United States Patent Application Publication US 2025/0333448 A1 - sequence listing, part 6

SEQ ID NO: 105844 - protein, 22 aa, Artificial Sequence
  Description of Artificial Sequence: Synthetic peptide
  Seed: MDPRMCSLMQGSTLPRRSGAAG
MDPRMISLMQASTMPRRSGAAG

SEQ ID NO: 105845 - protein, 22 aa, Artificial Sequence
  Description of Artificial Sequence: Synthetic peptide
  Seed: MDPRMCSLMQGSTLPRRSGAAG
MDPRMISLMQASTNPRRSGAAG

SEQ ID NO: 105846 - protein, 22 aa, Artificial Sequence
  Description of Artificial Sequence: Synthetic peptide
  Seed: MDPRMCSLMQGSTLPRRSGAAG
MDPRMISLMQASTSPRRSGAAG

SEQ ID NO: 105847 - protein, 22 aa, Artificial Sequence
  Description of Artificial Sequence: Synthetic peptide
  Seed: MDPRMCSLMQGSTLPRRSGAAG
MDPRMISLMQASTTPRRSGAAG

SEQ ID NO: 105848 - protein, 22 aa, Artificial Sequence
  Description of Artificial Sequence: Synthetic peptide
  Seed: MDPRMCSLMQGSTLPRRSGAAG
MDPRMISLMQASTVPRRSGAAG

SEQ ID NO: 105849 - protein, 22 aa, Artificial Sequence
  Description of Artificial Sequence: Synthetic peptide
  Seed: MDPRMCSLMQGSTLPRRSGAAG
MDPRMISLMQGSTAPRRSGAAG

SEQ ID NO: 105850 - protein, 22 aa, Artificial Sequence
  Description of Artificial Sequence: Synthetic peptide
  Seed: MDPRMCSLMQGSTLPRRSGAAG
MDPRMISLMQGSTIPRRSGAAG

SEQ ID NO: 105851 - protein, 22 aa, Artificial Sequence
  Description of Artificial Sequence: Synthetic peptide
  Seed: MDPRMCSLMQGSTLPRRSGAAG
MDPRMISLMQGSTLPRRSGAAG

SEQ ID NO: 105852 - protein, 22 aa, Artificial Sequence
  Description of Artificial Sequence: Synthetic peptide
  Seed: MDPRMCSLMQGSTLPRRSGAAG
MDPRMISLMQGSTMPRRSGAAG

SEQ ID NO: 105853 - protein, 22 aa, Artificial Sequence
  Description of Artificial Sequence: Synthetic peptide
  Seed: MDPRMCSLMQGSTLPRRSGAAG
MDPRMISLMQGSTSPRRSGAAG

SEQ ID NO: 105854 - protein, 22 aa, Artificial Sequence
  Description of Artificial Sequence: Synthetic peptide
  Seed: MDPRMCSLMQGSTLPRRSGAAG
MDPRMISLMQGSTTPRRSGAAG

SEQ ID NO: 105855 - protein, 22 aa, Artificial Sequence
  Description of Artificial Sequence: Synthetic peptide
  Seed: MDPRMCSLMQGSTLPRRSGAAG
MDPRMISLMQGSTVPRRSGAAG

SEQ ID NO: 105856 - protein, 22 aa, Artificial Sequence
  Description of Artificial Sequence: Synthetic peptide
  Seed: MDPRMCSLMQGSTLPRRSGAAG
MDPRMISLMQISTAPRRSGAAG

SEQ ID NO: 105857 - protein, 22 aa, Artificial Sequence
  Description of Artificial Sequence: Synthetic peptide
  Seed: MDPRMCSLMQGSTLPRRSGAAG
MDPRMISLMQISTSPRRSGAAG

SEQ ID NO: 105858 - protein, 22 aa, Artificial Sequence
  Description of Artificial Sequence: Synthetic peptide
  Seed: MDPRMCSLMQGSTLPRRSGAAG
MDPRMISLMQNSTIPRRSGAAG

SEQ ID NO: 105859 - protein, 22 aa, Artificial Sequence
  Description of Artificial Sequence: Synthetic peptide
  Seed: MDPRMCSLMQGSTLPRRSGAAG
MDPRMISLMQNSTLPRRSGAAG

SEQ ID NO: 105860 - protein, 22 aa, Artificial Sequence
  Description of Artificial Sequence: Synthetic peptide
  Seed: MDPRMCSLMQGSTLPRRSGAAG
MDPRMISLMQNSTVPRRSGAAG

SEQ ID NO: 105861 - protein, 22 aa, Artificial Sequence
  Description of Artificial Sequence: Synthetic peptide
  Seed: MDPRMCSLMQGSTLPRRSGAAG
MDPRMISLMQPSTAPRRSGAAG

SEQ ID NO: 105862 - protein, 22 aa, Artificial Sequence
  Description of Artificial Sequence: Synthetic peptide
  Seed: MDPRMCSLMQGSTLPRRSGAAG
MDPRMISLMQPSTIPRRSGAAG

SEQ ID NO: 105863 - protein, 22 aa, Artificial Sequence
  Description of Artificial Sequence: Synthetic peptide
  Seed: MDPRMCSLMQGSTLPRRSGAAG
MDPRMISLMQPSTLPRRSGAAG

SEQ ID NO: 105864 - protein, 22 aa, Artificial Sequence
  Description of Artificial Sequence: Synthetic peptide
  Seed: MDPRMCSLMQGSTLPRRSGAAG
MDPRMISLMQPSTMPRRSGAAG

SEQ ID NO: 105865 - protein, 22 aa, Artificial Sequence
  Description of Artificial Sequence: Synthetic peptide
  Seed: MDPRMCSLMQGSTLPRRSGAAG
MDPRMISLMQPSTNPRRSGAAG

SEQ ID NO: 105866 - protein, 22 aa, Artificial Sequence
  Description of Artificial Sequence: Synthetic peptide
  Seed: MDPRMCSLMQGSTLPRRSGAAG
MDPRMISLMQPSTSPRRSGAAG

SEQ ID NO: 105867 - protein, 22 aa, Artificial Sequence
  Description of Artificial Sequence: Synthetic peptide
  Seed: MDPRMCSLMQGSTLPRRSGAAG
MDPRMISLMQPSTVPRRSGAAG

SEQ ID NO: 105868 - protein, 22 aa, Artificial Sequence
  Description of Artificial Sequence: Synthetic peptide
  Seed: MDPRMCSLMQGSTLPRRSGAAG
MDPRMISLMQSSTAPRRSGAAG

SEQ ID NO: 105869 - protein, 22 aa, Artificial Sequence
  Description of Artificial Sequence: Synthetic peptide
  Seed: MDPRMCSLMQGSTLPRRSGAAG
MDPRMISLMQSSTIPRRSGAAG

SEQ ID NO: 105870 - protein, 22 aa, Artificial Sequence
  Description of Artificial Sequence: Synthetic peptide
  Seed: MDPRMCSLMQGSTLPRRSGAAG
MDPRMISLMQSSTLPRRSGAAG

SEQ ID NO: 105871 - protein, 22 aa, Artificial Sequence
  Description of Artificial Sequence: Synthetic peptide
  Seed: MDPRMCSLMQGSTLPRRSGAAG
MDPRMISLMQSSTMPRRSGAAG

SEQ ID NO: 105872 - protein, 22 aa, Artificial Sequence
  Description of Artificial Sequence: Synthetic peptide
  Seed: MDPRMCSLMQGSTLPRRSGAAG
MDPRMISLMQSSTSPRRSGAAG

SEQ ID NO: 105873 - protein, 22 aa, Artificial Sequence
  Description of Artificial Sequence: Synthetic peptide
  Seed: MDPRMCSLMQGSTLPRRSGAAG
MDPRMISLMQSSTTPRRSGAAG

SEQ ID NO: 105874 - protein, 22 aa, Artificial Sequence
  Description of Artificial Sequence: Synthetic peptide
  Seed: MDPRMCSLMQGSTLPRRSGAAG
MDPRMISLMQSSTVPRRSGAAG

SEQ ID NO: 105875 - protein, 22 aa, Artificial Sequence
  Description of Artificial Sequence: Synthetic peptide
  Seed: MDPRMCSLMQGSTLPRRSGAAG
MDPRMISLMQTSTAPRRSGAAG

SEQ ID NO: 105876 - protein, 22 aa, Artificial Sequence
  Description of Artificial Sequence: Synthetic peptide
  Seed: MDPRMCSLMQGSTLPRRSGAAG
MDPRMISLMQTSTIPRRSGAAG

SEQ ID NO: 105877 - protein, 22 aa, Artificial Sequence
  Description of Artificial Sequence: Synthetic peptide
  Seed: MDPRMCSLMQGSTLPRRSGAAG
MDPRMISLMQTSTLPRRSGAAG

SEQ ID NO: 105878 - protein, 22 aa, Artificial Sequence
  Description of Artificial Sequence: Synthetic peptide
  Seed: MDPRMCSLMQGSTLPRRSGAAG
MDPRMISLMQTSTNPRRSGAAG

SEQ ID NO: 105879 - protein, 22 aa, Artificial Sequence
  Description of Artificial Sequence: Synthetic peptide
  Seed: MDPRMCSLMQGSTLPRRSGAAG
MDPRMISLMQTSTSPRRSGAAG

SEQ ID NO: 105880 - protein, 22 aa, Artificial Sequence
  Description of Artificial Sequence: Synthetic peptide
  Seed: MDPRMCSLMQGSTLPRRSGAAG
MDPRMISLMQTSTVPRRSGAAG

SEQ ID NO: 105881 - protein, 22 aa, Artificial Sequence
  Description of Artificial Sequence: Synthetic peptide
  Seed: MDPRMCSLMQGSTLPRRSGAAG
MDPRMISLMQVSTAPRRSGAAG

SEQ ID NO: 105882 - protein, 22 aa, Artificial Sequence
  Description of Artificial Sequence: Synthetic peptide
  Seed: MDPRMCSLMQGSTLPRRSGAAG
MDPRMISLMQVSTNPRRSGAAG

SEQ ID NO: 105883 - protein, 22 aa, Artificial Sequence
  Description of Artificial Sequence: Synthetic peptide
  Seed: MDPRMCSLMQGSTLPRRSGAAG
MDPRMISLMQVSTSPRRSGAAG

SEQ ID NO: 105884 - protein, 22 aa, Artificial Sequence
  Description of Artificial Sequence: Synthetic peptide
  Seed: MDPRMCSLMQGSTLPRRSGAAG
MDPRMISLQQASTIPRRSGAAG

SEQ ID NO: 105885 - protein, 22 aa, Artificial Sequence
  Description of Artificial Sequence: Synthetic peptide
  Seed: MDPRMCSLMQGSTLPRRSGAAG
MDPRMISLQQASTLPRRSGAAG

SEQ ID NO: 105886 - protein, 22 aa, Artificial Sequence
  Description of Artificial Sequence: Synthetic peptide
  Seed: MDPRMCSLMQGSTLPRRSGAAG
MDPRMISLQQASTVPRRSGAAG

SEQ ID NO: 105887 - protein, 22 aa, Artificial Sequence
  Description of Artificial Sequence: Synthetic peptide
  Seed: MDPRMCSLMQGSTLPRRSGAAG
MDPRMISLVQASTLPRRSGAAG

SEQ ID NO: 105888 - protein, 22 aa, Artificial Sequence
  Description of Artificial Sequence: Synthetic peptide
  Seed: MDPRMCSLMQGSTLPRRSGAAG
MDPRMISLVQASTVPRRSGAAG

SEQ ID NO: 105889 - protein, 22 aa, Artificial Sequence
  Description of Artificial Sequence: Synthetic peptide
  Seed: MDPRMCSLMQGSTLPRRSGAAG
MDPRMLSLAQASTIPRRSGAAG

SEQ ID NO: 105890 - protein, 22 aa, Artificial Sequence
  Description of Artificial Sequence: Synthetic peptide
  Seed: MDPRMCSLMQGSTLPRRSGAAG
MDPRMLSLAQASTLPRRSGAAG

SEQ ID NO: 105891 - protein, 22 aa, Artificial Sequence
  Description of Artificial Sequence: Synthetic peptide
  Seed: MDPRMCSLMQGSTLPRRSGAAG
MDPRMLSLAQASTVPRRSGAAG

SEQ ID NO: 105892 - protein, 22 aa, Artificial Sequence
  Description of Artificial Sequence: Synthetic peptide
  Seed: MDPRMCSLMQGSTLPRRSGAAG
MDPRMLSLIQASTAPRRSGAAG

SEQ ID NO: 105893 - protein, 22 aa, Artificial Sequence
  Description of Artificial Sequence: Synthetic peptide
  Seed: MDPRMCSLMQGSTLPRRSGAAG
MDPRMLSLIQASTIPRRSGAAG

SEQ ID NO: 105894 - protein, 22 aa, Artificial Sequence
  Description of Artificial Sequence: Synthetic peptide
  Seed: MDPRMCSLMQGSTLPRRSGAAG
MDPRMLSLIQASTLPRRSGAAG

SEQ ID NO: 105895 - protein, 22 aa, Artificial Sequence
  Description of Artificial Sequence: Synthetic peptide
  Seed: MDPRMCSLMQGSTLPRRSGAAG
MDPRMLSLIQASTNPRRSGAAG

SEQ ID NO: 105896 - protein, 22 aa, Artificial Sequence
  Description of Artificial Sequence: Synthetic peptide
  Seed: MDPRMCSLMQGSTLPRRSGAAG
MDPRMLSLIQASTSPRRSGAAG

SEQ ID NO: 105897 - protein, 22 aa, Artificial Sequence
  Description of Artificial Sequence: Synthetic peptide
  Seed: MDPRMCSLMQGSTLPRRSGAAG
MDPRMLSLIQASTVPRRSGAAG

SEQ ID NO: 105898 - protein, 22 aa, Artificial Sequence
  Description of Artificial Sequence: Synthetic peptide
  Seed: MDPRMCSLMQGSTLPRRSGAAG
MDPRMLSLIQGSTLPRRSGAAG

SEQ ID NO: 105899 - protein, 22 aa, Artificial Sequence
  Description of Artificial Sequence: Synthetic peptide
  Seed: MDPRMCSLMQGSTLPRRSGAAG
MDPRMLSLIQGSTVPRRSGAAG

SEQ ID NO: 105900 - protein, 22 aa, Artificial Sequence
  Description of Artificial Sequence: Synthetic peptide
  Seed: MDPRMCSLMQGSTLPRRSGAAG
MDPRMLSLLQASTAPRRSGAAG

SEQ ID NO: 105901 - protein, 22 aa, Artificial Sequence
  Description of Artificial Sequence: Synthetic peptide
  Seed: MDPRMCSLMQGSTLPRRSGAAG
MDPRMLSLLQASTIPRRSGAAG

SEQ ID NO: 105902 - protein, 22 aa, Artificial Sequence
  Description of Artificial Sequence: Synthetic peptide
  Seed: MDPRMCSLMQGSTLPRRSGAAG
MDPRMLSLLQASTLPRRSGAAG

SEQ ID NO: 105903 - protein, 22 aa, Artificial Sequence
  Description of Artificial Sequence: Synthetic peptide
  Seed: MDPRMCSLMQGSTLPRRSGAAG
MDPRMLSLLQASTMPRRSGAAG

SEQ ID NO: 105904 - protein, 22 aa, Artificial Sequence
  Description of Artificial Sequence: Synthetic peptide
  Seed: MDPRMCSLMQGSTLPRRSGAAG
MDPRMLSLLQASTNPRRSGAAG

SEQ ID NO: 105905 - protein, 22 aa, Artificial Sequence
  Description of Artificial Sequence: Synthetic peptide
  Seed: MDPRMCSLMQGSTLPRRSGAAG
MDPRMLSLLQASTSPRRSGAAG

SEQ ID NO: 105906 - protein, 22 aa, Artificial Sequence
  Description of Artificial Sequence: Synthetic peptide
  Seed: MDPRMCSLMQGSTLPRRSGAAG
MDPRMLSLLQASTTPRRSGAAG

SEQ ID NO: 105907 - protein, 22 aa, Artificial Sequence
  Description of Artificial Sequence: Synthetic peptide
  Seed: MDPRMCSLMQGSTLPRRSGAAG
MDPRMLSLLQASTVPRRSGAAG

SEQ ID NO: 105908 - protein, 22 aa, Artificial Sequence
  Description of Artificial Sequence: Synthetic peptide
  Seed: MDPRMCSLMQGSTLPRRSGAAG
MDPRMLSLLQGSTAPRRSGAAG

SEQ ID NO: 105909 - protein, 22 aa, Artificial Sequence
  Description of Artificial Sequence: Synthetic peptide
  Seed: MDPRMCSLMQGSTLPRRSGAAG
MDPRMLSLLQGSTIPRRSGAAG

SEQ ID NO: 105910 - protein, 22 aa, Artificial Sequence
  Description of Artificial Sequence: Synthetic peptide
  Seed: MDPRMCSLMQGSTLPRRSGAAG
MDPRMLSLLQGSTLPRRSGAAG

SEQ ID NO: 105911 - protein, 22 aa, Artificial Sequence
  Description of Artificial Sequence: Synthetic peptide
  Seed: MDPRMCSLMQGSTLPRRSGAAG
MDPRMLSLLQGSTMPRRSGAAG

SEQ ID NO: 105912 - protein, 22 aa, Artificial Sequence
  Description of Artificial Sequence: Synthetic peptide
  Seed: MDPRMCSLMQGSTLPRRSGAAG
MDPRMLSLLQGSTSPRRSGAAG

SEQ ID NO: 105913 - protein, 22 aa, Artificial Sequence
  Description of Artificial Sequence: Synthetic peptide
  Seed: MDPRMCSLMQGSTLPRRSGAAG
MDPRMLSLLQGSTTPRRSGAAG

SEQ ID NO: 105914 - protein, 22 aa, Artificial Sequence
  Description of Artificial Sequence: Synthetic peptide
  Seed: MDPRMCSLMQGSTLPRRSGAAG
MDPRMLSLLQGSTVPRRSGAAG

SEQ ID NO: 105915 - protein, 22 aa, Artificial Sequence
  Description of Artificial Sequence: Synthetic peptide
  Seed: MDPRMCSLMQGSTLPRRSGAAG
MDPRMLSLLQPSTAPRRSGAAG

SEQ ID NO: 105916 - protein, 22 aa, Artificial Sequence
  Description of Artificial Sequence: Synthetic peptide
  Seed: MDPRMCSLMQGSTLPRRSGAAG
MDPRMLSLLQPSTIPRRSGAAG

SEQ ID NO: 105917 - protein, 22 aa, Artificial Sequence
  Description of Artificial Sequence: Synthetic peptide
  Seed: MDPRMCSLMQGSTLPRRSGAAG
MDPRMLSLLQPSTLPRRSGAAG

SEQ ID NO: 105918 - protein, 22 aa, Artificial Sequence
  Description of Artificial Sequence: Synthetic peptide
  Seed: MDPRMCSLMQGSTLPRRSGAAG
MDPRMLSLLQPSTNPRRSGAAG

SEQ ID NO: 105919 - protein, 22 aa, Artificial Sequence
  Description of Artificial Sequence: Synthetic peptide
  Seed: MDPRMCSLMQGSTLPRRSGAAG
MDPRMLSLLQPSTSPRRSGAAG

SEQ ID NO: 105920 - protein, 22 aa, Artificial Sequence
  Description of Artificial Sequence: Synthetic peptide
  Seed: MDPRMCSLMQGSTLPRRSGAAG
MDPRMLSLLQPSTVPRRSGAAG

SEQ ID NO: 105921 - protein, 22 aa, Artificial Sequence
  Description of Artificial Sequence: Synthetic peptide
  Seed: MDPRMCSLMQGSTLPRRSGAAG
MDPRMLSLLQSSTAPRRSGAAG

SEQ ID NO: 105922 - protein, 22 aa, Artificial Sequence
  Description of Artificial Sequence: Synthetic peptide
  Seed: MDPRMCSLMQGSTLPRRSGAAG
MDPRMLSLLQSSTIPRRSGAAG

SEQ ID NO: 105923 - protein, 22 aa, Artificial Sequence
  Description of Artificial Sequence: Synthetic peptide
  Seed: MDPRMCSLMQGSTLPRRSGAAG
MDPRMLSLLQSSTLPRRSGAAG

SEQ ID NO: 105924 - protein, 22 aa, Artificial Sequence
  Description of Artificial Sequence: Synthetic peptide
  Seed: MDPRMCSLMQGSTLPRRSGAAG
MDPRMLSLLQSSTVPRRSGAAG

SEQ ID NO: 105925 - protein, 22 aa, Artificial Sequence
  Description of Artificial Sequence: Synthetic peptide
  Seed: MDPRMCSLMQGSTLPRRSGAAG
MDPRMLSLLQTSTAPRRSGAAG

SEQ ID NO: 105926 - protein, 22 aa, Artificial Sequence
  Description of Artificial Sequence: Synthetic peptide
  Seed: MDPRMCSLMQGSTLPRRSGAAG
MDPRMLSLLQTSTNPRRSGAAG

SEQ ID NO: 105927 - protein, 22 aa, Artificial Sequence
  Description of Artificial Sequence: Synthetic peptide
  Seed: MDPRMCSLMQGSTLPRRSGAAG
MDPRMLSLLQTSTVPRRSGAAG

SEQ ID NO: 105928 - protein, 22 aa, Artificial Sequence
  Description of Artificial Sequence: Synthetic peptide
  Seed: MDPRMCSLMQGSTLPRRSGAAG
MDPRMLSLLQVSTAPRRSGAAG

SEQ ID NO: 105929 - protein, 22 aa, Artificial Sequence
  Description of Artificial Sequence: Synthetic peptide
  Seed: MDPRMCSLMQGSTLPRRSGAAG
MDPRMLSLLQVSTNPRRSGAAG

SEQ ID NO: 105930 - protein, 22 aa, Artificial Sequence
  Description of Artificial Sequence: Synthetic peptide
  Seed: MDPRMCSLMQGSTLPRRSGAAG
MDPRMLSLLQVSTSPRRSGAAG

SEQ ID NO: 105931 - protein, 22 aa, Artificial Sequence
  Description of Artificial Sequence: Synthetic peptide
  Seed: MDPRMCSLMQGSTLPRRSGAAG
MDPRMLSLMQASTAPRRSGAAG

SEQ ID NO: 105932 - protein, 22 aa, Artificial Sequence
  Description of Artificial Sequence: Synthetic peptide
  Seed: MDPRMCSLMQGSTLPRRSGAAG
MDPRMLSLMQASTIPRRSGAAG

SEQ ID NO: 105933 - protein, 22 aa, Artificial Sequence
  Description of Artificial Sequence: Synthetic peptide
  Seed: MDPRMCSLMQGSTLPRRSGAAG
MDPRMLSLMQASTLPRRSGAAG

SEQ ID NO: 105934 - protein, 22 aa, Artificial Sequence
  Description of Artificial Sequence: Synthetic peptide
  Seed: MDPRMCSLMQGSTLPRRSGAAG
MDPRMLSLMQASTMPRRSGAAG

SEQ ID NO: 105935 - protein, 22 aa, Artificial Sequence
  Description of Artificial Sequence: Synthetic peptide
  Seed: MDPRMCSLMQGSTLPRRSGAAG
MDPRMLSLMQASTNPRRSGAAG

SEQ ID NO: 105936 - protein, 22 aa, Artificial Sequence
  Description of Artificial Sequence: Synthetic peptide
  Seed: MDPRMCSLMQGSTLPRRSGAAG
MDPRMLSLMQASTSPRRSGAAG

SEQ ID NO: 105937 - protein, 22 aa, Artificial Sequence
  Description of Artificial Sequence: Synthetic peptide
  Seed: MDPRMCSLMQGSTLPRRSGAAG
MDPRMLSLMQASTTPRRSGAAG

SEQ ID NO: 105938 - protein, 22 aa, Artificial Sequence
  Description of Artificial Sequence: Synthetic peptide
  Seed: MDPRMCSLMQGSTLPRRSGAAG
MDPRMLSLMQASTVPRRSGAAG

SEQ ID NO: 105939 - protein, 22 aa, Artificial Sequence
  Description of Artificial Sequence: Synthetic peptide
  Seed: MDPRMCSLMQGSTLPRRSGAAG
MDPRMLSLMQGSTAPRRSGAAG

SEQ ID NO: 105940 - protein, 22 aa, Artificial Sequence
  Description of Artificial Sequence: Synthetic peptide
  Seed: MDPRMCSLMQGSTLPRRSGAAG
MDPRMLSLMQGSTIPRRSGAAG

SEQ ID NO: 105941 - protein, 22 aa, Artificial Sequence
  Description of Artificial Sequence: Synthetic peptide
  Seed: MDPRMCSLMQGSTLPRRSGAAG
MDPRMLSLMQGSTLPRRSGAAG

SEQ ID NO: 105942 - protein, 22 aa, Artificial Sequence
  Description of Artificial Sequence: Synthetic peptide
  Seed: MDPRMCSLMQGSTLPRRSGAAG
MDPRMLSLMQGSTMPRRSGAAG

SEQ ID NO: 105943 - protein, 22 aa, Artificial Sequence
  Description of Artificial Sequence: Synthetic peptide
  Seed: MDPRMCSLMQGSTLPRRSGAAG
MDPRMLSLMQGSTSPRRSGAAG

SEQ ID NO: 105944 - protein, 22 aa, Artificial Sequence
  Description of Artificial Sequence: Synthetic peptide
  Seed: MDPRMCSLMQGSTLPRRSGAAG
MDPRMLSLMQGSTTPRRSGAAG

SEQ ID NO: 105945 - protein, 22 aa, Artificial Sequence
  Description of Artificial Sequence: Synthetic peptide
  Seed: MDPRMCSLMQGSTLPRRSGAAG
MDPRMLSLMQGSTVPRRSGAAG

SEQ ID NO: 105946 - protein, 22 aa, Artificial Sequence
  Description of Artificial Sequence: Synthetic peptide
  Seed: MDPRMCSLMQGSTLPRRSGAAG
MDPRMLSLMQISTAPRRSGAAG

SEQ ID NO: 105947 - protein, 22 aa, Artificial Sequence
  Description of Artificial Sequence: Synthetic peptide
  Seed: MDPRMCSLMQGSTLPRRSGAAG
MDPRMLSLMQPSTAPRRSGAAG

SEQ ID NO: 105948 - protein, 22 aa, Artificial Sequence
  Description of Artificial Sequence: Synthetic peptide
  Seed: MDPRMCSLMQGSTLPRRSGAAG
MDPRMLSLMQPSTIPRRSGAAG

SEQ ID NO: 105949 - protein, 22 aa, Artificial Sequence
  Description of Artificial Sequence: Synthetic peptide
  Seed: MDPRMCSLMQGSTLPRRSGAAG
MDPRMLSLMQPSTLPRRSGAAG

SEQ ID NO: 105950 - protein, 22 aa, Artificial Sequence
  Description of Artificial Sequence: Synthetic peptide
  Seed: MDPRMCSLMQGSTLPRRSGAAG
MDPRMLSLMQPSTNPRRSGAAG

SEQ ID NO: 105951 - protein, 22 aa, Artificial Sequence
  Description of Artificial Sequence: Synthetic peptide
  Seed: MDPRMCSLMQGSTLPRRSGAAG
MDPRMLSLMQPSTSPRRSGAAG

SEQ ID NO: 105952 - protein, 22 aa, Artificial Sequence
  Description of Artificial Sequence: Synthetic peptide
  Seed: MDPRMCSLMQGSTLPRRSGAAG
MDPRMLSLMQPSTVPRRSGAAG

SEQ ID NO: 105953 - protein, 22 aa, Artificial Sequence
  Description of Artificial Sequence: Synthetic peptide
  Seed: MDPRMCSLMQGSTLPRRSGAAG
MDPRMLSLMQSSTAPRRSGAAG

SEQ ID NO: 105954 - protein, 22 aa, Artificial Sequence
  Description of Artificial Sequence: Synthetic peptide
  Seed: MDPRMCSLMQGSTLPRRSGAAG
MDPRMLSLMQSSTIPRRSGAAG

SEQ ID NO: 105955 - protein, 22 aa, Artificial Sequence
  Description of Artificial Sequence: Synthetic peptide
  Seed: MDPRMCSLMQGSTLPRRSGAAG
MDPRMLSLMQSSTLPRRSGAAG

SEQ ID NO: 105956 - protein, 22 aa, Artificial Sequence
  Description of Artificial Sequence: Synthetic peptide
  Seed: MDPRMCSLMQGSTLPRRSGAAG
MDPRMLSLMQSSTSPRRSGAAG

SEQ ID NO: 105957 - protein, 22 aa, Artificial Sequence
  Description of Artificial Sequence: Synthetic peptide
  Seed: MDPRMCSLMQGSTLPRRSGAAG
MDPRMLSLMQSSTVPRRSGAAG

SEQ ID NO: 105958 - protein, 22 aa, Artificial Sequence
  Description of Artificial Sequence: Synthetic peptide
  Seed: MDPRMCSLMQGSTLPRRSGAAG
MDPRMLSLMQTSTAPRRSGAAG

SEQ ID NO: 105959 - protein, 22 aa, Artificial Sequence
  Description of Artificial Sequence: Synthetic peptide
  Seed: MDPRMCSLMQGSTLPRRSGAAG
MDPRMLSLMQTSTVPRRSGAAG

SEQ ID NO: 105960 - protein, 22 aa, Artificial Sequence
  Description of Artificial Sequence: Synthetic peptide
  Seed: MDPRMCSLMQGSTLPRRSGAAG
MDPRMLSLMQVSTAPRRSGAAG

SEQ ID NO: 105961 - protein, 22 aa, Artificial Sequence
  Description of Artificial Sequence: Synthetic peptide
  Seed: MDPRMCSLMQGSTLPRRSGAAG
MDPRMLSLMQVSTNPRRSGAAG

SEQ ID NO: 105962 - protein, 22 aa, Artificial Sequence
  Description of Artificial Sequence: Synthetic peptide
  Seed: MDPRMCSLMQGSTLPRRSGAAG
MDPRMLSLMQVSTSPRRSGAAG

SEQ ID NO: 105963 - protein, 22 aa, Artificial Sequence
  Description of Artificial Sequence: Synthetic peptide
  Seed: MDPRMCSLMQGSTLPRRSGAAG
MDPRMLSLQQASTLPRRSGAAG

SEQ ID NO: 105964 - protein, 22 aa, Artificial Sequence
  Description of Artificial Sequence: Synthetic peptide
  Seed: MDPRMCSLMQGSTLPRRSGAAG
MDPRMLSLQQASTVPRRSGAAG

SEQ ID NO: 105965 - protein, 22 aa, Artificial Sequence
  Description of Artificial Sequence: Synthetic peptide
  Seed: MDPRMCSLMQGSTLPRRSGAAG
MDPRMMSLLQASTAPRRSGAAG

SEQ ID NO: 105966 - protein, 22 aa, Artificial Sequence
  Description of Artificial Sequence: Synthetic peptide
  Seed: MDPRMCSLMQGSTLPRRSGAAG
MDPRMMSLLQASTIPRRSGAAG

SEQ ID NO: 105967 - protein, 22 aa, Artificial Sequence
  Description of Artificial Sequence: Synthetic peptide
  Seed: MDPRMCSLMQGSTLPRRSGAAG
MDPRMMSLLQASTLPRRSGAAG

SEQ ID NO: 105968 - protein, 22 aa, Artificial Sequence
  Description of Artificial Sequence: Synthetic peptide
  Seed: MDPRMCSLMQGSTLPRRSGAAG
MDPRMMSLLQASTMPRRSGAAG

SEQ ID NO: 105969 - protein, 22 aa, Artificial Sequence
  Description of Artificial Sequence: Synthetic peptide
  Seed: MDPRMCSLMQGSTLPRRSGAAG
MDPRMMSLLQASTNPRRSGAAG

SEQ ID NO: 105970 - protein, 22 aa, Artificial Sequence
  Description of Artificial Sequence: Synthetic peptide
  Seed: MDPRMCSLMQGSTLPRRSGAAG
MDPRMMSLLQASTSPRRSGAAG

SEQ ID NO: 105971 - protein, 22 aa, Artificial Sequence
  Description of Artificial Sequence: Synthetic peptide
  Seed: MDPRMCSLMQGSTLPRRSGAAG
MDPRMMSLLQASTTPRRSGAAG

SEQ ID NO: 105972 - protein, 22 aa, Artificial Sequence
  Description of Artificial Sequence: Synthetic peptide
  Seed: MDPRMCSLMQGSTLPRRSGAAG
MDPRMMSLLQASTVPRRSGAAG

SEQ ID NO: 105973 - protein, 22 aa, Artificial Sequence
  Description of Artificial Sequence: Synthetic peptide
  Seed: MDPRMCSLMQGSTLPRRSGAAG
MDPRMMSLLQGSTAPRRSGAAG

SEQ ID NO: 105974 - protein, 22 aa, Artificial Sequence
  Description of Artificial Sequence: Synthetic peptide
  Seed: MDPRMCSLMQGSTLPRRSGAAG
MDPRMMSLLQGSTIPRRSGAAG

SEQ ID NO: 105975 - protein, 22 aa, Artificial Sequence
  Description of Artificial Sequence: Synthetic peptide
  Seed: MDPRMCSLMQGSTLPRRSGAAG
MDPRMMSLLQGSTLPRRSGAAG

SEQ ID NO: 105976 - protein, 22 aa, Artificial Sequence
  Description of Artificial Sequence: Synthetic peptide
  Seed: MDPRMCSLMQGSTLPRRSGAAG
MDPRMMSLLQGSTVPRRSGAAG

SEQ ID NO: 105977 - protein, 22 aa, Artificial Sequence
  Description of Artificial Sequence: Synthetic peptide
  Seed: MDPRMCSLMQGSTLPRRSGAAG
MDPRMMSLLQPSTAPRRSGAAG

SEQ ID NO: 105978 - protein, 22 aa, Artificial Sequence
  Description of Artificial Sequence: Synthetic peptide
  Seed: MDPRMCSLMQGSTLPRRSGAAG
MDPRMMSLLQPSTVPRRSGAAG

SEQ ID NO: 105979 - protein, 22 aa, Artificial Sequence
  Description of Artificial Sequence: Synthetic peptide
  Seed: MDPRMCSLMQGSTLPRRSGAAG
MDPRMMSLLQSSTAPRRSGAAG

SEQ ID NO: 105980 - protein, 22 aa, Artificial Sequence
  Description of Artificial Sequence: Synthetic peptide
  Seed: MDPRMCSLMQGSTLPRRSGAAG
MDPRMMSLLQSSTIPRRSGAAG

SEQ ID NO: 105981 - protein, 22 aa, Artificial Sequence
  Description of Artificial Sequence: Synthetic peptide
  Seed: MDPRMCSLMQGSTLPRRSGAAG
MDPRMMSLLQSSTLPRRSGAAG

SEQ ID NO: 105982 - protein, 22 aa, Artificial Sequence
  Description of Artificial Sequence: Synthetic peptide
  Seed: MDPRMCSLMQGSTLPRRSGAAG
MDPRMMSLLQSSTVPRRSGAAG

SEQ ID NO: 105983 - protein, 22 aa, Artificial Sequence
  Description of Artificial Sequence: Synthetic peptide
  Seed: MDPRMCSLMQGSTLPRRSGAAG
MDPRMMSLMQASTAPRRSGAAG

SEQ ID NO: 105984 - protein, 22 aa, Artificial Sequence
  Description of Artificial Sequence: Synthetic peptide
  Seed: MDPRMCSLMQGSTLPRRSGAAG
MDPRMMSLMQASTIPRRSGAAG

SEQ ID NO: 105985 - protein, 22 aa, Artificial Sequence
  Description of Artificial Sequence: Synthetic peptide
  Seed: MDPRMCSLMQGSTLPRRSGAAG
MDPRMMSLMQASTLPRRSGAAG

SEQ ID NO: 105986 - protein, 22 aa, Artificial Sequence
  Description of Artificial Sequence: Synthetic peptide
  Seed: MDPRMCSLMQGSTLPRRSGAAG
MDPRMMSLMQASTMPRRSGAAG

SEQ ID NO: 105987 - protein, 22 aa, Artificial Sequence
  Description of Artificial Sequence: Synthetic peptide
  Seed: MDPRMCSLMQGSTLPRRSGAAG
MDPRMMSLMQASTNPRRSGAAG

SEQ ID NO: 105988 - protein, 22 aa, Artificial Sequence
  Description of Artificial Sequence: Synthetic peptide
  Seed: MDPRMCSLMQGSTLPRRSGAAG
MDPRMMSLMQASTSPRRSGAAG

SEQ ID NO: 105989 - protein, 22 aa, Artificial Sequence
  Description of Artificial Sequence: Synthetic peptide
  Seed: MDPRMCSLMQGSTLPRRSGAAG
MDPRMMSLMQASTVPRRSGAAG

SEQ ID NO: 105990 - protein, 22 aa, Artificial Sequence
  Description of Artificial Sequence: Synthetic peptide
  Seed: MDPRMCSLMQGSTLPRRSGAAG
MDPRMMSLMQGSTAPRRSGAAG

SEQ ID NO: 105991 - protein, 22 aa, Artificial Sequence
  Description of Artificial Sequence: Synthetic peptide
  Seed: MDPRMCSLMQGSTLPRRSGAAG
MDPRMMSLMQGSTIPRRSGAAG

SEQ ID NO: 105992 - protein, 22 aa, Artificial Sequence
  Description of Artificial Sequence: Synthetic peptide
  Seed: MDPRMCSLMQGSTLPRRSGAAG
MDPRMMSLMQGSTLPRRSGAAG

SEQ ID NO: 105993 - protein, 22 aa, Artificial Sequence
  Description of Artificial Sequence: Synthetic peptide
  Seed: MDPRMCSLMQGSTLPRRSGAAG
MDPRMMSLMQGSTVPRRSGAAG

SEQ ID NO: 105994 - protein, 22 aa, Artificial Sequence
  Description of Artificial Sequence: Synthetic peptide
  Seed: MDPRMCSLMQGSTLPRRSGAAG
MDPRMMSLMQPSTAPRRSGAAG

SEQ ID NO: 105995 - protein, 22 aa, Artificial Sequence
  Description of Artificial Sequence: Synthetic peptide
  Seed: MDPRMCSLMQGSTLPRRSGAAG
MDPRMMSLMQPSTVPRRSGAAG

SEQ ID NO: 105996 - protein, 22 aa, Artificial Sequence
  Description of Artificial Sequence: Synthetic peptide
  Seed: MDPRMCSLMQGSTLPRRSGAAG
MDPRMMSLMQSSTIPRRSGAAG

SEQ ID NO: 105997 - protein, 22 aa, Artificial Sequence
  Description of Artificial Sequence: Synthetic peptide
  Seed: MDPRMCSLMQGSTLPRRSGAAG
MDPRMMSLMQSSTLPRRSGAAG

SEQ ID NO: 105998 - protein, 22 aa, Artificial Sequence
  Description of Artificial Sequence: Synthetic peptide
  Seed: MDPRMCSLMQGSTLPRRSGAAG
MDPRMMSLMQSSTVPRRSGAAG

SEQ ID NO: 105999 - protein, 22 aa, Artificial Sequence
  Description of Artificial Sequence: Synthetic peptide
  Seed: MDPRMCSLMQGSTLPRRSGAAG
MDPRMMSLMQVSTAPRRSGAAG

SEQ ID NO: 106000 - protein, 22 aa, Artificial Sequence
  Description of Artificial Sequence: Synthetic peptide
  Seed: MDPRMCSLMQGSTLPRRSGAAG
MDPRMVSLLQASTAPRRSGAAG

SEQ ID NO: 106001 - protein, 22 aa, Artificial Sequence
  Description of Artificial Sequence: Synthetic peptide
  Seed: MDPRMCSLMQGSTLPRRSGAAG
MDPRMVSLLQASTIPRRSGAAG

SEQ ID NO: 106002 - protein, 22 aa, Artificial Sequence
  Description of Artificial Sequence: Synthetic peptide
  Seed: MDPRMCSLMQGSTLPRRSGAAG
MDPRMVSLLQASTLPRRSGAAG

SEQ ID NO: 106003 - protein, 22 aa, Artificial Sequence
  Description of Artificial Sequence: Synthetic peptide
  Seed: MDPRMCSLMQGSTLPRRSGAAG
MDPRMVSLLQASTMPRRSGAAG

SEQ ID NO: 106004 - protein, 22 aa, Artificial Sequence
  Description of Artificial Sequence: Synthetic peptide
  Seed: MDPRMCSLMQGSTLPRRSGAAG
MDPRMVSLLQASTVPRRSGAAG

SEQ ID NO: 106005 - protein, 22 aa, Artificial Sequence
  Description of Artificial Sequence: Synthetic peptide
  Seed: MDPRMCSLMQGSTLPRRSGAAG
MDPRMVSLLQGSTAPRRSGAAG

SEQ ID NO: 106006 - protein, 22 aa, Artificial Sequence
  Description of Artificial Sequence: Synthetic peptide
  Seed: MDPRMCSLMQGSTLPRRSGAAG
MDPRMVSLLQGSTIPRRSGAAG

SEQ ID NO: 106007 - protein, 22 aa, Artificial Sequence
  Description of Artificial Sequence: Synthetic peptide
  Seed: MDPRMCSLMQGSTLPRRSGAAG
MDPRMVSLLQGSTLPRRSGAAG

SEQ ID NO: 106008 - protein, 22 aa, Artificial Sequence
  Description of Artificial Sequence: Synthetic peptide
  Seed: MDPRMCSLMQGSTLPRRSGAAG
MDPRMVSLLQGSTVPRRSGAAG

SEQ ID NO: 106009 - protein, 22 aa, Artificial Sequence
  Description of Artificial Sequence: Synthetic peptide
  Seed: MDPRMCSLMQGSTLPRRSGAAG
MDPRMVSLLQPSTIPRRSGAAG

SEQ ID NO: 106010 - protein, 22 aa, Artificial Sequence
  Description of Artificial Sequence: Synthetic peptide
  Seed: MDPRMCSLMQGSTLPRRSGAAG
MDPRMVSLLQPSTLPRRSGAAG

SEQ ID NO: 106011 - protein, 22 aa, Artificial Sequence
  Description of Artificial Sequence: Synthetic peptide
  Seed: MDPRMCSLMQGSTLPRRSGAAG
MDPRMVSLLQPSTVPRRSGAAG

SEQ ID NO: 106012 - protein, 22 aa, Artificial Sequence
  Description of Artificial Sequence: Synthetic peptide
  Seed: MDPRMCSLMQGSTLPRRSGAAG
MDPRMVSLLQSSTAPRRSGAAG

SEQ ID NO: 106013 - protein, 22 aa, Artificial Sequence
  Description of Artificial Sequence: Synthetic peptide
  Seed: MDPRMCSLMQGSTLPRRSGAAG
MDPRMVSLLQSSTIPRRSGAAG

SEQ ID NO: 106014 - protein, 22 aa, Artificial Sequence
  Description of Artificial Sequence: Synthetic peptide
  Seed: MDPRMCSLMQGSTLPRRSGAAG
MDPRMVSLLQSSTLPRRSGAAG

SEQ ID NO: 106015 - protein, 22 aa, Artificial Sequence
  Description of Artificial Sequence: Synthetic peptide
  Seed: MDPRMCSLMQGSTLPRRSGAAG
MDPRMVSLLQSSTVPRRSGAAG

SEQ ID NO: 106016 - protein, 22 aa, Artificial Sequence
  Description of Artificial Sequence: Synthetic peptide
  Seed: MDPRMCSLMQGSTLPRRSGAAG
MDPRMVSLMQASTAPRRSGAAG

SEQ ID NO: 106017 - protein, 22 aa, Artificial Sequence
  Description of Artificial Sequence: Synthetic peptide
  Seed: MDPRMCSLMQGSTLPRRSGAAG
MDPRMVSLMQASTIPRRSGAAG

SEQ ID NO: 106018 - protein, 22 aa, Artificial Sequence
  Description of Artificial Sequence: Synthetic peptide
  Seed: MDPRMCSLMQGSTLPRRSGAAG
MDPRMVSLMQASTLPRRSGAAG

SEQ ID NO: 106019 - protein, 22 aa, Artificial Sequence
  Description of Artificial Sequence: Synthetic peptide
  Seed: MDPRMCSLMQGSTLPRRSGAAG
MDPRMVSLMQASTMPRRSGAAG

SEQ ID NO: 106020 - protein, 22 aa, Artificial Sequence
  Description of Artificial Sequence: Synthetic peptide
  Seed: MDPRMCSLMQGSTLPRRSGAAG
MDPRMVSLMQASTVPRRSGAAG

SEQ ID NO: 106021 - protein, 22 aa, Artificial Sequence
  Description of Artificial Sequence: Synthetic peptide
  Seed: MDPRMCSLMQGSTLPRRSGAAG
MDPRMVSLMQGSTAPRRSGAAG

SEQ ID NO: 106022 - protein, 22 aa, Artificial Sequence
  Description of Artificial Sequence: Synthetic peptide
  Seed: MDPRMCSLMQGSTLPRRSGAAG
MDPRMVSLMQGSTIPRRSGAAG

SEQ ID NO: 106023 - protein, 22 aa, Artificial Sequence
  Description of Artificial Sequence: Synthetic peptide
  Seed: MDPRMCSLMQGSTLPRRSGAAG
MDPRMVSLMQGSTLPRRSGAAG

SEQ ID NO: 106024 - protein, 22 aa, Artificial Sequence
  Description of Artificial Sequence: Synthetic peptide
  Seed: MDPRMCSLMQGSTLPRRSGAAG
MDPRMVSLMQGSTVPRRSGAAG

SEQ ID NO: 106025 - protein, 22 aa, Artificial Sequence
  Description of Artificial Sequence: Synthetic peptide
  Seed: MDPRMCSLMQGSTLPRRSGAAG
MDPRMVSLMQPSTVPRRSGAAG

SEQ ID NO: 106026 - protein, 22 aa, Artificial Sequence
  Description of Artificial Sequence: Synthetic peptide
  Seed: MDPRMCSLMQGSTLPRRSGAAG
MDPRMVSLMQSSTIPRRSGAAG

SEQ ID NO: 106027 - protein, 22 aa, Artificial Sequence
  Description of Artificial Sequence: Synthetic peptide
  Seed: MDPRMCSLMQGSTLPRRSGAAG
MDPRMVSLMQSSTLPRRSGAAG

SEQ ID NO: 106028 - protein, 22 aa, Artificial Sequence
  Description of Artificial Sequence: Synthetic peptide
  Seed: MDPRMCSLMQGSTLPRRSGAAG
MDPRMVSLMQSSTVPRRSGAAG

SEQ ID NO: 106029 - protein, 22 aa, Artificial Sequence
  Description of Artificial Sequence: Synthetic peptide
  Seed: MDPRMCSLMQGSTLPRRSGAAG
MDPRMWSLAQASTAPRRSGAAG

SEQ ID NO: 106030 - protein, 22 aa, Artificial Sequence
  Description of Artificial Sequence: Synthetic peptide
  Seed: MDPRMCSLMQGSTLPRRSGAAG
MDPRMWSLAQASTIPRRSGAAG

SEQ ID NO: 106031 - protein, 22 aa, Artificial Sequence
  Description of Artificial Sequence: Synthetic peptide
  Seed: MDPRMCSLMQGSTLPRRSGAAG
MDPRMWSLAQASTLPRRSGAAG

SEQ ID NO: 106032 - protein, 22 aa, Artificial Sequence
  Description of Artificial Sequence: Synthetic peptide
  Seed: MDPRMCSLMQGSTLPRRSGAAG
MDPRMWSLAQASTMPRRSGAAG

SEQ ID NO: 106033 - protein, 22 aa, Artificial Sequence
  Description of Artificial Sequence: Synthetic peptide
  Seed: MDPRMCSLMQGSTLPRRSGAAG
MDPRMWSLAQASTSPRRSGAAG

SEQ ID NO: 106034 - protein, 22 aa, Artificial Sequence
  Description of Artificial Sequence: Synthetic peptide
  Seed: MDPRMCSLMQGSTLPRRSGAAG
MDPRMWSLAQASTVPRRSGAAG

SEQ ID NO: 106035 - protein, 22 aa, Artificial Sequence
  Description of Artificial Sequence: Synthetic peptide
  Seed: MDPRMCSLMQGSTLPRRSGAAG
MDPRMWSLAQGSTIPRRSGAAG

SEQ ID NO: 106036 - protein, 22 aa, Artificial Sequence
  Description of Artificial Sequence: Synthetic peptide
  Seed: MDPRMCSLMQGSTLPRRSGAAG
MDPRMWSLAQGSTLPRRSGAAG

SEQ ID NO: 106037 - protein, 22 aa, Artificial Sequence
  Description of Artificial Sequence: Synthetic peptide
  Seed: MDPRMCSLMQGSTLPRRSGAAG
MDPRMWSLAQGSTVPRRSGAAG

SEQ ID NO: 106038 - protein, 22 aa, Artificial Sequence
  Description of Artificial Sequence: Synthetic peptide
  Seed: MDPRMCSLMQGSTLPRRSGAAG
MDPRMWSLAQSSTIPRRSGAAG

SEQ ID NO: 106039 - protein, 22 aa, Artificial Sequence
  Description of Artificial Sequence: Synthetic peptide
  Seed: MDPRMCSLMQGSTLPRRSGAAG
MDPRMWSLAQSSTLPRRSGAAG

SEQ ID NO: 106040 - protein, 22 aa, Artificial Sequence
  Description of Artificial Sequence: Synthetic peptide
  Seed: MDPRMCSLMQGSTLPRRSGAAG
MDPRMWSLAQSSTVPRRSGAAG

SEQ ID NO: 106041 - protein, 22 aa, Artificial Sequence
  Description of Artificial Sequence: Synthetic peptide
  Seed: MDPRMCSLMQGSTLPRRSGAAG
MDPRMWSLIQASTAPRRSGAAG

SEQ ID NO: 106042 - protein, 22 aa, Artificial Sequence
  Description of Artificial Sequence: Synthetic peptide
  Seed: MDPRMCSLMQGSTLPRRSGAAG
MDPRMWSLIQASTIPRRSGAAG

SEQ ID NO: 106043 - protein, 22 aa, Artificial Sequence
  Description of Artificial Sequence: Synthetic peptide
  Seed: MDPRMCSLMQGSTLPRRSGAAG
MDPRMWSLIQASTLPRRSGAAG

SEQ ID NO: 106044 - protein, 22 aa, Artificial Sequence
  Description of Artificial Sequence: Synthetic peptide
  Seed: MDPRMCSLMQGSTLPRRSGAAG
MDPRMWSLIQASTMPRRSGAAG

SEQ ID NO: 106045 - protein, 22 aa, Artificial Sequence
  Description of Artificial Sequence: Synthetic peptide
  Seed: MDPRMCSLMQGSTLPRRSGAAG
MDPRMWSLIQASTNPRRSGAAG

SEQ ID NO: 106046 - protein, 22 aa, Artificial Sequence
  Description of Artificial Sequence: Synthetic peptide
  Seed: MDPRMCSLMQGSTLPRRSGAAG
MDPRMWSLIQASTSPRRSGAAG

SEQ ID NO: 106047 - protein, 22 aa, Artificial Sequence
  Description of Artificial Sequence: Synthetic peptide
  Seed: MDPRMCSLMQGSTLPRRSGAAG
MDPRMWSLIQASTTPRRSGAAG

SEQ ID NO: 106048 - protein, 22 aa, Artificial Sequence
  Description of Artificial Sequence: Synthetic peptide
  Seed: MDPRMCSLMQGSTLPRRSGAAG
MDPRMWSLIQASTVPRRSGAAG

SEQ ID NO: 106049 - protein, 22 aa, Artificial Sequence
  Description of Artificial Sequence: Synthetic peptide
  Seed: MDPRMCSLMQGSTLPRRSGAAG
MDPRMWSLIQGSTAPRRSGAAG

SEQ ID NO: 106050 - protein, 22 aa, Artificial Sequence
  Description of Artificial Sequence: Synthetic peptide
  Seed: MDPRMCSLMQGSTLPRRSGAAG
MDPRMWSLIQGSTIPRRSGAAG

SEQ ID NO: 106051 - protein, 22 aa, Artificial Sequence
  Description of Artificial Sequence: Synthetic peptide
  Seed: MDPRMCSLMQGSTLPRRSGAAG
MDPRMWSLIQGSTLPRRSGAAG

SEQ ID NO: 106052 - protein, 22 aa, Artificial Sequence
  Description of Artificial Sequence: Synthetic peptide
  Seed: MDPRMCSLMQGSTLPRRSGAAG
MDPRMWSLIQGSTVPRRSGAAG

SEQ ID NO: 106053 - protein, 22 aa, Artificial Sequence
  Description of Artificial Sequence: Synthetic peptide
  Seed: MDPRMCSLMQGSTLPRRSGAAG
MDPRMWSLIQPSTAPRRSGAAG

SEQ ID NO: 106054 - protein, 22 aa, Artificial Sequence
  Description of Artificial Sequence: Synthetic peptide
  Seed: MDPRMCSLMQGSTLPRRSGAAG
MDPRMWSLIQPSTIPRRSGAAG

SEQ ID NO: 106055 - protein, 22 aa, Artificial Sequence
  Description of Artificial Sequence: Synthetic peptide
  Seed: MDPRMCSLMQGSTLPRRSGAAG
MDPRMWSLIQPSTLPRRSGAAG

SEQ ID NO: 106056 - protein, 22 aa, Artificial Sequence
  Description of Artificial Sequence: Synthetic peptide
  Seed: MDPRMCSLMQGSTLPRRSGAAG
MDPRMWSLIQPSTNPRRSGAAG

SEQ ID NO: 106057 - protein, 22 aa, Artificial Sequence
  Description of Artificial Sequence: Synthetic peptide
  Seed: MDPRMCSLMQGSTLPRRSGAAG
MDPRMWSLIQPSTSPRRSGAAG

SEQ ID NO: 106058 - protein, 22 aa, Artificial Sequence
  Description of Artificial Sequence: Synthetic peptide
  Seed: MDPRMCSLMQGSTLPRRSGAAG
MDPRMWSLIQPSTVPRRSGAAG

SEQ ID NO: 106059 - protein, 22 aa, Artificial Sequence
  Description of Artificial Sequence: Synthetic peptide
  Seed: MDPRMCSLMQGSTLPRRSGAAG
MDPRMWSLIQSSTAPRRSGAAG

SEQ ID NO: 106060 - protein, 22 aa, Artificial Sequence
  Description of Artificial Sequence: Synthetic peptide
  Seed: MDPRMCSLMQGSTLPRRSGAAG
MDPRMWSLIQSSTIPRRSGAAG

SEQ ID NO: 106061 - protein, 22 aa, Artificial Sequence
  Description of Artificial Sequence: Synthetic peptide
  Seed: MDPRMCSLMQGSTLPRRSGAAG
MDPRMWSLIQSSTLPRRSGAAG

SEQ ID NO: 106062 - protein, 22 aa, Artificial Sequence
  Description of Artificial Sequence: Synthetic peptide
  Seed: MDPRMCSLMQGSTLPRRSGAAG
MDPRMWSLIQSSTNPRRSGAAG

SEQ ID NO: 106063 - protein, 22 aa, Artificial Sequence
  Description of Artificial Sequence: Synthetic peptide
  Seed: MDPRMCSLMQGSTLPRRSGAAG
MDPRMWSLIQSSTSPRRSGAAG

SEQ ID NO: 106064 - protein, 22 aa, Artificial Sequence
  Description of Artificial Sequence: Synthetic peptide
  Seed: MDPRMCSLMQGSTLPRRSGAAG
MDPRMWSLIQSSTVPRRSGAAG

SEQ ID NO: 106065 - protein, 22 aa, Artificial Sequence
  Description of Artificial Sequence: Synthetic peptide
  Seed: MDPRMCSLMQGSTLPRRSGAAG
MDPRMWSLIQTSTAPRRSGAAG

SEQ ID NO: 106066 - protein, 22 aa, Artificial Sequence
  Description of Artificial Sequence: Synthetic peptide
  Seed: MDPRMCSLMQGSTLPRRSGAAG
MDPRMWSLIQTSTNPRRSGAAG

SEQ ID NO: 106067 - protein, 22 aa, Artificial Sequence
  Description of Artificial Sequence: Synthetic peptide
  Seed: MDPRMCSLMQGSTLPRRSGAAG
MDPRMWSLIQTSTSPRRSGAAG

SEQ ID NO: 106068 - protein, 22 aa, Artificial Sequence
  Description of Artificial Sequence: Synthetic peptide
  Seed: MDPRMCSLMQGSTLPRRSGAAG
MDPRMWSLIQVSTAPRRSGAAG

SEQ ID NO: 106069 - protein, 22 aa, Artificial Sequence
  Description of Artificial Sequence: Synthetic peptide
  Seed: MDPRMCSLMQGSTLPRRSGAAG
MDPRMWSLIQVSTNPRRSGAAG

SEQ ID NO: 106070 - protein, 22 aa, Artificial Sequence
  Description of Artificial Sequence: Synthetic peptide
  Seed: MDPRMCSLMQGSTLPRRSGAAG
MDPRMWSLIQVSTSPRRSGAAG

SEQ ID NO: 106071 - protein, 22 aa, Artificial Sequence
  Description of Artificial Sequence: Synthetic peptide
  Seed: MDPRMCSLMQGSTLPRRSGAAG
MDPRMWSLLQASTAPRRSGAAG

SEQ ID NO: 106072 - protein, 22 aa, Artificial Sequence
  Description of Artificial Sequence: Synthetic peptide
  Seed: MDPRMCSLMQGSTLPRRSGAAG
MDPRMWSLLQASTGPRRSGAAG

SEQ ID NO: 106073 - protein, 22 aa, Artificial Sequence
  Description of Artificial Sequence: Synthetic peptide
  Seed: MDPRMCSLMQGSTLPRRSGAAG
MDPRMWSLLQASTIPRRSGAAG

SEQ ID NO: 106074 - protein, 22 aa, Artificial Sequence
  Description of Artificial Sequence: Synthetic peptide
  Seed: MDPRMCSLMQGSTLPRRSGAAG
MDPRMWSLLQASTLPRRSGAAG

SEQ ID NO: 106075 - protein, 22 aa, Artificial Sequence
  Description of Artificial Sequence: Synthetic peptide
  Seed: MDPRMCSLMQGSTLPRRSGAAG
MDPRMWSLLQASTMPRRSGAAG

SEQ ID NO: 106076 - protein, 22 aa, Artificial Sequence
  Description of Artificial Sequence: Synthetic peptide
  Seed: MDPRMCSLMQGSTLPRRSGAAG
MDPRMWSLLQASTNPRRSGAAG

SEQ ID NO: 106077 - protein, 22 aa, Artificial Sequence
  Description of Artificial Sequence: Synthetic peptide
  Seed: MDPRMCSLMQGSTLPRRSGAAG
MDPRMWSLLQASTSPRRSGAAG

SEQ ID NO: 106078 - protein, 22 aa, Artificial Sequence
  Description of Artificial Sequence: Synthetic peptide
  Seed: MDPRMCSLMQGSTLPRRSGAAG
MDPRMWSLLQASTTPRRSGAAG

SEQ ID NO: 106079 - protein, 22 aa, Artificial Sequence
  Description of Artificial Sequence: Synthetic peptide
  Seed: MDPRMCSLMQGSTLPRRSGAAG
MDPRMWSLLQASTVPRRSGAAG

SEQ ID NO: 106080 - protein, 22 aa, Artificial Sequence
  Description of Artificial Sequence: Synthetic peptide
  Seed: MDPRMCSLMQGSTLPRRSGAAG
MDPRMWSLLQGSTAPRRSGAAG

SEQ ID NO: 106081 - protein, 22 aa, Artificial Sequence
  Description of Artificial Sequence: Synthetic peptide
  Seed: MDPRMCSLMQGSTLPRRSGAAG
MDPRMWSLLQGSTGPRRSGAAG

SEQ ID NO: 106082 - protein, 22 aa, Artificial Sequence
  Description of Artificial Sequence: Synthetic peptide
  Seed: MDPRMCSLMQGSTLPRRSGAAG
MDPRMWSLLQGSTIPRRSGAAG

SEQ ID NO: 106083 - protein, 22 aa, Artificial Sequence
  Description of Artificial Sequence: Synthetic peptide
  Seed: MDPRMCSLMQGSTLPRRSGAAG
MDPRMWSLLQGSTLPRRSGAAG

SEQ ID NO: 106084 - protein, 22 aa, Artificial Sequence
  Description of Artificial Sequence: Synthetic peptide
  Seed: MDPRMCSLMQGSTLPRRSGAAG
MDPRMWSLLQGSTMPRRSGAAG

SEQ ID NO: 106085 - protein, 22 aa, Artificial Sequence
  Description of Artificial Sequence: Synthetic peptide
  Seed: MDPRMCSLMQGSTLPRRSGAAG
MDPRMWSLLQGSTSPRRSGAAG

SEQ ID NO: 106086 - protein, 22 aa, Artificial Sequence
  Description of Artificial Sequence: Synthetic peptide
  Seed: MDPRMCSLMQGSTLPRRSGAAG
MDPRMWSLLQGSTTPRRSGAAG

SEQ ID NO: 106087 - protein, 22 aa, Artificial Sequence
  Description of Artificial Sequence: Synthetic peptide
  Seed: MDPRMCSLMQGSTLPRRSGAAG
MDPRMWSLLQGSTVPRRSGAAG

SEQ ID NO: 106088 - protein, 22 aa, Artificial Sequence
  Description of Artificial Sequence: Synthetic peptide
  Seed: MDPRMCSLMQGSTLPRRSGAAG
MDPRMWSLLQISTAPRRSGAAG

SEQ ID NO: 106089 - protein, 22 aa, Artificial Sequence
  Description of Artificial Sequence: Synthetic peptide
  Seed: MDPRMCSLMQGSTLPRRSGAAG
MDPRMWSLLQISTNPRRSGAAG

SEQ ID NO: 106090 - protein, 22 aa, Artificial Sequence
  Description of Artificial Sequence: Synthetic peptide
  Seed: MDPRMCSLMQGSTLPRRSGAAG
MDPRMWSLLQISTSPRRSGAAG

SEQ ID NO: 106091 - protein, 22 aa, Artificial Sequence
  Description of Artificial Sequence: Synthetic peptide
  Seed: MDPRMCSLMQGSTLPRRSGAAG
MDPRMWSLLQNSTAPRRSGAAG

SEQ ID NO: 106092 - protein, 22 aa, Artificial Sequence
  Description of Artificial Sequence: Synthetic peptide
  Seed: MDPRMCSLMQGSTLPRRSGAAG
MDPRMWSLLQNSTIPRRSGAAG

SEQ ID NO: 106093 - protein, 22 aa, Artificial Sequence
  Description of Artificial Sequence: Synthetic peptide
  Seed: MDPRMCSLMQGSTLPRRSGAAG
MDPRMWSLLQNSTLPRRSGAAG

SEQ ID NO: 106094 - protein, 22 aa, Artificial Sequence
  Description of Artificial Sequence: Synthetic peptide
  Seed: MDPRMCSLMQGSTLPRRSGAAG
MDPRMWSLLQNSTVPRRSGAAG

SEQ ID NO: 106095 - protein, 22 aa, Artificial Sequence
  Description of Artificial Sequence: Synthetic peptide
  Seed: MDPRMCSLMQGSTLPRRSGAAG
MDPRMWSLLQPSTAPRRSGAAG

SEQ ID NO: 106096 - protein, 22 aa, Artificial Sequence
  Description of Artificial Sequence: Synthetic peptide
  Seed: MDPRMCSLMQGSTLPRRSGAAG
MDPRMWSLLQPSTIPRRSGAAG

SEQ ID NO: 106097 - protein, 22 aa, Artificial Sequence
  Description of Artificial Sequence: Synthetic peptide
  Seed: MDPRMCSLMQGSTLPRRSGAAG
MDPRMWSLLQPSTLPRRSGAAG

SEQ ID NO: 106098 - protein, 22 aa, Artificial Sequence
  Description of Artificial Sequence: Synthetic peptide
  Seed: MDPRMCSLMQGSTLPRRSGAAG
MDPRMWSLLQPSTMPRRSGAAG

SEQ ID NO: 106099 - protein, 22 aa, Artificial Sequence
  Description of Artificial Sequence: Synthetic peptide
  Seed: MDPRMCSLMQGSTLPRRSGAAG
MDPRMWSLLQPSTNPRRSGAAG

SEQ ID NO: 106100 - protein, 22 aa, Artificial Sequence
  Description of Artificial Sequence: Synthetic peptide
  Seed: MDPRMCSLMQGSTLPRRSGAAG
MDPRMWSLLQPSTSPRRSGAAG

SEQ ID NO: 106101 - protein, 22 aa, Artificial Sequence
  Description of Artificial Sequence: Synthetic peptide
  Seed: MDPRMCSLMQGSTLPRRSGAAG
MDPRMWSLLQPSTTPRRSGAAG

SEQ ID NO: 106102 - protein, 22 aa, Artificial Sequence
  Description of Artificial Sequence: Synthetic peptide
  Seed: MDPRMCSLMQGSTLPRRSGAAG
MDPRMWSLLQPSTVPRRSGAAG

SEQ ID NO: 106103 - protein, 22 aa, Artificial Sequence
  Description of Artificial Sequence: Synthetic peptide
  Seed: MDPRMCSLMQGSTLPRRSGAAG
MDPRMWSLLQSSTAPRRSGAAG

SEQ ID NO: 106104 - protein, 22 aa, Artificial Sequence
  Description of Artificial Sequence: Synthetic peptide
  Seed: MDPRMCSLMQGSTLPRRSGAAG
MDPRMWSLLQSSTIPRRSGAAG

SEQ ID NO: 106105 - protein, 22 aa, Artificial Sequence
  Description of Artificial Sequence: Synthetic peptide
  Seed: MDPRMCSLMQGSTLPRRSGAAG
MDPRMWSLLQSSTLPRRSGAAG

SEQ ID NO: 106106 - protein, 22 aa, Artificial Sequence
  Description of Artificial Sequence: Synthetic peptide
  Seed: MDPRMCSLMQGSTLPRRSGAAG
MDPRMWSLLQSSTMPRRSGAAG

SEQ ID NO: 106107 - protein, 22 aa, Artificial Sequence
  Description of Artificial Sequence: Synthetic peptide
  Seed: MDPRMCSLMQGSTLPRRSGAAG
MDPRMWSLLQSSTNPRRSGAAG

SEQ ID NO: 106108 - protein, 22 aa, Artificial Sequence
  Description of Artificial Sequence: Synthetic peptide
  Seed: MDPRMCSLMQGSTLPRRSGAAG
MDPRMWSLLQSSTSPRRSGAAG

SEQ ID NO: 106109 - protein, 22 aa, Artificial Sequence
  Description of Artificial Sequence: Synthetic peptide
  Seed: MDPRMCSLMQGSTLPRRSGAAG
MDPRMWSLLQSSTTPRRSGAAG

SEQ ID NO: 106110 - protein, 22 aa, Artificial Sequence
  Description of Artificial Sequence: Synthetic peptide
  Seed: MDPRMCSLMQGSTLPRRSGAAG
MDPRMWSLLQSSTVPRRSGAAG

SEQ ID NO: 106111 - protein, 22 aa, Artificial Sequence
  Description of Artificial Sequence: Synthetic peptide
  Seed: MDPRMCSLMQGSTLPRRSGAAG
MDPRMWSLLQTSTAPRRSGAAG

SEQ ID NO: 106112 - protein, 22 aa, Artificial Sequence
  Description of Artificial Sequence: Synthetic peptide
  Seed: MDPRMCSLMQGSTLPRRSGAAG
MDPRMWSLLQTSTIPRRSGAAG

SEQ ID NO: 106113 - protein, 22 aa, Artificial Sequence
  Description of Artificial Sequence: Synthetic peptide
  Seed: MDPRMCSLMQGSTLPRRSGAAG
MDPRMWSLLQTSTLPRRSGAAG

SEQ ID NO: 106114 - protein, 22 aa, Artificial Sequence
  Description of Artificial Sequence: Synthetic peptide
  Seed: MDPRMCSLMQGSTLPRRSGAAG
MDPRMWSLLQTSTNPRRSGAAG

SEQ ID NO: 106115 - protein, 22 aa, Artificial Sequence
  Description of Artificial Sequence: Synthetic peptide
  Seed: MDPRMCSLMQGSTLPRRSGAAG
MDPRMWSLLQTSTSPRRSGAAG

SEQ ID NO: 106116 - protein, 22 aa, Artificial Sequence
  Description of Artificial Sequence: Synthetic peptide
  Seed: MDPRMCSLMQGSTLPRRSGAAG
MDPRMWSLLQTSTTPRRSGAAG

SEQ ID NO: 106117 - protein, 22 aa, Artificial Sequence
  Description of Artificial Sequence: Synthetic peptide
  Seed: MDPRMCSLMQGSTLPRRSGAAG
MDPRMWSLLQTSTVPRRSGAAG

SEQ ID NO: 106118 - protein, 22 aa, Artificial Sequence
  Description of Artificial Sequence: Synthetic peptide
  Seed: MDPRMCSLMQGSTLPRRSGAAG
MDPRMWSLLQVSTAPRRSGAAG

SEQ ID NO: 106119 - protein, 22 aa, Artificial Sequence
  Description of Artificial Sequence: Synthetic peptide
  Seed: MDPRMCSLMQGSTLPRRSGAAG
MDPRMWSLLQVSTNPRRSGAAG

SEQ ID NO: 106120 - protein, 22 aa, Artificial Sequence
  Description of Artificial Sequence: Synthetic peptide
  Seed: MDPRMCSLMQGSTLPRRSGAAG
MDPRMWSLLQVSTSPRRSGAAG

SEQ ID NO: 106121 - protein, 22 aa, Artificial Sequence
  Description of Artificial Sequence: Synthetic peptide
  Seed: MDPRMCSLMQGSTLPRRSGAAG
MDPRMWSLLQVSTTPRRSGAAG

SEQ ID NO: 106122 - protein, 22 aa, Artificial Sequence
  Description of Artificial Sequence: Synthetic peptide
  Seed: MDPRMCSLMQGSTLPRRSGAAG
MDPRMWSLMQASTAPRRSGAAG

SEQ ID NO: 106123 - protein, 22 aa, Artificial Sequence
  Description of Artificial Sequence: Synthetic peptide
  Seed: MDPRMCSLMQGSTLPRRSGAAG
MDPRMWSLMQASTGPRRSGAAG

SEQ ID NO: 106124 - protein, 22 aa, Artificial Sequence
  Description of Artificial Sequence: Synthetic peptide
  Seed: MDPRMCSLMQGSTLPRRSGAAG
MDPRMWSLMQASTIPRRSGAAG

SEQ ID NO: 106125 - protein, 22 aa, Artificial Sequence
  Description of Artificial Sequence: Synthetic peptide
  Seed: MDPRMCSLMQGSTLPRRSGAAG
MDPRMWSLMQASTLPRRSGAAG

SEQ ID NO: 106126 - protein, 22 aa, Artificial Sequence
  Description of Artificial Sequence: Synthetic peptide
  Seed: MDPRMCSLMQGSTLPRRSGAAG
MDPRMWSLMQASTMPRRSGAAG

SEQ ID NO: 106127 - protein, 22 aa, Artificial Sequence
  Description of Artificial Sequence: Synthetic peptide
  Seed: MDPRMCSLMQGSTLPRRSGAAG
MDPRMWSLMQASTNPRRSGAAG

SEQ ID NO: 106128 - protein, 22 aa, Artificial Sequence
  Description of Artificial Sequence: Synthetic peptide
  Seed: MDPRMCSLMQGSTLPRRSGAAG
MDPRMWSLMQASTQPRRSGAAG

SEQ ID NO: 106129 - protein, 22 aa, Artificial Sequence
  Description of Artificial Sequence: Synthetic peptide
  Seed: MDPRMCSLMQGSTLPRRSGAAG
MDPRMWSLMQASTSPRRSGAAG

SEQ ID NO: 106130 - protein, 22 aa, Artificial Sequence
  Description of Artificial Sequence: Synthetic peptide
  Seed: MDPRMCSLMQGSTLPRRSGAAG
MDPRMWSLMQASTTPRRSGAAG

SEQ ID NO: 106131 - protein, 22 aa, Artificial Sequence
  Description of Artificial Sequence: Synthetic peptide
  Seed: MDPRMCSLMQGSTLPRRSGAAG
MDPRMWSLMQASTVPRRSGAAG

SEQ ID NO: 106132 - protein, 22 aa, Artificial Sequence
  Description of Artificial Sequence: Synthetic peptide
  Seed: MDPRMCSLMQGSTLPRRSGAAG
MDPRMWSLMQGSTAPRRSGAAG

SEQ ID NO: 106133 - protein, 22 aa, Artificial Sequence
  Description of Artificial Sequence: Synthetic peptide
  Seed: MDPRMCSLMQGSTLPRRSGAAG
MDPRMWSLMQGSTIPRRSGAAG

SEQ ID NO: 106134 - protein, 22 aa, Artificial Sequence
  Description of Artificial Sequence: Synthetic peptide
  Seed: MDPRMCSLMQGSTLPRRSGAAG
MDPRMWSLMQGSTLPRRSGAAG

SEQ ID NO: 106135 - protein, 22 aa, Artificial Sequence
  Description of Artificial Sequence: Synthetic peptide
  Seed: MDPRMCSLMQGSTLPRRSGAAG
MDPRMWSLMQGSTMPRRSGAAG

SEQ ID NO: 106136 - protein, 22 aa, Artificial Sequence
  Description of Artificial Sequence: Synthetic peptide
  Seed: MDPRMCSLMQGSTLPRRSGAAG
MDPRMWSLMQGSTSPRRSGAAG

SEQ ID NO: 106137 - protein, 22 aa, Artificial Sequence
  Description of Artificial Sequence: Synthetic peptide
  Seed: MDPRMCSLMQGSTLPRRSGAAG
MDPRMWSLMQGSTTPRRSGAAG

SEQ ID NO: 106138 - protein, 22 aa, Artificial Sequence
  Description of Artificial Sequence: Synthetic peptide
  Seed: MDPRMCSLMQGSTLPRRSGAAG
MDPRMWSLMQGSTVPRRSGAAG

SEQ ID NO: 106139 - protein, 22 aa, Artificial Sequence
  Description of Artificial Sequence: Synthetic peptide
  Seed: MDPRMCSLMQGSTLPRRSGAAG
MDPRMWSLMQISTAPRRSGAAG

SEQ ID NO: 106140 - protein, 22 aa, Artificial Sequence
  Description of Artificial Sequence: Synthetic peptide
  Seed: MDPRMCSLMQGSTLPRRSGAAG
MDPRMWSLMQISTNPRRSGAAG

SEQ ID NO: 106141 - protein, 22 aa, Artificial Sequence
  Description of Artificial Sequence: Synthetic peptide
  Seed: MDPRMCSLMQGSTLPRRSGAAG
MDPRMWSLMQISTSPRRSGAAG

SEQ ID NO: 106142 - protein, 22 aa, Artificial Sequence
  Description of Artificial Sequence: Synthetic peptide
  Seed: MDPRMCSLMQGSTLPRRSGAAG
MDPRMWSLMQNSTAPRRSGAAG

SEQ ID NO: 106143 - protein, 22 aa, Artificial Sequence
  Description of Artificial Sequence: Synthetic peptide
  Seed: MDPRMCSLMQGSTLPRRSGAAG
MDPRMWSLMQNSTIPRRSGAAG

SEQ ID NO: 106144 - protein, 22 aa, Artificial Sequence
  Description of Artificial Sequence: Synthetic peptide
  Seed: MDPRMCSLMQGSTLPRRSGAAG
MDPRMWSLMQNSTLPRRSGAAG

SEQ ID NO: 106145 - protein, 22 aa, Artificial Sequence
  Description of Artificial Sequence: Synthetic peptide
  Seed: MDPRMCSLMQGSTLPRRSGAAG
MDPRMWSLMQNSTVPRRSGAAG

SEQ ID NO: 106146 - protein, 22 aa, Artificial Sequence
  Description of Artificial Sequence: Synthetic peptide
  Seed: MDPRMCSLMQGSTLPRRSGAAG
MDPRMWSLMQPSTAPRRSGAAG

SEQ ID NO: 106147 - protein, 22 aa, Artificial Sequence
  Description of Artificial Sequence: Synthetic peptide
  Seed: MDPRMCSLMQGSTLPRRSGAAG
MDPRMWSLMQPSTIPRRSGAAG

SEQ ID NO: 106148 - protein, 22 aa, Artificial Sequence
  Description of Artificial Sequence: Synthetic peptide
  Seed: MDPRMCSLMQGSTLPRRSGAAG
MDPRMWSLMQPSTLPRRSGAAG

SEQ ID NO: 106149 - protein, 22 aa, Artificial Sequence
  Description of Artificial Sequence: Synthetic peptide
  Seed: MDPRMCSLMQGSTLPRRSGAAG
MDPRMWSLMQPSTMPRRSGAAG

SEQ ID NO: 106150 - protein, 22 aa, Artificial Sequence
  Description of Artificial Sequence: Synthetic peptide
  Seed: MDPRMCSLMQGSTLPRRSGAAG
MDPRMWSLMQPSTNPRRSGAAG

SEQ ID NO: 106151 - protein, 22 aa, Artificial Sequence
  Description of Artificial Sequence: Synthetic peptide
  Seed: MDPRMCSLMQGSTLPRRSGAAG
MDPRMWSLMQPSTSPRRSGAAG

SEQ ID NO: 106152 - protein, 22 aa, Artificial Sequence
  Description of Artificial Sequence: Synthetic peptide
  Seed: MDPRMCSLMQGSTLPRRSGAAG
MDPRMWSLMQPSTTPRRSGAAG

SEQ ID NO: 106153 - protein, 22 aa, Artificial Sequence
  Description of Artificial Sequence: Synthetic peptide
  Seed: MDPRMCSLMQGSTLPRRSGAAG
MDPRMWSLMQPSTVPRRSGAAG

SEQ ID NO: 106154 - protein, 22 aa, Artificial Sequence
  Description of Artificial Sequence: Synthetic peptide
  Seed: MDPRMCSLMQGSTLPRRSGAAG
MDPRMWSLMQSSTAPRRSGAAG

SEQ ID NO: 106155 - protein, 22 aa, Artificial Sequence
  Description of Artificial Sequence: Synthetic peptide
  Seed: MDPRMCSLMQGSTLPRRSGAAG
MDPRMWSLMQSSTIPRRSGAAG

SEQ ID NO: 106156 - protein, 22 aa, Artificial Sequence
  Description of Artificial Sequence: Synthetic peptide
  Seed: MDPRMCSLMQGSTLPRRSGAAG
MDPRMWSLMQSSTLPRRSGAAG

SEQ ID NO: 106157 - protein, 22 aa, Artificial Sequence
  Description of Artificial Sequence: Synthetic peptide
  Seed: MDPRMCSLMQGSTLPRRSGAAG
MDPRMWSLMQSSTMPRRSGAAG

SEQ ID NO: 106158 - protein, 22 aa, Artificial Sequence
  Description of Artificial Sequence: Synthetic peptide
  Seed: MDPRMCSLMQGSTLPRRSGAAG
MDPRMWSLMQSSTNPRRSGAAG

SEQ ID NO: 106159 - protein, 22 aa, Artificial Sequence
  Description of Artificial Sequence: Synthetic peptide
  Seed: MDPRMCSLMQGSTLPRRSGAAG
MDPRMWSLMQSSTSPRRSGAAG

SEQ ID NO: 106160 - protein, 22 aa, Artificial Sequence
  Description of Artificial Sequence: Synthetic peptide
  Seed: MDPRMCSLMQGSTLPRRSGAAG
MDPRMWSLMQSSTTPRRSGAAG

SEQ ID NO: 106161 - protein, 22 aa, Artificial Sequence
  Description of Artificial Sequence: Synthetic peptide
  Seed: MDPRMCSLMQGSTLPRRSGAAG
MDPRMWSLMQSSTVPRRSGAAG

SEQ ID NO: 106162 - protein, 22 aa, Artificial Sequence
  Description of Artificial Sequence: Synthetic peptide
  Seed: MDPRMCSLMQGSTLPRRSGAAG
MDPRMWSLMQTSTAPRRSGAAG

SEQ ID NO: 106163 - protein, 22 aa, Artificial Sequence
  Description of Artificial Sequence: Synthetic peptide
  Seed: MDPRMCSLMQGSTLPRRSGAAG
MDPRMWSLMQTSTIPRRSGAAG

SEQ ID NO: 106164 - protein, 22 aa, Artificial Sequence
  Description of Artificial Sequence: Synthetic peptide
  Seed: MDPRMCSLMQGSTLPRRSGAAG
MDPRMWSLMQTSTLPRRSGAAG

SEQ ID NO: 106165 - protein, 22 aa, Artificial Sequence
  Description of Artificial Sequence: Synthetic peptide
  Seed: MDPRMCSLMQGSTLPRRSGAAG
MDPRMWSLMQTSTNPRRSGAAG

SEQ ID NO: 106166 - protein, 22 aa, Artificial Sequence
  Description of Artificial Sequence: Synthetic peptide
  Seed: MDPRMCSLMQGSTLPRRSGAAG
MDPRMWSLMQTSTSPRRSGAAG

SEQ ID NO: 106167 - protein, 22 aa, Artificial Sequence
  Description of Artificial Sequence: Synthetic peptide
  Seed: MDPRMCSLMQGSTLPRRSGAAG
MDPRMWSLMQTSTTPRRSGAAG

SEQ ID NO: 106168 - protein, 22 aa, Artificial Sequence
  Description of Artificial Sequence: Synthetic peptide
  Seed: MDPRMCSLMQGSTLPRRSGAAG
MDPRMWSLMQTSTVPRRSGAAG

SEQ ID NO: 106169 - protein, 22 aa, Artificial Sequence
  Description of Artificial Sequence: Synthetic peptide
  Seed: MDPRMCSLMQGSTLPRRSGAAG
MDPRMWSLMQVSTAPRRSGAAG

SEQ ID NO: 106170 - protein, 22 aa, Artificial Sequence
  Description of Artificial Sequence: Synthetic peptide
  Seed: MDPRMCSLMQGSTLPRRSGAAG
MDPRMWSLMQVSTNPRRSGAAG

SEQ ID NO: 106171 - protein, 22 aa, Artificial Sequence
  Description of Artificial Sequence: Synthetic peptide
  Seed: MDPRMCSLMQGSTLPRRSGAAG
MDPRMWSLMQVSTSPRRSGAAG

SEQ ID NO: 106172 - protein, 22 aa, Artificial Sequence
  Description of Artificial Sequence: Synthetic peptide
  Seed: MDPRMCSLMQGSTLPRRSGAAG
MDPRMWSLMQVSTTPRRSGAAG

SEQ ID NO: 106173 - protein, 22 aa, Artificial Sequence
  Description of Artificial Sequence: Synthetic peptide
  Seed: MDPRMCSLMQGSTLPRRSGAAG
MDPRMWSLQQASTAPRRSGAAG

SEQ ID NO: 106174 - protein, 22 aa, Artificial Sequence
  Description of Artificial Sequence: Synthetic peptide
  Seed: MDPRMCSLMQGSTLPRRSGAAG
MDPRMWSLQQASTIPRRSGAAG

SEQ ID NO: 106175 - protein, 22 aa, Artificial Sequence
  Description of Artificial Sequence: Synthetic peptide
  Seed: MDPRMCSLMQGSTLPRRSGAAG
MDPRMWSLQQASTLPRRSGAAG

SEQ ID NO: 106176 - protein, 22 aa, Artificial Sequence
  Description of Artificial Sequence: Synthetic peptide
  Seed: MDPRMCSLMQGSTLPRRSGAAG
MDPRMWSLQQASTVPRRSGAAG

SEQ ID NO: 106177 - protein, 22 aa, Artificial Sequence
  Description of Artificial Sequence: Synthetic peptide
  Seed: MDPRMCSLMQGSTLPRRSGAAG
MDPRMWSLQQGSTLPRRSGAAG

SEQ ID NO: 106178 - protein, 22 aa, Artificial Sequence
  Description of Artificial Sequence: Synthetic peptide
  Seed: MDPRMCSLMQGSTLPRRSGAAG
MDPRMWSLQQGSTVPRRSGAAG

SEQ ID NO: 106179 - protein, 22 aa, Artificial Sequence
  Description of Artificial Sequence: Synthetic peptide
  Seed: MDPRMCSLMQGSTLPRRSGAAG
MDPRMWSLVQASTAPRRSGAAG

SEQ ID NO: 106180 - protein, 22 aa, Artificial Sequence
  Description of Artificial Sequence: Synthetic peptide
  Seed: MDPRMCSLMQGSTLPRRSGAAG
MDPRMWSLVQASTIPRRSGAAG

SEQ ID NO: 106181 - protein, 22 aa, Artificial Sequence
  Description of Artificial Sequence: Synthetic peptide
  Seed: MDPRMCSLMQGSTLPRRSGAAG
MDPRMWSLVQASTLPRRSGAAG

SEQ ID NO: 106182 - protein, 22 aa, Artificial Sequence
  Description of Artificial Sequence: Synthetic peptide
  Seed: MDPRMCSLMQGSTLPRRSGAAG
MDPRMWSLVQASTNPRRSGAAG

SEQ ID NO: 106183 - protein, 22 aa, Artificial Sequence
  Description of Artificial Sequence: Synthetic peptide
  Seed: MDPRMCSLMQGSTLPRRSGAAG
MDPRMWSLVQASTSPRRSGAAG

SEQ ID NO: 106184 - protein, 22 aa, Artificial Sequence
  Description of Artificial Sequence: Synthetic peptide
  Seed: MDPRMCSLMQGSTLPRRSGAAG
MDPRMWSLVQASTVPRRSGAAG

SEQ ID NO: 106185 - protein, 22 aa, Artificial Sequence
  Description of Artificial Sequence: Synthetic peptide
  Seed: MDPRMCSLMQGSTLPRRSGAAG
MDPRMWSLVQGSTAPRRSGAAG

SEQ ID NO: 106186 - protein, 22 aa, Artificial Sequence
  Description of Artificial Sequence: Synthetic peptide
  Seed: MDPRMCSLMQGSTLPRRSGAAG
MDPRMWSLVQGSTIPRRSGAAG

SEQ ID NO: 106187 - protein, 22 aa, Artificial Sequence
  Description of Artificial Sequence: Synthetic peptide
  Seed: MDPRMCSLMQGSTLPRRSGAAG
MDPRMWSLVQGSTLPRRSGAAG

SEQ ID NO: 106188 - protein, 22 aa, Artificial Sequence
  Description of Artificial Sequence: Synthetic peptide
  Seed: MDPRMCSLMQGSTLPRRSGAAG
MDPRMWSLVQGSTVPRRSGAAG

SEQ ID NO: 106189 - protein, 22 aa, Artificial Sequence
  Description of Artificial Sequence: Synthetic peptide
  Seed: MDPRMCSLMQGSTLPRRSGAAG
MDPRMYSLAQASTAPRRSGAAG

SEQ ID NO: 106190 - protein, 22 aa, Artificial Sequence
  Description of Artificial Sequence: Synthetic peptide
  Seed: MDPRMCSLMQGSTLPRRSGAAG
MDPRMYSLAQASTGPRRSGAAG

SEQ ID NO: 106191 - protein, 22 aa, Artificial Sequence
  Description of Artificial Sequence: Synthetic peptide
  Seed: MDPRMCSLMQGSTLPRRSGAAG
MDPRMYSLAQASTIPRRSGAAG

SEQ ID NO: 106192 - protein, 22 aa, Artificial Sequence
  Description of Artificial Sequence: Synthetic peptide
  Seed: MDPRMCSLMQGSTLPRRSGAAG
MDPRMYSLAQASTLPRRSGAAG

SEQ ID NO: 106193 - protein, 22 aa, Artificial Sequence
  Description of Artificial Sequence: Synthetic peptide
  Seed: MDPRMCSLMQGSTLPRRSGAAG
MDPRMYSLAQASTMPRRSGAAG

SEQ ID NO: 106194 - protein, 22 aa, Artificial Sequence
  Description of Artificial Sequence: Synthetic peptide
  Seed: MDPRMCSLMQGSTLPRRSGAAG
MDPRMYSLAQASTNPRRSGAAG

SEQ ID NO: 106195 - protein, 22 aa, Artificial Sequence
  Description of Artificial Sequence: Synthetic peptide
  Seed: MDPRMCSLMQGSTLPRRSGAAG
MDPRMYSLAQASTQPRRSGAAG

SEQ ID NO: 106196 - protein, 22 aa, Artificial Sequence
  Description of Artificial Sequence: Synthetic peptide
  Seed: MDPRMCSLMQGSTLPRRSGAAG
MDPRMYSLAQASTSPRRSGAAG

SEQ ID NO: 106197 - protein, 22 aa, Artificial Sequence
  Description of Artificial Sequence: Synthetic peptide
  Seed: MDPRMCSLMQGSTLPRRSGAAG
MDPRMYSLAQASTTPRRSGAAG

SEQ ID NO: 106198 - protein, 22 aa, Artificial Sequence
  Description of Artificial Sequence: Synthetic peptide
  Seed: MDPRMCSLMQGSTLPRRSGAAG
MDPRMYSLAQASTVPRRSGAAG

SEQ ID NO: 106199 - protein, 22 aa, Artificial Sequence
  Description of Artificial Sequence: Synthetic peptide
  Seed: MDPRMCSLMQGSTLPRRSGAAG
MDPRMYSLAQGSTAPRRSGAAG

SEQ ID NO: 106200 - protein, 22 aa, Artificial Sequence
  Description of Artificial Sequence: Synthetic peptide
  Seed: MDPRMCSLMQGSTLPRRSGAAG
MDPRMYSLAQGSTIPRRSGAAG

SEQ ID NO: 106201 - protein, 22 aa, Artificial Sequence
  Description of Artificial Sequence: Synthetic peptide
  Seed: MDPRMCSLMQGSTLPRRSGAAG
MDPRMYSLAQGSTLPRRSGAAG

SEQ ID NO: 106202 - protein, 22 aa, Artificial Sequence
  Description of Artificial Sequence: Synthetic peptide
  Seed: MDPRMCSLMQGSTLPRRSGAAG
MDPRMYSLAQGSTMPRRSGAAG

SEQ ID NO: 106203 - protein, 22 aa, Artificial Sequence
  Description of Artificial Sequence: Synthetic peptide
  Seed: MDPRMCSLMQGSTLPRRSGAAG
MDPRMYSLAQGSTVPRRSGAAG

SEQ ID NO: 106204 - protein, 22 aa, Artificial Sequence
  Description of Artificial Sequence: Synthetic peptide
  Seed: MDPRMCSLMQGSTLPRRSGAAG
MDPRMYSLAQISTAPRRSGAAG

SEQ ID NO: 106205 - protein, 22 aa, Artificial Sequence
  Description of Artificial Sequence: Synthetic peptide
  Seed: MDPRMCSLMQGSTLPRRSGAAG
MDPRMYSLAQISTNPRRSGAAG

SEQ ID NO: 106206 - protein, 22 aa, Artificial Sequence
  Description of Artificial Sequence: Synthetic peptide
  Seed: MDPRMCSLMQGSTLPRRSGAAG
MDPRMYSLAQISTSPRRSGAAG

SEQ ID NO: 106207 - protein, 22 aa, Artificial Sequence
  Description of Artificial Sequence: Synthetic peptide
  Seed: MDPRMCSLMQGSTLPRRSGAAG
MDPRMYSLAQISTVPRRSGAAG

SEQ ID NO: 106208 - protein, 22 aa, Artificial Sequence
  Description of Artificial Sequence: Synthetic peptide
  Seed: MDPRMCSLMQGSTLPRRSGAAG
MDPRMYSLAQNSTIPRRSGAAG

SEQ ID NO: 106209 - protein, 22 aa, Artificial Sequence
  Description of Artificial Sequence: Synthetic peptide
  Seed: MDPRMCSLMQGSTLPRRSGAAG
MDPRMYSLAQNSTLPRRSGAAG

SEQ ID NO: 106210 - protein, 22 aa, Artificial Sequence
  Description of Artificial Sequence: Synthetic peptide
  Seed: MDPRMCSLMQGSTLPRRSGAAG
MDPRMYSLAQNSTVPRRSGAAG

SEQ ID NO: 106211 - protein, 22 aa, Artificial Sequence
  Description of Artificial Sequence: Synthetic peptide
  Seed: MDPRMCSLMQGSTLPRRSGAAG
MDPRMYSLAQPSTAPRRSGAAG

SEQ ID NO: 106212 - protein, 22 aa, Artificial Sequence
  Description of Artificial Sequence: Synthetic peptide
  Seed: MDPRMCSLMQGSTLPRRSGAAG
MDPRMYSLAQPSTIPRRSGAAG

SEQ ID NO: 106213 - protein, 22 aa, Artificial Sequence
  Description of Artificial Sequence: Synthetic peptide
  Seed: MDPRMCSLMQGSTLPRRSGAAG
MDPRMYSLAQPSTLPRRSGAAG

SEQ ID NO: 106214 - protein, 22 aa, Artificial Sequence
  Description of Artificial Sequence: Synthetic peptide
  Seed: MDPRMCSLMQGSTLPRRSGAAG
MDPRMYSLAQPSTMPRRSGAAG

SEQ ID NO: 106215 - protein, 22 aa, Artificial Sequence
  Description of Artificial Sequence: Synthetic peptide
  Seed: MDPRMCSLMQGSTLPRRSGAAG
MDPRMYSLAQPSTNPRRSGAAG

SEQ ID NO: 106216 - protein, 22 aa, Artificial Sequence
  Description of Artificial Sequence: Synthetic peptide
  Seed: MDPRMCSLMQGSTLPRRSGAAG
MDPRMYSLAQPSTSPRRSGAAG

SEQ ID NO: 106217 - protein, 22 aa, Artificial Sequence
  Description of Artificial Sequence: Synthetic peptide
  Seed: MDPRMCSLMQGSTLPRRSGAAG
MDPRMYSLAQPSTVPRRSGAAG

SEQ ID NO: 106218 - protein, 22 aa, Artificial Sequence
  Description of Artificial Sequence: Synthetic peptide
  Seed: MDPRMCSLMQGSTLPRRSGAAG
MDPRMYSLAQSSTAPRRSGAAG

SEQ ID NO: 106219 - protein, 22 aa, Artificial Sequence
  Description of Artificial Sequence: Synthetic peptide
  Seed: MDPRMCSLMQGSTLPRRSGAAG
MDPRMYSLAQSSTIPRRSGAAG

SEQ ID NO: 106220 - protein, 22 aa, Artificial Sequence
  Description of Artificial Sequence: Synthetic peptide
  Seed: MDPRMCSLMQGSTLPRRSGAAG
MDPRMYSLAQSSTLPRRSGAAG

SEQ ID NO: 106221 - protein, 22 aa, Artificial Sequence
  Description of Artificial Sequence: Synthetic peptide
  Seed: MDPRMCSLMQGSTLPRRSGAAG
MDPRMYSLAQSSTMPRRSGAAG

SEQ ID NO: 106222 - protein, 22 aa, Artificial Sequence
  Description of Artificial Sequence: Synthetic peptide
  Seed: MDPRMCSLMQGSTLPRRSGAAG
MDPRMYSLAQSSTNPRRSGAAG

SEQ ID NO: 106223 - protein, 22 aa, Artificial Sequence
  Description of Artificial Sequence: Synthetic peptide
  Seed: MDPRMCSLMQGSTLPRRSGAAG
MDPRMYSLAQSSTSPRRSGAAG

SEQ ID NO: 106224 - protein, 22 aa, Artificial Sequence
  Description of Artificial Sequence: Synthetic peptide
  Seed: MDPRMCSLMQGSTLPRRSGAAG
MDPRMYSLAQSSTVPRRSGAAG

SEQ ID NO: 106225 - protein, 22 aa, Artificial Sequence
  Description of Artificial Sequence: Synthetic peptide
  Seed: MDPRMCSLMQGSTLPRRSGAAG
MDPRMYSLAQTSTAPRRSGAAG

SEQ ID NO: 106226 - protein, 22 aa, Artificial Sequence
  Description of Artificial Sequence: Synthetic peptide
  Seed: MDPRMCSLMQGSTLPRRSGAAG
MDPRMYSLAQTSTIPRRSGAAG

SEQ ID NO: 106227 - protein, 22 aa, Artificial Sequence
  Description of Artificial Sequence: Synthetic peptide
  Seed: MDPRMCSLMQGSTLPRRSGAAG
MDPRMYSLAQTSTLPRRSGAAG

SEQ ID NO: 106228 - protein, 22 aa, Artificial Sequence
  Description of Artificial Sequence: Synthetic peptide
  Seed: MDPRMCSLMQGSTLPRRSGAAG
MDPRMYSLAQTSTNPRRSGAAG

SEQ ID NO: 106229 - protein, 22 aa, Artificial Sequence
  Description of Artificial Sequence: Synthetic peptide
  Seed: MDPRMCSLMQGSTLPRRSGAAG
MDPRMYSLAQTSTSPRRSGAAG

SEQ ID NO: 106230 - protein, 22 aa, Artificial Sequence
  Description of Artificial Sequence: Synthetic peptide
  Seed: MDPRMCSLMQGSTLPRRSGAAG
MDPRMYSLAQTSTVPRRSGAAG

SEQ ID NO: 106231 - protein, 22 aa, Artificial Sequence
  Description of Artificial Sequence: Synthetic peptide
  Seed: MDPRMCSLMQGSTLPRRSGAAG
MDPRMYSLAQVSTAPRRSGAAG

SEQ ID NO: 106232 - protein, 22 aa, Artificial Sequence
  Description of Artificial Sequence: Synthetic peptide
  Seed: MDPRMCSLMQGSTLPRRSGAAG
MDPRMYSLAQVSTIPRRSGAAG

SEQ ID NO: 106233 - protein, 22 aa, Artificial Sequence
  Description of Artificial Sequence: Synthetic peptide
  Seed: MDPRMCSLMQGSTLPRRSGAAG
MDPRMYSLAQVSTLPRRSGAAG

SEQ ID NO: 106234 - protein, 22 aa, Artificial Sequence
  Description of Artificial Sequence: Synthetic peptide
  Seed: MDPRMCSLMQGSTLPRRSGAAG
MDPRMYSLAQVSTNPRRSGAAG

SEQ ID NO: 106235 - protein, 22 aa, Artificial Sequence
  Description of Artificial Sequence: Synthetic peptide
  Seed: MDPRMCSLMQGSTLPRRSGAAG
MDPRMYSLAQVSTSPRRSGAAG

SEQ ID NO: 106236 - protein, 22 aa, Artificial Sequence
  Description of Artificial Sequence: Synthetic peptide
  Seed: MDPRMCSLMQGSTLPRRSGAAG
MDPRMYSLAQVSTTPRRSGAAG

SEQ ID NO: 106237 - protein, 22 aa, Artificial Sequence
  Description of Artificial Sequence: Synthetic peptide
  Seed: MDPRMCSLMQGSTLPRRSGAAG
MDPRMYSLAQVSTVPRRSGAAG

SEQ ID NO: 106238 - protein, 22 aa, Artificial Sequence
  Description of Artificial Sequence: Synthetic peptide
  Seed: MDPRMCSLMQGSTLPRRSGAAG
MDPRMYSLEQASTIPRRSGAAG

SEQ ID NO: 106239 - protein, 22 aa, Artificial Sequence
  Description of Artificial Sequence: Synthetic peptide
  Seed: MDPRMCSLMQGSTLPRRSGAAG
MDPRMYSLEQASTLPRRSGAAG

SEQ ID NO: 106240 - protein, 22 aa, Artificial Sequence
  Description of Artificial Sequence: Synthetic peptide
  Seed: MDPRMCSLMQGSTLPRRSGAAG
MDPRMYSLEQASTVPRRSGAAG

SEQ ID NO: 106241 - protein, 22 aa, Artificial Sequence
  Description of Artificial Sequence: Synthetic peptide
  Seed: MDPRMCSLMQGSTLPRRSGAAG
MDPRMYSLFQASTAPRRSGAAG

SEQ ID NO: 106242 - protein, 22 aa, Artificial Sequence
  Description of Artificial Sequence: Synthetic peptide
  Seed: MDPRMCSLMQGSTLPRRSGAAG
MDPRMYSLFQASTIPRRSGAAG

SEQ ID NO: 106243 - protein, 22 aa, Artificial Sequence
  Description of Artificial Sequence: Synthetic peptide
  Seed: MDPRMCSLMQGSTLPRRSGAAG
MDPRMYSLFQASTLPRRSGAAG

SEQ ID NO: 106244 - protein, 22 aa, Artificial Sequence
  Description of Artificial Sequence: Synthetic peptide
  Seed: MDPRMCSLMQGSTLPRRSGAAG
MDPRMYSLFQASTNPRRSGAAG

SEQ ID NO: 106245 - protein, 22 aa, Artificial Sequence
  Description of Artificial Sequence: Synthetic peptide
  Seed: MDPRMCSLMQGSTLPRRSGAAG
MDPRMYSLFQASTSPRRSGAAG

SEQ ID NO: 106246 - protein, 22 aa, Artificial Sequence
  Description of Artificial Sequence: Synthetic peptide
  Seed: MDPRMCSLMQGSTLPRRSGAAG
MDPRMYSLFQASTVPRRSGAAG

SEQ ID NO: 106247 - protein, 22 aa, Artificial Sequence
  Description of Artificial Sequence: Synthetic peptide
  Seed: MDPRMCSLMQGSTLPRRSGAAG
MDPRMYSLFQPSTAPRRSGAAG

SEQ ID NO: 106248 - protein, 22 aa, Artificial Sequence
  Description of Artificial Sequence: Synthetic peptide
  Seed: MDPRMCSLMQGSTLPRRSGAAG
MDPRMYSLFQVSTAPRRSGAAG

SEQ ID NO: 106249 - protein, 22 aa, Artificial Sequence
  Description of Artificial Sequence: Synthetic peptide
  Seed: MDPRMCSLMQGSTLPRRSGAAG
MDPRMYSLGQASTIPRRSGAAG

SEQ ID NO: 106250 - protein, 22 aa, Artificial Sequence
  Description of Artificial Sequence: Synthetic peptide
  Seed: MDPRMCSLMQGSTLPRRSGAAG
MDPRMYSLGQASTLPRRSGAAG

SEQ ID NO: 106251 - protein, 22 aa, Artificial Sequence
  Description of Artificial Sequence: Synthetic peptide
  Seed: MDPRMCSLMQGSTLPRRSGAAG
MDPRMYSLGQASTVPRRSGAAG

SEQ ID NO: 106252 - protein, 22 aa, Artificial Sequence
  Description of Artificial Sequence: Synthetic peptide
  Seed: MDPRMCSLMQGSTLPRRSGAAG
MDPRMYSLIQASTAPRRSGAAG

SEQ ID NO: 106253 - protein, 22 aa, Artificial Sequence
  Description of Artificial Sequence: Synthetic peptide
  Seed: MDPRMCSLMQGSTLPRRSGAAG
MDPRMYSLIQASTGPRRSGAAG

SEQ ID NO: 106254 - protein, 22 aa, Artificial Sequence
  Description of Artificial Sequence: Synthetic peptide
  Seed: MDPRMCSLMQGSTLPRRSGAAG
MDPRMYSLIQASTHPRRSGAAG

SEQ ID NO: 106255 - protein, 22 aa, Artificial Sequence
  Description of Artificial Sequence: Synthetic peptide
  Seed: MDPRMCSLMQGSTLPRRSGAAG
MDPRMYSLIQASTIPRRSGAAG

SEQ ID NO: 106256 - protein, 22 aa, Artificial Sequence
  Description of Artificial Sequence: Synthetic peptide
  Seed: MDPRMCSLMQGSTLPRRSGAAG
MDPRMYSLIQASTLPRRSGAAG

SEQ ID NO: 106257 - protein, 22 aa, Artificial Sequence
  Description of Artificial Sequence: Synthetic peptide
  Seed: MDPRMCSLMQGSTLPRRSGAAG
MDPRMYSLIQASTMPRRSGAAG

SEQ ID NO: 106258 - protein, 22 aa, Artificial Sequence
  Description of Artificial Sequence: Synthetic peptide
  Seed: MDPRMCSLMQGSTLPRRSGAAG
MDPRMYSLIQASTNPRRSGAAG

SEQ ID NO: 106259 - protein, 22 aa, Artificial Sequence
  Description of Artificial Sequence: Synthetic peptide
  Seed: MDPRMCSLMQGSTLPRRSGAAG
MDPRMYSLIQASTQPRRSGAAG

SEQ ID NO: 106260 - protein, 22 aa, Artificial Sequence
  Description of Artificial Sequence: Synthetic peptide
  Seed: MDPRMCSLMQGSTLPRRSGAAG
MDPRMYSLIQASTSPRRSGAAG

SEQ ID NO: 106261 - protein, 22 aa, Artificial Sequence
  Description of Artificial Sequence: Synthetic peptide
  Seed: MDPRMCSLMQGSTLPRRSGAAG
MDPRMYSLIQASTTPRRSGAAG

SEQ ID NO: 106262 - protein, 22 aa, Artificial Sequence
  Description of Artificial Sequence: Synthetic peptide
  Seed: MDPRMCSLMQGSTLPRRSGAAG
MDPRMYSLIQASTVPRRSGAAG

SEQ ID NO: 106263 - protein, 22 aa, Artificial Sequence
  Description of Artificial Sequence: Synthetic peptide
  Seed: MDPRMCSLMQGSTLPRRSGAAG
MDPRMYSLIQGSTAPRRSGAAG

SEQ ID NO: 106264 - protein, 22 aa, Artificial Sequence
  Description of Artificial Sequence: Synthetic peptide
  Seed: MDPRMCSLMQGSTLPRRSGAAG
MDPRMYSLIQGSTIPRRSGAAG

SEQ ID NO: 106265 - protein, 22 aa, Artificial Sequence
  Description of Artificial Sequence: Synthetic peptide
  Seed: MDPRMCSLMQGSTLPRRSGAAG
MDPRMYSLIQGSTLPRRSGAAG

SEQ ID NO: 106266 - protein, 22 aa, Artificial Sequence
  Description of Artificial Sequence: Synthetic peptide
  Seed: MDPRMCSLMQGSTLPRRSGAAG
MDPRMYSLIQGSTMPRRSGAAG

SEQ ID NO: 106267 - protein, 22 aa, Artificial Sequence
  Description of Artificial Sequence: Synthetic peptide
  Seed: MDPRMCSLMQGSTLPRRSGAAG
MDPRMYSLIQGSTNPRRSGAAG

SEQ ID NO: 106268 - protein, 22 aa, Artificial Sequence
  Description of Artificial Sequence: Synthetic peptide
  Seed: MDPRMCSLMQGSTLPRRSGAAG
MDPRMYSLIQGSTSPRRSGAAG

SEQ ID NO: 106269 - protein, 22 aa, Artificial Sequence
  Description of Artificial Sequence: Synthetic peptide
  Seed: MDPRMCSLMQGSTLPRRSGAAG
MDPRMYSLIQGSTTPRRSGAAG

SEQ ID NO: 106270 - protein, 22 aa, Artificial Sequence
  Description of Artificial Sequence: Synthetic peptide
  Seed: MDPRMCSLMQGSTLPRRSGAAG
MDPRMYSLIQGSTVPRRSGAAG

SEQ ID NO: 106271 - protein, 22 aa, Artificial Sequence
  Description of Artificial Sequence: Synthetic peptide
  Seed: MDPRMCSLMQGSTLPRRSGAAG
MDPRMYSLIQISTAPRRSGAAG

SEQ ID NO: 106272 - protein, 22 aa, Artificial Sequence
  Description of Artificial Sequence: Synthetic peptide
  Seed: MDPRMCSLMQGSTLPRRSGAAG
MDPRMYSLIQISTGPRRSGAAG

SEQ ID NO: 106273 - protein, 22 aa, Artificial Sequence
  Description of Artificial Sequence: Synthetic peptide
  Seed: MDPRMCSLMQGSTLPRRSGAAG
MDPRMYSLIQISTNPRRSGAAG

SEQ ID NO: 106274 - protein, 22 aa, Artificial Sequence
  Description of Artificial Sequence: Synthetic peptide
  Seed: MDPRMCSLMQGSTLPRRSGAAG
MDPRMYSLIQISTSPRRSGAAG

SEQ ID NO: 106275 - protein, 22 aa, Artificial Sequence
  Description of Artificial Sequence: Synthetic peptide
  Seed: MDPRMCSLMQGSTLPRRSGAAG
MDPRMYSLIQISTTPRRSGAAG

SEQ ID NO: 106276 - protein, 22 aa, Artificial Sequence
  Description of Artificial Sequence: Synthetic peptide
  Seed: MDPRMCSLMQGSTLPRRSGAAG
MDPRMYSLIQISTVPRRSGAAG

SEQ ID NO: 106277 - protein, 22 aa, Artificial Sequence
  Description of Artificial Sequence: Synthetic peptide
  Seed: MDPRMCSLMQGSTLPRRSGAAG
MDPRMYSLIQLSTAPRRSGAAG

SEQ ID NO: 106278 - protein, 22 aa, Artificial Sequence
  Description of Artificial Sequence: Synthetic peptide
  Seed: MDPRMCSLMQGSTLPRRSGAAG
MDPRMYSLIQLSTNPRRSGAAG

SEQ ID NO: 106279 - protein, 22 aa, Artificial Sequence
  Description of Artificial Sequence: Synthetic peptide
  Seed: MDPRMCSLMQGSTLPRRSGAAG
MDPRMYSLIQMSTAPRRSGAAG

SEQ ID NO: 106280 - protein, 22 aa, Artificial Sequence
  Description of Artificial Sequence: Synthetic peptide
  Seed: MDPRMCSLMQGSTLPRRSGAAG
MDPRMYSLIQNSTAPRRSGAAG

SEQ ID NO: 106281 - protein, 22 aa, Artificial Sequence
  Description of Artificial Sequence: Synthetic peptide
  Seed: MDPRMCSLMQGSTLPRRSGAAG
MDPRMYSLIQNSTIPRRSGAAG

SEQ ID NO: 106282 - protein, 22 aa, Artificial Sequence
  Description of Artificial Sequence: Synthetic peptide
  Seed: MDPRMCSLMQGSTLPRRSGAAG
MDPRMYSLIQNSTLPRRSGAAG

SEQ ID NO: 106283 - protein, 22 aa, Artificial Sequence
  Description of Artificial Sequence: Synthetic peptide
  Seed: MDPRMCSLMQGSTLPRRSGAAG
MDPRMYSLIQNSTNPRRSGAAG

SEQ ID NO: 106284 - protein, 22 aa, Artificial Sequence
  Description of Artificial Sequence: Synthetic peptide
  Seed: MDPRMCSLMQGSTLPRRSGAAG
MDPRMYSLIQNSTSPRRSGAAG

SEQ ID NO: 106285 - protein, 22 aa, Artificial Sequence
  Description of Artificial Sequence: Synthetic peptide
  Seed: MDPRMCSLMQGSTLPRRSGAAG
MDPRMYSLIQNSTVPRRSGAAG

SEQ ID NO: 106286 - protein, 22 aa, Artificial Sequence
  Description of Artificial Sequence: Synthetic peptide
  Seed: MDPRMCSLMQGSTLPRRSGAAG
MDPRMYSLIQPSTAPRRSGAAG

SEQ ID NO: 106287 - protein, 22 aa, Artificial Sequence
  Description of Artificial Sequence: Synthetic peptide
  Seed: MDPRMCSLMQGSTLPRRSGAAG
MDPRMYSLIQPSTGPRRSGAAG

SEQ ID NO: 106288 - protein, 22 aa, Artificial Sequence
  Description of Artificial Sequence: Synthetic peptide
  Seed: MDPRMCSLMQGSTLPRRSGAAG
MDPRMYSLIQPSTIPRRSGAAG

SEQ ID NO: 106289 - protein, 22 aa, Artificial Sequence
  Description of Artificial Sequence: Synthetic peptide
  Seed: MDPRMCSLMQGSTLPRRSGAAG
MDPRMYSLIQPSTLPRRSGAAG

SEQ ID NO: 106290 - protein, 22 aa, Artificial Sequence
  Description of Artificial Sequence: Synthetic peptide
  Seed: MDPRMCSLMQGSTLPRRSGAAG
MDPRMYSLIQPSTMPRRSGAAG

SEQ ID NO: 106291 - protein, 22 aa, Artificial Sequence
  Description of Artificial Sequence: Synthetic peptide
  Seed: MDPRMCSLMQGSTLPRRSGAAG
MDPRMYSLIQPSTNPRRSGAAG

SEQ ID NO: 106292 - protein, 22 aa, Artificial Sequence
  Description of Artificial Sequence: Synthetic peptide
  Seed: MDPRMCSLMQGSTLPRRSGAAG
MDPRMYSLIQPSTQPRRSGAAG

SEQ ID NO: 106293 - protein, 22 aa, Artificial Sequence
  Description of Artificial Sequence: Synthetic peptide
  Seed: MDPRMCSLMQGSTLPRRSGAAG
MDPRMYSLIQPSTSPRRSGAAG

SEQ ID NO: 106294 - protein, 22 aa, Artificial Sequence
  Description of Artificial Sequence: Synthetic peptide
  Seed: MDPRMCSLMQGSTLPRRSGAAG
MDPRMYSLIQPSTTPRRSGAAG

SEQ ID NO: 106295 - protein, 22 aa, Artificial Sequence
  Description of Artificial Sequence: Synthetic peptide
  Seed: MDPRMCSLMQGSTLPRRSGAAG
MDPRMYSLIQPSTVPRRSGAAG

SEQ ID NO: 106296 - protein, 22 aa, Artificial Sequence
  Description of Artificial Sequence: Synthetic peptide
  Seed: MDPRMCSLMQGSTLPRRSGAAG
MDPRMYSLIQSSTAPRRSGAAG

SEQ ID NO: 106297 - protein, 22 aa, Artificial Sequence
  Description of Artificial Sequence: Synthetic peptide
  Seed: MDPRMCSLMQGSTLPRRSGAAG
MDPRMYSLIQSSTGPRRSGAAG

SEQ ID NO: 106298 - protein, 22 aa, Artificial Sequence
  Description of Artificial Sequence: Synthetic peptide
  Seed: MDPRMCSLMQGSTLPRRSGAAG
MDPRMYSLIQSSTIPRRSGAAG

SEQ ID NO: 106299 - protein, 22 aa, Artificial Sequence
  Description of Artificial Sequence: Synthetic peptide
  Seed: MDPRMCSLMQGSTLPRRSGAAG
MDPRMYSLIQSSTLPRRSGAAG

SEQ ID NO: 106300 - protein, 22 aa, Artificial Sequence
  Description of Artificial Sequence: Synthetic peptide
  Seed: MDPRMCSLMQGSTLPRRSGAAG
MDPRMYSLIQSSTMPRRSGAAG

SEQ ID NO: 106301 - protein, 22 aa, Artificial Sequence
  Description of Artificial Sequence: Synthetic peptide
  Seed: MDPRMCSLMQGSTLPRRSGAAG
MDPRMYSLIQSSTNPRRSGAAG

SEQ ID NO: 106302 - protein, 22 aa, Artificial Sequence
  Description of Artificial Sequence: Synthetic peptide
  Seed: MDPRMCSLMQGSTLPRRSGAAG
MDPRMYSLIQSSTSPRRSGAAG

SEQ ID NO: 106303 - protein, 22 aa, Artificial Sequence
  Description of Artificial Sequence: Synthetic peptide
  Seed: MDPRMCSLMQGSTLPRRSGAAG
MDPRMYSLIQSSTTPRRSGAAG

SEQ ID NO: 106304 - protein, 22 aa, Artificial Sequence
  Description of Artificial Sequence: Synthetic peptide
  Seed: MDPRMCSLMQGSTLPRRSGAAG
MDPRMYSLIQSSTVPRRSGAAG

SEQ ID NO: 106305 - protein, 22 aa, Artificial Sequence
  Description of Artificial Sequence: Synthetic peptide
  Seed: MDPRMCSLMQGSTLPRRSGAAG
MDPRMYSLIQTSTAPRRSGAAG

SEQ ID NO: 106306 - protein, 22 aa, Artificial Sequence
  Description of Artificial Sequence: Synthetic peptide
  Seed: MDPRMCSLMQGSTLPRRSGAAG
MDPRMYSLIQTSTGPRRSGAAG

SEQ ID NO: 106307 - protein, 22 aa, Artificial Sequence
  Description of Artificial Sequence: Synthetic peptide
  Seed: MDPRMCSLMQGSTLPRRSGAAG
MDPRMYSLIQTSTIPRRSGAAG

SEQ ID NO: 106308 - protein, 22 aa, Artificial Sequence
  Description of Artificial Sequence: Synthetic peptide
  Seed: MDPRMCSLMQGSTLPRRSGAAG
MDPRMYSLIQTSTLPRRSGAAG

SEQ ID NO: 106309 - protein, 22 aa, Artificial Sequence
  Description of Artificial Sequence: Synthetic peptide
  Seed: MDPRMCSLMQGSTLPRRSGAAG
MDPRMYSLIQTSTMPRRSGAAG

SEQ ID NO: 106310 - protein, 22 aa, Artificial Sequence
  Description of Artificial Sequence: Synthetic peptide
  Seed: MDPRMCSLMQGSTLPRRSGAAG
MDPRMYSLIQTSTNPRRSGAAG

SEQ ID NO: 106311 - protein, 22 aa, Artificial Sequence
  Description of Artificial Sequence: Synthetic peptide
  Seed: MDPRMCSLMQGSTLPRRSGAAG
MDPRMYSLIQTSTSPRRSGAAG

SEQ ID NO: 106312 - protein, 22 aa, Artificial Sequence
  Description of Artificial Sequence: Synthetic peptide
  Seed: MDPRMCSLMQGSTLPRRSGAAG
MDPRMYSLIQTSTTPRRSGAAG

SEQ ID NO: 106313 - protein, 22 aa, Artificial Sequence
  Description of Artificial Sequence: Synthetic peptide
  Seed: MDPRMCSLMQGSTLPRRSGAAG
MDPRMYSLIQTSTVPRRSGAAG

SEQ ID NO: 106314 - protein, 22 aa, Artificial Sequence
  Description of Artificial Sequence: Synthetic peptide
  Seed: MDPRMCSLMQGSTLPRRSGAAG
MDPRMYSLIQVSTAPRRSGAAG

SEQ ID NO: 106315 - protein, 22 aa, Artificial Sequence
  Description of Artificial Sequence: Synthetic peptide
  Seed: MDPRMCSLMQGSTLPRRSGAAG
MDPRMYSLIQVSTGPRRSGAAG

SEQ ID NO: 106316 - protein, 22 aa, Artificial Sequence
  Description of Artificial Sequence: Synthetic peptide
  Seed: MDPRMCSLMQGSTLPRRSGAAG
MDPRMYSLIQVSTIPRRSGAAG

SEQ ID NO: 106317 - protein, 22 aa, Artificial Sequence
  Description of Artificial Sequence: Synthetic peptide
  Seed: MDPRMCSLMQGSTLPRRSGAAG
MDPRMYSLIQVSTLPRRSGAAG

SEQ ID NO: 106318 - protein, 22 aa, Artificial Sequence
  Description of Artificial Sequence: Synthetic peptide
  Seed: MDPRMCSLMQGSTLPRRSGAAG
MDPRMYSLIQVSTMPRRSGAAG

SEQ ID NO: 106319 - protein, 22 aa, Artificial Sequence
  Description of Artificial Sequence: Synthetic peptide
  Seed: MDPRMCSLMQGSTLPRRSGAAG
MDPRMYSLIQVSTNPRRSGAAG

SEQ ID NO: 106320 - protein, 22 aa, Artificial Sequence
  Description of Artificial Sequence: Synthetic peptide
  Seed: MDPRMCSLMQGSTLPRRSGAAG
MDPRMYSLIQVSTSPRRSGAAG

SEQ ID NO: 106321 - protein, 22 aa, Artificial Sequence
  Description of Artificial Sequence: Synthetic peptide
  Seed: MDPRMCSLMQGSTLPRRSGAAG
MDPRMYSLIQVSTTPRRSGAAG

SEQ ID NO: 106322 - protein, 22 aa, Artificial Sequence
  Description of Artificial Sequence: Synthetic peptide
  Seed: MDPRMCSLMQGSTLPRRSGAAG
MDPRMYSLIQVSTVPRRSGAAG

SEQ ID NO: 106323 - protein, 22 aa, Artificial Sequence
  Description of Artificial Sequence: Synthetic peptide
  Seed: MDPRMCSLMQGSTLPRRSGAAG
MDPRMYSLLQASTAPRRSGAAG

SEQ ID NO: 106324 - protein, 22 aa, Artificial Sequence
  Description of Artificial Sequence: Synthetic peptide
  Seed: MDPRMCSLMQGSTLPRRSGAAG
MDPRMYSLLQASTCPRRSGAAG

SEQ ID NO: 106325 - protein, 22 aa, Artificial Sequence
  Description of Artificial Sequence: Synthetic peptide
  Seed: MDPRMCSLMQGSTLPRRSGAAG
MDPRMYSLLQASTDPRRSGAAG

SEQ ID NO: 106326 - protein, 22 aa, Artificial Sequence
  Description of Artificial Sequence: Synthetic peptide
  Seed: MDPRMCSLMQGSTLPRRSGAAG
MDPRMYSLLQASTEPRRSGAAG

SEQ ID NO: 106327 - protein, 22 aa, Artificial Sequence
  Description of Artificial Sequence: Synthetic peptide
  Seed: MDPRMCSLMQGSTLPRRSGAAG
MDPRMYSLLQASTFPRRSGAAG

SEQ ID NO: 106328 - protein, 22 aa, Artificial Sequence
  Description of Artificial Sequence: Synthetic peptide
  Seed: MDPRMCSLMQGSTLPRRSGAAG
MDPRMYSLLQASTGPRRSGAAG

SEQ ID NO: 106329 - protein, 22 aa, Artificial Sequence
  Description of Artificial Sequence: Synthetic peptide
  Seed: MDPRMCSLMQGSTLPRRSGAAG
MDPRMYSLLQASTHPRRSGAAG

SEQ ID NO: 106330 - protein, 22 aa, Artificial Sequence
  Description of Artificial Sequence: Synthetic peptide
  Seed: MDPRMCSLMQGSTLPRRSGAAG
MDPRMYSLLQASTIPRRSGAAG

SEQ ID NO: 106331 - protein, 22 aa, Artificial Sequence
  Description of Artificial Sequence: Synthetic peptide
  Seed: MDPRMCSLMQGSTLPRRSGAAG
MDPRMYSLLQASTLPRRSGAAG

SEQ ID NO: 106332 - protein, 22 aa, Artificial Sequence
  Description of Artificial Sequence: Synthetic peptide
  Seed: MDPRMCSLMQGSTLPRRSGAAG
MDPRMYSLLQASTMPRRSGAAG

SEQ ID NO: 106333 - protein, 22 aa, Artificial Sequence
  Description of Artificial Sequence: Synthetic peptide
  Seed: MDPRMCSLMQGSTLPRRSGAAG
MDPRMYSLLQASTNPRRSGAAG

SEQ ID NO: 106334 - protein, 22 aa, Artificial Sequence
  Description of Artificial Sequence: Synthetic peptide
  Seed: MDPRMCSLMQGSTLPRRSGAAG
MDPRMYSLLQASTPPRRSGAAG

SEQ ID NO: 106335 - protein, 22 aa, Artificial Sequence
  Description of Artificial Sequence: Synthetic peptide
  Seed: MDPRMCSLMQGSTLPRRSGAAG
MDPRMYSLLQASTQPRRSGAAG

SEQ ID NO: 106336 - protein, 22 aa, Artificial Sequence
  Description of Artificial Sequence: Synthetic peptide
  Seed: MDPRMCSLMQGSTLPRRSGAAG
MDPRMYSLLQASTSPRRSGAAG

SEQ ID NO: 106337 - protein, 22 aa, Artificial Sequence
  Description of Artificial Sequence: Synthetic peptide
  Seed: MDPRMCSLMQGSTLPRRSGAAG
MDPRMYSLLQASTTPRRSGAAG

SEQ ID NO: 106338 - protein, 22 aa, Artificial Sequence
  Description of Artificial Sequence: Synthetic peptide
  Seed: MDPRMCSLMQGSTLPRRSGAAG
MDPRMYSLLQASTVPRRSGAAG

SEQ ID NO: 106339 - protein, 22 aa, Artificial Sequence
  Description of Artificial Sequence: Synthetic peptide
  Seed: MDPRMCSLMQGSTLPRRSGAAG
MDPRMYSLLQGSTAPRRSGAAG

SEQ ID NO: 106340 - protein, 22 aa, Artificial Sequence
  Description of Artificial Sequence: Synthetic peptide
  Seed: MDPRMCSLMQGSTLPRRSGAAG
MDPRMYSLLQGSTCPRRSGAAG

SEQ ID NO: 106341 - protein, 22 aa, Artificial Sequence
  Description of Artificial Sequence: Synthetic peptide
  Seed: MDPRMCSLMQGSTLPRRSGAAG
MDPRMYSLLQGSTFPRRSGAAG

SEQ ID NO: 106342 - protein, 22 aa, Artificial Sequence
  Description of Artificial Sequence: Synthetic peptide
  Seed: MDPRMCSLMQGSTLPRRSGAAG
MDPRMYSLLQGSTGPRRSGAAG

SEQ ID NO: 106343 - protein, 22 aa, Artificial Sequence
  Description of Artificial Sequence: Synthetic peptide
  Seed: MDPRMCSLMQGSTLPRRSGAAG
MDPRMYSLLQGSTIPRRSGAAG

SEQ ID NO: 106344 - protein, 22 aa, Artificial Sequence
  Description of Artificial Sequence: Synthetic peptide
  Seed: MDPRMCSLMQGSTLPRRSGAAG
MDPRMYSLLQGSTLPRRSGAAG

SEQ ID NO: 106345 - protein, 22 aa, Artificial Sequence
  Description of Artificial Sequence: Synthetic peptide
  Seed: MDPRMCSLMQGSTLPRRSGAAG
MDPRMYSLLQGSTMPRRSGAAG

SEQ ID NO: 106346 - protein, 22 aa, Artificial Sequence
  Description of Artificial Sequence: Synthetic peptide
  Seed: MDPRMCSLMQGSTLPRRSGAAG
MDPRMYSLLQGSTNPRRSGAAG

SEQ ID NO: 106347 - protein, 22 aa, Artificial Sequence
  Description of Artificial Sequence: Synthetic peptide
  Seed: MDPRMCSLMQGSTLPRRSGAAG
MDPRMYSLLQGSTSPRRSGAAG

SEQ ID NO: 106348 - protein, 22 aa, Artificial Sequence
  Description of Artificial Sequence: Synthetic peptide
  Seed: MDPRMCSLMQGSTLPRRSGAAG
MDPRMYSLLQGSTTPRRSGAAG

SEQ ID NO: 106349 - protein, 22 aa, Artificial Sequence
  Description of Artificial Sequence: Synthetic peptide
  Seed: MDPRMCSLMQGSTLPRRSGAAG
MDPRMYSLLQGSTVPRRSGAAG

SEQ ID NO: 106350 - protein, 22 aa, Artificial Sequence
  Description of Artificial Sequence: Synthetic peptide
  Seed: MDPRMCSLMQGSTLPRRSGAAG
MDPRMYSLLQISTAPRRSGAAG

SEQ ID NO: 106351 - protein, 22 aa, Artificial Sequence
  Description of Artificial Sequence: Synthetic peptide
  Seed: MDPRMCSLMQGSTLPRRSGAAG
MDPRMYSLLQISTGPRRSGAAG

SEQ ID NO: 106352 - protein, 22 aa, Artificial Sequence
  Description of Artificial Sequence: Synthetic peptide
  Seed: MDPRMCSLMQGSTLPRRSGAAG
MDPRMYSLLQISTIPRRSGAAG

SEQ ID NO: 106353 - protein, 22 aa, Artificial Sequence
  Description of Artificial Sequence: Synthetic peptide
  Seed: MDPRMCSLMQGSTLPRRSGAAG
MDPRMYSLLQISTLPRRSGAAG

SEQ ID NO: 106354 - protein, 22 aa, Artificial Sequence
  Description of Artificial Sequence: Synthetic peptide
  Seed: MDPRMCSLMQGSTLPRRSGAAG
MDPRMYSLLQISTMPRRSGAAG

SEQ ID NO: 106355 - protein, 22 aa, Artificial Sequence
  Description of Artificial Sequence: Synthetic peptide
  Seed: MDPRMCSLMQGSTLPRRSGAAG
MDPRMYSLLQISTNPRRSGAAG

SEQ ID NO: 106356 - protein, 22 aa, Artificial Sequence
  Description of Artificial Sequence: Synthetic peptide
  Seed: MDPRMCSLMQGSTLPRRSGAAG
MDPRMYSLLQISTSPRRSGAAG

SEQ ID NO: 106357 - protein, 22 aa, Artificial Sequence
  Description of Artificial Sequence: Synthetic peptide
  Seed: MDPRMCSLMQGSTLPRRSGAAG
MDPRMYSLLQISTTPRRSGAAG

SEQ ID NO: 106358 - protein, 22 aa, Artificial Sequence
  Description of Artificial Sequence: Synthetic peptide
  Seed: MDPRMCSLMQGSTLPRRSGAAG
MDPRMYSLLQISTVPRRSGAAG

SEQ ID NO: 106359 - protein, 22 aa, Artificial Sequence
  Description of Artificial Sequence: Synthetic peptide
  Seed: MDPRMCSLMQGSTLPRRSGAAG
MDPRMYSLLQLSTAPRRSGAAG

SEQ ID NO: 106360 - protein, 22 aa, Artificial Sequence
  Description of Artificial Sequence: Synthetic peptide
  Seed: MDPRMCSLMQGSTLPRRSGAAG
MDPRMYSLLQLSTNPRRSGAAG

SEQ ID NO: 106361 - protein, 22 aa, Artificial Sequence
  Description of Artificial Sequence: Synthetic peptide
  Seed: MDPRMCSLMQGSTLPRRSGAAG
MDPRMYSLLQLSTSPRRSGAAG

SEQ ID NO: 106362 - protein, 22 aa, Artificial Sequence
  Description of Artificial Sequence: Synthetic peptide
  Seed: MDPRMCSLMQGSTLPRRSGAAG
MDPRMYSLLQMSTAPRRSGAAG

SEQ ID NO: 106363 - protein, 22 aa, Artificial Sequence
  Description of Artificial Sequence: Synthetic peptide
  Seed: MDPRMCSLMQGSTLPRRSGAAG
MDPRMYSLLQMSTNPRRSGAAG

SEQ ID NO: 106364 - protein, 22 aa, Artificial Sequence
  Description of Artificial Sequence: Synthetic peptide
  Seed: MDPRMCSLMQGSTLPRRSGAAG
MDPRMYSLLQMSTSPRRSGAAG

SEQ ID NO: 106365 - protein, 22 aa, Artificial Sequence
  Description of Artificial Sequence: Synthetic peptide
  Seed: MDPRMCSLMQGSTLPRRSGAAG
MDPRMYSLLQNSTAPRRSGAAG

SEQ ID NO: 106366 - protein, 22 aa, Artificial Sequence
  Description of Artificial Sequence: Synthetic peptide
  Seed: MDPRMCSLMQGSTLPRRSGAAG
MDPRMYSLLQNSTIPRRSGAAG

SEQ ID NO: 106367 - protein, 22 aa, Artificial Sequence
  Description of Artificial Sequence: Synthetic peptide
  Seed: MDPRMCSLMQGSTLPRRSGAAG
MDPRMYSLLQNSTLPRRSGAAG

SEQ ID NO: 106368 - protein, 22 aa, Artificial Sequence
  Description of Artificial Sequence: Synthetic peptide
  Seed: MDPRMCSLMQGSTLPRRSGAAG
MDPRMYSLLQNSTMPRRSGAAG

SEQ ID NO: 106369 - protein, 22 aa, Artificial Sequence
  Description of Artificial Sequence: Synthetic peptide
  Seed: MDPRMCSLMQGSTLPRRSGAAG
MDPRMYSLLQNSTNPRRSGAAG

SEQ ID NO: 106370 - protein, 22 aa, Artificial Sequence
  Description of Artificial Sequence: Synthetic peptide
  Seed: MDPRMCSLMQGSTLPRRSGAAG
MDPRMYSLLQNSTSPRRSGAAG

SEQ ID NO: 106371 - protein, 22 aa, Artificial Sequence
  Description of Artificial Sequence: Synthetic peptide
  Seed: MDPRMCSLMQGSTLPRRSGAAG
MDPRMYSLLQNSTTPRRSGAAG

SEQ ID NO: 106372 - protein, 22 aa, Artificial Sequence
  Description of Artificial Sequence: Synthetic peptide
  Seed: MDPRMCSLMQGSTLPRRSGAAG
MDPRMYSLLQNSTVPRRSGAAG

SEQ ID NO: 106373 - protein, 22 aa, Artificial Sequence
  Description of Artificial Sequence: Synthetic peptide
  Seed: MDPRMCSLMQGSTLPRRSGAAG
MDPRMYSLLQPSTAPRRSGAAG

SEQ ID NO: 106374 - protein, 22 aa, Artificial Sequence
  Description of Artificial Sequence: Synthetic peptide
  Seed: MDPRMCSLMQGSTLPRRSGAAG
MDPRMYSLLQPSTGPRRSGAAG

SEQ ID NO: 106375 - protein, 22 aa, Artificial Sequence
  Description of Artificial Sequence: Synthetic peptide
  Seed: MDPRMCSLMQGSTLPRRSGAAG
MDPRMYSLLQPSTHPRRSGAAG

SEQ ID NO: 106376 - protein, 22 aa, Artificial Sequence
  Description of Artificial Sequence: Synthetic peptide
  Seed: MDPRMCSLMQGSTLPRRSGAAG
MDPRMYSLLQPSTIPRRSGAAG

SEQ ID NO: 106377 - protein, 22 aa, Artificial Sequence
  Description of Artificial Sequence: Synthetic peptide
  Seed: MDPRMCSLMQGSTLPRRSGAAG
MDPRMYSLLQPSTLPRRSGAAG

SEQ ID NO: 106378 - protein, 22 aa, Artificial Sequence
  Description of Artificial Sequence: Synthetic peptide
  Seed: MDPRMCSLMQGSTLPRRSGAAG
MDPRMYSLLQPSTMPRRSGAAG

SEQ ID NO: 106379 - protein, 22 aa, Artificial Sequence
  Description of Artificial Sequence: Synthetic peptide
  Seed: MDPRMCSLMQGSTLPRRSGAAG
MDPRMYSLLQPSTNPRRSGAAG

SEQ ID NO: 106380 - protein, 22 aa, Artificial Sequence
  Description of Artificial Sequence: Synthetic peptide
  Seed: MDPRMCSLMQGSTLPRRSGAAG
MDPRMYSLLQPSTPPRRSGAAG

SEQ ID NO: 106381 - protein, 22 aa, Artificial Sequence
  Description of Artificial Sequence: Synthetic peptide
  Seed: MDPRMCSLMQGSTLPRRSGAAG
MDPRMYSLLQPSTQPRRSGAAG

SEQ ID NO: 106382 - protein, 22 aa, Artificial Sequence
  Description of Artificial Sequence: Synthetic peptide
  Seed: MDPRMCSLMQGSTLPRRSGAAG
MDPRMYSLLQPSTSPRRSGAAG

SEQ ID NO: 106383 - protein, 22 aa, Artificial Sequence
  Description of Artificial Sequence: Synthetic peptide
  Seed: MDPRMCSLMQGSTLPRRSGAAG
MDPRMYSLLQPSTTPRRSGAAG

SEQ ID NO: 106384 - protein, 22 aa, Artificial Sequence
  Description of Artificial Sequence: Synthetic peptide
  Seed: MDPRMCSLMQGSTLPRRSGAAG
MDPRMYSLLQPSTVPRRSGAAG

SEQ ID NO: 106385 - protein, 22 aa, Artificial Sequence
  Description of Artificial Sequence: Synthetic peptide
  Seed: MDPRMCSLMQGSTLPRRSGAAG
MDPRMYSLLQSSTAPRRSGAAG

SEQ ID NO: 106386 - protein, 22 aa, Artificial Sequence
  Description of Artificial Sequence: Synthetic peptide
  Seed: MDPRMCSLMQGSTLPRRSGAAG
MDPRMYSLLQSSTCPRRSGAAG

SEQ ID NO: 106387 - protein, 22 aa, Artificial Sequence
  Description of Artificial Sequence: Synthetic peptide
  Seed: MDPRMCSLMQGSTLPRRSGAAG
MDPRMYSLLQSSTGPRRSGAAG

SEQ ID NO: 106388 - protein, 22 aa, Artificial Sequence
  Description of Artificial Sequence: Synthetic peptide
  Seed: MDPRMCSLMQGSTLPRRSGAAG
MDPRMYSLLQSSTIPRRSGAAG

SEQ ID NO: 106389 - protein, 22 aa, Artificial Sequence
  Description of Artificial Sequence: Synthetic peptide
  Seed: MDPRMCSLMQGSTLPRRSGAAG
MDPRMYSLLQSSTLPRRSGAAG

SEQ ID NO: 106390 - protein, 22 aa, Artificial Sequence
  Description of Artificial Sequence: Synthetic peptide
  Seed: MDPRMCSLMQGSTLPRRSGAAG
MDPRMYSLLQSSTMPRRSGAAG

SEQ ID NO: 106391 - protein, 22 aa, Artificial Sequence
  Description of Artificial Sequence: Synthetic peptide
  Seed: MDPRMCSLMQGSTLPRRSGAAG
MDPRMYSLLQSSTNPRRSGAAG

SEQ ID NO: 106392 - protein, 22 aa, Artificial Sequence
  Description of Artificial Sequence: Synthetic peptide
  Seed: MDPRMCSLMQGSTLPRRSGAAG
MDPRMYSLLQSSTSPRRSGAAG

SEQ ID NO: 106393 - protein, 22 aa, Artificial Sequence
  Description of Artificial Sequence: Synthetic peptide
  Seed: MDPRMCSLMQGSTLPRRSGAAG
MDPRMYSLLQSSTTPRRSGAAG

SEQ ID NO: 106394 - protein, 22 aa, Artificial Sequence
  Description of Artificial Sequence: Synthetic peptide
  Seed: MDPRMCSLMQGSTLPRRSGAAG
MDPRMYSLLQSSTVPRRSGAAG

SEQ ID NO: 106395 - protein, 22 aa, Artificial Sequence
  Description of Artificial Sequence: Synthetic peptide
  Seed: MDPRMCSLMQGSTLPRRSGAAG
MDPRMYSLLQTSTAPRRSGAAG

SEQ ID NO: 106396 - protein, 22 aa, Artificial Sequence
  Description of Artificial Sequence: Synthetic peptide
  Seed: MDPRMCSLMQGSTLPRRSGAAG
MDPRMYSLLQTSTGPRRSGAAG

SEQ ID NO: 106397 - protein, 22 aa, Artificial Sequence
  Description of Artificial Sequence: Synthetic peptide
  Seed: MDPRMCSLMQGSTLPRRSGAAG
MDPRMYSLLQTSTIPRRSGAAG

SEQ ID NO: 106398 - protein, 22 aa, Artificial Sequence
  Description of Artificial Sequence: Synthetic peptide
  Seed: MDPRMCSLMQGSTLPRRSGAAG
MDPRMYSLLQTSTLPRRSGAAG

SEQ ID NO: 106399 - protein, 22 aa, Artificial Sequence
  Description of Artificial Sequence: Synthetic peptide
  Seed: MDPRMCSLMQGSTLPRRSGAAG
MDPRMYSLLQTSTMPRRSGAAG

SEQ ID NO: 106400 - protein, 22 aa, Artificial Sequence
  Description of Artificial Sequence: Synthetic peptide
  Seed: MDPRMCSLMQGSTLPRRSGAAG
MDPRMYSLLQTSTNPRRSGAAG

SEQ ID NO: 106401 - protein, 22 aa, Artificial Sequence
  Description of Artificial Sequence: Synthetic peptide
  Seed: MDPRMCSLMQGSTLPRRSGAAG
MDPRMYSLLQTSTSPRRSGAAG

SEQ ID NO: 106402 - protein, 22 aa, Artificial Sequence
  Description of Artificial Sequence: Synthetic peptide
  Seed: MDPRMCSLMQGSTLPRRSGAAG
MDPRMYSLLQTSTTPRRSGAAG

SEQ ID NO: 106403 - protein, 22 aa, Artificial Sequence
  Description of Artificial Sequence: Synthetic peptide
  Seed: MDPRMCSLMQGSTLPRRSGAAG
MDPRMYSLLQTSTVPRRSGAAG

SEQ ID NO: 106404 - protein, 22 aa, Artificial Sequence
  Description of Artificial Sequence: Synthetic peptide
  Seed: MDPRMCSLMQGSTLPRRSGAAG
MDPRMYSLLQVSTAPRRSGAAG

SEQ ID NO: 106405 - protein, 22 aa, Artificial Sequence
  Description of Artificial Sequence: Synthetic peptide
  Seed: MDPRMCSLMQGSTLPRRSGAAG
MDPRMYSLLQVSTGPRRSGAAG

SEQ ID NO: 106406 - protein, 22 aa, Artificial Sequence
  Description of Artificial Sequence: Synthetic peptide
  Seed: MDPRMCSLMQGSTLPRRSGAAG
MDPRMYSLLQVSTHPRRSGAAG

SEQ ID NO: 106407 - protein, 22 aa, Artificial Sequence
  Description of Artificial Sequence: Synthetic peptide
  Seed: MDPRMCSLMQGSTLPRRSGAAG
MDPRMYSLLQVSTIPRRSGAAG

SEQ ID NO: 106408 - protein, 22 aa, Artificial Sequence
  Description of Artificial Sequence: Synthetic peptide
  Seed: MDPRMCSLMQGSTLPRRSGAAG
MDPRMYSLLQVSTLPRRSGAAG

SEQ ID NO: 106409 - protein, 22 aa, Artificial Sequence
  Description of Artificial Sequence: Synthetic peptide
  Seed: MDPRMCSLMQGSTLPRRSGAAG
MDPRMYSLLQVSTMPRRSGAAG

SEQ ID NO: 106410 - protein, 22 aa, Artificial Sequence
  Description of Artificial Sequence: Synthetic peptide
  Seed: MDPRMCSLMQGSTLPRRSGAAG
MDPRMYSLLQVSTNPRRSGAAG

SEQ ID NO: 106411 - protein, 22 aa, Artificial Sequence
  Description of Artificial Sequence: Synthetic peptide
  Seed: MDPRMCSLMQGSTLPRRSGAAG
MDPRMYSLLQVSTQPRRSGAAG

SEQ ID NO: 106412 - protein, 22 aa, Artificial Sequence
  Description of Artificial Sequence: Synthetic peptide
  Seed: MDPRMCSLMQGSTLPRRSGAAG
MDPRMYSLLQVSTSPRRSGAAG

SEQ ID NO: 106413 - protein, 22 aa, Artificial Sequence
  Description of Artificial Sequence: Synthetic peptide
  Seed: MDPRMCSLMQGSTLPRRSGAAG
MDPRMYSLLQVSTTPRRSGAAG

SEQ ID NO: 106414 - protein, 22 aa, Artificial Sequence
  Description of Artificial Sequence: Synthetic peptide
  Seed: MDPRMCSLMQGSTLPRRSGAAG
MDPRMYSLLQVSTVPRRSGAAG

SEQ ID NO: 106415 - protein, 22 aa, Artificial Sequence
  Description of Artificial Sequence: Synthetic peptide
  Seed: MDPRMCSLMQGSTLPRRSGAAG
MDPRMYSLMQASTAPRRSGAAG

SEQ ID NO: 106416 - protein, 22 aa, Artificial Sequence
  Description of Artificial Sequence: Synthetic peptide
  Seed: MDPRMCSLMQGSTLPRRSGAAG
MDPRMYSLMQASTCPRRSGAAG

SEQ ID NO: 106417 - protein, 22 aa, Artificial Sequence
  Description of Artificial Sequence: Synthetic peptide
  Seed: MDPRMCSLMQGSTLPRRSGAAG
MDPRMYSLMQASTDPRRSGAAG

SEQ ID NO: 106418 - protein, 22 aa, Artificial Sequence
  Description of Artificial Sequence: Synthetic peptide
  Seed: MDPRMCSLMQGSTLPRRSGAAG
MDPRMYSLMQASTEPRRSGAAG

SEQ ID NO: 106419 - protein, 22 aa, Artificial Sequence
  Description of Artificial Sequence: Synthetic peptide
  Seed: MDPRMCSLMQGSTLPRRSGAAG
MDPRMYSLMQASTFPRRSGAAG

SEQ ID NO: 106420 - protein, 22 aa, Artificial Sequence
  Description of Artificial Sequence: Synthetic peptide
  Seed: MDPRMCSLMQGSTLPRRSGAAG
MDPRMYSLMQASTGPRRSGAAG

SEQ ID NO: 106421 - protein, 22 aa, Artificial Sequence
  Description of Artificial Sequence: Synthetic peptide
  Seed: MDPRMCSLMQGSTLPRRSGAAG
MDPRMYSLMQASTHPRRSGAAG

SEQ ID NO: 106422 - protein, 22 aa, Artificial Sequence
  Description of Artificial Sequence: Synthetic peptide
  Seed: MDPRMCSLMQGSTLPRRSGAAG
MDPRMYSLMQASTIPRRSGAAG

SEQ ID NO: 106423 - protein, 22 aa, Artificial Sequence
  Description of Artificial Sequence: Synthetic peptide
  Seed: MDPRMCSLMQGSTLPRRSGAAG
MDPRMYSLMQASTLPRRSGAAG

SEQ ID NO: 106424 - protein, 22 aa, Artificial Sequence
  Description of Artificial Sequence: Synthetic peptide
  Seed: MDPRMCSLMQGSTLPRRSGAAG
MDPRMYSLMQASTMPRRSGAAG

SEQ ID NO: 106425 - protein, 22 aa, Artificial Sequence
  Description of Artificial Sequence: Synthetic peptide
  Seed: MDPRMCSLMQGSTLPRRSGAAG
MDPRMYSLMQASTNPRRSGAAG

SEQ ID NO: 106426 - protein, 22 aa, Artificial Sequence
  Description of Artificial Sequence: Synthetic peptide
  Seed: MDPRMCSLMQGSTLPRRSGAAG
MDPRMYSLMQASTPPRRSGAAG

SEQ ID NO: 106427 - protein, 22 aa, Artificial Sequence
  Description of Artificial Sequence: Synthetic peptide
  Seed: MDPRMCSLMQGSTLPRRSGAAG
MDPRMYSLMQASTQPRRSGAAG

SEQ ID NO: 106428 - protein, 22 aa, Artificial Sequence
  Description of Artificial Sequence: Synthetic peptide
  Seed: MDPRMCSLMQGSTLPRRSGAAG
MDPRMYSLMQASTSPRRSGAAG

SEQ ID NO: 106429 - protein, 22 aa, Artificial Sequence
  Description of Artificial Sequence: Synthetic peptide
  Seed: MDPRMCSLMQGSTLPRRSGAAG
MDPRMYSLMQASTTPRRSGAAG

SEQ ID NO: 106430 - protein, 22 aa, Artificial Sequence
  Description of Artificial Sequence: Synthetic peptide
  Seed: MDPRMCSLMQGSTLPRRSGAAG
MDPRMYSLMQASTVPRRSGAAG

SEQ ID NO: 106431 - protein, 22 aa, Artificial Sequence
  Description of Artificial Sequence: Synthetic peptide
  Seed: MDPRMCSLMQGSTLPRRSGAAG
MDPRMYSLMQGSTAPRRSGAAG

SEQ ID NO: 106432 - protein, 22 aa, Artificial Sequence
  Description of Artificial Sequence: Synthetic peptide
  Seed: MDPRMCSLMQGSTLPRRSGAAG
MDPRMYSLMQGSTCPRRSGAAG

SEQ ID NO: 106433 - protein, 22 aa, Artificial Sequence
  Description of Artificial Sequence: Synthetic peptide
  Seed: MDPRMCSLMQGSTLPRRSGAAG
MDPRMYSLMQGSTFPRRSGAAG

SEQ ID NO: 106434 - protein, 22 aa, Artificial Sequence
  Description of Artificial Sequence: Synthetic peptide
  Seed: MDPRMCSLMQGSTLPRRSGAAG
MDPRMYSLMQGSTGPRRSGAAG

SEQ ID NO: 106435 - protein, 22 aa, Artificial Sequence
  Description of Artificial Sequence: Synthetic peptide
  Seed: MDPRMCSLMQGSTLPRRSGAAG
MDPRMYSLMQGSTIPRRSGAAG

SEQ ID NO: 106436 - protein, 22 aa, Artificial Sequence
  Description of Artificial Sequence: Synthetic peptide
  Seed: MDPRMCSLMQGSTLPRRSGAAG
MDPRMYSLMQGSTLPRRSGAAG

SEQ ID NO: 106437 - protein, 22 aa, Artificial Sequence
  Description of Artificial Sequence: Synthetic peptide
  Seed: MDPRMCSLMQGSTLPRRSGAAG
MDPRMYSLMQGSTMPRRSGAAG

SEQ ID NO: 106438 - protein, 22 aa, Artificial Sequence
  Description of Artificial Sequence: Synthetic peptide
  Seed: MDPRMCSLMQGSTLPRRSGAAG
MDPRMYSLMQGSTNPRRSGAAG

SEQ ID NO: 106439 - protein, 22 aa, Artificial Sequence
  Description of Artificial Sequence: Synthetic peptide
  Seed: MDPRMCSLMQGSTLPRRSGAAG
MDPRMYSLMQGSTSPRRSGAAG

SEQ ID NO: 106440 - protein, 22 aa, Artificial Sequence
  Description of Artificial Sequence: Synthetic peptide
  Seed: MDPRMCSLMQGSTLPRRSGAAG
MDPRMYSLMQGSTTPRRSGAAG

SEQ ID NO: 106441 - protein, 22 aa, Artificial Sequence
  Description of Artificial Sequence: Synthetic peptide
  Seed: MDPRMCSLMQGSTLPRRSGAAG
MDPRMYSLMQGSTVPRRSGAAG

SEQ ID NO: 106442 - protein, 22 aa, Artificial Sequence
  Description of Artificial Sequence: Synthetic peptide
  Seed: MDPRMCSLMQGSTLPRRSGAAG
MDPRMYSLMQISTAPRRSGAAG

SEQ ID NO: 106443 - protein, 22 aa, Artificial Sequence
  Description of Artificial Sequence: Synthetic peptide
  Seed: MDPRMCSLMQGSTLPRRSGAAG
MDPRMYSLMQISTGPRRSGAAG

SEQ ID NO: 106444 - protein, 22 aa, Artificial Sequence
  Description of Artificial Sequence: Synthetic peptide
  Seed: MDPRMCSLMQGSTLPRRSGAAG
MDPRMYSLMQISTHPRRSGAAG

SEQ ID NO: 106445 - protein, 22 aa, Artificial Sequence
  Description of Artificial Sequence: Synthetic peptide
  Seed: MDPRMCSLMQGSTLPRRSGAAG
MDPRMYSLMQISTIPRRSGAAG

SEQ ID NO: 106446 - protein, 22 aa, Artificial Sequence
  Description of Artificial Sequence: Synthetic peptide
  Seed: MDPRMCSLMQGSTLPRRSGAAG
MDPRMYSLMQISTLPRRSGAAG

SEQ ID NO: 106447 - protein, 22 aa, Artificial Sequence
  Description of Artificial Sequence: Synthetic peptide
  Seed: MDPRMCSLMQGSTLPRRSGAAG
MDPRMYSLMQISTMPRRSGAAG

SEQ ID NO: 106448 - protein, 22 aa, Artificial Sequence
  Description of Artificial Sequence: Synthetic peptide
  Seed: MDPRMCSLMQGSTLPRRSGAAG
MDPRMYSLMQISTNPRRSGAAG

SEQ ID NO: 106449 - protein, 22 aa, Artificial Sequence
  Description of Artificial Sequence: Synthetic peptide
  Seed: MDPRMCSLMQGSTLPRRSGAAG
MDPRMYSLMQISTSPRRSGAAG

SEQ ID NO: 106450 - protein, 22 aa, Artificial Sequence
  Description of Artificial Sequence: Synthetic peptide
  Seed: MDPRMCSLMQGSTLPRRSGAAG
MDPRMYSLMQISTTPRRSGAAG

SEQ ID NO: 106451 - protein, 22 aa, Artificial Sequence
  Description of Artificial Sequence: Synthetic peptide
  Seed: MDPRMCSLMQGSTLPRRSGAAG
MDPRMYSLMQISTVPRRSGAAG

SEQ ID NO: 106452 - protein, 22 aa, Artificial Sequence
  Description of Artificial Sequence: Synthetic peptide
  Seed: MDPRMCSLMQGSTLPRRSGAAG
MDPRMYSLMQLSTAPRRSGAAG

SEQ ID NO: 106453 - protein, 22 aa, Artificial Sequence
  Description of Artificial Sequence: Synthetic peptide
  Seed: MDPRMCSLMQGSTLPRRSGAAG
MDPRMYSLMQLSTNPRRSGAAG

SEQ ID NO: 106454 - protein, 22 aa, Artificial Sequence
  Description of Artificial Sequence: Synthetic peptide
  Seed: MDPRMCSLMQGSTLPRRSGAAG
MDPRMYSLMQLSTSPRRSGAAG

SEQ ID NO: 106455 - protein, 22 aa, Artificial Sequence
  Description of Artificial Sequence: Synthetic peptide
  Seed: MDPRMCSLMQGSTLPRRSGAAG
MDPRMYSLMQLSTTPRRSGAAG

SEQ ID NO: 106456 - protein, 22 aa, Artificial Sequence
  Description of Artificial Sequence: Synthetic peptide
  Seed: MDPRMCSLMQGSTLPRRSGAAG
MDPRMYSLMQLSTVPRRSGAAG

SEQ ID NO: 106457 - protein, 22 aa, Artificial Sequence
  Description of Artificial Sequence: Synthetic peptide
  Seed: MDPRMCSLMQGSTLPRRSGAAG
MDPRMYSLMQMSTAPRRSGAAG

SEQ ID NO: 106458 - protein, 22 aa, Artificial Sequence
  Description of Artificial Sequence: Synthetic peptide
  Seed: MDPRMCSLMQGSTLPRRSGAAG
MDPRMYSLMQMSTNPRRSGAAG

SEQ ID NO: 106459 - protein, 22 aa, Artificial Sequence
  Description of Artificial Sequence: Synthetic peptide
  Seed: MDPRMCSLMQGSTLPRRSGAAG
MDPRMYSLMQMSTSPRRSGAAG

SEQ ID NO: 106460 - protein, 22 aa, Artificial Sequence
  Description of Artificial Sequence: Synthetic peptide
  Seed: MDPRMCSLMQGSTLPRRSGAAG
MDPRMYSLMQNSTAPRRSGAAG

SEQ ID NO: 106461 - protein, 22 aa, Artificial Sequence
  Description of Artificial Sequence: Synthetic peptide
  Seed: MDPRMCSLMQGSTLPRRSGAAG
MDPRMYSLMQNSTIPRRSGAAG

SEQ ID NO: 106462 - protein, 22 aa, Artificial Sequence
  Description of Artificial Sequence: Synthetic peptide
  Seed: MDPRMCSLMQGSTLPRRSGAAG
MDPRMYSLMQNSTLPRRSGAAG

SEQ ID NO: 106463 - protein, 22 aa, Artificial Sequence
  Description of Artificial Sequence: Synthetic peptide
  Seed: MDPRMCSLMQGSTLPRRSGAAG
MDPRMYSLMQNSTMPRRSGAAG

SEQ ID NO: 106464 - protein, 22 aa, Artificial Sequence
  Description of Artificial Sequence: Synthetic peptide
  Seed: MDPRMCSLMQGSTLPRRSGAAG
MDPRMYSLMQNSTNPRRSGAAG

SEQ ID NO: 106465 - protein, 22 aa, Artificial Sequence
  Description of Artificial Sequence: Synthetic peptide
  Seed: MDPRMCSLMQGSTLPRRSGAAG
MDPRMYSLMQNSTSPRRSGAAG

SEQ ID NO: 106466 - protein, 22 aa, Artificial Sequence
  Description of Artificial Sequence: Synthetic peptide
  Seed: MDPRMCSLMQGSTLPRRSGAAG
MDPRMYSLMQNSTTPRRSGAAG

SEQ ID NO: 106467 - protein, 22 aa, Artificial Sequence
  Description of Artificial Sequence: Synthetic peptide
  Seed: MDPRMCSLMQGSTLPRRSGAAG
MDPRMYSLMQNSTVPRRSGAAG

SEQ ID NO: 106468 - protein, 22 aa, Artificial Sequence
  Description of Artificial Sequence: Synthetic peptide
  Seed: MDPRMCSLMQGSTLPRRSGAAG
MDPRMYSLMQPSTAPRRSGAAG

SEQ ID NO: 106469 - protein, 22 aa, Artificial Sequence
  Description of Artificial Sequence: Synthetic peptide
  Seed: MDPRMCSLMQGSTLPRRSGAAG
MDPRMYSLMQPSTGPRRSGAAG

SEQ ID NO: 106470 - protein, 22 aa, Artificial Sequence
  Description of Artificial Sequence: Synthetic peptide
  Seed: MDPRMCSLMQGSTLPRRSGAAG
MDPRMYSLMQPSTHPRRSGAAG

SEQ ID NO: 106471 - protein, 22 aa, Artificial Sequence
  Description of Artificial Sequence: Synthetic peptide
  Seed: MDPRMCSLMQGSTLPRRSGAAG
MDPRMYSLMQPSTIPRRSGAAG

SEQ ID NO: 106472 - protein, 22 aa, Artificial Sequence
  Description of Artificial Sequence: Synthetic peptide
  Seed: MDPRMCSLMQGSTLPRRSGAAG
MDPRMYSLMQPSTLPRRSGAAG

SEQ ID NO: 106473 - protein, 22 aa, Artificial Sequence
  Description of Artificial Sequence: Synthetic peptide
  Seed: MDPRMCSLMQGSTLPRRSGAAG
MDPRMYSLMQPSTMPRRSGAAG

SEQ ID NO: 106474 - protein, 22 aa, Artificial Sequence
  Description of Artificial Sequence: Synthetic peptide
  Seed: MDPRMCSLMQGSTLPRRSGAAG
MDPRMYSLMQPSTNPRRSGAAG

SEQ ID NO: 106475 - protein, 22 aa, Artificial Sequence
  Description of Artificial Sequence: Synthetic peptide
  Seed: MDPRMCSLMQGSTLPRRSGAAG
MDPRMYSLMQPSTPPRRSGAAG

SEQ ID NO: 106476 - protein, 22 aa, Artificial Sequence
  Description of Artificial Sequence: Synthetic peptide
  Seed: MDPRMCSLMQGSTLPRRSGAAG
MDPRMYSLMQPSTQPRRSGAAG

SEQ ID NO: 106477 - protein, 22 aa, Artificial Sequence
  Description of Artificial Sequence: Synthetic peptide
  Seed: MDPRMCSLMQGSTLPRRSGAAG
MDPRMYSLMQPSTSPRRSGAAG

SEQ ID NO: 106478 - protein, 22 aa, Artificial Sequence
  Description of Artificial Sequence: Synthetic peptide
  Seed: MDPRMCSLMQGSTLPRRSGAAG
MDPRMYSLMQPSTTPRRSGAAG

SEQ ID NO: 106479 - protein, 22 aa, Artificial Sequence
  Description of Artificial Sequence: Synthetic peptide
  Seed: MDPRMCSLMQGSTLPRRSGAAG
MDPRMYSLMQPSTVPRRSGAAG

SEQ ID NO: 106480 - protein, 22 aa, Artificial Sequence
  Description of Artificial Sequence: Synthetic peptide
  Seed: MDPRMCSLMQGSTLPRRSGAAG
MDPRMYSLMQSSTAPRRSGAAG

SEQ ID NO: 106481 - protein, 22 aa, Artificial Sequence
  Description of Artificial Sequence: Synthetic peptide
  Seed: MDPRMCSLMQGSTLPRRSGAAG
MDPRMYSLMQSSTGPRRSGAAG

SEQ ID NO: 106482 - protein, 22 aa, Artificial Sequence
  Description of Artificial Sequence: Synthetic peptide
  Seed: MDPRMCSLMQGSTLPRRSGAAG
MDPRMYSLMQSSTIPRRSGAAG

SEQ ID NO: 106483 - protein, 22 aa, Artificial Sequence
  Description of Artificial Sequence: Synthetic peptide
  Seed: MDPRMCSLMQGSTLPRRSGAAG
MDPRMYSLMQSSTLPRRSGAAG

SEQ ID NO: 106484 - protein, 22 aa, Artificial Sequence
  Description of Artificial Sequence: Synthetic peptide
  Seed: MDPRMCSLMQGSTLPRRSGAAG
MDPRMYSLMQSSTMPRRSGAAG

SEQ ID NO: 106485 - protein, 22 aa, Artificial Sequence
  Description of Artificial Sequence: Synthetic peptide
  Seed: MDPRMCSLMQGSTLPRRSGAAG
MDPRMYSLMQSSTNPRRSGAAG

SEQ ID NO: 106486 - protein, 22 aa, Artificial Sequence
  Description of Artificial Sequence: Synthetic peptide
  Seed: MDPRMCSLMQGSTLPRRSGAAG
MDPRMYSLMQSSTQPRRSGAAG

SEQ ID NO: 106487 - protein, 22 aa, Artificial Sequence
  Description of Artificial Sequence: Synthetic peptide
  Seed: MDPRMCSLMQGSTLPRRSGAAG
MDPRMYSLMQSSTSPRRSGAAG

SEQ ID NO: 106488 - protein, 22 aa, Artificial Sequence
  Description of Artificial Sequence: Synthetic peptide
  Seed: MDPRMCSLMQGSTLPRRSGAAG
MDPRMYSLMQSSTTPRRSGAAG

SEQ ID NO: 106489 - protein, 22 aa, Artificial Sequence
  Description of Artificial Sequence: Synthetic peptide
  Seed: MDPRMCSLMQGSTLPRRSGAAG
MDPRMYSLMQSSTVPRRSGAAG

SEQ ID NO: 106490 - protein, 22 aa, Artificial Sequence
  Description of Artificial Sequence: Synthetic peptide
  Seed: MDPRMCSLMQGSTLPRRSGAAG
MDPRMYSLMQTSTAPRRSGAAG

SEQ ID NO: 106491 - protein, 22 aa, Artificial Sequence
  Description of Artificial Sequence: Synthetic peptide
  Seed: MDPRMCSLMQGSTLPRRSGAAG
MDPRMYSLMQTSTGPRRSGAAG

SEQ ID NO: 106492 - protein, 22 aa, Artificial Sequence
  Description of Artificial Sequence: Synthetic peptide
  Seed: MDPRMCSLMQGSTLPRRSGAAG
MDPRMYSLMQTSTIPRRSGAAG

SEQ ID NO: 106493 - protein, 22 aa, Artificial Sequence
  Description of Artificial Sequence: Synthetic peptide
  Seed: MDPRMCSLMQGSTLPRRSGAAG
MDPRMYSLMQTSTLPRRSGAAG

SEQ ID NO: 106494 - protein, 22 aa, Artificial Sequence
  Description of Artificial Sequence: Synthetic peptide
  Seed: MDPRMCSLMQGSTLPRRSGAAG
MDPRMYSLMQTSTMPRRSGAAG

SEQ ID NO: 106495 - protein, 22 aa, Artificial Sequence
  Description of Artificial Sequence: Synthetic peptide
  Seed: MDPRMCSLMQGSTLPRRSGAAG
MDPRMYSLMQTSTNPRRSGAAG

SEQ ID NO: 106496 - protein, 22 aa, Artificial Sequence
  Description of Artificial Sequence: Synthetic peptide
  Seed: MDPRMCSLMQGSTLPRRSGAAG
MDPRMYSLMQTSTQPRRSGAAG

SEQ ID NO: 106497 - protein, 22 aa, Artificial Sequence
  Description of Artificial Sequence: Synthetic peptide
  Seed: MDPRMCSLMQGSTLPRRSGAAG
MDPRMYSLMQTSTSPRRSGAAG

SEQ ID NO: 106498 - protein, 22 aa, Artificial Sequence
  Description of Artificial Sequence: Synthetic peptide
  Seed: MDPRMCSLMQGSTLPRRSGAAG
MDPRMYSLMQTSTTPRRSGAAG

SEQ ID NO: 106499 - protein, 22 aa, Artificial Sequence
  Description of Artificial Sequence: Synthetic peptide
  Seed: MDPRMCSLMQGSTLPRRSGAAG
MDPRMYSLMQTSTVPRRSGAAG

SEQ ID NO: 106500 - protein, 22 aa, Artificial Sequence
  Description of Artificial Sequence: Synthetic peptide
  Seed: MDPRMCSLMQGSTLPRRSGAAG
MDPRMYSLMQVSTAPRRSGAAG

SEQ ID NO: 106501 - protein, 22 aa, Artificial Sequence
  Description of Artificial Sequence: Synthetic peptide
  Seed: MDPRMCSLMQGSTLPRRSGAAG
MDPRMYSLMQVSTGPRRSGAAG

SEQ ID NO: 106502 - protein, 22 aa, Artificial Sequence
  Description of Artificial Sequence: Synthetic peptide
  Seed: MDPRMCSLMQGSTLPRRSGAAG
MDPRMYSLMQVSTHPRRSGAAG

SEQ ID NO: 106503 - protein, 22 aa, Artificial Sequence
  Description of Artificial Sequence: Synthetic peptide
  Seed: MDPRMCSLMQGSTLPRRSGAAG
MDPRMYSLMQVSTIPRRSGAAG

SEQ ID NO: 106504 - protein, 22 aa, Artificial Sequence
  Description of Artificial Sequence: Synthetic peptide
  Seed: MDPRMCSLMQGSTLPRRSGAAG
MDPRMYSLMQVSTLPRRSGAAG

SEQ ID NO: 106505 - protein, 22 aa, Artificial Sequence
  Description of Artificial Sequence: Synthetic peptide
  Seed: MDPRMCSLMQGSTLPRRSGAAG
MDPRMYSLMQVSTMPRRSGAAG

SEQ ID NO: 106506 - protein, 22 aa, Artificial Sequence
  Description of Artificial Sequence: Synthetic peptide
  Seed: MDPRMCSLMQGSTLPRRSGAAG
MDPRMYSLMQVSTNPRRSGAAG

SEQ ID NO: 106507 - protein, 22 aa, Artificial Sequence
  Description of Artificial Sequence: Synthetic peptide
  Seed: MDPRMCSLMQGSTLPRRSGAAG
MDPRMYSLMQVSTQPRRSGAAG

SEQ ID NO: 106508 - protein, 22 aa, Artificial Sequence
  Description of Artificial Sequence: Synthetic peptide
  Seed: MDPRMCSLMQGSTLPRRSGAAG
MDPRMYSLMQVSTSPRRSGAAG

SEQ ID NO: 106509 - protein, 22 aa, Artificial Sequence
  Description of Artificial Sequence: Synthetic peptide
  Seed: MDPRMCSLMQGSTLPRRSGAAG
MDPRMYSLMQVSTTPRRSGAAG

SEQ ID NO: 106510 - protein, 22 aa, Artificial Sequence
  Description of Artificial Sequence: Synthetic peptide
  Seed: MDPRMCSLMQGSTLPRRSGAAG
MDPRMYSLMQVSTVPRRSGAAG

SEQ ID NO: 106511 - protein, 22 aa, Artificial Sequence
  Description of Artificial Sequence: Synthetic peptide
  Seed: MDPRMCSLMQGSTLPRRSGAAG
MDPRMYSLNQASTIPRRSGAAG

SEQ ID NO: 106512 - protein, 22 aa, Artificial Sequence
  Description of Artificial Sequence: Synthetic peptide
  Seed: MDPRMCSLMQGSTLPRRSGAAG
MDPRMYSLNQASTLPRRSGAAG

SEQ ID NO: 106513 - protein, 22 aa, Artificial Sequence
  Description of Artificial Sequence: Synthetic peptide
  Seed: MDPRMCSLMQGSTLPRRSGAAG
MDPRMYSLNQASTVPRRSGAAG

SEQ ID NO: 106514 - protein, 22 aa, Artificial Sequence
  Description of Artificial Sequence: Synthetic peptide
  Seed: MDPRMCSLMQGSTLPRRSGAAG
MDPRMYSLQQASTAPRRSGAAG

SEQ ID NO: 106515 - protein, 22 aa, Artificial Sequence
  Description of Artificial Sequence: Synthetic peptide
  Seed: MDPRMCSLMQGSTLPRRSGAAG
MDPRMYSLQQASTIPRRSGAAG

SEQ ID NO: 106516 - protein, 22 aa, Artificial Sequence
  Description of Artificial Sequence: Synthetic peptide
  Seed: MDPRMCSLMQGSTLPRRSGAAG
MDPRMYSLQQASTLPRRSGAAG

SEQ ID NO: 106517 - protein, 22 aa, Artificial Sequence
  Description of Artificial Sequence: Synthetic peptide
  Seed: MDPRMCSLMQGSTLPRRSGAAG
MDPRMYSLQQASTMPRRSGAAG

SEQ ID NO: 106518 - protein, 22 aa, Artificial Sequence
  Description of Artificial Sequence: Synthetic peptide
  Seed: MDPRMCSLMQGSTLPRRSGAAG
MDPRMYSLQQASTNPRRSGAAG

SEQ ID NO: 106519 - protein, 22 aa, Artificial Sequence
  Description of Artificial Sequence: Synthetic peptide
  Seed: MDPRMCSLMQGSTLPRRSGAAG
MDPRMYSLQQASTSPRRSGAAG

SEQ ID NO: 106520 - protein, 22 aa, Artificial Sequence
  Description of Artificial Sequence: Synthetic peptide
  Seed: MDPRMCSLMQGSTLPRRSGAAG
MDPRMYSLQQASTTPRRSGAAG

SEQ ID NO: 106521 - protein, 22 aa, Artificial Sequence
  Description of Artificial Sequence: Synthetic peptide
  Seed: MDPRMCSLMQGSTLPRRSGAAG
MDPRMYSLQQASTVPRRSGAAG

SEQ ID NO: 106522 - protein, 22 aa, Artificial Sequence
  Description of Artificial Sequence: Synthetic peptide
  Seed: MDPRMCSLMQGSTLPRRSGAAG
MDPRMYSLQQGSTAPRRSGAAG

SEQ ID NO: 106523 - protein, 22 aa, Artificial Sequence
  Description of Artificial Sequence: Synthetic peptide
  Seed: MDPRMCSLMQGSTLPRRSGAAG
MDPRMYSLQQGSTIPRRSGAAG

SEQ ID NO: 106524 - protein, 22 aa, Artificial Sequence
  Description of Artificial Sequence: Synthetic peptide
  Seed: MDPRMCSLMQGSTLPRRSGAAG
MDPRMYSLQQGSTLPRRSGAAG

SEQ ID NO: 106525 - protein, 22 aa, Artificial Sequence
  Description of Artificial Sequence: Synthetic peptide
  Seed: MDPRMCSLMQGSTLPRRSGAAG
MDPRMYSLQQGSTVPRRSGAAG

SEQ ID NO: 106526 - protein, 22 aa, Artificial Sequence
  Description of Artificial Sequence: Synthetic peptide
  Seed: MDPRMCSLMQGSTLPRRSGAAG
MDPRMYSLQQPSTIPRRSGAAG

SEQ ID NO: 106527 - protein, 22 aa, Artificial Sequence
  Description of Artificial Sequence: Synthetic peptide
  Seed: MDPRMCSLMQGSTLPRRSGAAG
MDPRMYSLQQPSTLPRRSGAAG

SEQ ID NO: 106528 - protein, 22 aa, Artificial Sequence
  Description of Artificial Sequence: Synthetic peptide
  Seed: MDPRMCSLMQGSTLPRRSGAAG
MDPRMYSLQQPSTVPRRSGAAG

SEQ ID NO: 106529 - protein, 22 aa, Artificial Sequence
  Description of Artificial Sequence: Synthetic peptide
  Seed: MDPRMCSLMQGSTLPRRSGAAG
MDPRMYSLQQSSTAPRRSGAAG

SEQ ID NO: 106530 - protein, 22 aa, Artificial Sequence
  Description of Artificial Sequence: Synthetic peptide
  Seed: MDPRMCSLMQGSTLPRRSGAAG
MDPRMYSLQQSSTIPRRSGAAG

SEQ ID NO: 106531 - protein, 22 aa, Artificial Sequence
  Description of Artificial Sequence: Synthetic peptide
  Seed: MDPRMCSLMQGSTLPRRSGAAG
MDPRMYSLQQSSTLPRRSGAAG

SEQ ID NO: 106532 - protein, 22 aa, Artificial Sequence
  Description of Artificial Sequence: Synthetic peptide
  Seed: MDPRMCSLMQGSTLPRRSGAAG
MDPRMYSLQQSSTVPRRSGAAG

SEQ ID NO: 106533 - protein, 22 aa, Artificial Sequence
  Description of Artificial Sequence: Synthetic peptide
  Seed: MDPRMCSLMQGSTLPRRSGAAG
MDPRMYSLQQVSTAPRRSGAAG

SEQ ID NO: 106534 - protein, 22 aa, Artificial Sequence
  Description of Artificial Sequence: Synthetic peptide
  Seed: MDPRMCSLMQGSTLPRRSGAAG
MDPRMYSLSQASTAPRRSGAAG

SEQ ID NO: 106535 - protein, 22 aa, Artificial Sequence
  Description of Artificial Sequence: Synthetic peptide
  Seed: MDPRMCSLMQGSTLPRRSGAAG
MDPRMYSLSQASTIPRRSGAAG

SEQ ID NO: 106536 - protein, 22 aa, Artificial Sequence
  Description of Artificial Sequence: Synthetic peptide
  Seed: MDPRMCSLMQGSTLPRRSGAAG
MDPRMYSLSQASTLPRRSGAAG

SEQ ID NO: 106537 - protein, 22 aa, Artificial Sequence
  Description of Artificial Sequence: Synthetic peptide
  Seed: MDPRMCSLMQGSTLPRRSGAAG
MDPRMYSLSQASTVPRRSGAAG

SEQ ID NO: 106538 - protein, 22 aa, Artificial Sequence
  Description of Artificial Sequence: Synthetic peptide
  Seed: MDPRMCSLMQGSTLPRRSGAAG
MDPRMYSLSQGSTIPRRSGAAG

SEQ ID NO: 106539 - protein, 22 aa, Artificial Sequence
  Description of Artificial Sequence: Synthetic peptide
  Seed: MDPRMCSLMQGSTLPRRSGAAG
MDPRMYSLSQGSTLPRRSGAAG

SEQ ID NO: 106540 - protein, 22 aa, Artificial Sequence
  Description of Artificial Sequence: Synthetic peptide
  Seed: MDPRMCSLMQGSTLPRRSGAAG
MDPRMYSLSQGSTVPRRSGAAG

SEQ ID NO: 106541 - protein, 22 aa, Artificial Sequence
  Description of Artificial Sequence: Synthetic peptide
  Seed: MDPRMCSLMQGSTLPRRSGAAG
MDPRMYSLSQSSTVPRRSGAAG

SEQ ID NO: 106542 - protein, 22 aa, Artificial Sequence
  Description of Artificial Sequence: Synthetic peptide
  Seed: MDPRMCSLMQGSTLPRRSGAAG
MDPRMYSLTQASTIPRRSGAAG

SEQ ID NO: 106543 - protein, 22 aa, Artificial Sequence
  Description of Artificial Sequence: Synthetic peptide
  Seed: MDPRMCSLMQGSTLPRRSGAAG
MDPRMYSLTQASTLPRRSGAAG

SEQ ID NO: 106544 - protein, 22 aa, Artificial Sequence
  Description of Artificial Sequence: Synthetic peptide
  Seed: MDPRMCSLMQGSTLPRRSGAAG
MDPRMYSLTQASTVPRRSGAAG

SEQ ID NO: 106545 - protein, 22 aa, Artificial Sequence
  Description of Artificial Sequence: Synthetic peptide
  Seed: MDPRMCSLMQGSTLPRRSGAAG
MDPRMYSLVQASTAPRRSGAAG

SEQ ID NO: 106546 - protein, 22 aa, Artificial Sequence
  Description of Artificial Sequence: Synthetic peptide
  Seed: MDPRMCSLMQGSTLPRRSGAAG
MDPRMYSLVQASTGPRRSGAAG

SEQ ID NO: 106547 - protein, 22 aa, Artificial Sequence
  Description of Artificial Sequence: Synthetic peptide
  Seed: MDPRMCSLMQGSTLPRRSGAAG
MDPRMYSLVQASTIPRRSGAAG

SEQ ID NO: 106548 - protein, 22 aa, Artificial Sequence
  Description of Artificial Sequence: Synthetic peptide
  Seed: MDPRMCSLMQGSTLPRRSGAAG
MDPRMYSLVQASTLPRRSGAAG

SEQ ID NO: 106549 - protein, 22 aa, Artificial Sequence
  Description of Artificial Sequence: Synthetic peptide
  Seed: MDPRMCSLMQGSTLPRRSGAAG
MDPRMYSLVQASTMPRRSGAAG

SEQ ID NO: 106550 - protein, 22 aa, Artificial Sequence
  Description of Artificial Sequence: Synthetic peptide
  Seed: MDPRMCSLMQGSTLPRRSGAAG
MDPRMYSLVQASTNPRRSGAAG

SEQ ID NO: 106551 - protein, 22 aa, Artificial Sequence
  Description of Artificial Sequence: Synthetic peptide
  Seed: MDPRMCSLMQGSTLPRRSGAAG
MDPRMYSLVQASTSPRRSGAAG

SEQ ID NO: 106552 - protein, 22 aa, Artificial Sequence
  Description of Artificial Sequence: Synthetic peptide
  Seed: MDPRMCSLMQGSTLPRRSGAAG
MDPRMYSLVQASTTPRRSGAAG

SEQ ID NO: 106553 - protein, 22 aa, Artificial Sequence
  Description of Artificial Sequence: Synthetic peptide
  Seed: MDPRMCSLMQGSTLPRRSGAAG
MDPRMYSLVQASTVPRRSGAAG

SEQ ID NO: 106554 - protein, 22 aa, Artificial Sequence
  Description of Artificial Sequence: Synthetic peptide
  Seed: MDPRMCSLMQGSTLPRRSGAAG
MDPRMYSLVQGSTAPRRSGAAG

SEQ ID NO: 106555 - protein, 22 aa, Artificial Sequence
  Description of Artificial Sequence: Synthetic peptide
  Seed: MDPRMCSLMQGSTLPRRSGAAG
MDPRMYSLVQGSTIPRRSGAAG

SEQ ID NO: 106556 - protein, 22 aa, Artificial Sequence
  Description of Artificial Sequence: Synthetic peptide
  Seed: MDPRMCSLMQGSTLPRRSGAAG
MDPRMYSLVQGSTLPRRSGAAG

SEQ ID NO: 106557 - protein, 22 aa, Artificial Sequence
  Description of Artificial Sequence: Synthetic peptide
  Seed: MDPRMCSLMQGSTLPRRSGAAG
MDPRMYSLVQGSTMPRRSGAAG

SEQ ID NO: 106558 - protein, 22 aa, Artificial Sequence
  Description of Artificial Sequence: Synthetic peptide
  Seed: MDPRMCSLMQGSTLPRRSGAAG
MDPRMYSLVQGSTVPRRSGAAG

SEQ ID NO: 106559 - protein, 22 aa, Artificial Sequence
  Description of Artificial Sequence: Synthetic peptide
  Seed: MDPRMCSLMQGSTLPRRSGAAG
MDPRMYSLVQISTAPRRSGAAG

SEQ ID NO: 106560 - protein, 22 aa, Artificial Sequence
  Description of Artificial Sequence: Synthetic peptide
  Seed: MDPRMCSLMQGSTLPRRSGAAG
MDPRMYSLVQISTNPRRSGAAG

SEQ ID NO: 106561 - protein, 22 aa, Artificial Sequence
  Description of Artificial Sequence: Synthetic peptide
  Seed: MDPRMCSLMQGSTLPRRSGAAG
MDPRMYSLVQISTSPRRSGAAG

SEQ ID NO: 106562 - protein, 22 aa, Artificial Sequence
  Description of Artificial Sequence: Synthetic peptide
  Seed: MDPRMCSLMQGSTLPRRSGAAG
MDPRMYSLVQPSTAPRRSGAAG

SEQ ID NO: 106563 - protein, 22 aa, Artificial Sequence
  Description of Artificial Sequence: Synthetic peptide
  Seed: MDPRMCSLMQGSTLPRRSGAAG
MDPRMYSLVQPSTIPRRSGAAG

SEQ ID NO: 106564 - protein, 22 aa, Artificial Sequence
  Description of Artificial Sequence: Synthetic peptide
  Seed: MDPRMCSLMQGSTLPRRSGAAG
MDPRMYSLVQPSTLPRRSGAAG

SEQ ID NO: 106565 - protein, 22 aa, Artificial Sequence
  Description of Artificial Sequence: Synthetic peptide
  Seed: MDPRMCSLMQGSTLPRRSGAAG
MDPRMYSLVQPSTNPRRSGAAG

SEQ ID NO: 106566 - protein, 22 aa, Artificial Sequence
  Description of Artificial Sequence: Synthetic peptide
  Seed: MDPRMCSLMQGSTLPRRSGAAG
MDPRMYSLVQPSTSPRRSGAAG

SEQ ID NO: 106567 - protein, 22 aa, Artificial Sequence
  Description of Artificial Sequence: Synthetic peptide
  Seed: MDPRMCSLMQGSTLPRRSGAAG
MDPRMYSLVQPSTTPRRSGAAG

SEQ ID NO: 106568 - protein, 22 aa, Artificial Sequence
  Description of Artificial Sequence: Synthetic peptide
  Seed: MDPRMCSLMQGSTLPRRSGAAG
MDPRMYSLVQPSTVPRRSGAAG

SEQ ID NO: 106569 - protein, 22 aa, Artificial Sequence
  Description of Artificial Sequence: Synthetic peptide
  Seed: MDPRMCSLMQGSTLPRRSGAAG
MDPRMYSLVQSSTAPRRSGAAG

SEQ ID NO: 106570 - protein, 22 aa, Artificial Sequence
  Description of Artificial Sequence: Synthetic peptide
  Seed: MDPRMCSLMQGSTLPRRSGAAG
MDPRMYSLVQSSTIPRRSGAAG

SEQ ID NO: 106571 - protein, 22 aa, Artificial Sequence
  Description of Artificial Sequence: Synthetic peptide
  Seed: MDPRMCSLMQGSTLPRRSGAAG
MDPRMYSLVQSSTLPRRSGAAG

SEQ ID NO: 106572 - protein, 22 aa, Artificial Sequence
  Description of Artificial Sequence: Synthetic peptide
  Seed: MDPRMCSLMQGSTLPRRSGAAG
MDPRMYSLVQSSTNPRRSGAAG

SEQ ID NO: 106573 - protein, 22 aa, Artificial Sequence
  Description of Artificial Sequence: Synthetic peptide
  Seed: MDPRMCSLMQGSTLPRRSGAAG
MDPRMYSLVQSSTSPRRSGAAG

SEQ ID NO: 106574 - protein, 22 aa, Artificial Sequence
  Description of Artificial Sequence: Synthetic peptide
  Seed: MDPRMCSLMQGSTLPRRSGAAG
MDPRMYSLVQSSTVPRRSGAAG

SEQ ID NO: 106575 - protein, 22 aa, Artificial Sequence
  Description of Artificial Sequence: Synthetic peptide
  Seed: MDPRMCSLMQGSTLPRRSGAAG
MDPRMYSLVQTSTAPRRSGAAG

SEQ ID NO: 106576 - protein, 22 aa, Artificial Sequence
  Description of Artificial Sequence: Synthetic peptide
  Seed: MDPRMCSLMQGSTLPRRSGAAG
MDPRMYSLVQTSTNPRRSGAAG

SEQ ID NO: 106577 - protein, 22 aa, Artificial Sequence
  Description of Artificial Sequence: Synthetic peptide
  Seed: MDPRMCSLMQGSTLPRRSGAAG
MDPRMYSLVQTSTSPRRSGAAG

SEQ ID NO: 106578 - protein, 22 aa, Artificial Sequence
  Description of Artificial Sequence: Synthetic peptide
  Seed: MDPRMCSLMQGSTLPRRSGAAG
MDPRMYSLVQTSTTPRRSGAAG

SEQ ID NO: 106579 - protein, 22 aa, Artificial Sequence
  Description of Artificial Sequence: Synthetic peptide
  Seed: MDPRMCSLMQGSTLPRRSGAAG
MDPRMYSLVQTSTVPRRSGAAG

SEQ ID NO: 106580 - protein, 22 aa, Artificial Sequence
  Description of Artificial Sequence: Synthetic peptide
  Seed: MDPRMCSLMQGSTLPRRSGAAG
MDPRMYSLVQVSTAPRRSGAAG

SEQ ID NO: 106581 - protein, 22 aa, Artificial Sequence
  Description of Artificial Sequence: Synthetic peptide
  Seed: MDPRMCSLMQGSTLPRRSGAAG
MDPRMYSLVQVSTNPRRSGAAG

SEQ ID NO: 106582 - protein, 22 aa, Artificial Sequence
  Description of Artificial Sequence: Synthetic peptide
  Seed: MDPRMCSLMQGSTLPRRSGAAG
MDPRMYSLVQVSTSPRRSGAAG

SEQ ID NO: 106583 - protein, 22 aa, Artificial Sequence
  Description of Artificial Sequence: Synthetic peptide
  Seed: MDPRMCSLMQGSTLPRRSGAAG
MDPRMYSLVQVSTTPRRSGAAG

SEQ ID NO: 106584 - protein, 22 aa, Artificial Sequence
  Description of Artificial Sequence: Synthetic peptide
  Seed: MDPRMCSLMQGSTLPRRSGAAG
MDPRMYSLVQVSTVPRRSGAAG

SEQ ID NO: 106585 - protein, 23 aa, Artificial Sequence
  Description of Artificial Sequence: Synthetic peptide
  Seed: MDPRMCSLMQGSTLPRRSGAAGA
MDPRMFSLAQASTAPRRSGAAGA

SEQ ID NO: 106586 - protein, 23 aa, Artificial Sequence
  Description of Artificial Sequence: Synthetic peptide
  Seed: MDPRMCSLMQGSTLPRRSGAAGA
MDPRMFSLAQASTCPRRSGAAGA

SEQ ID NO: 106587 - protein, 23 aa, Artificial Sequence
  Description of Artificial Sequence: Synthetic peptide
  Seed: MDPRMCSLMQGSTLPRRSGAAGA
MDPRMFSLAQASTFPRRSGAAGA

SEQ ID NO: 106588 - protein, 23 aa, Artificial Sequence
  Description of Artificial Sequence: Synthetic peptide
  Seed: MDPRMCSLMQGSTLPRRSGAAGA
MDPRMFSLAQASTGPRRSGAAGA

SEQ ID NO: 106589 - protein, 23 aa, Artificial Sequence
  Description of Artificial Sequence: Synthetic peptide
  Seed: MDPRMCSLMQGSTLPRRSGAAGA
MDPRMFSLAQASTHPRRSGAAGA

SEQ ID NO: 106590 - protein, 23 aa, Artificial Sequence
  Description of Artificial Sequence: Synthetic peptide
  Seed: MDPRMCSLMQGSTLPRRSGAAGA
MDPRMFSLAQASTIPRRSGAAGA

SEQ ID NO: 106591 - protein, 23 aa, Artificial Sequence
  Description of Artificial Sequence: Synthetic peptide
  Seed: MDPRMCSLMQGSTLPRRSGAAGA
MDPRMFSLAQASTLPRRSGAAGA

SEQ ID NO: 106592 - protein, 23 aa, Artificial Sequence
  Description of Artificial Sequence: Synthetic peptide
  Seed: MDPRMCSLMQGSTLPRRSGAAGA
MDPRMFSLAQASTMPRRSGAAGA

SEQ ID NO: 106593 - protein, 23 aa, Artificial Sequence
  Description of Artificial Sequence: Synthetic peptide
  Seed: MDPRMCSLMQGSTLPRRSGAAGA
MDPRMFSLAQASTNPRRSGAAGA

SEQ ID NO: 106594 - protein, 23 aa, Artificial Sequence
  Description of Artificial Sequence: Synthetic peptide
  Seed: MDPRMCSLMQGSTLPRRSGAAGA
MDPRMFSLAQASTQPRRSGAAGA

SEQ ID NO: 106595 - protein, 23 aa, Artificial Sequence
  Description of Artificial Sequence: Synthetic peptide
  Seed: MDPRMCSLMQGSTLPRRSGAAGA
MDPRMFSLAQASTSPRRSGAAGA

SEQ ID NO: 106596 - protein, 23 aa, Artificial Sequence
  Description of Artificial Sequence: Synthetic peptide
  Seed: MDPRMCSLMQGSTLPRRSGAAGA
MDPRMFSLAQASTTPRRSGAAGA

SEQ ID NO: 106597 - protein, 23 aa, Artificial Sequence
  Description of Artificial Sequence: Synthetic peptide
  Seed: MDPRMCSLMQGSTLPRRSGAAGA
MDPRMFSLAQASTVPRRSGAAGA

SEQ ID NO: 106598 - protein, 23 aa, Artificial Sequence
  Description of Artificial Sequence: Synthetic peptide
  Seed: MDPRMCSLMQGSTLPRRSGAAGA
MDPRMFSLAQGSTAPRRSGAAGA

SEQ ID NO: 106599 - protein, 23 aa, Artificial Sequence
  Description of Artificial Sequence: Synthetic peptide
  Seed: MDPRMCSLMQGSTLPRRSGAAGA
MDPRMFSLAQGSTIPRRSGAAGA

SEQ ID NO: 106600 - protein, 23 aa, Artificial Sequence
  Description of Artificial Sequence: Synthetic peptide
  Seed: MDPRMCSLMQGSTLPRRSGAAGA
MDPRMFSLAQGSTLPRRSGAAGA

SEQ ID NO: 106601 - protein, 23 aa, Artificial Sequence
  Description of Artificial Sequence: Synthetic peptide
  Seed: MDPRMCSLMQGSTLPRRSGAAGA
MDPRMFSLAQGSTMPRRSGAAGA

SEQ ID NO: 106602 - protein, 23 aa, Artificial Sequence
  Description of Artificial Sequence: Synthetic peptide
  Seed: MDPRMCSLMQGSTLPRRSGAAGA
MDPRMFSLAQGSTSPRRSGAAGA

SEQ ID NO: 106603 - protein, 23 aa, Artificial Sequence
  Description of Artificial Sequence: Synthetic peptide
  Seed: MDPRMCSLMQGSTLPRRSGAAGA
MDPRMFSLAQGSTTPRRSGAAGA

SEQ ID NO: 106604 - protein, 23 aa, Artificial Sequence
  Description of Artificial Sequence: Synthetic peptide
  Seed: MDPRMCSLMQGSTLPRRSGAAGA
MDPRMFSLAQGSTVPRRSGAAGA

SEQ ID NO: 106605 - protein, 23 aa, Artificial Sequence
  Description of Artificial Sequence: Synthetic peptide
  Seed: MDPRMCSLMQGSTLPRRSGAAGA
MDPRMFSLAQISTAPRRSGAAGA

SEQ ID NO: 106606 - protein, 23 aa, Artificial Sequence
  Description of Artificial Sequence: Synthetic peptide
  Seed: MDPRMCSLMQGSTLPRRSGAAGA
MDPRMFSLAQISTNPRRSGAAGA

SEQ ID NO: 106607 - protein, 23 aa, Artificial Sequence
  Description of Artificial Sequence: Synthetic peptide
  Seed: MDPRMCSLMQGSTLPRRSGAAGA
MDPRMFSLAQISTSPRRSGAAGA

SEQ ID NO: 106608 - protein, 23 aa, Artificial Sequence
  Description of Artificial Sequence: Synthetic peptide
  Seed: MDPRMCSLMQGSTLPRRSGAAGA
MDPRMFSLAQISTTPRRSGAAGA

SEQ ID NO: 106609 - protein, 23 aa, Artificial Sequence
  Description of Artificial Sequence: Synthetic peptide
  Seed: MDPRMCSLMQGSTLPRRSGAAGA
MDPRMFSLAQISTVPRRSGAAGA

SEQ ID NO: 106610 - protein, 23 aa, Artificial Sequence
  Description of Artificial Sequence: Synthetic peptide
  Seed: MDPRMCSLMQGSTLPRRSGAAGA
MDPRMFSLAQLSTAPRRSGAAGA

SEQ ID NO: 106611 - protein, 23 aa, Artificial Sequence
  Description of Artificial Sequence: Synthetic peptide
  Seed: MDPRMCSLMQGSTLPRRSGAAGA
MDPRMFSLAQNSTAPRRSGAAGA

SEQ ID NO: 106612 - protein, 23 aa, Artificial Sequence
  Description of Artificial Sequence: Synthetic peptide
  Seed: MDPRMCSLMQGSTLPRRSGAAGA
MDPRMFSLAQNSTIPRRSGAAGA

SEQ ID NO: 106613 - protein, 23 aa, Artificial Sequence
  Description of Artificial Sequence: Synthetic peptide
  Seed: MDPRMCSLMQGSTLPRRSGAAGA
MDPRMFSLAQNSTLPRRSGAAGA

SEQ ID NO: 106614 - protein, 23 aa, Artificial Sequence
  Description of Artificial Sequence: Synthetic peptide
  Seed: MDPRMCSLMQGSTLPRRSGAAGA
MDPRMFSLAQNSTNPRRSGAAGA

SEQ ID NO: 106615 - protein, 23 aa, Artificial Sequence
  Description of Artificial Sequence: Synthetic peptide
  Seed: MDPRMCSLMQGSTLPRRSGAAGA
MDPRMFSLAQNSTVPRRSGAAGA

SEQ ID NO: 106616 - protein, 23 aa, Artificial Sequence
  Description of Artificial Sequence: Synthetic peptide
  Seed: MDPRMCSLMQGSTLPRRSGAAGA
MDPRMFSLAQPSTAPRRSGAAGA

SEQ ID NO: 106617 - protein, 23 aa, Artificial Sequence
  Description of Artificial Sequence: Synthetic peptide
  Seed: MDPRMCSLMQGSTLPRRSGAAGA
MDPRMFSLAQPSTIPRRSGAAGA

SEQ ID NO: 106618 - protein, 23 aa, Artificial Sequence
  Description of Artificial Sequence: Synthetic peptide
  Seed: MDPRMCSLMQGSTLPRRSGAAGA
MDPRMFSLAQPSTLPRRSGAAGA

SEQ ID NO: 106619 - protein, 23 aa, Artificial Sequence
  Description of Artificial Sequence: Synthetic peptide
  Seed: MDPRMCSLMQGSTLPRRSGAAGA
MDPRMFSLAQPSTMPRRSGAAGA

SEQ ID NO: 106620 - protein, 23 aa, Artificial Sequence
  Description of Artificial Sequence: Synthetic peptide
  Seed: MDPRMCSLMQGSTLPRRSGAAGA
MDPRMFSLAQPSTNPRRSGAAGA

SEQ ID NO: 106621 - protein, 23 aa, Artificial Sequence
  Description of Artificial Sequence: Synthetic peptide
  Seed: MDPRMCSLMQGSTLPRRSGAAGA
MDPRMFSLAQPSTSPRRSGAAGA

SEQ ID NO: 106622 - protein, 23 aa, Artificial Sequence
  Description of Artificial Sequence: Synthetic peptide
  Seed: MDPRMCSLMQGSTLPRRSGAAGA
MDPRMFSLAQPSTTPRRSGAAGA

SEQ ID NO: 106623 - protein, 23 aa, Artificial Sequence
  Description of Artificial Sequence: Synthetic peptide
  Seed: MDPRMCSLMQGSTLPRRSGAAGA
MDPRMFSLAQPSTVPRRSGAAGA

SEQ ID NO: 106624 - protein, 23 aa, Artificial Sequence
  Description of Artificial Sequence: Synthetic peptide
  Seed: MDPRMCSLMQGSTLPRRSGAAGA
MDPRMFSLAQSSTAPRRSGAAGA

SEQ ID NO: 106625 - protein, 23 aa, Artificial Sequence
  Description of Artificial Sequence: Synthetic peptide
  Seed: MDPRMCSLMQGSTLPRRSGAAGA
MDPRMFSLAQSSTIPRRSGAAGA

SEQ ID NO: 106626 - protein, 23 aa, Artificial Sequence
  Description of Artificial Sequence: Synthetic peptide
  Seed: MDPRMCSLMQGSTLPRRSGAAGA
MDPRMFSLAQSSTLPRRSGAAGA

SEQ ID NO: 106627 - protein, 23 aa, Artificial Sequence
  Description of Artificial Sequence: Synthetic peptide
  Seed: MDPRMCSLMQGSTLPRRSGAAGA
MDPRMFSLAQSSTMPRRSGAAGA

SEQ ID NO: 106628 - protein, 23 aa, Artificial Sequence
  Description of Artificial Sequence: Synthetic peptide
  Seed: MDPRMCSLMQGSTLPRRSGAAGA
MDPRMFSLAQSSTNPRRSGAAGA

SEQ ID NO: 106629 - protein, 23 aa, Artificial Sequence
  Description of Artificial Sequence: Synthetic peptide
  Seed: MDPRMCSLMQGSTLPRRSGAAGA
MDPRMFSLAQSSTSPRRSGAAGA

SEQ ID NO: 106630 - protein, 23 aa, Artificial Sequence
  Description of Artificial Sequence: Synthetic peptide
  Seed: MDPRMCSLMQGSTLPRRSGAAGA
MDPRMFSLAQSSTTPRRSGAAGA

SEQ ID NO: 106631 - protein, 23 aa, Artificial Sequence
  Description of Artificial Sequence: Synthetic peptide
  Seed: MDPRMCSLMQGSTLPRRSGAAGA
MDPRMFSLAQSSTVPRRSGAAGA

SEQ ID NO: 106632 - protein, 23 aa, Artificial Sequence
  Description of Artificial Sequence: Synthetic peptide
  Seed: MDPRMCSLMQGSTLPRRSGAAGA
MDPRMFSLAQTSTAPRRSGAAGA

SEQ ID NO: 106633 - protein, 23 aa, Artificial Sequence
  Description of Artificial Sequence: Synthetic peptide
  Seed: MDPRMCSLMQGSTLPRRSGAAGA
MDPRMFSLAQTSTIPRRSGAAGA

SEQ ID NO: 106634 - protein, 23 aa, Artificial Sequence
  Description of Artificial Sequence: Synthetic peptide
  Seed: MDPRMCSLMQGSTLPRRSGAAGA
MDPRMFSLAQTSTLPRRSGAAGA

SEQ ID NO: 106635 - protein, 23 aa, Artificial Sequence
  Description of Artificial Sequence: Synthetic peptide
  Seed: MDPRMCSLMQGSTLPRRSGAAGA
MDPRMFSLAQTSTMPRRSGAAGA

SEQ ID NO: 106636 - protein, 23 aa, Artificial Sequence
  Description of Artificial Sequence: Synthetic peptide
  Seed: MDPRMCSLMQGSTLPRRSGAAGA
MDPRMFSLAQTSTNPRRSGAAGA

SEQ ID NO: 106637 - protein, 23 aa, Artificial Sequence
  Description of Artificial Sequence: Synthetic peptide
  Seed: MDPRMCSLMQGSTLPRRSGAAGA
MDPRMFSLAQTSTSPRRSGAAGA

SEQ ID NO: 106638 - protein, 23 aa, Artificial Sequence
  Description of Artificial Sequence: Synthetic peptide
  Seed: MDPRMCSLMQGSTLPRRSGAAGA
MDPRMFSLAQTSTTPRRSGAAGA

SEQ ID NO: 106639 - protein, 23 aa, Artificial Sequence
  Description of Artificial Sequence: Synthetic peptide
  Seed: MDPRMCSLMQGSTLPRRSGAAGA
MDPRMFSLAQTSTVPRRSGAAGA

SEQ ID NO: 106640 - protein, 23 aa, Artificial Sequence
  Description of Artificial Sequence: Synthetic peptide
  Seed: MDPRMCSLMQGSTLPRRSGAAGA
MDPRMFSLAQVSTAPRRSGAAGA

SEQ ID NO: 106641 - protein, 23 aa, Artificial Sequence
  Description of Artificial Sequence: Synthetic peptide
  Seed: MDPRMCSLMQGSTLPRRSGAAGA
MDPRMFSLAQVSTIPRRSGAAGA

SEQ ID NO: 106642 - protein, 23 aa, Artificial Sequence
  Description of Artificial Sequence: Synthetic peptide
  Seed: MDPRMCSLMQGSTLPRRSGAAGA
MDPRMFSLAQVSTLPRRSGAAGA

SEQ ID NO: 106643 - protein, 23 aa, Artificial Sequence
  Description of Artificial Sequence: Synthetic peptide
  Seed: MDPRMCSLMQGSTLPRRSGAAGA
MDPRMFSLAQVSTMPRRSGAAGA

SEQ ID NO: 106644 - protein, 23 aa, Artificial Sequence
  Description of Artificial Sequence: Synthetic peptide
  Seed: MDPRMCSLMQGSTLPRRSGAAGA
MDPRMFSLAQVSTNPRRSGAAGA

SEQ ID NO: 106645 - protein, 23 aa, Artificial Sequence
  Description of Artificial Sequence: Synthetic peptide
  Seed: MDPRMCSLMQGSTLPRRSGAAGA
MDPRMFSLAQVSTSPRRSGAAGA

SEQ ID NO: 106646 - protein, 23 aa, Artificial Sequence
  Description of Artificial Sequence: Synthetic peptide
  Seed: MDPRMCSLMQGSTLPRRSGAAGA
MDPRMFSLAQVSTTPRRSGAAGA

SEQ ID NO: 106647 - protein, 23 aa, Artificial Sequence
  Description of Artificial Sequence: Synthetic peptide
  Seed: MDPRMCSLMQGSTLPRRSGAAGA
MDPRMFSLAQVSTVPRRSGAAGA

SEQ ID NO: 106648 - protein, 23 aa, Artificial Sequence
  Description of Artificial Sequence: Synthetic peptide
  Seed: MDPRMCSLMQGSTLPRRSGAAGA
MDPRMFSLCQASTVPRRSGAAGA

SEQ ID NO: 106649 - protein, 23 aa, Artificial Sequence
  Description of Artificial Sequence: Synthetic peptide
  Seed: MDPRMCSLMQGSTLPRRSGAAGA
MDPRMFSLEQASTAPRRSGAAGA

SEQ ID NO: 106650 - protein, 23 aa, Artificial Sequence
  Description of Artificial Sequence: Synthetic peptide
  Seed: MDPRMCSLMQGSTLPRRSGAAGA
MDPRMFSLEQASTIPRRSGAAGA

SEQ ID NO: 106651 - protein, 23 aa, Artificial Sequence
  Description of Artificial Sequence: Synthetic peptide
  Seed: MDPRMCSLMQGSTLPRRSGAAGA
MDPRMFSLEQASTLPRRSGAAGA

SEQ ID NO: 106652 - protein, 23 aa, Artificial Sequence
  Description of Artificial Sequence: Synthetic peptide
  Seed: MDPRMCSLMQGSTLPRRSGAAGA
MDPRMFSLEQASTVPRRSGAAGA

SEQ ID NO: 106653 - protein, 23 aa, Artificial Sequence
  Description of Artificial Sequence: Synthetic peptide
  Seed: MDPRMCSLMQGSTLPRRSGAAGA
MDPRMFSLEQGSTIPRRSGAAGA

SEQ ID NO: 106654 - protein, 23 aa, Artificial Sequence
  Description of Artificial Sequence: Synthetic peptide
  Seed: MDPRMCSLMQGSTLPRRSGAAGA
MDPRMFSLEQGSTLPRRSGAAGA

SEQ ID NO: 106655 - protein, 23 aa, Artificial Sequence
  Description of Artificial Sequence: Synthetic peptide
  Seed: MDPRMCSLMQGSTLPRRSGAAGA
MDPRMFSLEQGSTVPRRSGAAGA

SEQ ID NO: 106656 - protein, 23 aa, Artificial Sequence
  Description of Artificial Sequence: Synthetic peptide
  Seed: MDPRMCSLMQGSTLPRRSGAAGA
MDPRMFSLEQSSTLPRRSGAAGA

SEQ ID NO: 106657 - protein, 23 aa, Artificial Sequence
  Description of Artificial Sequence: Synthetic peptide
  Seed: MDPRMCSLMQGSTLPRRSGAAGA
MDPRMFSLEQSSTVPRRSGAAGA

SEQ ID NO: 106658 - protein, 23 aa, Artificial Sequence
  Description of Artificial Sequence: Synthetic peptide
  Seed: MDPRMCSLMQGSTLPRRSGAAGA
MDPRMFSLFQASTAPRRSGAAGA

SEQ ID NO: 106659 - protein, 23 aa, Artificial Sequence
  Description of Artificial Sequence: Synthetic peptide
  Seed: MDPRMCSLMQGSTLPRRSGAAGA
MDPRMFSLFQASTIPRRSGAAGA

SEQ ID NO: 106660 - protein, 23 aa, Artificial Sequence
  Description of Artificial Sequence: Synthetic peptide
  Seed: MDPRMCSLMQGSTLPRRSGAAGA
MDPRMFSLFQASTLPRRSGAAGA

SEQ ID NO: 106661 - protein, 23 aa, Artificial Sequence
  Description of Artificial Sequence: Synthetic peptide
  Seed: MDPRMCSLMQGSTLPRRSGAAGA
MDPRMFSLFQASTNPRRSGAAGA

SEQ ID NO: 106662 - protein, 23 aa, Artificial Sequence
  Description of Artificial Sequence: Synthetic peptide
  Seed: MDPRMCSLMQGSTLPRRSGAAGA
MDPRMFSLFQASTSPRRSGAAGA

SEQ ID NO: 106663 - protein, 23 aa, Artificial Sequence
  Description of Artificial Sequence: Synthetic peptide
  Seed: MDPRMCSLMQGSTLPRRSGAAGA
MDPRMFSLFQASTVPRRSGAAGA

SEQ ID NO: 106664 - protein, 23 aa, Artificial Sequence
  Description of Artificial Sequence: Synthetic peptide
  Seed: MDPRMCSLMQGSTLPRRSGAAGA
MDPRMFSLFQGSTAPRRSGAAGA

SEQ ID NO: 106665 - protein, 23 aa, Artificial Sequence
  Description of Artificial Sequence: Synthetic peptide
  Seed: MDPRMCSLMQGSTLPRRSGAAGA
MDPRMFSLFQGSTVPRRSGAAGA

SEQ ID NO: 106666 - protein, 23 aa, Artificial Sequence
  Description of Artificial Sequence: Synthetic peptide
  Seed: MDPRMCSLMQGSTLPRRSGAAGA
MDPRMFSLFQPSTAPRRSGAAGA

SEQ ID NO: 106667 - protein, 23 aa, Artificial Sequence
  Description of Artificial Sequence: Synthetic peptide
  Seed: MDPRMCSLMQGSTLPRRSGAAGA
MDPRMFSLFQPSTNPRRSGAAGA

SEQ ID NO: 106668 - protein, 23 aa, Artificial Sequence
  Description of Artificial Sequence: Synthetic peptide
  Seed: MDPRMCSLMQGSTLPRRSGAAGA
MDPRMFSLFQPSTSPRRSGAAGA

SEQ ID NO: 106669 - protein, 23 aa, Artificial Sequence
  Description of Artificial Sequence: Synthetic peptide
  Seed: MDPRMCSLMQGSTLPRRSGAAGA
MDPRMFSLFQSSTAPRRSGAAGA

SEQ ID NO: 106670 - protein, 23 aa, Artificial Sequence
  Description of Artificial Sequence: Synthetic peptide
  Seed: MDPRMCSLMQGSTLPRRSGAAGA
MDPRMFSLFQSSTVPRRSGAAGA

SEQ ID NO: 106671 - protein, 23 aa, Artificial Sequence
  Description of Artificial Sequence: Synthetic peptide
  Seed: MDPRMCSLMQGSTLPRRSGAAGA
MDPRMFSLFQTSTAPRRSGAAGA

SEQ ID NO: 106672 - protein, 23 aa, Artificial Sequence
  Description of Artificial Sequence: Synthetic peptide
  Seed: MDPRMCSLMQGSTLPRRSGAAGA
MDPRMFSLFQVSTAPRRSGAAGA

SEQ ID NO: 106673 - protein, 23 aa, Artificial Sequence
  Description of Artificial Sequence: Synthetic peptide
  Seed: MDPRMCSLMQGSTLPRRSGAAGA
MDPRMFSLFQVSTNPRRSGAAGA

SEQ ID NO: 106674 - protein, 23 aa, Artificial Sequence
  Description of Artificial Sequence: Synthetic peptide
  Seed: MDPRMCSLMQGSTLPRRSGAAGA
MDPRMFSLGQASTAPRRSGAAGA

SEQ ID NO: 106675 - protein, 23 aa, Artificial Sequence
  Description of Artificial Sequence: Synthetic peptide
  Seed: MDPRMCSLMQGSTLPRRSGAAGA
MDPRMFSLGQASTIPRRSGAAGA

SEQ ID NO: 106676 - protein, 23 aa, Artificial Sequence
  Description of Artificial Sequence: Synthetic peptide
  Seed: MDPRMCSLMQGSTLPRRSGAAGA
MDPRMFSLGQASTLPRRSGAAGA

SEQ ID NO: 106677 - protein, 23 aa, Artificial Sequence
  Description of Artificial Sequence: Synthetic peptide
  Seed: MDPRMCSLMQGSTLPRRSGAAGA
MDPRMFSLGQASTVPRRSGAAGA

SEQ ID NO: 106678 - protein, 23 aa, Artificial Sequence
  Description of Artificial Sequence: Synthetic peptide
  Seed: MDPRMCSLMQGSTLPRRSGAAGA
MDPRMFSLHQASTLPRRSGAAGA

SEQ ID NO: 106679 - protein, 23 aa, Artificial Sequence
  Description of Artificial Sequence: Synthetic peptide
  Seed: MDPRMCSLMQGSTLPRRSGAAGA
MDPRMFSLHQASTVPRRSGAAGA

SEQ ID NO: 106680 - protein, 23 aa, Artificial Sequence
  Description of Artificial Sequence: Synthetic peptide
  Seed: MDPRMCSLMQGSTLPRRSGAAGA
MDPRMFSLIQASTAPRRSGAAGA

SEQ ID NO: 106681 - protein, 23 aa, Artificial Sequence
  Description of Artificial Sequence: Synthetic peptide
  Seed: MDPRMCSLMQGSTLPRRSGAAGA
MDPRMFSLIQASTCPRRSGAAGA

SEQ ID NO: 106682 - protein, 23 aa, Artificial Sequence
  Description of Artificial Sequence: Synthetic peptide
  Seed: MDPRMCSLMQGSTLPRRSGAAGA
MDPRMFSLIQASTDPRRSGAAGA

SEQ ID NO: 106683 - protein, 23 aa, Artificial Sequence
  Description of Artificial Sequence: Synthetic peptide
  Seed: MDPRMCSLMQGSTLPRRSGAAGA
MDPRMFSLIQASTEPRRSGAAGA

SEQ ID NO: 106684 - protein, 23 aa, Artificial Sequence
  Description of Artificial Sequence: Synthetic peptide
  Seed: MDPRMCSLMQGSTLPRRSGAAGA
MDPRMFSLIQASTFPRRSGAAGA

SEQ ID NO: 106685 - protein, 23 aa, Artificial Sequence
  Description of Artificial Sequence: Synthetic peptide
  Seed: MDPRMCSLMQGSTLPRRSGAAGA
MDPRMFSLIQASTGPRRSGAAGA

SEQ ID NO: 106686 - protein, 23 aa, Artificial Sequence
  Description of Artificial Sequence: Synthetic peptide
  Seed: MDPRMCSLMQGSTLPRRSGAAGA
MDPRMFSLIQASTHPRRSGAAGA

SEQ ID NO: 106687 - protein, 23 aa, Artificial Sequence
  Description of Artificial Sequence: Synthetic peptide
  Seed: MDPRMCSLMQGSTLPRRSGAAGA
MDPRMFSLIQASTIPRRSGAAGA

SEQ ID NO: 106688 - protein, 23 aa, Artificial Sequence
  Description of Artificial Sequence: Synthetic peptide
  Seed: MDPRMCSLMQGSTLPRRSGAAGA
MDPRMFSLIQASTLPRRSGAAGA

SEQ ID NO: 106689 - protein, 23 aa, Artificial Sequence
  Description of Artificial Sequence: Synthetic peptide
  Seed: MDPRMCSLMQGSTLPRRSGAAGA
MDPRMFSLIQASTMPRRSGAAGA

SEQ ID NO: 106690 - protein, 23 aa, Artificial Sequence
  Description of Artificial Sequence: Synthetic peptide
  Seed: MDPRMCSLMQGSTLPRRSGAAGA
MDPRMFSLIQASTNPRRSGAAGA

SEQ ID NO: 106691 - protein, 23 aa, Artificial Sequence
  Description of Artificial Sequence: Synthetic peptide
  Seed: MDPRMCSLMQGSTLPRRSGAAGA
MDPRMFSLIQASTPPRRSGAAGA

SEQ ID NO: 106692 - protein, 23 aa, Artificial Sequence
  Description of Artificial Sequence: Synthetic peptide
  Seed: MDPRMCSLMQGSTLPRRSGAAGA
MDPRMFSLIQASTQPRRSGAAGA

SEQ ID NO: 106693 - protein, 23 aa, Artificial Sequence
  Description of Artificial Sequence: Synthetic peptide
  Seed: MDPRMCSLMQGSTLPRRSGAAGA
MDPRMFSLIQASTSPRRSGAAGA

SEQ ID NO: 106694 - protein, 23 aa, Artificial Sequence
  Description of Artificial Sequence: Synthetic peptide
  Seed: MDPRMCSLMQGSTLPRRSGAAGA
MDPRMFSLIQASTTPRRSGAAGA

SEQ ID NO: 106695 - protein, 23 aa, Artificial Sequence
  Description of Artificial Sequence: Synthetic peptide
  Seed: MDPRMCSLMQGSTLPRRSGAAGA
MDPRMFSLIQASTVPRRSGAAGA

SEQ ID NO: 106696 - protein, 23 aa, Artificial Sequence
  Description of Artificial Sequence: Synthetic peptide
  Seed: MDPRMCSLMQGSTLPRRSGAAGA
MDPRMFSLIQGSTAPRRSGAAGA

SEQ ID NO: 106697 - protein, 23 aa, Artificial Sequence
  Description of Artificial Sequence: Synthetic peptide
  Seed: MDPRMCSLMQGSTLPRRSGAAGA
MDPRMFSLIQGSTCPRRSGAAGA

SEQ ID NO: 106698 - protein, 23 aa, Artificial Sequence
  Description of Artificial Sequence: Synthetic peptide
  Seed: MDPRMCSLMQGSTLPRRSGAAGA
MDPRMFSLIQGSTGPRRSGAAGA

SEQ ID NO: 106699 - protein, 23 aa, Artificial Sequence
  Description of Artificial Sequence: Synthetic peptide
  Seed: MDPRMCSLMQGSTLPRRSGAAGA
MDPRMFSLIQGSTIPRRSGAAGA

SEQ ID NO: 106700 - protein, 23 aa, Artificial Sequence
  Description of Artificial Sequence: Synthetic peptide
  Seed: MDPRMCSLMQGSTLPRRSGAAGA
MDPRMFSLIQGSTLPRRSGAAGA

SEQ ID NO: 106701 - protein, 23 aa, Artificial Sequence
  Description of Artificial Sequence: Synthetic peptide
  Seed: MDPRMCSLMQGSTLPRRSGAAGA
MDPRMFSLIQGSTMPRRSGAAGA

SEQ ID NO: 106702 - protein, 23 aa, Artificial Sequence
  Description of Artificial Sequence: Synthetic peptide
  Seed: MDPRMCSLMQGSTLPRRSGAAGA
MDPRMFSLIQGSTNPRRSGAAGA

SEQ ID NO: 106703 - protein, 23 aa, Artificial Sequence
  Description of Artificial Sequence: Synthetic peptide
  Seed: MDPRMCSLMQGSTLPRRSGAAGA
MDPRMFSLIQGSTSPRRSGAAGA

SEQ ID NO: 106704 - protein, 23 aa, Artificial Sequence
  Description of Artificial Sequence: Synthetic peptide
  Seed: MDPRMCSLMQGSTLPRRSGAAGA
MDPRMFSLIQGSTTPRRSGAAGA

SEQ ID NO: 106705 - protein, 23 aa, Artificial Sequence
  Description of Artificial Sequence: Synthetic peptide
  Seed: MDPRMCSLMQGSTLPRRSGAAGA
MDPRMFSLIQGSTVPRRSGAAGA

SEQ ID NO: 106706 - protein, 23 aa, Artificial Sequence
  Description of Artificial Sequence: Synthetic peptide
  Seed: MDPRMCSLMQGSTLPRRSGAAGA
MDPRMFSLIQISTAPRRSGAAGA

SEQ ID NO: 106707 - protein, 23 aa, Artificial Sequence
  Description of Artificial Sequence: Synthetic peptide
  Seed: MDPRMCSLMQGSTLPRRSGAAGA
MDPRMFSLIQISTGPRRSGAAGA

SEQ ID NO: 106708 - protein, 23 aa, Artificial Sequence
  Description of Artificial Sequence: Synthetic peptide
  Seed: MDPRMCSLMQGSTLPRRSGAAGA
MDPRMFSLIQISTIPRRSGAAGA

SEQ ID NO: 106709 - protein, 23 aa, Artificial Sequence
  Description of Artificial Sequence: Synthetic peptide
  Seed: MDPRMCSLMQGSTLPRRSGAAGA
MDPRMFSLIQISTMPRRSGAAGA

SEQ ID NO: 106710 - protein, 23 aa, Artificial Sequence
  Description of Artificial Sequence: Synthetic peptide
  Seed: MDPRMCSLMQGSTLPRRSGAAGA
MDPRMFSLIQISTNPRRSGAAGA

SEQ ID NO: 106711 - protein, 23 aa, Artificial Sequence
  Description of Artificial Sequence: Synthetic peptide
  Seed: MDPRMCSLMQGSTLPRRSGAAGA
MDPRMFSLIQISTSPRRSGAAGA

SEQ ID NO: 106712 - protein, 23 aa, Artificial Sequence
  Description of Artificial Sequence: Synthetic peptide
  Seed: MDPRMCSLMQGSTLPRRSGAAGA
MDPRMFSLIQISTTPRRSGAAGA

SEQ ID NO: 106713 - protein, 23 aa, Artificial Sequence
  Description of Artificial Sequence: Synthetic peptide
  Seed: MDPRMCSLMQGSTLPRRSGAAGA
MDPRMFSLIQISTVPRRSGAAGA

SEQ ID NO: 106714 - protein, 23 aa, Artificial Sequence
  Description of Artificial Sequence: Synthetic peptide
  Seed: MDPRMCSLMQGSTLPRRSGAAGA
MDPRMFSLIQLSTAPRRSGAAGA

SEQ ID NO: 106715 - protein, 23 aa, Artificial Sequence
  Description of Artificial Sequence: Synthetic peptide
  Seed: MDPRMCSLMQGSTLPRRSGAAGA
MDPRMFSLIQLSTNPRRSGAAGA

SEQ ID NO: 106716 - protein, 23 aa, Artificial Sequence
  Description of Artificial Sequence: Synthetic peptide
  Seed: MDPRMCSLMQGSTLPRRSGAAGA
MDPRMFSLIQLSTSPRRSGAAGA

SEQ ID NO: 106717 - protein, 23 aa, Artificial Sequence
  Description of Artificial Sequence: Synthetic peptide
  Seed: MDPRMCSLMQGSTLPRRSGAAGA
MDPRMFSLIQMSTAPRRSGAAGA

SEQ ID NO: 106718 - protein, 23 aa, Artificial Sequence
  Description of Artificial Sequence: Synthetic peptide
  Seed: MDPRMCSLMQGSTLPRRSGAAGA
MDPRMFSLIQMSTNPRRSGAAGA

SEQ ID NO: 106719 - protein, 23 aa, Artificial Sequence
  Description of Artificial Sequence: Synthetic peptide
  Seed: MDPRMCSLMQGSTLPRRSGAAGA
MDPRMFSLIQMSTSPRRSGAAGA

SEQ ID NO: 106720 - protein, 23 aa, Artificial Sequence
  Description of Artificial Sequence: Synthetic peptide
  Seed: MDPRMCSLMQGSTLPRRSGAAGA
MDPRMFSLIQNSTAPRRSGAAGA

SEQ ID NO: 106721 - protein, 23 aa, Artificial Sequence
  Description of Artificial Sequence: Synthetic peptide
  Seed: MDPRMCSLMQGSTLPRRSGAAGA
MDPRMFSLIQNSTIPRRSGAAGA

SEQ ID NO: 106722 - protein, 23 aa, Artificial Sequence
  Description of Artificial Sequence: Synthetic peptide
  Seed: MDPRMCSLMQGSTLPRRSGAAGA
MDPRMFSLIQNSTLPRRSGAAGA

SEQ ID NO: 106723 - protein, 23 aa, Artificial Sequence
  Description of Artificial Sequence: Synthetic peptide
  Seed: MDPRMCSLMQGSTLPRRSGAAGA
MDPRMFSLIQNSTNPRRSGAAGA

SEQ ID NO: 106724 - protein, 23 aa, Artificial Sequence
  Description of Artificial Sequence: Synthetic peptide
  Seed: MDPRMCSLMQGSTLPRRSGAAGA
MDPRMFSLIQNSTSPRRSGAAGA

SEQ ID NO: 106725 - protein, 23 aa, Artificial Sequence
  Description of Artificial Sequence: Synthetic peptide
  Seed: MDPRMCSLMQGSTLPRRSGAAGA
MDPRMFSLIQNSTTPRRSGAAGA

SEQ ID NO: 106726 - protein, 23 aa, Artificial Sequence
  Description of Artificial Sequence: Synthetic peptide
  Seed: MDPRMCSLMQGSTLPRRSGAAGA
MDPRMFSLIQNSTVPRRSGAAGA

SEQ ID NO: 106727 - protein, 23 aa, Artificial Sequence
  Description of Artificial Sequence: Synthetic peptide
  Seed: MDPRMCSLMQGSTLPRRSGAAGA
MDPRMFSLIQPSTAPRRSGAAGA

SEQ ID NO: 106728 - protein, 23 aa, Artificial Sequence
  Description of Artificial Sequence: Synthetic peptide
  Seed: MDPRMCSLMQGSTLPRRSGAAGA
MDPRMFSLIQPSTGPRRSGAAGA

SEQ ID NO: 106729 - protein, 23 aa, Artificial Sequence
  Description of Artificial Sequence: Synthetic peptide
  Seed: MDPRMCSLMQGSTLPRRSGAAGA
MDPRMFSLIQPSTHPRRSGAAGA

SEQ ID NO: 106730 - protein, 23 aa, Artificial Sequence
  Description of Artificial Sequence: Synthetic peptide
  Seed: MDPRMCSLMQGSTLPRRSGAAGA
MDPRMFSLIQPSTIPRRSGAAGA

SEQ ID NO: 106731 - protein, 23 aa, Artificial Sequence
  Description of Artificial Sequence: Synthetic peptide
  Seed: MDPRMCSLMQGSTLPRRSGAAGA
MDPRMFSLIQPSTLPRRSGAAGA

SEQ ID NO: 106732 - protein, 23 aa, Artificial Sequence
  Description of Artificial Sequence: Synthetic peptide
  Seed: MDPRMCSLMQGSTLPRRSGAAGA
MDPRMFSLIQPSTMPRRSGAAGA

SEQ ID NO: 106733 - protein, 23 aa, Artificial Sequence
  Description of Artificial Sequence: Synthetic peptide
  Seed: MDPRMCSLMQGSTLPRRSGAAGA
MDPRMFSLIQPSTNPRRSGAAGA

SEQ ID NO: 106734 - protein, 23 aa, Artificial Sequence
  Description of Artificial Sequence: Synthetic peptide
  Seed: MDPRMCSLMQGSTLPRRSGAAGA
MDPRMFSLIQPSTQPRRSGAAGA

SEQ ID NO: 106735 - protein, 23 aa, Artificial Sequence
  Description of Artificial Sequence: Synthetic peptide
  Seed: MDPRMCSLMQGSTLPRRSGAAGA
MDPRMFSLIQPSTSPRRSGAAGA

SEQ ID NO: 106736 - protein, 23 aa, Artificial Sequence
  Description of Artificial Sequence: Synthetic peptide
  Seed: MDPRMCSLMQGSTLPRRSGAAGA
MDPRMFSLIQPSTTPRRSGAAGA

SEQ ID NO: 106737 - protein, 23 aa, Artificial Sequence
  Description of Artificial Sequence: Synthetic peptide
  Seed: MDPRMCSLMQGSTLPRRSGAAGA
MDPRMFSLIQPSTVPRRSGAAGA

SEQ ID NO: 106738 - protein, 23 aa, Artificial Sequence
  Description of Artificial Sequence: Synthetic peptide
  Seed: MDPRMCSLMQGSTLPRRSGAAGA
MDPRMFSLIQSSTAPRRSGAAGA

SEQ ID NO: 106739 - protein, 23 aa, Artificial Sequence
  Description of Artificial Sequence: Synthetic peptide
  Seed: MDPRMCSLMQGSTLPRRSGAAGA
MDPRMFSLIQSSTGPRRSGAAGA

SEQ ID NO: 106740 - protein, 23 aa, Artificial Sequence
  Description of Artificial Sequence: Synthetic peptide
  Seed: MDPRMCSLMQGSTLPRRSGAAGA
MDPRMFSLIQSSTHPRRSGAAGA

SEQ ID NO: 106741 - protein, 23 aa, Artificial Sequence
  Description of Artificial Sequence: Synthetic peptide
  Seed: MDPRMCSLMQGSTLPRRSGAAGA
MDPRMFSLIQSSTIPRRSGAAGA

SEQ ID NO: 106742 - protein, 23 aa, Artificial Sequence
  Description of Artificial Sequence: Synthetic peptide
  Seed: MDPRMCSLMQGSTLPRRSGAAGA
MDPRMFSLIQSSTLPRRSGAAGA

SEQ ID NO: 106743 - protein, 23 aa, Artificial Sequence
  Description of Artificial Sequence: Synthetic peptide
  Seed: MDPRMCSLMQGSTLPRRSGAAGA
MDPRMFSLIQSSTMPRRSGAAGA

SEQ ID NO: 106744 - protein, 23 aa, Artificial Sequence
  Description of Artificial Sequence: Synthetic peptide
  Seed: MDPRMCSLMQGSTLPRRSGAAGA
MDPRMFSLIQSSTNPRRSGAAGA

SEQ ID NO: 106745 - protein, 23 aa, Artificial Sequence
  Description of Artificial Sequence: Synthetic peptide
  Seed: MDPRMCSLMQGSTLPRRSGAAGA
MDPRMFSLIQSSTQPRRSGAAGA

SEQ ID NO: 106746 - protein, 23 aa, Artificial Sequence
  Description of Artificial Sequence: Synthetic peptide
  Seed: MDPRMCSLMQGSTLPRRSGAAGA
MDPRMFSLIQSSTSPRRSGAAGA

SEQ ID NO: 106747 - protein, 23 aa, Artificial Sequence
  Description of Artificial Sequence: Synthetic peptide
  Seed: MDPRMCSLMQGSTLPRRSGAAGA
MDPRMFSLIQSSTTPRRSGAAGA

SEQ ID NO: 106748 - protein, 23 aa, Artificial Sequence
  Description of Artificial Sequence: Synthetic peptide
  Seed: MDPRMCSLMQGSTLPRRSGAAGA
MDPRMFSLIQSSTVPRRSGAAGA

SEQ ID NO: 106749 - protein, 23 aa, Artificial Sequence
  Description of Artificial Sequence: Synthetic peptide
  Seed: MDPRMCSLMQGSTLPRRSGAAGA
MDPRMFSLIQTSTAPRRSGAAGA

SEQ ID NO: 106750 - protein, 23 aa, Artificial Sequence
  Description of Artificial Sequence: Synthetic peptide
  Seed: MDPRMCSLMQGSTLPRRSGAAGA
MDPRMFSLIQTSTGPRRSGAAGA

SEQ ID NO: 106751 - protein, 23 aa, Artificial Sequence
  Description of Artificial Sequence: Synthetic peptide
  Seed: MDPRMCSLMQGSTLPRRSGAAGA
MDPRMFSLIQTSTHPRRSGAAGA

SEQ ID NO: 106752 - protein, 23 aa, Artificial Sequence
  Description of Artificial Sequence: Synthetic peptide
  Seed: MDPRMCSLMQGSTLPRRSGAAGA
MDPRMFSLIQTSTIPRRSGAAGA

SEQ ID NO: 106753 - protein, 23 aa, Artificial Sequence
  Description of Artificial Sequence: Synthetic peptide
  Seed: MDPRMCSLMQGSTLPRRSGAAGA
MDPRMFSLIQTSTLPRRSGAAGA

SEQ ID NO: 106754 - protein, 23 aa, Artificial Sequence
  Description of Artificial Sequence: Synthetic peptide
  Seed: MDPRMCSLMQGSTLPRRSGAAGA
MDPRMFSLIQTSTMPRRSGAAGA

SEQ ID NO: 106755 - protein, 23 aa, Artificial Sequence
  Description of Artificial Sequence: Synthetic peptide
  Seed: MDPRMCSLMQGSTLPRRSGAAGA
MDPRMFSLIQTSTNPRRSGAAGA

SEQ ID NO: 106756 - protein, 23 aa, Artificial Sequence
  Description of Artificial Sequence: Synthetic peptide
  Seed: MDPRMCSLMQGSTLPRRSGAAGA
MDPRMFSLIQTSTQPRRSGAAGA

SEQ ID NO: 106757 - protein, 23 aa, Artificial Sequence
  Description of Artificial Sequence: Synthetic peptide
  Seed: MDPRMCSLMQGSTLPRRSGAAGA
MDPRMFSLIQTSTSPRRSGAAGA

SEQ ID NO: 106758 - protein, 23 aa, Artificial Sequence
  Description of Artificial Sequence: Synthetic peptide
  Seed: MDPRMCSLMQGSTLPRRSGAAGA
MDPRMFSLIQTSTTPRRSGAAGA

SEQ ID NO: 106759 - protein, 23 aa, Artificial Sequence
  Description of Artificial Sequence: Synthetic peptide
  Seed: MDPRMCSLMQGSTLPRRSGAAGA
MDPRMFSLIQTSTVPRRSGAAGA

SEQ ID NO: 106760 - protein, 23 aa, Artificial Sequence
  Description of Artificial Sequence: Synthetic peptide
  Seed: MDPRMCSLMQGSTLPRRSGAAGA
MDPRMFSLIQVSTAPRRSGAAGA

SEQ ID NO: 106761 - protein, 23 aa, Artificial Sequence
  Description of Artificial Sequence: Synthetic peptide
  Seed: MDPRMCSLMQGSTLPRRSGAAGA
MDPRMFSLIQVSTGPRRSGAAGA

SEQ ID NO: 106762 - protein, 23 aa, Artificial Sequence
  Description of Artificial Sequence: Synthetic peptide
  Seed: MDPRMCSLMQGSTLPRRSGAAGA
MDPRMFSLIQVSTHPRRSGAAGA

SEQ ID NO: 106763 - protein, 23 aa, Artificial Sequence
  Description of Artificial Sequence: Synthetic peptide
  Seed: MDPRMCSLMQGSTLPRRSGAAGA
MDPRMFSLIQVSTIPRRSGAAGA

SEQ ID NO: 106764 - protein, 23 aa, Artificial Sequence
  Description of Artificial Sequence: Synthetic peptide
  Seed: MDPRMCSLMQGSTLPRRSGAAGA
MDPRMFSLIQVSTLPRRSGAAGA

SEQ ID NO: 106765 - protein, 23 aa, Artificial Sequence
  Description of Artificial Sequence: Synthetic peptide
  Seed: MDPRMCSLMQGSTLPRRSGAAGA
MDPRMFSLIQVSTMPRRSGAAGA

SEQ ID NO: 106766 - protein, 23 aa, Artificial Sequence
  Description of Artificial Sequence: Synthetic peptide
  Seed: MDPRMCSLMQGSTLPRRSGAAGA
MDPRMFSLIQVSTNPRRSGAAGA

SEQ ID NO: 106767 - protein, 23 aa, Artificial Sequence
  Description of Artificial Sequence: Synthetic peptide
  Seed: MDPRMCSLMQGSTLPRRSGAAGA
MDPRMFSLIQVSTQPRRSGAAGA

SEQ ID NO: 106768 - protein, 23 aa, Artificial Sequence
  Description of Artificial Sequence: Synthetic peptide
  Seed: MDPRMCSLMQGSTLPRRSGAAGA
MDPRMFSLIQVSTSPRRSGAAGA

SEQ ID NO: 106769 - protein, 23 aa, Artificial Sequence
  Description of Artificial Sequence: Synthetic peptide
  Seed: MDPRMCSLMQGSTLPRRSGAAGA
MDPRMFSLIQVSTTPRRSGAAGA

SEQ ID NO: 106770 - protein, 23 aa, Artificial Sequence
  Description of Artificial Sequence: Synthetic peptide
  Seed: MDPRMCSLMQGSTLPRRSGAAGA
MDPRMFSLIQVSTVPRRSGAAGA

SEQ ID NO: 106771 - protein, 23 aa, Artificial Sequence
  Description of Artificial Sequence: Synthetic peptide
  Seed: MDPRMCSLMQGSTLPRRSGAAGA
MDPRMFSLLQASTAPRRSGAAGA

SEQ ID NO: 106772 - protein, 23 aa, Artificial Sequence
  Description of Artificial Sequence: Synthetic peptide
  Seed: MDPRMCSLMQGSTLPRRSGAAGA
MDPRMFSLLQASTCPRRSGAAGA

SEQ ID NO: 106773 - protein, 23 aa, Artificial Sequence
  Description of Artificial Sequence: Synthetic peptide
  Seed: MDPRMCSLMQGSTLPRRSGAAGA
MDPRMFSLLQASTDPRRSGAAGA

SEQ ID NO: 106774 - protein, 23 aa, Artificial Sequence
  Description of Artificial Sequence: Synthetic peptide
  Seed: MDPRMCSLMQGSTLPRRSGAAGA
MDPRMFSLLQASTEPRRSGAAGA

SEQ ID NO: 106775 - protein, 23 aa, Artificial Sequence
  Description of Artificial Sequence: Synthetic peptide
  Seed: MDPRMCSLMQGSTLPRRSGAAGA
MDPRMFSLLQASTFPRRSGAAGA

SEQ ID NO: 106776 - protein, 23 aa, Artificial Sequence
  Description of Artificial Sequence: Synthetic peptide
  Seed: MDPRMCSLMQGSTLPRRSGAAGA
MDPRMFSLLQASTGPRRSGAAGA

SEQ ID NO: 106777 - protein, 23 aa, Artificial Sequence
  Description of Artificial Sequence: Synthetic peptide
  Seed: MDPRMCSLMQGSTLPRRSGAAGA
MDPRMFSLLQASTHPRRSGAAGA

SEQ ID NO: 106778 - protein, 23 aa, Artificial Sequence
  Description of Artificial Sequence: Synthetic peptide
  Seed: MDPRMCSLMQGSTLPRRSGAAGA
MDPRMFSLLQASTIPRRSGAAGA

SEQ ID NO: 106779 - protein, 23 aa, Artificial Sequence
  Description of Artificial Sequence: Synthetic peptide
  Seed: MDPRMCSLMQGSTLPRRSGAAGA
MDPRMFSLLQASTLPRRSGAAGA

SEQ ID NO: 106780 - protein, 23 aa, Artificial Sequence
  Description of Artificial Sequence: Synthetic peptide
  Seed: MDPRMCSLMQGSTLPRRSGAAGA
MDPRMFSLLQASTMPRRSGAAGA

SEQ ID NO: 106781 - protein, 23 aa, Artificial Sequence
  Description of Artificial Sequence: Synthetic peptide
  Seed: MDPRMCSLMQGSTLPRRSGAAGA
MDPRMFSLLQASTNPRRSGAAGA

SEQ ID NO: 106782 - protein, 23 aa, Artificial Sequence
  Description of Artificial Sequence: Synthetic peptide
  Seed: MDPRMCSLMQGSTLPRRSGAAGA
MDPRMFSLLQASTPPRRSGAAGA

SEQ ID NO: 106783 - protein, 23 aa, Artificial Sequence
  Description of Artificial Sequence: Synthetic peptide
  Seed: MDPRMCSLMQGSTLPRRSGAAGA
MDPRMFSLLQASTQPRRSGAAGA

SEQ ID NO: 106784 - protein, 23 aa, Artificial Sequence
  Description of Artificial Sequence: Synthetic peptide
  Seed: MDPRMCSLMQGSTLPRRSGAAGA
MDPRMFSLLQASTSPRRSGAAGA

SEQ ID NO: 106785 - protein, 23 aa, Artificial Sequence
  Description of Artificial Sequence: Synthetic peptide
  Seed: MDPRMCSLMQGSTLPRRSGAAGA
MDPRMFSLLQASTTPRRSGAAGA

SEQ ID NO: 106786 - protein, 23 aa, Artificial Sequence
  Description of Artificial Sequence: Synthetic peptide
  Seed: MDPRMCSLMQGSTLPRRSGAAGA
MDPRMFSLLQASTVPRRSGAAGA

SEQ ID NO: 106787 - protein, 23 aa, Artificial Sequence
  Description of Artificial Sequence: Synthetic peptide
  Seed: MDPRMCSLMQGSTLPRRSGAAGA
MDPRMFSLLQASTYPRRSGAAGA

SEQ ID NO: 106788 - protein, 23 aa, Artificial Sequence
  Description of Artificial Sequence: Synthetic peptide
  Seed: MDPRMCSLMQGSTLPRRSGAAGA
MDPRMFSLLQGSTAPRRSGAAGA

SEQ ID NO: 106789 - protein, 23 aa, Artificial Sequence
  Description of Artificial Sequence: Synthetic peptide
  Seed: MDPRMCSLMQGSTLPRRSGAAGA
MDPRMFSLLQGSTCPRRSGAAGA

SEQ ID NO: 106790 - protein, 23 aa, Artificial Sequence
  Description of Artificial Sequence: Synthetic peptide
  Seed: MDPRMCSLMQGSTLPRRSGAAGA
MDPRMFSLLQGSTFPRRSGAAGA

SEQ ID NO: 106791 - protein, 23 aa, Artificial Sequence
  Description of Artificial Sequence: Synthetic peptide
  Seed: MDPRMCSLMQGSTLPRRSGAAGA
MDPRMFSLLQGSTGPRRSGAAGA

SEQ ID NO: 106792 - protein, 23 aa, Artificial Sequence
  Description of Artificial Sequence: Synthetic peptide
  Seed: MDPRMCSLMQGSTLPRRSGAAGA
MDPRMFSLLQGSTIPRRSGAAGA

SEQ ID NO: 106793 - protein, 23 aa, Artificial Sequence
  Description of Artificial Sequence: Synthetic peptide
  Seed: MDPRMCSLMQGSTLPRRSGAAGA
MDPRMFSLLQGSTLPRRSGAAGA

SEQ ID NO: 106794 - protein, 23 aa, Artificial Sequence
  Description of Artificial Sequence: Synthetic peptide
  Seed: MDPRMCSLMQGSTLPRRSGAAGA
MDPRMFSLLQGSTMPRRSGAAGA

SEQ ID NO: 106795 - protein, 23 aa, Artificial Sequence
  Description of Artificial Sequence: Synthetic peptide
  Seed: MDPRMCSLMQGSTLPRRSGAAGA
MDPRMFSLLQGSTNPRRSGAAGA

SEQ ID NO: 106796 - protein, 23 aa, Artificial Sequence
  Description of Artificial Sequence: Synthetic peptide
  Seed: MDPRMCSLMQGSTLPRRSGAAGA
MDPRMFSLLQGSTSPRRSGAAGA

SEQ ID NO: 106797 - protein, 23 aa, Artificial Sequence
  Description of Artificial Sequence: Synthetic peptide
  Seed: MDPRMCSLMQGSTLPRRSGAAGA
MDPRMFSLLQGSTTPRRSGAAGA

SEQ ID NO: 106798 - protein, 23 aa, Artificial Sequence
  Description of Artificial Sequence: Synthetic peptide
  Seed: MDPRMCSLMQGSTLPRRSGAAGA
MDPRMFSLLQGSTVPRRSGAAGA

SEQ ID NO: 106799 - protein, 23 aa, Artificial Sequence
  Description of Artificial Sequence: Synthetic peptide
  Seed: MDPRMCSLMQGSTLPRRSGAAGA
MDPRMFSLLQISTAPRRSGAAGA

SEQ ID NO: 106800 - protein, 23 aa, Artificial Sequence
  Description of Artificial Sequence: Synthetic peptide
  Seed: MDPRMCSLMQGSTLPRRSGAAGA
MDPRMFSLLQISTGPRRSGAAGA

SEQ ID NO: 106801 - protein, 23 aa, Artificial Sequence
  Description of Artificial Sequence: Synthetic peptide
  Seed: MDPRMCSLMQGSTLPRRSGAAGA
MDPRMFSLLQISTHPRRSGAAGA

SEQ ID NO: 106802 - protein, 23 aa, Artificial Sequence
  Description of Artificial Sequence: Synthetic peptide
  Seed: MDPRMCSLMQGSTLPRRSGAAGA
MDPRMFSLLQISTIPRRSGAAGA

SEQ ID NO: 106803 - protein, 23 aa, Artificial Sequence
  Description of Artificial Sequence: Synthetic peptide
  Seed: MDPRMCSLMQGSTLPRRSGAAGA
MDPRMFSLLQISTLPRRSGAAGA

SEQ ID NO: 106804 - protein, 23 aa, Artificial Sequence
  Description of Artificial Sequence: Synthetic peptide
  Seed: MDPRMCSLMQGSTLPRRSGAAGA
MDPRMFSLLQISTMPRRSGAAGA

SEQ ID NO: 106805 - protein, 23 aa, Artificial Sequence
  Description of Artificial Sequence: Synthetic peptide
  Seed: MDPRMCSLMQGSTLPRRSGAAGA
MDPRMFSLLQISTNPRRSGAAGA

SEQ ID NO: 106806 - protein, 23 aa, Artificial Sequence
  Description of Artificial Sequence: Synthetic peptide
  Seed: MDPRMCSLMQGSTLPRRSGAAGA
MDPRMFSLLQISTQPRRSGAAGA

SEQ ID NO: 106807 - protein, 23 aa, Artificial Sequence
  Description of Artificial Sequence: Synthetic peptide
  Seed: MDPRMCSLMQGSTLPRRSGAAGA
MDPRMFSLLQISTSPRRSGAAGA

SEQ ID NO: 106808 - protein, 23 aa, Artificial Sequence
  Description of Artificial Sequence: Synthetic peptide
  Seed: MDPRMCSLMQGSTLPRRSGAAGA
MDPRMFSLLQISTTPRRSGAAGA

SEQ ID NO: 106809 - protein, 23 aa, Artificial Sequence
  Description of Artificial Sequence: Synthetic peptide
  Seed: MDPRMCSLMQGSTLPRRSGAAGA
MDPRMFSLLQISTVPRRSGAAGA

SEQ ID NO: 106810 - protein, 23 aa, Artificial Sequence
  Description of Artificial Sequence: Synthetic peptide
  Seed: MDPRMCSLMQGSTLPRRSGAAGA
MDPRMFSLLQLSTAPRRSGAAGA

SEQ ID NO: 106811 - protein, 23 aa, Artificial Sequence
  Description of Artificial Sequence: Synthetic peptide
  Seed: MDPRMCSLMQGSTLPRRSGAAGA
MDPRMFSLLQLSTNPRRSGAAGA

SEQ ID NO: 106812 - protein, 23 aa, Artificial Sequence
  Description of Artificial Sequence: Synthetic peptide
  Seed: MDPRMCSLMQGSTLPRRSGAAGA
MDPRMFSLLQLSTSPRRSGAAGA

SEQ ID NO: 106813 - protein, 23 aa, Artificial Sequence
  Description of Artificial Sequence: Synthetic peptide
  Seed: MDPRMCSLMQGSTLPRRSGAAGA
MDPRMFSLLQMSTAPRRSGAAGA

SEQ ID NO: 106814 - protein, 23 aa, Artificial Sequence
  Description of Artificial Sequence: Synthetic peptide
  Seed: MDPRMCSLMQGSTLPRRSGAAGA
MDPRMFSLLQMSTNPRRSGAAGA

SEQ ID NO: 106815 - protein, 23 aa, Artificial Sequence
  Description of Artificial Sequence: Synthetic peptide
  Seed: MDPRMCSLMQGSTLPRRSGAAGA
MDPRMFSLLQMSTSPRRSGAAGA

SEQ ID NO: 106816 - protein, 23 aa, Artificial Sequence
  Description of Artificial Sequence: Synthetic peptide
  Seed: MDPRMCSLMQGSTLPRRSGAAGA
MDPRMFSLLQNSTAPRRSGAAGA

SEQ ID NO: 106817 - protein, 23 aa, Artificial Sequence
  Description of Artificial Sequence: Synthetic peptide
  Seed: MDPRMCSLMQGSTLPRRSGAAGA
MDPRMFSLLQNSTGPRRSGAAGA

SEQ ID NO: 106818 - protein, 23 aa, Artificial Sequence
  Description of Artificial Sequence: Synthetic peptide
  Seed: MDPRMCSLMQGSTLPRRSGAAGA
MDPRMFSLLQNSTIPRRSGAAGA

SEQ ID NO: 106819 - protein, 23 aa, Artificial Sequence
  Description of Artificial Sequence: Synthetic peptide
  Seed: MDPRMCSLMQGSTLPRRSGAAGA
MDPRMFSLLQNSTLPRRSGAAGA

SEQ ID NO: 106820 - protein, 23 aa, Artificial Sequence
  Description of Artificial Sequence: Synthetic peptide
  Seed: MDPRMCSLMQGSTLPRRSGAAGA
MDPRMFSLLQNSTMPRRSGAAGA

SEQ ID NO: 106821 - protein, 23 aa, Artificial Sequence
  Description of Artificial Sequence: Synthetic peptide
  Seed: MDPRMCSLMQGSTLPRRSGAAGA
MDPRMFSLLQNSTNPRRSGAAGA

SEQ ID NO: 106822 - protein, 23 aa, Artificial Sequence
  Description of Artificial Sequence: Synthetic peptide
  Seed: MDPRMCSLMQGSTLPRRSGAAGA
MDPRMFSLLQNSTSPRRSGAAGA

SEQ ID NO: 106823 - protein, 23 aa, Artificial Sequence
  Description of Artificial Sequence: Synthetic peptide
  Seed: MDPRMCSLMQGSTLPRRSGAAGA
MDPRMFSLLQNSTTPRRSGAAGA

SEQ ID NO: 106824 - protein, 23 aa, Artificial Sequence
  Description of Artificial Sequence: Synthetic peptide
  Seed: MDPRMCSLMQGSTLPRRSGAAGA
MDPRMFSLLQNSTVPRRSGAAGA

SEQ ID NO: 106825 - protein, 23 aa, Artificial Sequence
  Description of Artificial Sequence: Synthetic peptide
  Seed: MDPRMCSLMQGSTLPRRSGAAGA
MDPRMFSLLQPSTAPRRSGAAGA

SEQ ID NO: 106826 - protein, 23 aa, Artificial Sequence
  Description of Artificial Sequence: Synthetic peptide
  Seed: MDPRMCSLMQGSTLPRRSGAAGA
MDPRMFSLLQPSTCPRRSGAAGA

SEQ ID NO: 106827 - protein, 23 aa, Artificial Sequence
  Description of Artificial Sequence: Synthetic peptide
  Seed: MDPRMCSLMQGSTLPRRSGAAGA
MDPRMFSLLQPSTDPRRSGAAGA

SEQ ID NO: 106828 - protein, 23 aa, Artificial Sequence
  Description of Artificial Sequence: Synthetic peptide
  Seed: MDPRMCSLMQGSTLPRRSGAAGA
MDPRMFSLLQPSTEPRRSGAAGA

SEQ ID NO: 106829 - protein, 23 aa, Artificial Sequence
  Description of Artificial Sequence: Synthetic peptide
  Seed: MDPRMCSLMQGSTLPRRSGAAGA
MDPRMFSLLQPSTFPRRSGAAGA

SEQ ID NO: 106830 - protein, 23 aa, Artificial Sequence
  Description of Artificial Sequence: Synthetic peptide
  Seed: MDPRMCSLMQGSTLPRRSGAAGA
MDPRMFSLLQPSTGPRRSGAAGA

SEQ ID NO: 106831 - protein, 23 aa, Artificial Sequence
  Description of Artificial Sequence: Synthetic peptide
  Seed: MDPRMCSLMQGSTLPRRSGAAGA
MDPRMFSLLQPSTHPRRSGAAGA

SEQ ID NO: 106832 - protein, 23 aa, Artificial Sequence
  Description of Artificial Sequence: Synthetic peptide
  Seed: MDPRMCSLMQGSTLPRRSGAAGA
MDPRMFSLLQPSTIPRRSGAAGA

SEQ ID NO: 106833 - protein, 23 aa, Artificial Sequence
  Description of Artificial Sequence: Synthetic peptide
  Seed: MDPRMCSLMQGSTLPRRSGAAGA
MDPRMFSLLQPSTLPRRSGAAGA

SEQ ID NO: 106834 - protein, 23 aa, Artificial Sequence
  Description of Artificial Sequence: Synthetic peptide
  Seed: MDPRMCSLMQGSTLPRRSGAAGA
MDPRMFSLLQPSTMPRRSGAAGA

SEQ ID NO: 106835 - protein, 23 aa, Artificial Sequence
  Description of Artificial Sequence: Synthetic peptide
  Seed: MDPRMCSLMQGSTLPRRSGAAGA
MDPRMFSLLQPSTNPRRSGAAGA

SEQ ID NO: 106836 - protein, 23 aa, Artificial Sequence
  Description of Artificial Sequence: Synthetic peptide
  Seed: MDPRMCSLMQGSTLPRRSGAAGA
MDPRMFSLLQPSTPPRRSGAAGA

SEQ ID NO: 106837 - protein, 23 aa, Artificial Sequence
  Description of Artificial Sequence: Synthetic peptide
  Seed: MDPRMCSLMQGSTLPRRSGAAGA
MDPRMFSLLQPSTQPRRSGAAGA

SEQ ID NO: 106838 - protein, 23 aa, Artificial Sequence
  Description of Artificial Sequence: Synthetic peptide
  Seed: MDPRMCSLMQGSTLPRRSGAAGA
MDPRMFSLLQPSTSPRRSGAAGA

SEQ ID NO: 106839 - protein, 23 aa, Artificial Sequence
  Description of Artificial Sequence: Synthetic peptide
  Seed: MDPRMCSLMQGSTLPRRSGAAGA
MDPRMFSLLQPSTTPRRSGAAGA

SEQ ID NO: 106840 - protein, 23 aa, Artificial Sequence
  Description of Artificial Sequence: Synthetic peptide
  Seed: MDPRMCSLMQGSTLPRRSGAAGA
MDPRMFSLLQPSTVPRRSGAAGA

SEQ ID NO: 106841 - protein, 23 aa, Artificial Sequence
  Description of Artificial Sequence: Synthetic peptide
  Seed: MDPRMCSLMQGSTLPRRSGAAGA
MDPRMFSLLQSSTAPRRSGAAGA

SEQ ID NO: 106842 - protein, 23 aa, Artificial Sequence
  Description of Artificial Sequence: Synthetic peptide
  Seed: MDPRMCSLMQGSTLPRRSGAAGA
MDPRMFSLLQSSTCPRRSGAAGA

SEQ ID NO: 106843 - protein, 23 aa, Artificial Sequence
  Description of Artificial Sequence: Synthetic peptide
  Seed: MDPRMCSLMQGSTLPRRSGAAGA
MDPRMFSLLQSSTDPRRSGAAGA

SEQ ID NO: 106844 - protein, 23 aa, Artificial Sequence
  Description of Artificial Sequence: Synthetic peptide
  Seed: MDPRMCSLMQGSTLPRRSGAAGA
MDPRMFSLLQSSTFPRRSGAAGA

SEQ ID NO: 106845 - protein, 23 aa, Artificial Sequence
  Description of Artificial Sequence: Synthetic peptide
  Seed: MDPRMCSLMQGSTLPRRSGAAGA
MDPRMFSLLQSSTGPRRSGAAGA

SEQ ID NO: 106846 - protein, 23 aa, Artificial Sequence
  Description of Artificial Sequence: Synthetic peptide
  Seed: MDPRMCSLMQGSTLPRRSGAAGA
MDPRMFSLLQSSTHPRRSGAAGA

SEQ ID NO: 106847 - protein, 23 aa, Artificial Sequence
  Description of Artificial Sequence: Synthetic peptide
  Seed: MDPRMCSLMQGSTLPRRSGAAGA
MDPRMFSLLQSSTIPRRSGAAGA

SEQ ID NO: 106848 - protein, 23 aa, Artificial Sequence
  Description of Artificial Sequence: Synthetic peptide
  Seed: MDPRMCSLMQGSTLPRRSGAAGA
MDPRMFSLLQSSTLPRRSGAAGA

SEQ ID NO: 106849 - protein, 23 aa, Artificial Sequence
  Description of Artificial Sequence: Synthetic peptide
  Seed: MDPRMCSLMQGSTLPRRSGAAGA
MDPRMFSLLQSSTMPRRSGAAGA

SEQ ID NO: 106850 - protein, 23 aa, Artificial Sequence
  Description of Artificial Sequence: Synthetic peptide
  Seed: MDPRMCSLMQGSTLPRRSGAAGA
MDPRMFSLLQSSTNPRRSGAAGA

SEQ ID NO: 106851 - protein, 23 aa, Artificial Sequence
  Description of Artificial Sequence: Synthetic peptide
  Seed: MDPRMCSLMQGSTLPRRSGAAGA
MDPRMFSLLQSSTQPRRSGAAGA

SEQ ID NO: 106852 - protein, 23 aa, Artificial Sequence
  Description of Artificial Sequence: Synthetic peptide
  Seed: MDPRMCSLMQGSTLPRRSGAAGA
MDPRMFSLLQSSTSPRRSGAAGA

SEQ ID NO: 106853 - protein, 23 aa, Artificial Sequence
  Description of Artificial Sequence: Synthetic peptide
  Seed: MDPRMCSLMQGSTLPRRSGAAGA
MDPRMFSLLQSSTTPRRSGAAGA

SEQ ID NO: 106854 - protein, 23 aa, Artificial Sequence
  Description of Artificial Sequence: Synthetic peptide
  Seed: MDPRMCSLMQGSTLPRRSGAAGA
MDPRMFSLLQSSTVPRRSGAAGA

SEQ ID NO: 106855 - protein, 23 aa, Artificial Sequence
  Description of Artificial Sequence: Synthetic peptide
  Seed: MDPRMCSLMQGSTLPRRSGAAGA
MDPRMFSLLQTSTAPRRSGAAGA

SEQ ID NO: 106856 - protein, 23 aa, Artificial Sequence
  Description of Artificial Sequence: Synthetic peptide
  Seed: MDPRMCSLMQGSTLPRRSGAAGA
MDPRMFSLLQTSTDPRRSGAAGA

SEQ ID NO: 106857 - protein, 23 aa, Artificial Sequence
  Description of Artificial Sequence: Synthetic peptide
  Seed: MDPRMCSLMQGSTLPRRSGAAGA
MDPRMFSLLQTSTGPRRSGAAGA

SEQ ID NO: 106858 - protein, 23 aa, Artificial Sequence
  Description of Artificial Sequence: Synthetic peptide
  Seed: MDPRMCSLMQGSTLPRRSGAAGA
MDPRMFSLLQTSTHPRRSGAAGA

SEQ ID NO: 106859 - protein, 23 aa, Artificial Sequence
  Description of Artificial Sequence: Synthetic peptide
  Seed: MDPRMCSLMQGSTLPRRSGAAGA
MDPRMFSLLQTSTIPRRSGAAGA

SEQ ID NO: 106860 - protein, 23 aa, Artificial Sequence
  Description of Artificial Sequence: Synthetic peptide
  Seed: MDPRMCSLMQGSTLPRRSGAAGA
MDPRMFSLLQTSTLPRRSGAAGA

SEQ ID NO: 106861 - protein, 23 aa, Artificial Sequence
  Description of Artificial Sequence: Synthetic peptide
  Seed: MDPRMCSLMQGSTLPRRSGAAGA
MDPRMFSLLQTSTMPRRSGAAGA

SEQ ID NO: 106862 - protein, 23 aa, Artificial Sequence
  Description of Artificial Sequence: Synthetic peptide
  Seed: MDPRMCSLMQGSTLPRRSGAAGA
MDPRMFSLLQTSTNPRRSGAAGA

SEQ ID NO: 106863 - protein, 23 aa, Artificial Sequence
  Description of Artificial Sequence: Synthetic peptide
  Seed: MDPRMCSLMQGSTLPRRSGAAGA
MDPRMFSLLQTSTQPRRSGAAGA

SEQ ID NO: 106864 - protein, 23 aa, Artificial Sequence
  Description of Artificial Sequence: Synthetic peptide
  Seed: MDPRMCSLMQGSTLPRRSGAAGA
MDPRMFSLLQTSTSPRRSGAAGA

SEQ ID NO: 106865 - protein, 23 aa, Artificial Sequence
  Description of Artificial Sequence: Synthetic peptide
  Seed: MDPRMCSLMQGSTLPRRSGAAGA
MDPRMFSLLQTSTTPRRSGAAGA

SEQ ID NO: 106866 - protein, 23 aa, Artificial Sequence
  Description of Artificial Sequence: Synthetic peptide
  Seed: MDPRMCSLMQGSTLPRRSGAAGA
MDPRMFSLLQTSTVPRRSGAAGA

SEQ ID NO: 106867 - protein, 23 aa, Artificial Sequence
  Description of Artificial Sequence: Synthetic peptide
  Seed: MDPRMCSLMQGSTLPRRSGAAGA
MDPRMFSLLQVSTAPRRSGAAGA

SEQ ID NO: 106868 - protein, 23 aa, Artificial Sequence
  Description of Artificial Sequence: Synthetic peptide
  Seed: MDPRMCSLMQGSTLPRRSGAAGA
MDPRMFSLLQVSTDPRRSGAAGA

SEQ ID NO: 106869 - protein, 23 aa, Artificial Sequence
  Description of Artificial Sequence: Synthetic peptide
  Seed: MDPRMCSLMQGSTLPRRSGAAGA
MDPRMFSLLQVSTGPRRSGAAGA

SEQ ID NO: 106870 - protein, 23 aa, Artificial Sequence
  Description of Artificial Sequence: Synthetic peptide
  Seed: MDPRMCSLMQGSTLPRRSGAAGA
MDPRMFSLLQVSTHPRRSGAAGA

SEQ ID NO: 106871 - protein, 23 aa, Artificial Sequence
  Description of Artificial Sequence: Synthetic peptide
  Seed: MDPRMCSLMQGSTLPRRSGAAGA
MDPRMFSLLQVSTIPRRSGAAGA

SEQ ID NO: 106872 - protein, 23 aa, Artificial Sequence
  Description of Artificial Sequence: Synthetic peptide
  Seed: MDPRMCSLMQGSTLPRRSGAAGA
MDPRMFSLLQVSTLPRRSGAAGA

SEQ ID NO: 106873 - protein, 23 aa, Artificial Sequence
  Description of Artificial Sequence: Synthetic peptide
  Seed: MDPRMCSLMQGSTLPRRSGAAGA
MDPRMFSLLQVSTMPRRSGAAGA

SEQ ID NO: 106874 - protein, 23 aa, Artificial Sequence
  Description of Artificial Sequence: Synthetic peptide
  Seed: MDPRMCSLMQGSTLPRRSGAAGA
MDPRMFSLLQVSTNPRRSGAAGA

SEQ ID NO: 106875 - protein, 23 aa, Artificial Sequence
  Description of Artificial Sequence: Synthetic peptide
  Seed: MDPRMCSLMQGSTLPRRSGAAGA
MDPRMFSLLQVSTPPRRSGAAGA

SEQ ID NO: 106876 - protein, 23 aa, Artificial Sequence
  Description of Artificial Sequence: Synthetic peptide
  Seed: MDPRMCSLMQGSTLPRRSGAAGA
MDPRMFSLLQVSTQPRRSGAAGA

SEQ ID NO: 106877 - protein, 23 aa, Artificial Sequence
  Description of Artificial Sequence: Synthetic peptide
  Seed: MDPRMCSLMQGSTLPRRSGAAGA
MDPRMFSLLQVSTSPRRSGAAGA

SEQ ID NO: 106878 - protein, 23 aa, Artificial Sequence
  Description of Artificial Sequence: Synthetic peptide
  Seed: MDPRMCSLMQGSTLPRRSGAAGA
MDPRMFSLLQVSTTPRRSGAAGA

SEQ ID NO: 106879 - protein, 23 aa, Artificial Sequence
  Description of Artificial Sequence: Synthetic peptide
  Seed: MDPRMCSLMQGSTLPRRSGAAGA
MDPRMFSLLQVSTVPRRSGAAGA

SEQ ID NO: 106880 - protein, 23 aa, Artificial Sequence
  Description of Artificial Sequence: Synthetic peptide
  Seed: MDPRMCSLMQGSTLPRRSGAAGA
MDPRMFSLMQASTAPRRSGAAGA

SEQ ID NO: 106881 - protein, 23 aa, Artificial Sequence
  Description of Artificial Sequence: Synthetic peptide
  Seed: MDPRMCSLMQGSTLPRRSGAAGA
MDPRMFSLMQASTCPRRSGAAGA

SEQ ID NO: 106882 - protein, 23 aa, Artificial Sequence
  Description of Artificial Sequence: Synthetic peptide
  Seed: MDPRMCSLMQGSTLPRRSGAAGA
MDPRMFSLMQASTDPRRSGAAGA

SEQ ID NO: 106883 - protein, 23 aa, Artificial Sequence
  Description of Artificial Sequence: Synthetic peptide
  Seed: MDPRMCSLMQGSTLPRRSGAAGA
MDPRMFSLMQASTEPRRSGAAGA

SEQ ID NO: 106884 - protein, 23 aa, Artificial Sequence
  Description of Artificial Sequence: Synthetic peptide
  Seed: MDPRMCSLMQGSTLPRRSGAAGA
MDPRMFSLMQASTFPRRSGAAGA

SEQ ID NO: 106885 - protein, 23 aa, Artificial Sequence
  Description of Artificial Sequence: Synthetic peptide
  Seed: MDPRMCSLMQGSTLPRRSGAAGA
MDPRMFSLMQASTGPRRSGAAGA

SEQ ID NO: 106886 - protein, 23 aa, Artificial Sequence
  Description of Artificial Sequence: Synthetic peptide
  Seed: MDPRMCSLMQGSTLPRRSGAAGA
MDPRMFSLMQASTHPRRSGAAGA

SEQ ID NO: 106887 - protein, 23 aa, Artificial Sequence
  Description of Artificial Sequence: Synthetic peptide
  Seed: MDPRMCSLMQGSTLPRRSGAAGA
MDPRMFSLMQASTIPRRSGAAGA

SEQ ID NO: 106888 - protein, 23 aa, Artificial Sequence
  Description of Artificial Sequence: Synthetic peptide
  Seed: MDPRMCSLMQGSTLPRRSGAAGA
MDPRMFSLMQASTLPRRSGAAGA

SEQ ID NO: 106889 - protein, 23 aa, Artificial Sequence
  Description of Artificial Sequence: Synthetic peptide
  Seed: MDPRMCSLMQGSTLPRRSGAAGA
MDPRMFSLMQASTMPRRSGAAGA

SEQ ID NO: 106890 - protein, 23 aa, Artificial Sequence
  Description of Artificial Sequence: Synthetic peptide
  Seed: MDPRMCSLMQGSTLPRRSGAAGA
MDPRMFSLMQASTNPRRSGAAGA

SEQ ID NO: 106891 - protein, 23 aa, Artificial Sequence
  Description of Artificial Sequence: Synthetic peptide
  Seed: MDPRMCSLMQGSTLPRRSGAAGA
MDPRMFSLMQASTPPRRSGAAGA

SEQ ID NO: 106892 - protein, 23 aa, Artificial Sequence
  Description of Artificial Sequence: Synthetic peptide
  Seed: MDPRMCSLMQGSTLPRRSGAAGA
MDPRMFSLMQASTQPRRSGAAGA

SEQ ID NO: 106893 - protein, 23 aa, Artificial Sequence
  Description of Artificial Sequence: Synthetic peptide
  Seed: MDPRMCSLMQGSTLPRRSGAAGA
MDPRMFSLMQASTSPRRSGAAGA

SEQ ID NO: 106894 - protein, 23 aa, Artificial Sequence
  Description of Artificial Sequence: Synthetic peptide
  Seed: MDPRMCSLMQGSTLPRRSGAAGA
MDPRMFSLMQASTTPRRSGAAGA

SEQ ID NO: 106895 - protein, 23 aa, Artificial Sequence
  Description of Artificial Sequence: Synthetic peptide
  Seed: MDPRMCSLMQGSTLPRRSGAAGA
MDPRMFSLMQASTVPRRSGAAGA

SEQ ID NO: 106896 - protein, 23 aa, Artificial Sequence
  Description of Artificial Sequence: Synthetic peptide
  Seed: MDPRMCSLMQGSTLPRRSGAAGA
MDPRMFSLMQASTYPRRSGAAGA

SEQ ID NO: 106897 - protein, 23 aa, Artificial Sequence
  Description of Artificial Sequence: Synthetic peptide
  Seed: MDPRMCSLMQGSTLPRRSGAAGA
MDPRMFSLMQGSTAPRRSGAAGA

SEQ ID NO: 106898 - protein, 23 aa, Artificial Sequence
  Description of Artificial Sequence: Synthetic peptide
  Seed: MDPRMCSLMQGSTLPRRSGAAGA
MDPRMFSLMQGSTCPRRSGAAGA

SEQ ID NO: 106899 - protein, 23 aa, Artificial Sequence
  Description of Artificial Sequence: Synthetic peptide
  Seed: MDPRMCSLMQGSTLPRRSGAAGA
MDPRMFSLMQGSTFPRRSGAAGA

SEQ ID NO: 106900 - protein, 23 aa, Artificial Sequence
  Description of Artificial Sequence: Synthetic peptide
  Seed: MDPRMCSLMQGSTLPRRSGAAGA
MDPRMFSLMQGSTGPRRSGAAGA

SEQ ID NO: 106901 - protein, 23 aa, Artificial Sequence
  Description of Artificial Sequence: Synthetic peptide
  Seed: MDPRMCSLMQGSTLPRRSGAAGA
MDPRMFSLMQGSTIPRRSGAAGA

SEQ ID NO: 106902 - protein, 23 aa, Artificial Sequence
  Description of Artificial Sequence: Synthetic peptide
  Seed: MDPRMCSLMQGSTLPRRSGAAGA
MDPRMFSLMQGSTLPRRSGAAGA

SEQ ID NO: 106903 - protein, 23 aa, Artificial Sequence
  Description of Artificial Sequence: Synthetic peptide
  Seed: MDPRMCSLMQGSTLPRRSGAAGA
MDPRMFSLMQGSTMPRRSGAAGA

SEQ ID NO: 106904 - protein, 23 aa, Artificial Sequence
  Description of Artificial Sequence: Synthetic peptide
  Seed: MDPRMCSLMQGSTLPRRSGAAGA
MDPRMFSLMQGSTNPRRSGAAGA

SEQ ID NO: 106905 - protein, 23 aa, Artificial Sequence
  Description of Artificial Sequence: Synthetic peptide
  Seed: MDPRMCSLMQGSTLPRRSGAAGA
MDPRMFSLMQGSTQPRRSGAAGA

SEQ ID NO: 106906 - protein, 23 aa, Artificial Sequence
  Description of Artificial Sequence: Synthetic peptide
  Seed: MDPRMCSLMQGSTLPRRSGAAGA
MDPRMFSLMQGSTSPRRSGAAGA

SEQ ID NO: 106907 - protein, 23 aa, Artificial Sequence
  Description of Artificial Sequence: Synthetic peptide
  Seed: MDPRMCSLMQGSTLPRRSGAAGA
MDPRMFSLMQGSTTPRRSGAAGA

SEQ ID NO: 106908 - protein, 23 aa, Artificial Sequence
  Description of Artificial Sequence: Synthetic peptide
  Seed: MDPRMCSLMQGSTLPRRSGAAGA
MDPRMFSLMQGSTVPRRSGAAGA

SEQ ID NO: 106909 - protein, 23 aa, Artificial Sequence
  Description of Artificial Sequence: Synthetic peptide
  Seed: MDPRMCSLMQGSTLPRRSGAAGA
MDPRMFSLMQHSTLPRRSGAAGA

SEQ ID NO: 106910 - protein, 23 aa, Artificial Sequence
  Description of Artificial Sequence: Synthetic peptide
  Seed: MDPRMCSLMQGSTLPRRSGAAGA
MDPRMFSLMQHSTVPRRSGAAGA

SEQ ID NO: 106911 - protein, 23 aa, Artificial Sequence
  Description of Artificial Sequence: Synthetic peptide
  Seed: MDPRMCSLMQGSTLPRRSGAAGA
MDPRMFSLMQISTAPRRSGAAGA

SEQ ID NO: 106912 - protein, 23 aa, Artificial Sequence
  Description of Artificial Sequence: Synthetic peptide
  Seed: MDPRMCSLMQGSTLPRRSGAAGA
MDPRMFSLMQISTGPRRSGAAGA

SEQ ID NO: 106913 - protein, 23 aa, Artificial Sequence
  Description of Artificial Sequence: Synthetic peptide
  Seed: MDPRMCSLMQGSTLPRRSGAAGA
MDPRMFSLMQISTHPRRSGAAGA

SEQ ID NO: 106914 - protein, 23 aa, Artificial Sequence
  Description of Artificial Sequence: Synthetic peptide
  Seed: MDPRMCSLMQGSTLPRRSGAAGA
MDPRMFSLMQISTIPRRSGAAGA

SEQ ID NO: 106915 - protein, 23 aa, Artificial Sequence
  Description of Artificial Sequence: Synthetic peptide
  Seed: MDPRMCSLMQGSTLPRRSGAAGA
MDPRMFSLMQISTLPRRSGAAGA

SEQ ID NO: 106916 - protein, 23 aa, Artificial Sequence
  Description of Artificial Sequence: Synthetic peptide
  Seed: MDPRMCSLMQGSTLPRRSGAAGA
MDPRMFSLMQISTMPRRSGAAGA

SEQ ID NO: 106917 - protein, 23 aa, Artificial Sequence
  Description of Artificial Sequence: Synthetic peptide
  Seed: MDPRMCSLMQGSTLPRRSGAAGA
MDPRMFSLMQISTNPRRSGAAGA

SEQ ID NO: 106918 - protein, 23 aa, Artificial Sequence
  Description of Artificial Sequence: Synthetic peptide
  Seed: MDPRMCSLMQGSTLPRRSGAAGA
MDPRMFSLMQISTQPRRSGAAGA

SEQ ID NO: 106919 - protein, 23 aa, Artificial Sequence
  Description of Artificial Sequence: Synthetic peptide
  Seed: MDPRMCSLMQGSTLPRRSGAAGA
MDPRMFSLMQISTSPRRSGAAGA

SEQ ID NO: 106920 - protein, 23 aa, Artificial Sequence
  Description of Artificial Sequence: Synthetic peptide
  Seed: MDPRMCSLMQGSTLPRRSGAAGA
MDPRMFSLMQISTTPRRSGAAGA

SEQ ID NO: 106921 - protein, 23 aa, Artificial Sequence
  Description of Artificial Sequence: Synthetic peptide
  Seed: MDPRMCSLMQGSTLPRRSGAAGA
MDPRMFSLMQISTVPRRSGAAGA

SEQ ID NO: 106922 - protein, 23 aa, Artificial Sequence
  Description of Artificial Sequence: Synthetic peptide
  Seed: MDPRMCSLMQGSTLPRRSGAAGA
MDPRMFSLMQLSTAPRRSGAAGA

SEQ ID NO: 106923 - protein, 23 aa, Artificial Sequence
  Description of Artificial Sequence: Synthetic peptide
  Seed: MDPRMCSLMQGSTLPRRSGAAGA
MDPRMFSLMQLSTNPRRSGAAGA

SEQ ID NO: 106924 - protein, 23 aa, Artificial Sequence
  Description of Artificial Sequence: Synthetic peptide
  Seed: MDPRMCSLMQGSTLPRRSGAAGA
MDPRMFSLMQLSTSPRRSGAAGA

SEQ ID NO: 106925 - protein, 23 aa, Artificial Sequence
  Description of Artificial Sequence: Synthetic peptide
  Seed: MDPRMCSLMQGSTLPRRSGAAGA
MDPRMFSLMQLSTTPRRSGAAGA

SEQ ID NO: 106926 - protein, 23 aa, Artificial Sequence
  Description of Artificial Sequence: Synthetic peptide
  Seed: MDPRMCSLMQGSTLPRRSGAAGA
MDPRMFSLMQLSTVPRRSGAAGA

SEQ ID NO: 106927 - protein, 23 aa, Artificial Sequence
  Description of Artificial Sequence: Synthetic peptide
  Seed: MDPRMCSLMQGSTLPRRSGAAGA
MDPRMFSLMQMSTAPRRSGAAGA

SEQ ID NO: 106928 - protein, 23 aa, Artificial Sequence
  Description of Artificial Sequence: Synthetic peptide
  Seed: MDPRMCSLMQGSTLPRRSGAAGA
MDPRMFSLMQMSTNPRRSGAAGA

SEQ ID NO: 106929 - protein, 23 aa, Artificial Sequence
  Description of Artificial Sequence: Synthetic peptide
  Seed: MDPRMCSLMQGSTLPRRSGAAGA
MDPRMFSLMQMSTSPRRSGAAGA

SEQ ID NO: 106930 - protein, 23 aa, Artificial Sequence
  Description of Artificial Sequence: Synthetic peptide
  Seed: MDPRMCSLMQGSTLPRRSGAAGA
MDPRMFSLMQMSTTPRRSGAAGA

SEQ ID NO: 106931 - protein, 23 aa, Artificial Sequence
  Description of Artificial Sequence: Synthetic peptide
  Seed: MDPRMCSLMQGSTLPRRSGAAGA
MDPRMFSLMQMSTVPRRSGAAGA

SEQ ID NO: 106932 - protein, 23 aa, Artificial Sequence
  Description of Artificial Sequence: Synthetic peptide
  Seed: MDPRMCSLMQGSTLPRRSGAAGA
MDPRMFSLMQNSTAPRRSGAAGA

SEQ ID NO: 106933 - protein, 23 aa, Artificial Sequence
  Description of Artificial Sequence: Synthetic peptide
  Seed: MDPRMCSLMQGSTLPRRSGAAGA
MDPRMFSLMQNSTGPRRSGAAGA

SEQ ID NO: 106934 - protein, 23 aa, Artificial Sequence
  Description of Artificial Sequence: Synthetic peptide
  Seed: MDPRMCSLMQGSTLPRRSGAAGA
MDPRMFSLMQNSTIPRRSGAAGA

SEQ ID NO: 106935 - protein, 23 aa, Artificial Sequence
  Description of Artificial Sequence: Synthetic peptide
  Seed: MDPRMCSLMQGSTLPRRSGAAGA
MDPRMFSLMQNSTLPRRSGAAGA

SEQ ID NO: 106936 - protein, 23 aa, Artificial Sequence
  Description of Artificial Sequence: Synthetic peptide
  Seed: MDPRMCSLMQGSTLPRRSGAAGA
MDPRMFSLMQNSTMPRRSGAAGA

SEQ ID NO: 106937 - protein, 23 aa, Artificial Sequence
  Description of Artificial Sequence: Synthetic peptide
  Seed: MDPRMCSLMQGSTLPRRSGAAGA
MDPRMFSLMQNSTNPRRSGAAGA

SEQ ID NO: 106938 - protein, 23 aa, Artificial Sequence
  Description of Artificial Sequence: Synthetic peptide
  Seed: MDPRMCSLMQGSTLPRRSGAAGA
MDPRMFSLMQNSTSPRRSGAAGA

SEQ ID NO: 106939 - protein, 23 aa, Artificial Sequence
  Description of Artificial Sequence: Synthetic peptide
  Seed: MDPRMCSLMQGSTLPRRSGAAGA
MDPRMFSLMQNSTTPRRSGAAGA

SEQ ID NO: 106940 - protein, 23 aa, Artificial Sequence
  Description of Artificial Sequence: Synthetic peptide
  Seed: MDPRMCSLMQGSTLPRRSGAAGA
MDPRMFSLMQNSTVPRRSGAAGA

SEQ ID NO: 106941 - protein, 23 aa, Artificial Sequence
  Description of Artificial Sequence: Synthetic peptide
  Seed: MDPRMCSLMQGSTLPRRSGAAGA
MDPRMFSLMQPSTAPRRSGAAGA

SEQ ID NO: 106942 - protein, 23 aa, Artificial Sequence
  Description of Artificial Sequence: Synthetic peptide
  Seed: MDPRMCSLMQGSTLPRRSGAAGA
MDPRMFSLMQPSTCPRRSGAAGA

SEQ ID NO: 106943 - protein, 23 aa, Artificial Sequence
  Description of Artificial Sequence: Synthetic peptide
  Seed: MDPRMCSLMQGSTLPRRSGAAGA
MDPRMFSLMQPSTDPRRSGAAGA

SEQ ID NO: 106944 - protein, 23 aa, Artificial Sequence
  Description of Artificial Sequence: Synthetic peptide
  Seed: MDPRMCSLMQGSTLPRRSGAAGA
MDPRMFSLMQPSTEPRRSGAAGA

SEQ ID NO: 106945 - protein, 23 aa, Artificial Sequence
  Description of Artificial Sequence: Synthetic peptide
  Seed: MDPRMCSLMQGSTLPRRSGAAGA
MDPRMFSLMQPSTFPRRSGAAGA

SEQ ID NO: 106946 - protein, 23 aa, Artificial Sequence
  Description of Artificial Sequence: Synthetic peptide
  Seed: MDPRMCSLMQGSTLPRRSGAAGA
MDPRMFSLMQPSTGPRRSGAAGA

SEQ ID NO: 106947 - protein, 23 aa, Artificial Sequence
  Description of Artificial Sequence: Synthetic peptide
  Seed: MDPRMCSLMQGSTLPRRSGAAGA
MDPRMFSLMQPSTHPRRSGAAGA

SEQ ID NO: 106948 - protein, 23 aa, Artificial Sequence
  Description of Artificial Sequence: Synthetic peptide
  Seed: MDPRMCSLMQGSTLPRRSGAAGA
MDPRMFSLMQPSTIPRRSGAAGA

SEQ ID NO: 106949 - protein, 23 aa, Artificial Sequence
  Description of Artificial Sequence: Synthetic peptide
  Seed: MDPRMCSLMQGSTLPRRSGAAGA
MDPRMFSLMQPSTLPRRSGAAGA

SEQ ID NO: 106950 - protein, 23 aa, Artificial Sequence
  Description of Artificial Sequence: Synthetic peptide
  Seed: MDPRMCSLMQGSTLPRRSGAAGA
MDPRMFSLMQPSTMPRRSGAAGA

SEQ ID NO: 106951 - protein, 23 aa, Artificial Sequence
  Description of Artificial Sequence: Synthetic peptide
  Seed: MDPRMCSLMQGSTLPRRSGAAGA
MDPRMFSLMQPSTNPRRSGAAGA

SEQ ID NO: 106952 - protein, 23 aa, Artificial Sequence
  Description of Artificial Sequence: Synthetic peptide
  Seed: MDPRMCSLMQGSTLPRRSGAAGA
MDPRMFSLMQPSTPPRRSGAAGA

SEQ ID NO: 106953 - protein, 23 aa, Artificial Sequence
  Description of Artificial Sequence: Synthetic peptide
  Seed: MDPRMCSLMQGSTLPRRSGAAGA
MDPRMFSLMQPSTQPRRSGAAGA

SEQ ID NO: 106954 - protein, 23 aa, Artificial Sequence
  Description of Artificial Sequence: Synthetic peptide
  Seed: MDPRMCSLMQGSTLPRRSGAAGA
MDPRMFSLMQPSTSPRRSGAAGA

SEQ ID NO: 106955 - protein, 23 aa, Artificial Sequence
  Description of Artificial Sequence: Synthetic peptide
  Seed: MDPRMCSLMQGSTLPRRSGAAGA
MDPRMFSLMQPSTTPRRSGAAGA

SEQ ID NO: 106956 - protein, 23 aa, Artificial Sequence
  Description of Artificial Sequence: Synthetic peptide
  Seed: MDPRMCSLMQGSTLPRRSGAAGA
MDPRMFSLMQPSTVPRRSGAAGA

SEQ ID NO: 106957 - protein, 23 aa, Artificial Sequence
  Description of Artificial Sequence: Synthetic peptide
  Seed: MDPRMCSLMQGSTLPRRSGAAGA
MDPRMFSLMQSSTAPRRSGAAGA

SEQ ID NO: 106958 - protein, 23 aa, Artificial Sequence
  Description of Artificial Sequence: Synthetic peptide
  Seed: MDPRMCSLMQGSTLPRRSGAAGA
MDPRMFSLMQSSTCPRRSGAAGA

SEQ ID NO: 106959 - protein, 23 aa, Artificial Sequence
  Description of Artificial Sequence: Synthetic peptide
  Seed: MDPRMCSLMQGSTLPRRSGAAGA
MDPRMFSLMQSSTDPRRSGAAGA

SEQ ID NO: 106960 - protein, 23 aa, Artificial Sequence
  Description of Artificial Sequence: Synthetic peptide
  Seed: MDPRMCSLMQGSTLPRRSGAAGA
MDPRMFSLMQSSTFPRRSGAAGA

SEQ ID NO: 106961 - protein, 23 aa, Artificial Sequence
  Description of Artificial Sequence: Synthetic peptide
  Seed: MDPRMCSLMQGSTLPRRSGAAGA
MDPRMFSLMQSSTGPRRSGAAGA

SEQ ID NO: 106962 - protein, 23 aa, Artificial Sequence
  Description of Artificial Sequence: Synthetic peptide
  Seed: MDPRMCSLMQGSTLPRRSGAAGA
MDPRMFSLMQSSTHPRRSGAAGA

SEQ ID NO: 106963 - protein, 23 aa, Artificial Sequence
  Description of Artificial Sequence: Synthetic peptide
  Seed: MDPRMCSLMQGSTLPRRSGAAGA
MDPRMFSLMQSSTIPRRSGAAGA

SEQ ID NO: 106964 - protein, 23 aa, Artificial Sequence
  Description of Artificial Sequence: Synthetic peptide
  Seed: MDPRMCSLMQGSTLPRRSGAAGA
MDPRMFSLMQSSTLPRRSGAAGA

SEQ ID NO: 106965 - protein, 23 aa, Artificial Sequence
  Description of Artificial Sequence: Synthetic peptide
  Seed: MDPRMCSLMQGSTLPRRSGAAGA
MDPRMFSLMQSSTMPRRSGAAGA

SEQ ID NO: 106966 - protein, 23 aa, Artificial Sequence
  Description of Artificial Sequence: Synthetic peptide
  Seed: MDPRMCSLMQGSTLPRRSGAAGA
MDPRMFSLMQSSTNPRRSGAAGA

SEQ ID NO: 106967 - protein, 23 aa, Artificial Sequence
  Description of Artificial Sequence: Synthetic peptide
  Seed: MDPRMCSLMQGSTLPRRSGAAGA
MDPRMFSLMQSSTPPRRSGAAGA

SEQ ID NO: 106968 - protein, 23 aa, Artificial Sequence
  Description of Artificial Sequence: Synthetic peptide
  Seed: MDPRMCSLMQGSTLPRRSGAAGA
MDPRMFSLMQSSTQPRRSGAAGA

SEQ ID NO: 106969 - protein, 23 aa, Artificial Sequence
  Description of Artificial Sequence: Synthetic peptide
  Seed: MDPRMCSLMQGSTLPRRSGAAGA
MDPRMFSLMQSSTSPRRSGAAGA

SEQ ID NO: 106970 - protein, 23 aa, Artificial Sequence
  Description of Artificial Sequence: Synthetic peptide
  Seed: MDPRMCSLMQGSTLPRRSGAAGA
MDPRMFSLMQSSTTPRRSGAAGA

SEQ ID NO: 106971 - protein, 23 aa, Artificial Sequence
  Description of Artificial Sequence: Synthetic peptide
  Seed: MDPRMCSLMQGSTLPRRSGAAGA
MDPRMFSLMQSSTVPRRSGAAGA

SEQ ID NO: 106972 - protein, 23 aa, Artificial Sequence
  Description of Artificial Sequence: Synthetic peptide
  Seed: MDPRMCSLMQGSTLPRRSGAAGA
MDPRMFSLMQTSTAPRRSGAAGA

SEQ ID NO: 106973 - protein, 23 aa, Artificial Sequence
  Description of Artificial Sequence: Synthetic peptide
  Seed: MDPRMCSLMQGSTLPRRSGAAGA
MDPRMFSLMQTSTDPRRSGAAGA

SEQ ID NO: 106974 - protein, 23 aa, Artificial Sequence
  Description of Artificial Sequence: Synthetic peptide
  Seed: MDPRMCSLMQGSTLPRRSGAAGA
MDPRMFSLMQTSTGPRRSGAAGA

SEQ ID NO: 106975 - protein, 23 aa, Artificial Sequence
  Description of Artificial Sequence: Synthetic peptide
  Seed: MDPRMCSLMQGSTLPRRSGAAGA
MDPRMFSLMQTSTHPRRSGAAGA

SEQ ID NO: 106976 - protein, 23 aa, Artificial Sequence
  Description of Artificial Sequence: Synthetic peptide
  Seed: MDPRMCSLMQGSTLPRRSGAAGA
MDPRMFSLMQTSTIPRRSGAAGA

SEQ ID NO: 106977 - protein, 23 aa, Artificial Sequence
  Description of Artificial Sequence: Synthetic peptide
  Seed: MDPRMCSLMQGSTLPRRSGAAGA
MDPRMFSLMQTSTLPRRSGAAGA

SEQ ID NO: 106978 - protein, 23 aa, Artificial Sequence
  Description of Artificial Sequence: Synthetic peptide
  Seed: MDPRMCSLMQGSTLPRRSGAAGA
MDPRMFSLMQTSTMPRRSGAAGA

SEQ ID NO: 106979 - protein, 23 aa, Artificial Sequence
  Description of Artificial Sequence: Synthetic peptide
  Seed: MDPRMCSLMQGSTLPRRSGAAGA
MDPRMFSLMQTSTNPRRSGAAGA

SEQ ID NO: 106980 - protein, 23 aa, Artificial Sequence
  Description of Artificial Sequence: Synthetic peptide
  Seed: MDPRMCSLMQGSTLPRRSGAAGA
MDPRMFSLMQTSTPPRRSGAAGA

SEQ ID NO: 106981 - protein, 23 aa, Artificial Sequence
  Description of Artificial Sequence: Synthetic peptide
  Seed: MDPRMCSLMQGSTLPRRSGAAGA
MDPRMFSLMQTSTQPRRSGAAGA

SEQ ID NO: 106982 - protein, 23 aa, Artificial Sequence
  Description of Artificial Sequence: Synthetic peptide
  Seed: MDPRMCSLMQGSTLPRRSGAAGA
MDPRMFSLMQTSTSPRRSGAAGA

SEQ ID NO: 106983 - protein, 23 aa, Artificial Sequence
  Description of Artificial Sequence: Synthetic peptide
  Seed: MDPRMCSLMQGSTLPRRSGAAGA
MDPRMFSLMQTSTTPRRSGAAGA

SEQ ID NO: 106984 - protein, 23 aa, Artificial Sequence
  Description of Artificial Sequence: Synthetic peptide
  Seed: MDPRMCSLMQGSTLPRRSGAAGA
MDPRMFSLMQTSTVPRRSGAAGA

SEQ ID NO: 106985 - protein, 23 aa, Artificial Sequence
  Description of Artificial Sequence: Synthetic peptide
  Seed: MDPRMCSLMQGSTLPRRSGAAGA
MDPRMFSLMQVSTAPRRSGAAGA

SEQ ID NO: 106986 - protein, 23 aa, Artificial Sequence
  Description of Artificial Sequence: Synthetic peptide
  Seed: MDPRMCSLMQGSTLPRRSGAAGA
MDPRMFSLMQVSTDPRRSGAAGA

SEQ ID NO: 106987 - protein, 23 aa, Artificial Sequence
  Description of Artificial Sequence: Synthetic peptide
  Seed: MDPRMCSLMQGSTLPRRSGAAGA
MDPRMFSLMQVSTEPRRSGAAGA

SEQ ID NO: 106988 - protein, 23 aa, Artificial Sequence
  Description of Artificial Sequence: Synthetic peptide
  Seed: MDPRMCSLMQGSTLPRRSGAAGA
MDPRMFSLMQVSTGPRRSGAAGA

SEQ ID NO: 106989 - protein, 23 aa, Artificial Sequence
  Description of Artificial Sequence: Synthetic peptide
  Seed: MDPRMCSLMQGSTLPRRSGAAGA
MDPRMFSLMQVSTHPRRSGAAGA

SEQ ID NO: 106990 - protein, 23 aa, Artificial Sequence
  Description of Artificial Sequence: Synthetic peptide
  Seed: MDPRMCSLMQGSTLPRRSGAAGA
MDPRMFSLMQVSTIPRRSGAAGA

SEQ ID NO: 106991 - protein, 23 aa, Artificial Sequence
  Description of Artificial Sequence: Synthetic peptide
  Seed: MDPRMCSLMQGSTLPRRSGAAGA
MDPRMFSLMQVSTLPRRSGAAGA

SEQ ID NO: 106992 - protein, 23 aa, Artificial Sequence
  Description of Artificial Sequence: Synthetic peptide
  Seed: MDPRMCSLMQGSTLPRRSGAAGA
MDPRMFSLMQVSTMPRRSGAAGA

SEQ ID NO: 106993 - protein, 23 aa, Artificial Sequence
  Description of Artificial Sequence: Synthetic peptide
  Seed: MDPRMCSLMQGSTLPRRSGAAGA
MDPRMFSLMQVSTNPRRSGAAGA

SEQ ID NO: 106994 - protein, 23 aa, Artificial Sequence
  Description of Artificial Sequence: Synthetic peptide
  Seed: MDPRMCSLMQGSTLPRRSGAAGA
MDPRMFSLMQVSTPPRRSGAAGA

SEQ ID NO: 106995 - protein, 23 aa, Artificial Sequence
  Description of Artificial Sequence: Synthetic peptide
  Seed: MDPRMCSLMQGSTLPRRSGAAGA
MDPRMFSLMQVSTQPRRSGAAGA

SEQ ID NO: 106996 - protein, 23 aa, Artificial Sequence
  Description of Artificial Sequence: Synthetic peptide
  Seed: MDPRMCSLMQGSTLPRRSGAAGA
MDPRMFSLMQVSTSPRRSGAAGA

SEQ ID NO: 106997 - protein, 23 aa, Artificial Sequence
  Description of Artificial Sequence: Synthetic peptide
  Seed: MDPRMCSLMQGSTLPRRSGAAGA
MDPRMFSLMQVSTTPRRSGAAGA

SEQ ID NO: 106998 - protein, 23 aa, Artificial Sequence
  Description of Artificial Sequence: Synthetic peptide
  Seed: MDPRMCSLMQGSTLPRRSGAAGA
MDPRMFSLMQVSTVPRRSGAAGA

SEQ ID NO: 106999 - protein, 23 aa, Artificial Sequence
  Description of Artificial Sequence: Synthetic peptide
  Seed: MDPRMCSLMQGSTLPRRSGAAGA
MDPRMFSLNQASTIPRRSGAAGA

SEQ ID NO: 107000 - protein, 23 aa, Artificial Sequence
  Description of Artificial Sequence: Synthetic peptide
  Seed: MDPRMCSLMQGSTLPRRSGAAGA
MDPRMFSLNQASTLPRRSGAAGA

SEQ ID NO: 107001 - protein, 23 aa, Artificial Sequence
  Description of Artificial Sequence: Synthetic peptide
  Seed: MDPRMCSLMQGSTLPRRSGAAGA
MDPRMFSLNQASTVPRRSGAAGA

SEQ ID NO: 107002 - protein, 23 aa, Artificial Sequence
  Description of Artificial Sequence: Synthetic peptide
  Seed: MDPRMCSLMQGSTLPRRSGAAGA
MDPRMFSLQQASTAPRRSGAAGA

SEQ ID NO: 107003 - protein, 23 aa, Artificial Sequence
  Description of Artificial Sequence: Synthetic peptide
  Seed: MDPRMCSLMQGSTLPRRSGAAGA
MDPRMFSLQQASTIPRRSGAAGA

SEQ ID NO: 107004 - protein, 23 aa, Artificial Sequence
  Description of Artificial Sequence: Synthetic peptide
  Seed: MDPRMCSLMQGSTLPRRSGAAGA
MDPRMFSLQQASTLPRRSGAAGA

SEQ ID NO: 107005 - protein, 23 aa, Artificial Sequence
  Description of Artificial Sequence: Synthetic peptide
  Seed: MDPRMCSLMQGSTLPRRSGAAGA
MDPRMFSLQQASTMPRRSGAAGA

SEQ ID NO: 107006 - protein, 23 aa, Artificial Sequence
  Description of Artificial Sequence: Synthetic peptide
  Seed: MDPRMCSLMQGSTLPRRSGAAGA
MDPRMFSLQQASTNPRRSGAAGA

SEQ ID NO: 107007 - protein, 23 aa, Artificial Sequence
  Description of Artificial Sequence: Synthetic peptide
  Seed: MDPRMCSLMQGSTLPRRSGAAGA
MDPRMFSLQQASTSPRRSGAAGA

SEQ ID NO: 107008 - protein, 23 aa, Artificial Sequence
  Description of Artificial Sequence: Synthetic peptide
  Seed: MDPRMCSLMQGSTLPRRSGAAGA
MDPRMFSLQQASTTPRRSGAAGA

SEQ ID NO: 107009 - protein, 23 aa, Artificial Sequence
  Description of Artificial Sequence: Synthetic peptide
  Seed: MDPRMCSLMQGSTLPRRSGAAGA
MDPRMFSLQQASTVPRRSGAAGA

SEQ ID NO: 107010 - protein, 23 aa, Artificial Sequence
  Description of Artificial Sequence: Synthetic peptide
  Seed: MDPRMCSLMQGSTLPRRSGAAGA
MDPRMFSLQQGSTAPRRSGAAGA

SEQ ID NO: 107011 - protein, 23 aa, Artificial Sequence
  Description of Artificial Sequence: Synthetic peptide
  Seed: MDPRMCSLMQGSTLPRRSGAAGA
MDPRMFSLQQGSTIPRRSGAAGA

SEQ ID NO: 107012 - protein, 23 aa, Artificial Sequence
  Description of Artificial Sequence: Synthetic peptide
  Seed: MDPRMCSLMQGSTLPRRSGAAGA
MDPRMFSLQQGSTLPRRSGAAGA

SEQ ID NO: 107013 - protein, 23 aa, Artificial Sequence
  Description of Artificial Sequence: Synthetic peptide
  Seed: MDPRMCSLMQGSTLPRRSGAAGA
MDPRMFSLQQGSTMPRRSGAAGA

SEQ ID NO: 107014 - protein, 23 aa, Artificial Sequence
  Description of Artificial Sequence: Synthetic peptide
  Seed: MDPRMCSLMQGSTLPRRSGAAGA
MDPRMFSLQQGSTVPRRSGAAGA

SEQ ID NO: 107015 - protein, 23 aa, Artificial Sequence
  Description of Artificial Sequence: Synthetic peptide
  Seed: MDPRMCSLMQGSTLPRRSGAAGA
MDPRMFSLQQISTAPRRSGAAGA

SEQ ID NO: 107016 - protein, 23 aa, Artificial Sequence
  Description of Artificial Sequence: Synthetic peptide
  Seed: MDPRMCSLMQGSTLPRRSGAAGA
MDPRMFSLQQNSTLPRRSGAAGA

SEQ ID NO: 107017 - protein, 23 aa, Artificial Sequence
  Description of Artificial Sequence: Synthetic peptide
  Seed: MDPRMCSLMQGSTLPRRSGAAGA
MDPRMFSLQQNSTVPRRSGAAGA

SEQ ID NO: 107018 - protein, 23 aa, Artificial Sequence
  Description of Artificial Sequence: Synthetic peptide
  Seed: MDPRMCSLMQGSTLPRRSGAAGA
MDPRMFSLQQPSTAPRRSGAAGA

SEQ ID NO: 107019 - protein, 23 aa, Artificial Sequence
  Description of Artificial Sequence: Synthetic peptide
  Seed: MDPRMCSLMQGSTLPRRSGAAGA
MDPRMFSLQQPSTIPRRSGAAGA

SEQ ID NO: 107020 - protein, 23 aa, Artificial Sequence
  Description of Artificial Sequence: Synthetic peptide
  Seed: MDPRMCSLMQGSTLPRRSGAAGA
MDPRMFSLQQPSTLPRRSGAAGA

SEQ ID NO: 107021 - protein, 23 aa, Artificial Sequence
  Description of Artificial Sequence: Synthetic peptide
  Seed: MDPRMCSLMQGSTLPRRSGAAGA
MDPRMFSLQQPSTVPRRSGAAGA

SEQ ID NO: 107022 - protein, 23 aa, Artificial Sequence
  Description of Artificial Sequence: Synthetic peptide
  Seed: MDPRMCSLMQGSTLPRRSGAAGA
MDPRMFSLQQSSTAPRRSGAAGA

SEQ ID NO: 107023 - protein, 23 aa, Artificial Sequence
  Description of Artificial Sequence: Synthetic peptide
  Seed: MDPRMCSLMQGSTLPRRSGAAGA
MDPRMFSLQQSSTIPRRSGAAGA

SEQ ID NO: 107024 - protein, 23 aa, Artificial Sequence
  Description of Artificial Sequence: Synthetic peptide
  Seed: MDPRMCSLMQGSTLPRRSGAAGA
MDPRMFSLQQSSTLPRRSGAAGA

SEQ ID NO: 107025 - protein, 23 aa, Artificial Sequence
  Description of Artificial Sequence: Synthetic peptide
  Seed: MDPRMCSLMQGSTLPRRSGAAGA
MDPRMFSLQQSSTMPRRSGAAGA

SEQ ID NO: 107026 - protein, 23 aa, Artificial Sequence
  Description of Artificial Sequence: Synthetic peptide
  Seed: MDPRMCSLMQGSTLPRRSGAAGA
MDPRMFSLQQSSTSPRRSGAAGA

SEQ ID NO: 107027 - protein, 23 aa, Artificial Sequence
  Description of Artificial Sequence: Synthetic peptide
  Seed: MDPRMCSLMQGSTLPRRSGAAGA
MDPRMFSLQQSSTVPRRSGAAGA

SEQ ID NO: 107028 - protein, 23 aa, Artificial Sequence
  Description of Artificial Sequence: Synthetic peptide
  Seed: MDPRMCSLMQGSTLPRRSGAAGA
MDPRMFSLQQTSTAPRRSGAAGA

SEQ ID NO: 107029 - protein, 23 aa, Artificial Sequence
  Description of Artificial Sequence: Synthetic peptide
  Seed: MDPRMCSLMQGSTLPRRSGAAGA
MDPRMFSLQQTSTLPRRSGAAGA

SEQ ID NO: 107030 - protein, 23 aa, Artificial Sequence
  Description of Artificial Sequence: Synthetic peptide
  Seed: MDPRMCSLMQGSTLPRRSGAAGA
MDPRMFSLQQTSTNPRRSGAAGA

SEQ ID NO: 107031 - protein, 23 aa, Artificial Sequence
  Description of Artificial Sequence: Synthetic peptide
  Seed: MDPRMCSLMQGSTLPRRSGAAGA
MDPRMFSLQQTSTVPRRSGAAGA

SEQ ID NO: 107032 - protein, 23 aa, Artificial Sequence
  Description of Artificial Sequence: Synthetic peptide
  Seed: MDPRMCSLMQGSTLPRRSGAAGA
MDPRMFSLQQVSTAPRRSGAAGA

SEQ ID NO: 107033 - protein, 23 aa, Artificial Sequence
  Description of Artificial Sequence: Synthetic peptide
  Seed: MDPRMCSLMQGSTLPRRSGAAGA
MDPRMFSLQQVSTNPRRSGAAGA

SEQ ID NO: 107034 - protein, 23 aa, Artificial Sequence
  Description of Artificial Sequence: Synthetic peptide
  Seed: MDPRMCSLMQGSTLPRRSGAAGA
MDPRMFSLQQVSTSPRRSGAAGA

SEQ ID NO: 107035 - protein, 23 aa, Artificial Sequence
  Description of Artificial Sequence: Synthetic peptide
  Seed: MDPRMCSLMQGSTLPRRSGAAGA
MDPRMFSLSQASTAPRRSGAAGA

SEQ ID NO: 107036 - protein, 23 aa, Artificial Sequence
  Description of Artificial Sequence: Synthetic peptide
  Seed: MDPRMCSLMQGSTLPRRSGAAGA
MDPRMFSLSQASTIPRRSGAAGA

SEQ ID NO: 107037 - protein, 23 aa, Artificial Sequence
  Description of Artificial Sequence: Synthetic peptide
  Seed: MDPRMCSLMQGSTLPRRSGAAGA
MDPRMFSLSQASTLPRRSGAAGA

SEQ ID NO: 107038 - protein, 23 aa, Artificial Sequence
  Description of Artificial Sequence: Synthetic peptide
  Seed: MDPRMCSLMQGSTLPRRSGAAGA
MDPRMFSLSQASTMPRRSGAAGA

SEQ ID NO: 107039 - protein, 23 aa, Artificial Sequence
  Description of Artificial Sequence: Synthetic peptide
  Seed: MDPRMCSLMQGSTLPRRSGAAGA
MDPRMFSLSQASTNPRRSGAAGA

SEQ ID NO: 107040 - protein, 23 aa, Artificial Sequence
  Description of Artificial Sequence: Synthetic peptide
  Seed: MDPRMCSLMQGSTLPRRSGAAGA
MDPRMFSLSQASTSPRRSGAAGA

SEQ ID NO: 107041 - protein, 23 aa, Artificial Sequence
  Description of Artificial Sequence: Synthetic peptide
  Seed: MDPRMCSLMQGSTLPRRSGAAGA
MDPRMFSLSQASTVPRRSGAAGA

SEQ ID NO: 107042 - protein, 23 aa, Artificial Sequence
  Description of Artificial Sequence: Synthetic peptide
  Seed: MDPRMCSLMQGSTLPRRSGAAGA
MDPRMFSLSQGSTIPRRSGAAGA

SEQ ID NO: 107043 - protein, 23 aa, Artificial Sequence
  Description of Artificial Sequence: Synthetic peptide
  Seed: MDPRMCSLMQGSTLPRRSGAAGA
MDPRMFSLSQGSTLPRRSGAAGA

SEQ ID NO: 107044 - protein, 23 aa, Artificial Sequence
  Description of Artificial Sequence: Synthetic peptide
  Seed: MDPRMCSLMQGSTLPRRSGAAGA
MDPRMFSLSQGSTVPRRSGAAGA

SEQ ID NO: 107045 - protein, 23 aa, Artificial Sequence
  Description of Artificial Sequence: Synthetic peptide
  Seed: MDPRMCSLMQGSTLPRRSGAAGA
MDPRMFSLSQPSTIPRRSGAAGA

SEQ ID NO: 107046 - protein, 23 aa, Artificial Sequence
  Description of Artificial Sequence: Synthetic peptide
  Seed: MDPRMCSLMQGSTLPRRSGAAGA
MDPRMFSLSQPSTLPRRSGAAGA

SEQ ID NO: 107047 - protein, 23 aa, Artificial Sequence
  Description of Artificial Sequence: Synthetic peptide
  Seed: MDPRMCSLMQGSTLPRRSGAAGA
MDPRMFSLSQPSTVPRRSGAAGA

SEQ ID NO: 107048 - protein, 23 aa, Artificial Sequence
  Description of Artificial Sequence: Synthetic peptide
  Seed: MDPRMCSLMQGSTLPRRSGAAGA
MDPRMFSLSQSSTIPRRSGAAGA

SEQ ID NO: 107049 - protein, 23 aa, Artificial Sequence
  Description of Artificial Sequence: Synthetic peptide
  Seed: MDPRMCSLMQGSTLPRRSGAAGA
MDPRMFSLSQSSTLPRRSGAAGA

SEQ ID NO: 107050 - protein, 23 aa, Artificial Sequence
  Description of Artificial Sequence: Synthetic peptide
  Seed: MDPRMCSLMQGSTLPRRSGAAGA
MDPRMFSLSQSSTVPRRSGAAGA

SEQ ID NO: 107051 - protein, 23 aa, Artificial Sequence
  Description of Artificial Sequence: Synthetic peptide
  Seed: MDPRMCSLMQGSTLPRRSGAAGA
MDPRMFSLTQASTAPRRSGAAGA

SEQ ID NO: 107052 - protein, 23 aa, Artificial Sequence
  Description of Artificial Sequence: Synthetic peptide
  Seed: MDPRMCSLMQGSTLPRRSGAAGA
MDPRMFSLTQASTIPRRSGAAGA

SEQ ID NO: 107053 - protein, 23 aa, Artificial Sequence
  Description of Artificial Sequence: Synthetic peptide
  Seed: MDPRMCSLMQGSTLPRRSGAAGA
MDPRMFSLTQASTLPRRSGAAGA

SEQ ID NO: 107054 - protein, 23 aa, Artificial Sequence
  Description of Artificial Sequence: Synthetic peptide
  Seed: MDPRMCSLMQGSTLPRRSGAAGA
MDPRMFSLTQASTNPRRSGAAGA

SEQ ID NO: 107055 - protein, 23 aa, Artificial Sequence
  Description of Artificial Sequence: Synthetic peptide
  Seed: MDPRMCSLMQGSTLPRRSGAAGA
MDPRMFSLTQASTSPRRSGAAGA

SEQ ID NO: 107056 - protein, 23 aa, Artificial Sequence
  Description of Artificial Sequence: Synthetic peptide
  Seed: MDPRMCSLMQGSTLPRRSGAAGA
MDPRMFSLTQASTVPRRSGAAGA

SEQ ID NO: 107057 - protein, 23 aa, Artificial Sequence
  Description of Artificial Sequence: Synthetic peptide
  Seed: MDPRMCSLMQGSTLPRRSGAAGA
MDPRMFSLTQGSTLPRRSGAAGA

SEQ ID NO: 107058 - protein, 23 aa, Artificial Sequence
  Description of Artificial Sequence: Synthetic peptide
  Seed: MDPRMCSLMQGSTLPRRSGAAGA
MDPRMFSLTQGSTVPRRSGAAGA

SEQ ID NO: 107059 - protein, 23 aa, Artificial Sequence
  Description of Artificial Sequence: Synthetic peptide
  Seed: MDPRMCSLMQGSTLPRRSGAAGA
MDPRMFSLVQASTAPRRSGAAGA

SEQ ID NO: 107060 - protein, 23 aa, Artificial Sequence
  Description of Artificial Sequence: Synthetic peptide
  Seed: MDPRMCSLMQGSTLPRRSGAAGA
MDPRMFSLVQASTGPRRSGAAGA

SEQ ID NO: 107061 - protein, 23 aa, Artificial Sequence
  Description of Artificial Sequence: Synthetic peptide
  Seed: MDPRMCSLMQGSTLPRRSGAAGA
MDPRMFSLVQASTHPRRSGAAGA

SEQ ID NO: 107062 - protein, 23 aa, Artificial Sequence
  Description of Artificial Sequence: Synthetic peptide
  Seed: MDPRMCSLMQGSTLPRRSGAAGA
MDPRMFSLVQASTIPRRSGAAGA

SEQ ID NO: 107063 - protein, 23 aa, Artificial Sequence
  Description of Artificial Sequence: Synthetic peptide
  Seed: MDPRMCSLMQGSTLPRRSGAAGA
MDPRMFSLVQASTLPRRSGAAGA

SEQ ID NO: 107064 - protein, 23 aa, Artificial Sequence
  Description of Artificial Sequence: Synthetic peptide
  Seed: MDPRMCSLMQGSTLPRRSGAAGA
MDPRMFSLVQASTMPRRSGAAGA

SEQ ID NO: 107065 - protein, 23 aa, Artificial Sequence
  Description of Artificial Sequence: Synthetic peptide
  Seed: MDPRMCSLMQGSTLPRRSGAAGA
MDPRMFSLVQASTNPRRSGAAGA

SEQ ID NO: 107066 - protein, 23 aa, Artificial Sequence
  Description of Artificial Sequence: Synthetic peptide
  Seed: MDPRMCSLMQGSTLPRRSGAAGA
MDPRMFSLVQASTQPRRSGAAGA

SEQ ID NO: 107067 - protein, 23 aa, Artificial Sequence
  Description of Artificial Sequence: Synthetic peptide
  Seed: MDPRMCSLMQGSTLPRRSGAAGA
MDPRMFSLVQASTSPRRSGAAGA

SEQ ID NO: 107068 - protein, 23 aa, Artificial Sequence
  Description of Artificial Sequence: Synthetic peptide
  Seed: MDPRMCSLMQGSTLPRRSGAAGA
MDPRMFSLVQASTTPRRSGAAGA

SEQ ID NO: 107069 - protein, 23 aa, Artificial Sequence
  Description of Artificial Sequence: Synthetic peptide
  Seed: MDPRMCSLMQGSTLPRRSGAAGA
MDPRMFSLVQASTVPRRSGAAGA

SEQ ID NO: 107070 - protein, 23 aa, Artificial Sequence
  Description of Artificial Sequence: Synthetic peptide
  Seed: MDPRMCSLMQGSTLPRRSGAAGA
MDPRMFSLVQGSTAPRRSGAAGA

SEQ ID NO: 107071 - protein, 23 aa, Artificial Sequence
  Description of Artificial Sequence: Synthetic peptide
  Seed: MDPRMCSLMQGSTLPRRSGAAGA
MDPRMFSLVQGSTIPRRSGAAGA

SEQ ID NO: 107072 - protein, 23 aa, Artificial Sequence
  Description of Artificial Sequence: Synthetic peptide
  Seed: MDPRMCSLMQGSTLPRRSGAAGA
MDPRMFSLVQGSTLPRRSGAAGA

SEQ ID NO: 107073 - protein, 23 aa, Artificial Sequence
  Description of Artificial Sequence: Synthetic peptide
  Seed: MDPRMCSLMQGSTLPRRSGAAGA
MDPRMFSLVQGSTMPRRSGAAGA

SEQ ID NO: 107074 - protein, 23 aa, Artificial Sequence
  Description of Artificial Sequence: Synthetic peptide
  Seed: MDPRMCSLMQGSTLPRRSGAAGA
MDPRMFSLVQGSTNPRRSGAAGA

SEQ ID NO: 107075 - protein, 23 aa, Artificial Sequence
  Description of Artificial Sequence: Synthetic peptide
  Seed: MDPRMCSLMQGSTLPRRSGAAGA
MDPRMFSLVQGSTSPRRSGAAGA

SEQ ID NO: 107076 - protein, 23 aa, Artificial Sequence
  Description of Artificial Sequence: Synthetic peptide
  Seed: MDPRMCSLMQGSTLPRRSGAAGA
MDPRMFSLVQGSTTPRRSGAAGA

SEQ ID NO: 107077 - protein, 23 aa, Artificial Sequence
  Description of Artificial Sequence: Synthetic peptide
  Seed: MDPRMCSLMQGSTLPRRSGAAGA
MDPRMFSLVQGSTVPRRSGAAGA

SEQ ID NO: 107078 - protein, 23 aa, Artificial Sequence
  Description of Artificial Sequence: Synthetic peptide
  Seed: MDPRMCSLMQGSTLPRRSGAAGA
MDPRMFSLVQISTAPRRSGAAGA

SEQ ID NO: 107079 - protein, 23 aa, Artificial Sequence
  Description of Artificial Sequence: Synthetic peptide
  Seed: MDPRMCSLMQGSTLPRRSGAAGA
MDPRMFSLVQISTNPRRSGAAGA

SEQ ID NO: 107080 - protein, 23 aa, Artificial Sequence
  Description of Artificial Sequence: Synthetic peptide
  Seed: MDPRMCSLMQGSTLPRRSGAAGA
MDPRMFSLVQISTSPRRSGAAGA

SEQ ID NO: 107081 - protein, 23 aa, Artificial Sequence
  Description of Artificial Sequence: Synthetic peptide
  Seed: MDPRMCSLMQGSTLPRRSGAAGA
MDPRMFSLVQNSTAPRRSGAAGA

SEQ ID NO: 107082 - protein, 23 aa, Artificial Sequence
  Description of Artificial Sequence: Synthetic peptide
  Seed: MDPRMCSLMQGSTLPRRSGAAGA
MDPRMFSLVQNSTIPRRSGAAGA

SEQ ID NO: 107083 - protein, 23 aa, Artificial Sequence
  Description of Artificial Sequence: Synthetic peptide
  Seed: MDPRMCSLMQGSTLPRRSGAAGA
MDPRMFSLVQNSTLPRRSGAAGA

SEQ ID NO: 107084 - protein, 23 aa, Artificial Sequence
  Description of Artificial Sequence: Synthetic peptide
  Seed: MDPRMCSLMQGSTLPRRSGAAGA
MDPRMFSLVQNSTVPRRSGAAGA

SEQ ID NO: 107085 - protein, 23 aa, Artificial Sequence
  Description of Artificial Sequence: Synthetic peptide
  Seed: MDPRMCSLMQGSTLPRRSGAAGA
MDPRMFSLVQPSTAPRRSGAAGA

SEQ ID NO: 107086 - protein, 23 aa, Artificial Sequence
  Description of Artificial Sequence: Synthetic peptide
  Seed: MDPRMCSLMQGSTLPRRSGAAGA
MDPRMFSLVQPSTGPRRSGAAGA

SEQ ID NO: 107087 - protein, 23 aa, Artificial Sequence
  Description of Artificial Sequence: Synthetic peptide
  Seed: MDPRMCSLMQGSTLPRRSGAAGA
MDPRMFSLVQPSTIPRRSGAAGA

SEQ ID NO: 107088 - protein, 23 aa, Artificial Sequence
  Description of Artificial Sequence: Synthetic peptide
  Seed: MDPRMCSLMQGSTLPRRSGAAGA
MDPRMFSLVQPSTLPRRSGAAGA

SEQ ID NO: 107089 - protein, 23 aa, Artificial Sequence
  Description of Artificial Sequence: Synthetic peptide
  Seed: MDPRMCSLMQGSTLPRRSGAAGA
MDPRMFSLVQPSTMPRRSGAAGA

SEQ ID NO: 107090 - protein, 23 aa, Artificial Sequence
  Description of Artificial Sequence: Synthetic peptide
  Seed: MDPRMCSLMQGSTLPRRSGAAGA
MDPRMFSLVQPSTNPRRSGAAGA

SEQ ID NO: 107091 - protein, 23 aa, Artificial Sequence
  Description of Artificial Sequence: Synthetic peptide
  Seed: MDPRMCSLMQGSTLPRRSGAAGA
MDPRMFSLVQPSTSPRRSGAAGA

SEQ ID NO: 107092 - protein, 23 aa, Artificial Sequence
  Description of Artificial Sequence: Synthetic peptide
  Seed: MDPRMCSLMQGSTLPRRSGAAGA
MDPRMFSLVQPSTTPRRSGAAGA

SEQ ID NO: 107093 - protein, 23 aa, Artificial Sequence
  Description of Artificial Sequence: Synthetic peptide
  Seed: MDPRMCSLMQGSTLPRRSGAAGA
MDPRMFSLVQPSTVPRRSGAAGA

SEQ ID NO: 107094 - protein, 23 aa, Artificial Sequence
  Description of Artificial Sequence: Synthetic peptide
  Seed: MDPRMCSLMQGSTLPRRSGAAGA
MDPRMFSLVQSSTAPRRSGAAGA

SEQ ID NO: 107095 - protein, 23 aa, Artificial Sequence
  Description of Artificial Sequence: Synthetic peptide
  Seed: MDPRMCSLMQGSTLPRRSGAAGA
MDPRMFSLVQSSTGPRRSGAAGA

SEQ ID NO: 107096 - protein, 23 aa, Artificial Sequence
  Description of Artificial Sequence: Synthetic peptide
  Seed: MDPRMCSLMQGSTLPRRSGAAGA
MDPRMFSLVQSSTIPRRSGAAGA

SEQ ID NO: 107097 - protein, 23 aa, Artificial Sequence
  Description of Artificial Sequence: Synthetic peptide
  Seed: MDPRMCSLMQGSTLPRRSGAAGA
MDPRMFSLVQSSTLPRRSGAAGA

SEQ ID NO: 107098 - protein, 23 aa, Artificial Sequence
  Description of Artificial Sequence: Synthetic peptide
  Seed: MDPRMCSLMQGSTLPRRSGAAGA
MDPRMFSLVQSSTMPRRSGAAGA

SEQ ID NO: 107099 - protein, 23 aa, Artificial Sequence
  Description of Artificial Sequence: Synthetic peptide
  Seed: MDPRMCSLMQGSTLPRRSGAAGA
MDPRMFSLVQSSTNPRRSGAAGA

SEQ ID NO: 107100 - protein, 23 aa, Artificial Sequence
  Description of Artificial Sequence: Synthetic peptide
  Seed: MDPRMCSLMQGSTLPRRSGAAGA
MDPRMFSLVQSSTSPRRSGAAGA

SEQ ID NO: 107101 - protein, 23 aa, Artificial Sequence
  Description of Artificial Sequence: Synthetic peptide
  Seed: MDPRMCSLMQGSTLPRRSGAAGA
MDPRMFSLVQSSTTPRRSGAAGA

SEQ ID NO: 107102 - protein, 23 aa, Artificial Sequence
  Description of Artificial Sequence: Synthetic peptide
  Seed: MDPRMCSLMQGSTLPRRSGAAGA
MDPRMFSLVQSSTVPRRSGAAGA

SEQ ID NO: 107103 - protein, 23 aa, Artificial Sequence
  Description of Artificial Sequence: Synthetic peptide
  Seed: MDPRMCSLMQGSTLPRRSGAAGA
MDPRMFSLVQTSTAPRRSGAAGA

SEQ ID NO: 107104 - protein, 23 aa, Artificial Sequence
  Description of Artificial Sequence: Synthetic peptide
  Seed: MDPRMCSLMQGSTLPRRSGAAGA
MDPRMFSLVQTSTIPRRSGAAGA

SEQ ID NO: 107105 - protein, 23 aa, Artificial Sequence
  Description of Artificial Sequence: Synthetic peptide
  Seed: MDPRMCSLMQGSTLPRRSGAAGA
MDPRMFSLVQTSTLPRRSGAAGA

SEQ ID NO: 107106 - protein, 23 aa, Artificial Sequence
  Description of Artificial Sequence: Synthetic peptide
  Seed: MDPRMCSLMQGSTLPRRSGAAGA
MDPRMFSLVQTSTNPRRSGAAGA

SEQ ID NO: 107107 - protein, 23 aa, Artificial Sequence
  Description of Artificial Sequence: Synthetic peptide
  Seed: MDPRMCSLMQGSTLPRRSGAAGA
MDPRMFSLVQTSTSPRRSGAAGA

SEQ ID NO: 107108 - protein, 23 aa, Artificial Sequence
  Description of Artificial Sequence: Synthetic peptide
  Seed: MDPRMCSLMQGSTLPRRSGAAGA
MDPRMFSLVQTSTTPRRSGAAGA

SEQ ID NO: 107109 - protein, 23 aa, Artificial Sequence
  Description of Artificial Sequence: Synthetic peptide
  Seed: MDPRMCSLMQGSTLPRRSGAAGA
MDPRMFSLVQTSTVPRRSGAAGA

SEQ ID NO: 107110 - protein, 23 aa, Artificial Sequence
  Description of Artificial Sequence: Synthetic peptide
  Seed: MDPRMCSLMQGSTLPRRSGAAGA
MDPRMFSLVQVSTAPRRSGAAGA

SEQ ID NO: 107111 - protein, 23 aa, Artificial Sequence
  Description of Artificial Sequence: Synthetic peptide
  Seed: MDPRMCSLMQGSTLPRRSGAAGA
MDPRMFSLVQVSTNPRRSGAAGA

SEQ ID NO: 107112 - protein, 23 aa, Artificial Sequence
  Description of Artificial Sequence: Synthetic peptide
  Seed: MDPRMCSLMQGSTLPRRSGAAGA
MDPRMFSLVQVSTSPRRSGAAGA

SEQ ID NO: 107113 - protein, 23 aa, Artificial Sequence
  Description of Artificial Sequence: Synthetic peptide
  Seed: MDPRMCSLMQGSTLPRRSGAAGA
MDPRMFSLVQVSTTPRRSGAAGA

SEQ ID NO: 107114 - protein, 23 aa, Artificial Sequence
  Description of Artificial Sequence: Synthetic peptide
  Seed: MDPRMCSLMQGSTLPRRSGAAGA
MDPRMFSLVQVSTVPRRSGAAGA

SEQ ID NO: 107115 - protein, 23 aa, Artificial Sequence
  Description of Artificial Sequence: Synthetic peptide
  Seed: MDPRMCSLMQGSTLPRRSGAAGA
MDPRMISLAQASTAPRRSGAAGA

SEQ ID NO: 107116 - protein, 23 aa, Artificial Sequence
  Description of Artificial Sequence: Synthetic peptide
  Seed: MDPRMCSLMQGSTLPRRSGAAGA
MDPRMISLAQASTIPRRSGAAGA

SEQ ID NO: 107117 - protein, 23 aa, Artificial Sequence
  Description of Artificial Sequence: Synthetic peptide
  Seed: MDPRMCSLMQGSTLPRRSGAAGA
MDPRMISLAQASTLPRRSGAAGA

SEQ ID NO: 107118 - protein, 23 aa, Artificial Sequence
  Description of Artificial Sequence: Synthetic peptide
  Seed: MDPRMCSLMQGSTLPRRSGAAGA
MDPRMISLAQASTVPRRSGAAGA

SEQ ID NO: 107119 - protein, 23 aa, Artificial Sequence
  Description of Artificial Sequence: Synthetic peptide
  Seed: MDPRMCSLMQGSTLPRRSGAAGA
MDPRMISLAQGSTLPRRSGAAGA

SEQ ID NO: 107120 - protein, 23 aa, Artificial Sequence
  Description of Artificial Sequence: Synthetic peptide
  Seed: MDPRMCSLMQGSTLPRRSGAAGA
MDPRMISLAQGSTVPRRSGAAGA

SEQ ID NO: 107121 - protein, 23 aa, Artificial Sequence
  Description of Artificial Sequence: Synthetic peptide
  Seed: MDPRMCSLMQGSTLPRRSGAAGA
MDPRMISLIQASTAPRRSGAAGA

SEQ ID NO: 107122 - protein, 23 aa, Artificial Sequence
  Description of Artificial Sequence: Synthetic peptide
  Seed: MDPRMCSLMQGSTLPRRSGAAGA
MDPRMISLIQASTIPRRSGAAGA

SEQ ID NO: 107123 - protein, 23 aa, Artificial Sequence
  Description of Artificial Sequence: Synthetic peptide
  Seed: MDPRMCSLMQGSTLPRRSGAAGA
MDPRMISLIQASTLPRRSGAAGA

SEQ ID NO: 107124 - protein, 23 aa, Artificial Sequence
  Description of Artificial Sequence: Synthetic peptide
  Seed: MDPRMCSLMQGSTLPRRSGAAGA
MDPRMISLIQASTNPRRSGAAGA

SEQ ID NO: 107125 - protein, 23 aa, Artificial Sequence
  Description of Artificial Sequence: Synthetic peptide
  Seed: MDPRMCSLMQGSTLPRRSGAAGA
MDPRMISLIQASTSPRRSGAAGA

SEQ ID NO: 107126 - protein, 23 aa, Artificial Sequence
  Description of Artificial Sequence: Synthetic peptide
  Seed: MDPRMCSLMQGSTLPRRSGAAGA
MDPRMISLIQASTVPRRSGAAGA

SEQ ID NO: 107127 - protein, 23 aa, Artificial Sequence
  Description of Artificial Sequence: Synthetic peptide
  Seed: MDPRMCSLMQGSTLPRRSGAAGA
MDPRMISLIQGSTAPRRSGAAGA

SEQ ID NO: 107128 - protein, 23 aa, Artificial Sequence
  Description of Artificial Sequence: Synthetic peptide
  Seed: MDPRMCSLMQGSTLPRRSGAAGA
MDPRMISLIQGSTIPRRSGAAGA

SEQ ID NO: 107129 - protein, 23 aa, Artificial Sequence
  Description of Artificial Sequence: Synthetic peptide
  Seed: MDPRMCSLMQGSTLPRRSGAAGA
MDPRMISLIQGSTLPRRSGAAGA

SEQ ID NO: 107130 - protein, 23 aa, Artificial Sequence
  Description of Artificial Sequence: Synthetic peptide
  Seed: MDPRMCSLMQGSTLPRRSGAAGA
MDPRMISLIQGSTVPRRSGAAGA

SEQ ID NO: 107131 - protein, 23 aa, Artificial Sequence
  Description of Artificial Sequence: Synthetic peptide
  Seed: MDPRMCSLMQGSTLPRRSGAAGA
MDPRMISLIQPSTVPRRSGAAGA

SEQ ID NO: 107132 - protein, 23 aa, Artificial Sequence
  Description of Artificial Sequence: Synthetic peptide
  Seed: MDPRMCSLMQGSTLPRRSGAAGA
MDPRMISLIQSSTLPRRSGAAGA

SEQ ID NO: 107133 - protein, 23 aa, Artificial Sequence
  Description of Artificial Sequence: Synthetic peptide
  Seed: MDPRMCSLMQGSTLPRRSGAAGA
MDPRMISLIQSSTVPRRSGAAGA

SEQ ID NO: 107134 - protein, 23 aa, Artificial Sequence
  Description of Artificial Sequence: Synthetic peptide
  Seed: MDPRMCSLMQGSTLPRRSGAAGA
MDPRMISLLQASTAPRRSGAAGA

SEQ ID NO: 107135 - protein, 23 aa, Artificial Sequence
  Description of Artificial Sequence: Synthetic peptide
  Seed: MDPRMCSLMQGSTLPRRSGAAGA
MDPRMISLLQASTGPRRSGAAGA

SEQ ID NO: 107136 - protein, 23 aa, Artificial Sequence
  Description of Artificial Sequence: Synthetic peptide
  Seed: MDPRMCSLMQGSTLPRRSGAAGA
MDPRMISLLQASTIPRRSGAAGA

SEQ ID NO: 107137 - protein, 23 aa, Artificial Sequence
  Description of Artificial Sequence: Synthetic peptide
  Seed: MDPRMCSLMQGSTLPRRSGAAGA
MDPRMISLLQASTLPRRSGAAGA

SEQ ID NO: 107138 - protein, 23 aa, Artificial Sequence
  Description of Artificial Sequence: Synthetic peptide
  Seed: MDPRMCSLMQGSTLPRRSGAAGA
MDPRMISLLQASTMPRRSGAAGA

SEQ ID NO: 107139 - protein, 23 aa, Artificial Sequence
  Description of Artificial Sequence: Synthetic peptide
  Seed: MDPRMCSLMQGSTLPRRSGAAGA
MDPRMISLLQASTNPRRSGAAGA

SEQ ID NO: 107140 - protein, 23 aa, Artificial Sequence
  Description of Artificial Sequence: Synthetic peptide
  Seed: MDPRMCSLMQGSTLPRRSGAAGA
MDPRMISLLQASTSPRRSGAAGA

SEQ ID NO: 107141 - protein, 23 aa, Artificial Sequence
  Description of Artificial Sequence: Synthetic peptide
  Seed: MDPRMCSLMQGSTLPRRSGAAGA
MDPRMISLLQASTTPRRSGAAGA

SEQ ID NO: 107142 - protein, 23 aa, Artificial Sequence
  Description of Artificial Sequence: Synthetic peptide
  Seed: MDPRMCSLMQGSTLPRRSGAAGA
MDPRMISLLQASTVPRRSGAAGA

SEQ ID NO: 107143 - protein, 23 aa, Artificial Sequence
  Description of Artificial Sequence: Synthetic peptide
  Seed: MDPRMCSLMQGSTLPRRSGAAGA
MDPRMISLLQGSTAPRRSGAAGA

SEQ ID NO: 107144 - protein, 23 aa, Artificial Sequence
  Description of Artificial Sequence: Synthetic peptide
  Seed: MDPRMCSLMQGSTLPRRSGAAGA
MDPRMISLLQGSTIPRRSGAAGA

SEQ ID NO: 107145 - protein, 23 aa, Artificial Sequence
  Description of Artificial Sequence: Synthetic peptide
  Seed: MDPRMCSLMQGSTLPRRSGAAGA
MDPRMISLLQGSTLPRRSGAAGA

SEQ ID NO: 107146 - protein, 23 aa, Artificial Sequence
  Description of Artificial Sequence: Synthetic peptide
  Seed: MDPRMCSLMQGSTLPRRSGAAGA
MDPRMISLLQGSTMPRRSGAAGA

SEQ ID NO: 107147 - protein, 23 aa, Artificial Sequence
  Description of Artificial Sequence: Synthetic peptide
  Seed: MDPRMCSLMQGSTLPRRSGAAGA
MDPRMISLLQGSTSPRRSGAAGA

SEQ ID NO: 107148 - protein, 23 aa, Artificial Sequence
  Description of Artificial Sequence: Synthetic peptide
  Seed: MDPRMCSLMQGSTLPRRSGAAGA
MDPRMISLLQGSTTPRRSGAAGA

SEQ ID NO: 107149 - protein, 23 aa, Artificial Sequence
  Description of Artificial Sequence: Synthetic peptide
  Seed: MDPRMCSLMQGSTLPRRSGAAGA
MDPRMISLLQGSTVPRRSGAAGA

SEQ ID NO: 107150 - protein, 23 aa, Artificial Sequence
  Description of Artificial Sequence: Synthetic peptide
  Seed: MDPRMCSLMQGSTLPRRSGAAGA
MDPRMISLLQNSTIPRRSGAAGA

SEQ ID NO: 107151 - protein, 23 aa, Artificial Sequence
  Description of Artificial Sequence: Synthetic peptide
  Seed: MDPRMCSLMQGSTLPRRSGAAGA
MDPRMISLLQNSTLPRRSGAAGA

SEQ ID NO: 107152 - protein, 23 aa, Artificial Sequence
  Description of Artificial Sequence: Synthetic peptide
  Seed: MDPRMCSLMQGSTLPRRSGAAGA
MDPRMISLLQNSTVPRRSGAAGA

SEQ ID NO: 107153 - protein, 23 aa, Artificial Sequence
  Description of Artificial Sequence: Synthetic peptide
  Seed: MDPRMCSLMQGSTLPRRSGAAGA
MDPRMISLLQPSTAPRRSGAAGA

SEQ ID NO: 107154 - protein, 23 aa, Artificial Sequence
  Description of Artificial Sequence: Synthetic peptide
  Seed: MDPRMCSLMQGSTLPRRSGAAGA
MDPRMISLLQPSTIPRRSGAAGA

SEQ ID NO: 107155 - protein, 23 aa, Artificial Sequence
  Description of Artificial Sequence: Synthetic peptide
  Seed: MDPRMCSLMQGSTLPRRSGAAGA
MDPRMISLLQPSTLPRRSGAAGA

SEQ ID NO: 107156 - protein, 23 aa, Artificial Sequence
  Description of Artificial Sequence: Synthetic peptide
  Seed: MDPRMCSLMQGSTLPRRSGAAGA
MDPRMISLLQPSTMPRRSGAAGA

SEQ ID NO: 107157 - protein, 23 aa, Artificial Sequence
  Description of Artificial Sequence: Synthetic peptide
  Seed: MDPRMCSLMQGSTLPRRSGAAGA
MDPRMISLLQPSTNPRRSGAAGA

SEQ ID NO: 107158 - protein, 23 aa, Artificial Sequence
  Description of Artificial Sequence: Synthetic peptide
  Seed: MDPRMCSLMQGSTLPRRSGAAGA
MDPRMISLLQPSTSPRRSGAAGA

SEQ ID NO: 107159 - protein, 23 aa, Artificial Sequence
  Description of Artificial Sequence: Synthetic peptide
  Seed: MDPRMCSLMQGSTLPRRSGAAGA
MDPRMISLLQPSTTPRRSGAAGA

SEQ ID NO: 107160 - protein, 23 aa, Artificial Sequence
  Description of Artificial Sequence: Synthetic peptide
  Seed: MDPRMCSLMQGSTLPRRSGAAGA
MDPRMISLLQPSTVPRRSGAAGA

SEQ ID NO: 107161 - protein, 23 aa, Artificial Sequence
  Description of Artificial Sequence: Synthetic peptide
  Seed: MDPRMCSLMQGSTLPRRSGAAGA
MDPRMISLLQSSTAPRRSGAAGA

SEQ ID NO: 107162 - protein, 23 aa, Artificial Sequence
  Description of Artificial Sequence: Synthetic peptide
  Seed: MDPRMCSLMQGSTLPRRSGAAGA
MDPRMISLLQSSTIPRRSGAAGA

SEQ ID NO: 107163 - protein, 23 aa, Artificial Sequence
  Description of Artificial Sequence: Synthetic peptide
  Seed: MDPRMCSLMQGSTLPRRSGAAGA
MDPRMISLLQSSTLPRRSGAAGA

SEQ ID NO: 107164 - protein, 23 aa, Artificial Sequence
  Description of Artificial Sequence: Synthetic peptide
  Seed: MDPRMCSLMQGSTLPRRSGAAGA
MDPRMISLLQSSTMPRRSGAAGA

SEQ ID NO: 107165 - protein, 23 aa, Artificial Sequence
  Description of Artificial Sequence: Synthetic peptide
  Seed: MDPRMCSLMQGSTLPRRSGAAGA
MDPRMISLLQSSTSPRRSGAAGA

SEQ ID NO: 107166 - protein, 23 aa, Artificial Sequence
  Description of Artificial Sequence: Synthetic peptide
  Seed: MDPRMCSLMQGSTLPRRSGAAGA
MDPRMISLLQSSTTPRRSGAAGA

SEQ ID NO: 107167 - protein, 23 aa, Artificial Sequence
  Description of Artificial Sequence: Synthetic peptide
  Seed: MDPRMCSLMQGSTLPRRSGAAGA
MDPRMISLLQSSTVPRRSGAAGA

SEQ ID NO: 107168 - protein, 23 aa, Artificial Sequence
  Description of Artificial Sequence: Synthetic peptide
  Seed: MDPRMCSLMQGSTLPRRSGAAGA
MDPRMISLLQTSTAPRRSGAAGA

SEQ ID NO: 107169 - protein, 23 aa, Artificial Sequence
  Description of Artificial Sequence: Synthetic peptide
  Seed: MDPRMCSLMQGSTLPRRSGAAGA
MDPRMISLLQTSTIPRRSGAAGA

SEQ ID NO: 107170 - protein, 23 aa, Artificial Sequence
  Description of Artificial Sequence: Synthetic peptide
  Seed: MDPRMCSLMQGSTLPRRSGAAGA
MDPRMISLLQTSTLPRRSGAAGA

SEQ ID NO: 107171 - protein, 23 aa, Artificial Sequence
  Description of Artificial Sequence: Synthetic peptide
  Seed: MDPRMCSLMQGSTLPRRSGAAGA
MDPRMISLLQTSTNPRRSGAAGA

SEQ ID NO: 107172 - protein, 23 aa, Artificial Sequence
  Description of Artificial Sequence: Synthetic peptide
  Seed: MDPRMCSLMQGSTLPRRSGAAGA
MDPRMISLLQTSTVPRRSGAAGA

SEQ ID NO: 107173 - protein, 23 aa, Artificial Sequence
  Description of Artificial Sequence: Synthetic peptide
  Seed: MDPRMCSLMQGSTLPRRSGAAGA
MDPRMISLLQVSTAPRRSGAAGA

SEQ ID NO: 107174 - protein, 23 aa, Artificial Sequence
  Description of Artificial Sequence: Synthetic peptide
  Seed: MDPRMCSLMQGSTLPRRSGAAGA
MDPRMISLLQVSTNPRRSGAAGA

SEQ ID NO: 107175 - protein, 23 aa, Artificial Sequence
  Description of Artificial Sequence: Synthetic peptide
  Seed: MDPRMCSLMQGSTLPRRSGAAGA
MDPRMISLLQVSTSPRRSGAAGA

SEQ ID NO: 107176 - protein, 23 aa, Artificial Sequence
  Description of Artificial Sequence: Synthetic peptide
  Seed: MDPRMCSLMQGSTLPRRSGAAGA
MDPRMISLMQASTAPRRSGAAGA

SEQ ID NO: 107177 - protein, 23 aa, Artificial Sequence
  Description of Artificial Sequence: Synthetic peptide
  Seed: MDPRMCSLMQGSTLPRRSGAAGA
MDPRMISLMQASTGPRRSGAAGA

SEQ ID NO: 107178 - protein, 23 aa, Artificial Sequence
  Description of Artificial Sequence: Synthetic peptide
  Seed: MDPRMCSLMQGSTLPRRSGAAGA
MDPRMISLMQASTIPRRSGAAGA

SEQ ID NO: 107179 - protein, 23 aa, Artificial Sequence
  Description of Artificial Sequence: Synthetic peptide
  Seed: MDPRMCSLMQGSTLPRRSGAAGA
MDPRMISLMQASTLPRRSGAAGA

SEQ ID NO: 107180 - protein, 23 aa, Artificial Sequence
  Description of Artificial Sequence: Synthetic peptide
  Seed: MDPRMCSLMQGSTLPRRSGAAGA
MDPRMISLMQASTMPRRSGAAGA

SEQ ID NO: 107181 - protein, 23 aa, Artificial Sequence
  Description of Artificial Sequence: Synthetic peptide
  Seed: MDPRMCSLMQGSTLPRRSGAAGA
MDPRMISLMQASTNPRRSGAAGA

SEQ ID NO: 107182 - protein, 23 aa, Artificial Sequence
  Description of Artificial Sequence: Synthetic peptide
  Seed: MDPRMCSLMQGSTLPRRSGAAGA
MDPRMISLMQASTSPRRSGAAGA

SEQ ID NO: 107183 - protein, 23 aa, Artificial Sequence
  Description of Artificial Sequence: Synthetic peptide
  Seed: MDPRMCSLMQGSTLPRRSGAAGA
MDPRMISLMQASTTPRRSGAAGA

SEQ ID NO: 107184 - protein, 23 aa, Artificial Sequence
  Description of Artificial Sequence: Synthetic peptide
  Seed: MDPRMCSLMQGSTLPRRSGAAGA
MDPRMISLMQASTVPRRSGAAGA

SEQ ID NO: 107185 - protein, 23 aa, Artificial Sequence
  Description of Artificial Sequence: Synthetic peptide
  Seed: MDPRMCSLMQGSTLPRRSGAAGA
MDPRMISLMQGSTAPRRSGAAGA

SEQ ID NO: 107186 - protein, 23 aa, Artificial Sequence
  Description of Artificial Sequence: Synthetic peptide
  Seed: MDPRMCSLMQGSTLPRRSGAAGA
MDPRMISLMQGSTIPRRSGAAGA

SEQ ID NO: 107187 - protein, 23 aa, Artificial Sequence
  Description of Artificial Sequence: Synthetic peptide
  Seed: MDPRMCSLMQGSTLPRRSGAAGA
MDPRMISLMQGSTLPRRSGAAGA

SEQ ID NO: 107188 - protein, 23 aa, Artificial Sequence
  Description of Artificial Sequence: Synthetic peptide
  Seed: MDPRMCSLMQGSTLPRRSGAAGA
MDPRMISLMQGSTMPRRSGAAGA

SEQ ID NO: 107189 - protein, 23 aa, Artificial Sequence
  Description of Artificial Sequence: Synthetic peptide
  Seed: MDPRMCSLMQGSTLPRRSGAAGA
MDPRMISLMQGSTSPRRSGAAGA

SEQ ID NO: 107190 - protein, 23 aa, Artificial Sequence
  Description of Artificial Sequence: Synthetic peptide
  Seed: MDPRMCSLMQGSTLPRRSGAAGA
MDPRMISLMQGSTTPRRSGAAGA

SEQ ID NO: 107191 - protein, 23 aa, Artificial Sequence
  Description of Artificial Sequence: Synthetic peptide
  Seed: MDPRMCSLMQGSTLPRRSGAAGA
MDPRMISLMQGSTVPRRSGAAGA

SEQ ID NO: 107192 - protein, 23 aa, Artificial Sequence
  Description of Artificial Sequence: Synthetic peptide
  Seed: MDPRMCSLMQGSTLPRRSGAAGA
MDPRMISLMQISTAPRRSGAAGA

SEQ ID NO: 107193 - protein, 23 aa, Artificial Sequence
  Description of Artificial Sequence: Synthetic peptide
  Seed: MDPRMCSLMQGSTLPRRSGAAGA
MDPRMISLMQISTSPRRSGAAGA

SEQ ID NO: 107194 - protein, 23 aa, Artificial Sequence
  Description of Artificial Sequence: Synthetic peptide
  Seed: MDPRMCSLMQGSTLPRRSGAAGA
MDPRMISLMQNSTIPRRSGAAGA

SEQ ID NO: 107195 - protein, 23 aa, Artificial Sequence
  Description of Artificial Sequence: Synthetic peptide
  Seed: MDPRMCSLMQGSTLPRRSGAAGA
MDPRMISLMQNSTLPRRSGAAGA

SEQ ID NO: 107196 - protein, 23 aa, Artificial Sequence
  Description of Artificial Sequence: Synthetic peptide
  Seed: MDPRMCSLMQGSTLPRRSGAAGA
MDPRMISLMQNSTVPRRSGAAGA

SEQ ID NO: 107197 - protein, 23 aa, Artificial Sequence
  Description of Artificial Sequence: Synthetic peptide
  Seed: MDPRMCSLMQGSTLPRRSGAAGA
MDPRMISLMQPSTAPRRSGAAGA

SEQ ID NO: 107198 - protein, 23 aa, Artificial Sequence
  Description of Artificial Sequence: Synthetic peptide
  Seed: MDPRMCSLMQGSTLPRRSGAAGA
MDPRMISLMQPSTIPRRSGAAGA

SEQ ID NO: 107199 - protein, 23 aa, Artificial Sequence
  Description of Artificial Sequence: Synthetic peptide
  Seed: MDPRMCSLMQGSTLPRRSGAAGA
MDPRMISLMQPSTLPRRSGAAGA

SEQ ID NO: 107200 - protein, 23 aa, Artificial Sequence
  Description of Artificial Sequence: Synthetic peptide
  Seed: MDPRMCSLMQGSTLPRRSGAAGA
MDPRMISLMQPSTMPRRSGAAGA

SEQ ID NO: 107201 - protein, 23 aa, Artificial Sequence
  Description of Artificial Sequence: Synthetic peptide
  Seed: MDPRMCSLMQGSTLPRRSGAAGA
MDPRMISLMQPSTNPRRSGAAGA

SEQ ID NO: 107202 - protein, 23 aa, Artificial Sequence
  Description of Artificial Sequence: Synthetic peptide
  Seed: MDPRMCSLMQGSTLPRRSGAAGA
MDPRMISLMQPSTSPRRSGAAGA

SEQ ID NO: 107203 - protein, 23 aa, Artificial Sequence
  Description of Artificial Sequence: Synthetic peptide
  Seed: MDPRMCSLMQGSTLPRRSGAAGA
MDPRMISLMQPSTVPRRSGAAGA

SEQ ID NO: 107204 - protein, 23 aa, Artificial Sequence
  Description of Artificial Sequence: Synthetic peptide
  Seed: MDPRMCSLMQGSTLPRRSGAAGA
MDPRMISLMQSSTAPRRSGAAGA

SEQ ID NO: 107205 - protein, 23 aa, Artificial Sequence
  Description of Artificial Sequence: Synthetic peptide
  Seed: MDPRMCSLMQGSTLPRRSGAAGA
MDPRMISLMQSSTIPRRSGAAGA

SEQ ID NO: 107206 - protein, 23 aa, Artificial Sequence
  Description of Artificial Sequence: Synthetic peptide
  Seed: MDPRMCSLMQGSTLPRRSGAAGA
MDPRMISLMQSSTLPRRSGAAGA

SEQ ID NO: 107207 - protein, 23 aa, Artificial Sequence
  Description of Artificial Sequence: Synthetic peptide
  Seed: MDPRMCSLMQGSTLPRRSGAAGA
MDPRMISLMQSSTMPRRSGAAGA

SEQ ID NO: 107208 - protein, 23 aa, Artificial Sequence
  Description of Artificial Sequence: Synthetic peptide
  Seed: MDPRMCSLMQGSTLPRRSGAAGA
MDPRMISLMQSSTNPRRSGAAGA

SEQ ID NO: 107209 - protein, 23 aa, Artificial Sequence
  Description of Artificial Sequence: Synthetic peptide
  Seed: MDPRMCSLMQGSTLPRRSGAAGA
MDPRMISLMQSSTSPRRSGAAGA

SEQ ID NO: 107210 - protein, 23 aa, Artificial Sequence
  Description of Artificial Sequence: Synthetic peptide
  Seed: MDPRMCSLMQGSTLPRRSGAAGA
MDPRMISLMQSSTTPRRSGAAGA

SEQ ID NO: 107211 - protein, 23 aa, Artificial Sequence
  Description of Artificial Sequence: Synthetic peptide
  Seed: MDPRMCSLMQGSTLPRRSGAAGA
MDPRMISLMQSSTVPRRSGAAGA

SEQ ID NO: 107212 - protein, 23 aa, Artificial Sequence
  Description of Artificial Sequence: Synthetic peptide
  Seed: MDPRMCSLMQGSTLPRRSGAAGA
MDPRMISLMQTSTAPRRSGAAGA

SEQ ID NO: 107213 - protein, 23 aa, Artificial Sequence
  Description of Artificial Sequence: Synthetic peptide
  Seed: MDPRMCSLMQGSTLPRRSGAAGA
MDPRMISLMQTSTIPRRSGAAGA

SEQ ID NO: 107214 - protein, 23 aa, Artificial Sequence
  Description of Artificial Sequence: Synthetic peptide
  Seed: MDPRMCSLMQGSTLPRRSGAAGA
MDPRMISLMQTSTLPRRSGAAGA

SEQ ID NO: 107215 - protein, 23 aa, Artificial Sequence
  Description of Artificial Sequence: Synthetic peptide
  Seed: MDPRMCSLMQGSTLPRRSGAAGA
MDPRMISLMQTSTNPRRSGAAGA

SEQ ID NO: 107216 - protein, 23 aa, Artificial Sequence
  Description of Artificial Sequence: Synthetic peptide
  Seed: MDPRMCSLMQGSTLPRRSGAAGA
MDPRMISLMQTSTSPRRSGAAGA

SEQ ID NO: 107217 - protein, 23 aa, Artificial Sequence
  Description of Artificial Sequence: Synthetic peptide
  Seed: MDPRMCSLMQGSTLPRRSGAAGA
MDPRMISLMQTSTVPRRSGAAGA

SEQ ID NO: 107218 - protein, 23 aa, Artificial Sequence
  Description of Artificial Sequence: Synthetic peptide
  Seed: MDPRMCSLMQGSTLPRRSGAAGA
MDPRMISLMQVSTAPRRSGAAGA

SEQ ID NO: 107219 - protein, 23 aa, Artificial Sequence
  Description of Artificial Sequence: Synthetic peptide
  Seed: MDPRMCSLMQGSTLPRRSGAAGA
MDPRMISLMQVSTNPRRSGAAGA

SEQ ID NO: 107220 - protein, 23 aa, Artificial Sequence
  Description of Artificial Sequence: Synthetic peptide
  Seed: MDPRMCSLMQGSTLPRRSGAAGA
MDPRMISLMQVSTSPRRSGAAGA

SEQ ID NO: 107221 - protein, 23 aa, Artificial Sequence
  Description of Artificial Sequence: Synthetic peptide
  Seed: MDPRMCSLMQGSTLPRRSGAAGA
MDPRMISLQQASTAPRRSGAAGA

SEQ ID NO: 107222 - protein, 23 aa, Artificial Sequence
  Description of Artificial Sequence: Synthetic peptide
  Seed: MDPRMCSLMQGSTLPRRSGAAGA
MDPRMISLQQASTIPRRSGAAGA

SEQ ID NO: 107223 - protein, 23 aa, Artificial Sequence
  Description of Artificial Sequence: Synthetic peptide
  Seed: MDPRMCSLMQGSTLPRRSGAAGA
MDPRMISLQQASTLPRRSGAAGA

SEQ ID NO: 107224 - protein, 23 aa, Artificial Sequence
  Description of Artificial Sequence: Synthetic peptide
  Seed: MDPRMCSLMQGSTLPRRSGAAGA
MDPRMISLQQASTVPRRSGAAGA

SEQ ID NO: 107225 - protein, 23 aa, Artificial Sequence
  Description of Artificial Sequence: Synthetic peptide
  Seed: MDPRMCSLMQGSTLPRRSGAAGA
MDPRMISLVQASTLPRRSGAAGA

SEQ ID NO: 107226 - protein, 23 aa, Artificial Sequence
  Description of Artificial Sequence: Synthetic peptide
  Seed: MDPRMCSLMQGSTLPRRSGAAGA
MDPRMISLVQASTVPRRSGAAGA

SEQ ID NO: 107227 - protein, 23 aa, Artificial Sequence
  Description of Artificial Sequence: Synthetic peptide
  Seed: MDPRMCSLMQGSTLPRRSGAAGA
MDPRMLSLAQASTIPRRSGAAGA

SEQ ID NO: 107228 - protein, 23 aa, Artificial Sequence
  Description of Artificial Sequence: Synthetic peptide
  Seed: MDPRMCSLMQGSTLPRRSGAAGA
MDPRMLSLAQASTLPRRSGAAGA

SEQ ID NO: 107229 - protein, 23 aa, Artificial Sequence
  Description of Artificial Sequence: Synthetic peptide
  Seed: MDPRMCSLMQGSTLPRRSGAAGA
MDPRMLSLAQASTVPRRSGAAGA

SEQ ID NO: 107230 - protein, 23 aa, Artificial Sequence
  Description of Artificial Sequence: Synthetic peptide
  Seed: MDPRMCSLMQGSTLPRRSGAAGA
MDPRMLSLIQASTAPRRSGAAGA

SEQ ID NO: 107231 - protein, 23 aa, Artificial Sequence
  Description of Artificial Sequence: Synthetic peptide
  Seed: MDPRMCSLMQGSTLPRRSGAAGA
MDPRMLSLIQASTIPRRSGAAGA

SEQ ID NO: 107232 - protein, 23 aa, Artificial Sequence
  Description of Artificial Sequence: Synthetic peptide
  Seed: MDPRMCSLMQGSTLPRRSGAAGA
MDPRMLSLIQASTLPRRSGAAGA

SEQ ID NO: 107233 - protein, 23 aa, Artificial Sequence
  Description of Artificial Sequence: Synthetic peptide
  Seed: MDPRMCSLMQGSTLPRRSGAAGA
MDPRMLSLIQASTNPRRSGAAGA

SEQ ID NO: 107234 - protein, 23 aa, Artificial Sequence
  Description of Artificial Sequence: Synthetic peptide
  Seed: MDPRMCSLMQGSTLPRRSGAAGA
MDPRMLSLIQASTSPRRSGAAGA

SEQ ID NO: 107235 - protein, 23 aa, Artificial Sequence
  Description of Artificial Sequence: Synthetic peptide
  Seed: MDPRMCSLMQGSTLPRRSGAAGA
MDPRMLSLIQASTVPRRSGAAGA

SEQ ID NO: 107236 - protein, 23 aa, Artificial Sequence
  Description of Artificial Sequence: Synthetic peptide
  Seed: MDPRMCSLMQGSTLPRRSGAAGA
MDPRMLSLIQGSTAPRRSGAAGA

SEQ ID NO: 107237 - protein, 23 aa, Artificial Sequence
  Description of Artificial Sequence: Synthetic peptide
  Seed: MDPRMCSLMQGSTLPRRSGAAGA
MDPRMLSLIQGSTIPRRSGAAGA

SEQ ID NO: 107238 - protein, 23 aa, Artificial Sequence
  Description of Artificial Sequence: Synthetic peptide
  Seed: MDPRMCSLMQGSTLPRRSGAAGA
MDPRMLSLIQGSTLPRRSGAAGA

SEQ ID NO: 107239 - protein, 23 aa, Artificial Sequence
  Description of Artificial Sequence: Synthetic peptide
  Seed: MDPRMCSLMQGSTLPRRSGAAGA
MDPRMLSLIQGSTVPRRSGAAGA

SEQ ID NO: 107240 - protein, 23 aa, Artificial Sequence
  Description of Artificial Sequence: Synthetic peptide
  Seed: MDPRMCSLMQGSTLPRRSGAAGA
MDPRMLSLLQASTAPRRSGAAGA

SEQ ID NO: 107241 - protein, 23 aa, Artificial Sequence
  Description of Artificial Sequence: Synthetic peptide
  Seed: MDPRMCSLMQGSTLPRRSGAAGA
MDPRMLSLLQASTIPRRSGAAGA

SEQ ID NO: 107242 - protein, 23 aa, Artificial Sequence
  Description of Artificial Sequence: Synthetic peptide
  Seed: MDPRMCSLMQGSTLPRRSGAAGA
MDPRMLSLLQASTLPRRSGAAGA

SEQ ID NO: 107243 - protein, 23 aa, Artificial Sequence
  Description of Artificial Sequence: Synthetic peptide
  Seed: MDPRMCSLMQGSTLPRRSGAAGA
MDPRMLSLLQASTMPRRSGAAGA

SEQ ID NO: 107244 - protein, 23 aa, Artificial Sequence
  Description of Artificial Sequence: Synthetic peptide
  Seed: MDPRMCSLMQGSTLPRRSGAAGA
MDPRMLSLLQASTNPRRSGAAGA

SEQ ID NO: 107245 - protein, 23 aa, Artificial Sequence
  Description of Artificial Sequence: Synthetic peptide
  Seed: MDPRMCSLMQGSTLPRRSGAAGA
MDPRMLSLLQASTSPRRSGAAGA

SEQ ID NO: 107246 - protein, 23 aa, Artificial Sequence
  Description of Artificial Sequence: Synthetic peptide
  Seed: MDPRMCSLMQGSTLPRRSGAAGA
MDPRMLSLLQASTTPRRSGAAGA

SEQ ID NO: 107247 - protein, 23 aa, Artificial Sequence
  Description of Artificial Sequence: Synthetic peptide
  Seed: MDPRMCSLMQGSTLPRRSGAAGA
MDPRMLSLLQASTVPRRSGAAGA

SEQ ID NO: 107248 - protein, 23 aa, Artificial Sequence
  Description of Artificial Sequence: Synthetic peptide
  Seed: MDPRMCSLMQGSTLPRRSGAAGA
MDPRMLSLLQGSTAPRRSGAAGA

SEQ ID NO: 107249 - protein, 23 aa, Artificial Sequence
  Description of Artificial Sequence: Synthetic peptide
  Seed: MDPRMCSLMQGSTLPRRSGAAGA
MDPRMLSLLQGSTIPRRSGAAGA

SEQ ID NO: 107250 - protein, 23 aa, Artificial Sequence
  Description of Artificial Sequence: Synthetic peptide
  Seed: MDPRMCSLMQGSTLPRRSGAAGA
MDPRMLSLLQGSTLPRRSGAAGA

SEQ ID NO: 107251 - protein, 23 aa, Artificial Sequence
  Description of Artificial Sequence: Synthetic peptide
  Seed: MDPRMCSLMQGSTLPRRSGAAGA
MDPRMLSLLQGSTMPRRSGAAGA

SEQ ID NO: 107252 - protein, 23 aa, Artificial Sequence
  Description of Artificial Sequence: Synthetic peptide
  Seed: MDPRMCSLMQGSTLPRRSGAAGA
MDPRMLSLLQGSTSPRRSGAAGA

SEQ ID NO: 107253 - protein, 23 aa, Artificial Sequence
  Description of Artificial Sequence: Synthetic peptide
  Seed: MDPRMCSLMQGSTLPRRSGAAGA
MDPRMLSLLQGSTTPRRSGAAGA

SEQ ID NO: 107254 - protein, 23 aa, Artificial Sequence
  Description of Artificial Sequence: Synthetic peptide
  Seed: MDPRMCSLMQGSTLPRRSGAAGA
MDPRMLSLLQGSTVPRRSGAAGA

SEQ ID NO: 107255 - protein, 23 aa, Artificial Sequence
  Description of Artificial Sequence: Synthetic peptide
  Seed: MDPRMCSLMQGSTLPRRSGAAGA
MDPRMLSLLQPSTAPRRSGAAGA

SEQ ID NO: 107256 - protein, 23 aa, Artificial Sequence
  Description of Artificial Sequence: Synthetic peptide
  Seed: MDPRMCSLMQGSTLPRRSGAAGA
MDPRMLSLLQPSTIPRRSGAAGA

SEQ ID NO: 107257 - protein, 23 aa, Artificial Sequence
  Description of Artificial Sequence: Synthetic peptide
  Seed: MDPRMCSLMQGSTLPRRSGAAGA
MDPRMLSLLQPSTLPRRSGAAGA

SEQ ID NO: 107258 - protein, 23 aa, Artificial Sequence
  Description of Artificial Sequence: Synthetic peptide
  Seed: MDPRMCSLMQGSTLPRRSGAAGA
MDPRMLSLLQPSTNPRRSGAAGA

SEQ ID NO: 107259 - protein, 23 aa, Artificial Sequence
  Description of Artificial Sequence: Synthetic peptide
  Seed: MDPRMCSLMQGSTLPRRSGAAGA
MDPRMLSLLQPSTSPRRSGAAGA

SEQ ID NO: 107260 - protein, 23 aa, Artificial Sequence
  Description of Artificial Sequence: Synthetic peptide
  Seed: MDPRMCSLMQGSTLPRRSGAAGA
MDPRMLSLLQPSTVPRRSGAAGA

SEQ ID NO: 107261 - protein, 23 aa, Artificial Sequence
  Description of Artificial Sequence: Synthetic peptide
  Seed: MDPRMCSLMQGSTLPRRSGAAGA
MDPRMLSLLQSSTAPRRSGAAGA

SEQ ID NO: 107262 - protein, 23 aa, Artificial Sequence
  Description of Artificial Sequence: Synthetic peptide
  Seed: MDPRMCSLMQGSTLPRRSGAAGA
MDPRMLSLLQSSTIPRRSGAAGA

SEQ ID NO: 107263 - protein, 23 aa, Artificial Sequence
  Description of Artificial Sequence: Synthetic peptide
  Seed: MDPRMCSLMQGSTLPRRSGAAGA
MDPRMLSLLQSSTLPRRSGAAGA

SEQ ID NO: 107264 - protein, 23 aa, Artificial Sequence
  Description of Artificial Sequence: Synthetic peptide
  Seed: MDPRMCSLMQGSTLPRRSGAAGA
MDPRMLSLLQSSTTPRRSGAAGA

SEQ ID NO: 107265 - protein, 23 aa, Artificial Sequence
  Description of Artificial Sequence: Synthetic peptide
  Seed: MDPRMCSLMQGSTLPRRSGAAGA
MDPRMLSLLQSSTVPRRSGAAGA

SEQ ID NO: 107266 - protein, 23 aa, Artificial Sequence
  Description of Artificial Sequence: Synthetic peptide
  Seed: MDPRMCSLMQGSTLPRRSGAAGA
MDPRMLSLLQTSTAPRRSGAAGA

SEQ ID NO: 107267 - protein, 23 aa, Artificial Sequence
  Description of Artificial Sequence: Synthetic peptide
  Seed: MDPRMCSLMQGSTLPRRSGAAGA
MDPRMLSLLQTSTNPRRSGAAGA

SEQ ID NO: 107268 - protein, 23 aa, Artificial Sequence
  Description of Artificial Sequence: Synthetic peptide
  Seed: MDPRMCSLMQGSTLPRRSGAAGA
MDPRMLSLLQTSTVPRRSGAAGA

SEQ ID NO: 107269 - protein, 23 aa, Artificial Sequence
  Description of Artificial Sequence: Synthetic peptide
  Seed: MDPRMCSLMQGSTLPRRSGAAGA
MDPRMLSLLQVSTAPRRSGAAGA

SEQ ID NO: 107270 - protein, 23 aa, Artificial Sequence
  Description of Artificial Sequence: Synthetic peptide
  Seed: MDPRMCSLMQGSTLPRRSGAAGA
MDPRMLSLLQVSTNPRRSGAAGA

SEQ ID NO: 107271 - protein, 23 aa, Artificial Sequence
  Description of Artificial Sequence: Synthetic peptide
  Seed: MDPRMCSLMQGSTLPRRSGAAGA
MDPRMLSLLQVSTSPRRSGAAGA

SEQ ID NO: 107272 - protein, 23 aa, Artificial Sequence
  Description of Artificial Sequence: Synthetic peptide
  Seed: MDPRMCSLMQGSTLPRRSGAAGA
MDPRMLSLMQASTAPRRSGAAGA

SEQ ID NO: 107273 - protein, 23 aa, Artificial Sequence
  Description of Artificial Sequence: Synthetic peptide
  Seed: MDPRMCSLMQGSTLPRRSGAAGA
MDPRMLSLMQASTIPRRSGAAGA

SEQ ID NO: 107274 - protein, 23 aa, Artificial Sequence
  Description of Artificial Sequence: Synthetic peptide
  Seed: MDPRMCSLMQGSTLPRRSGAAGA
MDPRMLSLMQASTLPRRSGAAGA

SEQ ID NO: 107275 - protein, 23 aa, Artificial Sequence
  Description of Artificial Sequence: Synthetic peptide
  Seed: MDPRMCSLMQGSTLPRRSGAAGA
MDPRMLSLMQASTMPRRSGAAGA

SEQ ID NO: 107276 - protein, 23 aa, Artificial Sequence
  Description of Artificial Sequence: Synthetic peptide
  Seed: MDPRMCSLMQGSTLPRRSGAAGA
MDPRMLSLMQASTNPRRSGAAGA

SEQ ID NO: 107277 - protein, 23 aa, Artificial Sequence
  Description of Artificial Sequence: Synthetic peptide
  Seed: MDPRMCSLMQGSTLPRRSGAAGA
MDPRMLSLMQASTSPRRSGAAGA

SEQ ID NO: 107278 - protein, 23 aa, Artificial Sequence
  Description of Artificial Sequence: Synthetic peptide
  Seed: MDPRMCSLMQGSTLPRRSGAAGA
MDPRMLSLMQASTTPRRSGAAGA

SEQ ID NO: 107279 - protein, 23 aa, Artificial Sequence
  Description of Artificial Sequence: Synthetic peptide
  Seed: MDPRMCSLMQGSTLPRRSGAAGA
MDPRMLSLMQASTVPRRSGAAGA

SEQ ID NO: 107280 - protein, 23 aa, Artificial Sequence
  Description of Artificial Sequence: Synthetic peptide
  Seed: MDPRMCSLMQGSTLPRRSGAAGA
MDPRMLSLMQGSTAPRRSGAAGA

SEQ ID NO: 107281 - protein, 23 aa, Artificial Sequence
  Description of Artificial Sequence: Synthetic peptide
  Seed: MDPRMCSLMQGSTLPRRSGAAGA
MDPRMLSLMQGSTIPRRSGAAGA

SEQ ID NO: 107282 - protein, 23 aa, Artificial Sequence
  Description of Artificial Sequence: Synthetic peptide
  Seed: MDPRMCSLMQGSTLPRRSGAAGA
MDPRMLSLMQGSTLPRRSGAAGA

SEQ ID NO: 107283 - protein, 23 aa, Artificial Sequence
  Description of Artificial Sequence: Synthetic peptide
  Seed: MDPRMCSLMQGSTLPRRSGAAGA
MDPRMLSLMQGSTMPRRSGAAGA

SEQ ID NO: 107284 - protein, 23 aa, Artificial Sequence
  Description of Artificial Sequence: Synthetic peptide
  Seed: MDPRMCSLMQGSTLPRRSGAAGA
MDPRMLSLMQGSTSPRRSGAAGA

SEQ ID NO: 107285 - protein, 23 aa, Artificial Sequence
  Description of Artificial Sequence: Synthetic peptide
  Seed: MDPRMCSLMQGSTLPRRSGAAGA
MDPRMLSLMQGSTTPRRSGAAGA

SEQ ID NO: 107286 - protein, 23 aa, Artificial Sequence
  Description of Artificial Sequence: Synthetic peptide
  Seed: MDPRMCSLMQGSTLPRRSGAAGA
MDPRMLSLMQGSTVPRRSGAAGA

SEQ ID NO: 107287 - protein, 23 aa, Artificial Sequence
  Description of Artificial Sequence: Synthetic peptide
  Seed: MDPRMCSLMQGSTLPRRSGAAGA
MDPRMLSLMQISTAPRRSGAAGA

SEQ ID NO: 107288 - protein, 23 aa, Artificial Sequence
  Description of Artificial Sequence: Synthetic peptide
  Seed: MDPRMCSLMQGSTLPRRSGAAGA
MDPRMLSLMQPSTAPRRSGAAGA

SEQ ID NO: 107289 - protein, 23 aa, Artificial Sequence
  Description of Artificial Sequence: Synthetic peptide
  Seed: MDPRMCSLMQGSTLPRRSGAAGA
MDPRMLSLMQPSTIPRRSGAAGA

SEQ ID NO: 107290 - protein, 23 aa, Artificial Sequence
  Description of Artificial Sequence: Synthetic peptide
  Seed: MDPRMCSLMQGSTLPRRSGAAGA
MDPRMLSLMQPSTLPRRSGAAGA

SEQ ID NO: 107291 - protein, 23 aa, Artificial Sequence
  Description of Artificial Sequence: Synthetic peptide
  Seed: MDPRMCSLMQGSTLPRRSGAAGA
MDPRMLSLMQPSTNPRRSGAAGA

SEQ ID NO: 107292 - protein, 23 aa, Artificial Sequence
  Description of Artificial Sequence: Synthetic peptide
  Seed: MDPRMCSLMQGSTLPRRSGAAGA
MDPRMLSLMQPSTSPRRSGAAGA

SEQ ID NO: 107293 - protein, 23 aa, Artificial Sequence
  Description of Artificial Sequence: Synthetic peptide
  Seed: MDPRMCSLMQGSTLPRRSGAAGA
MDPRMLSLMQPSTVPRRSGAAGA

SEQ ID NO: 107294 - protein, 23 aa, Artificial Sequence
  Description of Artificial Sequence: Synthetic peptide
  Seed: MDPRMCSLMQGSTLPRRSGAAGA
MDPRMLSLMQSSTAPRRSGAAGA

SEQ ID NO: 107295 - protein, 23 aa, Artificial Sequence
  Description of Artificial Sequence: Synthetic peptide
  Seed: MDPRMCSLMQGSTLPRRSGAAGA
MDPRMLSLMQSSTIPRRSGAAGA

SEQ ID NO: 107296 - protein, 23 aa, Artificial Sequence
  Description of Artificial Sequence: Synthetic peptide
  Seed: MDPRMCSLMQGSTLPRRSGAAGA
MDPRMLSLMQSSTLPRRSGAAGA

SEQ ID NO: 107297 - protein, 23 aa, Artificial Sequence
  Description of Artificial Sequence: Synthetic peptide
  Seed: MDPRMCSLMQGSTLPRRSGAAGA
MDPRMLSLMQSSTSPRRSGAAGA

SEQ ID NO: 107298 - protein, 23 aa, Artificial Sequence
  Description of Artificial Sequence: Synthetic peptide
  Seed: MDPRMCSLMQGSTLPRRSGAAGA
MDPRMLSLMQSSTVPRRSGAAGA

SEQ ID NO: 107299 - protein, 23 aa, Artificial Sequence
  Description of Artificial Sequence: Synthetic peptide
  Seed: MDPRMCSLMQGSTLPRRSGAAGA
MDPRMLSLMQTSTAPRRSGAAGA

SEQ ID NO: 107300 - protein, 23 aa, Artificial Sequence
  Description of Artificial Sequence: Synthetic peptide
  Seed: MDPRMCSLMQGSTLPRRSGAAGA
MDPRMLSLMQTSTNPRRSGAAGA

SEQ ID NO: 107301 - protein, 23 aa, Artificial Sequence
  Description of Artificial Sequence: Synthetic peptide
  Seed: MDPRMCSLMQGSTLPRRSGAAGA
MDPRMLSLMQTSTVPRRSGAAGA

SEQ ID NO: 107302 - protein, 23 aa, Artificial Sequence
  Description of Artificial Sequence: Synthetic peptide
  Seed: MDPRMCSLMQGSTLPRRSGAAGA
MDPRMLSLMQVSTAPRRSGAAGA

SEQ ID NO: 107303 - protein, 23 aa, Artificial Sequence
  Description of Artificial Sequence: Synthetic peptide
  Seed: MDPRMCSLMQGSTLPRRSGAAGA
MDPRMLSLMQVSTNPRRSGAAGA

SEQ ID NO: 107304 - protein, 23 aa, Artificial Sequence
  Description of Artificial Sequence: Synthetic peptide
  Seed: MDPRMCSLMQGSTLPRRSGAAGA
MDPRMLSLMQVSTSPRRSGAAGA

SEQ ID NO: 107305 - protein, 23 aa, Artificial Sequence
  Description of Artificial Sequence: Synthetic peptide
  Seed: MDPRMCSLMQGSTLPRRSGAAGA
MDPRMLSLQQASTLPRRSGAAGA

SEQ ID NO: 107306 - protein, 23 aa, Artificial Sequence
  Description of Artificial Sequence: Synthetic peptide
  Seed: MDPRMCSLMQGSTLPRRSGAAGA
MDPRMLSLQQASTVPRRSGAAGA

SEQ ID NO: 107307 - protein, 23 aa, Artificial Sequence
  Description of Artificial Sequence: Synthetic peptide
  Seed: MDPRMCSLMQGSTLPRRSGAAGA
MDPRMMSLLQASTAPRRSGAAGA

SEQ ID NO: 107308 - protein, 23 aa, Artificial Sequence
  Description of Artificial Sequence: Synthetic peptide
  Seed: MDPRMCSLMQGSTLPRRSGAAGA
MDPRMMSLLQASTIPRRSGAAGA

SEQ ID NO: 107309 - protein, 23 aa, Artificial Sequence
  Description of Artificial Sequence: Synthetic peptide
  Seed: MDPRMCSLMQGSTLPRRSGAAGA
MDPRMMSLLQASTLPRRSGAAGA

SEQ ID NO: 107310 - protein, 23 aa, Artificial Sequence
  Description of Artificial Sequence: Synthetic peptide
  Seed: MDPRMCSLMQGSTLPRRSGAAGA
MDPRMMSLLQASTMPRRSGAAGA

SEQ ID NO: 107311 - protein, 23 aa, Artificial Sequence
  Description of Artificial Sequence: Synthetic peptide
  Seed: MDPRMCSLMQGSTLPRRSGAAGA
MDPRMMSLLQASTNPRRSGAAGA

SEQ ID NO: 107312 - protein, 23 aa, Artificial Sequence
  Description of Artificial Sequence: Synthetic peptide
  Seed: MDPRMCSLMQGSTLPRRSGAAGA
MDPRMMSLLQASTSPRRSGAAGA

SEQ ID NO: 107313 - protein, 23 aa, Artificial Sequence
  Description of Artificial Sequence: Synthetic peptide
  Seed: MDPRMCSLMQGSTLPRRSGAAGA
MDPRMMSLLQASTTPRRSGAAGA

SEQ ID NO: 107314 - protein, 23 aa, Artificial Sequence
  Description of Artificial Sequence: Synthetic peptide
  Seed: MDPRMCSLMQGSTLPRRSGAAGA
MDPRMMSLLQASTVPRRSGAAGA

SEQ ID NO: 107315 - protein, 23 aa, Artificial Sequence
  Description of Artificial Sequence: Synthetic peptide
  Seed: MDPRMCSLMQGSTLPRRSGAAGA
MDPRMMSLLQGSTAPRRSGAAGA

SEQ ID NO: 107316 - protein, 23 aa, Artificial Sequence
  Description of Artificial Sequence: Synthetic peptide
  Seed: MDPRMCSLMQGSTLPRRSGAAGA
MDPRMMSLLQGSTIPRRSGAAGA

SEQ ID NO: 107317 - protein, 23 aa, Artificial Sequence
  Description of Artificial Sequence: Synthetic peptide
  Seed: MDPRMCSLMQGSTLPRRSGAAGA
MDPRMMSLLQGSTLPRRSGAAGA

SEQ ID NO: 107318 - protein, 23 aa, Artificial Sequence
  Description of Artificial Sequence: Synthetic peptide
  Seed: MDPRMCSLMQGSTLPRRSGAAGA
MDPRMMSLLQGSTVPRRSGAAGA

SEQ ID NO: 107319 - protein, 23 aa, Artificial Sequence
  Description of Artificial Sequence: Synthetic peptide
  Seed: MDPRMCSLMQGSTLPRRSGAAGA
MDPRMMSLLQPSTAPRRSGAAGA

SEQ ID NO: 107320 - protein, 23 aa, Artificial Sequence
  Description of Artificial Sequence: Synthetic peptide
  Seed: MDPRMCSLMQGSTLPRRSGAAGA
MDPRMMSLLQPSTVPRRSGAAGA

SEQ ID NO: 107321 - protein, 23 aa, Artificial Sequence
  Description of Artificial Sequence: Synthetic peptide
  Seed: MDPRMCSLMQGSTLPRRSGAAGA
MDPRMMSLLQSSTAPRRSGAAGA

SEQ ID NO: 107322 - protein, 23 aa, Artificial Sequence
  Description of Artificial Sequence: Synthetic peptide
  Seed: MDPRMCSLMQGSTLPRRSGAAGA
MDPRMMSLLQSSTIPRRSGAAGA

SEQ ID NO: 107323 - protein, 23 aa, Artificial Sequence
  Description of Artificial Sequence: Synthetic peptide
  Seed: MDPRMCSLMQGSTLPRRSGAAGA
MDPRMMSLLQSSTLPRRSGAAGA

SEQ ID NO: 107324 - protein, 23 aa, Artificial Sequence
  Description of Artificial Sequence: Synthetic peptide
  Seed: MDPRMCSLMQGSTLPRRSGAAGA
MDPRMMSLLQSSTVPRRSGAAGA

SEQ ID NO: 107325 - protein, 23 aa, Artificial Sequence
  Description of Artificial Sequence: Synthetic peptide
  Seed: MDPRMCSLMQGSTLPRRSGAAGA
MDPRMMSLMQASTAPRRSGAAGA

SEQ ID NO: 107326 - protein, 23 aa, Artificial Sequence
  Description of Artificial Sequence: Synthetic peptide
  Seed: MDPRMCSLMQGSTLPRRSGAAGA
MDPRMMSLMQASTIPRRSGAAGA

SEQ ID NO: 107327 - protein, 23 aa, Artificial Sequence
  Description of Artificial Sequence: Synthetic peptide
  Seed: MDPRMCSLMQGSTLPRRSGAAGA
MDPRMMSLMQASTLPRRSGAAGA

SEQ ID NO: 107328 - protein, 23 aa, Artificial Sequence
  Description of Artificial Sequence: Synthetic peptide
  Seed: MDPRMCSLMQGSTLPRRSGAAGA
MDPRMMSLMQASTMPRRSGAAGA

SEQ ID NO: 107329 - protein, 23 aa, Artificial Sequence
  Description of Artificial Sequence: Synthetic peptide
  Seed: MDPRMCSLMQGSTLPRRSGAAGA
MDPRMMSLMQASTNPRRSGAAGA

SEQ ID NO: 107330 - protein, 23 aa, Artificial Sequence
  Description of Artificial Sequence: Synthetic peptide
  Seed: MDPRMCSLMQGSTLPRRSGAAGA
MDPRMMSLMQASTSPRRSGAAGA

SEQ ID NO: 107331 - protein, 23 aa, Artificial Sequence
  Description of Artificial Sequence: Synthetic peptide
  Seed: MDPRMCSLMQGSTLPRRSGAAGA
MDPRMMSLMQASTTPRRSGAAGA

SEQ ID NO: 107332 - protein, 23 aa, Artificial Sequence
  Description of Artificial Sequence: Synthetic peptide
  Seed: MDPRMCSLMQGSTLPRRSGAAGA
MDPRMMSLMQASTVPRRSGAAGA

SEQ ID NO: 107333 - protein, 23 aa, Artificial Sequence
  Description of Artificial Sequence: Synthetic peptide
  Seed: MDPRMCSLMQGSTLPRRSGAAGA
MDPRMMSLMQGSTAPRRSGAAGA

SEQ ID NO: 107334 - protein, 23 aa, Artificial Sequence
  Description of Artificial Sequence: Synthetic peptide
  Seed: MDPRMCSLMQGSTLPRRSGAAGA
MDPRMMSLMQGSTIPRRSGAAGA

SEQ ID NO: 107335 - protein, 23 aa, Artificial Sequence
  Description of Artificial Sequence: Synthetic peptide
  Seed: MDPRMCSLMQGSTLPRRSGAAGA
MDPRMMSLMQGSTLPRRSGAAGA

SEQ ID NO: 107336 - protein, 23 aa, Artificial Sequence
  Description of Artificial Sequence: Synthetic peptide
  Seed: MDPRMCSLMQGSTLPRRSGAAGA
MDPRMMSLMQGSTVPRRSGAAGA

SEQ ID NO: 107337 - protein, 23 aa, Artificial Sequence
  Description of Artificial Sequence: Synthetic peptide
  Seed: MDPRMCSLMQGSTLPRRSGAAGA
MDPRMMSLMQPSTAPRRSGAAGA

SEQ ID NO: 107338 - protein, 23 aa, Artificial Sequence
  Description of Artificial Sequence: Synthetic peptide
  Seed: MDPRMCSLMQGSTLPRRSGAAGA
MDPRMMSLMQPSTVPRRSGAAGA

SEQ ID NO: 107339 - protein, 23 aa, Artificial Sequence
  Description of Artificial Sequence: Synthetic peptide
  Seed: MDPRMCSLMQGSTLPRRSGAAGA
MDPRMMSLMQSSTIPRRSGAAGA

SEQ ID NO: 107340 - protein, 23 aa, Artificial Sequence
  Description of Artificial Sequence: Synthetic peptide
  Seed: MDPRMCSLMQGSTLPRRSGAAGA
MDPRMMSLMQSSTLPRRSGAAGA

SEQ ID NO: 107341 - protein, 23 aa, Artificial Sequence
  Description of Artificial Sequence: Synthetic peptide
  Seed: MDPRMCSLMQGSTLPRRSGAAGA
MDPRMMSLMQSSTVPRRSGAAGA

SEQ ID NO: 107342 - protein, 23 aa, Artificial Sequence
  Description of Artificial Sequence: Synthetic peptide
  Seed: MDPRMCSLMQGSTLPRRSGAAGA
MDPRMMSLMQVSTAPRRSGAAGA

SEQ ID NO: 107343 - protein, 23 aa, Artificial Sequence
  Description of Artificial Sequence: Synthetic peptide
  Seed: MDPRMCSLMQGSTLPRRSGAAGA
MDPRMVSLLQASTAPRRSGAAGA

SEQ ID NO: 107344 - protein, 23 aa, Artificial Sequence
  Description of Artificial Sequence: Synthetic peptide
  Seed: MDPRMCSLMQGSTLPRRSGAAGA
MDPRMVSLLQASTIPRRSGAAGA

SEQ ID NO: 107345 - protein, 23 aa, Artificial Sequence
  Description of Artificial Sequence: Synthetic peptide
  Seed: MDPRMCSLMQGSTLPRRSGAAGA
MDPRMVSLLQASTLPRRSGAAGA

SEQ ID NO: 107346 - protein, 23 aa, Artificial Sequence
  Description of Artificial Sequence: Synthetic peptide
  Seed: MDPRMCSLMQGSTLPRRSGAAGA
MDPRMVSLLQASTMPRRSGAAGA

SEQ ID NO: 107347 - protein, 23 aa, Artificial Sequence
  Description of Artificial Sequence: Synthetic peptide
  Seed: MDPRMCSLMQGSTLPRRSGAAGA
MDPRMVSLLQASTTPRRSGAAGA

SEQ ID NO: 107348 - protein, 23 aa, Artificial Sequence
  Description of Artificial Sequence: Synthetic peptide
  Seed: MDPRMCSLMQGSTLPRRSGAAGA
MDPRMVSLLQASTVPRRSGAAGA

SEQ ID NO: 107349 - protein, 23 aa, Artificial Sequence
  Description of Artificial Sequence: Synthetic peptide
  Seed: MDPRMCSLMQGSTLPRRSGAAGA
MDPRMVSLLQGSTAPRRSGAAGA

SEQ ID NO: 107350 - protein, 23 aa, Artificial Sequence
  Description of Artificial Sequence: Synthetic peptide
  Seed: MDPRMCSLMQGSTLPRRSGAAGA
MDPRMVSLLQGSTIPRRSGAAGA

SEQ ID NO: 107351 - protein, 23 aa, Artificial Sequence
  Description of Artificial Sequence: Synthetic peptide
  Seed: MDPRMCSLMQGSTLPRRSGAAGA
MDPRMVSLLQGSTLPRRSGAAGA

SEQ ID NO: 107352 - protein, 23 aa, Artificial Sequence
  Description of Artificial Sequence: Synthetic peptide
  Seed: MDPRMCSLMQGSTLPRRSGAAGA
MDPRMVSLLQGSTVPRRSGAAGA

SEQ ID NO: 107353 - protein, 23 aa, Artificial Sequence
  Description of Artificial Sequence: Synthetic peptide
  Seed: MDPRMCSLMQGSTLPRRSGAAGA
MDPRMVSLLQPSTIPRRSGAAGA

SEQ ID NO: 107354 - protein, 23 aa, Artificial Sequence
  Description of Artificial Sequence: Synthetic peptide
  Seed: MDPRMCSLMQGSTLPRRSGAAGA
MDPRMVSLLQPSTLPRRSGAAGA

SEQ ID NO: 107355 - protein, 23 aa, Artificial Sequence
  Description of Artificial Sequence: Synthetic peptide
  Seed: MDPRMCSLMQGSTLPRRSGAAGA
MDPRMVSLLQPSTVPRRSGAAGA

SEQ ID NO: 107356 - protein, 23 aa, Artificial Sequence
  Description of Artificial Sequence: Synthetic peptide
  Seed: MDPRMCSLMQGSTLPRRSGAAGA
MDPRMVSLLQSSTAPRRSGAAGA

SEQ ID NO: 107357 - protein, 23 aa, Artificial Sequence
  Description of Artificial Sequence: Synthetic peptide
  Seed: MDPRMCSLMQGSTLPRRSGAAGA
MDPRMVSLLQSSTIPRRSGAAGA

SEQ ID NO: 107358 - protein, 23 aa, Artificial Sequence
  Description of Artificial Sequence: Synthetic peptide
  Seed: MDPRMCSLMQGSTLPRRSGAAGA
MDPRMVSLLQSSTLPRRSGAAGA

SEQ ID NO: 107359 - protein, 23 aa, Artificial Sequence
  Description of Artificial Sequence: Synthetic peptide
  Seed: MDPRMCSLMQGSTLPRRSGAAGA
MDPRMVSLLQSSTVPRRSGAAGA

SEQ ID NO: 107360 - protein, 23 aa, Artificial Sequence
  Description of Artificial Sequence: Synthetic peptide
  Seed: MDPRMCSLMQGSTLPRRSGAAGA
MDPRMVSLMQASTAPRRSGAAGA

SEQ ID NO: 107361 - protein, 23 aa, Artificial Sequence
  Description of Artificial Sequence: Synthetic peptide
  Seed: MDPRMCSLMQGSTLPRRSGAAGA
MDPRMVSLMQASTIPRRSGAAGA

SEQ ID NO: 107362 - protein, 23 aa, Artificial Sequence
  Description of Artificial Sequence: Synthetic peptide
  Seed: MDPRMCSLMQGSTLPRRSGAAGA
MDPRMVSLMQASTLPRRSGAAGA

SEQ ID NO: 107363 - protein, 23 aa, Artificial Sequence
  Description of Artificial Sequence: Synthetic peptide
  Seed: MDPRMCSLMQGSTLPRRSGAAGA
MDPRMVSLMQASTMPRRSGAAGA

SEQ ID NO: 107364 - protein, 23 aa, Artificial Sequence
  Description of Artificial Sequence: Synthetic peptide
  Seed: MDPRMCSLMQGSTLPRRSGAAGA
MDPRMVSLMQASTVPRRSGAAGA

SEQ ID NO: 107365 - protein, 23 aa, Artificial Sequence
  Description of Artificial Sequence: Synthetic peptide
  Seed: MDPRMCSLMQGSTLPRRSGAAGA
MDPRMVSLMQGSTAPRRSGAAGA

SEQ ID NO: 107366 - protein, 23 aa, Artificial Sequence
  Description of Artificial Sequence: Synthetic peptide
  Seed: MDPRMCSLMQGSTLPRRSGAAGA
MDPRMVSLMQGSTIPRRSGAAGA

SEQ ID NO: 107367 - protein, 23 aa, Artificial Sequence
  Description of Artificial Sequence: Synthetic peptide
  Seed: MDPRMCSLMQGSTLPRRSGAAGA
MDPRMVSLMQGSTLPRRSGAAGA

SEQ ID NO: 107368 - protein, 23 aa, Artificial Sequence
  Description of Artificial Sequence: Synthetic peptide
  Seed: MDPRMCSLMQGSTLPRRSGAAGA
MDPRMVSLMQGSTVPRRSGAAGA

SEQ ID NO: 107369 - protein, 23 aa, Artificial Sequence
  Description of Artificial Sequence: Synthetic peptide
  Seed: MDPRMCSLMQGSTLPRRSGAAGA
MDPRMVSLMQPSTIPRRSGAAGA

SEQ ID NO: 107370 - protein, 23 aa, Artificial Sequence
  Description of Artificial Sequence: Synthetic peptide
  Seed: MDPRMCSLMQGSTLPRRSGAAGA
MDPRMVSLMQPSTLPRRSGAAGA

SEQ ID NO: 107371 - protein, 23 aa, Artificial Sequence
  Description of Artificial Sequence: Synthetic peptide
  Seed: MDPRMCSLMQGSTLPRRSGAAGA
MDPRMVSLMQPSTVPRRSGAAGA

SEQ ID NO: 107372 - protein, 23 aa, Artificial Sequence
  Description of Artificial Sequence: Synthetic peptide
  Seed: MDPRMCSLMQGSTLPRRSGAAGA
MDPRMVSLMQSSTIPRRSGAAGA

SEQ ID NO: 107373 - protein, 23 aa, Artificial Sequence
  Description of Artificial Sequence: Synthetic peptide
  Seed: MDPRMCSLMQGSTLPRRSGAAGA
MDPRMVSLMQSSTLPRRSGAAGA

SEQ ID NO: 107374 - protein, 23 aa, Artificial Sequence
  Description of Artificial Sequence: Synthetic peptide
  Seed: MDPRMCSLMQGSTLPRRSGAAGA
MDPRMVSLMQSSTVPRRSGAAGA

SEQ ID NO: 107375 - protein, 23 aa, Artificial Sequence
  Description of Artificial Sequence: Synthetic peptide
  Seed: MDPRMCSLMQGSTLPRRSGAAGA
MDPRMWSLAQASTAPRRSGAAGA

SEQ ID NO: 107376 - protein, 23 aa, Artificial Sequence
  Description of Artificial Sequence: Synthetic peptide
  Seed: MDPRMCSLMQGSTLPRRSGAAGA
MDPRMWSLAQASTIPRRSGAAGA

SEQ ID NO: 107377 - protein, 23 aa, Artificial Sequence
  Description of Artificial Sequence: Synthetic peptide
  Seed: MDPRMCSLMQGSTLPRRSGAAGA
MDPRMWSLAQASTLPRRSGAAGA

SEQ ID NO: 107378 - protein, 23 aa, Artificial Sequence
  Description of Artificial Sequence: Synthetic peptide
  Seed: MDPRMCSLMQGSTLPRRSGAAGA
MDPRMWSLAQASTMPRRSGAAGA

SEQ ID NO: 107379 - protein, 23 aa, Artificial Sequence
  Description of Artificial Sequence: Synthetic peptide
  Seed: MDPRMCSLMQGSTLPRRSGAAGA
MDPRMWSLAQASTSPRRSGAAGA

SEQ ID NO: 107380 - protein, 23 aa, Artificial Sequence
  Description of Artificial Sequence: Synthetic peptide
  Seed: MDPRMCSLMQGSTLPRRSGAAGA
MDPRMWSLAQASTVPRRSGAAGA

SEQ ID NO: 107381 - protein, 23 aa, Artificial Sequence
  Description of Artificial Sequence: Synthetic peptide
  Seed: MDPRMCSLMQGSTLPRRSGAAGA
MDPRMWSLAQGSTAPRRSGAAGA

SEQ ID NO: 107382 - protein, 23 aa, Artificial Sequence
  Description of Artificial Sequence: Synthetic peptide
  Seed: MDPRMCSLMQGSTLPRRSGAAGA
MDPRMWSLAQGSTIPRRSGAAGA

SEQ ID NO: 107383 - protein, 23 aa, Artificial Sequence
  Description of Artificial Sequence: Synthetic peptide
  Seed: MDPRMCSLMQGSTLPRRSGAAGA
MDPRMWSLAQGSTLPRRSGAAGA

SEQ ID NO: 107384 - protein, 23 aa, Artificial Sequence
  Description of Artificial Sequence: Synthetic peptide
  Seed: MDPRMCSLMQGSTLPRRSGAAGA
MDPRMWSLAQGSTVPRRSGAAGA

SEQ ID NO: 107385 - protein, 23 aa, Artificial Sequence
  Description of Artificial Sequence: Synthetic peptide
  Seed: MDPRMCSLMQGSTLPRRSGAAGA
MDPRMWSLAQSSTIPRRSGAAGA

SEQ ID NO: 107386 - protein, 23 aa, Artificial Sequence
  Description of Artificial Sequence: Synthetic peptide
  Seed: MDPRMCSLMQGSTLPRRSGAAGA
MDPRMWSLAQSSTLPRRSGAAGA

SEQ ID NO: 107387 - protein, 23 aa, Artificial Sequence
  Description of Artificial Sequence: Synthetic peptide
  Seed: MDPRMCSLMQGSTLPRRSGAAGA
MDPRMWSLAQSSTVPRRSGAAGA

SEQ ID NO: 107388 - protein, 23 aa, Artificial Sequence
  Description of Artificial Sequence: Synthetic peptide
  Seed: MDPRMCSLMQGSTLPRRSGAAGA
MDPRMWSLIQASTAPRRSGAAGA

SEQ ID NO: 107389 - protein, 23 aa, Artificial Sequence
  Description of Artificial Sequence: Synthetic peptide
  Seed: MDPRMCSLMQGSTLPRRSGAAGA
MDPRMWSLIQASTIPRRSGAAGA

SEQ ID NO: 107390 - protein, 23 aa, Artificial Sequence
  Description of Artificial Sequence: Synthetic peptide
  Seed: MDPRMCSLMQGSTLPRRSGAAGA
MDPRMWSLIQASTLPRRSGAAGA

SEQ ID NO: 107391 - protein, 23 aa, Artificial Sequence
  Description of Artificial Sequence: Synthetic peptide
  Seed: MDPRMCSLMQGSTLPRRSGAAGA
MDPRMWSLIQASTMPRRSGAAGA

SEQ ID NO: 107392 - protein, 23 aa, Artificial Sequence
  Description of Artificial Sequence: Synthetic peptide
  Seed: MDPRMCSLMQGSTLPRRSGAAGA
MDPRMWSLIQASTNPRRSGAAGA

SEQ ID NO: 107393 - protein, 23 aa, Artificial Sequence
  Description of Artificial Sequence: Synthetic peptide
  Seed: MDPRMCSLMQGSTLPRRSGAAGA
MDPRMWSLIQASTSPRRSGAAGA

SEQ ID NO: 107394 - protein, 23 aa, Artificial Sequence
  Description of Artificial Sequence: Synthetic peptide
  Seed: MDPRMCSLMQGSTLPRRSGAAGA
MDPRMWSLIQASTTPRRSGAAGA

SEQ ID NO: 107395 - protein, 23 aa, Artificial Sequence
  Description of Artificial Sequence: Synthetic peptide
  Seed: MDPRMCSLMQGSTLPRRSGAAGA
MDPRMWSLIQASTVPRRSGAAGA

SEQ ID NO: 107396 - protein, 23 aa, Artificial Sequence
  Description of Artificial Sequence: Synthetic peptide
  Seed: MDPRMCSLMQGSTLPRRSGAAGA
MDPRMWSLIQGSTAPRRSGAAGA

SEQ ID NO: 107397 - protein, 23 aa, Artificial Sequence
  Description of Artificial Sequence: Synthetic peptide
  Seed: MDPRMCSLMQGSTLPRRSGAAGA
MDPRMWSLIQGSTIPRRSGAAGA

SEQ ID NO: 107398 - protein, 23 aa, Artificial Sequence
  Description of Artificial Sequence: Synthetic peptide
  Seed: MDPRMCSLMQGSTLPRRSGAAGA
MDPRMWSLIQGSTLPRRSGAAGA

SEQ ID NO: 107399 - protein, 23 aa, Artificial Sequence
  Description of Artificial Sequence: Synthetic peptide
  Seed: MDPRMCSLMQGSTLPRRSGAAGA
MDPRMWSLIQGSTVPRRSGAAGA

SEQ ID NO: 107400 - protein, 23 aa, Artificial Sequence
  Description of Artificial Sequence: Synthetic peptide
  Seed: MDPRMCSLMQGSTLPRRSGAAGA
MDPRMWSLIQISTAPRRSGAAGA

SEQ ID NO: 107401 - protein, 23 aa, Artificial Sequence
  Description of Artificial Sequence: Synthetic peptide
  Seed: MDPRMCSLMQGSTLPRRSGAAGA
MDPRMWSLIQPSTAPRRSGAAGA

SEQ ID NO: 107402 - protein, 23 aa, Artificial Sequence
  Description of Artificial Sequence: Synthetic peptide
  Seed: MDPRMCSLMQGSTLPRRSGAAGA
MDPRMWSLIQPSTIPRRSGAAGA

SEQ ID NO: 107403 - protein, 23 aa, Artificial Sequence
  Description of Artificial Sequence: Synthetic peptide
  Seed: MDPRMCSLMQGSTLPRRSGAAGA
MDPRMWSLIQPSTLPRRSGAAGA

SEQ ID NO: 107404 - protein, 23 aa, Artificial Sequence
  Description of Artificial Sequence: Synthetic peptide
  Seed: MDPRMCSLMQGSTLPRRSGAAGA
MDPRMWSLIQPSTNPRRSGAAGA

SEQ ID NO: 107405 - protein, 23 aa, Artificial Sequence
  Description of Artificial Sequence: Synthetic peptide
  Seed: MDPRMCSLMQGSTLPRRSGAAGA
MDPRMWSLIQPSTSPRRSGAAGA

SEQ ID NO: 107406 - protein, 23 aa, Artificial Sequence
  Description of Artificial Sequence: Synthetic peptide
  Seed: MDPRMCSLMQGSTLPRRSGAAGA
MDPRMWSLIQPSTVPRRSGAAGA

SEQ ID NO: 107407 - protein, 23 aa, Artificial Sequence
  Description of Artificial Sequence: Synthetic peptide
  Seed: MDPRMCSLMQGSTLPRRSGAAGA
MDPRMWSLIQSSTAPRRSGAAGA

SEQ ID NO: 107408 - protein, 23 aa, Artificial Sequence
  Description of Artificial Sequence: Synthetic peptide
  Seed: MDPRMCSLMQGSTLPRRSGAAGA
MDPRMWSLIQSSTIPRRSGAAGA

SEQ ID NO: 107409 - protein, 23 aa, Artificial Sequence
  Description of Artificial Sequence: Synthetic peptide
  Seed: MDPRMCSLMQGSTLPRRSGAAGA
MDPRMWSLIQSSTLPRRSGAAGA

SEQ ID NO: 107410 - protein, 23 aa, Artificial Sequence
  Description of Artificial Sequence: Synthetic peptide
  Seed: MDPRMCSLMQGSTLPRRSGAAGA
MDPRMWSLIQSSTNPRRSGAAGA

SEQ ID NO: 107411 - protein, 23 aa, Artificial Sequence
  Description of Artificial Sequence: Synthetic peptide
  Seed: MDPRMCSLMQGSTLPRRSGAAGA
MDPRMWSLIQSSTSPRRSGAAGA

SEQ ID NO: 107412 - protein, 23 aa, Artificial Sequence
  Description of Artificial Sequence: Synthetic peptide
  Seed: MDPRMCSLMQGSTLPRRSGAAGA
MDPRMWSLIQSSTVPRRSGAAGA

SEQ ID NO: 107413 - protein, 23 aa, Artificial Sequence
  Description of Artificial Sequence: Synthetic peptide
  Seed: MDPRMCSLMQGSTLPRRSGAAGA
MDPRMWSLIQTSTAPRRSGAAGA

SEQ ID NO: 107414 - protein, 23 aa, Artificial Sequence
  Description of Artificial Sequence: Synthetic peptide
  Seed: MDPRMCSLMQGSTLPRRSGAAGA
MDPRMWSLIQTSTNPRRSGAAGA

SEQ ID NO: 107415 - protein, 23 aa, Artificial Sequence
  Description of Artificial Sequence: Synthetic peptide
  Seed: MDPRMCSLMQGSTLPRRSGAAGA
MDPRMWSLIQTSTSPRRSGAAGA

SEQ ID NO: 107416 - protein, 23 aa, Artificial Sequence
  Description of Artificial Sequence: Synthetic peptide
  Seed: MDPRMCSLMQGSTLPRRSGAAGA
MDPRMWSLIQVSTAPRRSGAAGA

SEQ ID NO: 107417 - protein, 23 aa, Artificial Sequence
  Description of Artificial Sequence: Synthetic peptide
  Seed: MDPRMCSLMQGSTLPRRSGAAGA
MDPRMWSLIQVSTNPRRSGAAGA

SEQ ID NO: 107418 - protein, 23 aa, Artificial Sequence
  Description of Artificial Sequence: Synthetic peptide
  Seed: MDPRMCSLMQGSTLPRRSGAAGA
MDPRMWSLIQVSTSPRRSGAAGA

SEQ ID NO: 107419 - protein, 23 aa, Artificial Sequence
  Description of Artificial Sequence: Synthetic peptide
  Seed: MDPRMCSLMQGSTLPRRSGAAGA
MDPRMWSLLQASTAPRRSGAAGA

SEQ ID NO: 107420 - protein, 23 aa, Artificial Sequence
  Description of Artificial Sequence: Synthetic peptide
  Seed: MDPRMCSLMQGSTLPRRSGAAGA
MDPRMWSLLQASTGPRRSGAAGA

SEQ ID NO: 107421 - protein, 23 aa, Artificial Sequence
  Description of Artificial Sequence: Synthetic peptide
  Seed: MDPRMCSLMQGSTLPRRSGAAGA
MDPRMWSLLQASTIPRRSGAAGA

SEQ ID NO: 107422 - protein, 23 aa, Artificial Sequence
  Description of Artificial Sequence: Synthetic peptide
  Seed: MDPRMCSLMQGSTLPRRSGAAGA
MDPRMWSLLQASTLPRRSGAAGA

SEQ ID NO: 107423 - protein, 23 aa, Artificial Sequence
  Description of Artificial Sequence: Synthetic peptide
  Seed: MDPRMCSLMQGSTLPRRSGAAGA
MDPRMWSLLQASTMPRRSGAAGA

SEQ ID NO: 107424 - protein, 23 aa, Artificial Sequence
  Description of Artificial Sequence: Synthetic peptide
  Seed: MDPRMCSLMQGSTLPRRSGAAGA
MDPRMWSLLQASTNPRRSGAAGA

SEQ ID NO: 107425 - protein, 23 aa, Artificial Sequence
  Description of Artificial Sequence: Synthetic peptide
  Seed: MDPRMCSLMQGSTLPRRSGAAGA
MDPRMWSLLQASTSPRRSGAAGA

SEQ ID NO: 107426 - protein, 23 aa, Artificial Sequence
  Description of Artificial Sequence: Synthetic peptide
  Seed: MDPRMCSLMQGSTLPRRSGAAGA
MDPRMWSLLQASTTPRRSGAAGA

SEQ ID NO: 107427 - protein, 23 aa, Artificial Sequence
  Description of Artificial Sequence: Synthetic peptide
  Seed: MDPRMCSLMQGSTLPRRSGAAGA
MDPRMWSLLQASTVPRRSGAAGA

SEQ ID NO: 107428 - protein, 23 aa, Artificial Sequence
  Description of Artificial Sequence: Synthetic peptide
  Seed: MDPRMCSLMQGSTLPRRSGAAGA
MDPRMWSLLQGSTAPRRSGAAGA

SEQ ID NO: 107429 - protein, 23 aa, Artificial Sequence
  Description of Artificial Sequence: Synthetic peptide
  Seed: MDPRMCSLMQGSTLPRRSGAAGA
MDPRMWSLLQGSTGPRRSGAAGA

SEQ ID NO: 107430 - protein, 23 aa, Artificial Sequence
  Description of Artificial Sequence: Synthetic peptide
  Seed: MDPRMCSLMQGSTLPRRSGAAGA
MDPRMWSLLQGSTIPRRSGAAGA

SEQ ID NO: 107431 - protein, 23 aa, Artificial Sequence
  Description of Artificial Sequence: Synthetic peptide
  Seed: MDPRMCSLMQGSTLPRRSGAAGA
MDPRMWSLLQGSTLPRRSGAAGA

SEQ ID NO: 107432 - protein, 23 aa, Artificial Sequence
  Description of Artificial Sequence: Synthetic peptide
  Seed: MDPRMCSLMQGSTLPRRSGAAGA
MDPRMWSLLQGSTMPRRSGAAGA

SEQ ID NO: 107433 - protein, 23 aa, Artificial Sequence
  Description of Artificial Sequence: Synthetic peptide
  Seed: MDPRMCSLMQGSTLPRRSGAAGA
MDPRMWSLLQGSTSPRRSGAAGA

SEQ ID NO: 107434 - protein, 23 aa, Artificial Sequence
  Description of Artificial Sequence: Synthetic peptide
  Seed: MDPRMCSLMQGSTLPRRSGAAGA
MDPRMWSLLQGSTTPRRSGAAGA

SEQ ID NO: 107435 - protein, 23 aa, Artificial Sequence
  Description of Artificial Sequence: Synthetic peptide
  Seed: MDPRMCSLMQGSTLPRRSGAAGA
MDPRMWSLLQGSTVPRRSGAAGA

SEQ ID NO: 107436 - protein, 23 aa, Artificial Sequence
  Description of Artificial Sequence: Synthetic peptide
  Seed: MDPRMCSLMQGSTLPRRSGAAGA
MDPRMWSLLQISTAPRRSGAAGA

SEQ ID NO: 107437 - protein, 23 aa, Artificial Sequence
  Description of Artificial Sequence: Synthetic peptide
  Seed: MDPRMCSLMQGSTLPRRSGAAGA
MDPRMWSLLQISTNPRRSGAAGA

SEQ ID NO: 107438 - protein, 23 aa, Artificial Sequence
  Description of Artificial Sequence: Synthetic peptide
  Seed: MDPRMCSLMQGSTLPRRSGAAGA
MDPRMWSLLQISTSPRRSGAAGA

SEQ ID NO: 107439 - protein, 23 aa, Artificial Sequence
  Description of Artificial Sequence: Synthetic peptide
  Seed: MDPRMCSLMQGSTLPRRSGAAGA
MDPRMWSLLQNSTAPRRSGAAGA

SEQ ID NO: 107440 - protein, 23 aa, Artificial Sequence
  Description of Artificial Sequence: Synthetic peptide
  Seed: MDPRMCSLMQGSTLPRRSGAAGA
MDPRMWSLLQNSTIPRRSGAAGA

SEQ ID NO: 107441 - protein, 23 aa, Artificial Sequence
  Description of Artificial Sequence: Synthetic peptide
  Seed: MDPRMCSLMQGSTLPRRSGAAGA
MDPRMWSLLQNSTLPRRSGAAGA

SEQ ID NO: 107442 - protein, 23 aa, Artificial Sequence
  Description of Artificial Sequence: Synthetic peptide
  Seed: MDPRMCSLMQGSTLPRRSGAAGA
MDPRMWSLLQNSTVPRRSGAAGA

SEQ ID NO: 107443 - protein, 23 aa, Artificial Sequence
  Description of Artificial Sequence: Synthetic peptide
  Seed: MDPRMCSLMQGSTLPRRSGAAGA
MDPRMWSLLQPSTAPRRSGAAGA

SEQ ID NO: 107444 - protein, 23 aa, Artificial Sequence
  Description of Artificial Sequence: Synthetic peptide
  Seed: MDPRMCSLMQGSTLPRRSGAAGA
MDPRMWSLLQPSTIPRRSGAAGA

SEQ ID NO: 107445 - protein, 23 aa, Artificial Sequence
  Description of Artificial Sequence: Synthetic peptide
  Seed: MDPRMCSLMQGSTLPRRSGAAGA
MDPRMWSLLQPSTLPRRSGAAGA

SEQ ID NO: 107446 - protein, 23 aa, Artificial Sequence
  Description of Artificial Sequence: Synthetic peptide
  Seed: MDPRMCSLMQGSTLPRRSGAAGA
MDPRMWSLLQPSTMPRRSGAAGA

SEQ ID NO: 107447 - protein, 23 aa, Artificial Sequence
  Description of Artificial Sequence: Synthetic peptide
  Seed: MDPRMCSLMQGSTLPRRSGAAGA
MDPRMWSLLQPSTNPRRSGAAGA

SEQ ID NO: 107448 - protein, 23 aa, Artificial Sequence
  Description of Artificial Sequence: Synthetic peptide
  Seed: MDPRMCSLMQGSTLPRRSGAAGA
MDPRMWSLLQPSTSPRRSGAAGA

SEQ ID NO: 107449 - protein, 23 aa, Artificial Sequence
  Description of Artificial Sequence: Synthetic peptide
  Seed: MDPRMCSLMQGSTLPRRSGAAGA
MDPRMWSLLQPSTTPRRSGAAGA

SEQ ID NO: 107450 - protein, 23 aa, Artificial Sequence
  Description of Artificial Sequence: Synthetic peptide
  Seed: MDPRMCSLMQGSTLPRRSGAAGA
MDPRMWSLLQPSTVPRRSGAAGA

SEQ ID NO: 107451 - protein, 23 aa, Artificial Sequence
  Description of Artificial Sequence: Synthetic peptide
  Seed: MDPRMCSLMQGSTLPRRSGAAGA
MDPRMWSLLQSSTAPRRSGAAGA

SEQ ID NO: 107452 - protein, 23 aa, Artificial Sequence
  Description of Artificial Sequence: Synthetic peptide
  Seed: MDPRMCSLMQGSTLPRRSGAAGA
MDPRMWSLLQSSTIPRRSGAAGA

SEQ ID NO: 107453 - protein, 23 aa, Artificial Sequence
  Description of Artificial Sequence: Synthetic peptide
  Seed: MDPRMCSLMQGSTLPRRSGAAGA
MDPRMWSLLQSSTLPRRSGAAGA

SEQ ID NO: 107454 - protein, 23 aa, Artificial Sequence
  Description of Artificial Sequence: Synthetic peptide
  Seed: MDPRMCSLMQGSTLPRRSGAAGA
MDPRMWSLLQSSTMPRRSGAAGA

SEQ ID NO: 107455 - protein, 23 aa, Artificial Sequence
  Description of Artificial Sequence: Synthetic peptide
  Seed: MDPRMCSLMQGSTLPRRSGAAGA
MDPRMWSLLQSSTNPRRSGAAGA

SEQ ID NO: 107456 - protein, 23 aa, Artificial Sequence
  Description of Artificial Sequence: Synthetic peptide
  Seed: MDPRMCSLMQGSTLPRRSGAAGA
MDPRMWSLLQSSTSPRRSGAAGA

SEQ ID NO: 107457 - protein, 23 aa, Artificial Sequence
  Description of Artificial Sequence: Synthetic peptide
  Seed: MDPRMCSLMQGSTLPRRSGAAGA
MDPRMWSLLQSSTTPRRSGAAGA

SEQ ID NO: 107458 - protein, 23 aa, Artificial Sequence
  Description of Artificial Sequence: Synthetic peptide
  Seed: MDPRMCSLMQGSTLPRRSGAAGA
MDPRMWSLLQSSTVPRRSGAAGA

SEQ ID NO: 107459 - protein, 23 aa, Artificial Sequence
  Description of Artificial Sequence: Synthetic peptide
  Seed: MDPRMCSLMQGSTLPRRSGAAGA
MDPRMWSLLQTSTAPRRSGAAGA

SEQ ID NO: 107460 - protein, 23 aa, Artificial Sequence
  Description of Artificial Sequence: Synthetic peptide
  Seed: MDPRMCSLMQGSTLPRRSGAAGA
MDPRMWSLLQTSTIPRRSGAAGA

SEQ ID NO: 107461 - protein, 23 aa, Artificial Sequence
  Description of Artificial Sequence: Synthetic peptide
  Seed: MDPRMCSLMQGSTLPRRSGAAGA
MDPRMWSLLQTSTLPRRSGAAGA

SEQ ID NO: 107462 - protein, 23 aa, Artificial Sequence
  Description of Artificial Sequence: Synthetic peptide
  Seed: MDPRMCSLMQGSTLPRRSGAAGA
MDPRMWSLLQTSTNPRRSGAAGA

SEQ ID NO: 107463 - protein, 23 aa, Artificial Sequence
  Description of Artificial Sequence: Synthetic peptide
  Seed: MDPRMCSLMQGSTLPRRSGAAGA
MDPRMWSLLQTSTSPRRSGAAGA

SEQ ID NO: 107464 - protein, 23 aa, Artificial Sequence
  Description of Artificial Sequence: Synthetic peptide
  Seed: MDPRMCSLMQGSTLPRRSGAAGA
MDPRMWSLLQTSTTPRRSGAAGA

SEQ ID NO: 107465 - protein, 23 aa, Artificial Sequence
  Description of Artificial Sequence: Synthetic peptide
  Seed: MDPRMCSLMQGSTLPRRSGAAGA
MDPRMWSLLQTSTVPRRSGAAGA

SEQ ID NO: 107466 - protein, 23 aa, Artificial Sequence
  Description of Artificial Sequence: Synthetic peptide
  Seed: MDPRMCSLMQGSTLPRRSGAAGA
MDPRMWSLLQVSTAPRRSGAAGA

SEQ ID NO: 107467 - protein, 23 aa, Artificial Sequence
  Description of Artificial Sequence: Synthetic peptide
  Seed: MDPRMCSLMQGSTLPRRSGAAGA
MDPRMWSLLQVSTNPRRSGAAGA

SEQ ID NO: 107468 - protein, 23 aa, Artificial Sequence
  Description of Artificial Sequence: Synthetic peptide
  Seed: MDPRMCSLMQGSTLPRRSGAAGA
MDPRMWSLLQVSTSPRRSGAAGA

SEQ ID NO: 107469 - protein, 23 aa, Artificial Sequence
  Description of Artificial Sequence: Synthetic peptide
  Seed: MDPRMCSLMQGSTLPRRSGAAGA
MDPRMWSLLQVSTTPRRSGAAGA

SEQ ID NO: 107470 - protein, 23 aa, Artificial Sequence
  Description of Artificial Sequence: Synthetic peptide
  Seed: MDPRMCSLMQGSTLPRRSGAAGA
MDPRMWSLMQASTAPRRSGAAGA

SEQ ID NO: 107471 - protein, 23 aa, Artificial Sequence
  Description of Artificial Sequence: Synthetic peptide
  Seed: MDPRMCSLMQGSTLPRRSGAAGA
MDPRMWSLMQASTGPRRSGAAGA

SEQ ID NO: 107472 - protein, 23 aa, Artificial Sequence
  Description of Artificial Sequence: Synthetic peptide
  Seed: MDPRMCSLMQGSTLPRRSGAAGA
MDPRMWSLMQASTIPRRSGAAGA

SEQ ID NO: 107473 - protein, 23 aa, Artificial Sequence
  Description of Artificial Sequence: Synthetic peptide
  Seed: MDPRMCSLMQGSTLPRRSGAAGA
MDPRMWSLMQASTLPRRSGAAGA

SEQ ID NO: 107474 - protein, 23 aa, Artificial Sequence
  Description of Artificial Sequence: Synthetic peptide
  Seed: MDPRMCSLMQGSTLPRRSGAAGA
MDPRMWSLMQASTMPRRSGAAGA

SEQ ID NO: 107475 - protein, 23 aa, Artificial Sequence
  Description of Artificial Sequence: Synthetic peptide
  Seed: MDPRMCSLMQGSTLPRRSGAAGA
MDPRMWSLMQASTNPRRSGAAGA

SEQ ID NO: 107476 - protein, 23 aa, Artificial Sequence
  Description of Artificial Sequence: Synthetic peptide
  Seed: MDPRMCSLMQGSTLPRRSGAAGA
MDPRMWSLMQASTQPRRSGAAGA

SEQ ID NO: 107477 - protein, 23 aa, Artificial Sequence
  Description of Artificial Sequence: Synthetic peptide
  Seed: MDPRMCSLMQGSTLPRRSGAAGA
MDPRMWSLMQASTSPRRSGAAGA

SEQ ID NO: 107478 - protein, 23 aa, Artificial Sequence
  Description of Artificial Sequence: Synthetic peptide
  Seed: MDPRMCSLMQGSTLPRRSGAAGA
MDPRMWSLMQASTTPRRSGAAGA

SEQ ID NO: 107479 - protein, 23 aa, Artificial Sequence
  Description of Artificial Sequence: Synthetic peptide
  Seed: MDPRMCSLMQGSTLPRRSGAAGA
MDPRMWSLMQASTVPRRSGAAGA

SEQ ID NO: 107480 - protein, 23 aa, Artificial Sequence
  Description of Artificial Sequence: Synthetic peptide
  Seed: MDPRMCSLMQGSTLPRRSGAAGA
MDPRMWSLMQGSTAPRRSGAAGA

SEQ ID NO: 107481 - protein, 23 aa, Artificial Sequence
  Description of Artificial Sequence: Synthetic peptide
  Seed: MDPRMCSLMQGSTLPRRSGAAGA
MDPRMWSLMQGSTIPRRSGAAGA

SEQ ID NO: 107482 - protein, 23 aa, Artificial Sequence
  Description of Artificial Sequence: Synthetic peptide
  Seed: MDPRMCSLMQGSTLPRRSGAAGA
MDPRMWSLMQGSTLPRRSGAAGA

SEQ ID NO: 107483 - protein, 23 aa, Artificial Sequence
  Description of Artificial Sequence: Synthetic peptide
  Seed: MDPRMCSLMQGSTLPRRSGAAGA
MDPRMWSLMQGSTMPRRSGAAGA

SEQ ID NO: 107484 - protein, 23 aa, Artificial Sequence
  Description of Artificial Sequence: Synthetic peptide
  Seed: MDPRMCSLMQGSTLPRRSGAAGA
MDPRMWSLMQGSTSPRRSGAAGA

SEQ ID NO: 107485 - protein, 23 aa, Artificial Sequence
  Description of Artificial Sequence: Synthetic peptide
  Seed: MDPRMCSLMQGSTLPRRSGAAGA
MDPRMWSLMQGSTTPRRSGAAGA

SEQ ID NO: 107486 - protein, 23 aa, Artificial Sequence
  Description of Artificial Sequence: Synthetic peptide
  Seed: MDPRMCSLMQGSTLPRRSGAAGA
MDPRMWSLMQGSTVPRRSGAAGA

SEQ ID NO: 107487 - protein, 23 aa, Artificial Sequence
  Description of Artificial Sequence: Synthetic peptide
  Seed: MDPRMCSLMQGSTLPRRSGAAGA
MDPRMWSLMQISTAPRRSGAAGA

SEQ ID NO: 107488 - protein, 23 aa, Artificial Sequence
  Description of Artificial Sequence: Synthetic peptide
  Seed: MDPRMCSLMQGSTLPRRSGAAGA
MDPRMWSLMQISTNPRRSGAAGA

SEQ ID NO: 107489 - protein, 23 aa, Artificial Sequence
  Description of Artificial Sequence: Synthetic peptide
  Seed: MDPRMCSLMQGSTLPRRSGAAGA
MDPRMWSLMQISTSPRRSGAAGA

SEQ ID NO: 107490 - protein, 23 aa, Artificial Sequence
  Description of Artificial Sequence: Synthetic peptide
  Seed: MDPRMCSLMQGSTLPRRSGAAGA
MDPRMWSLMQNSTAPRRSGAAGA

SEQ ID NO: 107491 - protein, 23 aa, Artificial Sequence
  Description of Artificial Sequence: Synthetic peptide
  Seed: MDPRMCSLMQGSTLPRRSGAAGA
MDPRMWSLMQNSTIPRRSGAAGA

SEQ ID NO: 107492 - protein, 23 aa, Artificial Sequence
  Description of Artificial Sequence: Synthetic peptide
  Seed: MDPRMCSLMQGSTLPRRSGAAGA
MDPRMWSLMQNSTLPRRSGAAGA

SEQ ID NO: 107493 - protein, 23 aa, Artificial Sequence
  Description of Artificial Sequence: Synthetic peptide
  Seed: MDPRMCSLMQGSTLPRRSGAAGA
MDPRMWSLMQNSTVPRRSGAAGA

SEQ ID NO: 107494 - protein, 23 aa, Artificial Sequence
  Description of Artificial Sequence: Synthetic peptide
  Seed: MDPRMCSLMQGSTLPRRSGAAGA
MDPRMWSLMQPSTAPRRSGAAGA

SEQ ID NO: 107495 - protein, 23 aa, Artificial Sequence
  Description of Artificial Sequence: Synthetic peptide
  Seed: MDPRMCSLMQGSTLPRRSGAAGA
MDPRMWSLMQPSTIPRRSGAAGA

SEQ ID NO: 107496 - protein, 23 aa, Artificial Sequence
  Description of Artificial Sequence: Synthetic peptide
  Seed: MDPRMCSLMQGSTLPRRSGAAGA
MDPRMWSLMQPSTLPRRSGAAGA

SEQ ID NO: 107497 - protein, 23 aa, Artificial Sequence
  Description of Artificial Sequence: Synthetic peptide
  Seed: MDPRMCSLMQGSTLPRRSGAAGA
MDPRMWSLMQPSTMPRRSGAAGA

SEQ ID NO: 107498 - protein, 23 aa, Artificial Sequence
  Description of Artificial Sequence: Synthetic peptide
  Seed: MDPRMCSLMQGSTLPRRSGAAGA
MDPRMWSLMQPSTNPRRSGAAGA

SEQ ID NO: 107499 - protein, 23 aa, Artificial Sequence
  Description of Artificial Sequence: Synthetic peptide
  Seed: MDPRMCSLMQGSTLPRRSGAAGA
MDPRMWSLMQPSTSPRRSGAAGA

SEQ ID NO: 107500 - protein, 23 aa, Artificial Sequence
  Description of Artificial Sequence: Synthetic peptide
  Seed: MDPRMCSLMQGSTLPRRSGAAGA
MDPRMWSLMQPSTTPRRSGAAGA

SEQ ID NO: 107501 - protein, 23 aa, Artificial Sequence
  Description of Artificial Sequence: Synthetic peptide
  Seed: MDPRMCSLMQGSTLPRRSGAAGA
MDPRMWSLMQPSTVPRRSGAAGA

SEQ ID NO: 107502 - protein, 23 aa, Artificial Sequence
  Description of Artificial Sequence: Synthetic peptide
  Seed: MDPRMCSLMQGSTLPRRSGAAGA
MDPRMWSLMQSSTAPRRSGAAGA

SEQ ID NO: 107503 - protein, 23 aa, Artificial Sequence
  Description of Artificial Sequence: Synthetic peptide
  Seed: MDPRMCSLMQGSTLPRRSGAAGA
MDPRMWSLMQSSTIPRRSGAAGA

SEQ ID NO: 107504 - protein, 23 aa, Artificial Sequence
  Description of Artificial Sequence: Synthetic peptide
  Seed: MDPRMCSLMQGSTLPRRSGAAGA
MDPRMWSLMQSSTLPRRSGAAGA

SEQ ID NO: 107505 - protein, 23 aa, Artificial Sequence
  Description of Artificial Sequence: Synthetic peptide
  Seed: MDPRMCSLMQGSTLPRRSGAAGA
MDPRMWSLMQSSTMPRRSGAAGA

SEQ ID NO: 107506 - protein, 23 aa, Artificial Sequence
  Description of Artificial Sequence: Synthetic peptide
  Seed: MDPRMCSLMQGSTLPRRSGAAGA
MDPRMWSLMQSSTNPRRSGAAGA

SEQ ID NO: 107507 - protein, 23 aa, Artificial Sequence
  Description of Artificial Sequence: Synthetic peptide
  Seed: MDPRMCSLMQGSTLPRRSGAAGA
MDPRMWSLMQSSTSPRRSGAAGA

SEQ ID NO: 107508 - protein, 23 aa, Artificial Sequence
  Description of Artificial Sequence: Synthetic peptide
  Seed: MDPRMCSLMQGSTLPRRSGAAGA
MDPRMWSLMQSSTTPRRSGAAGA

SEQ ID NO: 107509 - protein, 23 aa, Artificial Sequence
  Description of Artificial Sequence: Synthetic peptide
  Seed: MDPRMCSLMQGSTLPRRSGAAGA
MDPRMWSLMQSSTVPRRSGAAGA

SEQ ID NO: 107510 - protein, 23 aa, Artificial Sequence
  Description of Artificial Sequence: Synthetic peptide
  Seed: MDPRMCSLMQGSTLPRRSGAAGA
MDPRMWSLMQTSTAPRRSGAAGA

SEQ ID NO: 107511 - protein, 23 aa, Artificial Sequence
  Description of Artificial Sequence: Synthetic peptide
  Seed: MDPRMCSLMQGSTLPRRSGAAGA
MDPRMWSLMQTSTIPRRSGAAGA

SEQ ID NO: 107512 - protein, 23 aa, Artificial Sequence
  Description of Artificial Sequence: Synthetic peptide
  Seed: MDPRMCSLMQGSTLPRRSGAAGA
MDPRMWSLMQTSTLPRRSGAAGA

SEQ ID NO: 107513 - protein, 23 aa, Artificial Sequence
  Description of Artificial Sequence: Synthetic peptide
  Seed: MDPRMCSLMQGSTLPRRSGAAGA
MDPRMWSLMQTSTNPRRSGAAGA

SEQ ID NO: 107514 - protein, 23 aa, Artificial Sequence
  Description of Artificial Sequence: Synthetic peptide
  Seed: MDPRMCSLMQGSTLPRRSGAAGA
MDPRMWSLMQTSTSPRRSGAAGA

SEQ ID NO: 107515 - protein, 23 aa, Artificial Sequence
  Description of Artificial Sequence: Synthetic peptide
  Seed: MDPRMCSLMQGSTLPRRSGAAGA
MDPRMWSLMQTSTTPRRSGAAGA

SEQ ID NO: 107516 - protein, 23 aa, Artificial Sequence
  Description of Artificial Sequence: Synthetic peptide
  Seed: MDPRMCSLMQGSTLPRRSGAAGA
MDPRMWSLMQTSTVPRRSGAAGA

SEQ ID NO: 107517 - protein, 23 aa, Artificial Sequence
  Description of Artificial Sequence: Synthetic peptide
  Seed: MDPRMCSLMQGSTLPRRSGAAGA
MDPRMWSLMQVSTAPRRSGAAGA

SEQ ID NO: 107518 - protein, 23 aa, Artificial Sequence
  Description of Artificial Sequence: Synthetic peptide
  Seed: MDPRMCSLMQGSTLPRRSGAAGA
MDPRMWSLMQVSTNPRRSGAAGA

SEQ ID NO: 107519 - protein, 23 aa, Artificial Sequence
  Description of Artificial Sequence: Synthetic peptide
  Seed: MDPRMCSLMQGSTLPRRSGAAGA
MDPRMWSLMQVSTSPRRSGAAGA

SEQ ID NO: 107520 - protein, 23 aa, Artificial Sequence
  Description of Artificial Sequence: Synthetic peptide
  Seed: MDPRMCSLMQGSTLPRRSGAAGA
MDPRMWSLMQVSTTPRRSGAAGA

SEQ ID NO: 107521 - protein, 23 aa, Artificial Sequence
  Description of Artificial Sequence: Synthetic peptide
  Seed: MDPRMCSLMQGSTLPRRSGAAGA
MDPRMWSLQQASTAPRRSGAAGA

SEQ ID NO: 107522 - protein, 23 aa, Artificial Sequence
  Description of Artificial Sequence: Synthetic peptide
  Seed: MDPRMCSLMQGSTLPRRSGAAGA
MDPRMWSLQQASTIPRRSGAAGA

SEQ ID NO: 107523 - protein, 23 aa, Artificial Sequence
  Description of Artificial Sequence: Synthetic peptide
  Seed: MDPRMCSLMQGSTLPRRSGAAGA
MDPRMWSLQQASTLPRRSGAAGA

SEQ ID NO: 107524 - protein, 23 aa, Artificial Sequence
  Description of Artificial Sequence: Synthetic peptide
  Seed: MDPRMCSLMQGSTLPRRSGAAGA
MDPRMWSLQQASTVPRRSGAAGA

SEQ ID NO: 107525 - protein, 23 aa, Artificial Sequence
  Description of Artificial Sequence: Synthetic peptide
  Seed: MDPRMCSLMQGSTLPRRSGAAGA
MDPRMWSLQQGSTLPRRSGAAGA

SEQ ID NO: 107526 - protein, 23 aa, Artificial Sequence
  Description of Artificial Sequence: Synthetic peptide
  Seed: MDPRMCSLMQGSTLPRRSGAAGA
MDPRMWSLQQGSTVPRRSGAAGA

SEQ ID NO: 107527 - protein, 23 aa, Artificial Sequence
  Description of Artificial Sequence: Synthetic peptide
  Seed: MDPRMCSLMQGSTLPRRSGAAGA
MDPRMWSLVQASTAPRRSGAAGA

SEQ ID NO: 107528 - protein, 23 aa, Artificial Sequence
  Description of Artificial Sequence: Synthetic peptide
  Seed: MDPRMCSLMQGSTLPRRSGAAGA
MDPRMWSLVQASTIPRRSGAAGA

SEQ ID NO: 107529 - protein, 23 aa, Artificial Sequence
  Description of Artificial Sequence: Synthetic peptide
  Seed: MDPRMCSLMQGSTLPRRSGAAGA
MDPRMWSLVQASTLPRRSGAAGA

SEQ ID NO: 107530 - protein, 23 aa, Artificial Sequence
  Description of Artificial Sequence: Synthetic peptide
  Seed: MDPRMCSLMQGSTLPRRSGAAGA
MDPRMWSLVQASTNPRRSGAAGA

SEQ ID NO: 107531 - protein, 23 aa, Artificial Sequence
  Description of Artificial Sequence: Synthetic peptide
  Seed: MDPRMCSLMQGSTLPRRSGAAGA
MDPRMWSLVQASTSPRRSGAAGA

SEQ ID NO: 107532 - protein, 23 aa, Artificial Sequence
  Description of Artificial Sequence: Synthetic peptide
  Seed: MDPRMCSLMQGSTLPRRSGAAGA
MDPRMWSLVQASTVPRRSGAAGA

SEQ ID NO: 107533 - protein, 23 aa, Artificial Sequence
  Description of Artificial Sequence: Synthetic peptide
  Seed: MDPRMCSLMQGSTLPRRSGAAGA
MDPRMWSLVQGSTAPRRSGAAGA

SEQ ID NO: 107534 - protein, 23 aa, Artificial Sequence
  Description of Artificial Sequence: Synthetic peptide
  Seed: MDPRMCSLMQGSTLPRRSGAAGA
MDPRMWSLVQGSTIPRRSGAAGA

SEQ ID NO: 107535 - protein, 23 aa, Artificial Sequence
  Description of Artificial Sequence: Synthetic peptide
  Seed: MDPRMCSLMQGSTLPRRSGAAGA
MDPRMWSLVQGSTLPRRSGAAGA

SEQ ID NO: 107536 - protein, 23 aa, Artificial Sequence
  Description of Artificial Sequence: Synthetic peptide
  Seed: MDPRMCSLMQGSTLPRRSGAAGA
MDPRMWSLVQGSTVPRRSGAAGA

SEQ ID NO: 107537 - protein, 23 aa, Artificial Sequence
  Description of Artificial Sequence: Synthetic peptide
  Seed: MDPRMCSLMQGSTLPRRSGAAGA
MDPRMWSLVQSSTVPRRSGAAGA

SEQ ID NO: 107538 - protein, 23 aa, Artificial Sequence
  Description of Artificial Sequence: Synthetic peptide
  Seed: MDPRMCSLMQGSTLPRRSGAAGA
MDPRMYSLAQASTAPRRSGAAGA

SEQ ID NO: 107539 - protein, 23 aa, Artificial Sequence
  Description of Artificial Sequence: Synthetic peptide
  Seed: MDPRMCSLMQGSTLPRRSGAAGA
MDPRMYSLAQASTGPRRSGAAGA

SEQ ID NO: 107540 - protein, 23 aa, Artificial Sequence
  Description of Artificial Sequence: Synthetic peptide
  Seed: MDPRMCSLMQGSTLPRRSGAAGA
MDPRMYSLAQASTIPRRSGAAGA

SEQ ID NO: 107541 - protein, 23 aa, Artificial Sequence
  Description of Artificial Sequence: Synthetic peptide
  Seed: MDPRMCSLMQGSTLPRRSGAAGA
MDPRMYSLAQASTLPRRSGAAGA

SEQ ID NO: 107542 - protein, 23 aa, Artificial Sequence
  Description of Artificial Sequence: Synthetic peptide
  Seed: MDPRMCSLMQGSTLPRRSGAAGA
MDPRMYSLAQASTMPRRSGAAGA

SEQ ID NO: 107543 - protein, 23 aa, Artificial Sequence
  Description of Artificial Sequence: Synthetic peptide
  Seed: MDPRMCSLMQGSTLPRRSGAAGA
MDPRMYSLAQASTNPRRSGAAGA

SEQ ID NO: 107544 - protein, 23 aa, Artificial Sequence
  Description of Artificial Sequence: Synthetic peptide
  Seed: MDPRMCSLMQGSTLPRRSGAAGA
MDPRMYSLAQASTQPRRSGAAGA

SEQ ID NO: 107545 - protein, 23 aa, Artificial Sequence
  Description of Artificial Sequence: Synthetic peptide
  Seed: MDPRMCSLMQGSTLPRRSGAAGA
MDPRMYSLAQASTSPRRSGAAGA

SEQ ID NO: 107546 - protein, 23 aa, Artificial Sequence
  Description of Artificial Sequence: Synthetic peptide
  Seed: MDPRMCSLMQGSTLPRRSGAAGA
MDPRMYSLAQASTTPRRSGAAGA

SEQ ID NO: 107547 - protein, 23 aa, Artificial Sequence
  Description of Artificial Sequence: Synthetic peptide
  Seed: MDPRMCSLMQGSTLPRRSGAAGA
MDPRMYSLAQASTVPRRSGAAGA

SEQ ID NO: 107548 - protein, 23 aa, Artificial Sequence
  Description of Artificial Sequence: Synthetic peptide
  Seed: MDPRMCSLMQGSTLPRRSGAAGA
MDPRMYSLAQGSTAPRRSGAAGA

SEQ ID NO: 107549 - protein, 23 aa, Artificial Sequence
  Description of Artificial Sequence: Synthetic peptide
  Seed: MDPRMCSLMQGSTLPRRSGAAGA
MDPRMYSLAQGSTIPRRSGAAGA

SEQ ID NO: 107550 - protein, 23 aa, Artificial Sequence
  Description of Artificial Sequence: Synthetic peptide
  Seed: MDPRMCSLMQGSTLPRRSGAAGA
MDPRMYSLAQGSTLPRRSGAAGA

SEQ ID NO: 107551 - protein, 23 aa, Artificial Sequence
  Description of Artificial Sequence: Synthetic peptide
  Seed: MDPRMCSLMQGSTLPRRSGAAGA
MDPRMYSLAQGSTMPRRSGAAGA

SEQ ID NO: 107552 - protein, 23 aa, Artificial Sequence
  Description of Artificial Sequence: Synthetic peptide
  Seed: MDPRMCSLMQGSTLPRRSGAAGA
MDPRMYSLAQGSTVPRRSGAAGA

SEQ ID NO: 107553 - protein, 23 aa, Artificial Sequence
  Description of Artificial Sequence: Synthetic peptide
  Seed: MDPRMCSLMQGSTLPRRSGAAGA
MDPRMYSLAQISTAPRRSGAAGA

SEQ ID NO: 107554 - protein, 23 aa, Artificial Sequence
  Description of Artificial Sequence: Synthetic peptide
  Seed: MDPRMCSLMQGSTLPRRSGAAGA
MDPRMYSLAQISTNPRRSGAAGA

SEQ ID NO: 107555 - protein, 23 aa, Artificial Sequence
  Description of Artificial Sequence: Synthetic peptide
  Seed: MDPRMCSLMQGSTLPRRSGAAGA
MDPRMYSLAQISTSPRRSGAAGA

SEQ ID NO: 107556 - protein, 23 aa, Artificial Sequence
  Description of Artificial Sequence: Synthetic peptide
  Seed: MDPRMCSLMQGSTLPRRSGAAGA
MDPRMYSLAQISTVPRRSGAAGA

SEQ ID NO: 107557 - protein, 23 aa, Artificial Sequence
  Description of Artificial Sequence: Synthetic peptide
  Seed: MDPRMCSLMQGSTLPRRSGAAGA
MDPRMYSLAQNSTIPRRSGAAGA

SEQ ID NO: 107558 - protein, 23 aa, Artificial Sequence
  Description of Artificial Sequence: Synthetic peptide
  Seed: MDPRMCSLMQGSTLPRRSGAAGA
MDPRMYSLAQNSTLPRRSGAAGA

SEQ ID NO: 107559 - protein, 23 aa, Artificial Sequence
  Description of Artificial Sequence: Synthetic peptide
  Seed: MDPRMCSLMQGSTLPRRSGAAGA
MDPRMYSLAQNSTVPRRSGAAGA

SEQ ID NO: 107560 - protein, 23 aa, Artificial Sequence
  Description of Artificial Sequence: Synthetic peptide
  Seed: MDPRMCSLMQGSTLPRRSGAAGA
MDPRMYSLAQPSTAPRRSGAAGA

SEQ ID NO: 107561 - protein, 23 aa, Artificial Sequence
  Description of Artificial Sequence: Synthetic peptide
  Seed: MDPRMCSLMQGSTLPRRSGAAGA
MDPRMYSLAQPSTIPRRSGAAGA

SEQ ID NO: 107562 - protein, 23 aa, Artificial Sequence
  Description of Artificial Sequence: Synthetic peptide
  Seed: MDPRMCSLMQGSTLPRRSGAAGA
MDPRMYSLAQPSTLPRRSGAAGA

SEQ ID NO: 107563 - protein, 23 aa, Artificial Sequence
  Description of Artificial Sequence: Synthetic peptide
  Seed: MDPRMCSLMQGSTLPRRSGAAGA
MDPRMYSLAQPSTMPRRSGAAGA

SEQ ID NO: 107564 - protein, 23 aa, Artificial Sequence
  Description of Artificial Sequence: Synthetic peptide
  Seed: MDPRMCSLMQGSTLPRRSGAAGA
MDPRMYSLAQPSTNPRRSGAAGA

SEQ ID NO: 107565 - protein, 23 aa, Artificial Sequence
  Description of Artificial Sequence: Synthetic peptide
  Seed: MDPRMCSLMQGSTLPRRSGAAGA
MDPRMYSLAQPSTSPRRSGAAGA

SEQ ID NO: 107566 - protein, 23 aa, Artificial Sequence
  Description of Artificial Sequence: Synthetic peptide
  Seed: MDPRMCSLMQGSTLPRRSGAAGA
MDPRMYSLAQPSTVPRRSGAAGA

SEQ ID NO: 107567 - protein, 23 aa, Artificial Sequence
  Description of Artificial Sequence: Synthetic peptide
  Seed: MDPRMCSLMQGSTLPRRSGAAGA
MDPRMYSLAQSSTAPRRSGAAGA

SEQ ID NO: 107568 - protein, 23 aa, Artificial Sequence
  Description of Artificial Sequence: Synthetic peptide
  Seed: MDPRMCSLMQGSTLPRRSGAAGA
MDPRMYSLAQSSTIPRRSGAAGA

SEQ ID NO: 107569 - protein, 23 aa, Artificial Sequence
  Description of Artificial Sequence: Synthetic peptide
  Seed: MDPRMCSLMQGSTLPRRSGAAGA
MDPRMYSLAQSSTLPRRSGAAGA

SEQ ID NO: 107570 - protein, 23 aa, Artificial Sequence
  Description of Artificial Sequence: Synthetic peptide
  Seed: MDPRMCSLMQGSTLPRRSGAAGA
MDPRMYSLAQSSTMPRRSGAAGA

SEQ ID NO: 107571 - protein, 23 aa, Artificial Sequence
  Description of Artificial Sequence: Synthetic peptide
  Seed: MDPRMCSLMQGSTLPRRSGAAGA
MDPRMYSLAQSSTNPRRSGAAGA

SEQ ID NO: 107572 - protein, 23 aa, Artificial Sequence
  Description of Artificial Sequence: Synthetic peptide
  Seed: MDPRMCSLMQGSTLPRRSGAAGA
MDPRMYSLAQSSTSPRRSGAAGA

SEQ ID NO: 107573 - protein, 23 aa, Artificial Sequence
  Description of Artificial Sequence: Synthetic peptide
  Seed: MDPRMCSLMQGSTLPRRSGAAGA
MDPRMYSLAQSSTVPRRSGAAGA

SEQ ID NO: 107574 - protein, 23 aa, Artificial Sequence
  Description of Artificial Sequence: Synthetic peptide
  Seed: MDPRMCSLMQGSTLPRRSGAAGA
MDPRMYSLAQTSTAPRRSGAAGA

SEQ ID NO: 107575 - protein, 23 aa, Artificial Sequence
  Description of Artificial Sequence: Synthetic peptide
  Seed: MDPRMCSLMQGSTLPRRSGAAGA
MDPRMYSLAQTSTIPRRSGAAGA

SEQ ID NO: 107576 - protein, 23 aa, Artificial Sequence
  Description of Artificial Sequence: Synthetic peptide
  Seed: MDPRMCSLMQGSTLPRRSGAAGA
MDPRMYSLAQTSTLPRRSGAAGA

SEQ ID NO: 107577 - protein, 23 aa, Artificial Sequence
  Description of Artificial Sequence: Synthetic peptide
  Seed: MDPRMCSLMQGSTLPRRSGAAGA
MDPRMYSLAQTSTNPRRSGAAGA

SEQ ID NO: 107578 - protein, 23 aa, Artificial Sequence
  Description of Artificial Sequence: Synthetic peptide
  Seed: MDPRMCSLMQGSTLPRRSGAAGA
MDPRMYSLAQTSTSPRRSGAAGA

SEQ ID NO: 107579 - protein, 23 aa, Artificial Sequence
  Description of Artificial Sequence: Synthetic peptide
  Seed: MDPRMCSLMQGSTLPRRSGAAGA
MDPRMYSLAQTSTVPRRSGAAGA

SEQ ID NO: 107580 - protein, 23 aa, Artificial Sequence
  Description of Artificial Sequence: Synthetic peptide
  Seed: MDPRMCSLMQGSTLPRRSGAAGA
MDPRMYSLAQVSTAPRRSGAAGA

SEQ ID NO: 107581 - protein, 23 aa, Artificial Sequence
  Description of Artificial Sequence: Synthetic peptide
  Seed: MDPRMCSLMQGSTLPRRSGAAGA
MDPRMYSLAQVSTIPRRSGAAGA

SEQ ID NO: 107582 - protein, 23 aa, Artificial Sequence
  Description of Artificial Sequence: Synthetic peptide
  Seed: MDPRMCSLMQGSTLPRRSGAAGA
MDPRMYSLAQVSTLPRRSGAAGA

SEQ ID NO: 107583 - protein, 23 aa, Artificial Sequence
  Description of Artificial Sequence: Synthetic peptide
  Seed: MDPRMCSLMQGSTLPRRSGAAGA
MDPRMYSLAQVSTNPRRSGAAGA

SEQ ID NO: 107584 - protein, 23 aa, Artificial Sequence
  Description of Artificial Sequence: Synthetic peptide
  Seed: MDPRMCSLMQGSTLPRRSGAAGA
MDPRMYSLAQVSTSPRRSGAAGA

SEQ ID NO: 107585 - protein, 23 aa, Artificial Sequence
  Description of Artificial Sequence: Synthetic peptide
  Seed: MDPRMCSLMQGSTLPRRSGAAGA
MDPRMYSLAQVSTTPRRSGAAGA

SEQ ID NO: 107586 - protein, 23 aa, Artificial Sequence
  Description of Artificial Sequence: Synthetic peptide
  Seed: MDPRMCSLMQGSTLPRRSGAAGA
MDPRMYSLAQVSTVPRRSGAAGA

SEQ ID NO: 107587 - protein, 23 aa, Artificial Sequence
  Description of Artificial Sequence: Synthetic peptide
  Seed: MDPRMCSLMQGSTLPRRSGAAGA
MDPRMYSLEQASTAPRRSGAAGA

SEQ ID NO: 107588 - protein, 23 aa, Artificial Sequence
  Description of Artificial Sequence: Synthetic peptide
  Seed: MDPRMCSLMQGSTLPRRSGAAGA
MDPRMYSLEQASTIPRRSGAAGA

SEQ ID NO: 107589 - protein, 23 aa, Artificial Sequence
  Description of Artificial Sequence: Synthetic peptide
  Seed: MDPRMCSLMQGSTLPRRSGAAGA
MDPRMYSLEQASTLPRRSGAAGA

SEQ ID NO: 107590 - protein, 23 aa, Artificial Sequence
  Description of Artificial Sequence: Synthetic peptide
  Seed: MDPRMCSLMQGSTLPRRSGAAGA
MDPRMYSLEQASTVPRRSGAAGA

SEQ ID NO: 107591 - protein, 23 aa, Artificial Sequence
  Description of Artificial Sequence: Synthetic peptide
  Seed: MDPRMCSLMQGSTLPRRSGAAGA
MDPRMYSLFQASTAPRRSGAAGA

SEQ ID NO: 107592 - protein, 23 aa, Artificial Sequence
  Description of Artificial Sequence: Synthetic peptide
  Seed: MDPRMCSLMQGSTLPRRSGAAGA
MDPRMYSLFQASTIPRRSGAAGA

SEQ ID NO: 107593 - protein, 23 aa, Artificial Sequence
  Description of Artificial Sequence: Synthetic peptide
  Seed: MDPRMCSLMQGSTLPRRSGAAGA
MDPRMYSLFQASTLPRRSGAAGA

SEQ ID NO: 107594 - protein, 23 aa, Artificial Sequence
  Description of Artificial Sequence: Synthetic peptide
  Seed: MDPRMCSLMQGSTLPRRSGAAGA
MDPRMYSLFQASTNPRRSGAAGA

SEQ ID NO: 107595 - protein, 23 aa, Artificial Sequence
  Description of Artificial Sequence: Synthetic peptide
  Seed: MDPRMCSLMQGSTLPRRSGAAGA
MDPRMYSLFQASTSPRRSGAAGA

SEQ ID NO: 107596 - protein, 23 aa, Artificial Sequence
  Description of Artificial Sequence: Synthetic peptide
  Seed: MDPRMCSLMQGSTLPRRSGAAGA
MDPRMYSLFQASTVPRRSGAAGA

SEQ ID NO: 107597 - protein, 23 aa, Artificial Sequence
  Description of Artificial Sequence: Synthetic peptide
  Seed: MDPRMCSLMQGSTLPRRSGAAGA
MDPRMYSLFQPSTAPRRSGAAGA

SEQ ID NO: 107598 - protein, 23 aa, Artificial Sequence
  Description of Artificial Sequence: Synthetic peptide
  Seed: MDPRMCSLMQGSTLPRRSGAAGA
MDPRMYSLFQVSTAPRRSGAAGA

SEQ ID NO: 107599 - protein, 23 aa, Artificial Sequence
  Description of Artificial Sequence: Synthetic peptide
  Seed: MDPRMCSLMQGSTLPRRSGAAGA
MDPRMYSLGQASTIPRRSGAAGA

SEQ ID NO: 107600 - protein, 23 aa, Artificial Sequence
  Description of Artificial Sequence: Synthetic peptide
  Seed: MDPRMCSLMQGSTLPRRSGAAGA
MDPRMYSLGQASTLPRRSGAAGA

SEQ ID NO: 107601 - protein, 23 aa, Artificial Sequence
  Description of Artificial Sequence: Synthetic peptide
  Seed: MDPRMCSLMQGSTLPRRSGAAGA
MDPRMYSLGQASTVPRRSGAAGA

SEQ ID NO: 107602 - protein, 23 aa, Artificial Sequence
  Description of Artificial Sequence: Synthetic peptide
  Seed: MDPRMCSLMQGSTLPRRSGAAGA
MDPRMYSLIQASTAPRRSGAAGA

SEQ ID NO: 107603 - protein, 23 aa, Artificial Sequence
  Description of Artificial Sequence: Synthetic peptide
  Seed: MDPRMCSLMQGSTLPRRSGAAGA
MDPRMYSLIQASTCPRRSGAAGA

SEQ ID NO: 107604 - protein, 23 aa, Artificial Sequence
  Description of Artificial Sequence: Synthetic peptide
  Seed: MDPRMCSLMQGSTLPRRSGAAGA
MDPRMYSLIQASTGPRRSGAAGA

SEQ ID NO: 107605 - protein, 23 aa, Artificial Sequence
  Description of Artificial Sequence: Synthetic peptide
  Seed: MDPRMCSLMQGSTLPRRSGAAGA
MDPRMYSLIQASTHPRRSGAAGA

SEQ ID NO: 107606 - protein, 23 aa, Artificial Sequence
  Description of Artificial Sequence: Synthetic peptide
  Seed: MDPRMCSLMQGSTLPRRSGAAGA
MDPRMYSLIQASTIPRRSGAAGA

SEQ ID NO: 107607 - protein, 23 aa, Artificial Sequence
  Description of Artificial Sequence: Synthetic peptide
  Seed: MDPRMCSLMQGSTLPRRSGAAGA
MDPRMYSLIQASTLPRRSGAAGA

SEQ ID NO: 107608 - protein, 23 aa, Artificial Sequence
  Description of Artificial Sequence: Synthetic peptide
  Seed: MDPRMCSLMQGSTLPRRSGAAGA
MDPRMYSLIQASTMPRRSGAAGA

SEQ ID NO: 107609 - protein, 23 aa, Artificial Sequence
  Description of Artificial Sequence: Synthetic peptide
  Seed: MDPRMCSLMQGSTLPRRSGAAGA
MDPRMYSLIQASTNPRRSGAAGA

SEQ ID NO: 107610 - protein, 23 aa, Artificial Sequence
  Description of Artificial Sequence: Synthetic peptide
  Seed: MDPRMCSLMQGSTLPRRSGAAGA
MDPRMYSLIQASTQPRRSGAAGA

SEQ ID NO: 107611 - protein, 23 aa, Artificial Sequence
  Description of Artificial Sequence: Synthetic peptide
  Seed: MDPRMCSLMQGSTLPRRSGAAGA
MDPRMYSLIQASTSPRRSGAAGA

SEQ ID NO: 107612 - protein, 23 aa, Artificial Sequence
  Description of Artificial Sequence: Synthetic peptide
  Seed: MDPRMCSLMQGSTLPRRSGAAGA
MDPRMYSLIQASTTPRRSGAAGA

SEQ ID NO: 107613 - protein, 23 aa, Artificial Sequence
  Description of Artificial Sequence: Synthetic peptide
  Seed: MDPRMCSLMQGSTLPRRSGAAGA
MDPRMYSLIQASTVPRRSGAAGA

SEQ ID NO: 107614 - protein, 23 aa, Artificial Sequence
  Description of Artificial Sequence: Synthetic peptide
  Seed: MDPRMCSLMQGSTLPRRSGAAGA
MDPRMYSLIQGSTAPRRSGAAGA

SEQ ID NO: 107615 - protein, 23 aa, Artificial Sequence
  Description of Artificial Sequence: Synthetic peptide
  Seed: MDPRMCSLMQGSTLPRRSGAAGA
MDPRMYSLIQGSTIPRRSGAAGA

SEQ ID NO: 107616 - protein, 23 aa, Artificial Sequence
  Description of Artificial Sequence: Synthetic peptide
  Seed: MDPRMCSLMQGSTLPRRSGAAGA
MDPRMYSLIQGSTLPRRSGAAGA

SEQ ID NO: 107617 - protein, 23 aa, Artificial Sequence
  Description of Artificial Sequence: Synthetic peptide
  Seed: MDPRMCSLMQGSTLPRRSGAAGA
MDPRMYSLIQGSTMPRRSGAAGA

SEQ ID NO: 107618 - protein, 23 aa, Artificial Sequence
  Description of Artificial Sequence: Synthetic peptide
  Seed: MDPRMCSLMQGSTLPRRSGAAGA
MDPRMYSLIQGSTNPRRSGAAGA

SEQ ID NO: 107619 - protein, 23 aa, Artificial Sequence
  Description of Artificial Sequence: Synthetic peptide
  Seed: MDPRMCSLMQGSTLPRRSGAAGA
MDPRMYSLIQGSTSPRRSGAAGA

SEQ ID NO: 107620 - protein, 23 aa, Artificial Sequence
  Description of Artificial Sequence: Synthetic peptide
  Seed: MDPRMCSLMQGSTLPRRSGAAGA
MDPRMYSLIQGSTTPRRSGAAGA

SEQ ID NO: 107621 - protein, 23 aa, Artificial Sequence
  Description of Artificial Sequence: Synthetic peptide
  Seed: MDPRMCSLMQGSTLPRRSGAAGA
MDPRMYSLIQGSTVPRRSGAAGA

SEQ ID NO: 107622 - protein, 23 aa, Artificial Sequence
  Description of Artificial Sequence: Synthetic peptide
  Seed: MDPRMCSLMQGSTLPRRSGAAGA
MDPRMYSLIQISTAPRRSGAAGA

SEQ ID NO: 107623 - protein, 23 aa, Artificial Sequence
  Description of Artificial Sequence: Synthetic peptide
  Seed: MDPRMCSLMQGSTLPRRSGAAGA
MDPRMYSLIQISTGPRRSGAAGA

SEQ ID NO: 107624 - protein, 23 aa, Artificial Sequence
  Description of Artificial Sequence: Synthetic peptide
  Seed: MDPRMCSLMQGSTLPRRSGAAGA
MDPRMYSLIQISTNPRRSGAAGA

SEQ ID NO: 107625 - protein, 23 aa, Artificial Sequence
  Description of Artificial Sequence: Synthetic peptide
  Seed: MDPRMCSLMQGSTLPRRSGAAGA
MDPRMYSLIQISTSPRRSGAAGA

SEQ ID NO: 107626 - protein, 23 aa, Artificial Sequence
  Description of Artificial Sequence: Synthetic peptide
  Seed: MDPRMCSLMQGSTLPRRSGAAGA
MDPRMYSLIQISTTPRRSGAAGA

SEQ ID NO: 107627 - protein, 23 aa, Artificial Sequence
  Description of Artificial Sequence: Synthetic peptide
  Seed: MDPRMCSLMQGSTLPRRSGAAGA
MDPRMYSLIQISTVPRRSGAAGA

SEQ ID NO: 107628 - protein, 23 aa, Artificial Sequence
  Description of Artificial Sequence: Synthetic peptide
  Seed: MDPRMCSLMQGSTLPRRSGAAGA
MDPRMYSLIQLSTAPRRSGAAGA

SEQ ID NO: 107629 - protein, 23 aa, Artificial Sequence
  Description of Artificial Sequence: Synthetic peptide
  Seed: MDPRMCSLMQGSTLPRRSGAAGA
MDPRMYSLIQLSTNPRRSGAAGA

SEQ ID NO: 107630 - protein, 23 aa, Artificial Sequence
  Description of Artificial Sequence: Synthetic peptide
  Seed: MDPRMCSLMQGSTLPRRSGAAGA
MDPRMYSLIQMSTAPRRSGAAGA

SEQ ID NO: 107631 - protein, 23 aa, Artificial Sequence
  Description of Artificial Sequence: Synthetic peptide
  Seed: MDPRMCSLMQGSTLPRRSGAAGA
MDPRMYSLIQNSTAPRRSGAAGA

SEQ ID NO: 107632 - protein, 23 aa, Artificial Sequence
  Description of Artificial Sequence: Synthetic peptide
  Seed: MDPRMCSLMQGSTLPRRSGAAGA
MDPRMYSLIQNSTIPRRSGAAGA

SEQ ID NO: 107633 - protein, 23 aa, Artificial Sequence
  Description of Artificial Sequence: Synthetic peptide
  Seed: MDPRMCSLMQGSTLPRRSGAAGA
MDPRMYSLIQNSTLPRRSGAAGA

SEQ ID NO: 107634 - protein, 23 aa, Artificial Sequence
  Description of Artificial Sequence: Synthetic peptide
  Seed: MDPRMCSLMQGSTLPRRSGAAGA
MDPRMYSLIQNSTNPRRSGAAGA

SEQ ID NO: 107635 - protein, 23 aa, Artificial Sequence
  Description of Artificial Sequence: Synthetic peptide
  Seed: MDPRMCSLMQGSTLPRRSGAAGA
MDPRMYSLIQNSTSPRRSGAAGA

SEQ ID NO: 107636 - protein, 23 aa, Artificial Sequence
  Description of Artificial Sequence: Synthetic peptide
  Seed: MDPRMCSLMQGSTLPRRSGAAGA
MDPRMYSLIQNSTVPRRSGAAGA

SEQ ID NO: 107637 - protein, 23 aa, Artificial Sequence
  Description of Artificial Sequence: Synthetic peptide
  Seed: MDPRMCSLMQGSTLPRRSGAAGA
MDPRMYSLIQPSTAPRRSGAAGA

SEQ ID NO: 107638 - protein, 23 aa, Artificial Sequence
  Description of Artificial Sequence: Synthetic peptide
  Seed: MDPRMCSLMQGSTLPRRSGAAGA
MDPRMYSLIQPSTGPRRSGAAGA

SEQ ID NO: 107639 - protein, 23 aa, Artificial Sequence
  Description of Artificial Sequence: Synthetic peptide
  Seed: MDPRMCSLMQGSTLPRRSGAAGA
MDPRMYSLIQPSTIPRRSGAAGA

SEQ ID NO: 107640 - protein, 23 aa, Artificial Sequence
  Description of Artificial Sequence: Synthetic peptide
  Seed: MDPRMCSLMQGSTLPRRSGAAGA
MDPRMYSLIQPSTLPRRSGAAGA

SEQ ID NO: 107641 - protein, 23 aa, Artificial Sequence
  Description of Artificial Sequence: Synthetic peptide
  Seed: MDPRMCSLMQGSTLPRRSGAAGA
MDPRMYSLIQPSTMPRRSGAAGA

SEQ ID NO: 107642 - protein, 23 aa, Artificial Sequence
  Description of Artificial Sequence: Synthetic peptide
  Seed: MDPRMCSLMQGSTLPRRSGAAGA
MDPRMYSLIQPSTNPRRSGAAGA

SEQ ID NO: 107643 - protein, 23 aa, Artificial Sequence
  Description of Artificial Sequence: Synthetic peptide
  Seed: MDPRMCSLMQGSTLPRRSGAAGA
MDPRMYSLIQPSTQPRRSGAAGA

SEQ ID NO: 107644 - protein, 23 aa, Artificial Sequence
  Description of Artificial Sequence: Synthetic peptide
  Seed: MDPRMCSLMQGSTLPRRSGAAGA
MDPRMYSLIQPSTSPRRSGAAGA

SEQ ID NO: 107645 - protein, 23 aa, Artificial Sequence
  Description of Artificial Sequence: Synthetic peptide
  Seed: MDPRMCSLMQGSTLPRRSGAAGA
MDPRMYSLIQPSTTPRRSGAAGA

SEQ ID NO: 107646 - protein, 23 aa, Artificial Sequence
  Description of Artificial Sequence: Synthetic peptide
  Seed: MDPRMCSLMQGSTLPRRSGAAGA
MDPRMYSLIQPSTVPRRSGAAGA

SEQ ID NO: 107647 - protein, 23 aa, Artificial Sequence
  Description of Artificial Sequence: Synthetic peptide
  Seed: MDPRMCSLMQGSTLPRRSGAAGA
MDPRMYSLIQSSTAPRRSGAAGA

SEQ ID NO: 107648 - protein, 23 aa, Artificial Sequence
  Description of Artificial Sequence: Synthetic peptide
  Seed: MDPRMCSLMQGSTLPRRSGAAGA
MDPRMYSLIQSSTGPRRSGAAGA

SEQ ID NO: 107649 - protein, 23 aa, Artificial Sequence
  Description of Artificial Sequence: Synthetic peptide
  Seed: MDPRMCSLMQGSTLPRRSGAAGA
MDPRMYSLIQSSTIPRRSGAAGA

SEQ ID NO: 107650 - protein, 23 aa, Artificial Sequence
  Description of Artificial Sequence: Synthetic peptide
  Seed: MDPRMCSLMQGSTLPRRSGAAGA
MDPRMYSLIQSSTLPRRSGAAGA

SEQ ID NO: 107651 - protein, 23 aa, Artificial Sequence
  Description of Artificial Sequence: Synthetic peptide
  Seed: MDPRMCSLMQGSTLPRRSGAAGA
MDPRMYSLIQSSTMPRRSGAAGA

SEQ ID NO: 107652 - protein, 23 aa, Artificial Sequence
  Description of Artificial Sequence: Synthetic peptide
  Seed: MDPRMCSLMQGSTLPRRSGAAGA
MDPRMYSLIQSSTNPRRSGAAGA

SEQ ID NO: 107653 - protein, 23 aa, Artificial Sequence
  Description of Artificial Sequence: Synthetic peptide
  Seed: MDPRMCSLMQGSTLPRRSGAAGA
MDPRMYSLIQSSTSPRRSGAAGA

SEQ ID NO: 107654 - protein, 23 aa, Artificial Sequence
  Description of Artificial Sequence: Synthetic peptide
  Seed: MDPRMCSLMQGSTLPRRSGAAGA
MDPRMYSLIQSSTTPRRSGAAGA

SEQ ID NO: 107655 - protein, 23 aa, Artificial Sequence
  Description of Artificial Sequence: Synthetic peptide
  Seed: MDPRMCSLMQGSTLPRRSGAAGA
MDPRMYSLIQSSTVPRRSGAAGA

SEQ ID NO: 107656 - protein, 23 aa, Artificial Sequence
  Description of Artificial Sequence: Synthetic peptide
  Seed: MDPRMCSLMQGSTLPRRSGAAGA
MDPRMYSLIQTSTAPRRSGAAGA

SEQ ID NO: 107657 - protein, 23 aa, Artificial Sequence
  Description of Artificial Sequence: Synthetic peptide
  Seed: MDPRMCSLMQGSTLPRRSGAAGA
MDPRMYSLIQTSTGPRRSGAAGA

SEQ ID NO: 107658 - protein, 23 aa, Artificial Sequence
  Description of Artificial Sequence: Synthetic peptide
  Seed: MDPRMCSLMQGSTLPRRSGAAGA
MDPRMYSLIQTSTIPRRSGAAGA

SEQ ID NO: 107659 - protein, 23 aa, Artificial Sequence
  Description of Artificial Sequence: Synthetic peptide
  Seed: MDPRMCSLMQGSTLPRRSGAAGA
MDPRMYSLIQTSTLPRRSGAAGA

SEQ ID NO: 107660 - protein, 23 aa, Artificial Sequence
  Description of Artificial Sequence: Synthetic peptide
  Seed: MDPRMCSLMQGSTLPRRSGAAGA
MDPRMYSLIQTSTMPRRSGAAGA

SEQ ID NO: 107661 - protein, 23 aa, Artificial Sequence
  Description of Artificial Sequence: Synthetic peptide
  Seed: MDPRMCSLMQGSTLPRRSGAAGA
MDPRMYSLIQTSTNPRRSGAAGA

SEQ ID NO: 107662 - protein, 23 aa, Artificial Sequence
  Description of Artificial Sequence: Synthetic peptide
  Seed: MDPRMCSLMQGSTLPRRSGAAGA
MDPRMYSLIQTSTSPRRSGAAGA

SEQ ID NO: 107663 - protein, 23 aa, Artificial Sequence
  Description of Artificial Sequence: Synthetic peptide
  Seed: MDPRMCSLMQGSTLPRRSGAAGA
MDPRMYSLIQTSTTPRRSGAAGA

SEQ ID NO: 107664 - protein, 23 aa, Artificial Sequence
  Description of Artificial Sequence: Synthetic peptide
  Seed: MDPRMCSLMQGSTLPRRSGAAGA
MDPRMYSLIQTSTVPRRSGAAGA

SEQ ID NO: 107665 - protein, 23 aa, Artificial Sequence
  Description of Artificial Sequence: Synthetic peptide
  Seed: MDPRMCSLMQGSTLPRRSGAAGA
MDPRMYSLIQVSTAPRRSGAAGA

SEQ ID NO: 107666 - protein, 23 aa, Artificial Sequence
  Description of Artificial Sequence: Synthetic peptide
  Seed: MDPRMCSLMQGSTLPRRSGAAGA
MDPRMYSLIQVSTGPRRSGAAGA

SEQ ID NO: 107667 - protein, 23 aa, Artificial Sequence
  Description of Artificial Sequence: Synthetic peptide
  Seed: MDPRMCSLMQGSTLPRRSGAAGA
MDPRMYSLIQVSTIPRRSGAAGA

SEQ ID NO: 107668 - protein, 23 aa, Artificial Sequence
  Description of Artificial Sequence: Synthetic peptide
  Seed: MDPRMCSLMQGSTLPRRSGAAGA
MDPRMYSLIQVSTLPRRSGAAGA

SEQ ID NO: 107669 - protein, 23 aa, Artificial Sequence
  Description of Artificial Sequence: Synthetic peptide
  Seed: MDPRMCSLMQGSTLPRRSGAAGA
MDPRMYSLIQVSTMPRRSGAAGA

SEQ ID NO: 107670 - protein, 23 aa, Artificial Sequence
  Description of Artificial Sequence: Synthetic peptide
  Seed: MDPRMCSLMQGSTLPRRSGAAGA
MDPRMYSLIQVSTNPRRSGAAGA

SEQ ID NO: 107671 - protein, 23 aa, Artificial Sequence
  Description of Artificial Sequence: Synthetic peptide
  Seed: MDPRMCSLMQGSTLPRRSGAAGA
MDPRMYSLIQVSTSPRRSGAAGA

SEQ ID NO: 107672 - protein, 23 aa, Artificial Sequence
  Description of Artificial Sequence: Synthetic peptide
  Seed: MDPRMCSLMQGSTLPRRSGAAGA
MDPRMYSLIQVSTTPRRSGAAGA

SEQ ID NO: 107673 - protein, 23 aa, Artificial Sequence
  Description of Artificial Sequence: Synthetic peptide
  Seed: MDPRMCSLMQGSTLPRRSGAAGA
MDPRMYSLIQVSTVPRRSGAAGA

SEQ ID NO: 107674 - protein, 23 aa, Artificial Sequence
  Description of Artificial Sequence: Synthetic peptide
  Seed: MDPRMCSLMQGSTLPRRSGAAGA
MDPRMYSLLQASTAPRRSGAAGA

SEQ ID NO: 107675 - protein, 23 aa, Artificial Sequence
  Description of Artificial Sequence: Synthetic peptide
  Seed: MDPRMCSLMQGSTLPRRSGAAGA
MDPRMYSLLQASTCPRRSGAAGA

SEQ ID NO: 107676 - protein, 23 aa, Artificial Sequence
  Description of Artificial Sequence: Synthetic peptide
  Seed: MDPRMCSLMQGSTLPRRSGAAGA
MDPRMYSLLQASTDPRRSGAAGA

SEQ ID NO: 107677 - protein, 23 aa, Artificial Sequence
  Description of Artificial Sequence: Synthetic peptide
  Seed: MDPRMCSLMQGSTLPRRSGAAGA
MDPRMYSLLQASTEPRRSGAAGA

SEQ ID NO: 107678 - protein, 23 aa, Artificial Sequence
  Description of Artificial Sequence: Synthetic peptide
  Seed: MDPRMCSLMQGSTLPRRSGAAGA
MDPRMYSLLQASTFPRRSGAAGA

SEQ ID NO: 107679 - protein, 23 aa, Artificial Sequence
  Description of Artificial Sequence: Synthetic peptide
  Seed: MDPRMCSLMQGSTLPRRSGAAGA
MDPRMYSLLQASTGPRRSGAAGA

SEQ ID NO: 107680 - protein, 23 aa, Artificial Sequence
  Description of Artificial Sequence: Synthetic peptide
  Seed: MDPRMCSLMQGSTLPRRSGAAGA
MDPRMYSLLQASTHPRRSGAAGA

SEQ ID NO: 107681 - protein, 23 aa, Artificial Sequence
  Description of Artificial Sequence: Synthetic peptide
  Seed: MDPRMCSLMQGSTLPRRSGAAGA
MDPRMYSLLQASTIPRRSGAAGA

SEQ ID NO: 107682 - protein, 23 aa, Artificial Sequence
  Description of Artificial Sequence: Synthetic peptide
  Seed: MDPRMCSLMQGSTLPRRSGAAGA
MDPRMYSLLQASTLPRRSGAAGA

SEQ ID NO: 107683 - protein, 23 aa, Artificial Sequence
  Description of Artificial Sequence: Synthetic peptide
  Seed: MDPRMCSLMQGSTLPRRSGAAGA
MDPRMYSLLQASTMPRRSGAAGA

SEQ ID NO: 107684 - protein, 23 aa, Artificial Sequence
  Description of Artificial Sequence: Synthetic peptide
  Seed: MDPRMCSLMQGSTLPRRSGAAGA
MDPRMYSLLQASTNPRRSGAAGA

SEQ ID NO: 107685 - protein, 23 aa, Artificial Sequence
  Description of Artificial Sequence: Synthetic peptide
  Seed: MDPRMCSLMQGSTLPRRSGAAGA
MDPRMYSLLQASTPPRRSGAAGA

SEQ ID NO: 107686 - protein, 23 aa, Artificial Sequence
  Description of Artificial Sequence: Synthetic peptide
  Seed: MDPRMCSLMQGSTLPRRSGAAGA
MDPRMYSLLQASTQPRRSGAAGA

SEQ ID NO: 107687 - protein, 23 aa, Artificial Sequence
  Description of Artificial Sequence: Synthetic peptide
  Seed: MDPRMCSLMQGSTLPRRSGAAGA
MDPRMYSLLQASTSPRRSGAAGA

SEQ ID NO: 107688 - protein, 23 aa, Artificial Sequence
  Description of Artificial Sequence: Synthetic peptide
  Seed: MDPRMCSLMQGSTLPRRSGAAGA
MDPRMYSLLQASTTPRRSGAAGA

SEQ ID NO: 107689 - protein, 23 aa, Artificial Sequence
  Description of Artificial Sequence: Synthetic peptide
  Seed: MDPRMCSLMQGSTLPRRSGAAGA
MDPRMYSLLQASTVPRRSGAAGA

SEQ ID NO: 107690 - protein, 23 aa, Artificial Sequence
  Description of Artificial Sequence: Synthetic peptide
  Seed: MDPRMCSLMQGSTLPRRSGAAGA
MDPRMYSLLQGSTAPRRSGAAGA

SEQ ID NO: 107691 - protein, 23 aa, Artificial Sequence
  Description of Artificial Sequence: Synthetic peptide
  Seed: MDPRMCSLMQGSTLPRRSGAAGA
MDPRMYSLLQGSTCPRRSGAAGA

SEQ ID NO: 107692 - protein, 23 aa, Artificial Sequence
  Description of Artificial Sequence: Synthetic peptide
  Seed: MDPRMCSLMQGSTLPRRSGAAGA
MDPRMYSLLQGSTFPRRSGAAGA

SEQ ID NO: 107693 - protein, 23 aa, Artificial Sequence
  Description of Artificial Sequence: Synthetic peptide
  Seed: MDPRMCSLMQGSTLPRRSGAAGA
MDPRMYSLLQGSTGPRRSGAAGA

SEQ ID NO: 107694 - protein, 23 aa, Artificial Sequence
  Description of Artificial Sequence: Synthetic peptide
  Seed: MDPRMCSLMQGSTLPRRSGAAGA
MDPRMYSLLQGSTIPRRSGAAGA

SEQ ID NO: 107695 - protein, 23 aa, Artificial Sequence
  Description of Artificial Sequence: Synthetic peptide
  Seed: MDPRMCSLMQGSTLPRRSGAAGA
MDPRMYSLLQGSTLPRRSGAAGA

SEQ ID NO: 107696 - protein, 23 aa, Artificial Sequence
  Description of Artificial Sequence: Synthetic peptide
  Seed: MDPRMCSLMQGSTLPRRSGAAGA
MDPRMYSLLQGSTMPRRSGAAGA

SEQ ID NO: 107697 - protein, 23 aa, Artificial Sequence
  Description of Artificial Sequence: Synthetic peptide
  Seed: MDPRMCSLMQGSTLPRRSGAAGA
MDPRMYSLLQGSTNPRRSGAAGA

SEQ ID NO: 107698 - protein, 23 aa, Artificial Sequence
  Description of Artificial Sequence: Synthetic peptide
  Seed: MDPRMCSLMQGSTLPRRSGAAGA
MDPRMYSLLQGSTSPRRSGAAGA

SEQ ID NO: 107699 - protein, 23 aa, Artificial Sequence
  Description of Artificial Sequence: Synthetic peptide
  Seed: MDPRMCSLMQGSTLPRRSGAAGA
MDPRMYSLLQGSTTPRRSGAAGA

SEQ ID NO: 107700 - protein, 23 aa, Artificial Sequence
  Description of Artificial Sequence: Synthetic peptide
  Seed: MDPRMCSLMQGSTLPRRSGAAGA
MDPRMYSLLQGSTVPRRSGAAGA

SEQ ID NO: 107701 - protein, 23 aa, Artificial Sequence
  Description of Artificial Sequence: Synthetic peptide
  Seed: MDPRMCSLMQGSTLPRRSGAAGA
MDPRMYSLLQISTAPRRSGAAGA

SEQ ID NO: 107702 - protein, 23 aa, Artificial Sequence
  Description of Artificial Sequence: Synthetic peptide
  Seed: MDPRMCSLMQGSTLPRRSGAAGA
MDPRMYSLLQISTGPRRSGAAGA

SEQ ID NO: 107703 - protein, 23 aa, Artificial Sequence
  Description of Artificial Sequence: Synthetic peptide
  Seed: MDPRMCSLMQGSTLPRRSGAAGA
MDPRMYSLLQISTIPRRSGAAGA

SEQ ID NO: 107704 - protein, 23 aa, Artificial Sequence
  Description of Artificial Sequence: Synthetic peptide
  Seed: MDPRMCSLMQGSTLPRRSGAAGA
MDPRMYSLLQISTLPRRSGAAGA

SEQ ID NO: 107705 - protein, 23 aa, Artificial Sequence
  Description of Artificial Sequence: Synthetic peptide
  Seed: MDPRMCSLMQGSTLPRRSGAAGA
MDPRMYSLLQISTMPRRSGAAGA

SEQ ID NO: 107706 - protein, 23 aa, Artificial Sequence
  Description of Artificial Sequence: Synthetic peptide
  Seed: MDPRMCSLMQGSTLPRRSGAAGA
MDPRMYSLLQISTNPRRSGAAGA

SEQ ID NO: 107707 - protein, 23 aa, Artificial Sequence
  Description of Artificial Sequence: Synthetic peptide
  Seed: MDPRMCSLMQGSTLPRRSGAAGA
MDPRMYSLLQISTSPRRSGAAGA

SEQ ID NO: 107708 - protein, 23 aa, Artificial Sequence
  Description of Artificial Sequence: Synthetic peptide
  Seed: MDPRMCSLMQGSTLPRRSGAAGA
MDPRMYSLLQISTTPRRSGAAGA

SEQ ID NO: 107709 - protein, 23 aa, Artificial Sequence
  Description of Artificial Sequence: Synthetic peptide
  Seed: MDPRMCSLMQGSTLPRRSGAAGA
MDPRMYSLLQISTVPRRSGAAGA

SEQ ID NO: 107710 - protein, 23 aa, Artificial Sequence
  Description of Artificial Sequence: Synthetic peptide
  Seed: MDPRMCSLMQGSTLPRRSGAAGA
MDPRMYSLLQLSTAPRRSGAAGA

SEQ ID NO: 107711 - protein, 23 aa, Artificial Sequence
  Description of Artificial Sequence: Synthetic peptide
  Seed: MDPRMCSLMQGSTLPRRSGAAGA
MDPRMYSLLQLSTNPRRSGAAGA

SEQ ID NO: 107712 - protein, 23 aa, Artificial Sequence
  Description of Artificial Sequence: Synthetic peptide
  Seed: MDPRMCSLMQGSTLPRRSGAAGA
MDPRMYSLLQLSTSPRRSGAAGA

SEQ ID NO: 107713 - protein, 23 aa, Artificial Sequence
  Description of Artificial Sequence: Synthetic peptide
  Seed: MDPRMCSLMQGSTLPRRSGAAGA
MDPRMYSLLQMSTAPRRSGAAGA

SEQ ID NO: 107714 - protein, 23 aa, Artificial Sequence
  Description of Artificial Sequence: Synthetic peptide
  Seed: MDPRMCSLMQGSTLPRRSGAAGA
MDPRMYSLLQMSTNPRRSGAAGA

SEQ ID NO: 107715 - protein, 23 aa, Artificial Sequence
  Description of Artificial Sequence: Synthetic peptide
  Seed: MDPRMCSLMQGSTLPRRSGAAGA
MDPRMYSLLQMSTSPRRSGAAGA

SEQ ID NO: 107716 - protein, 23 aa, Artificial Sequence
  Description of Artificial Sequence: Synthetic peptide
  Seed: MDPRMCSLMQGSTLPRRSGAAGA
MDPRMYSLLQNSTAPRRSGAAGA

SEQ ID NO: 107717 - protein, 23 aa, Artificial Sequence
  Description of Artificial Sequence: Synthetic peptide
  Seed: MDPRMCSLMQGSTLPRRSGAAGA
MDPRMYSLLQNSTIPRRSGAAGA

SEQ ID NO: 107718 - protein, 23 aa, Artificial Sequence
  Description of Artificial Sequence: Synthetic peptide
  Seed: MDPRMCSLMQGSTLPRRSGAAGA
MDPRMYSLLQNSTLPRRSGAAGA

SEQ ID NO: 107719 - protein, 23 aa, Artificial Sequence
  Description of Artificial Sequence: Synthetic peptide
  Seed: MDPRMCSLMQGSTLPRRSGAAGA
MDPRMYSLLQNSTMPRRSGAAGA

SEQ ID NO: 107720 - protein, 23 aa, Artificial Sequence
  Description of Artificial Sequence: Synthetic peptide
  Seed: MDPRMCSLMQGSTLPRRSGAAGA
MDPRMYSLLQNSTNPRRSGAAGA

SEQ ID NO: 107721 - protein, 23 aa, Artificial Sequence
  Description of Artificial Sequence: Synthetic peptide
  Seed: MDPRMCSLMQGSTLPRRSGAAGA
MDPRMYSLLQNSTSPRRSGAAGA

SEQ ID NO: 107722 - protein, 23 aa, Artificial Sequence
  Description of Artificial Sequence: Synthetic peptide
  Seed: MDPRMCSLMQGSTLPRRSGAAGA
MDPRMYSLLQNSTTPRRSGAAGA

SEQ ID NO: 107723 - protein, 23 aa, Artificial Sequence
  Description of Artificial Sequence: Synthetic peptide
  Seed: MDPRMCSLMQGSTLPRRSGAAGA
MDPRMYSLLQNSTVPRRSGAAGA

SEQ ID NO: 107724 - protein, 23 aa, Artificial Sequence
  Description of Artificial Sequence: Synthetic peptide
  Seed: MDPRMCSLMQGSTLPRRSGAAGA
MDPRMYSLLQPSTAPRRSGAAGA

SEQ ID NO: 107725 - protein, 23 aa, Artificial Sequence
  Description of Artificial Sequence: Synthetic peptide
  Seed: MDPRMCSLMQGSTLPRRSGAAGA
MDPRMYSLLQPSTGPRRSGAAGA

SEQ ID NO: 107726 - protein, 23 aa, Artificial Sequence
  Description of Artificial Sequence: Synthetic peptide
  Seed: MDPRMCSLMQGSTLPRRSGAAGA
MDPRMYSLLQPSTHPRRSGAAGA

SEQ ID NO: 107727 - protein, 23 aa, Artificial Sequence
  Description of Artificial Sequence: Synthetic peptide
  Seed: MDPRMCSLMQGSTLPRRSGAAGA
MDPRMYSLLQPSTIPRRSGAAGA

SEQ ID NO: 107728 - protein, 23 aa, Artificial Sequence
  Description of Artificial Sequence: Synthetic peptide
  Seed: MDPRMCSLMQGSTLPRRSGAAGA
MDPRMYSLLQPSTLPRRSGAAGA

SEQ ID NO: 107729 - protein, 23 aa, Artificial Sequence
  Description of Artificial Sequence: Synthetic peptide
  Seed: MDPRMCSLMQGSTLPRRSGAAGA
MDPRMYSLLQPSTMPRRSGAAGA

SEQ ID NO: 107730 - protein, 23 aa, Artificial Sequence
  Description of Artificial Sequence: Synthetic peptide
  Seed: MDPRMCSLMQGSTLPRRSGAAGA
MDPRMYSLLQPSTNPRRSGAAGA

SEQ ID NO: 107731 - protein, 23 aa, Artificial Sequence
  Description of Artificial Sequence: Synthetic peptide
  Seed: MDPRMCSLMQGSTLPRRSGAAGA
MDPRMYSLLQPSTPPRRSGAAGA

SEQ ID NO: 107732 - protein, 23 aa, Artificial Sequence
  Description of Artificial Sequence: Synthetic peptide
  Seed: MDPRMCSLMQGSTLPRRSGAAGA
MDPRMYSLLQPSTQPRRSGAAGA

SEQ ID NO: 107733 - protein, 23 aa, Artificial Sequence
  Description of Artificial Sequence: Synthetic peptide
  Seed: MDPRMCSLMQGSTLPRRSGAAGA
MDPRMYSLLQPSTSPRRSGAAGA

SEQ ID NO: 107734 - protein, 23 aa, Artificial Sequence
  Description of Artificial Sequence: Synthetic peptide
  Seed: MDPRMCSLMQGSTLPRRSGAAGA
MDPRMYSLLQPSTTPRRSGAAGA

SEQ ID NO: 107735 - protein, 23 aa, Artificial Sequence
  Description of Artificial Sequence: Synthetic peptide
  Seed: MDPRMCSLMQGSTLPRRSGAAGA
MDPRMYSLLQPSTVPRRSGAAGA

SEQ ID NO: 107736 - protein, 23 aa, Artificial Sequence
  Description of Artificial Sequence: Synthetic peptide
  Seed: MDPRMCSLMQGSTLPRRSGAAGA
MDPRMYSLLQSSTAPRRSGAAGA

SEQ ID NO: 107737 - protein, 23 aa, Artificial Sequence
  Description of Artificial Sequence: Synthetic peptide
  Seed: MDPRMCSLMQGSTLPRRSGAAGA
MDPRMYSLLQSSTCPRRSGAAGA

SEQ ID NO: 107738 - protein, 23 aa, Artificial Sequence
  Description of Artificial Sequence: Synthetic peptide
  Seed: MDPRMCSLMQGSTLPRRSGAAGA
MDPRMYSLLQSSTGPRRSGAAGA

SEQ ID NO: 107739 - protein, 23 aa, Artificial Sequence
  Description of Artificial Sequence: Synthetic peptide
  Seed: MDPRMCSLMQGSTLPRRSGAAGA
MDPRMYSLLQSSTIPRRSGAAGA

SEQ ID NO: 107740 - protein, 23 aa, Artificial Sequence
  Description of Artificial Sequence: Synthetic peptide
  Seed: MDPRMCSLMQGSTLPRRSGAAGA
MDPRMYSLLQSSTLPRRSGAAGA

SEQ ID NO: 107741 - protein, 23 aa, Artificial Sequence
  Description of Artificial Sequence: Synthetic peptide
  Seed: MDPRMCSLMQGSTLPRRSGAAGA
MDPRMYSLLQSSTMPRRSGAAGA

SEQ ID NO: 107742 - protein, 23 aa, Artificial Sequence
  Description of Artificial Sequence: Synthetic peptide
  Seed: MDPRMCSLMQGSTLPRRSGAAGA
MDPRMYSLLQSSTNPRRSGAAGA

SEQ ID NO: 107743 - protein, 23 aa, Artificial Sequence
  Description of Artificial Sequence: Synthetic peptide
  Seed: MDPRMCSLMQGSTLPRRSGAAGA
MDPRMYSLLQSSTSPRRSGAAGA

SEQ ID NO: 107744 - protein, 23 aa, Artificial Sequence
  Description of Artificial Sequence: Synthetic peptide
  Seed: MDPRMCSLMQGSTLPRRSGAAGA
MDPRMYSLLQSSTTPRRSGAAGA

SEQ ID NO: 107745 - protein, 23 aa, Artificial Sequence
  Description of Artificial Sequence: Synthetic peptide
  Seed: MDPRMCSLMQGSTLPRRSGAAGA
MDPRMYSLLQSSTVPRRSGAAGA

SEQ ID NO: 107746 - protein, 23 aa, Artificial Sequence
  Description of Artificial Sequence: Synthetic peptide
  Seed: MDPRMCSLMQGSTLPRRSGAAGA
MDPRMYSLLQTSTAPRRSGAAGA

SEQ ID NO: 107747 - protein, 23 aa, Artificial Sequence
  Description of Artificial Sequence: Synthetic peptide
  Seed: MDPRMCSLMQGSTLPRRSGAAGA
MDPRMYSLLQTSTGPRRSGAAGA

SEQ ID NO: 107748 - protein, 23 aa, Artificial Sequence
  Description of Artificial Sequence: Synthetic peptide
  Seed: MDPRMCSLMQGSTLPRRSGAAGA
MDPRMYSLLQTSTIPRRSGAAGA

SEQ ID NO: 107749 - protein, 23 aa, Artificial Sequence
  Description of Artificial Sequence: Synthetic peptide
  Seed: MDPRMCSLMQGSTLPRRSGAAGA
MDPRMYSLLQTSTLPRRSGAAGA

SEQ ID NO: 107750 - protein, 23 aa, Artificial Sequence
  Description of Artificial Sequence: Synthetic peptide
  Seed: MDPRMCSLMQGSTLPRRSGAAGA
MDPRMYSLLQTSTMPRRSGAAGA

SEQ ID NO: 107751 - protein, 23 aa, Artificial Sequence
  Description of Artificial Sequence: Synthetic peptide
  Seed: MDPRMCSLMQGSTLPRRSGAAGA
MDPRMYSLLQTSTNPRRSGAAGA

SEQ ID NO: 107752 - protein, 23 aa, Artificial Sequence
  Description of Artificial Sequence: Synthetic peptide
  Seed: MDPRMCSLMQGSTLPRRSGAAGA
MDPRMYSLLQTSTSPRRSGAAGA

SEQ ID NO: 107753 - protein, 23 aa, Artificial Sequence
  Description of Artificial Sequence: Synthetic peptide
  Seed: MDPRMCSLMQGSTLPRRSGAAGA
MDPRMYSLLQTSTTPRRSGAAGA

SEQ ID NO: 107754 - protein, 23 aa, Artificial Sequence
  Description of Artificial Sequence: Synthetic peptide
  Seed: MDPRMCSLMQGSTLPRRSGAAGA
MDPRMYSLLQTSTVPRRSGAAGA

SEQ ID NO: 107755 - protein, 23 aa, Artificial Sequence
  Description of Artificial Sequence: Synthetic peptide
  Seed: MDPRMCSLMQGSTLPRRSGAAGA
MDPRMYSLLQVSTAPRRSGAAGA

SEQ ID NO: 107756 - protein, 23 aa, Artificial Sequence
  Description of Artificial Sequence: Synthetic peptide
  Seed: MDPRMCSLMQGSTLPRRSGAAGA
MDPRMYSLLQVSTGPRRSGAAGA

SEQ ID NO: 107757 - protein, 23 aa, Artificial Sequence
  Description of Artificial Sequence: Synthetic peptide
  Seed: MDPRMCSLMQGSTLPRRSGAAGA
MDPRMYSLLQVSTHPRRSGAAGA

SEQ ID NO: 107758 - protein, 23 aa, Artificial Sequence
  Description of Artificial Sequence: Synthetic peptide
  Seed: MDPRMCSLMQGSTLPRRSGAAGA
MDPRMYSLLQVSTIPRRSGAAGA

SEQ ID NO: 107759 - protein, 23 aa, Artificial Sequence
  Description of Artificial Sequence: Synthetic peptide
  Seed: MDPRMCSLMQGSTLPRRSGAAGA
MDPRMYSLLQVSTLPRRSGAAGA

SEQ ID NO: 107760 - protein, 23 aa, Artificial Sequence
  Description of Artificial Sequence: Synthetic peptide
  Seed: MDPRMCSLMQGSTLPRRSGAAGA
MDPRMYSLLQVSTMPRRSGAAGA

SEQ ID NO: 107761 - protein, 23 aa, Artificial Sequence
  Description of Artificial Sequence: Synthetic peptide
  Seed: MDPRMCSLMQGSTLPRRSGAAGA
MDPRMYSLLQVSTNPRRSGAAGA

SEQ ID NO: 107762 - protein, 23 aa, Artificial Sequence
  Description of Artificial Sequence: Synthetic peptide
  Seed: MDPRMCSLMQGSTLPRRSGAAGA
MDPRMYSLLQVSTQPRRSGAAGA

SEQ ID NO: 107763 - protein, 23 aa, Artificial Sequence
  Description of Artificial Sequence: Synthetic peptide
  Seed: MDPRMCSLMQGSTLPRRSGAAGA
MDPRMYSLLQVSTSPRRSGAAGA

SEQ ID NO: 107764 - protein, 23 aa, Artificial Sequence
  Description of Artificial Sequence: Synthetic peptide
  Seed: MDPRMCSLMQGSTLPRRSGAAGA
MDPRMYSLLQVSTTPRRSGAAGA

SEQ ID NO: 107765 - protein, 23 aa, Artificial Sequence
  Description of Artificial Sequence: Synthetic peptide
  Seed: MDPRMCSLMQGSTLPRRSGAAGA
MDPRMYSLLQVSTVPRRSGAAGA

SEQ ID NO: 107766 - protein, 23 aa, Artificial Sequence
  Description of Artificial Sequence: Synthetic peptide
  Seed: MDPRMCSLMQGSTLPRRSGAAGA
MDPRMYSLMQASTAPRRSGAAGA

SEQ ID NO: 107767 - protein, 23 aa, Artificial Sequence
  Description of Artificial Sequence: Synthetic peptide
  Seed: MDPRMCSLMQGSTLPRRSGAAGA
MDPRMYSLMQASTCPRRSGAAGA

SEQ ID NO: 107768 - protein, 23 aa, Artificial Sequence
  Description of Artificial Sequence: Synthetic peptide
  Seed: MDPRMCSLMQGSTLPRRSGAAGA
MDPRMYSLMQASTDPRRSGAAGA

SEQ ID NO: 107769 - protein, 23 aa, Artificial Sequence
  Description of Artificial Sequence: Synthetic peptide
  Seed: MDPRMCSLMQGSTLPRRSGAAGA
MDPRMYSLMQASTEPRRSGAAGA

SEQ ID NO: 107770 - protein, 23 aa, Artificial Sequence
  Description of Artificial Sequence: Synthetic peptide
  Seed: MDPRMCSLMQGSTLPRRSGAAGA
MDPRMYSLMQASTFPRRSGAAGA

SEQ ID NO: 107771 - protein, 23 aa, Artificial Sequence
  Description of Artificial Sequence: Synthetic peptide
  Seed: MDPRMCSLMQGSTLPRRSGAAGA
MDPRMYSLMQASTGPRRSGAAGA

SEQ ID NO: 107772 - protein, 23 aa, Artificial Sequence
  Description of Artificial Sequence: Synthetic peptide
  Seed: MDPRMCSLMQGSTLPRRSGAAGA
MDPRMYSLMQASTHPRRSGAAGA

SEQ ID NO: 107773 - protein, 23 aa, Artificial Sequence
  Description of Artificial Sequence: Synthetic peptide
  Seed: MDPRMCSLMQGSTLPRRSGAAGA
MDPRMYSLMQASTIPRRSGAAGA

SEQ ID NO: 107774 - protein, 23 aa, Artificial Sequence
  Description of Artificial Sequence: Synthetic peptide
  Seed: MDPRMCSLMQGSTLPRRSGAAGA
MDPRMYSLMQASTLPRRSGAAGA

SEQ ID NO: 107775 - protein, 23 aa, Artificial Sequence
  Description of Artificial Sequence: Synthetic peptide
  Seed: MDPRMCSLMQGSTLPRRSGAAGA
MDPRMYSLMQASTMPRRSGAAGA

SEQ ID NO: 107776 - protein, 23 aa, Artificial Sequence
  Description of Artificial Sequence: Synthetic peptide
  Seed: MDPRMCSLMQGSTLPRRSGAAGA
MDPRMYSLMQASTNPRRSGAAGA

SEQ ID NO: 107777 - protein, 23 aa, Artificial Sequence
  Description of Artificial Sequence: Synthetic peptide
  Seed: MDPRMCSLMQGSTLPRRSGAAGA
MDPRMYSLMQASTPPRRSGAAGA

SEQ ID NO: 107778 - protein, 23 aa, Artificial Sequence
  Description of Artificial Sequence: Synthetic peptide
  Seed: MDPRMCSLMQGSTLPRRSGAAGA
MDPRMYSLMQASTQPRRSGAAGA

SEQ ID NO: 107779 - protein, 23 aa, Artificial Sequence
  Description of Artificial Sequence: Synthetic peptide
  Seed: MDPRMCSLMQGSTLPRRSGAAGA
MDPRMYSLMQASTSPRRSGAAGA

SEQ ID NO: 107780 - protein, 23 aa, Artificial Sequence
  Description of Artificial Sequence: Synthetic peptide
  Seed: MDPRMCSLMQGSTLPRRSGAAGA
MDPRMYSLMQASTTPRRSGAAGA

SEQ ID NO: 107781 - protein, 23 aa, Artificial Sequence
  Description of Artificial Sequence: Synthetic peptide
  Seed: MDPRMCSLMQGSTLPRRSGAAGA
MDPRMYSLMQASTVPRRSGAAGA

SEQ ID NO: 107782 - protein, 23 aa, Artificial Sequence
  Description of Artificial Sequence: Synthetic peptide
  Seed: MDPRMCSLMQGSTLPRRSGAAGA
MDPRMYSLMQGSTAPRRSGAAGA

SEQ ID NO: 107783 - protein, 23 aa, Artificial Sequence
  Description of Artificial Sequence: Synthetic peptide
  Seed: MDPRMCSLMQGSTLPRRSGAAGA
MDPRMYSLMQGSTCPRRSGAAGA

SEQ ID NO: 107784 - protein, 23 aa, Artificial Sequence
  Description of Artificial Sequence: Synthetic peptide
  Seed: MDPRMCSLMQGSTLPRRSGAAGA
MDPRMYSLMQGSTFPRRSGAAGA

SEQ ID NO: 107785 - protein, 23 aa, Artificial Sequence
  Description of Artificial Sequence: Synthetic peptide
  Seed: MDPRMCSLMQGSTLPRRSGAAGA
MDPRMYSLMQGSTGPRRSGAAGA

SEQ ID NO: 107786 - protein, 23 aa, Artificial Sequence
  Description of Artificial Sequence: Synthetic peptide
  Seed: MDPRMCSLMQGSTLPRRSGAAGA
MDPRMYSLMQGSTIPRRSGAAGA

SEQ ID NO: 107787 - protein, 23 aa, Artificial Sequence
  Description of Artificial Sequence: Synthetic peptide
  Seed: MDPRMCSLMQGSTLPRRSGAAGA
MDPRMYSLMQGSTLPRRSGAAGA

SEQ ID NO: 107788 - protein, 23 aa, Artificial Sequence
  Description of Artificial Sequence: Synthetic peptide
  Seed: MDPRMCSLMQGSTLPRRSGAAGA
MDPRMYSLMQGSTMPRRSGAAGA

SEQ ID NO: 107789 - protein, 23 aa, Artificial Sequence
  Description of Artificial Sequence: Synthetic peptide
  Seed: MDPRMCSLMQGSTLPRRSGAAGA
MDPRMYSLMQGSTNPRRSGAAGA

SEQ ID NO: 107790 - protein, 23 aa, Artificial Sequence
  Description of Artificial Sequence: Synthetic peptide
  Seed: MDPRMCSLMQGSTLPRRSGAAGA
MDPRMYSLMQGSTSPRRSGAAGA

SEQ ID NO: 107791 - protein, 23 aa, Artificial Sequence
  Description of Artificial Sequence: Synthetic peptide
  Seed: MDPRMCSLMQGSTLPRRSGAAGA
MDPRMYSLMQGSTTPRRSGAAGA

SEQ ID NO: 107792 - protein, 23 aa, Artificial Sequence
  Description of Artificial Sequence: Synthetic peptide
  Seed: MDPRMCSLMQGSTLPRRSGAAGA
MDPRMYSLMQGSTVPRRSGAAGA

SEQ ID NO: 107793 - protein, 23 aa, Artificial Sequence
  Description of Artificial Sequence: Synthetic peptide
  Seed: MDPRMCSLMQGSTLPRRSGAAGA
MDPRMYSLMQISTAPRRSGAAGA

SEQ ID NO: 107794 - protein, 23 aa, Artificial Sequence
  Description of Artificial Sequence: Synthetic peptide
  Seed: MDPRMCSLMQGSTLPRRSGAAGA
MDPRMYSLMQISTGPRRSGAAGA

SEQ ID NO: 107795 - protein, 23 aa, Artificial Sequence
  Description of Artificial Sequence: Synthetic peptide
  Seed: MDPRMCSLMQGSTLPRRSGAAGA
MDPRMYSLMQISTHPRRSGAAGA

SEQ ID NO: 107796 - protein, 23 aa, Artificial Sequence
  Description of Artificial Sequence: Synthetic peptide
  Seed: MDPRMCSLMQGSTLPRRSGAAGA
MDPRMYSLMQISTIPRRSGAAGA

SEQ ID NO: 107797 - protein, 23 aa, Artificial Sequence
  Description of Artificial Sequence: Synthetic peptide
  Seed: MDPRMCSLMQGSTLPRRSGAAGA
MDPRMYSLMQISTLPRRSGAAGA

SEQ ID NO: 107798 - protein, 23 aa, Artificial Sequence
  Description of Artificial Sequence: Synthetic peptide
  Seed: MDPRMCSLMQGSTLPRRSGAAGA
MDPRMYSLMQISTMPRRSGAAGA

SEQ ID NO: 107799 - protein, 23 aa, Artificial Sequence
  Description of Artificial Sequence: Synthetic peptide
  Seed: MDPRMCSLMQGSTLPRRSGAAGA
MDPRMYSLMQISTNPRRSGAAGA

SEQ ID NO: 107800 - protein, 23 aa, Artificial Sequence
  Description of Artificial Sequence: Synthetic peptide
  Seed: MDPRMCSLMQGSTLPRRSGAAGA
MDPRMYSLMQISTQPRRSGAAGA

SEQ ID NO: 107801 - protein, 23 aa, Artificial Sequence
  Description of Artificial Sequence: Synthetic peptide
  Seed: MDPRMCSLMQGSTLPRRSGAAGA
MDPRMYSLMQISTSPRRSGAAGA

SEQ ID NO: 107802 - protein, 23 aa, Artificial Sequence
  Description of Artificial Sequence: Synthetic peptide
  Seed: MDPRMCSLMQGSTLPRRSGAAGA
MDPRMYSLMQISTTPRRSGAAGA

SEQ ID NO: 107803 - protein, 23 aa, Artificial Sequence
  Description of Artificial Sequence: Synthetic peptide
  Seed: MDPRMCSLMQGSTLPRRSGAAGA
MDPRMYSLMQISTVPRRSGAAGA

SEQ ID NO: 107804 - protein, 23 aa, Artificial Sequence
  Description of Artificial Sequence: Synthetic peptide
  Seed: MDPRMCSLMQGSTLPRRSGAAGA
MDPRMYSLMQLSTAPRRSGAAGA

SEQ ID NO: 107805 - protein, 23 aa, Artificial Sequence
  Description of Artificial Sequence: Synthetic peptide
  Seed: MDPRMCSLMQGSTLPRRSGAAGA
MDPRMYSLMQLSTNPRRSGAAGA

SEQ ID NO: 107806 - protein, 23 aa, Artificial Sequence
  Description of Artificial Sequence: Synthetic peptide
  Seed: MDPRMCSLMQGSTLPRRSGAAGA
MDPRMYSLMQLSTSPRRSGAAGA

SEQ ID NO: 107807 - protein, 23 aa, Artificial Sequence
  Description of Artificial Sequence: Synthetic peptide
  Seed: MDPRMCSLMQGSTLPRRSGAAGA
MDPRMYSLMQLSTTPRRSGAAGA

SEQ ID NO: 107808 - protein, 23 aa, Artificial Sequence
  Description of Artificial Sequence: Synthetic peptide
  Seed: MDPRMCSLMQGSTLPRRSGAAGA
MDPRMYSLMQLSTVPRRSGAAGA

SEQ ID NO: 107809 - protein, 23 aa, Artificial Sequence
  Description of Artificial Sequence: Synthetic peptide
  Seed: MDPRMCSLMQGSTLPRRSGAAGA
MDPRMYSLMQMSTAPRRSGAAGA

SEQ ID NO: 107810 - protein, 23 aa, Artificial Sequence
  Description of Artificial Sequence: Synthetic peptide
  Seed: MDPRMCSLMQGSTLPRRSGAAGA
MDPRMYSLMQMSTNPRRSGAAGA

SEQ ID NO: 107811 - protein, 23 aa, Artificial Sequence
  Description of Artificial Sequence: Synthetic peptide
  Seed: MDPRMCSLMQGSTLPRRSGAAGA
MDPRMYSLMQMSTSPRRSGAAGA

SEQ ID NO: 107812 - protein, 23 aa, Artificial Sequence
  Description of Artificial Sequence: Synthetic peptide
  Seed: MDPRMCSLMQGSTLPRRSGAAGA
MDPRMYSLMQNSTAPRRSGAAGA

SEQ ID NO: 107813 - protein, 23 aa, Artificial Sequence
  Description of Artificial Sequence: Synthetic peptide
  Seed: MDPRMCSLMQGSTLPRRSGAAGA
MDPRMYSLMQNSTIPRRSGAAGA

SEQ ID NO: 107814 - protein, 23 aa, Artificial Sequence
  Description of Artificial Sequence: Synthetic peptide
  Seed: MDPRMCSLMQGSTLPRRSGAAGA
MDPRMYSLMQNSTLPRRSGAAGA

SEQ ID NO: 107815 - protein, 23 aa, Artificial Sequence
  Description of Artificial Sequence: Synthetic peptide
  Seed: MDPRMCSLMQGSTLPRRSGAAGA
MDPRMYSLMQNSTMPRRSGAAGA

SEQ ID NO: 107816 - protein, 23 aa, Artificial Sequence
  Description of Artificial Sequence: Synthetic peptide
  Seed: MDPRMCSLMQGSTLPRRSGAAGA
MDPRMYSLMQNSTNPRRSGAAGA

SEQ ID NO: 107817 - protein, 23 aa, Artificial Sequence
  Description of Artificial Sequence: Synthetic peptide
  Seed: MDPRMCSLMQGSTLPRRSGAAGA
MDPRMYSLMQNSTSPRRSGAAGA

SEQ ID NO: 107818 - protein, 23 aa, Artificial Sequence
  Description of Artificial Sequence: Synthetic peptide
  Seed: MDPRMCSLMQGSTLPRRSGAAGA
MDPRMYSLMQNSTTPRRSGAAGA

SEQ ID NO: 107819 - protein, 23 aa, Artificial Sequence
  Description of Artificial Sequence: Synthetic peptide
  Seed: MDPRMCSLMQGSTLPRRSGAAGA
MDPRMYSLMQNSTVPRRSGAAGA

SEQ ID NO: 107820 - protein, 23 aa, Artificial Sequence
  Description of Artificial Sequence: Synthetic peptide
  Seed: MDPRMCSLMQGSTLPRRSGAAGA
MDPRMYSLMQPSTAPRRSGAAGA

SEQ ID NO: 107821 - protein, 23 aa, Artificial Sequence
  Description of Artificial Sequence: Synthetic peptide
  Seed: MDPRMCSLMQGSTLPRRSGAAGA
MDPRMYSLMQPSTGPRRSGAAGA

SEQ ID NO: 107822 - protein, 23 aa, Artificial Sequence
  Description of Artificial Sequence: Synthetic peptide
  Seed: MDPRMCSLMQGSTLPRRSGAAGA
MDPRMYSLMQPSTHPRRSGAAGA

SEQ ID NO: 107823 - protein, 23 aa, Artificial Sequence
  Description of Artificial Sequence: Synthetic peptide
  Seed: MDPRMCSLMQGSTLPRRSGAAGA
MDPRMYSLMQPSTIPRRSGAAGA

SEQ ID NO: 107824 - protein, 23 aa, Artificial Sequence
  Description of Artificial Sequence: Synthetic peptide
  Seed: MDPRMCSLMQGSTLPRRSGAAGA
MDPRMYSLMQPSTLPRRSGAAGA

SEQ ID NO: 107825 - protein, 23 aa, Artificial Sequence
  Description of Artificial Sequence: Synthetic peptide
  Seed: MDPRMCSLMQGSTLPRRSGAAGA
MDPRMYSLMQPSTMPRRSGAAGA

SEQ ID NO: 107826 - protein, 23 aa, Artificial Sequence
  Description of Artificial Sequence: Synthetic peptide
  Seed: MDPRMCSLMQGSTLPRRSGAAGA
MDPRMYSLMQPSTNPRRSGAAGA

SEQ ID NO: 107827 - protein, 23 aa, Artificial Sequence
  Description of Artificial Sequence: Synthetic peptide
  Seed: MDPRMCSLMQGSTLPRRSGAAGA
MDPRMYSLMQPSTPPRRSGAAGA

SEQ ID NO: 107828 - protein, 23 aa, Artificial Sequence
  Description of Artificial Sequence: Synthetic peptide
  Seed: MDPRMCSLMQGSTLPRRSGAAGA
MDPRMYSLMQPSTQPRRSGAAGA

SEQ ID NO: 107829 - protein, 23 aa, Artificial Sequence
  Description of Artificial Sequence: Synthetic peptide
  Seed: MDPRMCSLMQGSTLPRRSGAAGA
MDPRMYSLMQPSTSPRRSGAAGA

SEQ ID NO: 107830 - protein, 23 aa, Artificial Sequence
  Description of Artificial Sequence: Synthetic peptide
  Seed: MDPRMCSLMQGSTLPRRSGAAGA
MDPRMYSLMQPSTTPRRSGAAGA

SEQ ID NO: 107831 - protein, 23 aa, Artificial Sequence
  Description of Artificial Sequence: Synthetic peptide
  Seed: MDPRMCSLMQGSTLPRRSGAAGA
MDPRMYSLMQPSTVPRRSGAAGA

SEQ ID NO: 107832 - protein, 23 aa, Artificial Sequence
  Description of Artificial Sequence: Synthetic peptide
  Seed: MDPRMCSLMQGSTLPRRSGAAGA
MDPRMYSLMQSSTAPRRSGAAGA

SEQ ID NO: 107833 - protein, 23 aa, Artificial Sequence
  Description of Artificial Sequence: Synthetic peptide
  Seed: MDPRMCSLMQGSTLPRRSGAAGA
MDPRMYSLMQSSTCPRRSGAAGA

SEQ ID NO: 107834 - protein, 23 aa, Artificial Sequence
  Description of Artificial Sequence: Synthetic peptide
  Seed: MDPRMCSLMQGSTLPRRSGAAGA
MDPRMYSLMQSSTGPRRSGAAGA

SEQ ID NO: 107835 - protein, 23 aa, Artificial Sequence
  Description of Artificial Sequence: Synthetic peptide
  Seed: MDPRMCSLMQGSTLPRRSGAAGA
MDPRMYSLMQSSTIPRRSGAAGA

SEQ ID NO: 107836 - protein, 23 aa, Artificial Sequence
  Description of Artificial Sequence: Synthetic peptide
  Seed: MDPRMCSLMQGSTLPRRSGAAGA
MDPRMYSLMQSSTLPRRSGAAGA

SEQ ID NO: 107837 - protein, 23 aa, Artificial Sequence
  Description of Artificial Sequence: Synthetic peptide
  Seed: MDPRMCSLMQGSTLPRRSGAAGA
MDPRMYSLMQSSTMPRRSGAAGA

SEQ ID NO: 107838 - protein, 23 aa, Artificial Sequence
  Description of Artificial Sequence: Synthetic peptide
  Seed: MDPRMCSLMQGSTLPRRSGAAGA
MDPRMYSLMQSSTNPRRSGAAGA

SEQ ID NO: 107839 - protein, 23 aa, Artificial Sequence
  Description of Artificial Sequence: Synthetic peptide
  Seed: MDPRMCSLMQGSTLPRRSGAAGA
MDPRMYSLMQSSTQPRRSGAAGA

SEQ ID NO: 107840 - protein, 23 aa, Artificial Sequence
  Description of Artificial Sequence: Synthetic peptide
  Seed: MDPRMCSLMQGSTLPRRSGAAGA
MDPRMYSLMQSSTSPRRSGAAGA

SEQ ID NO: 107841 - protein, 23 aa, Artificial Sequence
  Description of Artificial Sequence: Synthetic peptide
  Seed: MDPRMCSLMQGSTLPRRSGAAGA
MDPRMYSLMQSSTTPRRSGAAGA

SEQ ID NO: 107842 - protein, 23 aa, Artificial Sequence
  Description of Artificial Sequence: Synthetic peptide
  Seed: MDPRMCSLMQGSTLPRRSGAAGA
MDPRMYSLMQSSTVPRRSGAAGA

SEQ ID NO: 107843 - protein, 23 aa, Artificial Sequence
  Description of Artificial Sequence: Synthetic peptide
  Seed: MDPRMCSLMQGSTLPRRSGAAGA
MDPRMYSLMQTSTAPRRSGAAGA

SEQ ID NO: 107844 - protein, 23 aa, Artificial Sequence
  Description of Artificial Sequence: Synthetic peptide
  Seed: MDPRMCSLMQGSTLPRRSGAAGA
MDPRMYSLMQTSTGPRRSGAAGA

SEQ ID NO: 107845 - protein, 23 aa, Artificial Sequence
  Description of Artificial Sequence: Synthetic peptide
  Seed: MDPRMCSLMQGSTLPRRSGAAGA
MDPRMYSLMQTSTIPRRSGAAGA

SEQ ID NO: 107846 - protein, 23 aa, Artificial Sequence
  Description of Artificial Sequence: Synthetic peptide
  Seed: MDPRMCSLMQGSTLPRRSGAAGA
MDPRMYSLMQTSTLPRRSGAAGA

SEQ ID NO: 107847 - protein, 23 aa, Artificial Sequence
  Description of Artificial Sequence: Synthetic peptide
  Seed: MDPRMCSLMQGSTLPRRSGAAGA
MDPRMYSLMQTSTMPRRSGAAGA

SEQ ID NO: 107848 - protein, 23 aa, Artificial Sequence
  Description of Artificial Sequence: Synthetic peptide
  Seed: MDPRMCSLMQGSTLPRRSGAAGA
MDPRMYSLMQTSTNPRRSGAAGA

SEQ ID NO: 107849 - protein, 23 aa, Artificial Sequence
  Description of Artificial Sequence: Synthetic peptide
  Seed: MDPRMCSLMQGSTLPRRSGAAGA
MDPRMYSLMQTSTQPRRSGAAGA

SEQ ID NO: 107850 - protein, 23 aa, Artificial Sequence
  Description of Artificial Sequence: Synthetic peptide
  Seed: MDPRMCSLMQGSTLPRRSGAAGA
MDPRMYSLMQTSTSPRRSGAAGA

SEQ ID NO: 107851 - protein, 23 aa, Artificial Sequence
  Description of Artificial Sequence: Synthetic peptide
  Seed: MDPRMCSLMQGSTLPRRSGAAGA
MDPRMYSLMQTSTTPRRSGAAGA

SEQ ID NO: 107852 - protein, 23 aa, Artificial Sequence
  Description of Artificial Sequence: Synthetic peptide
  Seed: MDPRMCSLMQGSTLPRRSGAAGA
MDPRMYSLMQTSTVPRRSGAAGA

SEQ ID NO: 107853 - protein, 23 aa, Artificial Sequence
  Description of Artificial Sequence: Synthetic peptide
  Seed: MDPRMCSLMQGSTLPRRSGAAGA
MDPRMYSLMQVSTAPRRSGAAGA

SEQ ID NO: 107854 - protein, 23 aa, Artificial Sequence
  Description of Artificial Sequence: Synthetic peptide
  Seed: MDPRMCSLMQGSTLPRRSGAAGA
MDPRMYSLMQVSTGPRRSGAAGA

SEQ ID NO: 107855 - protein, 23 aa, Artificial Sequence
  Description of Artificial Sequence: Synthetic peptide
  Seed: MDPRMCSLMQGSTLPRRSGAAGA
MDPRMYSLMQVSTHPRRSGAAGA

SEQ ID NO: 107856 - protein, 23 aa, Artificial Sequence
  Description of Artificial Sequence: Synthetic peptide
  Seed: MDPRMCSLMQGSTLPRRSGAAGA
MDPRMYSLMQVSTIPRRSGAAGA

SEQ ID NO: 107857 - protein, 23 aa, Artificial Sequence
  Description of Artificial Sequence: Synthetic peptide
  Seed: MDPRMCSLMQGSTLPRRSGAAGA
MDPRMYSLMQVSTLPRRSGAAGA

SEQ ID NO: 107858 - protein, 23 aa, Artificial Sequence
  Description of Artificial Sequence: Synthetic peptide
  Seed: MDPRMCSLMQGSTLPRRSGAAGA
MDPRMYSLMQVSTMPRRSGAAGA

SEQ ID NO: 107859 - protein, 23 aa, Artificial Sequence
  Description of Artificial Sequence: Synthetic peptide
  Seed: MDPRMCSLMQGSTLPRRSGAAGA
MDPRMYSLMQVSTNPRRSGAAGA

SEQ ID NO: 107860 - protein, 23 aa, Artificial Sequence
  Description of Artificial Sequence: Synthetic peptide
  Seed: MDPRMCSLMQGSTLPRRSGAAGA
MDPRMYSLMQVSTQPRRSGAAGA

SEQ ID NO: 107861 - protein, 23 aa, Artificial Sequence
  Description of Artificial Sequence: Synthetic peptide
  Seed: MDPRMCSLMQGSTLPRRSGAAGA
MDPRMYSLMQVSTSPRRSGAAGA

SEQ ID NO: 107862 - protein, 23 aa, Artificial Sequence
  Description of Artificial Sequence: Synthetic peptide
  Seed: MDPRMCSLMQGSTLPRRSGAAGA
MDPRMYSLMQVSTTPRRSGAAGA

SEQ ID NO: 107863 - protein, 23 aa, Artificial Sequence
  Description of Artificial Sequence: Synthetic peptide
  Seed: MDPRMCSLMQGSTLPRRSGAAGA
MDPRMYSLMQVSTVPRRSGAAGA

SEQ ID NO: 107864 - protein, 23 aa, Artificial Sequence
  Description of Artificial Sequence: Synthetic peptide
  Seed: MDPRMCSLMQGSTLPRRSGAAGA
MDPRMYSLNQASTIPRRSGAAGA

SEQ ID NO: 107865 - protein, 23 aa, Artificial Sequence
  Description of Artificial Sequence: Synthetic peptide
  Seed: MDPRMCSLMQGSTLPRRSGAAGA
MDPRMYSLNQASTLPRRSGAAGA

SEQ ID NO: 107866 - protein, 23 aa, Artificial Sequence
  Description of Artificial Sequence: Synthetic peptide
  Seed: MDPRMCSLMQGSTLPRRSGAAGA
MDPRMYSLNQASTVPRRSGAAGA

SEQ ID NO: 107867 - protein, 23 aa, Artificial Sequence
  Description of Artificial Sequence: Synthetic peptide
  Seed: MDPRMCSLMQGSTLPRRSGAAGA
MDPRMYSLQQASTAPRRSGAAGA

SEQ ID NO: 107868 - protein, 23 aa, Artificial Sequence
  Description of Artificial Sequence: Synthetic peptide
  Seed: MDPRMCSLMQGSTLPRRSGAAGA
MDPRMYSLQQASTIPRRSGAAGA

SEQ ID NO: 107869 - protein, 23 aa, Artificial Sequence
  Description of Artificial Sequence: Synthetic peptide
  Seed: MDPRMCSLMQGSTLPRRSGAAGA
MDPRMYSLQQASTLPRRSGAAGA

SEQ ID NO: 107870 - protein, 23 aa, Artificial Sequence
  Description of Artificial Sequence: Synthetic peptide
  Seed: MDPRMCSLMQGSTLPRRSGAAGA
MDPRMYSLQQASTMPRRSGAAGA

SEQ ID NO: 107871 - protein, 23 aa, Artificial Sequence
  Description of Artificial Sequence: Synthetic peptide
  Seed: MDPRMCSLMQGSTLPRRSGAAGA
MDPRMYSLQQASTNPRRSGAAGA

SEQ ID NO: 107872 - protein, 23 aa, Artificial Sequence
  Description of Artificial Sequence: Synthetic peptide
  Seed: MDPRMCSLMQGSTLPRRSGAAGA
MDPRMYSLQQASTSPRRSGAAGA

SEQ ID NO: 107873 - protein, 23 aa, Artificial Sequence
  Description of Artificial Sequence: Synthetic peptide
  Seed: MDPRMCSLMQGSTLPRRSGAAGA
MDPRMYSLQQASTTPRRSGAAGA

SEQ ID NO: 107874 - protein, 23 aa, Artificial Sequence
  Description of Artificial Sequence: Synthetic peptide
  Seed: MDPRMCSLMQGSTLPRRSGAAGA
MDPRMYSLQQASTVPRRSGAAGA

SEQ ID NO: 107875 - protein, 23 aa, Artificial Sequence
  Description of Artificial Sequence: Synthetic peptide
  Seed: MDPRMCSLMQGSTLPRRSGAAGA
MDPRMYSLQQGSTAPRRSGAAGA

SEQ ID NO: 107876 - protein, 23 aa, Artificial Sequence
  Description of Artificial Sequence: Synthetic peptide
  Seed: MDPRMCSLMQGSTLPRRSGAAGA
MDPRMYSLQQGSTIPRRSGAAGA

SEQ ID NO: 107877 - protein, 23 aa, Artificial Sequence
  Description of Artificial Sequence: Synthetic peptide
  Seed: MDPRMCSLMQGSTLPRRSGAAGA
MDPRMYSLQQGSTLPRRSGAAGA

SEQ ID NO: 107878 - protein, 23 aa, Artificial Sequence
  Description of Artificial Sequence: Synthetic peptide
  Seed: MDPRMCSLMQGSTLPRRSGAAGA
MDPRMYSLQQGSTVPRRSGAAGA

SEQ ID NO: 107879 - protein, 23 aa, Artificial Sequence
  Description of Artificial Sequence: Synthetic peptide
  Seed: MDPRMCSLMQGSTLPRRSGAAGA
MDPRMYSLQQPSTIPRRSGAAGA

SEQ ID NO: 107880 - protein, 23 aa, Artificial Sequence
  Description of Artificial Sequence: Synthetic peptide
  Seed: MDPRMCSLMQGSTLPRRSGAAGA
MDPRMYSLQQPSTLPRRSGAAGA

SEQ ID NO: 107881 - protein, 23 aa, Artificial Sequence
  Description of Artificial Sequence: Synthetic peptide
  Seed: MDPRMCSLMQGSTLPRRSGAAGA
MDPRMYSLQQPSTVPRRSGAAGA

SEQ ID NO: 107882 - protein, 23 aa, Artificial Sequence
  Description of Artificial Sequence: Synthetic peptide
  Seed: MDPRMCSLMQGSTLPRRSGAAGA
MDPRMYSLQQSSTAPRRSGAAGA

SEQ ID NO: 107883 - protein, 23 aa, Artificial Sequence
  Description of Artificial Sequence: Synthetic peptide
  Seed: MDPRMCSLMQGSTLPRRSGAAGA
MDPRMYSLQQSSTIPRRSGAAGA

SEQ ID NO: 107884 - protein, 23 aa, Artificial Sequence
  Description of Artificial Sequence: Synthetic peptide
  Seed: MDPRMCSLMQGSTLPRRSGAAGA
MDPRMYSLQQSSTLPRRSGAAGA

SEQ ID NO: 107885 - protein, 23 aa, Artificial Sequence
  Description of Artificial Sequence: Synthetic peptide
  Seed: MDPRMCSLMQGSTLPRRSGAAGA
MDPRMYSLQQSSTVPRRSGAAGA

SEQ ID NO: 107886 - protein, 23 aa, Artificial Sequence
  Description of Artificial Sequence: Synthetic peptide
  Seed: MDPRMCSLMQGSTLPRRSGAAGA
MDPRMYSLQQVSTAPRRSGAAGA

SEQ ID NO: 107887 - protein, 23 aa, Artificial Sequence
  Description of Artificial Sequence: Synthetic peptide
  Seed: MDPRMCSLMQGSTLPRRSGAAGA
MDPRMYSLSQASTAPRRSGAAGA

SEQ ID NO: 107888 - protein, 23 aa, Artificial Sequence
  Description of Artificial Sequence: Synthetic peptide
  Seed: MDPRMCSLMQGSTLPRRSGAAGA
MDPRMYSLSQASTIPRRSGAAGA

SEQ ID NO: 107889 - protein, 23 aa, Artificial Sequence
  Description of Artificial Sequence: Synthetic peptide
  Seed: MDPRMCSLMQGSTLPRRSGAAGA
MDPRMYSLSQASTLPRRSGAAGA

SEQ ID NO: 107890 - protein, 23 aa, Artificial Sequence
  Description of Artificial Sequence: Synthetic peptide
  Seed: MDPRMCSLMQGSTLPRRSGAAGA
MDPRMYSLSQASTMPRRSGAAGA

SEQ ID NO: 107891 - protein, 23 aa, Artificial Sequence
  Description of Artificial Sequence: Synthetic peptide
  Seed: MDPRMCSLMQGSTLPRRSGAAGA
MDPRMYSLSQASTVPRRSGAAGA

SEQ ID NO: 107892 - protein, 23 aa, Artificial Sequence
  Description of Artificial Sequence: Synthetic peptide
  Seed: MDPRMCSLMQGSTLPRRSGAAGA
MDPRMYSLSQGSTIPRRSGAAGA

SEQ ID NO: 107893 - protein, 23 aa, Artificial Sequence
  Description of Artificial Sequence: Synthetic peptide
  Seed: MDPRMCSLMQGSTLPRRSGAAGA
MDPRMYSLSQGSTLPRRSGAAGA

SEQ ID NO: 107894 - protein, 23 aa, Artificial Sequence
  Description of Artificial Sequence: Synthetic peptide
  Seed: MDPRMCSLMQGSTLPRRSGAAGA
MDPRMYSLSQGSTVPRRSGAAGA

SEQ ID NO: 107895 - protein, 23 aa, Artificial Sequence
  Description of Artificial Sequence: Synthetic peptide
  Seed: MDPRMCSLMQGSTLPRRSGAAGA
MDPRMYSLSQSSTVPRRSGAAGA

SEQ ID NO: 107896 - protein, 23 aa, Artificial Sequence
  Description of Artificial Sequence: Synthetic peptide
  Seed: MDPRMCSLMQGSTLPRRSGAAGA
MDPRMYSLTQASTIPRRSGAAGA

SEQ ID NO: 107897 - protein, 23 aa, Artificial Sequence
  Description of Artificial Sequence: Synthetic peptide
  Seed: MDPRMCSLMQGSTLPRRSGAAGA
MDPRMYSLTQASTLPRRSGAAGA

SEQ ID NO: 107898 - protein, 23 aa, Artificial Sequence
  Description of Artificial Sequence: Synthetic peptide
  Seed: MDPRMCSLMQGSTLPRRSGAAGA
MDPRMYSLTQASTVPRRSGAAGA

SEQ ID NO: 107899 - protein, 23 aa, Artificial Sequence
  Description of Artificial Sequence: Synthetic peptide
  Seed: MDPRMCSLMQGSTLPRRSGAAGA
MDPRMYSLVQASTAPRRSGAAGA

SEQ ID NO: 107900 - protein, 23 aa, Artificial Sequence
  Description of Artificial Sequence: Synthetic peptide
  Seed: MDPRMCSLMQGSTLPRRSGAAGA
MDPRMYSLVQASTGPRRSGAAGA

SEQ ID NO: 107901 - protein, 23 aa, Artificial Sequence
  Description of Artificial Sequence: Synthetic peptide
  Seed: MDPRMCSLMQGSTLPRRSGAAGA
MDPRMYSLVQASTIPRRSGAAGA

SEQ ID NO: 107902 - protein, 23 aa, Artificial Sequence
  Description of Artificial Sequence: Synthetic peptide
  Seed: MDPRMCSLMQGSTLPRRSGAAGA
MDPRMYSLVQASTLPRRSGAAGA

SEQ ID NO: 107903 - protein, 23 aa, Artificial Sequence
  Description of Artificial Sequence: Synthetic peptide
  Seed: MDPRMCSLMQGSTLPRRSGAAGA
MDPRMYSLVQASTMPRRSGAAGA

SEQ ID NO: 107904 - protein, 23 aa, Artificial Sequence
  Description of Artificial Sequence: Synthetic peptide
  Seed: MDPRMCSLMQGSTLPRRSGAAGA
MDPRMYSLVQASTNPRRSGAAGA

SEQ ID NO: 107905 - protein, 23 aa, Artificial Sequence
  Description of Artificial Sequence: Synthetic peptide
  Seed: MDPRMCSLMQGSTLPRRSGAAGA
MDPRMYSLVQASTSPRRSGAAGA

SEQ ID NO: 107906 - protein, 23 aa, Artificial Sequence
  Description of Artificial Sequence: Synthetic peptide
  Seed: MDPRMCSLMQGSTLPRRSGAAGA
MDPRMYSLVQASTTPRRSGAAGA

SEQ ID NO: 107907 - protein, 23 aa, Artificial Sequence
  Description of Artificial Sequence: Synthetic peptide
  Seed: MDPRMCSLMQGSTLPRRSGAAGA
MDPRMYSLVQASTVPRRSGAAGA

SEQ ID NO: 107908 - protein, 23 aa, Artificial Sequence
  Description of Artificial Sequence: Synthetic peptide
  Seed: MDPRMCSLMQGSTLPRRSGAAGA
MDPRMYSLVQGSTAPRRSGAAGA

SEQ ID NO: 107909 - protein, 23 aa, Artificial Sequence
  Description of Artificial Sequence: Synthetic peptide
  Seed: MDPRMCSLMQGSTLPRRSGAAGA
MDPRMYSLVQGSTIPRRSGAAGA

SEQ ID NO: 107910 - protein, 23 aa, Artificial Sequence
  Description of Artificial Sequence: Synthetic peptide
  Seed: MDPRMCSLMQGSTLPRRSGAAGA
MDPRMYSLVQGSTLPRRSGAAGA

SEQ ID NO: 107911 - protein, 23 aa, Artificial Sequence
  Description of Artificial Sequence: Synthetic peptide
  Seed: MDPRMCSLMQGSTLPRRSGAAGA
MDPRMYSLVQGSTMPRRSGAAGA

SEQ ID NO: 107912 - protein, 23 aa, Artificial Sequence
  Description of Artificial Sequence: Synthetic peptide
  Seed: MDPRMCSLMQGSTLPRRSGAAGA
MDPRMYSLVQGSTVPRRSGAAGA

SEQ ID NO: 107913 - protein, 23 aa, Artificial Sequence
  Description of Artificial Sequence: Synthetic peptide
  Seed: MDPRMCSLMQGSTLPRRSGAAGA
MDPRMYSLVQISTAPRRSGAAGA

SEQ ID NO: 107914 - protein, 23 aa, Artificial Sequence
  Description of Artificial Sequence: Synthetic peptide
  Seed: MDPRMCSLMQGSTLPRRSGAAGA
MDPRMYSLVQISTNPRRSGAAGA

SEQ ID NO: 107915 - protein, 23 aa, Artificial Sequence
  Description of Artificial Sequence: Synthetic peptide
  Seed: MDPRMCSLMQGSTLPRRSGAAGA
MDPRMYSLVQISTSPRRSGAAGA

SEQ ID NO: 107916 - protein, 23 aa, Artificial Sequence
  Description of Artificial Sequence: Synthetic peptide
  Seed: MDPRMCSLMQGSTLPRRSGAAGA
MDPRMYSLVQPSTAPRRSGAAGA

SEQ ID NO: 107917 - protein, 23 aa, Artificial Sequence
  Description of Artificial Sequence: Synthetic peptide
  Seed: MDPRMCSLMQGSTLPRRSGAAGA
MDPRMYSLVQPSTIPRRSGAAGA

SEQ ID NO: 107918 - protein, 23 aa, Artificial Sequence
  Description of Artificial Sequence: Synthetic peptide
  Seed: MDPRMCSLMQGSTLPRRSGAAGA
MDPRMYSLVQPSTLPRRSGAAGA

SEQ ID NO: 107919 - protein, 23 aa, Artificial Sequence
  Description of Artificial Sequence: Synthetic peptide
  Seed: MDPRMCSLMQGSTLPRRSGAAGA
MDPRMYSLVQPSTNPRRSGAAGA

SEQ ID NO: 107920 - protein, 23 aa, Artificial Sequence
  Description of Artificial Sequence: Synthetic peptide
  Seed: MDPRMCSLMQGSTLPRRSGAAGA
MDPRMYSLVQPSTSPRRSGAAGA

SEQ ID NO: 107921 - protein, 23 aa, Artificial Sequence
  Description of Artificial Sequence: Synthetic peptide
  Seed: MDPRMCSLMQGSTLPRRSGAAGA
MDPRMYSLVQPSTTPRRSGAAGA

SEQ ID NO: 107922 - protein, 23 aa, Artificial Sequence
  Description of Artificial Sequence: Synthetic peptide
  Seed: MDPRMCSLMQGSTLPRRSGAAGA
MDPRMYSLVQPSTVPRRSGAAGA

SEQ ID NO: 107923 - protein, 23 aa, Artificial Sequence
  Description of Artificial Sequence: Synthetic peptide
  Seed: MDPRMCSLMQGSTLPRRSGAAGA
MDPRMYSLVQSSTAPRRSGAAGA

SEQ ID NO: 107924 - protein, 23 aa, Artificial Sequence
  Description of Artificial Sequence: Synthetic peptide
  Seed: MDPRMCSLMQGSTLPRRSGAAGA
MDPRMYSLVQSSTIPRRSGAAGA

SEQ ID NO: 107925 - protein, 23 aa, Artificial Sequence
  Description of Artificial Sequence: Synthetic peptide
  Seed: MDPRMCSLMQGSTLPRRSGAAGA
MDPRMYSLVQSSTLPRRSGAAGA

SEQ ID NO: 107926 - protein, 23 aa, Artificial Sequence
  Description of Artificial Sequence: Synthetic peptide
  Seed: MDPRMCSLMQGSTLPRRSGAAGA
MDPRMYSLVQSSTNPRRSGAAGA

SEQ ID NO: 107927 - protein, 23 aa, Artificial Sequence
  Description of Artificial Sequence: Synthetic peptide
  Seed: MDPRMCSLMQGSTLPRRSGAAGA
MDPRMYSLVQSSTSPRRSGAAGA

SEQ ID NO: 107928 - protein, 23 aa, Artificial Sequence
  Description of Artificial Sequence: Synthetic peptide
  Seed: MDPRMCSLMQGSTLPRRSGAAGA
MDPRMYSLVQSSTVPRRSGAAGA

SEQ ID NO: 107929 - protein, 23 aa, Artificial Sequence
  Description of Artificial Sequence: Synthetic peptide
  Seed: MDPRMCSLMQGSTLPRRSGAAGA
MDPRMYSLVQTSTAPRRSGAAGA

SEQ ID NO: 107930 - protein, 23 aa, Artificial Sequence
  Description of Artificial Sequence: Synthetic peptide
  Seed: MDPRMCSLMQGSTLPRRSGAAGA
MDPRMYSLVQTSTIPRRSGAAGA

SEQ ID NO: 107931 - protein, 23 aa, Artificial Sequence
  Description of Artificial Sequence: Synthetic peptide
  Seed: MDPRMCSLMQGSTLPRRSGAAGA
MDPRMYSLVQTSTNPRRSGAAGA

SEQ ID NO: 107932 - protein, 23 aa, Artificial Sequence
  Description of Artificial Sequence: Synthetic peptide
  Seed: MDPRMCSLMQGSTLPRRSGAAGA
MDPRMYSLVQTSTSPRRSGAAGA

SEQ ID NO: 107933 - protein, 23 aa, Artificial Sequence
  Description of Artificial Sequence: Synthetic peptide
  Seed: MDPRMCSLMQGSTLPRRSGAAGA
MDPRMYSLVQTSTTPRRSGAAGA

SEQ ID NO: 107934 - protein, 23 aa, Artificial Sequence
  Description of Artificial Sequence: Synthetic peptide
  Seed: MDPRMCSLMQGSTLPRRSGAAGA
MDPRMYSLVQTSTVPRRSGAAGA

SEQ ID NO: 107935 - protein, 23 aa, Artificial Sequence
  Description of Artificial Sequence: Synthetic peptide
  Seed: MDPRMCSLMQGSTLPRRSGAAGA
MDPRMYSLVQVSTAPRRSGAAGA

SEQ ID NO: 107936 - protein, 23 aa, Artificial Sequence
  Description of Artificial Sequence: Synthetic peptide
  Seed: MDPRMCSLMQGSTLPRRSGAAGA
MDPRMYSLVQVSTNPRRSGAAGA

SEQ ID NO: 107937 - protein, 23 aa, Artificial Sequence
  Description of Artificial Sequence: Synthetic peptide
  Seed: MDPRMCSLMQGSTLPRRSGAAGA
MDPRMYSLVQVSTSPRRSGAAGA

SEQ ID NO: 107938 - protein, 23 aa, Artificial Sequence
  Description of Artificial Sequence: Synthetic peptide
  Seed: MDPRMCSLMQGSTLPRRSGAAGA
MDPRMYSLVQVSTTPRRSGAAGA

SEQ ID NO: 107939 - protein, 23 aa, Artificial Sequence
  Description of Artificial Sequence: Synthetic peptide
  Seed: MDPRMCSLMQGSTLPRRSGAAGA
MDPRMYSLVQVSTVPRRSGAAGA

SEQ ID NO: 107940 - protein, 23 aa, Artificial Sequence
  Description of Artificial Sequence: Synthetic peptide
  Seed: MDPRMCSLMQGSTLPRRSGAAGA
MDPRMCSLMQISTIPRRSAAAGA

SEQ ID NO: 107941 - protein, 23 aa, Artificial Sequence
  Description of Artificial Sequence: Synthetic peptide
  Seed: MDPRMCSLMQGSTLPRRSGAAGA
MDPRMCSLMQISTMPRRSAAAGA

SEQ ID NO: 107942 - protein, 13 aa, Artificial Sequence
  Description of Artificial Sequence: Synthetic peptide
  Seed: PRMCSLMQGSTLP
PRMFSLIQASTAP

SEQ ID NO: 107943 - protein, 13 aa, Artificial Sequence
  Description of Artificial Sequence: Synthetic peptide
  Seed: PRMCSLMQGSTLP
PRMFSLIQASTIP

SEQ ID NO: 107944 - protein, 13 aa, Artificial Sequence
  Description of Artificial Sequence: Synthetic peptide
  Seed: PRMCSLMQGSTLP
PRMFSLIQASTLP

SEQ ID NO: 107945 - protein, 13 aa, Artificial Sequence
  Description of Artificial Sequence: Synthetic peptide
  Seed: PRMCSLMQGSTLP
PRMFSLIQASTVP

SEQ ID NO: 107946 - protein, 13 aa, Artificial Sequence
  Description of Artificial Sequence: Synthetic peptide
  Seed: PRMCSLMQGSTLP
PRMFSLIQGSTLP

SEQ ID NO: 107947 - protein, 13 aa, Artificial Sequence
  Description of Artificial Sequence: Synthetic peptide
  Seed: PRMCSLMQGSTLP
PRMFSLIQGSTVP

SEQ ID NO: 107948 - protein, 13 aa, Artificial Sequence
  Description of Artificial Sequence: Synthetic peptide
  Seed: PRMCSLMQGSTLP
PRMFSLLQASTAP

SEQ ID NO: 107949 - protein, 13 aa, Artificial Sequence
  Description of Artificial Sequence: Synthetic peptide
  Seed: PRMCSLMQGSTLP
PRMFSLLQASTIP

SEQ ID NO: 107950 - protein, 13 aa, Artificial Sequence
  Description of Artificial Sequence: Synthetic peptide
  Seed: PRMCSLMQGSTLP
PRMFSLLQASTLP

SEQ ID NO: 107951 - protein, 13 aa, Artificial Sequence
  Description of Artificial Sequence: Synthetic peptide
  Seed: PRMCSLMQGSTLP
PRMFSLLQASTMP

SEQ ID NO: 107952 - protein, 13 aa, Artificial Sequence
  Description of Artificial Sequence: Synthetic peptide
  Seed: PRMCSLMQGSTLP
PRMFSLLQASTTP

SEQ ID NO: 107953 - protein, 13 aa, Artificial Sequence
  Description of Artificial Sequence: Synthetic peptide
  Seed: PRMCSLMQGSTLP
PRMFSLLQASTVP

SEQ ID NO: 107954 - protein, 13 aa, Artificial Sequence
  Description of Artificial Sequence: Synthetic peptide
  Seed: PRMCSLMQGSTLP
PRMFSLLQGSTAP

SEQ ID NO: 107955 - protein, 13 aa, Artificial Sequence
  Description of Artificial Sequence: Synthetic peptide
  Seed: PRMCSLMQGSTLP
PRMFSLLQGSTIP

SEQ ID NO: 107956 - protein, 13 aa, Artificial Sequence
  Description of Artificial Sequence: Synthetic peptide
  Seed: PRMCSLMQGSTLP
PRMFSLLQGSTLP

SEQ ID NO: 107957 - protein, 13 aa, Artificial Sequence
  Description of Artificial Sequence: Synthetic peptide
  Seed: PRMCSLMQGSTLP
PRMFSLLQGSTMP

SEQ ID NO: 107958 - protein, 13 aa, Artificial Sequence
  Description of Artificial Sequence: Synthetic peptide
  Seed: PRMCSLMQGSTLP
PRMFSLLQGSTTP

SEQ ID NO: 107959 - protein, 13 aa, Artificial Sequence
  Description of Artificial Sequence: Synthetic peptide
  Seed: PRMCSLMQGSTLP
PRMFSLLQGSTVP

SEQ ID NO: 107960 - protein, 13 aa, Artificial Sequence
  Description of Artificial Sequence: Synthetic peptide
  Seed: PRMCSLMQGSTLP
PRMFSLLQPSTAP

SEQ ID NO: 107961 - protein, 13 aa, Artificial Sequence
  Description of Artificial Sequence: Synthetic peptide
  Seed: PRMCSLMQGSTLP
PRMFSLLQPSTIP

SEQ ID NO: 107962 - protein, 13 aa, Artificial Sequence
  Description of Artificial Sequence: Synthetic peptide
  Seed: PRMCSLMQGSTLP
PRMFSLLQPSTLP

SEQ ID NO: 107963 - protein, 13 aa, Artificial Sequence
  Description of Artificial Sequence: Synthetic peptide
  Seed: PRMCSLMQGSTLP
PRMFSLLQPSTVP

SEQ ID NO: 107964 - protein, 13 aa, Artificial Sequence
  Description of Artificial Sequence: Synthetic peptide
  Seed: PRMCSLMQGSTLP
PRMFSLLQSSTAP

SEQ ID NO: 107965 - protein, 13 aa, Artificial Sequence
  Description of Artificial Sequence: Synthetic peptide
  Seed: PRMCSLMQGSTLP
PRMFSLLQSSTIP

SEQ ID NO: 107966 - protein, 13 aa, Artificial Sequence
  Description of Artificial Sequence: Synthetic peptide
  Seed: PRMCSLMQGSTLP
PRMFSLLQSSTLP

SEQ ID NO: 107967 - protein, 13 aa, Artificial Sequence
  Description of Artificial Sequence: Synthetic peptide
  Seed: PRMCSLMQGSTLP
PRMFSLLQSSTTP

SEQ ID NO: 107968 - protein, 13 aa, Artificial Sequence
  Description of Artificial Sequence: Synthetic peptide
  Seed: PRMCSLMQGSTLP
PRMFSLLQSSTVP

SEQ ID NO: 107969 - protein, 13 aa, Artificial Sequence
  Description of Artificial Sequence: Synthetic peptide
  Seed: PRMCSLMQGSTLP
PRMFSLMQASTAP

SEQ ID NO: 107970 - protein, 13 aa, Artificial Sequence
  Description of Artificial Sequence: Synthetic peptide
  Seed: PRMCSLMQGSTLP
PRMFSLMQASTIP

SEQ ID NO: 107971 - protein, 13 aa, Artificial Sequence
  Description of Artificial Sequence: Synthetic peptide
  Seed: PRMCSLMQGSTLP
PRMFSLMQASTLP

SEQ ID NO: 107972 - protein, 13 aa, Artificial Sequence
  Description of Artificial Sequence: Synthetic peptide
  Seed: PRMCSLMQGSTLP
PRMFSLMQASTMP

SEQ ID NO: 107973 - protein, 13 aa, Artificial Sequence
  Description of Artificial Sequence: Synthetic peptide
  Seed: PRMCSLMQGSTLP
PRMFSLMQASTTP

SEQ ID NO: 107974 - protein, 13 aa, Artificial Sequence
  Description of Artificial Sequence: Synthetic peptide
  Seed: PRMCSLMQGSTLP
PRMFSLMQASTVP

SEQ ID NO: 107975 - protein, 13 aa, Artificial Sequence
  Description of Artificial Sequence: Synthetic peptide
  Seed: PRMCSLMQGSTLP
PRMFSLMQGSTAP

SEQ ID NO: 107976 - protein, 13 aa, Artificial Sequence
  Description of Artificial Sequence: Synthetic peptide
  Seed: PRMCSLMQGSTLP
PRMFSLMQGSTIP

SEQ ID NO: 107977 - protein, 13 aa, Artificial Sequence
  Description of Artificial Sequence: Synthetic peptide
  Seed: PRMCSLMQGSTLP
PRMFSLMQGSTLP

SEQ ID NO: 107978 - protein, 13 aa, Artificial Sequence
  Description of Artificial Sequence: Synthetic peptide
  Seed: PRMCSLMQGSTLP
PRMFSLMQGSTMP

SEQ ID NO: 107979 - protein, 13 aa, Artificial Sequence
  Description of Artificial Sequence: Synthetic peptide
  Seed: PRMCSLMQGSTLP
PRMFSLMQGSTVP

SEQ ID NO: 107980 - protein, 13 aa, Artificial Sequence
  Description of Artificial Sequence: Synthetic peptide
  Seed: PRMCSLMQGSTLP
PRMFSLMQPSTIP

SEQ ID NO: 107981 - protein, 13 aa, Artificial Sequence
  Description of Artificial Sequence: Synthetic peptide
  Seed: PRMCSLMQGSTLP
PRMFSLMQPSTLP

SEQ ID NO: 107982 - protein, 13 aa, Artificial Sequence
  Description of Artificial Sequence: Synthetic peptide
  Seed: PRMCSLMQGSTLP
PRMFSLMQPSTVP

SEQ ID NO: 107983 - protein, 13 aa, Artificial Sequence
  Description of Artificial Sequence: Synthetic peptide
  Seed: PRMCSLMQGSTLP
PRMFSLMQSSTAP

SEQ ID NO: 107984 - protein, 13 aa, Artificial Sequence
  Description of Artificial Sequence: Synthetic peptide
  Seed: PRMCSLMQGSTLP
PRMFSLMQSSTIP

SEQ ID NO: 107985 - protein, 13 aa, Artificial Sequence
  Description of Artificial Sequence: Synthetic peptide
  Seed: PRMCSLMQGSTLP
PRMFSLMQSSTLP

SEQ ID NO: 107986 - protein, 13 aa, Artificial Sequence
  Description of Artificial Sequence: Synthetic peptide
  Seed: PRMCSLMQGSTLP
PRMFSLMQSSTVP

SEQ ID NO: 107987 - protein, 13 aa, Artificial Sequence
  Description of Artificial Sequence: Synthetic peptide
  Seed: PRMCSLMQGSTLP
PRMYSLLQASTAP

SEQ ID NO: 107988 - protein, 13 aa, Artificial Sequence
  Description of Artificial Sequence: Synthetic peptide
  Seed: PRMCSLMQGSTLP
PRMYSLLQASTIP

SEQ ID NO: 107989 - protein, 13 aa, Artificial Sequence
  Description of Artificial Sequence: Synthetic peptide
  Seed: PRMCSLMQGSTLP
PRMYSLLQASTLP

SEQ ID NO: 107990 - protein, 13 aa, Artificial Sequence
  Description of Artificial Sequence: Synthetic peptide
  Seed: PRMCSLMQGSTLP
PRMYSLLQASTVP

SEQ ID NO: 107991 - protein, 13 aa, Artificial Sequence
  Description of Artificial Sequence: Synthetic peptide
  Seed: PRMCSLMQGSTLP
PRMYSLLQGSTAP

SEQ ID NO: 107992 - protein, 13 aa, Artificial Sequence
  Description of Artificial Sequence: Synthetic peptide
  Seed: PRMCSLMQGSTLP
PRMYSLLQGSTIP

SEQ ID NO: 107993 - protein, 13 aa, Artificial Sequence
  Description of Artificial Sequence: Synthetic peptide
  Seed: PRMCSLMQGSTLP
PRMYSLLQGSTLP

SEQ ID NO: 107994 - protein, 13 aa, Artificial Sequence
  Description of Artificial Sequence: Synthetic peptide
  Seed: PRMCSLMQGSTLP
PRMYSLLQGSTVP

SEQ ID NO: 107995 - protein, 13 aa, Artificial Sequence
  Description of Artificial Sequence: Synthetic peptide
  Seed: PRMCSLMQGSTLP
PRMYSLLQSSTAP

SEQ ID NO: 107996 - protein, 13 aa, Artificial Sequence
  Description of Artificial Sequence: Synthetic peptide
  Seed: PRMCSLMQGSTLP
PRMYSLLQSSTIP

SEQ ID NO: 107997 - protein, 13 aa, Artificial Sequence
  Description of Artificial Sequence: Synthetic peptide
  Seed: PRMCSLMQGSTLP
PRMYSLLQSSTLP

SEQ ID NO: 107998 - protein, 13 aa, Artificial Sequence
  Description of Artificial Sequence: Synthetic peptide
  Seed: PRMCSLMQGSTLP
PRMYSLLQSSTVP

SEQ ID NO: 107999 - protein, 13 aa, Artificial Sequence
  Description of Artificial Sequence: Synthetic peptide
  Seed: PRMCSLMQGSTLP
PRMYSLMQASTAP

SEQ ID NO: 108000 - protein, 13 aa, Artificial Sequence
  Description of Artificial Sequence: Synthetic peptide
  Seed: PRMCSLMQGSTLP
PRMYSLMQASTIP

SEQ ID NO: 108001 - protein, 13 aa, Artificial Sequence
  Description of Artificial Sequence: Synthetic peptide
  Seed: PRMCSLMQGSTLP
PRMYSLMQASTLP

SEQ ID NO: 108002 - protein, 13 aa, Artificial Sequence
  Description of Artificial Sequence: Synthetic peptide
  Seed: PRMCSLMQGSTLP
PRMYSLMQASTVP

SEQ ID NO: 108003 - protein, 13 aa, Artificial Sequence
  Description of Artificial Sequence: Synthetic peptide
  Seed: PRMCSLMQGSTLP
PRMYSLMQGSTAP

SEQ ID NO: 108004 - protein, 13 aa, Artificial Sequence
  Description of Artificial Sequence: Synthetic peptide
  Seed: PRMCSLMQGSTLP
PRMYSLMQGSTIP

SEQ ID NO: 108005 - protein, 13 aa, Artificial Sequence
  Description of Artificial Sequence: Synthetic peptide
  Seed: PRMCSLMQGSTLP
PRMYSLMQGSTLP

SEQ ID NO: 108006 - protein, 13 aa, Artificial Sequence
  Description of Artificial Sequence: Synthetic peptide
  Seed: PRMCSLMQGSTLP
PRMYSLMQGSTVP

SEQ ID NO: 108007 - protein, 13 aa, Artificial Sequence
  Description of Artificial Sequence: Synthetic peptide
  Seed: PRMCSLMQGSTLP
PRMYSLMQSSTLP

SEQ ID NO: 108008 - protein, 13 aa, Artificial Sequence
  Description of Artificial Sequence: Synthetic peptide
  Seed: PRMCSLMQGSTLP
PRMYSLMQSSTVP

SEQ ID NO: 108009 - protein, 14 aa, Artificial Sequence
  Description of Artificial Sequence: Synthetic peptide
  Seed: PRMCSLMQGSTLPR
PRMFSLAQASTAPR

SEQ ID NO: 108010 - protein, 14 aa, Artificial Sequence
  Description of Artificial Sequence: Synthetic peptide
  Seed: PRMCSLMQGSTLPR
PRMFSLAQASTIPR

SEQ ID NO: 108011 - protein, 14 aa, Artificial Sequence
  Description of Artificial Sequence: Synthetic peptide
  Seed: PRMCSLMQGSTLPR
PRMFSLAQASTLPR

SEQ ID NO: 108012 - protein, 14 aa, Artificial Sequence
  Description of Artificial Sequence: Synthetic peptide
  Seed: PRMCSLMQGSTLPR
PRMFSLAQASTMPR

SEQ ID NO: 108013 - protein, 14 aa, Artificial Sequence
  Description of Artificial Sequence: Synthetic peptide
  Seed: PRMCSLMQGSTLPR
PRMFSLAQASTNPR

SEQ ID NO: 108014 - protein, 14 aa, Artificial Sequence
  Description of Artificial Sequence: Synthetic peptide
  Seed: PRMCSLMQGSTLPR
PRMFSLAQASTSPR

SEQ ID NO: 108015 - protein, 14 aa, Artificial Sequence
  Description of Artificial Sequence: Synthetic peptide
  Seed: PRMCSLMQGSTLPR
PRMFSLAQASTTPR

SEQ ID NO: 108016 - protein, 14 aa, Artificial Sequence
  Description of Artificial Sequence: Synthetic peptide
  Seed: PRMCSLMQGSTLPR
PRMFSLAQASTVPR

SEQ ID NO: 108017 - protein, 14 aa, Artificial Sequence
  Description of Artificial Sequence: Synthetic peptide
  Seed: PRMCSLMQGSTLPR
PRMFSLAQGSTAPR

SEQ ID NO: 108018 - protein, 14 aa, Artificial Sequence
  Description of Artificial Sequence: Synthetic peptide
  Seed: PRMCSLMQGSTLPR
PRMFSLAQGSTIPR

SEQ ID NO: 108019 - protein, 14 aa, Artificial Sequence
  Description of Artificial Sequence: Synthetic peptide
  Seed: PRMCSLMQGSTLPR
PRMFSLAQGSTLPR

SEQ ID NO: 108020 - protein, 14 aa, Artificial Sequence
  Description of Artificial Sequence: Synthetic peptide
  Seed: PRMCSLMQGSTLPR
PRMFSLAQGSTMPR

SEQ ID NO: 108021 - protein, 14 aa, Artificial Sequence
  Description of Artificial Sequence: Synthetic peptide
  Seed: PRMCSLMQGSTLPR
PRMFSLAQGSTTPR

SEQ ID NO: 108022 - protein, 14 aa, Artificial Sequence
  Description of Artificial Sequence: Synthetic peptide
  Seed: PRMCSLMQGSTLPR
PRMFSLAQGSTVPR

SEQ ID NO: 108023 - protein, 14 aa, Artificial Sequence
  Description of Artificial Sequence: Synthetic peptide
  Seed: PRMCSLMQGSTLPR
PRMFSLAQISTAPR

SEQ ID NO: 108024 - protein, 14 aa, Artificial Sequence
  Description of Artificial Sequence: Synthetic peptide
  Seed: PRMCSLMQGSTLPR
PRMFSLAQISTNPR

SEQ ID NO: 108025 - protein, 14 aa, Artificial Sequence
  Description of Artificial Sequence: Synthetic peptide
  Seed: PRMCSLMQGSTLPR
PRMFSLAQISTSPR

SEQ ID NO: 108026 - protein, 14 aa, Artificial Sequence
  Description of Artificial Sequence: Synthetic peptide
  Seed: PRMCSLMQGSTLPR
PRMFSLAQNSTIPR

SEQ ID NO: 108027 - protein, 14 aa, Artificial Sequence
  Description of Artificial Sequence: Synthetic peptide
  Seed: PRMCSLMQGSTLPR
PRMFSLAQNSTLPR

SEQ ID NO: 108028 - protein, 14 aa, Artificial Sequence
  Description of Artificial Sequence: Synthetic peptide
  Seed: PRMCSLMQGSTLPR
PRMFSLAQNSTVPR

SEQ ID NO: 108029 - protein, 14 aa, Artificial Sequence
  Description of Artificial Sequence: Synthetic peptide
  Seed: PRMCSLMQGSTLPR
PRMFSLAQPSTAPR

SEQ ID NO: 108030 - protein, 14 aa, Artificial Sequence
  Description of Artificial Sequence: Synthetic peptide
  Seed: PRMCSLMQGSTLPR
PRMFSLAQPSTIPR

SEQ ID NO: 108031 - protein, 14 aa, Artificial Sequence
  Description of Artificial Sequence: Synthetic peptide
  Seed: PRMCSLMQGSTLPR
PRMFSLAQPSTLPR

SEQ ID NO: 108032 - protein, 14 aa, Artificial Sequence
  Description of Artificial Sequence: Synthetic peptide
  Seed: PRMCSLMQGSTLPR
PRMFSLAQPSTNPR

SEQ ID NO: 108033 - protein, 14 aa, Artificial Sequence
  Description of Artificial Sequence: Synthetic peptide
  Seed: PRMCSLMQGSTLPR
PRMFSLAQPSTSPR

SEQ ID NO: 108034 - protein, 14 aa, Artificial Sequence
  Description of Artificial Sequence: Synthetic peptide
  Seed: PRMCSLMQGSTLPR
PRMFSLAQPSTVPR

SEQ ID NO: 108035 - protein, 14 aa, Artificial Sequence
  Description of Artificial Sequence: Synthetic peptide
  Seed: PRMCSLMQGSTLPR
PRMFSLAQSSTAPR

SEQ ID NO: 108036 - protein, 14 aa, Artificial Sequence
  Description of Artificial Sequence: Synthetic peptide
  Seed: PRMCSLMQGSTLPR
PRMFSLAQSSTIPR

SEQ ID NO: 108037 - protein, 14 aa, Artificial Sequence
  Description of Artificial Sequence: Synthetic peptide
  Seed: PRMCSLMQGSTLPR
PRMFSLAQSSTLPR

SEQ ID NO: 108038 - protein, 14 aa, Artificial Sequence
  Description of Artificial Sequence: Synthetic peptide
  Seed: PRMCSLMQGSTLPR
PRMFSLAQSSTMPR

SEQ ID NO: 108039 - protein, 14 aa, Artificial Sequence
  Description of Artificial Sequence: Synthetic peptide
  Seed: PRMCSLMQGSTLPR
PRMFSLAQSSTNPR

SEQ ID NO: 108040 - protein, 14 aa, Artificial Sequence
  Description of Artificial Sequence: Synthetic peptide
  Seed: PRMCSLMQGSTLPR
PRMFSLAQSSTSPR

SEQ ID NO: 108041 - protein, 14 aa, Artificial Sequence
  Description of Artificial Sequence: Synthetic peptide
  Seed: PRMCSLMQGSTLPR
PRMFSLAQSSTTPR

SEQ ID NO: 108042 - protein, 14 aa, Artificial Sequence
  Description of Artificial Sequence: Synthetic peptide
  Seed: PRMCSLMQGSTLPR
PRMFSLAQSSTVPR

SEQ ID NO: 108043 - protein, 14 aa, Artificial Sequence
  Description of Artificial Sequence: Synthetic peptide
  Seed: PRMCSLMQGSTLPR
PRMFSLAQTSTAPR

SEQ ID NO: 108044 - protein, 14 aa, Artificial Sequence
  Description of Artificial Sequence: Synthetic peptide
  Seed: PRMCSLMQGSTLPR
PRMFSLAQTSTIPR

SEQ ID NO: 108045 - protein, 14 aa, Artificial Sequence
  Description of Artificial Sequence: Synthetic peptide
  Seed: PRMCSLMQGSTLPR
PRMFSLAQTSTLPR

SEQ ID NO: 108046 - protein, 14 aa, Artificial Sequence
  Description of Artificial Sequence: Synthetic peptide
  Seed: PRMCSLMQGSTLPR
PRMFSLAQTSTVPR

SEQ ID NO: 108047 - protein, 14 aa, Artificial Sequence
  Description of Artificial Sequence: Synthetic peptide
  Seed: PRMCSLMQGSTLPR
PRMFSLAQVSTAPR

SEQ ID NO: 108048 - protein, 14 aa, Artificial Sequence
  Description of Artificial Sequence: Synthetic peptide
  Seed: PRMCSLMQGSTLPR
PRMFSLAQVSTNPR

SEQ ID NO: 108049 - protein, 14 aa, Artificial Sequence
  Description of Artificial Sequence: Synthetic peptide
  Seed: PRMCSLMQGSTLPR
PRMFSLAQVSTSPR

SEQ ID NO: 108050 - protein, 14 aa, Artificial Sequence
  Description of Artificial Sequence: Synthetic peptide
  Seed: PRMCSLMQGSTLPR
PRMFSLAQVSTVPR

SEQ ID NO: 108051 - protein, 14 aa, Artificial Sequence
  Description of Artificial Sequence: Synthetic peptide
  Seed: PRMCSLMQGSTLPR
PRMFSLEQASTAPR

SEQ ID NO: 108052 - protein, 14 aa, Artificial Sequence
  Description of Artificial Sequence: Synthetic peptide
  Seed: PRMCSLMQGSTLPR
PRMFSLEQASTIPR

SEQ ID NO: 108053 - protein, 14 aa, Artificial Sequence
  Description of Artificial Sequence: Synthetic peptide
  Seed: PRMCSLMQGSTLPR
PRMFSLEQASTLPR

SEQ ID NO: 108054 - protein, 14 aa, Artificial Sequence
  Description of Artificial Sequence: Synthetic peptide
  Seed: PRMCSLMQGSTLPR
PRMFSLEQASTVPR

SEQ ID NO: 108055 - protein, 14 aa, Artificial Sequence
  Description of Artificial Sequence: Synthetic peptide
  Seed: PRMCSLMQGSTLPR
PRMFSLFQASTAPR

SEQ ID NO: 108056 - protein, 14 aa, Artificial Sequence
  Description of Artificial Sequence: Synthetic peptide
  Seed: PRMCSLMQGSTLPR
PRMFSLFQASTIPR

SEQ ID NO: 108057 - protein, 14 aa, Artificial Sequence
  Description of Artificial Sequence: Synthetic peptide
  Seed: PRMCSLMQGSTLPR
PRMFSLFQASTLPR

SEQ ID NO: 108058 - protein, 14 aa, Artificial Sequence
  Description of Artificial Sequence: Synthetic peptide
  Seed: PRMCSLMQGSTLPR
PRMFSLFQASTVPR

SEQ ID NO: 108059 - protein, 14 aa, Artificial Sequence
  Description of Artificial Sequence: Synthetic peptide
  Seed: PRMCSLMQGSTLPR
PRMFSLFQPSTAPR

SEQ ID NO: 108060 - protein, 14 aa, Artificial Sequence
  Description of Artificial Sequence: Synthetic peptide
  Seed: PRMCSLMQGSTLPR
PRMFSLGQASTLPR

SEQ ID NO: 108061 - protein, 14 aa, Artificial Sequence
  Description of Artificial Sequence: Synthetic peptide
  Seed: PRMCSLMQGSTLPR
PRMFSLIQASTAPR

SEQ ID NO: 108062 - protein, 14 aa, Artificial Sequence
  Description of Artificial Sequence: Synthetic peptide
  Seed: PRMCSLMQGSTLPR
PRMFSLIQASTGPR

SEQ ID NO: 108063 - protein, 14 aa, Artificial Sequence
  Description of Artificial Sequence: Synthetic peptide
  Seed: PRMCSLMQGSTLPR
PRMFSLIQASTHPR

SEQ ID NO: 108064 - protein, 14 aa, Artificial Sequence
  Description of Artificial Sequence: Synthetic peptide
  Seed: PRMCSLMQGSTLPR
PRMFSLIQASTIPR

SEQ ID NO: 108065 - protein, 14 aa, Artificial Sequence
  Description of Artificial Sequence: Synthetic peptide
  Seed: PRMCSLMQGSTLPR
PRMFSLIQASTLPR

SEQ ID NO: 108066 - protein, 14 aa, Artificial Sequence
  Description of Artificial Sequence: Synthetic peptide
  Seed: PRMCSLMQGSTLPR
PRMFSLIQASTMPR

SEQ ID NO: 108067 - protein, 14 aa, Artificial Sequence
  Description of Artificial Sequence: Synthetic peptide
  Seed: PRMCSLMQGSTLPR
PRMFSLIQASTNPR

SEQ ID NO: 108068 - protein, 14 aa, Artificial Sequence
  Description of Artificial Sequence: Synthetic peptide
  Seed: PRMCSLMQGSTLPR
PRMFSLIQASTQPR

SEQ ID NO: 108069 - protein, 14 aa, Artificial Sequence
  Description of Artificial Sequence: Synthetic peptide
  Seed: PRMCSLMQGSTLPR
PRMFSLIQASTSPR

SEQ ID NO: 108070 - protein, 14 aa, Artificial Sequence
  Description of Artificial Sequence: Synthetic peptide
  Seed: PRMCSLMQGSTLPR
PRMFSLIQASTTPR

SEQ ID NO: 108071 - protein, 14 aa, Artificial Sequence
  Description of Artificial Sequence: Synthetic peptide
  Seed: PRMCSLMQGSTLPR
PRMFSLIQASTVPR

SEQ ID NO: 108072 - protein, 14 aa, Artificial Sequence
  Description of Artificial Sequence: Synthetic peptide
  Seed: PRMCSLMQGSTLPR
PRMFSLIQGSTAPR

SEQ ID NO: 108073 - protein, 14 aa, Artificial Sequence
  Description of Artificial Sequence: Synthetic peptide
  Seed: PRMCSLMQGSTLPR
PRMFSLIQGSTGPR

SEQ ID NO: 108074 - protein, 14 aa, Artificial Sequence
  Description of Artificial Sequence: Synthetic peptide
  Seed: PRMCSLMQGSTLPR
PRMFSLIQGSTIPR

SEQ ID NO: 108075 - protein, 14 aa, Artificial Sequence
  Description of Artificial Sequence: Synthetic peptide
  Seed: PRMCSLMQGSTLPR
PRMFSLIQGSTLPR

SEQ ID NO: 108076 - protein, 14 aa, Artificial Sequence
  Description of Artificial Sequence: Synthetic peptide
  Seed: PRMCSLMQGSTLPR
PRMFSLIQGSTMPR

SEQ ID NO: 108077 - protein, 14 aa, Artificial Sequence
  Description of Artificial Sequence: Synthetic peptide
  Seed: PRMCSLMQGSTLPR
PRMFSLIQGSTNPR

SEQ ID NO: 108078 - protein, 14 aa, Artificial Sequence
  Description of Artificial Sequence: Synthetic peptide
  Seed: PRMCSLMQGSTLPR
PRMFSLIQGSTSPR

SEQ ID NO: 108079 - protein, 14 aa, Artificial Sequence
  Description of Artificial Sequence: Synthetic peptide
  Seed: PRMCSLMQGSTLPR
PRMFSLIQGSTTPR

SEQ ID NO: 108080 - protein, 14 aa, Artificial Sequence
  Description of Artificial Sequence: Synthetic peptide
  Seed: PRMCSLMQGSTLPR
PRMFSLIQGSTVPR

SEQ ID NO: 108081 - protein, 14 aa, Artificial Sequence
  Description of Artificial Sequence: Synthetic peptide
  Seed: PRMCSLMQGSTLPR
PRMFSLIQISTAPR

SEQ ID NO: 108082 - protein, 14 aa, Artificial Sequence
  Description of Artificial Sequence: Synthetic peptide
  Seed: PRMCSLMQGSTLPR
PRMFSLIQISTIPR

SEQ ID NO: 108083 - protein, 14 aa, Artificial Sequence
  Description of Artificial Sequence: Synthetic peptide
  Seed: PRMCSLMQGSTLPR
PRMFSLIQISTLPR

SEQ ID NO: 108084 - protein, 14 aa, Artificial Sequence
  Description of Artificial Sequence: Synthetic peptide
  Seed: PRMCSLMQGSTLPR
PRMFSLIQISTNPR

SEQ ID NO: 108085 - protein, 14 aa, Artificial Sequence
  Description of Artificial Sequence: Synthetic peptide
  Seed: PRMCSLMQGSTLPR
PRMFSLIQISTSPR

SEQ ID NO: 108086 - protein, 14 aa, Artificial Sequence
  Description of Artificial Sequence: Synthetic peptide
  Seed: PRMCSLMQGSTLPR
PRMFSLIQISTTPR

SEQ ID NO: 108087 - protein, 14 aa, Artificial Sequence
  Description of Artificial Sequence: Synthetic peptide
  Seed: PRMCSLMQGSTLPR
PRMFSLIQISTVPR

SEQ ID NO: 108088 - protein, 14 aa, Artificial Sequence
  Description of Artificial Sequence: Synthetic peptide
  Seed: PRMCSLMQGSTLPR
PRMFSLIQLSTAPR

SEQ ID NO: 108089 - protein, 14 aa, Artificial Sequence
  Description of Artificial Sequence: Synthetic peptide
  Seed: PRMCSLMQGSTLPR
PRMFSLIQNSTAPR

SEQ ID NO: 108090 - protein, 14 aa, Artificial Sequence
  Description of Artificial Sequence: Synthetic peptide
  Seed: PRMCSLMQGSTLPR
PRMFSLIQNSTIPR

SEQ ID NO: 108091 - protein, 14 aa, Artificial Sequence
  Description of Artificial Sequence: Synthetic peptide
  Seed: PRMCSLMQGSTLPR
PRMFSLIQNSTLPR

SEQ ID NO: 108092 - protein, 14 aa, Artificial Sequence
  Description of Artificial Sequence: Synthetic peptide
  Seed: PRMCSLMQGSTLPR
PRMFSLIQNSTNPR

SEQ ID NO: 108093 - protein, 14 aa, Artificial Sequence
  Description of Artificial Sequence: Synthetic peptide
  Seed: PRMCSLMQGSTLPR
PRMFSLIQNSTSPR

SEQ ID NO: 108094 - protein, 14 aa, Artificial Sequence
  Description of Artificial Sequence: Synthetic peptide
  Seed: PRMCSLMQGSTLPR
PRMFSLIQNSTTPR

SEQ ID NO: 108095 - protein, 14 aa, Artificial Sequence
  Description of Artificial Sequence: Synthetic peptide
  Seed: PRMCSLMQGSTLPR
PRMFSLIQNSTVPR

SEQ ID NO: 108096 - protein, 14 aa, Artificial Sequence
  Description of Artificial Sequence: Synthetic peptide
  Seed: PRMCSLMQGSTLPR
PRMFSLIQPSTAPR

SEQ ID NO: 108097 - protein, 14 aa, Artificial Sequence
  Description of Artificial Sequence: Synthetic peptide
  Seed: PRMCSLMQGSTLPR
PRMFSLIQPSTGPR

SEQ ID NO: 108098 - protein, 14 aa, Artificial Sequence
  Description of Artificial Sequence: Synthetic peptide
  Seed: PRMCSLMQGSTLPR
PRMFSLIQPSTIPR

SEQ ID NO: 108099 - protein, 14 aa, Artificial Sequence
  Description of Artificial Sequence: Synthetic peptide
  Seed: PRMCSLMQGSTLPR
PRMFSLIQPSTLPR

SEQ ID NO: 108100 - protein, 14 aa, Artificial Sequence
  Description of Artificial Sequence: Synthetic peptide
  Seed: PRMCSLMQGSTLPR
PRMFSLIQPSTMPR

SEQ ID NO: 108101 - protein, 14 aa, Artificial Sequence
  Description of Artificial Sequence: Synthetic peptide
  Seed: PRMCSLMQGSTLPR
PRMFSLIQPSTNPR

SEQ ID NO: 108102 - protein, 14 aa, Artificial Sequence
  Description of Artificial Sequence: Synthetic peptide
  Seed: PRMCSLMQGSTLPR
PRMFSLIQPSTSPR

SEQ ID NO: 108103 - protein, 14 aa, Artificial Sequence
  Description of Artificial Sequence: Synthetic peptide
  Seed: PRMCSLMQGSTLPR
PRMFSLIQPSTTPR

SEQ ID NO: 108104 - protein, 14 aa, Artificial Sequence
  Description of Artificial Sequence: Synthetic peptide
  Seed: PRMCSLMQGSTLPR
PRMFSLIQPSTVPR

SEQ ID NO: 108105 - protein, 14 aa, Artificial Sequence
  Description of Artificial Sequence: Synthetic peptide
  Seed: PRMCSLMQGSTLPR
PRMFSLIQSSTAPR

SEQ ID NO: 108106 - protein, 14 aa, Artificial Sequence
  Description of Artificial Sequence: Synthetic peptide
  Seed: PRMCSLMQGSTLPR
PRMFSLIQSSTGPR

SEQ ID NO: 108107 - protein, 14 aa, Artificial Sequence
  Description of Artificial Sequence: Synthetic peptide
  Seed: PRMCSLMQGSTLPR
PRMFSLIQSSTIPR

SEQ ID NO: 108108 - protein, 14 aa, Artificial Sequence
  Description of Artificial Sequence: Synthetic peptide
  Seed: PRMCSLMQGSTLPR
PRMFSLIQSSTLPR

SEQ ID NO: 108109 - protein, 14 aa, Artificial Sequence
  Description of Artificial Sequence: Synthetic peptide
  Seed: PRMCSLMQGSTLPR
PRMFSLIQSSTMPR

SEQ ID NO: 108110 - protein, 14 aa, Artificial Sequence
  Description of Artificial Sequence: Synthetic peptide
  Seed: PRMCSLMQGSTLPR
PRMFSLIQSSTNPR

SEQ ID NO: 108111 - protein, 14 aa, Artificial Sequence
  Description of Artificial Sequence: Synthetic peptide
  Seed: PRMCSLMQGSTLPR
PRMFSLIQSSTSPR

SEQ ID NO: 108112 - protein, 14 aa, Artificial Sequence
  Description of Artificial Sequence: Synthetic peptide
  Seed: PRMCSLMQGSTLPR
PRMFSLIQSSTTPR

SEQ ID NO: 108113 - protein, 14 aa, Artificial Sequence
  Description of Artificial Sequence: Synthetic peptide
  Seed: PRMCSLMQGSTLPR
PRMFSLIQSSTVPR

SEQ ID NO: 108114 - protein, 14 aa, Artificial Sequence
  Description of Artificial Sequence: Synthetic peptide
  Seed: PRMCSLMQGSTLPR
PRMFSLIQTSTAPR

SEQ ID NO: 108115 - protein, 14 aa, Artificial Sequence
  Description of Artificial Sequence: Synthetic peptide
  Seed: PRMCSLMQGSTLPR
PRMFSLIQTSTIPR

SEQ ID NO: 108116 - protein, 14 aa, Artificial Sequence
  Description of Artificial Sequence: Synthetic peptide
  Seed: PRMCSLMQGSTLPR
PRMFSLIQTSTLPR

SEQ ID NO: 108117 - protein, 14 aa, Artificial Sequence
  Description of Artificial Sequence: Synthetic peptide
  Seed: PRMCSLMQGSTLPR
PRMFSLIQTSTMPR

SEQ ID NO: 108118 - protein, 14 aa, Artificial Sequence
  Description of Artificial Sequence: Synthetic peptide
  Seed: PRMCSLMQGSTLPR
PRMFSLIQTSTNPR

SEQ ID NO: 108119 - protein, 14 aa, Artificial Sequence
  Description of Artificial Sequence: Synthetic peptide
  Seed: PRMCSLMQGSTLPR
PRMFSLIQTSTSPR

SEQ ID NO: 108120 - protein, 14 aa, Artificial Sequence
  Description of Artificial Sequence: Synthetic peptide
  Seed: PRMCSLMQGSTLPR
PRMFSLIQTSTTPR

SEQ ID NO: 108121 - protein, 14 aa, Artificial Sequence
  Description of Artificial Sequence: Synthetic peptide
  Seed: PRMCSLMQGSTLPR
PRMFSLIQTSTVPR

SEQ ID NO: 108122 - protein, 14 aa, Artificial Sequence
  Description of Artificial Sequence: Synthetic peptide
  Seed: PRMCSLMQGSTLPR
PRMFSLIQVSTAPR

SEQ ID NO: 108123 - protein, 14 aa, Artificial Sequence
  Description of Artificial Sequence: Synthetic peptide
  Seed: PRMCSLMQGSTLPR
PRMFSLIQVSTGPR

SEQ ID NO: 108124 - protein, 14 aa, Artificial Sequence
  Description of Artificial Sequence: Synthetic peptide
  Seed: PRMCSLMQGSTLPR
PRMFSLIQVSTIPR

SEQ ID NO: 108125 - protein, 14 aa, Artificial Sequence
  Description of Artificial Sequence: Synthetic peptide
  Seed: PRMCSLMQGSTLPR
PRMFSLIQVSTLPR

SEQ ID NO: 108126 - protein, 14 aa, Artificial Sequence
  Description of Artificial Sequence: Synthetic peptide
  Seed: PRMCSLMQGSTLPR
PRMFSLIQVSTMPR

SEQ ID NO: 108127 - protein, 14 aa, Artificial Sequence
  Description of Artificial Sequence: Synthetic peptide
  Seed: PRMCSLMQGSTLPR
PRMFSLIQVSTNPR

SEQ ID NO: 108128 - protein, 14 aa, Artificial Sequence
  Description of Artificial Sequence: Synthetic peptide
  Seed: PRMCSLMQGSTLPR
PRMFSLIQVSTSPR

SEQ ID NO: 108129 - protein, 14 aa, Artificial Sequence
  Description of Artificial Sequence: Synthetic peptide
  Seed: PRMCSLMQGSTLPR
PRMFSLIQVSTTPR

SEQ ID NO: 108130 - protein, 14 aa, Artificial Sequence
  Description of Artificial Sequence: Synthetic peptide
  Seed: PRMCSLMQGSTLPR
PRMFSLIQVSTVPR

SEQ ID NO: 108131 - protein, 14 aa, Artificial Sequence
  Description of Artificial Sequence: Synthetic peptide
  Seed: PRMCSLMQGSTLPR
PRMFSLLQASTAPR

SEQ ID NO: 108132 - protein, 14 aa, Artificial Sequence
  Description of Artificial Sequence: Synthetic peptide
  Seed: PRMCSLMQGSTLPR
PRMFSLLQASTCPR

SEQ ID NO: 108133 - protein, 14 aa, Artificial Sequence
  Description of Artificial Sequence: Synthetic peptide
  Seed: PRMCSLMQGSTLPR
PRMFSLLQASTFPR

SEQ ID NO: 108134 - protein, 14 aa, Artificial Sequence
  Description of Artificial Sequence: Synthetic peptide
  Seed: PRMCSLMQGSTLPR
PRMFSLLQASTGPR

SEQ ID NO: 108135 - protein, 14 aa, Artificial Sequence
  Description of Artificial Sequence: Synthetic peptide
  Seed: PRMCSLMQGSTLPR
PRMFSLLQASTHPR

SEQ ID NO: 108136 - protein, 14 aa, Artificial Sequence
  Description of Artificial Sequence: Synthetic peptide
  Seed: PRMCSLMQGSTLPR
PRMFSLLQASTIPR

SEQ ID NO: 108137 - protein, 14 aa, Artificial Sequence
  Description of Artificial Sequence: Synthetic peptide
  Seed: PRMCSLMQGSTLPR
PRMFSLLQASTLPR

SEQ ID NO: 108138 - protein, 14 aa, Artificial Sequence
  Description of Artificial Sequence: Synthetic peptide
  Seed: PRMCSLMQGSTLPR
PRMFSLLQASTMPR

SEQ ID NO: 108139 - protein, 14 aa, Artificial Sequence
  Description of Artificial Sequence: Synthetic peptide
  Seed: PRMCSLMQGSTLPR
PRMFSLLQASTNPR

SEQ ID NO: 108140 - protein, 14 aa, Artificial Sequence
  Description of Artificial Sequence: Synthetic peptide
  Seed: PRMCSLMQGSTLPR
PRMFSLLQASTPPR

SEQ ID NO: 108141 - protein, 14 aa, Artificial Sequence
  Description of Artificial Sequence: Synthetic peptide
  Seed: PRMCSLMQGSTLPR
PRMFSLLQASTQPR

SEQ ID NO: 108142 - protein, 14 aa, Artificial Sequence
  Description of Artificial Sequence: Synthetic peptide
  Seed: PRMCSLMQGSTLPR
PRMFSLLQASTSPR

SEQ ID NO: 108143 - protein, 14 aa, Artificial Sequence
  Description of Artificial Sequence: Synthetic peptide
  Seed: PRMCSLMQGSTLPR
PRMFSLLQASTTPR

SEQ ID NO: 108144 - protein, 14 aa, Artificial Sequence
  Description of Artificial Sequence: Synthetic peptide
  Seed: PRMCSLMQGSTLPR
PRMFSLLQASTVPR

SEQ ID NO: 108145 - protein, 14 aa, Artificial Sequence
  Description of Artificial Sequence: Synthetic peptide
  Seed: PRMCSLMQGSTLPR
PRMFSLLQGSTAPR

SEQ ID NO: 108146 - protein, 14 aa, Artificial Sequence
  Description of Artificial Sequence: Synthetic peptide
  Seed: PRMCSLMQGSTLPR
PRMFSLLQGSTCPR

SEQ ID NO: 108147 - protein, 14 aa, Artificial Sequence
  Description of Artificial Sequence: Synthetic peptide
  Seed: PRMCSLMQGSTLPR
PRMFSLLQGSTFPR

SEQ ID NO: 108148 - protein, 14 aa, Artificial Sequence
  Description of Artificial Sequence: Synthetic peptide
  Seed: PRMCSLMQGSTLPR
PRMFSLLQGSTGPR

SEQ ID NO: 108149 - protein, 14 aa, Artificial Sequence
  Description of Artificial Sequence: Synthetic peptide
  Seed: PRMCSLMQGSTLPR
PRMFSLLQGSTIPR

SEQ ID NO: 108150 - protein, 14 aa, Artificial Sequence
  Description of Artificial Sequence: Synthetic peptide
  Seed: PRMCSLMQGSTLPR
PRMFSLLQGSTLPR

SEQ ID NO: 108151 - protein, 14 aa, Artificial Sequence
  Description of Artificial Sequence: Synthetic peptide
  Seed: PRMCSLMQGSTLPR
PRMFSLLQGSTMPR

SEQ ID NO: 108152 - protein, 14 aa, Artificial Sequence
  Description of Artificial Sequence: Synthetic peptide
  Seed: PRMCSLMQGSTLPR
PRMFSLLQGSTNPR

SEQ ID NO: 108153 - protein, 14 aa, Artificial Sequence
  Description of Artificial Sequence: Synthetic peptide
  Seed: PRMCSLMQGSTLPR
PRMFSLLQGSTSPR

SEQ ID NO: 108154 - protein, 14 aa, Artificial Sequence
  Description of Artificial Sequence: Synthetic peptide
  Seed: PRMCSLMQGSTLPR
PRMFSLLQGSTTPR

SEQ ID NO: 108155 - protein, 14 aa, Artificial Sequence
  Description of Artificial Sequence: Synthetic peptide
  Seed: PRMCSLMQGSTLPR
PRMFSLLQGSTVPR

SEQ ID NO: 108156 - protein, 14 aa, Artificial Sequence
  Description of Artificial Sequence: Synthetic peptide
  Seed: PRMCSLMQGSTLPR
PRMFSLLQISTAPR

SEQ ID NO: 108157 - protein, 14 aa, Artificial Sequence
  Description of Artificial Sequence: Synthetic peptide
  Seed: PRMCSLMQGSTLPR
PRMFSLLQISTGPR

SEQ ID NO: 108158 - protein, 14 aa, Artificial Sequence
  Description of Artificial Sequence: Synthetic peptide
  Seed: PRMCSLMQGSTLPR
PRMFSLLQISTHPR

SEQ ID NO: 108159 - protein, 14 aa, Artificial Sequence
  Description of Artificial Sequence: Synthetic peptide
  Seed: PRMCSLMQGSTLPR
PRMFSLLQISTIPR

SEQ ID NO: 108160 - protein, 14 aa, Artificial Sequence
  Description of Artificial Sequence: Synthetic peptide
  Seed: PRMCSLMQGSTLPR
PRMFSLLQISTLPR

SEQ ID NO: 108161 - protein, 14 aa, Artificial Sequence
  Description of Artificial Sequence: Synthetic peptide
  Seed: PRMCSLMQGSTLPR
PRMFSLLQISTMPR

SEQ ID NO: 108162 - protein, 14 aa, Artificial Sequence
  Description of Artificial Sequence: Synthetic peptide
  Seed: PRMCSLMQGSTLPR
PRMFSLLQISTNPR

SEQ ID NO: 108163 - protein, 14 aa, Artificial Sequence
  Description of Artificial Sequence: Synthetic peptide
  Seed: PRMCSLMQGSTLPR
PRMFSLLQISTSPR

SEQ ID NO: 108164 - protein, 14 aa, Artificial Sequence
  Description of Artificial Sequence: Synthetic peptide
  Seed: PRMCSLMQGSTLPR
PRMFSLLQISTTPR

SEQ ID NO: 108165 - protein, 14 aa, Artificial Sequence
  Description of Artificial Sequence: Synthetic peptide
  Seed: PRMCSLMQGSTLPR
PRMFSLLQISTVPR

SEQ ID NO: 108166 - protein, 14 aa, Artificial Sequence
  Description of Artificial Sequence: Synthetic peptide
  Seed: PRMCSLMQGSTLPR
PRMFSLLQLSTAPR

SEQ ID NO: 108167 - protein, 14 aa, Artificial Sequence
  Description of Artificial Sequence: Synthetic peptide
  Seed: PRMCSLMQGSTLPR
PRMFSLLQLSTNPR

SEQ ID NO: 108168 - protein, 14 aa, Artificial Sequence
  Description of Artificial Sequence: Synthetic peptide
  Seed: PRMCSLMQGSTLPR
PRMFSLLQLSTSPR

SEQ ID NO: 108169 - protein, 14 aa, Artificial Sequence
  Description of Artificial Sequence: Synthetic peptide
  Seed: PRMCSLMQGSTLPR
PRMFSLLQMSTAPR

SEQ ID NO: 108170 - protein, 14 aa, Artificial Sequence
  Description of Artificial Sequence: Synthetic peptide
  Seed: PRMCSLMQGSTLPR
PRMFSLLQNSTAPR

SEQ ID NO: 108171 - protein, 14 aa, Artificial Sequence
  Description of Artificial Sequence: Synthetic peptide
  Seed: PRMCSLMQGSTLPR
PRMFSLLQNSTIPR

SEQ ID NO: 108172 - protein, 14 aa, Artificial Sequence
  Description of Artificial Sequence: Synthetic peptide
  Seed: PRMCSLMQGSTLPR
PRMFSLLQNSTLPR

SEQ ID NO: 108173 - protein, 14 aa, Artificial Sequence
  Description of Artificial Sequence: Synthetic peptide
  Seed: PRMCSLMQGSTLPR
PRMFSLLQNSTMPR

SEQ ID NO: 108174 - protein, 14 aa, Artificial Sequence
  Description of Artificial Sequence: Synthetic peptide
  Seed: PRMCSLMQGSTLPR
PRMFSLLQNSTNPR

SEQ ID NO: 108175 - protein, 14 aa, Artificial Sequence
  Description of Artificial Sequence: Synthetic peptide
  Seed: PRMCSLMQGSTLPR
PRMFSLLQNSTSPR

SEQ ID NO: 108176 - protein, 14 aa, Artificial Sequence
  Description of Artificial Sequence: Synthetic peptide
  Seed: PRMCSLMQGSTLPR
PRMFSLLQNSTTPR

SEQ ID NO: 108177 - protein, 14 aa, Artificial Sequence
  Description of Artificial Sequence: Synthetic peptide
  Seed: PRMCSLMQGSTLPR
PRMFSLLQNSTVPR

SEQ ID NO: 108178 - protein, 14 aa, Artificial Sequence
  Description of Artificial Sequence: Synthetic peptide
  Seed: PRMCSLMQGSTLPR
PRMFSLLQPSTAPR

SEQ ID NO: 108179 - protein, 14 aa, Artificial Sequence
  Description of Artificial Sequence: Synthetic peptide
  Seed: PRMCSLMQGSTLPR
PRMFSLLQPSTGPR

SEQ ID NO: 108180 - protein, 14 aa, Artificial Sequence
  Description of Artificial Sequence: Synthetic peptide
  Seed: PRMCSLMQGSTLPR
PRMFSLLQPSTHPR

SEQ ID NO: 108181 - protein, 14 aa, Artificial Sequence
  Description of Artificial Sequence: Synthetic peptide
  Seed: PRMCSLMQGSTLPR
PRMFSLLQPSTIPR

SEQ ID NO: 108182 - protein, 14 aa, Artificial Sequence
  Description of Artificial Sequence: Synthetic peptide
  Seed: PRMCSLMQGSTLPR
PRMFSLLQPSTLPR

SEQ ID NO: 108183 - protein, 14 aa, Artificial Sequence
  Description of Artificial Sequence: Synthetic peptide
  Seed: PRMCSLMQGSTLPR
PRMFSLLQPSTMPR

SEQ ID NO: 108184 - protein, 14 aa, Artificial Sequence
  Description of Artificial Sequence: Synthetic peptide
  Seed: PRMCSLMQGSTLPR
PRMFSLLQPSTNPR

SEQ ID NO: 108185 - protein, 14 aa, Artificial Sequence
  Description of Artificial Sequence: Synthetic peptide
  Seed: PRMCSLMQGSTLPR
PRMFSLLQPSTPPR

SEQ ID NO: 108186 - protein, 14 aa, Artificial Sequence
  Description of Artificial Sequence: Synthetic peptide
  Seed: PRMCSLMQGSTLPR
PRMFSLLQPSTQPR

SEQ ID NO: 108187 - protein, 14 aa, Artificial Sequence
  Description of Artificial Sequence: Synthetic peptide
  Seed: PRMCSLMQGSTLPR
PRMFSLLQPSTSPR

SEQ ID NO: 108188 - protein, 14 aa, Artificial Sequence
  Description of Artificial Sequence: Synthetic peptide
  Seed: PRMCSLMQGSTLPR
PRMFSLLQPSTTPR

SEQ ID NO: 108189 - protein, 14 aa, Artificial Sequence
  Description of Artificial Sequence: Synthetic peptide
  Seed: PRMCSLMQGSTLPR
PRMFSLLQPSTVPR

SEQ ID NO: 108190 - protein, 14 aa, Artificial Sequence
  Description of Artificial Sequence: Synthetic peptide
  Seed: PRMCSLMQGSTLPR
PRMFSLLQSSTAPR

SEQ ID NO: 108191 - protein, 14 aa, Artificial Sequence
  Description of Artificial Sequence: Synthetic peptide
  Seed: PRMCSLMQGSTLPR
PRMFSLLQSSTCPR

SEQ ID NO: 108192 - protein, 14 aa, Artificial Sequence
  Description of Artificial Sequence: Synthetic peptide
  Seed: PRMCSLMQGSTLPR
PRMFSLLQSSTFPR

SEQ ID NO: 108193 - protein, 14 aa, Artificial Sequence
  Description of Artificial Sequence: Synthetic peptide
  Seed: PRMCSLMQGSTLPR
PRMFSLLQSSTGPR

SEQ ID NO: 108194 - protein, 14 aa, Artificial Sequence
  Description of Artificial Sequence: Synthetic peptide
  Seed: PRMCSLMQGSTLPR
PRMFSLLQSSTHPR

SEQ ID NO: 108195 - protein, 14 aa, Artificial Sequence
  Description of Artificial Sequence: Synthetic peptide
  Seed: PRMCSLMQGSTLPR
PRMFSLLQSSTIPR

SEQ ID NO: 108196 - protein, 14 aa, Artificial Sequence
  Description of Artificial Sequence: Synthetic peptide
  Seed: PRMCSLMQGSTLPR
PRMFSLLQSSTLPR

SEQ ID NO: 108197 - protein, 14 aa, Artificial Sequence
  Description of Artificial Sequence: Synthetic peptide
  Seed: PRMCSLMQGSTLPR
PRMFSLLQSSTMPR

SEQ ID NO: 108198 - protein, 14 aa, Artificial Sequence
  Description of Artificial Sequence: Synthetic peptide
  Seed: PRMCSLMQGSTLPR
PRMFSLLQSSTNPR

SEQ ID NO: 108199 - protein, 14 aa, Artificial Sequence
  Description of Artificial Sequence: Synthetic peptide
  Seed: PRMCSLMQGSTLPR
PRMFSLLQSSTSPR

SEQ ID NO: 108200 - protein, 14 aa, Artificial Sequence
  Description of Artificial Sequence: Synthetic peptide
  Seed: PRMCSLMQGSTLPR
PRMFSLLQSSTTPR

SEQ ID NO: 108201 - protein, 14 aa, Artificial Sequence
  Description of Artificial Sequence: Synthetic peptide
  Seed: PRMCSLMQGSTLPR
PRMFSLLQSSTVPR

SEQ ID NO: 108202 - protein, 14 aa, Artificial Sequence
  Description of Artificial Sequence: Synthetic peptide
  Seed: PRMCSLMQGSTLPR
PRMFSLLQTSTAPR

SEQ ID NO: 108203 - protein, 14 aa, Artificial Sequence
  Description of Artificial Sequence: Synthetic peptide
  Seed: PRMCSLMQGSTLPR
PRMFSLLQTSTGPR

SEQ ID NO: 108204 - protein, 14 aa, Artificial Sequence
  Description of Artificial Sequence: Synthetic peptide
  Seed: PRMCSLMQGSTLPR
PRMFSLLQTSTHPR

SEQ ID NO: 108205 - protein, 14 aa, Artificial Sequence
  Description of Artificial Sequence: Synthetic peptide
  Seed: PRMCSLMQGSTLPR
PRMFSLLQTSTIPR

SEQ ID NO: 108206 - protein, 14 aa, Artificial Sequence
  Description of Artificial Sequence: Synthetic peptide
  Seed: PRMCSLMQGSTLPR
PRMFSLLQTSTLPR

SEQ ID NO: 108207 - protein, 14 aa, Artificial Sequence
  Description of Artificial Sequence: Synthetic peptide
  Seed: PRMCSLMQGSTLPR
PRMFSLLQTSTMPR

SEQ ID NO: 108208 - protein, 14 aa, Artificial Sequence
  Description of Artificial Sequence: Synthetic peptide
  Seed: PRMCSLMQGSTLPR
PRMFSLLQTSTNPR

SEQ ID NO: 108209 - protein, 14 aa, Artificial Sequence
  Description of Artificial Sequence: Synthetic peptide
  Seed: PRMCSLMQGSTLPR
PRMFSLLQTSTSPR

SEQ ID NO: 108210 - protein, 14 aa, Artificial Sequence
  Description of Artificial Sequence: Synthetic peptide
  Seed: PRMCSLMQGSTLPR
PRMFSLLQTSTTPR

SEQ ID NO: 108211 - protein, 14 aa, Artificial Sequence
  Description of Artificial Sequence: Synthetic peptide
  Seed: PRMCSLMQGSTLPR
PRMFSLLQTSTVPR

SEQ ID NO: 108212 - protein, 14 aa, Artificial Sequence
  Description of Artificial Sequence: Synthetic peptide
  Seed: PRMCSLMQGSTLPR
PRMFSLLQVSTAPR

SEQ ID NO: 108213 - protein, 14 aa, Artificial Sequence
  Description of Artificial Sequence: Synthetic peptide
  Seed: PRMCSLMQGSTLPR
PRMFSLLQVSTGPR

SEQ ID NO: 108214 - protein, 14 aa, Artificial Sequence
  Description of Artificial Sequence: Synthetic peptide
  Seed: PRMCSLMQGSTLPR
PRMFSLLQVSTHPR

SEQ ID NO: 108215 - protein, 14 aa, Artificial Sequence
  Description of Artificial Sequence: Synthetic peptide
  Seed: PRMCSLMQGSTLPR
PRMFSLLQVSTIPR

SEQ ID NO: 108216 - protein, 14 aa, Artificial Sequence
  Description of Artificial Sequence: Synthetic peptide
  Seed: PRMCSLMQGSTLPR
PRMFSLLQVSTLPR

SEQ ID NO: 108217 - protein, 14 aa, Artificial Sequence
  Description of Artificial Sequence: Synthetic peptide
  Seed: PRMCSLMQGSTLPR
PRMFSLLQVSTMPR

SEQ ID NO: 108218 - protein, 14 aa, Artificial Sequence
  Description of Artificial Sequence: Synthetic peptide
  Seed: PRMCSLMQGSTLPR
PRMFSLLQVSTNPR

SEQ ID NO: 108219 - protein, 14 aa, Artificial Sequence
  Description of Artificial Sequence: Synthetic peptide
  Seed: PRMCSLMQGSTLPR
PRMFSLLQVSTSPR

SEQ ID NO: 108220 - protein, 14 aa, Artificial Sequence
  Description of Artificial Sequence: Synthetic peptide
  Seed: PRMCSLMQGSTLPR
PRMFSLLQVSTTPR

SEQ ID NO: 108221 - protein, 14 aa, Artificial Sequence
  Description of Artificial Sequence: Synthetic peptide
  Seed: PRMCSLMQGSTLPR
PRMFSLLQVSTVPR

SEQ ID NO: 108222 - protein, 14 aa, Artificial Sequence
  Description of Artificial Sequence: Synthetic peptide
  Seed: PRMCSLMQGSTLPR
PRMFSLMQASTAPR

SEQ ID NO: 108223 - protein, 14 aa, Artificial Sequence
  Description of Artificial Sequence: Synthetic peptide
  Seed: PRMCSLMQGSTLPR
PRMFSLMQASTCPR

SEQ ID NO: 108224 - protein, 14 aa, Artificial Sequence
  Description of Artificial Sequence: Synthetic peptide
  Seed: PRMCSLMQGSTLPR
PRMFSLMQASTFPR

SEQ ID NO: 108225 - protein, 14 aa, Artificial Sequence
  Description of Artificial Sequence: Synthetic peptide
  Seed: PRMCSLMQGSTLPR
PRMFSLMQASTGPR

SEQ ID NO: 108226 - protein, 14 aa, Artificial Sequence
  Description of Artificial Sequence: Synthetic peptide
  Seed: PRMCSLMQGSTLPR
PRMFSLMQASTHPR

SEQ ID NO: 108227 - protein, 14 aa, Artificial Sequence
  Description of Artificial Sequence: Synthetic peptide
  Seed: PRMCSLMQGSTLPR
PRMFSLMQASTIPR

SEQ ID NO: 108228 - protein, 14 aa, Artificial Sequence
  Description of Artificial Sequence: Synthetic peptide
  Seed: PRMCSLMQGSTLPR
PRMFSLMQASTLPR

SEQ ID NO: 108229 - protein, 14 aa, Artificial Sequence
  Description of Artificial Sequence: Synthetic peptide
  Seed: PRMCSLMQGSTLPR
PRMFSLMQASTMPR

SEQ ID NO: 108230 - protein, 14 aa, Artificial Sequence
  Description of Artificial Sequence: Synthetic peptide
  Seed: PRMCSLMQGSTLPR
PRMFSLMQASTNPR

SEQ ID NO: 108231 - protein, 14 aa, Artificial Sequence
  Description of Artificial Sequence: Synthetic peptide
  Seed: PRMCSLMQGSTLPR
PRMFSLMQASTPPR

SEQ ID NO: 108232 - protein, 14 aa, Artificial Sequence
  Description of Artificial Sequence: Synthetic peptide
  Seed: PRMCSLMQGSTLPR
PRMFSLMQASTQPR

SEQ ID NO: 108233 - protein, 14 aa, Artificial Sequence
  Description of Artificial Sequence: Synthetic peptide
  Seed: PRMCSLMQGSTLPR
PRMFSLMQASTSPR

SEQ ID NO: 108234 - protein, 14 aa, Artificial Sequence
  Description of Artificial Sequence: Synthetic peptide
  Seed: PRMCSLMQGSTLPR
PRMFSLMQASTTPR

SEQ ID NO: 108235 - protein, 14 aa, Artificial Sequence
  Description of Artificial Sequence: Synthetic peptide
  Seed: PRMCSLMQGSTLPR
PRMFSLMQASTVPR

SEQ ID NO: 108236 - protein, 14 aa, Artificial Sequence
  Description of Artificial Sequence: Synthetic peptide
  Seed: PRMCSLMQGSTLPR
PRMFSLMQGSTAPR

SEQ ID NO: 108237 - protein, 14 aa, Artificial Sequence
  Description of Artificial Sequence: Synthetic peptide
  Seed: PRMCSLMQGSTLPR
PRMFSLMQGSTCPR

SEQ ID NO: 108238 - protein, 14 aa, Artificial Sequence
  Description of Artificial Sequence: Synthetic peptide
  Seed: PRMCSLMQGSTLPR
PRMFSLMQGSTFPR

SEQ ID NO: 108239 - protein, 14 aa, Artificial Sequence
  Description of Artificial Sequence: Synthetic peptide
  Seed: PRMCSLMQGSTLPR
PRMFSLMQGSTGPR

SEQ ID NO: 108240 - protein, 14 aa, Artificial Sequence
  Description of Artificial Sequence: Synthetic peptide
  Seed: PRMCSLMQGSTLPR
PRMFSLMQGSTIPR

SEQ ID NO: 108241 - protein, 14 aa, Artificial Sequence
  Description of Artificial Sequence: Synthetic peptide
  Seed: PRMCSLMQGSTLPR
PRMFSLMQGSTLPR

SEQ ID NO: 108242 - protein, 14 aa, Artificial Sequence
  Description of Artificial Sequence: Synthetic peptide
  Seed: PRMCSLMQGSTLPR
PRMFSLMQGSTMPR

SEQ ID NO: 108243 - protein, 14 aa, Artificial Sequence
  Description of Artificial Sequence: Synthetic peptide
  Seed: PRMCSLMQGSTLPR
PRMFSLMQGSTNPR

SEQ ID NO: 108244 - protein, 14 aa, Artificial Sequence
  Description of Artificial Sequence: Synthetic peptide
  Seed: PRMCSLMQGSTLPR
PRMFSLMQGSTSPR

SEQ ID NO: 108245 - protein, 14 aa, Artificial Sequence
  Description of Artificial Sequence: Synthetic peptide
  Seed: PRMCSLMQGSTLPR
PRMFSLMQGSTTPR

SEQ ID NO: 108246 - protein, 14 aa, Artificial Sequence
  Description of Artificial Sequence: Synthetic peptide
  Seed: PRMCSLMQGSTLPR
PRMFSLMQGSTVPR

SEQ ID NO: 108247 - protein, 14 aa, Artificial Sequence
  Description of Artificial Sequence: Synthetic peptide
  Seed: PRMCSLMQGSTLPR
PRMFSLMQISTAPR

SEQ ID NO: 108248 - protein, 14 aa, Artificial Sequence
  Description of Artificial Sequence: Synthetic peptide
  Seed: PRMCSLMQGSTLPR
PRMFSLMQISTGPR

SEQ ID NO: 108249 - protein, 14 aa, Artificial Sequence
  Description of Artificial Sequence: Synthetic peptide
  Seed: PRMCSLMQGSTLPR
PRMFSLMQISTHPR

SEQ ID NO: 108250 - protein, 14 aa, Artificial Sequence
  Description of Artificial Sequence: Synthetic peptide
  Seed: PRMCSLMQGSTLPR
PRMFSLMQISTIPR

SEQ ID NO: 108251 - protein, 14 aa, Artificial Sequence
  Description of Artificial Sequence: Synthetic peptide
  Seed: PRMCSLMQGSTLPR
PRMFSLMQISTLPR

SEQ ID NO: 108252 - protein, 14 aa, Artificial Sequence
  Description of Artificial Sequence: Synthetic peptide
  Seed: PRMCSLMQGSTLPR
PRMFSLMQISTMPR

SEQ ID NO: 108253 - protein, 14 aa, Artificial Sequence
  Description of Artificial Sequence: Synthetic peptide
  Seed: PRMCSLMQGSTLPR
PRMFSLMQISTNPR

SEQ ID NO: 108254 - protein, 14 aa, Artificial Sequence
  Description of Artificial Sequence: Synthetic peptide
  Seed: PRMCSLMQGSTLPR
PRMFSLMQISTSPR

SEQ ID NO: 108255 - protein, 14 aa, Artificial Sequence
  Description of Artificial Sequence: Synthetic peptide
  Seed: PRMCSLMQGSTLPR
PRMFSLMQISTTPR

SEQ ID NO: 108256 - protein, 14 aa, Artificial Sequence
  Description of Artificial Sequence: Synthetic peptide
  Seed: PRMCSLMQGSTLPR
PRMFSLMQISTVPR

SEQ ID NO: 108257 - protein, 14 aa, Artificial Sequence
  Description of Artificial Sequence: Synthetic peptide
  Seed: PRMCSLMQGSTLPR
PRMFSLMQLSTAPR

SEQ ID NO: 108258 - protein, 14 aa, Artificial Sequence
  Description of Artificial Sequence: Synthetic peptide
  Seed: PRMCSLMQGSTLPR
PRMFSLMQLSTNPR

SEQ ID NO: 108259 - protein, 14 aa, Artificial Sequence
  Description of Artificial Sequence: Synthetic peptide
  Seed: PRMCSLMQGSTLPR
PRMFSLMQLSTSPR

SEQ ID NO: 108260 - protein, 14 aa, Artificial Sequence
  Description of Artificial Sequence: Synthetic peptide
  Seed: PRMCSLMQGSTLPR
PRMFSLMQLSTTPR

SEQ ID NO: 108261 - protein, 14 aa, Artificial Sequence
  Description of Artificial Sequence: Synthetic peptide
  Seed: PRMCSLMQGSTLPR
PRMFSLMQMSTAPR

SEQ ID NO: 108262 - protein, 14 aa, Artificial Sequence
  Description of Artificial Sequence: Synthetic peptide
  Seed: PRMCSLMQGSTLPR
PRMFSLMQMSTNPR

SEQ ID NO: 108263 - protein, 14 aa, Artificial Sequence
  Description of Artificial Sequence: Synthetic peptide
  Seed: PRMCSLMQGSTLPR
PRMFSLMQMSTSPR

SEQ ID NO: 108264 - protein, 14 aa, Artificial Sequence
  Description of Artificial Sequence: Synthetic peptide
  Seed: PRMCSLMQGSTLPR
PRMFSLMQNSTAPR

SEQ ID NO: 108265 - protein, 14 aa, Artificial Sequence
  Description of Artificial Sequence: Synthetic peptide
  Seed: PRMCSLMQGSTLPR
PRMFSLMQNSTIPR

SEQ ID NO: 108266 - protein, 14 aa, Artificial Sequence
  Description of Artificial Sequence: Synthetic peptide
  Seed: PRMCSLMQGSTLPR
PRMFSLMQNSTLPR

SEQ ID NO: 108267 - protein, 14 aa, Artificial Sequence
  Description of Artificial Sequence: Synthetic peptide
  Seed: PRMCSLMQGSTLPR
PRMFSLMQNSTMPR

SEQ ID NO: 108268 - protein, 14 aa, Artificial Sequence
  Description of Artificial Sequence: Synthetic peptide
  Seed: PRMCSLMQGSTLPR
PRMFSLMQNSTNPR

SEQ ID NO: 108269 - protein, 14 aa, Artificial Sequence
  Description of Artificial Sequence: Synthetic peptide
  Seed: PRMCSLMQGSTLPR
PRMFSLMQNSTSPR

SEQ ID NO: 108270 - protein, 14 aa, Artificial Sequence
  Description of Artificial Sequence: Synthetic peptide
  Seed: PRMCSLMQGSTLPR
PRMFSLMQNSTTPR

SEQ ID NO: 108271 - protein, 14 aa, Artificial Sequence
  Description of Artificial Sequence: Synthetic peptide
  Seed: PRMCSLMQGSTLPR
PRMFSLMQNSTVPR

SEQ ID NO: 108272 - protein, 14 aa, Artificial Sequence
  Description of Artificial Sequence: Synthetic peptide
  Seed: PRMCSLMQGSTLPR
PRMFSLMQPSTAPR

SEQ ID NO: 108273 - protein, 14 aa, Artificial Sequence
  Description of Artificial Sequence: Synthetic peptide
  Seed: PRMCSLMQGSTLPR
PRMFSLMQPSTGPR

SEQ ID NO: 108274 - protein, 14 aa, Artificial Sequence
  Description of Artificial Sequence: Synthetic peptide
  Seed: PRMCSLMQGSTLPR
PRMFSLMQPSTHPR

SEQ ID NO: 108275 - protein, 14 aa, Artificial Sequence
  Description of Artificial Sequence: Synthetic peptide
  Seed: PRMCSLMQGSTLPR
PRMFSLMQPSTIPR

SEQ ID NO: 108276 - protein, 14 aa, Artificial Sequence
  Description of Artificial Sequence: Synthetic peptide
  Seed: PRMCSLMQGSTLPR
PRMFSLMQPSTLPR

SEQ ID NO: 108277 - protein, 14 aa, Artificial Sequence
  Description of Artificial Sequence: Synthetic peptide
  Seed: PRMCSLMQGSTLPR
PRMFSLMQPSTMPR

SEQ ID NO: 108278 - protein, 14 aa, Artificial Sequence
  Description of Artificial Sequence: Synthetic peptide
  Seed: PRMCSLMQGSTLPR
PRMFSLMQPSTNPR

SEQ ID NO: 108279 - protein, 14 aa, Artificial Sequence
  Description of Artificial Sequence: Synthetic peptide
  Seed: PRMCSLMQGSTLPR
PRMFSLMQPSTPPR

SEQ ID NO: 108280 - protein, 14 aa, Artificial Sequence
  Description of Artificial Sequence: Synthetic peptide
  Seed: PRMCSLMQGSTLPR
PRMFSLMQPSTQPR

SEQ ID NO: 108281 - protein, 14 aa, Artificial Sequence
  Description of Artificial Sequence: Synthetic peptide
  Seed: PRMCSLMQGSTLPR
PRMFSLMQPSTSPR

SEQ ID NO: 108282 - protein, 14 aa, Artificial Sequence
  Description of Artificial Sequence: Synthetic peptide
  Seed: PRMCSLMQGSTLPR
PRMFSLMQPSTTPR

SEQ ID NO: 108283 - protein, 14 aa, Artificial Sequence
  Description of Artificial Sequence: Synthetic peptide
  Seed: PRMCSLMQGSTLPR
PRMFSLMQPSTVPR

SEQ ID NO: 108284 - protein, 14 aa, Artificial Sequence
  Description of Artificial Sequence: Synthetic peptide
  Seed: PRMCSLMQGSTLPR
PRMFSLMQSSTAPR

SEQ ID NO: 108285 - protein, 14 aa, Artificial Sequence
  Description of Artificial Sequence: Synthetic peptide
  Seed: PRMCSLMQGSTLPR
PRMFSLMQSSTCPR

SEQ ID NO: 108286 - protein, 14 aa, Artificial Sequence
  Description of Artificial Sequence: Synthetic peptide
  Seed: PRMCSLMQGSTLPR
PRMFSLMQSSTFPR

SEQ ID NO: 108287 - protein, 14 aa, Artificial Sequence
  Description of Artificial Sequence: Synthetic peptide
  Seed: PRMCSLMQGSTLPR
PRMFSLMQSSTGPR

SEQ ID NO: 108288 - protein, 14 aa, Artificial Sequence
  Description of Artificial Sequence: Synthetic peptide
  Seed: PRMCSLMQGSTLPR
PRMFSLMQSSTHPR

SEQ ID NO: 108289 - protein, 14 aa, Artificial Sequence
  Description of Artificial Sequence: Synthetic peptide
  Seed: PRMCSLMQGSTLPR
PRMFSLMQSSTIPR

SEQ ID NO: 108290 - protein, 14 aa, Artificial Sequence
  Description of Artificial Sequence: Synthetic peptide
  Seed: PRMCSLMQGSTLPR
PRMFSLMQSSTLPR

SEQ ID NO: 108291 - protein, 14 aa, Artificial Sequence
  Description of Artificial Sequence: Synthetic peptide
  Seed: PRMCSLMQGSTLPR
PRMFSLMQSSTMPR

SEQ ID NO: 108292 - protein, 14 aa, Artificial Sequence
  Description of Artificial Sequence: Synthetic peptide
  Seed: PRMCSLMQGSTLPR
PRMFSLMQSSTNPR

SEQ ID NO: 108293 - protein, 14 aa, Artificial Sequence
  Description of Artificial Sequence: Synthetic peptide
  Seed: PRMCSLMQGSTLPR
PRMFSLMQSSTQPR

SEQ ID NO: 108294 - protein, 14 aa, Artificial Sequence
  Description of Artificial Sequence: Synthetic peptide
  Seed: PRMCSLMQGSTLPR
PRMFSLMQSSTSPR

SEQ ID NO: 108295 - protein, 14 aa, Artificial Sequence
  Description of Artificial Sequence: Synthetic peptide
  Seed: PRMCSLMQGSTLPR
PRMFSLMQSSTTPR

SEQ ID NO: 108296 - protein, 14 aa, Artificial Sequence
  Description of Artificial Sequence: Synthetic peptide
  Seed: PRMCSLMQGSTLPR
PRMFSLMQSSTVPR

SEQ ID NO: 108297 - protein, 14 aa, Artificial Sequence
  Description of Artificial Sequence: Synthetic peptide
  Seed: PRMCSLMQGSTLPR
PRMFSLMQTSTAPR

SEQ ID NO: 108298 - protein, 14 aa, Artificial Sequence
  Description of Artificial Sequence: Synthetic peptide
  Seed: PRMCSLMQGSTLPR
PRMFSLMQTSTHPR

SEQ ID NO: 108299 - protein, 14 aa, Artificial Sequence
  Description of Artificial Sequence: Synthetic peptide
  Seed: PRMCSLMQGSTLPR
PRMFSLMQTSTIPR

SEQ ID NO: 108300 - protein, 14 aa, Artificial Sequence
  Description of Artificial Sequence: Synthetic peptide
  Seed: PRMCSLMQGSTLPR
PRMFSLMQTSTLPR

SEQ ID NO: 108301 - protein, 14 aa, Artificial Sequence
  Description of Artificial Sequence: Synthetic peptide
  Seed: PRMCSLMQGSTLPR
PRMFSLMQTSTMPR

SEQ ID NO: 108302 - protein, 14 aa, Artificial Sequence
  Description of Artificial Sequence: Synthetic peptide
  Seed: PRMCSLMQGSTLPR
PRMFSLMQTSTNPR

SEQ ID NO: 108303 - protein, 14 aa, Artificial Sequence
  Description of Artificial Sequence: Synthetic peptide
  Seed: PRMCSLMQGSTLPR
PRMFSLMQTSTSPR

SEQ ID NO: 108304 - protein, 14 aa, Artificial Sequence
  Description of Artificial Sequence: Synthetic peptide
  Seed: PRMCSLMQGSTLPR
PRMFSLMQTSTTPR

SEQ ID NO: 108305 - protein, 14 aa, Artificial Sequence
  Description of Artificial Sequence: Synthetic peptide
  Seed: PRMCSLMQGSTLPR
PRMFSLMQTSTVPR

SEQ ID NO: 108306 - protein, 14 aa, Artificial Sequence
  Description of Artificial Sequence: Synthetic peptide
  Seed: PRMCSLMQGSTLPR
PRMFSLMQVSTAPR

SEQ ID NO: 108307 - protein, 14 aa, Artificial Sequence
  Description of Artificial Sequence: Synthetic peptide
  Seed: PRMCSLMQGSTLPR
PRMFSLMQVSTGPR

SEQ ID NO: 108308 - protein, 14 aa, Artificial Sequence
  Description of Artificial Sequence: Synthetic peptide
  Seed: PRMCSLMQGSTLPR
PRMFSLMQVSTHPR

SEQ ID NO: 108309 - protein, 14 aa, Artificial Sequence
  Description of Artificial Sequence: Synthetic peptide
  Seed: PRMCSLMQGSTLPR
PRMFSLMQVSTIPR

SEQ ID NO: 108310 - protein, 14 aa, Artificial Sequence
  Description of Artificial Sequence: Synthetic peptide
  Seed: PRMCSLMQGSTLPR
PRMFSLMQVSTLPR

SEQ ID NO: 108311 - protein, 14 aa, Artificial Sequence
  Description of Artificial Sequence: Synthetic peptide
  Seed: PRMCSLMQGSTLPR
PRMFSLMQVSTMPR

SEQ ID NO: 108312 - protein, 14 aa, Artificial Sequence
  Description of Artificial Sequence: Synthetic peptide
  Seed: PRMCSLMQGSTLPR
PRMFSLMQVSTNPR

SEQ ID NO: 108313 - protein, 14 aa, Artificial Sequence
  Description of Artificial Sequence: Synthetic peptide
  Seed: PRMCSLMQGSTLPR
PRMFSLMQVSTQPR

SEQ ID NO: 108314 - protein, 14 aa, Artificial Sequence
  Description of Artificial Sequence: Synthetic peptide
  Seed: PRMCSLMQGSTLPR
PRMFSLMQVSTSPR

SEQ ID NO: 108315 - protein, 14 aa, Artificial Sequence
  Description of Artificial Sequence: Synthetic peptide
  Seed: PRMCSLMQGSTLPR
PRMFSLMQVSTTPR

SEQ ID NO: 108316 - protein, 14 aa, Artificial Sequence
  Description of Artificial Sequence: Synthetic peptide
  Seed: PRMCSLMQGSTLPR
PRMFSLMQVSTVPR

SEQ ID NO: 108317 - protein, 14 aa, Artificial Sequence
  Description of Artificial Sequence: Synthetic peptide
  Seed: PRMCSLMQGSTLPR
PRMFSLNQASTLPR

SEQ ID NO: 108318 - protein, 14 aa, Artificial Sequence
  Description of Artificial Sequence: Synthetic peptide
  Seed: PRMCSLMQGSTLPR
PRMFSLQQASTAPR

SEQ ID NO: 108319 - protein, 14 aa, Artificial Sequence
  Description of Artificial Sequence: Synthetic peptide
  Seed: PRMCSLMQGSTLPR
PRMFSLQQASTIPR

SEQ ID NO: 108320 - protein, 14 aa, Artificial Sequence
  Description of Artificial Sequence: Synthetic peptide
  Seed: PRMCSLMQGSTLPR
PRMFSLQQASTLPR

SEQ ID NO: 108321 - protein, 14 aa, Artificial Sequence
  Description of Artificial Sequence: Synthetic peptide
  Seed: PRMCSLMQGSTLPR
PRMFSLQQASTMPR

SEQ ID NO: 108322 - protein, 14 aa, Artificial Sequence
  Description of Artificial Sequence: Synthetic peptide
  Seed: PRMCSLMQGSTLPR
PRMFSLQQASTTPR

SEQ ID NO: 108323 - protein, 14 aa, Artificial Sequence
  Description of Artificial Sequence: Synthetic peptide
  Seed: PRMCSLMQGSTLPR
PRMFSLQQASTVPR

SEQ ID NO: 108324 - protein, 14 aa, Artificial Sequence
  Description of Artificial Sequence: Synthetic peptide
  Seed: PRMCSLMQGSTLPR
PRMFSLQQGSTAPR

SEQ ID NO: 108325 - protein, 14 aa, Artificial Sequence
  Description of Artificial Sequence: Synthetic peptide
  Seed: PRMCSLMQGSTLPR
PRMFSLQQGSTIPR

SEQ ID NO: 108326 - protein, 14 aa, Artificial Sequence
  Description of Artificial Sequence: Synthetic peptide
  Seed: PRMCSLMQGSTLPR
PRMFSLQQGSTLPR

SEQ ID NO: 108327 - protein, 14 aa, Artificial Sequence
  Description of Artificial Sequence: Synthetic peptide
  Seed: PRMCSLMQGSTLPR
PRMFSLQQGSTMPR

SEQ ID NO: 108328 - protein, 14 aa, Artificial Sequence
  Description of Artificial Sequence: Synthetic peptide
  Seed: PRMCSLMQGSTLPR
PRMFSLQQGSTVPR

SEQ ID NO: 108329 - protein, 14 aa, Artificial Sequence
  Description of Artificial Sequence: Synthetic peptide
  Seed: PRMCSLMQGSTLPR
PRMFSLQQNSTLPR

SEQ ID NO: 108330 - protein, 14 aa, Artificial Sequence
  Description of Artificial Sequence: Synthetic peptide
  Seed: PRMCSLMQGSTLPR
PRMFSLQQPSTIPR

SEQ ID NO: 108331 - protein, 14 aa, Artificial Sequence
  Description of Artificial Sequence: Synthetic peptide
  Seed: PRMCSLMQGSTLPR
PRMFSLQQPSTLPR

SEQ ID NO: 108332 - protein, 14 aa, Artificial Sequence
  Description of Artificial Sequence: Synthetic peptide
  Seed: PRMCSLMQGSTLPR
PRMFSLQQPSTVPR

SEQ ID NO: 108333 - protein, 14 aa, Artificial Sequence
  Description of Artificial Sequence: Synthetic peptide
  Seed: PRMCSLMQGSTLPR
PRMFSLQQSSTAPR

SEQ ID NO: 108334 - protein, 14 aa, Artificial Sequence
  Description of Artificial Sequence: Synthetic peptide
  Seed: PRMCSLMQGSTLPR
PRMFSLQQSSTIPR

SEQ ID NO: 108335 - protein, 14 aa, Artificial Sequence
  Description of Artificial Sequence: Synthetic peptide
  Seed: PRMCSLMQGSTLPR
PRMFSLQQSSTLPR

SEQ ID NO: 108336 - protein, 14 aa, Artificial Sequence
  Description of Artificial Sequence: Synthetic peptide
  Seed: PRMCSLMQGSTLPR
PRMFSLQQSSTVPR

SEQ ID NO: 108337 - protein, 14 aa, Artificial Sequence
  Description of Artificial Sequence: Synthetic peptide
  Seed: PRMCSLMQGSTLPR
PRMFSLQQVSTAPR

SEQ ID NO: 108338 - protein, 14 aa, Artificial Sequence
  Description of Artificial Sequence: Synthetic peptide
  Seed: PRMCSLMQGSTLPR
PRMFSLSQASTAPR

SEQ ID NO: 108339 - protein, 14 aa, Artificial Sequence
  Description of Artificial Sequence: Synthetic peptide
  Seed: PRMCSLMQGSTLPR
PRMFSLSQASTIPR

SEQ ID NO: 108340 - protein, 14 aa, Artificial Sequence
  Description of Artificial Sequence: Synthetic peptide
  Seed: PRMCSLMQGSTLPR
PRMFSLSQASTLPR

SEQ ID NO: 108341 - protein, 14 aa, Artificial Sequence
  Description of Artificial Sequence: Synthetic peptide
  Seed: PRMCSLMQGSTLPR
PRMFSLSQASTVPR

SEQ ID NO: 108342 - protein, 14 aa, Artificial Sequence
  Description of Artificial Sequence: Synthetic peptide
  Seed: PRMCSLMQGSTLPR
PRMFSLSQGSTLPR

SEQ ID NO: 108343 - protein, 14 aa, Artificial Sequence
  Description of Artificial Sequence: Synthetic peptide
  Seed: PRMCSLMQGSTLPR
PRMFSLVQASTAPR

SEQ ID NO: 108344 - protein, 14 aa, Artificial Sequence
  Description of Artificial Sequence: Synthetic peptide
  Seed: PRMCSLMQGSTLPR
PRMFSLVQASTIPR

SEQ ID NO: 108345 - protein, 14 aa, Artificial Sequence
  Description of Artificial Sequence: Synthetic peptide
  Seed: PRMCSLMQGSTLPR
PRMFSLVQASTLPR

SEQ ID NO: 108346 - protein, 14 aa, Artificial Sequence
  Description of Artificial Sequence: Synthetic peptide
  Seed: PRMCSLMQGSTLPR
PRMFSLVQASTMPR

SEQ ID NO: 108347 - protein, 14 aa, Artificial Sequence
  Description of Artificial Sequence: Synthetic peptide
  Seed: PRMCSLMQGSTLPR
PRMFSLVQASTNPR

SEQ ID NO: 108348 - protein, 14 aa, Artificial Sequence
  Description of Artificial Sequence: Synthetic peptide
  Seed: PRMCSLMQGSTLPR
PRMFSLVQASTSPR

SEQ ID NO: 108349 - protein, 14 aa, Artificial Sequence
  Description of Artificial Sequence: Synthetic peptide
  Seed: PRMCSLMQGSTLPR
PRMFSLVQASTTPR

SEQ ID NO: 108350 - protein, 14 aa, Artificial Sequence
  Description of Artificial Sequence: Synthetic peptide
  Seed: PRMCSLMQGSTLPR
PRMFSLVQASTVPR

SEQ ID NO: 108351 - protein, 14 aa, Artificial Sequence
  Description of Artificial Sequence: Synthetic peptide
  Seed: PRMCSLMQGSTLPR
PRMFSLVQGSTAPR

SEQ ID NO: 108352 - protein, 14 aa, Artificial Sequence
  Description of Artificial Sequence: Synthetic peptide
  Seed: PRMCSLMQGSTLPR
PRMFSLVQGSTIPR

SEQ ID NO: 108353 - protein, 14 aa, Artificial Sequence
  Description of Artificial Sequence: Synthetic peptide
  Seed: PRMCSLMQGSTLPR
PRMFSLVQGSTLPR

SEQ ID NO: 108354 - protein, 14 aa, Artificial Sequence
  Description of Artificial Sequence: Synthetic peptide
  Seed: PRMCSLMQGSTLPR
PRMFSLVQGSTMPR

SEQ ID NO: 108355 - protein, 14 aa, Artificial Sequence
  Description of Artificial Sequence: Synthetic peptide
  Seed: PRMCSLMQGSTLPR
PRMFSLVQGSTTPR

SEQ ID NO: 108356 - protein, 14 aa, Artificial Sequence
  Description of Artificial Sequence: Synthetic peptide
  Seed: PRMCSLMQGSTLPR
PRMFSLVQGSTVPR

SEQ ID NO: 108357 - protein, 14 aa, Artificial Sequence
  Description of Artificial Sequence: Synthetic peptide
  Seed: PRMCSLMQGSTLPR
PRMFSLVQISTAPR

SEQ ID NO: 108358 - protein, 14 aa, Artificial Sequence
  Description of Artificial Sequence: Synthetic peptide
  Seed: PRMCSLMQGSTLPR
PRMFSLVQPSTAPR

SEQ ID NO: 108359 - protein, 14 aa, Artificial Sequence
  Description of Artificial Sequence: Synthetic peptide
  Seed: PRMCSLMQGSTLPR
PRMFSLVQPSTIPR

SEQ ID NO: 108360 - protein, 14 aa, Artificial Sequence
  Description of Artificial Sequence: Synthetic peptide
  Seed: PRMCSLMQGSTLPR
PRMFSLVQPSTLPR

SEQ ID NO: 108361 - protein, 14 aa, Artificial Sequence
  Description of Artificial Sequence: Synthetic peptide
  Seed: PRMCSLMQGSTLPR
PRMFSLVQPSTNPR

SEQ ID NO: 108362 - protein, 14 aa, Artificial Sequence
  Description of Artificial Sequence: Synthetic peptide
  Seed: PRMCSLMQGSTLPR
PRMFSLVQPSTSPR

SEQ ID NO: 108363 - protein, 14 aa, Artificial Sequence
  Description of Artificial Sequence: Synthetic peptide
  Seed: PRMCSLMQGSTLPR
PRMFSLVQPSTTPR

SEQ ID NO: 108364 - protein, 14 aa, Artificial Sequence
  Description of Artificial Sequence: Synthetic peptide
  Seed: PRMCSLMQGSTLPR
PRMFSLVQPSTVPR

SEQ ID NO: 108365 - protein, 14 aa, Artificial Sequence
  Description of Artificial Sequence: Synthetic peptide
  Seed: PRMCSLMQGSTLPR
PRMFSLVQSSTAPR

SEQ ID NO: 108366 - protein, 14 aa, Artificial Sequence
  Description of Artificial Sequence: Synthetic peptide
  Seed: PRMCSLMQGSTLPR
PRMFSLVQSSTIPR

SEQ ID NO: 108367 - protein, 14 aa, Artificial Sequence
  Description of Artificial Sequence: Synthetic peptide
  Seed: PRMCSLMQGSTLPR
PRMFSLVQSSTLPR

SEQ ID NO: 108368 - protein, 14 aa, Artificial Sequence
  Description of Artificial Sequence: Synthetic peptide
  Seed: PRMCSLMQGSTLPR
PRMFSLVQSSTNPR

SEQ ID NO: 108369 - protein, 14 aa, Artificial Sequence
  Description of Artificial Sequence: Synthetic peptide
  Seed: PRMCSLMQGSTLPR
PRMFSLVQSSTSPR

SEQ ID NO: 108370 - protein, 14 aa, Artificial Sequence
  Description of Artificial Sequence: Synthetic peptide
  Seed: PRMCSLMQGSTLPR
PRMFSLVQSSTTPR

SEQ ID NO: 108371 - protein, 14 aa, Artificial Sequence
  Description of Artificial Sequence: Synthetic peptide
  Seed: PRMCSLMQGSTLPR
PRMFSLVQSSTVPR

SEQ ID NO: 108372 - protein, 14 aa, Artificial Sequence
  Description of Artificial Sequence: Synthetic peptide
  Seed: PRMCSLMQGSTLPR
PRMFSLVQTSTAPR

SEQ ID NO: 108373 - protein, 14 aa, Artificial Sequence
  Description of Artificial Sequence: Synthetic peptide
  Seed: PRMCSLMQGSTLPR
PRMFSLVQTSTSPR

SEQ ID NO: 108374 - protein, 14 aa, Artificial Sequence
  Description of Artificial Sequence: Synthetic peptide
  Seed: PRMCSLMQGSTLPR
PRMFSLVQVSTAPR

SEQ ID NO: 108375 - protein, 14 aa, Artificial Sequence
  Description of Artificial Sequence: Synthetic peptide
  Seed: PRMCSLMQGSTLPR
PRMFSLVQVSTNPR

SEQ ID NO: 108376 - protein, 14 aa, Artificial Sequence
  Description of Artificial Sequence: Synthetic peptide
  Seed: PRMCSLMQGSTLPR
PRMFSLVQVSTSPR

SEQ ID NO: 108377 - protein, 14 aa, Artificial Sequence
  Description of Artificial Sequence: Synthetic peptide
  Seed: PRMCSLMQGSTLPR
PRMISLAQASTLPR

SEQ ID NO: 108378 - protein, 14 aa, Artificial Sequence
  Description of Artificial Sequence: Synthetic peptide
  Seed: PRMCSLMQGSTLPR
PRMISLIQASTAPR

SEQ ID NO: 108379 - protein, 14 aa, Artificial Sequence
  Description of Artificial Sequence: Synthetic peptide
  Seed: PRMCSLMQGSTLPR
PRMISLIQASTIPR

SEQ ID NO: 108380 - protein, 14 aa, Artificial Sequence
  Description of Artificial Sequence: Synthetic peptide
  Seed: PRMCSLMQGSTLPR
PRMISLIQASTLPR

SEQ ID NO: 108381 - protein, 14 aa, Artificial Sequence
  Description of Artificial Sequence: Synthetic peptide
  Seed: PRMCSLMQGSTLPR
PRMISLIQASTVPR

SEQ ID NO: 108382 - protein, 14 aa, Artificial Sequence
  Description of Artificial Sequence: Synthetic peptide
  Seed: PRMCSLMQGSTLPR
PRMISLIQGSTLPR

SEQ ID NO: 108383 - protein, 14 aa, Artificial Sequence
  Description of Artificial Sequence: Synthetic peptide
  Seed: PRMCSLMQGSTLPR
PRMISLIQGSTVPR

SEQ ID NO: 108384 - protein, 14 aa, Artificial Sequence
  Description of Artificial Sequence: Synthetic peptide
  Seed: PRMCSLMQGSTLPR
PRMISLLQASTAPR

SEQ ID NO: 108385 - protein, 14 aa, Artificial Sequence
  Description of Artificial Sequence: Synthetic peptide
  Seed: PRMCSLMQGSTLPR
PRMISLLQASTIPR

SEQ ID NO: 108386 - protein, 14 aa, Artificial Sequence
  Description of Artificial Sequence: Synthetic peptide
  Seed: PRMCSLMQGSTLPR
PRMISLLQASTLPR

SEQ ID NO: 108387 - protein, 14 aa, Artificial Sequence
  Description of Artificial Sequence: Synthetic peptide
  Seed: PRMCSLMQGSTLPR
PRMISLLQASTMPR

SEQ ID NO: 108388 - protein, 14 aa, Artificial Sequence
  Description of Artificial Sequence: Synthetic peptide
  Seed: PRMCSLMQGSTLPR
PRMISLLQASTSPR

SEQ ID NO: 108389 - protein, 14 aa, Artificial Sequence
  Description of Artificial Sequence: Synthetic peptide
  Seed: PRMCSLMQGSTLPR
PRMISLLQASTTPR

SEQ ID NO: 108390 - protein, 14 aa, Artificial Sequence
  Description of Artificial Sequence: Synthetic peptide
  Seed: PRMCSLMQGSTLPR
PRMISLLQASTVPR

SEQ ID NO: 108391 - protein, 14 aa, Artificial Sequence
  Description of Artificial Sequence: Synthetic peptide
  Seed: PRMCSLMQGSTLPR
PRMISLLQGSTAPR

SEQ ID NO: 108392 - protein, 14 aa, Artificial Sequence
  Description of Artificial Sequence: Synthetic peptide
  Seed: PRMCSLMQGSTLPR
PRMISLLQGSTIPR

SEQ ID NO: 108393 - protein, 14 aa, Artificial Sequence
  Description of Artificial Sequence: Synthetic peptide
  Seed: PRMCSLMQGSTLPR
PRMISLLQGSTLPR

SEQ ID NO: 108394 - protein, 14 aa, Artificial Sequence
  Description of Artificial Sequence: Synthetic peptide
  Seed: PRMCSLMQGSTLPR
PRMISLLQGSTMPR

SEQ ID NO: 108395 - protein, 14 aa, Artificial Sequence
  Description of Artificial Sequence: Synthetic peptide
  Seed: PRMCSLMQGSTLPR
PRMISLLQGSTSPR

SEQ ID NO: 108396 - protein, 14 aa, Artificial Sequence
  Description of Artificial Sequence: Synthetic peptide
  Seed: PRMCSLMQGSTLPR
PRMISLLQGSTTPR

SEQ ID NO: 108397 - protein, 14 aa, Artificial Sequence
  Description of Artificial Sequence: Synthetic peptide
  Seed: PRMCSLMQGSTLPR
PRMISLLQGSTVPR

SEQ ID NO: 108398 - protein, 14 aa, Artificial Sequence
  Description of Artificial Sequence: Synthetic peptide
  Seed: PRMCSLMQGSTLPR
PRMISLLQPSTAPR

SEQ ID NO: 108399 - protein, 14 aa, Artificial Sequence
  Description of Artificial Sequence: Synthetic peptide
  Seed: PRMCSLMQGSTLPR
PRMISLLQPSTIPR

SEQ ID NO: 108400 - protein, 14 aa, Artificial Sequence
  Description of Artificial Sequence: Synthetic peptide
  Seed: PRMCSLMQGSTLPR
PRMISLLQPSTLPR

SEQ ID NO: 108401 - protein, 14 aa, Artificial Sequence
  Description of Artificial Sequence: Synthetic peptide
  Seed: PRMCSLMQGSTLPR
PRMISLLQPSTVPR

SEQ ID NO: 108402 - protein, 14 aa, Artificial Sequence
  Description of Artificial Sequence: Synthetic peptide
  Seed: PRMCSLMQGSTLPR
PRMISLLQSSTAPR

SEQ ID NO: 108403 - protein, 14 aa, Artificial Sequence
  Description of Artificial Sequence: Synthetic peptide
  Seed: PRMCSLMQGSTLPR
PRMISLLQSSTIPR

SEQ ID NO: 108404 - protein, 14 aa, Artificial Sequence
  Description of Artificial Sequence: Synthetic peptide
  Seed: PRMCSLMQGSTLPR
PRMISLLQSSTLPR

SEQ ID NO: 108405 - protein, 14 aa, Artificial Sequence
  Description of Artificial Sequence: Synthetic peptide
  Seed: PRMCSLMQGSTLPR
PRMISLLQSSTMPR

SEQ ID NO: 108406 - protein, 14 aa, Artificial Sequence
  Description of Artificial Sequence: Synthetic peptide
  Seed: PRMCSLMQGSTLPR
PRMISLLQSSTTPR

SEQ ID NO: 108407 - protein, 14 aa, Artificial Sequence
  Description of Artificial Sequence: Synthetic peptide
  Seed: PRMCSLMQGSTLPR
PRMISLLQSSTVPR

SEQ ID NO: 108408 - protein, 14 aa, Artificial Sequence
  Description of Artificial Sequence: Synthetic peptide
  Seed: PRMCSLMQGSTLPR
PRMISLLQTSTVPR

SEQ ID NO: 108409 - protein, 14 aa, Artificial Sequence
  Description of Artificial Sequence: Synthetic peptide
  Seed: PRMCSLMQGSTLPR
PRMISLMQASTAPR

SEQ ID NO: 108410 - protein, 14 aa, Artificial Sequence
  Description of Artificial Sequence: Synthetic peptide
  Seed: PRMCSLMQGSTLPR
PRMISLMQASTIPR

SEQ ID NO: 108411 - protein, 14 aa, Artificial Sequence
  Description of Artificial Sequence: Synthetic peptide
  Seed: PRMCSLMQGSTLPR
PRMISLMQASTLPR

SEQ ID NO: 108412 - protein, 14 aa, Artificial Sequence
  Description of Artificial Sequence: Synthetic peptide
  Seed: PRMCSLMQGSTLPR
PRMISLMQASTMPR

SEQ ID NO: 108413 - protein, 14 aa, Artificial Sequence
  Description of Artificial Sequence: Synthetic peptide
  Seed: PRMCSLMQGSTLPR
PRMISLMQASTSPR

SEQ ID NO: 108414 - protein, 14 aa, Artificial Sequence
  Description of Artificial Sequence: Synthetic peptide
  Seed: PRMCSLMQGSTLPR
PRMISLMQASTTPR

SEQ ID NO: 108415 - protein, 14 aa, Artificial Sequence
  Description of Artificial Sequence: Synthetic peptide
  Seed: PRMCSLMQGSTLPR
PRMISLMQASTVPR

SEQ ID NO: 108416 - protein, 14 aa, Artificial Sequence
  Description of Artificial Sequence: Synthetic peptide
  Seed: PRMCSLMQGSTLPR
PRMISLMQGSTAPR

SEQ ID NO: 108417 - protein, 14 aa, Artificial Sequence
  Description of Artificial Sequence: Synthetic peptide
  Seed: PRMCSLMQGSTLPR
PRMISLMQGSTIPR

SEQ ID NO: 108418 - protein, 14 aa, Artificial Sequence
  Description of Artificial Sequence: Synthetic peptide
  Seed: PRMCSLMQGSTLPR
PRMISLMQGSTLPR

SEQ ID NO: 108419 - protein, 14 aa, Artificial Sequence
  Description of Artificial Sequence: Synthetic peptide
  Seed: PRMCSLMQGSTLPR
PRMISLMQGSTMPR

SEQ ID NO: 108420 - protein, 14 aa, Artificial Sequence
  Description of Artificial Sequence: Synthetic peptide
  Seed: PRMCSLMQGSTLPR
PRMISLMQGSTSPR

SEQ ID NO: 108421 - protein, 14 aa, Artificial Sequence
  Description of Artificial Sequence: Synthetic peptide
  Seed: PRMCSLMQGSTLPR
PRMISLMQGSTTPR

SEQ ID NO: 108422 - protein, 14 aa, Artificial Sequence
  Description of Artificial Sequence: Synthetic peptide
  Seed: PRMCSLMQGSTLPR
PRMISLMQGSTVPR

SEQ ID NO: 108423 - protein, 14 aa, Artificial Sequence
  Description of Artificial Sequence: Synthetic peptide
  Seed: PRMCSLMQGSTLPR
PRMISLMQPSTAPR

SEQ ID NO: 108424 - protein, 14 aa, Artificial Sequence
  Description of Artificial Sequence: Synthetic peptide
  Seed: PRMCSLMQGSTLPR
PRMISLMQPSTIPR

SEQ ID NO: 108425 - protein, 14 aa, Artificial Sequence
  Description of Artificial Sequence: Synthetic peptide
  Seed: PRMCSLMQGSTLPR
PRMISLMQPSTLPR

SEQ ID NO: 108426 - protein, 14 aa, Artificial Sequence
  Description of Artificial Sequence: Synthetic peptide
  Seed: PRMCSLMQGSTLPR
PRMISLMQPSTVPR

SEQ ID NO: 108427 - protein, 14 aa, Artificial Sequence
  Description of Artificial Sequence: Synthetic peptide
  Seed: PRMCSLMQGSTLPR
PRMISLMQSSTAPR

SEQ ID NO: 108428 - protein, 14 aa, Artificial Sequence
  Description of Artificial Sequence: Synthetic peptide
  Seed: PRMCSLMQGSTLPR
PRMISLMQSSTIPR

SEQ ID NO: 108429 - protein, 14 aa, Artificial Sequence
  Description of Artificial Sequence: Synthetic peptide
  Seed: PRMCSLMQGSTLPR
PRMISLMQSSTLPR

SEQ ID NO: 108430 - protein, 14 aa, Artificial Sequence
  Description of Artificial Sequence: Synthetic peptide
  Seed: PRMCSLMQGSTLPR
PRMISLMQSSTTPR

SEQ ID NO: 108431 - protein, 14 aa, Artificial Sequence
  Description of Artificial Sequence: Synthetic peptide
  Seed: PRMCSLMQGSTLPR
PRMISLMQSSTVPR

SEQ ID NO: 108432 - protein, 14 aa, Artificial Sequence
  Description of Artificial Sequence: Synthetic peptide
  Seed: PRMCSLMQGSTLPR
PRMLSLIQASTLPR

SEQ ID NO: 108433 - protein, 14 aa, Artificial Sequence
  Description of Artificial Sequence: Synthetic peptide
  Seed: PRMCSLMQGSTLPR
PRMLSLIQASTVPR

SEQ ID NO: 108434 - protein, 14 aa, Artificial Sequence
  Description of Artificial Sequence: Synthetic peptide
  Seed: PRMCSLMQGSTLPR
PRMLSLLQASTAPR

SEQ ID NO: 108435 - protein, 14 aa, Artificial Sequence
  Description of Artificial Sequence: Synthetic peptide
  Seed: PRMCSLMQGSTLPR
PRMLSLLQASTIPR

SEQ ID NO: 108436 - protein, 14 aa, Artificial Sequence
  Description of Artificial Sequence: Synthetic peptide
  Seed: PRMCSLMQGSTLPR
PRMLSLLQASTLPR

SEQ ID NO: 108437 - protein, 14 aa, Artificial Sequence
  Description of Artificial Sequence: Synthetic peptide
  Seed: PRMCSLMQGSTLPR
PRMLSLLQASTMPR

SEQ ID NO: 108438 - protein, 14 aa, Artificial Sequence
  Description of Artificial Sequence: Synthetic peptide
  Seed: PRMCSLMQGSTLPR
PRMLSLLQASTTPR

SEQ ID NO: 108439 - protein, 14 aa, Artificial Sequence
  Description of Artificial Sequence: Synthetic peptide
  Seed: PRMCSLMQGSTLPR
PRMLSLLQASTVPR

SEQ ID NO: 108440 - protein, 14 aa, Artificial Sequence
  Description of Artificial Sequence: Synthetic peptide
  Seed: PRMCSLMQGSTLPR
PRMLSLLQGSTAPR

SEQ ID NO: 108441 - protein, 14 aa, Artificial Sequence
  Description of Artificial Sequence: Synthetic peptide
  Seed: PRMCSLMQGSTLPR
PRMLSLLQGSTIPR

SEQ ID NO: 108442 - protein, 14 aa, Artificial Sequence
  Description of Artificial Sequence: Synthetic peptide
  Seed: PRMCSLMQGSTLPR
PRMLSLLQGSTLPR

SEQ ID NO: 108443 - protein, 14 aa, Artificial Sequence
  Description of Artificial Sequence: Synthetic peptide
  Seed: PRMCSLMQGSTLPR
PRMLSLLQGSTMPR

SEQ ID NO: 108444 - protein, 14 aa, Artificial Sequence
  Description of Artificial Sequence: Synthetic peptide
  Seed: PRMCSLMQGSTLPR
PRMLSLLQGSTTPR

SEQ ID NO: 108445 - protein, 14 aa, Artificial Sequence
  Description of Artificial Sequence: Synthetic peptide
  Seed: PRMCSLMQGSTLPR
PRMLSLLQGSTVPR

SEQ ID NO: 108446 - protein, 14 aa, Artificial Sequence
  Description of Artificial Sequence: Synthetic peptide
  Seed: PRMCSLMQGSTLPR
PRMLSLLQPSTIPR

SEQ ID NO: 108447 - protein, 14 aa, Artificial Sequence
  Description of Artificial Sequence: Synthetic peptide
  Seed: PRMCSLMQGSTLPR
PRMLSLLQPSTLPR

SEQ ID NO: 108448 - protein, 14 aa, Artificial Sequence
  Description of Artificial Sequence: Synthetic peptide
  Seed: PRMCSLMQGSTLPR
PRMLSLLQPSTVPR

SEQ ID NO: 108449 - protein, 14 aa, Artificial Sequence
  Description of Artificial Sequence: Synthetic peptide
  Seed: PRMCSLMQGSTLPR
PRMLSLLQSSTAPR

SEQ ID NO: 108450 - protein, 14 aa, Artificial Sequence
  Description of Artificial Sequence: Synthetic peptide
  Seed: PRMCSLMQGSTLPR
PRMLSLLQSSTIPR

SEQ ID NO: 108451 - protein, 14 aa, Artificial Sequence
  Description of Artificial Sequence: Synthetic peptide
  Seed: PRMCSLMQGSTLPR
PRMLSLLQSSTLPR

SEQ ID NO: 108452 - protein, 14 aa, Artificial Sequence
  Description of Artificial Sequence: Synthetic peptide
  Seed: PRMCSLMQGSTLPR
PRMLSLLQSSTVPR

SEQ ID NO: 108453 - protein, 14 aa, Artificial Sequence
  Description of Artificial Sequence: Synthetic peptide
  Seed: PRMCSLMQGSTLPR
PRMLSLMQASTAPR

SEQ ID NO: 108454 - protein, 14 aa, Artificial Sequence
  Description of Artificial Sequence: Synthetic peptide
  Seed: PRMCSLMQGSTLPR
PRMLSLMQASTIPR

SEQ ID NO: 108455 - protein, 14 aa, Artificial Sequence
  Description of Artificial Sequence: Synthetic peptide
  Seed: PRMCSLMQGSTLPR
PRMLSLMQASTLPR

SEQ ID NO: 108456 - protein, 14 aa, Artificial Sequence
  Description of Artificial Sequence: Synthetic peptide
  Seed: PRMCSLMQGSTLPR
PRMLSLMQASTMPR

SEQ ID NO: 108457 - protein, 14 aa, Artificial Sequence
  Description of Artificial Sequence: Synthetic peptide
  Seed: PRMCSLMQGSTLPR
PRMLSLMQASTTPR

SEQ ID NO: 108458 - protein, 14 aa, Artificial Sequence
  Description of Artificial Sequence: Synthetic peptide
  Seed: PRMCSLMQGSTLPR
PRMLSLMQASTVPR

SEQ ID NO: 108459 - protein, 14 aa, Artificial Sequence
  Description of Artificial Sequence: Synthetic peptide
  Seed: PRMCSLMQGSTLPR
PRMLSLMQGSTAPR

SEQ ID NO: 108460 - protein, 14 aa, Artificial Sequence
  Description of Artificial Sequence: Synthetic peptide
  Seed: PRMCSLMQGSTLPR
PRMLSLMQGSTIPR

SEQ ID NO: 108461 - protein, 14 aa, Artificial Sequence
  Description of Artificial Sequence: Synthetic peptide
  Seed: PRMCSLMQGSTLPR
PRMLSLMQGSTLPR

SEQ ID NO: 108462 - protein, 14 aa, Artificial Sequence
  Description of Artificial Sequence: Synthetic peptide
  Seed: PRMCSLMQGSTLPR
PRMLSLMQGSTMPR

SEQ ID NO: 108463 - protein, 14 aa, Artificial Sequence
  Description of Artificial Sequence: Synthetic peptide
  Seed: PRMCSLMQGSTLPR
PRMLSLMQGSTTPR

SEQ ID NO: 108464 - protein, 14 aa, Artificial Sequence
  Description of Artificial Sequence: Synthetic peptide
  Seed: PRMCSLMQGSTLPR
PRMLSLMQGSTVPR

SEQ ID NO: 108465 - protein, 14 aa, Artificial Sequence
  Description of Artificial Sequence: Synthetic peptide
  Seed: PRMCSLMQGSTLPR
PRMLSLMQPSTIPR

SEQ ID NO: 108466 - protein, 14 aa, Artificial Sequence
  Description of Artificial Sequence: Synthetic peptide
  Seed: PRMCSLMQGSTLPR
PRMLSLMQPSTLPR

SEQ ID NO: 108467 - protein, 14 aa, Artificial Sequence
  Description of Artificial Sequence: Synthetic peptide
  Seed: PRMCSLMQGSTLPR
PRMLSLMQPSTVPR

SEQ ID NO: 108468 - protein, 14 aa, Artificial Sequence
  Description of Artificial Sequence: Synthetic peptide
  Seed: PRMCSLMQGSTLPR
PRMLSLMQSSTAPR

SEQ ID NO: 108469 - protein, 14 aa, Artificial Sequence
  Description of Artificial Sequence: Synthetic peptide
  Seed: PRMCSLMQGSTLPR
PRMLSLMQSSTIPR

SEQ ID NO: 108470 - protein, 14 aa, Artificial Sequence
  Description of Artificial Sequence: Synthetic peptide
  Seed: PRMCSLMQGSTLPR
PRMLSLMQSSTLPR

SEQ ID NO: 108471 - protein, 14 aa, Artificial Sequence
  Description of Artificial Sequence: Synthetic peptide
  Seed: PRMCSLMQGSTLPR
PRMLSLMQSSTVPR

SEQ ID NO: 108472 - protein, 14 aa, Artificial Sequence
  Description of Artificial Sequence: Synthetic peptide
  Seed: PRMCSLMQGSTLPR
PRMMSLLQASTAPR

SEQ ID NO: 108473 - protein, 14 aa, Artificial Sequence
  Description of Artificial Sequence: Synthetic peptide
  Seed: PRMCSLMQGSTLPR
PRMMSLLQASTIPR

SEQ ID NO: 108474 - protein, 14 aa, Artificial Sequence
  Description of Artificial Sequence: Synthetic peptide
  Seed: PRMCSLMQGSTLPR
PRMMSLLQASTLPR

SEQ ID NO: 108475 - protein, 14 aa, Artificial Sequence
  Description of Artificial Sequence: Synthetic peptide
  Seed: PRMCSLMQGSTLPR
PRMMSLLQASTVPR

SEQ ID NO: 108476 - protein, 14 aa, Artificial Sequence
  Description of Artificial Sequence: Synthetic peptide
  Seed: PRMCSLMQGSTLPR
PRMMSLLQGSTAPR

SEQ ID NO: 108477 - protein, 14 aa, Artificial Sequence
  Description of Artificial Sequence: Synthetic peptide
  Seed: PRMCSLMQGSTLPR
PRMMSLLQGSTIPR

SEQ ID NO: 108478 - protein, 14 aa, Artificial Sequence
  Description of Artificial Sequence: Synthetic peptide
  Seed: PRMCSLMQGSTLPR
PRMMSLLQGSTLPR

SEQ ID NO: 108479 - protein, 14 aa, Artificial Sequence
  Description of Artificial Sequence: Synthetic peptide
  Seed: PRMCSLMQGSTLPR
PRMMSLLQGSTVPR

SEQ ID NO: 108480 - protein, 14 aa, Artificial Sequence
  Description of Artificial Sequence: Synthetic peptide
  Seed: PRMCSLMQGSTLPR
PRMMSLLQSSTLPR

SEQ ID NO: 108481 - protein, 14 aa, Artificial Sequence
  Description of Artificial Sequence: Synthetic peptide
  Seed: PRMCSLMQGSTLPR
PRMMSLLQSSTVPR

SEQ ID NO: 108482 - protein, 14 aa, Artificial Sequence
  Description of Artificial Sequence: Synthetic peptide
  Seed: PRMCSLMQGSTLPR
PRMMSLMQASTAPR

SEQ ID NO: 108483 - protein, 14 aa, Artificial Sequence
  Description of Artificial Sequence: Synthetic peptide
  Seed: PRMCSLMQGSTLPR
PRMMSLMQASTIPR

SEQ ID NO: 108484 - protein, 14 aa, Artificial Sequence
  Description of Artificial Sequence: Synthetic peptide
  Seed: PRMCSLMQGSTLPR
PRMMSLMQASTLPR

SEQ ID NO: 108485 - protein, 14 aa, Artificial Sequence
  Description of Artificial Sequence: Synthetic peptide
  Seed: PRMCSLMQGSTLPR
PRMMSLMQASTVPR

SEQ ID NO: 108486 - protein, 14 aa, Artificial Sequence
  Description of Artificial Sequence: Synthetic peptide
  Seed: PRMCSLMQGSTLPR
PRMMSLMQGSTAPR

SEQ ID NO: 108487 - protein, 14 aa, Artificial Sequence
  Description of Artificial Sequence: Synthetic peptide
  Seed: PRMCSLMQGSTLPR
PRMMSLMQGSTIPR

SEQ ID NO: 108488 - protein, 14 aa, Artificial Sequence
  Description of Artificial Sequence: Synthetic peptide
  Seed: PRMCSLMQGSTLPR
PRMMSLMQGSTLPR

SEQ ID NO: 108489 - protein, 14 aa, Artificial Sequence
  Description of Artificial Sequence: Synthetic peptide
  Seed: PRMCSLMQGSTLPR
PRMMSLMQGSTVPR

SEQ ID NO: 108490 - protein, 14 aa, Artificial Sequence
  Description of Artificial Sequence: Synthetic peptide
  Seed: PRMCSLMQGSTLPR
PRMMSLMQSSTLPR

SEQ ID NO: 108491 - protein, 14 aa, Artificial Sequence
  Description of Artificial Sequence: Synthetic peptide
  Seed: PRMCSLMQGSTLPR
PRMVSLLQASTIPR

SEQ ID NO: 108492 - protein, 14 aa, Artificial Sequence
  Description of Artificial Sequence: Synthetic peptide
  Seed: PRMCSLMQGSTLPR
PRMVSLLQASTLPR

SEQ ID NO: 108493 - protein, 14 aa, Artificial Sequence
  Description of Artificial Sequence: Synthetic peptide
  Seed: PRMCSLMQGSTLPR
PRMVSLLQASTVPR

SEQ ID NO: 108494 - protein, 14 aa, Artificial Sequence
  Description of Artificial Sequence: Synthetic peptide
  Seed: PRMCSLMQGSTLPR
PRMVSLLQGSTAPR

SEQ ID NO: 108495 - protein, 14 aa, Artificial Sequence
  Description of Artificial Sequence: Synthetic peptide
  Seed: PRMCSLMQGSTLPR
PRMVSLLQGSTIPR

SEQ ID NO: 108496 - protein, 14 aa, Artificial Sequence
  Description of Artificial Sequence: Synthetic peptide
  Seed: PRMCSLMQGSTLPR
PRMVSLLQGSTLPR

SEQ ID NO: 108497 - protein, 14 aa, Artificial Sequence
  Description of Artificial Sequence: Synthetic peptide
  Seed: PRMCSLMQGSTLPR
PRMVSLLQGSTVPR

SEQ ID NO: 108498 - protein, 14 aa, Artificial Sequence
  Description of Artificial Sequence: Synthetic peptide
  Seed: PRMCSLMQGSTLPR
PRMVSLLQSSTVPR

SEQ ID NO: 108499 - protein, 14 aa, Artificial Sequence
  Description of Artificial Sequence: Synthetic peptide
  Seed: PRMCSLMQGSTLPR
PRMVSLMQASTIPR

SEQ ID NO: 108500 - protein, 14 aa, Artificial Sequence
  Description of Artificial Sequence: Synthetic peptide
  Seed: PRMCSLMQGSTLPR
PRMVSLMQASTLPR

SEQ ID NO: 108501 - protein, 14 aa, Artificial Sequence
  Description of Artificial Sequence: Synthetic peptide
  Seed: PRMCSLMQGSTLPR
PRMVSLMQASTVPR

SEQ ID NO: 108502 - protein, 14 aa, Artificial Sequence
  Description of Artificial Sequence: Synthetic peptide
  Seed: PRMCSLMQGSTLPR
PRMVSLMQGSTIPR

SEQ ID NO: 108503 - protein, 14 aa, Artificial Sequence
  Description of Artificial Sequence: Synthetic peptide
  Seed: PRMCSLMQGSTLPR
PRMVSLMQGSTLPR

SEQ ID NO: 108504 - protein, 14 aa, Artificial Sequence
  Description of Artificial Sequence: Synthetic peptide
  Seed: PRMCSLMQGSTLPR
PRMVSLMQGSTVPR

SEQ ID NO: 108505 - protein, 14 aa, Artificial Sequence
  Description of Artificial Sequence: Synthetic peptide
  Seed: PRMCSLMQGSTLPR
PRMWSLAQASTIPR

SEQ ID NO: 108506 - protein, 14 aa, Artificial Sequence
  Description of Artificial Sequence: Synthetic peptide
  Seed: PRMCSLMQGSTLPR
PRMWSLAQASTLPR

SEQ ID NO: 108507 - protein, 14 aa, Artificial Sequence
  Description of Artificial Sequence: Synthetic peptide
  Seed: PRMCSLMQGSTLPR
PRMWSLAQASTVPR

SEQ ID NO: 108508 - protein, 14 aa, Artificial Sequence
  Description of Artificial Sequence: Synthetic peptide
  Seed: PRMCSLMQGSTLPR
PRMWSLIQASTAPR

SEQ ID NO: 108509 - protein, 14 aa, Artificial Sequence
  Description of Artificial Sequence: Synthetic peptide
  Seed: PRMCSLMQGSTLPR
PRMWSLIQASTIPR

SEQ ID NO: 108510 - protein, 14 aa, Artificial Sequence
  Description of Artificial Sequence: Synthetic peptide
  Seed: PRMCSLMQGSTLPR
PRMWSLIQASTLPR

SEQ ID NO: 108511 - protein, 14 aa, Artificial Sequence
  Description of Artificial Sequence: Synthetic peptide
  Seed: PRMCSLMQGSTLPR
PRMWSLIQASTSPR

SEQ ID NO: 108512 - protein, 14 aa, Artificial Sequence
  Description of Artificial Sequence: Synthetic peptide
  Seed: PRMCSLMQGSTLPR
PRMWSLIQASTVPR

SEQ ID NO: 108513 - protein, 14 aa, Artificial Sequence
  Description of Artificial Sequence: Synthetic peptide
  Seed: PRMCSLMQGSTLPR
PRMWSLIQGSTAPR

SEQ ID NO: 108514 - protein, 14 aa, Artificial Sequence
  Description of Artificial Sequence: Synthetic peptide
  Seed: PRMCSLMQGSTLPR
PRMWSLIQGSTIPR

SEQ ID NO: 108515 - protein, 14 aa, Artificial Sequence
  Description of Artificial Sequence: Synthetic peptide
  Seed: PRMCSLMQGSTLPR
PRMWSLIQGSTLPR

SEQ ID NO: 108516 - protein, 14 aa, Artificial Sequence
  Description of Artificial Sequence: Synthetic peptide
  Seed: PRMCSLMQGSTLPR
PRMWSLIQGSTVPR

SEQ ID NO: 108517 - protein, 14 aa, Artificial Sequence
  Description of Artificial Sequence: Synthetic peptide
  Seed: PRMCSLMQGSTLPR
PRMWSLIQPSTAPR

SEQ ID NO: 108518 - protein, 14 aa, Artificial Sequence
  Description of Artificial Sequence: Synthetic peptide
  Seed: PRMCSLMQGSTLPR
PRMWSLIQSSTAPR

SEQ ID NO: 108519 - protein, 14 aa, Artificial Sequence
  Description of Artificial Sequence: Synthetic peptide
  Seed: PRMCSLMQGSTLPR
PRMWSLIQSSTIPR

SEQ ID NO: 108520 - protein, 14 aa, Artificial Sequence
  Description of Artificial Sequence: Synthetic peptide
  Seed: PRMCSLMQGSTLPR
PRMWSLIQSSTLPR

SEQ ID NO: 108521 - protein, 14 aa, Artificial Sequence
  Description of Artificial Sequence: Synthetic peptide
  Seed: PRMCSLMQGSTLPR
PRMWSLIQSSTVPR

SEQ ID NO: 108522 - protein, 14 aa, Artificial Sequence
  Description of Artificial Sequence: Synthetic peptide
  Seed: PRMCSLMQGSTLPR
PRMWSLLQASTAPR

SEQ ID NO: 108523 - protein, 14 aa, Artificial Sequence
  Description of Artificial Sequence: Synthetic peptide
  Seed: PRMCSLMQGSTLPR
PRMWSLLQASTIPR

SEQ ID NO: 108524 - protein, 14 aa, Artificial Sequence
  Description of Artificial Sequence: Synthetic peptide
  Seed: PRMCSLMQGSTLPR
PRMWSLLQASTLPR

SEQ ID NO: 108525 - protein, 14 aa, Artificial Sequence
  Description of Artificial Sequence: Synthetic peptide
  Seed: PRMCSLMQGSTLPR
PRMWSLLQASTMPR

SEQ ID NO: 108526 - protein, 14 aa, Artificial Sequence
  Description of Artificial Sequence: Synthetic peptide
  Seed: PRMCSLMQGSTLPR
PRMWSLLQASTSPR

SEQ ID NO: 108527 - protein, 14 aa, Artificial Sequence
  Description of Artificial Sequence: Synthetic peptide
  Seed: PRMCSLMQGSTLPR
PRMWSLLQASTTPR

SEQ ID NO: 108528 - protein, 14 aa, Artificial Sequence
  Description of Artificial Sequence: Synthetic peptide
  Seed: PRMCSLMQGSTLPR
PRMWSLLQASTVPR

SEQ ID NO: 108529 - protein, 14 aa, Artificial Sequence
  Description of Artificial Sequence: Synthetic peptide
  Seed: PRMCSLMQGSTLPR
PRMWSLLQGSTAPR

SEQ ID NO: 108530 - protein, 14 aa, Artificial Sequence
  Description of Artificial Sequence: Synthetic peptide
  Seed: PRMCSLMQGSTLPR
PRMWSLLQGSTIPR

SEQ ID NO: 108531 - protein, 14 aa, Artificial Sequence
  Description of Artificial Sequence: Synthetic peptide
  Seed: PRMCSLMQGSTLPR
PRMWSLLQGSTLPR

SEQ ID NO: 108532 - protein, 14 aa, Artificial Sequence
  Description of Artificial Sequence: Synthetic peptide
  Seed: PRMCSLMQGSTLPR
PRMWSLLQGSTMPR

SEQ ID NO: 108533 - protein, 14 aa, Artificial Sequence
  Description of Artificial Sequence: Synthetic peptide
  Seed: PRMCSLMQGSTLPR
PRMWSLLQGSTSPR

SEQ ID NO: 108534 - protein, 14 aa, Artificial Sequence
  Description of Artificial Sequence: Synthetic peptide
  Seed: PRMCSLMQGSTLPR
PRMWSLLQGSTTPR

SEQ ID NO: 108535 - protein, 14 aa, Artificial Sequence
  Description of Artificial Sequence: Synthetic peptide
  Seed: PRMCSLMQGSTLPR
PRMWSLLQGSTVPR

SEQ ID NO: 108536 - protein, 14 aa, Artificial Sequence
  Description of Artificial Sequence: Synthetic peptide
  Seed: PRMCSLMQGSTLPR
PRMWSLLQISTAPR

SEQ ID NO: 108537 - protein, 14 aa, Artificial Sequence
  Description of Artificial Sequence: Synthetic peptide
  Seed: PRMCSLMQGSTLPR
PRMWSLLQNSTAPR

SEQ ID NO: 108538 - protein, 14 aa, Artificial Sequence
  Description of Artificial Sequence: Synthetic peptide
  Seed: PRMCSLMQGSTLPR
PRMWSLLQNSTIPR

SEQ ID NO: 108539 - protein, 14 aa, Artificial Sequence
  Description of Artificial Sequence: Synthetic peptide
  Seed: PRMCSLMQGSTLPR
PRMWSLLQNSTLPR

SEQ ID NO: 108540 - protein, 14 aa, Artificial Sequence
  Description of Artificial Sequence: Synthetic peptide
  Seed: PRMCSLMQGSTLPR
PRMWSLLQNSTVPR

SEQ ID NO: 108541 - protein, 14 aa, Artificial Sequence
  Description of Artificial Sequence: Synthetic peptide
  Seed: PRMCSLMQGSTLPR
PRMWSLLQPSTAPR

SEQ ID NO: 108542 - protein, 14 aa, Artificial Sequence
  Description of Artificial Sequence: Synthetic peptide
  Seed: PRMCSLMQGSTLPR
PRMWSLLQPSTIPR

SEQ ID NO: 108543 - protein, 14 aa, Artificial Sequence
  Description of Artificial Sequence: Synthetic peptide
  Seed: PRMCSLMQGSTLPR
PRMWSLLQPSTLPR

SEQ ID NO: 108544 - protein, 14 aa, Artificial Sequence
  Description of Artificial Sequence: Synthetic peptide
  Seed: PRMCSLMQGSTLPR
PRMWSLLQPSTSPR

SEQ ID NO: 108545 - protein, 14 aa, Artificial Sequence
  Description of Artificial Sequence: Synthetic peptide
  Seed: PRMCSLMQGSTLPR
PRMWSLLQPSTVPR

SEQ ID NO: 108546 - protein, 14 aa, Artificial Sequence
  Description of Artificial Sequence: Synthetic peptide
  Seed: PRMCSLMQGSTLPR
PRMWSLLQSSTAPR

SEQ ID NO: 108547 - protein, 14 aa, Artificial Sequence
  Description of Artificial Sequence: Synthetic peptide
  Seed: PRMCSLMQGSTLPR
PRMWSLLQSSTIPR

SEQ ID NO: 108548 - protein, 14 aa, Artificial Sequence
  Description of Artificial Sequence: Synthetic peptide
  Seed: PRMCSLMQGSTLPR
PRMWSLLQSSTLPR

SEQ ID NO: 108549 - protein, 14 aa, Artificial Sequence
  Description of Artificial Sequence: Synthetic peptide
  Seed: PRMCSLMQGSTLPR
PRMWSLLQSSTMPR

SEQ ID NO: 108550 - protein, 14 aa, Artificial Sequence
  Description of Artificial Sequence: Synthetic peptide
  Seed: PRMCSLMQGSTLPR
PRMWSLLQSSTSPR

SEQ ID NO: 108551 - protein, 14 aa, Artificial Sequence
  Description of Artificial Sequence: Synthetic peptide
  Seed: PRMCSLMQGSTLPR
PRMWSLLQSSTTPR

SEQ ID NO: 108552 - protein, 14 aa, Artificial Sequence
  Description of Artificial Sequence: Synthetic peptide
  Seed: PRMCSLMQGSTLPR
PRMWSLLQSSTVPR

SEQ ID NO: 108553 - protein, 14 aa, Artificial Sequence
  Description of Artificial Sequence: Synthetic peptide
  Seed: PRMCSLMQGSTLPR
PRMWSLLQTSTAPR

SEQ ID NO: 108554 - protein, 14 aa, Artificial Sequence
  Description of Artificial Sequence: Synthetic peptide
  Seed: PRMCSLMQGSTLPR
PRMWSLLQTSTIPR

SEQ ID NO: 108555 - protein, 14 aa, Artificial Sequence
  Description of Artificial Sequence: Synthetic peptide
  Seed: PRMCSLMQGSTLPR
PRMWSLLQTSTLPR

SEQ ID NO: 108556 - protein, 14 aa, Artificial Sequence
  Description of Artificial Sequence: Synthetic peptide
  Seed: PRMCSLMQGSTLPR
PRMWSLLQTSTSPR

SEQ ID NO: 108557 - protein, 14 aa, Artificial Sequence
  Description of Artificial Sequence: Synthetic peptide
  Seed: PRMCSLMQGSTLPR
PRMWSLLQTSTVPR

SEQ ID NO: 108558 - protein, 14 aa, Artificial Sequence
  Description of Artificial Sequence: Synthetic peptide
  Seed: PRMCSLMQGSTLPR
PRMWSLLQVSTAPR

SEQ ID NO: 108559 - protein, 14 aa, Artificial Sequence
  Description of Artificial Sequence: Synthetic peptide
  Seed: PRMCSLMQGSTLPR
PRMWSLLQVSTSPR

SEQ ID NO: 108560 - protein, 14 aa, Artificial Sequence
  Description of Artificial Sequence: Synthetic peptide
  Seed: PRMCSLMQGSTLPR
PRMWSLMQASTAPR

SEQ ID NO: 108561 - protein, 14 aa, Artificial Sequence
  Description of Artificial Sequence: Synthetic peptide
  Seed: PRMCSLMQGSTLPR
PRMWSLMQASTIPR

SEQ ID NO: 108562 - protein, 14 aa, Artificial Sequence
  Description of Artificial Sequence: Synthetic peptide
  Seed: PRMCSLMQGSTLPR
PRMWSLMQASTLPR

SEQ ID NO: 108563 - protein, 14 aa, Artificial Sequence
  Description of Artificial Sequence: Synthetic peptide
  Seed: PRMCSLMQGSTLPR
PRMWSLMQASTMPR

SEQ ID NO: 108564 - protein, 14 aa, Artificial Sequence
  Description of Artificial Sequence: Synthetic peptide
  Seed: PRMCSLMQGSTLPR
PRMWSLMQASTSPR

SEQ ID NO: 108565 - protein, 14 aa, Artificial Sequence
  Description of Artificial Sequence: Synthetic peptide
  Seed: PRMCSLMQGSTLPR
PRMWSLMQASTTPR

SEQ ID NO: 108566 - protein, 14 aa, Artificial Sequence
  Description of Artificial Sequence: Synthetic peptide
  Seed: PRMCSLMQGSTLPR
PRMWSLMQASTVPR

SEQ ID NO: 108567 - protein, 14 aa, Artificial Sequence
  Description of Artificial Sequence: Synthetic peptide
  Seed: PRMCSLMQGSTLPR
PRMWSLMQGSTAPR

SEQ ID NO: 108568 - protein, 14 aa, Artificial Sequence
  Description of Artificial Sequence: Synthetic peptide
  Seed: PRMCSLMQGSTLPR
PRMWSLMQGSTIPR

SEQ ID NO: 108569 - protein, 14 aa, Artificial Sequence
  Description of Artificial Sequence: Synthetic peptide
  Seed: PRMCSLMQGSTLPR
PRMWSLMQGSTLPR

SEQ ID NO: 108570 - protein, 14 aa, Artificial Sequence
  Description of Artificial Sequence: Synthetic peptide
  Seed: PRMCSLMQGSTLPR
PRMWSLMQGSTMPR

SEQ ID NO: 108571 - protein, 14 aa, Artificial Sequence
  Description of Artificial Sequence: Synthetic peptide
  Seed: PRMCSLMQGSTLPR
PRMWSLMQGSTSPR

SEQ ID NO: 108572 - protein, 14 aa, Artificial Sequence
  Description of Artificial Sequence: Synthetic peptide
  Seed: PRMCSLMQGSTLPR
PRMWSLMQGSTTPR

SEQ ID NO: 108573 - protein, 14 aa, Artificial Sequence
  Description of Artificial Sequence: Synthetic peptide
  Seed: PRMCSLMQGSTLPR
PRMWSLMQGSTVPR

SEQ ID NO: 108574 - protein, 14 aa, Artificial Sequence
  Description of Artificial Sequence: Synthetic peptide
  Seed: PRMCSLMQGSTLPR
PRMWSLMQISTAPR

SEQ ID NO: 108575 - protein, 14 aa, Artificial Sequence
  Description of Artificial Sequence: Synthetic peptide
  Seed: PRMCSLMQGSTLPR
PRMWSLMQNSTIPR

SEQ ID NO: 108576 - protein, 14 aa, Artificial Sequence
  Description of Artificial Sequence: Synthetic peptide
  Seed: PRMCSLMQGSTLPR
PRMWSLMQNSTLPR

SEQ ID NO: 108577 - protein, 14 aa, Artificial Sequence
  Description of Artificial Sequence: Synthetic peptide
  Seed: PRMCSLMQGSTLPR
PRMWSLMQNSTVPR

SEQ ID NO: 108578 - protein, 14 aa, Artificial Sequence
  Description of Artificial Sequence: Synthetic peptide
  Seed: PRMCSLMQGSTLPR
PRMWSLMQPSTAPR

SEQ ID NO: 108579 - protein, 14 aa, Artificial Sequence
  Description of Artificial Sequence: Synthetic peptide
  Seed: PRMCSLMQGSTLPR
PRMWSLMQPSTIPR

SEQ ID NO: 108580 - protein, 14 aa, Artificial Sequence
  Description of Artificial Sequence: Synthetic peptide
  Seed: PRMCSLMQGSTLPR
PRMWSLMQPSTLPR

SEQ ID NO: 108581 - protein, 14 aa, Artificial Sequence
  Description of Artificial Sequence: Synthetic peptide
  Seed: PRMCSLMQGSTLPR
PRMWSLMQPSTVPR

SEQ ID NO: 108582 - protein, 14 aa, Artificial Sequence
  Description of Artificial Sequence: Synthetic peptide
  Seed: PRMCSLMQGSTLPR
PRMWSLMQSSTAPR

SEQ ID NO: 108583 - protein, 14 aa, Artificial Sequence
  Description of Artificial Sequence: Synthetic peptide
  Seed: PRMCSLMQGSTLPR
PRMWSLMQSSTIPR

SEQ ID NO: 108584 - protein, 14 aa, Artificial Sequence
  Description of Artificial Sequence: Synthetic peptide
  Seed: PRMCSLMQGSTLPR
PRMWSLMQSSTLPR

SEQ ID NO: 108585 - protein, 14 aa, Artificial Sequence
  Description of Artificial Sequence: Synthetic peptide
  Seed: PRMCSLMQGSTLPR
PRMWSLMQSSTMPR

SEQ ID NO: 108586 - protein, 14 aa, Artificial Sequence
  Description of Artificial Sequence: Synthetic peptide
  Seed: PRMCSLMQGSTLPR
PRMWSLMQSSTSPR

SEQ ID NO: 108587 - protein, 14 aa, Artificial Sequence
  Description of Artificial Sequence: Synthetic peptide
  Seed: PRMCSLMQGSTLPR
PRMWSLMQSSTTPR

SEQ ID NO: 108588 - protein, 14 aa, Artificial Sequence
  Description of Artificial Sequence: Synthetic peptide
  Seed: PRMCSLMQGSTLPR
PRMWSLMQSSTVPR

SEQ ID NO: 108589 - protein, 14 aa, Artificial Sequence
  Description of Artificial Sequence: Synthetic peptide
  Seed: PRMCSLMQGSTLPR
PRMWSLMQTSTAPR

SEQ ID NO: 108590 - protein, 14 aa, Artificial Sequence
  Description of Artificial Sequence: Synthetic peptide
  Seed: PRMCSLMQGSTLPR
PRMWSLMQTSTIPR

SEQ ID NO: 108591 - protein, 14 aa, Artificial Sequence
  Description of Artificial Sequence: Synthetic peptide
  Seed: PRMCSLMQGSTLPR
PRMWSLMQTSTLPR

SEQ ID NO: 108592 - protein, 14 aa, Artificial Sequence
  Description of Artificial Sequence: Synthetic peptide
  Seed: PRMCSLMQGSTLPR
PRMWSLMQTSTVPR

SEQ ID NO: 108593 - protein, 14 aa, Artificial Sequence
  Description of Artificial Sequence: Synthetic peptide
  Seed: PRMCSLMQGSTLPR
PRMWSLMQVSTAPR

SEQ ID NO: 108594 - protein, 14 aa, Artificial Sequence
  Description of Artificial Sequence: Synthetic peptide
  Seed: PRMCSLMQGSTLPR
PRMWSLMQVSTSPR

SEQ ID NO: 108595 - protein, 14 aa, Artificial Sequence
  Description of Artificial Sequence: Synthetic peptide
  Seed: PRMCSLMQGSTLPR
PRMWSLQQASTLPR

SEQ ID NO: 108596 - protein, 14 aa, Artificial Sequence
  Description of Artificial Sequence: Synthetic peptide
  Seed: PRMCSLMQGSTLPR
PRMYSLAQASTAPR

SEQ ID NO: 108597 - protein, 14 aa, Artificial Sequence
  Description of Artificial Sequence: Synthetic peptide
  Seed: PRMCSLMQGSTLPR
PRMYSLAQASTIPR

SEQ ID NO: 108598 - protein, 14 aa, Artificial Sequence
  Description of Artificial Sequence: Synthetic peptide
  Seed: PRMCSLMQGSTLPR
PRMYSLAQASTLPR

SEQ ID NO: 108599 - protein, 14 aa, Artificial Sequence
  Description of Artificial Sequence: Synthetic peptide
  Seed: PRMCSLMQGSTLPR
PRMYSLAQASTMPR

SEQ ID NO: 108600 - protein, 14 aa, Artificial Sequence
  Description of Artificial Sequence: Synthetic peptide
  Seed: PRMCSLMQGSTLPR
PRMYSLAQASTVPR

SEQ ID NO: 108601 - protein, 14 aa, Artificial Sequence
  Description of Artificial Sequence: Synthetic peptide
  Seed: PRMCSLMQGSTLPR
PRMYSLAQGSTAPR

SEQ ID NO: 108602 - protein, 14 aa, Artificial Sequence
  Description of Artificial Sequence: Synthetic peptide
  Seed: PRMCSLMQGSTLPR
PRMYSLAQGSTIPR

SEQ ID NO: 108603 - protein, 14 aa, Artificial Sequence
  Description of Artificial Sequence: Synthetic peptide
  Seed: PRMCSLMQGSTLPR
PRMYSLAQGSTLPR

SEQ ID NO: 108604 - protein, 14 aa, Artificial Sequence
  Description of Artificial Sequence: Synthetic peptide
  Seed: PRMCSLMQGSTLPR
PRMYSLAQGSTVPR

SEQ ID NO: 108605 - protein, 14 aa, Artificial Sequence
  Description of Artificial Sequence: Synthetic peptide
  Seed: PRMCSLMQGSTLPR
PRMYSLAQISTAPR

SEQ ID NO: 108606 - protein, 14 aa, Artificial Sequence
  Description of Artificial Sequence: Synthetic peptide
  Seed: PRMCSLMQGSTLPR
PRMYSLAQPSTIPR

SEQ ID NO: 108607 - protein, 14 aa, Artificial Sequence
  Description of Artificial Sequence: Synthetic peptide
  Seed: PRMCSLMQGSTLPR
PRMYSLAQPSTLPR

SEQ ID NO: 108608 - protein, 14 aa, Artificial Sequence
  Description of Artificial Sequence: Synthetic peptide
  Seed: PRMCSLMQGSTLPR
PRMYSLAQPSTVPR

SEQ ID NO: 108609 - protein, 14 aa, Artificial Sequence
  Description of Artificial Sequence: Synthetic peptide
  Seed: PRMCSLMQGSTLPR
PRMYSLAQSSTAPR

SEQ ID NO: 108610 - protein, 14 aa, Artificial Sequence
  Description of Artificial Sequence: Synthetic peptide
  Seed: PRMCSLMQGSTLPR
PRMYSLAQSSTIPR

SEQ ID NO: 108611 - protein, 14 aa, Artificial Sequence
  Description of Artificial Sequence: Synthetic peptide
  Seed: PRMCSLMQGSTLPR
PRMYSLAQSSTLPR

SEQ ID NO: 108612 - protein, 14 aa, Artificial Sequence
  Description of Artificial Sequence: Synthetic peptide
  Seed: PRMCSLMQGSTLPR
PRMYSLAQSSTVPR

SEQ ID NO: 108613 - protein, 14 aa, Artificial Sequence
  Description of Artificial Sequence: Synthetic peptide
  Seed: PRMCSLMQGSTLPR
PRMYSLAQVSTAPR

SEQ ID NO: 108614 - protein, 14 aa, Artificial Sequence
  Description of Artificial Sequence: Synthetic peptide
  Seed: PRMCSLMQGSTLPR
PRMYSLIQASTAPR

SEQ ID NO: 108615 - protein, 14 aa, Artificial Sequence
  Description of Artificial Sequence: Synthetic peptide
  Seed: PRMCSLMQGSTLPR
PRMYSLIQASTIPR

SEQ ID NO: 108616 - protein, 14 aa, Artificial Sequence
  Description of Artificial Sequence: Synthetic peptide
  Seed: PRMCSLMQGSTLPR
PRMYSLIQASTLPR

SEQ ID NO: 108617 - protein, 14 aa, Artificial Sequence
  Description of Artificial Sequence: Synthetic peptide
  Seed: PRMCSLMQGSTLPR
PRMYSLIQASTMPR

SEQ ID NO: 108618 - protein, 14 aa, Artificial Sequence
  Description of Artificial Sequence: Synthetic peptide
  Seed: PRMCSLMQGSTLPR
PRMYSLIQASTNPR

SEQ ID NO: 108619 - protein, 14 aa, Artificial Sequence
  Description of Artificial Sequence: Synthetic peptide
  Seed: PRMCSLMQGSTLPR
PRMYSLIQASTSPR

SEQ ID NO: 108620 - protein, 14 aa, Artificial Sequence
  Description of Artificial Sequence: Synthetic peptide
  Seed: PRMCSLMQGSTLPR
PRMYSLIQASTTPR

SEQ ID NO: 108621 - protein, 14 aa, Artificial Sequence
  Description of Artificial Sequence: Synthetic peptide
  Seed: PRMCSLMQGSTLPR
PRMYSLIQASTVPR

SEQ ID NO: 108622 - protein, 14 aa, Artificial Sequence
  Description of Artificial Sequence: Synthetic peptide
  Seed: PRMCSLMQGSTLPR
PRMYSLIQGSTAPR

SEQ ID NO: 108623 - protein, 14 aa, Artificial Sequence
  Description of Artificial Sequence: Synthetic peptide
  Seed: PRMCSLMQGSTLPR
PRMYSLIQGSTIPR

SEQ ID NO: 108624 - protein, 14 aa, Artificial Sequence
  Description of Artificial Sequence: Synthetic peptide
  Seed: PRMCSLMQGSTLPR
PRMYSLIQGSTLPR

SEQ ID NO: 108625 - protein, 14 aa, Artificial Sequence
  Description of Artificial Sequence: Synthetic peptide
  Seed: PRMCSLMQGSTLPR
PRMYSLIQGSTMPR

SEQ ID NO: 108626 - protein, 14 aa, Artificial Sequence
  Description of Artificial Sequence: Synthetic peptide
  Seed: PRMCSLMQGSTLPR
PRMYSLIQGSTSPR

SEQ ID NO: 108627 - protein, 14 aa, Artificial Sequence
  Description of Artificial Sequence: Synthetic peptide
  Seed: PRMCSLMQGSTLPR
PRMYSLIQGSTTPR

SEQ ID NO: 108628 - protein, 14 aa, Artificial Sequence
  Description of Artificial Sequence: Synthetic peptide
  Seed: PRMCSLMQGSTLPR
PRMYSLIQGSTVPR

SEQ ID NO: 108629 - protein, 14 aa, Artificial Sequence
  Description of Artificial Sequence: Synthetic peptide
  Seed: PRMCSLMQGSTLPR
PRMYSLIQISTAPR

SEQ ID NO: 108630 - protein, 14 aa, Artificial Sequence
  Description of Artificial Sequence: Synthetic peptide
  Seed: PRMCSLMQGSTLPR
PRMYSLIQISTSPR

SEQ ID NO: 108631 - protein, 14 aa, Artificial Sequence
  Description of Artificial Sequence: Synthetic peptide
  Seed: PRMCSLMQGSTLPR
PRMYSLIQNSTIPR

SEQ ID NO: 108632 - protein, 14 aa, Artificial Sequence
  Description of Artificial Sequence: Synthetic peptide
  Seed: PRMCSLMQGSTLPR
PRMYSLIQNSTLPR

SEQ ID NO: 108633 - protein, 14 aa, Artificial Sequence
  Description of Artificial Sequence: Synthetic peptide
  Seed: PRMCSLMQGSTLPR
PRMYSLIQNSTVPR

SEQ ID NO: 108634 - protein, 14 aa, Artificial Sequence
  Description of Artificial Sequence: Synthetic peptide
  Seed: PRMCSLMQGSTLPR
PRMYSLIQPSTAPR

SEQ ID NO: 108635 - protein, 14 aa, Artificial Sequence
  Description of Artificial Sequence: Synthetic peptide
  Seed: PRMCSLMQGSTLPR
PRMYSLIQPSTIPR

SEQ ID NO: 108636 - protein, 14 aa, Artificial Sequence
  Description of Artificial Sequence: Synthetic peptide
  Seed: PRMCSLMQGSTLPR
PRMYSLIQPSTLPR

SEQ ID NO: 108637 - protein, 14 aa, Artificial Sequence
  Description of Artificial Sequence: Synthetic peptide
  Seed: PRMCSLMQGSTLPR
PRMYSLIQPSTNPR

SEQ ID NO: 108638 - protein, 14 aa, Artificial Sequence
  Description of Artificial Sequence: Synthetic peptide
  Seed: PRMCSLMQGSTLPR
PRMYSLIQPSTSPR

SEQ ID NO: 108639 - protein, 14 aa, Artificial Sequence
  Description of Artificial Sequence: Synthetic peptide
  Seed: PRMCSLMQGSTLPR
PRMYSLIQPSTTPR

SEQ ID NO: 108640 - protein, 14 aa, Artificial Sequence
  Description of Artificial Sequence: Synthetic peptide
  Seed: PRMCSLMQGSTLPR
PRMYSLIQPSTVPR

SEQ ID NO: 108641 - protein, 14 aa, Artificial Sequence
  Description of Artificial Sequence: Synthetic peptide
  Seed: PRMCSLMQGSTLPR
PRMYSLIQSSTAPR

SEQ ID NO: 108642 - protein, 14 aa, Artificial Sequence
  Description of Artificial Sequence: Synthetic peptide
  Seed: PRMCSLMQGSTLPR
PRMYSLIQSSTIPR

SEQ ID NO: 108643 - protein, 14 aa, Artificial Sequence
  Description of Artificial Sequence: Synthetic peptide
  Seed: PRMCSLMQGSTLPR
PRMYSLIQSSTLPR

SEQ ID NO: 108644 - protein, 14 aa, Artificial Sequence
  Description of Artificial Sequence: Synthetic peptide
  Seed: PRMCSLMQGSTLPR
PRMYSLIQSSTMPR

SEQ ID NO: 108645 - protein, 14 aa, Artificial Sequence
  Description of Artificial Sequence: Synthetic peptide
  Seed: PRMCSLMQGSTLPR
PRMYSLIQSSTNPR

SEQ ID NO: 108646 - protein, 14 aa, Artificial Sequence
  Description of Artificial Sequence: Synthetic peptide
  Seed: PRMCSLMQGSTLPR
PRMYSLIQSSTSPR

SEQ ID NO: 108647 - protein, 14 aa, Artificial Sequence
  Description of Artificial Sequence: Synthetic peptide
  Seed: PRMCSLMQGSTLPR
PRMYSLIQSSTTPR

SEQ ID NO: 108648 - protein, 14 aa, Artificial Sequence
  Description of Artificial Sequence: Synthetic peptide
  Seed: PRMCSLMQGSTLPR
PRMYSLIQSSTVPR

SEQ ID NO: 108649 - protein, 14 aa, Artificial Sequence
  Description of Artificial Sequence: Synthetic peptide
  Seed: PRMCSLMQGSTLPR
PRMYSLIQTSTAPR

SEQ ID NO: 108650 - protein, 14 aa, Artificial Sequence
  Description of Artificial Sequence: Synthetic peptide
  Seed: PRMCSLMQGSTLPR
PRMYSLIQTSTIPR

SEQ ID NO: 108651 - protein, 14 aa, Artificial Sequence
  Description of Artificial Sequence: Synthetic peptide
  Seed: PRMCSLMQGSTLPR
PRMYSLIQTSTLPR

SEQ ID NO: 108652 - protein, 14 aa, Artificial Sequence
  Description of Artificial Sequence: Synthetic peptide
  Seed: PRMCSLMQGSTLPR
PRMYSLIQTSTSPR

SEQ ID NO: 108653 - protein, 14 aa, Artificial Sequence
  Description of Artificial Sequence: Synthetic peptide
  Seed: PRMCSLMQGSTLPR
PRMYSLIQTSTTPR

SEQ ID NO: 108654 - protein, 14 aa, Artificial Sequence
  Description of Artificial Sequence: Synthetic peptide
  Seed: PRMCSLMQGSTLPR
PRMYSLIQTSTVPR

SEQ ID NO: 108655 - protein, 14 aa, Artificial Sequence
  Description of Artificial Sequence: Synthetic peptide
  Seed: PRMCSLMQGSTLPR
PRMYSLIQVSTAPR

SEQ ID NO: 108656 - protein, 14 aa, Artificial Sequence
  Description of Artificial Sequence: Synthetic peptide
  Seed: PRMCSLMQGSTLPR
PRMYSLIQVSTNPR

SEQ ID NO: 108657 - protein, 14 aa, Artificial Sequence
  Description of Artificial Sequence: Synthetic peptide
  Seed: PRMCSLMQGSTLPR
PRMYSLIQVSTSPR

SEQ ID NO: 108658 - protein, 14 aa, Artificial Sequence
  Description of Artificial Sequence: Synthetic peptide
  Seed: PRMCSLMQGSTLPR
PRMYSLIQVSTTPR

SEQ ID NO: 108659 - protein, 14 aa, Artificial Sequence
  Description of Artificial Sequence: Synthetic peptide
  Seed: PRMCSLMQGSTLPR
PRMYSLIQVSTVPR

SEQ ID NO: 108660 - protein, 14 aa, Artificial Sequence
  Description of Artificial Sequence: Synthetic peptide
  Seed: PRMCSLMQGSTLPR
PRMYSLLQASTAPR

SEQ ID NO: 108661 - protein, 14 aa, Artificial Sequence
  Description of Artificial Sequence: Synthetic peptide
  Seed: PRMCSLMQGSTLPR
PRMYSLLQASTFPR

SEQ ID NO: 108662 - protein, 14 aa, Artificial Sequence
  Description of Artificial Sequence: Synthetic peptide
  Seed: PRMCSLMQGSTLPR
PRMYSLLQASTGPR

SEQ ID NO: 108663 - protein, 14 aa, Artificial Sequence
  Description of Artificial Sequence: Synthetic peptide
  Seed: PRMCSLMQGSTLPR
PRMYSLLQASTIPR

SEQ ID NO: 108664 - protein, 14 aa, Artificial Sequence
  Description of Artificial Sequence: Synthetic peptide
  Seed: PRMCSLMQGSTLPR
PRMYSLLQASTLPR

SEQ ID NO: 108665 - protein, 14 aa, Artificial Sequence
  Description of Artificial Sequence: Synthetic peptide
  Seed: PRMCSLMQGSTLPR
PRMYSLLQASTMPR

SEQ ID NO: 108666 - protein, 14 aa, Artificial Sequence
  Description of Artificial Sequence: Synthetic peptide
  Seed: PRMCSLMQGSTLPR
PRMYSLLQASTNPR

SEQ ID NO: 108667 - protein, 14 aa, Artificial Sequence
  Description of Artificial Sequence: Synthetic peptide
  Seed: PRMCSLMQGSTLPR
PRMYSLLQASTSPR

SEQ ID NO: 108668 - protein, 14 aa, Artificial Sequence
  Description of Artificial Sequence: Synthetic peptide
  Seed: PRMCSLMQGSTLPR
PRMYSLLQASTTPR

SEQ ID NO: 108669 - protein, 14 aa, Artificial Sequence
  Description of Artificial Sequence: Synthetic peptide
  Seed: PRMCSLMQGSTLPR
PRMYSLLQASTVPR

SEQ ID NO: 108670 - protein, 14 aa, Artificial Sequence
  Description of Artificial Sequence: Synthetic peptide
  Seed: PRMCSLMQGSTLPR
PRMYSLLQGSTAPR

SEQ ID NO: 108671 - protein, 14 aa, Artificial Sequence
  Description of Artificial Sequence: Synthetic peptide
  Seed: PRMCSLMQGSTLPR
PRMYSLLQGSTGPR

SEQ ID NO: 108672 - protein, 14 aa, Artificial Sequence
  Description of Artificial Sequence: Synthetic peptide
  Seed: PRMCSLMQGSTLPR
PRMYSLLQGSTIPR

SEQ ID NO: 108673 - protein, 14 aa, Artificial Sequence
  Description of Artificial Sequence: Synthetic peptide
  Seed: PRMCSLMQGSTLPR
PRMYSLLQGSTLPR

SEQ ID NO: 108674 - protein, 14 aa, Artificial Sequence
  Description of Artificial Sequence: Synthetic peptide
  Seed: PRMCSLMQGSTLPR
PRMYSLLQGSTMPR

SEQ ID NO: 108675 - protein, 14 aa, Artificial Sequence
  Description of Artificial Sequence: Synthetic peptide
  Seed: PRMCSLMQGSTLPR
PRMYSLLQGSTSPR

SEQ ID NO: 108676 - protein, 14 aa, Artificial Sequence
  Description of Artificial Sequence: Synthetic peptide
  Seed: PRMCSLMQGSTLPR
PRMYSLLQGSTTPR

SEQ ID NO: 108677 - protein, 14 aa, Artificial Sequence
  Description of Artificial Sequence: Synthetic peptide
  Seed: PRMCSLMQGSTLPR
PRMYSLLQGSTVPR

SEQ ID NO: 108678 - protein, 14 aa, Artificial Sequence
  Description of Artificial Sequence: Synthetic peptide
  Seed: PRMCSLMQGSTLPR
PRMYSLLQISTAPR

SEQ ID NO: 108679 - protein, 14 aa, Artificial Sequence
  Description of Artificial Sequence: Synthetic peptide
  Seed: PRMCSLMQGSTLPR
PRMYSLLQISTIPR

SEQ ID NO: 108680 - protein, 14 aa, Artificial Sequence
  Description of Artificial Sequence: Synthetic peptide
  Seed: PRMCSLMQGSTLPR
PRMYSLLQISTLPR

SEQ ID NO: 108681 - protein, 14 aa, Artificial Sequence
  Description of Artificial Sequence: Synthetic peptide
  Seed: PRMCSLMQGSTLPR
PRMYSLLQISTNPR

SEQ ID NO: 108682 - protein, 14 aa, Artificial Sequence
  Description of Artificial Sequence: Synthetic peptide
  Seed: PRMCSLMQGSTLPR
PRMYSLLQISTSPR

SEQ ID NO: 108683 - protein, 14 aa, Artificial Sequence
  Description of Artificial Sequence: Synthetic peptide
  Seed: PRMCSLMQGSTLPR
PRMYSLLQISTTPR

SEQ ID NO: 108684 - protein, 14 aa, Artificial Sequence
  Description of Artificial Sequence: Synthetic peptide
  Seed: PRMCSLMQGSTLPR
PRMYSLLQISTVPR

SEQ ID NO: 108685 - protein, 14 aa, Artificial Sequence
  Description of Artificial Sequence: Synthetic peptide
  Seed: PRMCSLMQGSTLPR
PRMYSLLQNSTAPR

SEQ ID NO: 108686 - protein, 14 aa, Artificial Sequence
  Description of Artificial Sequence: Synthetic peptide
  Seed: PRMCSLMQGSTLPR
PRMYSLLQNSTIPR

SEQ ID NO: 108687 - protein, 14 aa, Artificial Sequence
  Description of Artificial Sequence: Synthetic peptide
  Seed: PRMCSLMQGSTLPR
PRMYSLLQNSTLPR

SEQ ID NO: 108688 - protein, 14 aa, Artificial Sequence
  Description of Artificial Sequence: Synthetic peptide
  Seed: PRMCSLMQGSTLPR
PRMYSLLQNSTMPR

SEQ ID NO: 108689 - protein, 14 aa, Artificial Sequence
  Description of Artificial Sequence: Synthetic peptide
  Seed: PRMCSLMQGSTLPR
PRMYSLLQNSTTPR

SEQ ID NO: 108690 - protein, 14 aa, Artificial Sequence
  Description of Artificial Sequence: Synthetic peptide
  Seed: PRMCSLMQGSTLPR
PRMYSLLQNSTVPR

SEQ ID NO: 108691 - protein, 14 aa, Artificial Sequence
  Description of Artificial Sequence: Synthetic peptide
  Seed: PRMCSLMQGSTLPR
PRMYSLLQPSTAPR

SEQ ID NO: 108692 - protein, 14 aa, Artificial Sequence
  Description of Artificial Sequence: Synthetic peptide
  Seed: PRMCSLMQGSTLPR
PRMYSLLQPSTIPR

SEQ ID NO: 108693 - protein, 14 aa, Artificial Sequence
  Description of Artificial Sequence: Synthetic peptide
  Seed: PRMCSLMQGSTLPR
PRMYSLLQPSTLPR

SEQ ID NO: 108694 - protein, 14 aa, Artificial Sequence
  Description of Artificial Sequence: Synthetic peptide
  Seed: PRMCSLMQGSTLPR
PRMYSLLQPSTMPR

SEQ ID NO: 108695 - protein, 14 aa, Artificial Sequence
  Description of Artificial Sequence: Synthetic peptide
  Seed: PRMCSLMQGSTLPR
PRMYSLLQPSTNPR

SEQ ID NO: 108696 - protein, 14 aa, Artificial Sequence
  Description of Artificial Sequence: Synthetic peptide
  Seed: PRMCSLMQGSTLPR
PRMYSLLQPSTSPR

SEQ ID NO: 108697 - protein, 14 aa, Artificial Sequence
  Description of Artificial Sequence: Synthetic peptide
  Seed: PRMCSLMQGSTLPR
PRMYSLLQPSTTPR

SEQ ID NO: 108698 - protein, 14 aa, Artificial Sequence
  Description of Artificial Sequence: Synthetic peptide
  Seed: PRMCSLMQGSTLPR
PRMYSLLQPSTVPR

SEQ ID NO: 108699 - protein, 14 aa, Artificial Sequence
  Description of Artificial Sequence: Synthetic peptide
  Seed: PRMCSLMQGSTLPR
PRMYSLLQSSTAPR

SEQ ID NO: 108700 - protein, 14 aa, Artificial Sequence
  Description of Artificial Sequence: Synthetic peptide
  Seed: PRMCSLMQGSTLPR
PRMYSLLQSSTGPR

SEQ ID NO: 108701 - protein, 14 aa, Artificial Sequence
  Description of Artificial Sequence: Synthetic peptide
  Seed: PRMCSLMQGSTLPR
PRMYSLLQSSTIPR

SEQ ID NO: 108702 - protein, 14 aa, Artificial Sequence
  Description of Artificial Sequence: Synthetic peptide
  Seed: PRMCSLMQGSTLPR
PRMYSLLQSSTLPR

SEQ ID NO: 108703 - protein, 14 aa, Artificial Sequence
  Description of Artificial Sequence: Synthetic peptide
  Seed: PRMCSLMQGSTLPR
PRMYSLLQSSTMPR

SEQ ID NO: 108704 - protein, 14 aa, Artificial Sequence
  Description of Artificial Sequence: Synthetic peptide
  Seed: PRMCSLMQGSTLPR
PRMYSLLQSSTNPR

SEQ ID NO: 108705 - protein, 14 aa, Artificial Sequence
  Description of Artificial Sequence: Synthetic peptide
  Seed: PRMCSLMQGSTLPR
PRMYSLLQSSTSPR

SEQ ID NO: 108706 - protein, 14 aa, Artificial Sequence
  Description of Artificial Sequence: Synthetic peptide
  Seed: PRMCSLMQGSTLPR
PRMYSLLQSSTTPR

SEQ ID NO: 108707 - protein, 14 aa, Artificial Sequence
  Description of Artificial Sequence: Synthetic peptide
  Seed: PRMCSLMQGSTLPR
PRMYSLLQSSTVPR

SEQ ID NO: 108708 - protein, 14 aa, Artificial Sequence
  Description of Artificial Sequence: Synthetic peptide
  Seed: PRMCSLMQGSTLPR
PRMYSLLQTSTAPR

SEQ ID NO: 108709 - protein, 14 aa, Artificial Sequence
  Description of Artificial Sequence: Synthetic peptide
  Seed: PRMCSLMQGSTLPR
PRMYSLLQTSTIPR

SEQ ID NO: 108710 - protein, 14 aa, Artificial Sequence
  Description of Artificial Sequence: Synthetic peptide
  Seed: PRMCSLMQGSTLPR
PRMYSLLQTSTLPR

SEQ ID NO: 108711 - protein, 14 aa, Artificial Sequence
  Description of Artificial Sequence: Synthetic peptide
  Seed: PRMCSLMQGSTLPR
PRMYSLLQTSTMPR

SEQ ID NO: 108712 - protein, 14 aa, Artificial Sequence
  Description of Artificial Sequence: Synthetic peptide
  Seed: PRMCSLMQGSTLPR
PRMYSLLQTSTNPR

SEQ ID NO: 108713 - protein, 14 aa, Artificial Sequence
  Description of Artificial Sequence: Synthetic peptide
  Seed: PRMCSLMQGSTLPR
PRMYSLLQTSTSPR

SEQ ID NO: 108714 - protein, 14 aa, Artificial Sequence
  Description of Artificial Sequence: Synthetic peptide
  Seed: PRMCSLMQGSTLPR
PRMYSLLQTSTTPR

SEQ ID NO: 108715 - protein, 14 aa, Artificial Sequence
  Description of Artificial Sequence: Synthetic peptide
  Seed: PRMCSLMQGSTLPR
PRMYSLLQTSTVPR

SEQ ID NO: 108716 - protein, 14 aa, Artificial Sequence
  Description of Artificial Sequence: Synthetic peptide
  Seed: PRMCSLMQGSTLPR
PRMYSLLQVSTAPR

SEQ ID NO: 108717 - protein, 14 aa, Artificial Sequence
  Description of Artificial Sequence: Synthetic peptide
  Seed: PRMCSLMQGSTLPR
PRMYSLLQVSTIPR

SEQ ID NO: 108718 - protein, 14 aa, Artificial Sequence
  Description of Artificial Sequence: Synthetic peptide
  Seed: PRMCSLMQGSTLPR
PRMYSLLQVSTLPR

SEQ ID NO: 108719 - protein, 14 aa, Artificial Sequence
  Description of Artificial Sequence: Synthetic peptide
  Seed: PRMCSLMQGSTLPR
PRMYSLLQVSTMPR

SEQ ID NO: 108720 - protein, 14 aa, Artificial Sequence
  Description of Artificial Sequence: Synthetic peptide
  Seed: PRMCSLMQGSTLPR
PRMYSLLQVSTNPR

SEQ ID NO: 108721 - protein, 14 aa, Artificial Sequence
  Description of Artificial Sequence: Synthetic peptide
  Seed: PRMCSLMQGSTLPR
PRMYSLLQVSTSPR

SEQ ID NO: 108722 - protein, 14 aa, Artificial Sequence
  Description of Artificial Sequence: Synthetic peptide
  Seed: PRMCSLMQGSTLPR
PRMYSLLQVSTTPR

SEQ ID NO: 108723 - protein, 14 aa, Artificial Sequence
  Description of Artificial Sequence: Synthetic peptide
  Seed: PRMCSLMQGSTLPR
PRMYSLLQVSTVPR

SEQ ID NO: 108724 - protein, 14 aa, Artificial Sequence
  Description of Artificial Sequence: Synthetic peptide
  Seed: PRMCSLMQGSTLPR
PRMYSLMQASTAPR

SEQ ID NO: 108725 - protein, 14 aa, Artificial Sequence
  Description of Artificial Sequence: Synthetic peptide
  Seed: PRMCSLMQGSTLPR
PRMYSLMQASTFPR

SEQ ID NO: 108726 - protein, 14 aa, Artificial Sequence
  Description of Artificial Sequence: Synthetic peptide
  Seed: PRMCSLMQGSTLPR
PRMYSLMQASTGPR

SEQ ID NO: 108727 - protein, 14 aa, Artificial Sequence
  Description of Artificial Sequence: Synthetic peptide
  Seed: PRMCSLMQGSTLPR
PRMYSLMQASTIPR

SEQ ID NO: 108728 - protein, 14 aa, Artificial Sequence
  Description of Artificial Sequence: Synthetic peptide
  Seed: PRMCSLMQGSTLPR
PRMYSLMQASTLPR

SEQ ID NO: 108729 - protein, 14 aa, Artificial Sequence
  Description of Artificial Sequence: Synthetic peptide
  Seed: PRMCSLMQGSTLPR
PRMYSLMQASTMPR

SEQ ID NO: 108730 - protein, 14 aa, Artificial Sequence
  Description of Artificial Sequence: Synthetic peptide
  Seed: PRMCSLMQGSTLPR
PRMYSLMQASTNPR

SEQ ID NO: 108731 - protein, 14 aa, Artificial Sequence
  Description of Artificial Sequence: Synthetic peptide
  Seed: PRMCSLMQGSTLPR
PRMYSLMQASTSPR

SEQ ID NO: 108732 - protein, 14 aa, Artificial Sequence
  Description of Artificial Sequence: Synthetic peptide
  Seed: PRMCSLMQGSTLPR
PRMYSLMQASTTPR

SEQ ID NO: 108733 - protein, 14 aa, Artificial Sequence
  Description of Artificial Sequence: Synthetic peptide
  Seed: PRMCSLMQGSTLPR
PRMYSLMQASTVPR

SEQ ID NO: 108734 - protein, 14 aa, Artificial Sequence
  Description of Artificial Sequence: Synthetic peptide
  Seed: PRMCSLMQGSTLPR
PRMYSLMQGSTAPR

SEQ ID NO: 108735 - protein, 14 aa, Artificial Sequence
  Description of Artificial Sequence: Synthetic peptide
  Seed: PRMCSLMQGSTLPR
PRMYSLMQGSTGPR

SEQ ID NO: 108736 - protein, 14 aa, Artificial Sequence
  Description of Artificial Sequence: Synthetic peptide
  Seed: PRMCSLMQGSTLPR
PRMYSLMQGSTIPR

SEQ ID NO: 108737 - protein, 14 aa, Artificial Sequence
  Description of Artificial Sequence: Synthetic peptide
  Seed: PRMCSLMQGSTLPR
PRMYSLMQGSTLPR

SEQ ID NO: 108738 - protein, 14 aa, Artificial Sequence
  Description of Artificial Sequence: Synthetic peptide
  Seed: PRMCSLMQGSTLPR
PRMYSLMQGSTMPR

SEQ ID NO: 108739 - protein, 14 aa, Artificial Sequence
  Description of Artificial Sequence: Synthetic peptide
  Seed: PRMCSLMQGSTLPR
PRMYSLMQGSTSPR

SEQ ID NO: 108740 - protein, 14 aa, Artificial Sequence
  Description of Artificial Sequence: Synthetic peptide
  Seed: PRMCSLMQGSTLPR
PRMYSLMQGSTTPR

SEQ ID NO: 108741 - protein, 14 aa, Artificial Sequence
  Description of Artificial Sequence: Synthetic peptide
  Seed: PRMCSLMQGSTLPR
PRMYSLMQGSTVPR

SEQ ID NO: 108742 - protein, 14 aa, Artificial Sequence
  Description of Artificial Sequence: Synthetic peptide
  Seed: PRMCSLMQGSTLPR
PRMYSLMQISTAPR

SEQ ID NO: 108743 - protein, 14 aa, Artificial Sequence
  Description of Artificial Sequence: Synthetic peptide
  Seed: PRMCSLMQGSTLPR
PRMYSLMQISTIPR

SEQ ID NO: 108744 - protein, 14 aa, Artificial Sequence
  Description of Artificial Sequence: Synthetic peptide
  Seed: PRMCSLMQGSTLPR
PRMYSLMQISTLPR

SEQ ID NO: 108745 - protein, 14 aa, Artificial Sequence
  Description of Artificial Sequence: Synthetic peptide
  Seed: PRMCSLMQGSTLPR
PRMYSLMQISTMPR

SEQ ID NO: 108746 - protein, 14 aa, Artificial Sequence
  Description of Artificial Sequence: Synthetic peptide
  Seed: PRMCSLMQGSTLPR
PRMYSLMQISTNPR

SEQ ID NO: 108747 - protein, 14 aa, Artificial Sequence
  Description of Artificial Sequence: Synthetic peptide
  Seed: PRMCSLMQGSTLPR
PRMYSLMQISTSPR

SEQ ID NO: 108748 - protein, 14 aa, Artificial Sequence
  Description of Artificial Sequence: Synthetic peptide
  Seed: PRMCSLMQGSTLPR
PRMYSLMQISTTPR

SEQ ID NO: 108749 - protein, 14 aa, Artificial Sequence
  Description of Artificial Sequence: Synthetic peptide
  Seed: PRMCSLMQGSTLPR
PRMYSLMQISTVPR

SEQ ID NO: 108750 - protein, 14 aa, Artificial Sequence
  Description of Artificial Sequence: Synthetic peptide
  Seed: PRMCSLMQGSTLPR
PRMYSLMQLSTAPR

SEQ ID NO: 108751 - protein, 14 aa, Artificial Sequence
  Description of Artificial Sequence: Synthetic peptide
  Seed: PRMCSLMQGSTLPR
PRMYSLMQNSTAPR

SEQ ID NO: 108752 - protein, 14 aa, Artificial Sequence
  Description of Artificial Sequence: Synthetic peptide
  Seed: PRMCSLMQGSTLPR
PRMYSLMQNSTIPR

SEQ ID NO: 108753 - protein, 14 aa, Artificial Sequence
  Description of Artificial Sequence: Synthetic peptide
  Seed: PRMCSLMQGSTLPR
PRMYSLMQNSTLPR

SEQ ID NO: 108754 - protein, 14 aa, Artificial Sequence
  Description of Artificial Sequence: Synthetic peptide
  Seed: PRMCSLMQGSTLPR
PRMYSLMQNSTMPR

SEQ ID NO: 108755 - protein, 14 aa, Artificial Sequence
  Description of Artificial Sequence: Synthetic peptide
  Seed: PRMCSLMQGSTLPR
PRMYSLMQNSTVPR

SEQ ID NO: 108756 - protein, 14 aa, Artificial Sequence
  Description of Artificial Sequence: Synthetic peptide
  Seed: PRMCSLMQGSTLPR
PRMYSLMQPSTAPR

SEQ ID NO: 108757 - protein, 14 aa, Artificial Sequence
  Description of Artificial Sequence: Synthetic peptide
  Seed: PRMCSLMQGSTLPR
PRMYSLMQPSTIPR

SEQ ID NO: 108758 - protein, 14 aa, Artificial Sequence
  Description of Artificial Sequence: Synthetic peptide
  Seed: PRMCSLMQGSTLPR
PRMYSLMQPSTLPR

SEQ ID NO: 108759 - protein, 14 aa, Artificial Sequence
  Description of Artificial Sequence: Synthetic peptide
  Seed: PRMCSLMQGSTLPR
PRMYSLMQPSTMPR

SEQ ID NO: 108760 - protein, 14 aa, Artificial Sequence
  Description of Artificial Sequence: Synthetic peptide
  Seed: PRMCSLMQGSTLPR
PRMYSLMQPSTNPR

SEQ ID NO: 108761 - protein, 14 aa, Artificial Sequence
  Description of Artificial Sequence: Synthetic peptide
  Seed: PRMCSLMQGSTLPR
PRMYSLMQPSTSPR

SEQ ID NO: 108762 - protein, 14 aa, Artificial Sequence
  Description of Artificial Sequence: Synthetic peptide
  Seed: PRMCSLMQGSTLPR
PRMYSLMQPSTTPR

SEQ ID NO: 108763 - protein, 14 aa, Artificial Sequence
  Description of Artificial Sequence: Synthetic peptide
  Seed: PRMCSLMQGSTLPR
PRMYSLMQPSTVPR

SEQ ID NO: 108764 - protein, 14 aa, Artificial Sequence
  Description of Artificial Sequence: Synthetic peptide
  Seed: PRMCSLMQGSTLPR
PRMYSLMQSSTAPR

SEQ ID NO: 108765 - protein, 14 aa, Artificial Sequence
  Description of Artificial Sequence: Synthetic peptide
  Seed: PRMCSLMQGSTLPR
PRMYSLMQSSTIPR

SEQ ID NO: 108766 - protein, 14 aa, Artificial Sequence
  Description of Artificial Sequence: Synthetic peptide
  Seed: PRMCSLMQGSTLPR
PRMYSLMQSSTLPR

SEQ ID NO: 108767 - protein, 14 aa, Artificial Sequence
  Description of Artificial Sequence: Synthetic peptide
  Seed: PRMCSLMQGSTLPR
PRMYSLMQSSTMPR

SEQ ID NO: 108768 - protein, 14 aa, Artificial Sequence
  Description of Artificial Sequence: Synthetic peptide
  Seed: PRMCSLMQGSTLPR
PRMYSLMQSSTNPR

SEQ ID NO: 108769 - protein, 14 aa, Artificial Sequence
  Description of Artificial Sequence: Synthetic peptide
  Seed: PRMCSLMQGSTLPR
PRMYSLMQSSTSPR

SEQ ID NO: 108770 - protein, 14 aa, Artificial Sequence
  Description of Artificial Sequence: Synthetic peptide
  Seed: PRMCSLMQGSTLPR
PRMYSLMQSSTTPR

SEQ ID NO: 108771 - protein, 14 aa, Artificial Sequence
  Description of Artificial Sequence: Synthetic peptide
  Seed: PRMCSLMQGSTLPR
PRMYSLMQSSTVPR

SEQ ID NO: 108772 - protein, 14 aa, Artificial Sequence
  Description of Artificial Sequence: Synthetic peptide
  Seed: PRMCSLMQGSTLPR
PRMYSLMQTSTAPR

SEQ ID NO: 108773 - protein, 14 aa, Artificial Sequence
  Description of Artificial Sequence: Synthetic peptide
  Seed: PRMCSLMQGSTLPR
PRMYSLMQTSTIPR

SEQ ID NO: 108774 - protein, 14 aa, Artificial Sequence
  Description of Artificial Sequence: Synthetic peptide
  Seed: PRMCSLMQGSTLPR
PRMYSLMQTSTLPR

SEQ ID NO: 108775 - protein, 14 aa, Artificial Sequence
  Description of Artificial Sequence: Synthetic peptide
  Seed: PRMCSLMQGSTLPR
PRMYSLMQTSTMPR

SEQ ID NO: 108776 - protein, 14 aa, Artificial Sequence
  Description of Artificial Sequence: Synthetic peptide
  Seed: PRMCSLMQGSTLPR
PRMYSLMQTSTNPR

SEQ ID NO: 108777 - protein, 14 aa, Artificial Sequence
  Description of Artificial Sequence: Synthetic peptide
  Seed: PRMCSLMQGSTLPR
PRMYSLMQTSTSPR

SEQ ID NO: 108778 - protein, 14 aa, Artificial Sequence
  Description of Artificial Sequence: Synthetic peptide
  Seed: PRMCSLMQGSTLPR
PRMYSLMQTSTTPR

SEQ ID NO: 108779 - protein, 14 aa, Artificial Sequence
  Description of Artificial Sequence: Synthetic peptide
  Seed: PRMCSLMQGSTLPR
PRMYSLMQTSTVPR

SEQ ID NO: 108780 - protein, 14 aa, Artificial Sequence
  Description of Artificial Sequence: Synthetic peptide
  Seed: PRMCSLMQGSTLPR
PRMYSLMQVSTAPR

SEQ ID NO: 108781 - protein, 14 aa, Artificial Sequence
  Description of Artificial Sequence: Synthetic peptide
  Seed: PRMCSLMQGSTLPR
PRMYSLMQVSTIPR

SEQ ID NO: 108782 - protein, 14 aa, Artificial Sequence
  Description of Artificial Sequence: Synthetic peptide
  Seed: PRMCSLMQGSTLPR
PRMYSLMQVSTLPR

SEQ ID NO: 108783 - protein, 14 aa, Artificial Sequence
  Description of Artificial Sequence: Synthetic peptide
  Seed: PRMCSLMQGSTLPR
PRMYSLMQVSTMPR

SEQ ID NO: 108784 - protein, 14 aa, Artificial Sequence
  Description of Artificial Sequence: Synthetic peptide
  Seed: PRMCSLMQGSTLPR
PRMYSLMQVSTNPR

SEQ ID NO: 108785 - protein, 14 aa, Artificial Sequence
  Description of Artificial Sequence: Synthetic peptide
  Seed: PRMCSLMQGSTLPR
PRMYSLMQVSTSPR

SEQ ID NO: 108786 - protein, 14 aa, Artificial Sequence
  Description of Artificial Sequence: Synthetic peptide
  Seed: PRMCSLMQGSTLPR
PRMYSLMQVSTTPR

SEQ ID NO: 108787 - protein, 14 aa, Artificial Sequence
  Description of Artificial Sequence: Synthetic peptide
  Seed: PRMCSLMQGSTLPR
PRMYSLMQVSTVPR

SEQ ID NO: 108788 - protein, 14 aa, Artificial Sequence
  Description of Artificial Sequence: Synthetic peptide
  Seed: PRMCSLMQGSTLPR
PRMYSLQQASTAPR

SEQ ID NO: 108789 - protein, 14 aa, Artificial Sequence
  Description of Artificial Sequence: Synthetic peptide
  Seed: PRMCSLMQGSTLPR
PRMYSLQQASTIPR

SEQ ID NO: 108790 - protein, 14 aa, Artificial Sequence
  Description of Artificial Sequence: Synthetic peptide
  Seed: PRMCSLMQGSTLPR
PRMYSLQQASTLPR

SEQ ID NO: 108791 - protein, 14 aa, Artificial Sequence
  Description of Artificial Sequence: Synthetic peptide
  Seed: PRMCSLMQGSTLPR
PRMYSLQQASTVPR

SEQ ID NO: 108792 - protein, 14 aa, Artificial Sequence
  Description of Artificial Sequence: Synthetic peptide
  Seed: PRMCSLMQGSTLPR
PRMYSLQQGSTAPR

SEQ ID NO: 108793 - protein, 14 aa, Artificial Sequence
  Description of Artificial Sequence: Synthetic peptide
  Seed: PRMCSLMQGSTLPR
PRMYSLQQGSTIPR

SEQ ID NO: 108794 - protein, 14 aa, Artificial Sequence
  Description of Artificial Sequence: Synthetic peptide
  Seed: PRMCSLMQGSTLPR
PRMYSLQQGSTLPR

SEQ ID NO: 108795 - protein, 14 aa, Artificial Sequence
  Description of Artificial Sequence: Synthetic peptide
  Seed: PRMCSLMQGSTLPR
PRMYSLQQGSTVPR

SEQ ID NO: 108796 - protein, 14 aa, Artificial Sequence
  Description of Artificial Sequence: Synthetic peptide
  Seed: PRMCSLMQGSTLPR
PRMYSLQQSSTAPR

SEQ ID NO: 108797 - protein, 14 aa, Artificial Sequence
  Description of Artificial Sequence: Synthetic peptide
  Seed: PRMCSLMQGSTLPR
PRMYSLQQSSTIPR

SEQ ID NO: 108798 - protein, 14 aa, Artificial Sequence
  Description of Artificial Sequence: Synthetic peptide
  Seed: PRMCSLMQGSTLPR
PRMYSLQQSSTLPR

SEQ ID NO: 108799 - protein, 14 aa, Artificial Sequence
  Description of Artificial Sequence: Synthetic peptide
  Seed: PRMCSLMQGSTLPR
PRMYSLQQSSTVPR

SEQ ID NO: 108800 - protein, 14 aa, Artificial Sequence
  Description of Artificial Sequence: Synthetic peptide
  Seed: PRMCSLMQGSTLPR
PRMYSLSQASTLPR

SEQ ID NO: 108801 - protein, 14 aa, Artificial Sequence
  Description of Artificial Sequence: Synthetic peptide
  Seed: PRMCSLMQGSTLPR
PRMYSLVQASTAPR

SEQ ID NO: 108802 - protein, 14 aa, Artificial Sequence
  Description of Artificial Sequence: Synthetic peptide
  Seed: PRMCSLMQGSTLPR
PRMYSLVQASTIPR

SEQ ID NO: 108803 - protein, 14 aa, Artificial Sequence
  Description of Artificial Sequence: Synthetic peptide
  Seed: PRMCSLMQGSTLPR
PRMYSLVQASTLPR

SEQ ID NO: 108804 - protein, 14 aa, Artificial Sequence
  Description of Artificial Sequence: Synthetic peptide
  Seed: PRMCSLMQGSTLPR
PRMYSLVQASTVPR

SEQ ID NO: 108805 - protein, 14 aa, Artificial Sequence
  Description of Artificial Sequence: Synthetic peptide
  Seed: PRMCSLMQGSTLPR
PRMYSLVQGSTAPR

SEQ ID NO: 108806 - protein, 14 aa, Artificial Sequence
  Description of Artificial Sequence: Synthetic peptide
  Seed: PRMCSLMQGSTLPR
PRMYSLVQGSTIPR

SEQ ID NO: 108807 - protein, 14 aa, Artificial Sequence
  Description of Artificial Sequence: Synthetic peptide
  Seed: PRMCSLMQGSTLPR
PRMYSLVQGSTLPR

SEQ ID NO: 108808 - protein, 14 aa, Artificial Sequence
  Description of Artificial Sequence: Synthetic peptide
  Seed: PRMCSLMQGSTLPR
PRMYSLVQGSTVPR

SEQ ID NO: 108809 - protein, 14 aa, Artificial Sequence
  Description of Artificial Sequence: Synthetic peptide
  Seed: PRMCSLMQGSTLPR
PRMYSLVQPSTAPR

SEQ ID NO: 108810 - protein, 14 aa, Artificial Sequence
  Description of Artificial Sequence: Synthetic peptide
  Seed: PRMCSLMQGSTLPR
PRMYSLVQPSTLPR

SEQ ID NO: 108811 - protein, 14 aa, Artificial Sequence
  Description of Artificial Sequence: Synthetic peptide
  Seed: PRMCSLMQGSTLPR
PRMYSLVQPSTVPR

SEQ ID NO: 108812 - protein, 14 aa, Artificial Sequence
  Description of Artificial Sequence: Synthetic peptide
  Seed: PRMCSLMQGSTLPR
PRMYSLVQSSTAPR

SEQ ID NO: 108813 - protein, 14 aa, Artificial Sequence
  Description of Artificial Sequence: Synthetic peptide
  Seed: PRMCSLMQGSTLPR
PRMYSLVQSSTIPR

SEQ ID NO: 108814 - protein, 14 aa, Artificial Sequence
  Description of Artificial Sequence: Synthetic peptide
  Seed: PRMCSLMQGSTLPR
PRMYSLVQSSTLPR

SEQ ID NO: 108815 - protein, 14 aa, Artificial Sequence
  Description of Artificial Sequence: Synthetic peptide
  Seed: PRMCSLMQGSTLPR
PRMYSLVQSSTVPR

SEQ ID NO: 108816 - protein, 15 aa, Artificial Sequence
  Description of Artificial Sequence: Synthetic peptide
  Seed: PRMCSLMQGSTLPRR
PRMASLLQASTLPRR

SEQ ID NO: 108817 - protein, 15 aa, Artificial Sequence
  Description of Artificial Sequence: Synthetic peptide
  Seed: PRMCSLMQGSTLPRR
PRMASLMQASTLPRR

SEQ ID NO: 108818 - protein, 15 aa, Artificial Sequence
  Description of Artificial Sequence: Synthetic peptide
  Seed: PRMCSLMQGSTLPRR
PRMCSLIQASTIPRR

SEQ ID NO: 108819 - protein, 15 aa, Artificial Sequence
  Description of Artificial Sequence: Synthetic peptide
  Seed: PRMCSLMQGSTLPRR
PRMCSLIQASTLPRR

SEQ ID NO: 108820 - protein, 15 aa, Artificial Sequence
  Description of Artificial Sequence: Synthetic peptide
  Seed: PRMCSLMQGSTLPRR
PRMCSLIQASTVPRR

SEQ ID NO: 108821 - protein, 15 aa, Artificial Sequence
  Description of Artificial Sequence: Synthetic peptide
  Seed: PRMCSLMQGSTLPRR
PRMCSLIQGSTIPRR

SEQ ID NO: 108822 - protein, 15 aa, Artificial Sequence
  Description of Artificial Sequence: Synthetic peptide
  Seed: PRMCSLMQGSTLPRR
PRMCSLIQGSTLPRR

SEQ ID NO: 108823 - protein, 15 aa, Artificial Sequence
  Description of Artificial Sequence: Synthetic peptide
  Seed: PRMCSLMQGSTLPRR
PRMCSLIQGSTVPRR

SEQ ID NO: 108824 - protein, 15 aa, Artificial Sequence
  Description of Artificial Sequence: Synthetic peptide
  Seed: PRMCSLMQGSTLPRR
PRMCSLIQSSTLPRR

SEQ ID NO: 108825 - protein, 15 aa, Artificial Sequence
  Description of Artificial Sequence: Synthetic peptide
  Seed: PRMCSLMQGSTLPRR
PRMCSLIQSSTVPRR

SEQ ID NO: 108826 - protein, 15 aa, Artificial Sequence
  Description of Artificial Sequence: Synthetic peptide
  Seed: PRMCSLMQGSTLPRR
PRMCSLLQASTAPRR

SEQ ID NO: 108827 - protein, 15 aa, Artificial Sequence
  Description of Artificial Sequence: Synthetic peptide
  Seed: PRMCSLMQGSTLPRR
PRMCSLLQASTIPRR

SEQ ID NO: 108828 - protein, 15 aa, Artificial Sequence
  Description of Artificial Sequence: Synthetic peptide
  Seed: PRMCSLMQGSTLPRR
PRMCSLLQASTLPRR

SEQ ID NO: 108829 - protein, 15 aa, Artificial Sequence
  Description of Artificial Sequence: Synthetic peptide
  Seed: PRMCSLMQGSTLPRR
PRMCSLLQASTMPRR

SEQ ID NO: 108830 - protein, 15 aa, Artificial Sequence
  Description of Artificial Sequence: Synthetic peptide
  Seed: PRMCSLMQGSTLPRR
PRMCSLLQASTTPRR

SEQ ID NO: 108831 - protein, 15 aa, Artificial Sequence
  Description of Artificial Sequence: Synthetic peptide
  Seed: PRMCSLMQGSTLPRR
PRMCSLLQASTVPRR

SEQ ID NO: 108832 - protein, 15 aa, Artificial Sequence
  Description of Artificial Sequence: Synthetic peptide
  Seed: PRMCSLMQGSTLPRR
PRMCSLLQGSTAPRR

SEQ ID NO: 108833 - protein, 15 aa, Artificial Sequence
  Description of Artificial Sequence: Synthetic peptide
  Seed: PRMCSLMQGSTLPRR
PRMCSLLQGSTIPRR

SEQ ID NO: 108834 - protein, 15 aa, Artificial Sequence
  Description of Artificial Sequence: Synthetic peptide
  Seed: PRMCSLMQGSTLPRR
PRMCSLLQGSTLPRR

SEQ ID NO: 108835 - protein, 15 aa, Artificial Sequence
  Description of Artificial Sequence: Synthetic peptide
  Seed: PRMCSLMQGSTLPRR
PRMCSLLQGSTMPRR

SEQ ID NO: 108836 - protein, 15 aa, Artificial Sequence
  Description of Artificial Sequence: Synthetic peptide
  Seed: PRMCSLMQGSTLPRR
PRMCSLLQGSTVPRR

SEQ ID NO: 108837 - protein, 15 aa, Artificial Sequence
  Description of Artificial Sequence: Synthetic peptide
  Seed: PRMCSLMQGSTLPRR
PRMCSLLQPSTIPRR

SEQ ID NO: 108838 - protein, 15 aa, Artificial Sequence
  Description of Artificial Sequence: Synthetic peptide
  Seed: PRMCSLMQGSTLPRR
PRMCSLLQPSTLPRR

SEQ ID NO: 108839 - protein, 15 aa, Artificial Sequence
  Description of Artificial Sequence: Synthetic peptide
  Seed: PRMCSLMQGSTLPRR
PRMCSLLQPSTVPRR

SEQ ID NO: 108840 - protein, 15 aa, Artificial Sequence
  Description of Artificial Sequence: Synthetic peptide
  Seed: PRMCSLMQGSTLPRR
PRMCSLLQSSTAPRR

SEQ ID NO: 108841 - protein, 15 aa, Artificial Sequence
  Description of Artificial Sequence: Synthetic peptide
  Seed: PRMCSLMQGSTLPRR
PRMCSLLQSSTIPRR

SEQ ID NO: 108842 - protein, 15 aa, Artificial Sequence
  Description of Artificial Sequence: Synthetic peptide
  Seed: PRMCSLMQGSTLPRR
PRMCSLLQSSTLPRR

SEQ ID NO: 108843 - protein, 15 aa, Artificial Sequence
  Description of Artificial Sequence: Synthetic peptide
  Seed: PRMCSLMQGSTLPRR
PRMCSLLQSSTMPRR

SEQ ID NO: 108844 - protein, 15 aa, Artificial Sequence
  Description of Artificial Sequence: Synthetic peptide
  Seed: PRMCSLMQGSTLPRR
PRMCSLLQSSTVPRR

SEQ ID NO: 108845 - protein, 15 aa, Artificial Sequence
  Description of Artificial Sequence: Synthetic peptide
  Seed: PRMCSLMQGSTLPRR
PRMCSLLQTSTVPRR

SEQ ID NO: 108846 - protein, 15 aa, Artificial Sequence
  Description of Artificial Sequence: Synthetic peptide
  Seed: PRMCSLMQGSTLPRR
PRMCSLMQASTAPRR

SEQ ID NO: 108847 - protein, 15 aa, Artificial Sequence
  Description of Artificial Sequence: Synthetic peptide
  Seed: PRMCSLMQGSTLPRR
PRMCSLMQASTIPRR

SEQ ID NO: 108848 - protein, 15 aa, Artificial Sequence
  Description of Artificial Sequence: Synthetic peptide
  Seed: PRMCSLMQGSTLPRR
PRMCSLMQASTLPRR

SEQ ID NO: 108849 - protein, 15 aa, Artificial Sequence
  Description of Artificial Sequence: Synthetic peptide
  Seed: PRMCSLMQGSTLPRR
PRMCSLMQASTMPRR

SEQ ID NO: 108850 - protein, 15 aa, Artificial Sequence
  Description of Artificial Sequence: Synthetic peptide
  Seed: PRMCSLMQGSTLPRR
PRMCSLMQASTTPRR

SEQ ID NO: 108851 - protein, 15 aa, Artificial Sequence
  Description of Artificial Sequence: Synthetic peptide
  Seed: PRMCSLMQGSTLPRR
PRMCSLMQASTVPRR

SEQ ID NO: 108852 - protein, 15 aa, Artificial Sequence
  Description of Artificial Sequence: Synthetic peptide
  Seed: PRMCSLMQGSTLPRR
PRMCSLMQGSTAPRR

SEQ ID NO: 108853 - protein, 15 aa, Artificial Sequence
  Description of Artificial Sequence: Synthetic peptide
  Seed: PRMCSLMQGSTLPRR
PRMCSLMQGSTIPRR

SEQ ID NO: 108854 - protein, 15 aa, Artificial Sequence
  Description of Artificial Sequence: Synthetic peptide
  Seed: PRMCSLMQGSTLPRR
PRMCSLMQGSTMPRR

SEQ ID NO: 108855 - protein, 15 aa, Artificial Sequence
  Description of Artificial Sequence: Synthetic peptide
  Seed: PRMCSLMQGSTLPRR
PRMCSLMQGSTVPRR

SEQ ID NO: 108856 - protein, 15 aa, Artificial Sequence
  Description of Artificial Sequence: Synthetic peptide
  Seed: PRMCSLMQGSTLPRR
PRMCSLMQPSTIPRR

SEQ ID NO: 108857 - protein, 15 aa, Artificial Sequence
  Description of Artificial Sequence: Synthetic peptide
  Seed: PRMCSLMQGSTLPRR
PRMCSLMQPSTLPRR

SEQ ID NO: 108858 - protein, 15 aa, Artificial Sequence
  Description of Artificial Sequence: Synthetic peptide
  Seed: PRMCSLMQGSTLPRR
PRMCSLMQPSTVPRR

SEQ ID NO: 108859 - protein, 15 aa, Artificial Sequence
  Description of Artificial Sequence: Synthetic peptide
  Seed: PRMCSLMQGSTLPRR
PRMCSLMQSSTAPRR

SEQ ID NO: 108860 - protein, 15 aa, Artificial Sequence
  Description of Artificial Sequence: Synthetic peptide
  Seed: PRMCSLMQGSTLPRR
PRMCSLMQSSTIPRR

SEQ ID NO: 108861 - protein, 15 aa, Artificial Sequence
  Description of Artificial Sequence: Synthetic peptide
  Seed: PRMCSLMQGSTLPRR
PRMCSLMQSSTLPRR

SEQ ID NO: 108862 - protein, 15 aa, Artificial Sequence
  Description of Artificial Sequence: Synthetic peptide
  Seed: PRMCSLMQGSTLPRR
PRMCSLMQSSTVPRR

SEQ ID NO: 108863 - protein, 15 aa, Artificial Sequence
  Description of Artificial Sequence: Synthetic peptide
  Seed: PRMCSLMQGSTLPRR
PRMFSLAQASTAPRR

SEQ ID NO: 108864 - protein, 15 aa, Artificial Sequence
  Description of Artificial Sequence: Synthetic peptide
  Seed: PRMCSLMQGSTLPRR
PRMFSLAQASTCPRR

SEQ ID NO: 108865 - protein, 15 aa, Artificial Sequence
  Description of Artificial Sequence: Synthetic peptide
  Seed: PRMCSLMQGSTLPRR
PRMFSLAQASTDPRR

SEQ ID NO: 108866 - protein, 15 aa, Artificial Sequence
  Description of Artificial Sequence: Synthetic peptide
  Seed: PRMCSLMQGSTLPRR
PRMFSLAQASTEPRR

SEQ ID NO: 108867 - protein, 15 aa, Artificial Sequence
  Description of Artificial Sequence: Synthetic peptide
  Seed: PRMCSLMQGSTLPRR
PRMFSLAQASTFPRR

SEQ ID NO: 108868 - protein, 15 aa, Artificial Sequence
  Description of Artificial Sequence: Synthetic peptide
  Seed: PRMCSLMQGSTLPRR
PRMFSLAQASTGPRR

SEQ ID NO: 108869 - protein, 15 aa, Artificial Sequence
  Description of Artificial Sequence: Synthetic peptide
  Seed: PRMCSLMQGSTLPRR
PRMFSLAQASTHPRR

SEQ ID NO: 108870 - protein, 15 aa, Artificial Sequence
  Description of Artificial Sequence: Synthetic peptide
  Seed: PRMCSLMQGSTLPRR
PRMFSLAQASTIPRR

SEQ ID NO: 108871 - protein, 15 aa, Artificial Sequence
  Description of Artificial Sequence: Synthetic peptide
  Seed: PRMCSLMQGSTLPRR
PRMFSLAQASTKPRR

SEQ ID NO: 108872 - protein, 15 aa, Artificial Sequence
  Description of Artificial Sequence: Synthetic peptide
  Seed: PRMCSLMQGSTLPRR
PRMFSLAQASTLPRR

SEQ ID NO: 108873 - protein, 15 aa, Artificial Sequence
  Description of Artificial Sequence: Synthetic peptide
  Seed: PRMCSLMQGSTLPRR
PRMFSLAQASTMPRR

SEQ ID NO: 108874 - protein, 15 aa, Artificial Sequence
  Description of Artificial Sequence: Synthetic peptide
  Seed: PRMCSLMQGSTLPRR
PRMFSLAQASTNPRR

SEQ ID NO: 108875 - protein, 15 aa, Artificial Sequence
  Description of Artificial Sequence: Synthetic peptide
  Seed: PRMCSLMQGSTLPRR
PRMFSLAQASTPPRR

SEQ ID NO: 108876 - protein, 15 aa, Artificial Sequence
  Description of Artificial Sequence: Synthetic peptide
  Seed: PRMCSLMQGSTLPRR
PRMFSLAQASTQPRR

SEQ ID NO: 108877 - protein, 15 aa, Artificial Sequence
  Description of Artificial Sequence: Synthetic peptide
  Seed: PRMCSLMQGSTLPRR
PRMFSLAQASTRPRR

SEQ ID NO: 108878 - protein, 15 aa, Artificial Sequence
  Description of Artificial Sequence: Synthetic peptide
  Seed: PRMCSLMQGSTLPRR
PRMFSLAQASTSPRR

SEQ ID NO: 108879 - protein, 15 aa, Artificial Sequence
  Description of Artificial Sequence: Synthetic peptide
  Seed: PRMCSLMQGSTLPRR
PRMFSLAQASTTPRR

SEQ ID NO: 108880 - protein, 15 aa, Artificial Sequence
  Description of Artificial Sequence: Synthetic peptide
  Seed: PRMCSLMQGSTLPRR
PRMFSLAQASTVPRR

SEQ ID NO: 108881 - protein, 15 aa, Artificial Sequence
  Description of Artificial Sequence: Synthetic peptide
  Seed: PRMCSLMQGSTLPRR
PRMFSLAQASTWPRR

SEQ ID NO: 108882 - protein, 15 aa, Artificial Sequence
  Description of Artificial Sequence: Synthetic peptide
  Seed: PRMCSLMQGSTLPRR
PRMFSLAQASTYPRR

SEQ ID NO: 108883 - protein, 15 aa, Artificial Sequence
  Description of Artificial Sequence: Synthetic peptide
  Seed: PRMCSLMQGSTLPRR
PRMFSLAQCSTAPRR

SEQ ID NO: 108884 - protein, 15 aa, Artificial Sequence
  Description of Artificial Sequence: Synthetic peptide
  Seed: PRMCSLMQGSTLPRR
PRMFSLAQCSTIPRR

SEQ ID NO: 108885 - protein, 15 aa, Artificial Sequence
  Description of Artificial Sequence: Synthetic peptide
  Seed: PRMCSLMQGSTLPRR
PRMFSLAQCSTLPRR

SEQ ID NO: 108886 - protein, 15 aa, Artificial Sequence
  Description of Artificial Sequence: Synthetic peptide
  Seed: PRMCSLMQGSTLPRR
PRMFSLAQCSTVPRR

SEQ ID NO: 108887 - protein, 15 aa, Artificial Sequence
  Description of Artificial Sequence: Synthetic peptide
  Seed: PRMCSLMQGSTLPRR
PRMFSLAQESTLPRR

SEQ ID NO: 108888 - protein, 15 aa, Artificial Sequence
  Description of Artificial Sequence: Synthetic peptide
  Seed: PRMCSLMQGSTLPRR
PRMFSLAQESTVPRR

SEQ ID NO: 108889 - protein, 15 aa, Artificial Sequence
  Description of Artificial Sequence: Synthetic peptide
  Seed: PRMCSLMQGSTLPRR
PRMFSLAQFSTIPRR

SEQ ID NO: 108890 - protein, 15 aa, Artificial Sequence
  Description of Artificial Sequence: Synthetic peptide
  Seed: PRMCSLMQGSTLPRR
PRMFSLAQFSTLPRR

SEQ ID NO: 108891 - protein, 15 aa, Artificial Sequence
  Description of Artificial Sequence: Synthetic peptide
  Seed: PRMCSLMQGSTLPRR
PRMFSLAQFSTMPRR

SEQ ID NO: 108892 - protein, 15 aa, Artificial Sequence
  Description of Artificial Sequence: Synthetic peptide
  Seed: PRMCSLMQGSTLPRR
PRMFSLAQFSTVPRR

SEQ ID NO: 108893 - protein, 15 aa, Artificial Sequence
  Description of Artificial Sequence: Synthetic peptide
  Seed: PRMCSLMQGSTLPRR
PRMFSLAQGSTAPRR

SEQ ID NO: 108894 - protein, 15 aa, Artificial Sequence
  Description of Artificial Sequence: Synthetic peptide
  Seed: PRMCSLMQGSTLPRR
PRMFSLAQGSTCPRR

SEQ ID NO: 108895 - protein, 15 aa, Artificial Sequence
  Description of Artificial Sequence: Synthetic peptide
  Seed: PRMCSLMQGSTLPRR
PRMFSLAQGSTFPRR

SEQ ID NO: 108896 - protein, 15 aa, Artificial Sequence
  Description of Artificial Sequence: Synthetic peptide
  Seed: PRMCSLMQGSTLPRR
PRMFSLAQGSTGPRR

SEQ ID NO: 108897 - protein, 15 aa, Artificial Sequence
  Description of Artificial Sequence: Synthetic peptide
  Seed: PRMCSLMQGSTLPRR
PRMFSLAQGSTHPRR

SEQ ID NO: 108898 - protein, 15 aa, Artificial Sequence
  Description of Artificial Sequence: Synthetic peptide
  Seed: PRMCSLMQGSTLPRR
PRMFSLAQGSTIPRR

SEQ ID NO: 108899 - protein, 15 aa, Artificial Sequence
  Description of Artificial Sequence: Synthetic peptide
  Seed: PRMCSLMQGSTLPRR
PRMFSLAQGSTLPRR

SEQ ID NO: 108900 - protein, 15 aa, Artificial Sequence
  Description of Artificial Sequence: Synthetic peptide
  Seed: PRMCSLMQGSTLPRR
PRMFSLAQGSTMPRR

SEQ ID NO: 108901 - protein, 15 aa, Artificial Sequence
  Description of Artificial Sequence: Synthetic peptide
  Seed: PRMCSLMQGSTLPRR
PRMFSLAQGSTNPRR

SEQ ID NO: 108902 - protein, 15 aa, Artificial Sequence
  Description of Artificial Sequence: Synthetic peptide
  Seed: PRMCSLMQGSTLPRR
PRMFSLAQGSTPPRR

SEQ ID NO: 108903 - protein, 15 aa, Artificial Sequence
  Description of Artificial Sequence: Synthetic peptide
  Seed: PRMCSLMQGSTLPRR
PRMFSLAQGSTQPRR

SEQ ID NO: 108904 - protein, 15 aa, Artificial Sequence
  Description of Artificial Sequence: Synthetic peptide
  Seed: PRMCSLMQGSTLPRR
PRMFSLAQGSTRPRR

SEQ ID NO: 108905 - protein, 15 aa, Artificial Sequence
  Description of Artificial Sequence: Synthetic peptide
  Seed: PRMCSLMQGSTLPRR
PRMFSLAQGSTSPRR

SEQ ID NO: 108906 - protein, 15 aa, Artificial Sequence
  Description of Artificial Sequence: Synthetic peptide
  Seed: PRMCSLMQGSTLPRR
PRMFSLAQGSTTPRR

SEQ ID NO: 108907 - protein, 15 aa, Artificial Sequence
  Description of Artificial Sequence: Synthetic peptide
  Seed: PRMCSLMQGSTLPRR
PRMFSLAQGSTVPRR

SEQ ID NO: 108908 - protein, 15 aa, Artificial Sequence
  Description of Artificial Sequence: Synthetic peptide
  Seed: PRMCSLMQGSTLPRR
PRMFSLAQGSTWPRR

SEQ ID NO: 108909 - protein, 15 aa, Artificial Sequence
  Description of Artificial Sequence: Synthetic peptide
  Seed: PRMCSLMQGSTLPRR
PRMFSLAQGSTYPRR

SEQ ID NO: 108910 - protein, 15 aa, Artificial Sequence
  Description of Artificial Sequence: Synthetic peptide
  Seed: PRMCSLMQGSTLPRR
PRMFSLAQHSTAPRR

SEQ ID NO: 108911 - protein, 15 aa, Artificial Sequence
  Description of Artificial Sequence: Synthetic peptide
  Seed: PRMCSLMQGSTLPRR
PRMFSLAQHSTIPRR

SEQ ID NO: 108912 - protein, 15 aa, Artificial Sequence
  Description of Artificial Sequence: Synthetic peptide
  Seed: PRMCSLMQGSTLPRR
PRMFSLAQHSTLPRR

SEQ ID NO: 108913 - protein, 15 aa, Artificial Sequence
  Description of Artificial Sequence: Synthetic peptide
  Seed: PRMCSLMQGSTLPRR
PRMFSLAQHSTMPRR

SEQ ID NO: 108914 - protein, 15 aa, Artificial Sequence
  Description of Artificial Sequence: Synthetic peptide
  Seed: PRMCSLMQGSTLPRR
PRMFSLAQHSTVPRR

SEQ ID NO: 108915 - protein, 15 aa, Artificial Sequence
  Description of Artificial Sequence: Synthetic peptide
  Seed: PRMCSLMQGSTLPRR
PRMFSLAQISTAPRR

SEQ ID NO: 108916 - protein, 15 aa, Artificial Sequence
  Description of Artificial Sequence: Synthetic peptide
  Seed: PRMCSLMQGSTLPRR
PRMFSLAQISTDPRR

SEQ ID NO: 108917 - protein, 15 aa, Artificial Sequence
  Description of Artificial Sequence: Synthetic peptide
  Seed: PRMCSLMQGSTLPRR
PRMFSLAQISTEPRR

SEQ ID NO: 108918 - protein, 15 aa, Artificial Sequence
  Description of Artificial Sequence: Synthetic peptide
  Seed: PRMCSLMQGSTLPRR
PRMFSLAQISTGPRR

SEQ ID NO: 108919 - protein, 15 aa, Artificial Sequence
  Description of Artificial Sequence: Synthetic peptide
  Seed: PRMCSLMQGSTLPRR
PRMFSLAQISTHPRR

SEQ ID NO: 108920 - protein, 15 aa, Artificial Sequence
  Description of Artificial Sequence: Synthetic peptide
  Seed: PRMCSLMQGSTLPRR
PRMFSLAQISTIPRR

SEQ ID NO: 108921 - protein, 15 aa, Artificial Sequence
  Description of Artificial Sequence: Synthetic peptide
  Seed: PRMCSLMQGSTLPRR
PRMFSLAQISTLPRR

SEQ ID NO: 108922 - protein, 15 aa, Artificial Sequence
  Description of Artificial Sequence: Synthetic peptide
  Seed: PRMCSLMQGSTLPRR
PRMFSLAQISTMPRR

SEQ ID NO: 108923 - protein, 15 aa, Artificial Sequence
  Description of Artificial Sequence: Synthetic peptide
  Seed: PRMCSLMQGSTLPRR
PRMFSLAQISTNPRR

SEQ ID NO: 108924 - protein, 15 aa, Artificial Sequence
  Description of Artificial Sequence: Synthetic peptide
  Seed: PRMCSLMQGSTLPRR
PRMFSLAQISTPPRR

SEQ ID NO: 108925 - protein, 15 aa, Artificial Sequence
  Description of Artificial Sequence: Synthetic peptide
  Seed: PRMCSLMQGSTLPRR
PRMFSLAQISTQPRR

SEQ ID NO: 108926 - protein, 15 aa, Artificial Sequence
  Description of Artificial Sequence: Synthetic peptide
  Seed: PRMCSLMQGSTLPRR
PRMFSLAQISTSPRR

SEQ ID NO: 108927 - protein, 15 aa, Artificial Sequence
  Description of Artificial Sequence: Synthetic peptide
  Seed: PRMCSLMQGSTLPRR
PRMFSLAQISTTPRR

SEQ ID NO: 108928 - protein, 15 aa, Artificial Sequence
  Description of Artificial Sequence: Synthetic peptide
  Seed: PRMCSLMQGSTLPRR
PRMFSLAQISTVPRR

SEQ ID NO: 108929 - protein, 15 aa, Artificial Sequence
  Description of Artificial Sequence: Synthetic peptide
  Seed: PRMCSLMQGSTLPRR
PRMFSLAQLSTAPRR

SEQ ID NO: 108930 - protein, 15 aa, Artificial Sequence
  Description of Artificial Sequence: Synthetic peptide
  Seed: PRMCSLMQGSTLPRR
PRMFSLAQLSTGPRR

SEQ ID NO: 108931 - protein, 15 aa, Artificial Sequence
  Description of Artificial Sequence: Synthetic peptide
  Seed: PRMCSLMQGSTLPRR
PRMFSLAQLSTHPRR

SEQ ID NO: 108932 - protein, 15 aa, Artificial Sequence
  Description of Artificial Sequence: Synthetic peptide
  Seed: PRMCSLMQGSTLPRR
PRMFSLAQLSTIPRR

SEQ ID NO: 108933 - protein, 15 aa, Artificial Sequence
  Description of Artificial Sequence: Synthetic peptide
  Seed: PRMCSLMQGSTLPRR
PRMFSLAQLSTLPRR

SEQ ID NO: 108934 - protein, 15 aa, Artificial Sequence
  Description of Artificial Sequence: Synthetic peptide
  Seed: PRMCSLMQGSTLPRR
PRMFSLAQLSTMPRR

SEQ ID NO: 108935 - protein, 15 aa, Artificial Sequence
  Description of Artificial Sequence: Synthetic peptide
  Seed: PRMCSLMQGSTLPRR
PRMFSLAQLSTNPRR

SEQ ID NO: 108936 - protein, 15 aa, Artificial Sequence
  Description of Artificial Sequence: Synthetic peptide
  Seed: PRMCSLMQGSTLPRR
PRMFSLAQLSTQPRR

SEQ ID NO: 108937 - protein, 15 aa, Artificial Sequence
  Description of Artificial Sequence: Synthetic peptide
  Seed: PRMCSLMQGSTLPRR
PRMFSLAQLSTSPRR

SEQ ID NO: 108938 - protein, 15 aa, Artificial Sequence
  Description of Artificial Sequence: Synthetic peptide
  Seed: PRMCSLMQGSTLPRR
PRMFSLAQLSTTPRR

SEQ ID NO: 108939 - protein, 15 aa, Artificial Sequence
  Description of Artificial Sequence: Synthetic peptide
  Seed: PRMCSLMQGSTLPRR
PRMFSLAQLSTVPRR

SEQ ID NO: 108940 - protein, 15 aa, Artificial Sequence
  Description of Artificial Sequence: Synthetic peptide
  Seed: PRMCSLMQGSTLPRR
PRMFSLAQMSTAPRR

SEQ ID NO: 108941 - protein, 15 aa, Artificial Sequence
  Description of Artificial Sequence: Synthetic peptide
  Seed: PRMCSLMQGSTLPRR
PRMFSLAQMSTHPRR

SEQ ID NO: 108942 - protein, 15 aa, Artificial Sequence
  Description of Artificial Sequence: Synthetic peptide
  Seed: PRMCSLMQGSTLPRR
PRMFSLAQMSTIPRR

SEQ ID NO: 108943 - protein, 15 aa, Artificial Sequence
  Description of Artificial Sequence: Synthetic peptide
  Seed: PRMCSLMQGSTLPRR
PRMFSLAQMSTLPRR

SEQ ID NO: 108944 - protein, 15 aa, Artificial Sequence
  Description of Artificial Sequence: Synthetic peptide
  Seed: PRMCSLMQGSTLPRR
PRMFSLAQMSTMPRR

SEQ ID NO: 108945 - protein, 15 aa, Artificial Sequence
  Description of Artificial Sequence: Synthetic peptide
  Seed: PRMCSLMQGSTLPRR
PRMFSLAQMSTNPRR

SEQ ID NO: 108946 - protein, 15 aa, Artificial Sequence
  Description of Artificial Sequence: Synthetic peptide
  Seed: PRMCSLMQGSTLPRR
PRMFSLAQMSTQPRR

SEQ ID NO: 108947 - protein, 15 aa, Artificial Sequence
  Description of Artificial Sequence: Synthetic peptide
  Seed: PRMCSLMQGSTLPRR
PRMFSLAQMSTSPRR

SEQ ID NO: 108948 - protein, 15 aa, Artificial Sequence
  Description of Artificial Sequence: Synthetic peptide
  Seed: PRMCSLMQGSTLPRR
PRMFSLAQMSTTPRR

SEQ ID NO: 108949 - protein, 15 aa, Artificial Sequence
  Description of Artificial Sequence: Synthetic peptide
  Seed: PRMCSLMQGSTLPRR
PRMFSLAQMSTVPRR

SEQ ID NO: 108950 - protein, 15 aa, Artificial Sequence
  Description of Artificial Sequence: Synthetic peptide
  Seed: PRMCSLMQGSTLPRR
PRMFSLAQNSTAPRR

SEQ ID NO: 108951 - protein, 15 aa, Artificial Sequence
  Description of Artificial Sequence: Synthetic peptide
  Seed: PRMCSLMQGSTLPRR
PRMFSLAQNSTCPRR

SEQ ID NO: 108952 - protein, 15 aa, Artificial Sequence
  Description of Artificial Sequence: Synthetic peptide
  Seed: PRMCSLMQGSTLPRR
PRMFSLAQNSTFPRR

SEQ ID NO: 108953 - protein, 15 aa, Artificial Sequence
  Description of Artificial Sequence: Synthetic peptide
  Seed: PRMCSLMQGSTLPRR
PRMFSLAQNSTGPRR

SEQ ID NO: 108954 - protein, 15 aa, Artificial Sequence
  Description of Artificial Sequence: Synthetic peptide
  Seed: PRMCSLMQGSTLPRR
PRMFSLAQNSTHPRR

SEQ ID NO: 108955 - protein, 15 aa, Artificial Sequence
  Description of Artificial Sequence: Synthetic peptide
  Seed: PRMCSLMQGSTLPRR
PRMFSLAQNSTIPRR

SEQ ID NO: 108956 - protein, 15 aa, Artificial Sequence
  Description of Artificial Sequence: Synthetic peptide
  Seed: PRMCSLMQGSTLPRR
PRMFSLAQNSTLPRR

SEQ ID NO: 108957 - protein, 15 aa, Artificial Sequence
  Description of Artificial Sequence: Synthetic peptide
  Seed: PRMCSLMQGSTLPRR
PRMFSLAQNSTMPRR

SEQ ID NO: 108958 - protein, 15 aa, Artificial Sequence
  Description of Artificial Sequence: Synthetic peptide
  Seed: PRMCSLMQGSTLPRR
PRMFSLAQNSTNPRR

SEQ ID NO: 108959 - protein, 15 aa, Artificial Sequence
  Description of Artificial Sequence: Synthetic peptide
  Seed: PRMCSLMQGSTLPRR
PRMFSLAQNSTQPRR

SEQ ID NO: 108960 - protein, 15 aa, Artificial Sequence
  Description of Artificial Sequence: Synthetic peptide
  Seed: PRMCSLMQGSTLPRR
PRMFSLAQNSTSPRR

SEQ ID NO: 108961 - protein, 15 aa, Artificial Sequence
  Description of Artificial Sequence: Synthetic peptide
  Seed: PRMCSLMQGSTLPRR
PRMFSLAQNSTTPRR

SEQ ID NO: 108962 - protein, 15 aa, Artificial Sequence
  Description of Artificial Sequence: Synthetic peptide
  Seed: PRMCSLMQGSTLPRR
PRMFSLAQNSTVPRR

SEQ ID NO: 108963 - protein, 15 aa, Artificial Sequence
  Description of Artificial Sequence: Synthetic peptide
  Seed: PRMCSLMQGSTLPRR
PRMFSLAQPSTAPRR

SEQ ID NO: 108964 - protein, 15 aa, Artificial Sequence
  Description of Artificial Sequence: Synthetic peptide
  Seed: PRMCSLMQGSTLPRR
PRMFSLAQPSTCPRR

SEQ ID NO: 108965 - protein, 15 aa, Artificial Sequence
  Description of Artificial Sequence: Synthetic peptide
  Seed: PRMCSLMQGSTLPRR
PRMFSLAQPSTEPRR

SEQ ID NO: 108966 - protein, 15 aa, Artificial Sequence
  Description of Artificial Sequence: Synthetic peptide
  Seed: PRMCSLMQGSTLPRR
PRMFSLAQPSTFPRR

SEQ ID NO: 108967 - protein, 15 aa, Artificial Sequence
  Description of Artificial Sequence: Synthetic peptide
  Seed: PRMCSLMQGSTLPRR
PRMFSLAQPSTGPRR

SEQ ID NO: 108968 - protein, 15 aa, Artificial Sequence
  Description of Artificial Sequence: Synthetic peptide
  Seed: PRMCSLMQGSTLPRR
PRMFSLAQPSTHPRR

SEQ ID NO: 108969 - protein, 15 aa, Artificial Sequence
  Description of Artificial Sequence: Synthetic peptide
  Seed: PRMCSLMQGSTLPRR
PRMFSLAQPSTIPRR

SEQ ID NO: 108970 - protein, 15 aa, Artificial Sequence
  Description of Artificial Sequence: Synthetic peptide
  Seed: PRMCSLMQGSTLPRR
PRMFSLAQPSTLPRR

SEQ ID NO: 108971 - protein, 15 aa, Artificial Sequence
  Description of Artificial Sequence: Synthetic peptide
  Seed: PRMCSLMQGSTLPRR
PRMFSLAQPSTMPRR

SEQ ID NO: 108972 - protein, 15 aa, Artificial Sequence
  Description of Artificial Sequence: Synthetic peptide
  Seed: PRMCSLMQGSTLPRR
PRMFSLAQPSTNPRR

SEQ ID NO: 108973 - protein, 15 aa, Artificial Sequence
  Description of Artificial Sequence: Synthetic peptide
  Seed: PRMCSLMQGSTLPRR
PRMFSLAQPSTPPRR

SEQ ID NO: 108974 - protein, 15 aa, Artificial Sequence
  Description of Artificial Sequence: Synthetic peptide
  Seed: PRMCSLMQGSTLPRR
PRMFSLAQPSTQPRR

SEQ ID NO: 108975 - protein, 15 aa, Artificial Sequence
  Description of Artificial Sequence: Synthetic peptide
  Seed: PRMCSLMQGSTLPRR
PRMFSLAQPSTRPRR

SEQ ID NO: 108976 - protein, 15 aa, Artificial Sequence
  Description of Artificial Sequence: Synthetic peptide
  Seed: PRMCSLMQGSTLPRR
PRMFSLAQPSTSPRR

SEQ ID NO: 108977 - protein, 15 aa, Artificial Sequence
  Description of Artificial Sequence: Synthetic peptide
  Seed: PRMCSLMQGSTLPRR
PRMFSLAQPSTTPRR

SEQ ID NO: 108978 - protein, 15 aa, Artificial Sequence
  Description of Artificial Sequence: Synthetic peptide
  Seed: PRMCSLMQGSTLPRR
PRMFSLAQPSTVPRR

SEQ ID NO: 108979 - protein, 15 aa, Artificial Sequence
  Description of Artificial Sequence: Synthetic peptide
  Seed: PRMCSLMQGSTLPRR
PRMFSLAQPSTWPRR

SEQ ID NO: 108980 - protein, 15 aa, Artificial Sequence
  Description of Artificial Sequence: Synthetic peptide
  Seed: PRMCSLMQGSTLPRR
PRMFSLAQPSTYPRR

SEQ ID NO: 108981 - protein, 15 aa, Artificial Sequence
  Description of Artificial Sequence: Synthetic peptide
  Seed: PRMCSLMQGSTLPRR
PRMFSLAQQSTAPRR

SEQ ID NO: 108982 - protein, 15 aa, Artificial Sequence
  Description of Artificial Sequence: Synthetic peptide
  Seed: PRMCSLMQGSTLPRR
PRMFSLAQQSTIPRR

SEQ ID NO: 108983 - protein, 15 aa, Artificial Sequence
  Description of Artificial Sequence: Synthetic peptide
  Seed: PRMCSLMQGSTLPRR
PRMFSLAQQSTLPRR

SEQ ID NO: 108984 - protein, 15 aa, Artificial Sequence
  Description of Artificial Sequence: Synthetic peptide
  Seed: PRMCSLMQGSTLPRR
PRMFSLAQQSTVPRR

SEQ ID NO: 108985 - protein, 15 aa, Artificial Sequence
  Description of Artificial Sequence: Synthetic peptide
  Seed: PRMCSLMQGSTLPRR
PRMFSLAQSSTAPRR

SEQ ID NO: 108986 - protein, 15 aa, Artificial Sequence
  Description of Artificial Sequence: Synthetic peptide
  Seed: PRMCSLMQGSTLPRR
PRMFSLAQSSTCPRR

SEQ ID NO: 108987 - protein, 15 aa, Artificial Sequence
  Description of Artificial Sequence: Synthetic peptide
  Seed: PRMCSLMQGSTLPRR
PRMFSLAQSSTEPRR

SEQ ID NO: 108988 - protein, 15 aa, Artificial Sequence
  Description of Artificial Sequence: Synthetic peptide
  Seed: PRMCSLMQGSTLPRR
PRMFSLAQSSTFPRR

SEQ ID NO: 108989 - protein, 15 aa, Artificial Sequence
  Description of Artificial Sequence: Synthetic peptide
  Seed: PRMCSLMQGSTLPRR
PRMFSLAQSSTGPRR

SEQ ID NO: 108990 - protein, 15 aa, Artificial Sequence
  Description of Artificial Sequence: Synthetic peptide
  Seed: PRMCSLMQGSTLPRR
PRMFSLAQSSTHPRR

SEQ ID NO: 108991 - protein, 15 aa, Artificial Sequence
  Description of Artificial Sequence: Synthetic peptide
  Seed: PRMCSLMQGSTLPRR
PRMFSLAQSSTIPRR

SEQ ID NO: 108992 - protein, 15 aa, Artificial Sequence
  Description of Artificial Sequence: Synthetic peptide
  Seed: PRMCSLMQGSTLPRR
PRMFSLAQSSTKPRR

SEQ ID NO: 108993 - protein, 15 aa, Artificial Sequence
  Description of Artificial Sequence: Synthetic peptide
  Seed: PRMCSLMQGSTLPRR
PRMFSLAQSSTLPRR

SEQ ID NO: 108994 - protein, 15 aa, Artificial Sequence
  Description of Artificial Sequence: Synthetic peptide
  Seed: PRMCSLMQGSTLPRR
PRMFSLAQSSTMPRR

SEQ ID NO: 108995 - protein, 15 aa, Artificial Sequence
  Description of Artificial Sequence: Synthetic peptide
  Seed: PRMCSLMQGSTLPRR
PRMFSLAQSSTNPRR

SEQ ID NO: 108996 - protein, 15 aa, Artificial Sequence
  Description of Artificial Sequence: Synthetic peptide
  Seed: PRMCSLMQGSTLPRR
PRMFSLAQSSTPPRR

SEQ ID NO: 108997 - protein, 15 aa, Artificial Sequence
  Description of Artificial Sequence: Synthetic peptide
  Seed: PRMCSLMQGSTLPRR
PRMFSLAQSSTQPRR

SEQ ID NO: 108998 - protein, 15 aa, Artificial Sequence
  Description of Artificial Sequence: Synthetic peptide
  Seed: PRMCSLMQGSTLPRR
PRMFSLAQSSTRPRR

SEQ ID NO: 108999 - protein, 15 aa, Artificial Sequence
  Description of Artificial Sequence: Synthetic peptide
  Seed: PRMCSLMQGSTLPRR
PRMFSLAQSSTSPRR

SEQ ID NO: 109000 - protein, 15 aa, Artificial Sequence
  Description of Artificial Sequence: Synthetic peptide
  Seed: PRMCSLMQGSTLPRR
PRMFSLAQSSTTPRR

SEQ ID NO: 109001 - protein, 15 aa, Artificial Sequence
  Description of Artificial Sequence: Synthetic peptide
  Seed: PRMCSLMQGSTLPRR
PRMFSLAQSSTVPRR

SEQ ID NO: 109002 - protein, 15 aa, Artificial Sequence
  Description of Artificial Sequence: Synthetic peptide
  Seed: PRMCSLMQGSTLPRR
PRMFSLAQSSTWPRR

SEQ ID NO: 109003 - protein, 15 aa, Artificial Sequence
  Description of Artificial Sequence: Synthetic peptide
  Seed: PRMCSLMQGSTLPRR
PRMFSLAQSSTYPRR

SEQ ID NO: 109004 - protein, 15 aa, Artificial Sequence
  Description of Artificial Sequence: Synthetic peptide
  Seed: PRMCSLMQGSTLPRR
PRMFSLAQTSTAPRR

SEQ ID NO: 109005 - protein, 15 aa, Artificial Sequence
  Description of Artificial Sequence: Synthetic peptide
  Seed: PRMCSLMQGSTLPRR
PRMFSLAQTSTCPRR

SEQ ID NO: 109006 - protein, 15 aa, Artificial Sequence
  Description of Artificial Sequence: Synthetic peptide
  Seed: PRMCSLMQGSTLPRR
PRMFSLAQTSTFPRR

SEQ ID NO: 109007 - protein, 15 aa, Artificial Sequence
  Description of Artificial Sequence: Synthetic peptide
  Seed: PRMCSLMQGSTLPRR
PRMFSLAQTSTGPRR

SEQ ID NO: 109008 - protein, 15 aa, Artificial Sequence
  Description of Artificial Sequence: Synthetic peptide
  Seed: PRMCSLMQGSTLPRR
PRMFSLAQTSTHPRR

SEQ ID NO: 109009 - protein, 15 aa, Artificial Sequence
  Description of Artificial Sequence: Synthetic peptide
  Seed: PRMCSLMQGSTLPRR
PRMFSLAQTSTIPRR

SEQ ID NO: 109010 - protein, 15 aa, Artificial Sequence
  Description of Artificial Sequence: Synthetic peptide
  Seed: PRMCSLMQGSTLPRR
PRMFSLAQTSTLPRR

SEQ ID NO: 109011 - protein, 15 aa, Artificial Sequence
  Description of Artificial Sequence: Synthetic peptide
  Seed: PRMCSLMQGSTLPRR
PRMFSLAQTSTMPRR

SEQ ID NO: 109012 - protein, 15 aa, Artificial Sequence
  Description of Artificial Sequence: Synthetic peptide
  Seed: PRMCSLMQGSTLPRR
PRMFSLAQTSTNPRR

SEQ ID NO: 109013 - protein, 15 aa, Artificial Sequence
  Description of Artificial Sequence: Synthetic peptide
  Seed: PRMCSLMQGSTLPRR
PRMFSLAQTSTPPRR

SEQ ID NO: 109014 - protein, 15 aa, Artificial Sequence
  Description of Artificial Sequence: Synthetic peptide
  Seed: PRMCSLMQGSTLPRR
PRMFSLAQTSTQPRR

SEQ ID NO: 109015 - protein, 15 aa, Artificial Sequence
  Description of Artificial Sequence: Synthetic peptide
  Seed: PRMCSLMQGSTLPRR
PRMFSLAQTSTSPRR

SEQ ID NO: 109016 - protein, 15 aa, Artificial Sequence
  Description of Artificial Sequence: Synthetic peptide
  Seed: PRMCSLMQGSTLPRR
PRMFSLAQTSTTPRR

SEQ ID NO: 109017 - protein, 15 aa, Artificial Sequence
  Description of Artificial Sequence: Synthetic peptide
  Seed: PRMCSLMQGSTLPRR
PRMFSLAQTSTVPRR

SEQ ID NO: 109018 - protein, 15 aa, Artificial Sequence
  Description of Artificial Sequence: Synthetic peptide
  Seed: PRMCSLMQGSTLPRR
PRMFSLAQTSTWPRR

SEQ ID NO: 109019 - protein, 15 aa, Artificial Sequence
  Description of Artificial Sequence: Synthetic peptide
  Seed: PRMCSLMQGSTLPRR
PRMFSLAQTSTYPRR

SEQ ID NO: 109020 - protein, 15 aa, Artificial Sequence
  Description of Artificial Sequence: Synthetic peptide
  Seed: PRMCSLMQGSTLPRR
PRMFSLAQVSTAPRR

SEQ ID NO: 109021 - protein, 15 aa, Artificial Sequence
  Description of Artificial Sequence: Synthetic peptide
  Seed: PRMCSLMQGSTLPRR
PRMFSLAQVSTCPRR

SEQ ID NO: 109022 - protein, 15 aa, Artificial Sequence
  Description of Artificial Sequence: Synthetic peptide
  Seed: PRMCSLMQGSTLPRR
PRMFSLAQVSTDPRR

SEQ ID NO: 109023 - protein, 15 aa, Artificial Sequence
  Description of Artificial Sequence: Synthetic peptide
  Seed: PRMCSLMQGSTLPRR
PRMFSLAQVSTEPRR

SEQ ID NO: 109024 - protein, 15 aa, Artificial Sequence
  Description of Artificial Sequence: Synthetic peptide
  Seed: PRMCSLMQGSTLPRR
PRMFSLAQVSTFPRR

SEQ ID NO: 109025 - protein, 15 aa, Artificial Sequence
  Description of Artificial Sequence: Synthetic peptide
  Seed: PRMCSLMQGSTLPRR
PRMFSLAQVSTGPRR

SEQ ID NO: 109026 - protein, 15 aa, Artificial Sequence
  Description of Artificial Sequence: Synthetic peptide
  Seed: PRMCSLMQGSTLPRR
PRMFSLAQVSTHPRR

SEQ ID NO: 109027 - protein, 15 aa, Artificial Sequence
  Description of Artificial Sequence: Synthetic peptide
  Seed: PRMCSLMQGSTLPRR
PRMFSLAQVSTIPRR

SEQ ID NO: 109028 - protein, 15 aa, Artificial Sequence
  Description of Artificial Sequence: Synthetic peptide
  Seed: PRMCSLMQGSTLPRR
PRMFSLAQVSTLPRR

SEQ ID NO: 109029 - protein, 15 aa, Artificial Sequence
  Description of Artificial Sequence: Synthetic peptide
  Seed: PRMCSLMQGSTLPRR
PRMFSLAQVSTMPRR

SEQ ID NO: 109030 - protein, 15 aa, Artificial Sequence
  Description of Artificial Sequence: Synthetic peptide
  Seed: PRMCSLMQGSTLPRR
PRMFSLAQVSTNPRR

SEQ ID NO: 109031 - protein, 15 aa, Artificial Sequence
  Description of Artificial Sequence: Synthetic peptide
  Seed: PRMCSLMQGSTLPRR
PRMFSLAQVSTPPRR

SEQ ID NO: 109032 - protein, 15 aa, Artificial Sequence
  Description of Artificial Sequence: Synthetic peptide
  Seed: PRMCSLMQGSTLPRR
PRMFSLAQVSTQPRR

SEQ ID NO: 109033 - protein, 15 aa, Artificial Sequence
  Description of Artificial Sequence: Synthetic peptide
  Seed: PRMCSLMQGSTLPRR
PRMFSLAQVSTSPRR

SEQ ID NO: 109034 - protein, 15 aa, Artificial Sequence
  Description of Artificial Sequence: Synthetic peptide
  Seed: PRMCSLMQGSTLPRR
PRMFSLAQVSTTPRR

SEQ ID NO: 109035 - protein, 15 aa, Artificial Sequence
  Description of Artificial Sequence: Synthetic peptide
  Seed: PRMCSLMQGSTLPRR
PRMFSLAQVSTVPRR

SEQ ID NO: 109036 - protein, 15 aa, Artificial Sequence
  Description of Artificial Sequence: Synthetic peptide
  Seed: PRMCSLMQGSTLPRR
PRMFSLAQWSTLPRR

SEQ ID NO: 109037 - protein, 15 aa, Artificial Sequence
  Description of Artificial Sequence: Synthetic peptide
  Seed: PRMCSLMQGSTLPRR
PRMFSLCQASTAPRR

SEQ ID NO: 109038 - protein, 15 aa, Artificial Sequence
  Description of Artificial Sequence: Synthetic peptide
  Seed: PRMCSLMQGSTLPRR
PRMFSLCQASTGPRR

SEQ ID NO: 109039 - protein, 15 aa, Artificial Sequence
  Description of Artificial Sequence: Synthetic peptide
  Seed: PRMCSLMQGSTLPRR
PRMFSLCQASTIPRR

SEQ ID NO: 109040 - protein, 15 aa, Artificial Sequence
  Description of Artificial Sequence: Synthetic peptide
  Seed: PRMCSLMQGSTLPRR
PRMFSLCQASTLPRR

SEQ ID NO: 109041 - protein, 15 aa, Artificial Sequence
  Description of Artificial Sequence: Synthetic peptide
  Seed: PRMCSLMQGSTLPRR
PRMFSLCQASTMPRR

SEQ ID NO: 109042 - protein, 15 aa, Artificial Sequence
  Description of Artificial Sequence: Synthetic peptide
  Seed: PRMCSLMQGSTLPRR
PRMFSLCQASTSPRR

SEQ ID NO: 109043 - protein, 15 aa, Artificial Sequence
  Description of Artificial Sequence: Synthetic peptide
  Seed: PRMCSLMQGSTLPRR
PRMFSLCQASTTPRR

SEQ ID NO: 109044 - protein, 15 aa, Artificial Sequence
  Description of Artificial Sequence: Synthetic peptide
  Seed: PRMCSLMQGSTLPRR
PRMFSLCQASTVPRR

SEQ ID NO: 109045 - protein, 15 aa, Artificial Sequence
  Description of Artificial Sequence: Synthetic peptide
  Seed: PRMCSLMQGSTLPRR
PRMFSLCQGSTAPRR

SEQ ID NO: 109046 - protein, 15 aa, Artificial Sequence
  Description of Artificial Sequence: Synthetic peptide
  Seed: PRMCSLMQGSTLPRR
PRMFSLCQGSTIPRR

SEQ ID NO: 109047 - protein, 15 aa, Artificial Sequence
  Description of Artificial Sequence: Synthetic peptide
  Seed: PRMCSLMQGSTLPRR
PRMFSLCQGSTLPRR

SEQ ID NO: 109048 - protein, 15 aa, Artificial Sequence
  Description of Artificial Sequence: Synthetic peptide
  Seed: PRMCSLMQGSTLPRR
PRMFSLCQGSTMPRR

SEQ ID NO: 109049 - protein, 15 aa, Artificial Sequence
  Description of Artificial Sequence: Synthetic peptide
  Seed: PRMCSLMQGSTLPRR
PRMFSLCQGSTVPRR

SEQ ID NO: 109050 - protein, 15 aa, Artificial Sequence
  Description of Artificial Sequence: Synthetic peptide
  Seed: PRMCSLMQGSTLPRR
PRMFSLCQNSTIPRR

SEQ ID NO: 109051 - protein, 15 aa, Artificial Sequence
  Description of Artificial Sequence: Synthetic peptide
  Seed: PRMCSLMQGSTLPRR
PRMFSLCQNSTLPRR

SEQ ID NO: 109052 - protein, 15 aa, Artificial Sequence
  Description of Artificial Sequence: Synthetic peptide
  Seed: PRMCSLMQGSTLPRR
PRMFSLCQNSTVPRR

SEQ ID NO: 109053 - protein, 15 aa, Artificial Sequence
  Description of Artificial Sequence: Synthetic peptide
  Seed: PRMCSLMQGSTLPRR
PRMFSLCQPSTAPRR

SEQ ID NO: 109054 - protein, 15 aa, Artificial Sequence
  Description of Artificial Sequence: Synthetic peptide
  Seed: PRMCSLMQGSTLPRR
PRMFSLCQPSTIPRR

SEQ ID NO: 109055 - protein, 15 aa, Artificial Sequence
  Description of Artificial Sequence: Synthetic peptide
  Seed: PRMCSLMQGSTLPRR
PRMFSLCQPSTLPRR

SEQ ID NO: 109056 - protein, 15 aa, Artificial Sequence
  Description of Artificial Sequence: Synthetic peptide
  Seed: PRMCSLMQGSTLPRR
PRMFSLCQPSTVPRR

SEQ ID NO: 109057 - protein, 15 aa, Artificial Sequence
  Description of Artificial Sequence: Synthetic peptide
  Seed: PRMCSLMQGSTLPRR
PRMFSLCQSSTAPRR

SEQ ID NO: 109058 - protein, 15 aa, Artificial Sequence
  Description of Artificial Sequence: Synthetic peptide
  Seed: PRMCSLMQGSTLPRR
PRMFSLCQSSTIPRR

SEQ ID NO: 109059 - protein, 15 aa, Artificial Sequence
  Description of Artificial Sequence: Synthetic peptide
  Seed: PRMCSLMQGSTLPRR
PRMFSLCQSSTLPRR

SEQ ID NO: 109060 - protein, 15 aa, Artificial Sequence
  Description of Artificial Sequence: Synthetic peptide
  Seed: PRMCSLMQGSTLPRR
PRMFSLCQSSTMPRR

SEQ ID NO: 109061 - protein, 15 aa, Artificial Sequence
  Description of Artificial Sequence: Synthetic peptide
  Seed: PRMCSLMQGSTLPRR
PRMFSLCQSSTSPRR

SEQ ID NO: 109062 - protein, 15 aa, Artificial Sequence
  Description of Artificial Sequence: Synthetic peptide
  Seed: PRMCSLMQGSTLPRR
PRMFSLCQSSTTPRR

SEQ ID NO: 109063 - protein, 15 aa, Artificial Sequence
  Description of Artificial Sequence: Synthetic peptide
  Seed: PRMCSLMQGSTLPRR
PRMFSLCQSSTVPRR

SEQ ID NO: 109064 - protein, 15 aa, Artificial Sequence
  Description of Artificial Sequence: Synthetic peptide
  Seed: PRMCSLMQGSTLPRR
PRMFSLCQTSTIPRR

SEQ ID NO: 109065 - protein, 15 aa, Artificial Sequence
  Description of Artificial Sequence: Synthetic peptide
  Seed: PRMCSLMQGSTLPRR
PRMFSLCQTSTLPRR

SEQ ID NO: 109066 - protein, 15 aa, Artificial Sequence
  Description of Artificial Sequence: Synthetic peptide
  Seed: PRMCSLMQGSTLPRR
PRMFSLCQTSTVPRR

SEQ ID NO: 109067 - protein, 15 aa, Artificial Sequence
  Description of Artificial Sequence: Synthetic peptide
  Seed: PRMCSLMQGSTLPRR
PRMFSLDQASTIPRR

SEQ ID NO: 109068 - protein, 15 aa, Artificial Sequence
  Description of Artificial Sequence: Synthetic peptide
  Seed: PRMCSLMQGSTLPRR
PRMFSLDQASTLPRR

SEQ ID NO: 109069 - protein, 15 aa, Artificial Sequence
  Description of Artificial Sequence: Synthetic peptide
  Seed: PRMCSLMQGSTLPRR
PRMFSLDQASTVPRR

SEQ ID NO: 109070 - protein, 15 aa, Artificial Sequence
  Description of Artificial Sequence: Synthetic peptide
  Seed: PRMCSLMQGSTLPRR
PRMFSLEQASTAPRR

SEQ ID NO: 109071 - protein, 15 aa, Artificial Sequence
  Description of Artificial Sequence: Synthetic peptide
  Seed: PRMCSLMQGSTLPRR
PRMFSLEQASTFPRR

SEQ ID NO: 109072 - protein, 15 aa, Artificial Sequence
  Description of Artificial Sequence: Synthetic peptide
  Seed: PRMCSLMQGSTLPRR
PRMFSLEQASTGPRR

SEQ ID NO: 109073 - protein, 15 aa, Artificial Sequence
  Description of Artificial Sequence: Synthetic peptide
  Seed: PRMCSLMQGSTLPRR
PRMFSLEQASTIPRR

SEQ ID NO: 109074 - protein, 15 aa, Artificial Sequence
  Description of Artificial Sequence: Synthetic peptide
  Seed: PRMCSLMQGSTLPRR
PRMFSLEQASTLPRR

SEQ ID NO: 109075 - protein, 15 aa, Artificial Sequence
  Description of Artificial Sequence: Synthetic peptide
  Seed: PRMCSLMQGSTLPRR
PRMFSLEQASTMPRR

SEQ ID NO: 109076 - protein, 15 aa, Artificial Sequence
  Description of Artificial Sequence: Synthetic peptide
  Seed: PRMCSLMQGSTLPRR
PRMFSLEQASTNPRR

SEQ ID NO: 109077 - protein, 15 aa, Artificial Sequence
  Description of Artificial Sequence: Synthetic peptide
  Seed: PRMCSLMQGSTLPRR
PRMFSLEQASTSPRR

SEQ ID NO: 109078 - protein, 15 aa, Artificial Sequence
  Description of Artificial Sequence: Synthetic peptide
  Seed: PRMCSLMQGSTLPRR
PRMFSLEQASTTPRR

SEQ ID NO: 109079 - protein, 15 aa, Artificial Sequence
  Description of Artificial Sequence: Synthetic peptide
  Seed: PRMCSLMQGSTLPRR
PRMFSLEQASTVPRR

SEQ ID NO: 109080 - protein, 15 aa, Artificial Sequence
  Description of Artificial Sequence: Synthetic peptide
  Seed: PRMCSLMQGSTLPRR
PRMFSLEQFSTLPRR

SEQ ID NO: 109081 - protein, 15 aa, Artificial Sequence
  Description of Artificial Sequence: Synthetic peptide
  Seed: PRMCSLMQGSTLPRR
PRMFSLEQGSTAPRR

SEQ ID NO: 109082 - protein, 15 aa, Artificial Sequence
  Description of Artificial Sequence: Synthetic peptide
  Seed: PRMCSLMQGSTLPRR
PRMFSLEQGSTGPRR

SEQ ID NO: 109083 - protein, 15 aa, Artificial Sequence
  Description of Artificial Sequence: Synthetic peptide
  Seed: PRMCSLMQGSTLPRR
PRMFSLEQGSTIPRR

SEQ ID NO: 109084 - protein, 15 aa, Artificial Sequence
  Description of Artificial Sequence: Synthetic peptide
  Seed: PRMCSLMQGSTLPRR
PRMFSLEQGSTLPRR

SEQ ID NO: 109085 - protein, 15 aa, Artificial Sequence
  Description of Artificial Sequence: Synthetic peptide
  Seed: PRMCSLMQGSTLPRR
PRMFSLEQGSTMPRR

SEQ ID NO: 109086 - protein, 15 aa, Artificial Sequence
  Description of Artificial Sequence: Synthetic peptide
  Seed: PRMCSLMQGSTLPRR
PRMFSLEQGSTSPRR

SEQ ID NO: 109087 - protein, 15 aa, Artificial Sequence
  Description of Artificial Sequence: Synthetic peptide
  Seed: PRMCSLMQGSTLPRR
PRMFSLEQGSTTPRR

SEQ ID NO: 109088 - protein, 15 aa, Artificial Sequence
  Description of Artificial Sequence: Synthetic peptide
  Seed: PRMCSLMQGSTLPRR
PRMFSLEQGSTVPRR

SEQ ID NO: 109089 - protein, 15 aa, Artificial Sequence
  Description of Artificial Sequence: Synthetic peptide
  Seed: PRMCSLMQGSTLPRR
PRMFSLEQISTAPRR

SEQ ID NO: 109090 - protein, 15 aa, Artificial Sequence
  Description of Artificial Sequence: Synthetic peptide
  Seed: PRMCSLMQGSTLPRR
PRMFSLEQISTSPRR

SEQ ID NO: 109091 - protein, 15 aa, Artificial Sequence
  Description of Artificial Sequence: Synthetic peptide
  Seed: PRMCSLMQGSTLPRR
PRMFSLEQNSTAPRR

SEQ ID NO: 109092 - protein, 15 aa, Artificial Sequence
  Description of Artificial Sequence: Synthetic peptide
  Seed: PRMCSLMQGSTLPRR
PRMFSLEQNSTIPRR

SEQ ID NO: 109093 - protein, 15 aa, Artificial Sequence
  Description of Artificial Sequence: Synthetic peptide
  Seed: PRMCSLMQGSTLPRR
PRMFSLEQNSTLPRR

SEQ ID NO: 109094 - protein, 15 aa, Artificial Sequence
  Description of Artificial Sequence: Synthetic peptide
  Seed: PRMCSLMQGSTLPRR
PRMFSLEQNSTVPRR

SEQ ID NO: 109095 - protein, 15 aa, Artificial Sequence
  Description of Artificial Sequence: Synthetic peptide
  Seed: PRMCSLMQGSTLPRR
PRMFSLEQPSTAPRR

SEQ ID NO: 109096 - protein, 15 aa, Artificial Sequence
  Description of Artificial Sequence: Synthetic peptide
  Seed: PRMCSLMQGSTLPRR
PRMFSLEQPSTIPRR

SEQ ID NO: 109097 - protein, 15 aa, Artificial Sequence
  Description of Artificial Sequence: Synthetic peptide
  Seed: PRMCSLMQGSTLPRR
PRMFSLEQPSTLPRR

SEQ ID NO: 109098 - protein, 15 aa, Artificial Sequence
  Description of Artificial Sequence: Synthetic peptide
  Seed: PRMCSLMQGSTLPRR
PRMFSLEQPSTMPRR

SEQ ID NO: 109099 - protein, 15 aa, Artificial Sequence
  Description of Artificial Sequence: Synthetic peptide
  Seed: PRMCSLMQGSTLPRR
PRMFSLEQPSTSPRR

SEQ ID NO: 109100 - protein, 15 aa, Artificial Sequence
  Description of Artificial Sequence: Synthetic peptide
  Seed: PRMCSLMQGSTLPRR
PRMFSLEQPSTVPRR

SEQ ID NO: 109101 - protein, 15 aa, Artificial Sequence
  Description of Artificial Sequence: Synthetic peptide
  Seed: PRMCSLMQGSTLPRR
PRMFSLEQSSTAPRR

SEQ ID NO: 109102 - protein, 15 aa, Artificial Sequence
  Description of Artificial Sequence: Synthetic peptide
  Seed: PRMCSLMQGSTLPRR
PRMFSLEQSSTGPRR

SEQ ID NO: 109103 - protein, 15 aa, Artificial Sequence
  Description of Artificial Sequence: Synthetic peptide
  Seed: PRMCSLMQGSTLPRR
PRMFSLEQSSTIPRR

SEQ ID NO: 109104 - protein, 15 aa, Artificial Sequence
  Description of Artificial Sequence: Synthetic peptide
  Seed: PRMCSLMQGSTLPRR
PRMFSLEQSSTLPRR

SEQ ID NO: 109105 - protein, 15 aa, Artificial Sequence
  Description of Artificial Sequence: Synthetic peptide
  Seed: PRMCSLMQGSTLPRR
PRMFSLEQSSTMPRR

SEQ ID NO: 109106 - protein, 15 aa, Artificial Sequence
  Description of Artificial Sequence: Synthetic peptide
  Seed: PRMCSLMQGSTLPRR
PRMFSLEQSSTSPRR

SEQ ID NO: 109107 - protein, 15 aa, Artificial Sequence
  Description of Artificial Sequence: Synthetic peptide
  Seed: PRMCSLMQGSTLPRR
PRMFSLEQSSTTPRR

SEQ ID NO: 109108 - protein, 15 aa, Artificial Sequence
  Description of Artificial Sequence: Synthetic peptide
  Seed: PRMCSLMQGSTLPRR
PRMFSLEQSSTVPRR

SEQ ID NO: 109109 - protein, 15 aa, Artificial Sequence
  Description of Artificial Sequence: Synthetic peptide
  Seed: PRMCSLMQGSTLPRR
PRMFSLEQTSTAPRR

SEQ ID NO: 109110 - protein, 15 aa, Artificial Sequence
  Description of Artificial Sequence: Synthetic peptide
  Seed: PRMCSLMQGSTLPRR
PRMFSLEQTSTIPRR

SEQ ID NO: 109111 - protein, 15 aa, Artificial Sequence
  Description of Artificial Sequence: Synthetic peptide
  Seed: PRMCSLMQGSTLPRR
PRMFSLEQTSTLPRR

SEQ ID NO: 109112 - protein, 15 aa, Artificial Sequence
  Description of Artificial Sequence: Synthetic peptide
  Seed: PRMCSLMQGSTLPRR
PRMFSLEQTSTVPRR

SEQ ID NO: 109113 - protein, 15 aa, Artificial Sequence
  Description of Artificial Sequence: Synthetic peptide
  Seed: PRMCSLMQGSTLPRR
PRMFSLEQVSTAPRR

SEQ ID NO: 109114 - protein, 15 aa, Artificial Sequence
  Description of Artificial Sequence: Synthetic peptide
  Seed: PRMCSLMQGSTLPRR
PRMFSLEQVSTIPRR

SEQ ID NO: 109115 - protein, 15 aa, Artificial Sequence
  Description of Artificial Sequence: Synthetic peptide
  Seed: PRMCSLMQGSTLPRR
PRMFSLEQVSTLPRR

SEQ ID NO: 109116 - protein, 15 aa, Artificial Sequence
  Description of Artificial Sequence: Synthetic peptide
  Seed: PRMCSLMQGSTLPRR
PRMFSLEQVSTNPRR

SEQ ID NO: 109117 - protein, 15 aa, Artificial Sequence
  Description of Artificial Sequence: Synthetic peptide
  Seed: PRMCSLMQGSTLPRR
PRMFSLEQVSTSPRR

SEQ ID NO: 109118 - protein, 15 aa, Artificial Sequence
  Description of Artificial Sequence: Synthetic peptide
  Seed: PRMCSLMQGSTLPRR
PRMFSLEQVSTVPRR

SEQ ID NO: 109119 - protein, 15 aa, Artificial Sequence
  Description of Artificial Sequence: Synthetic peptide
  Seed: PRMCSLMQGSTLPRR
PRMFSLFQASTAPRR

SEQ ID NO: 109120 - protein, 15 aa, Artificial Sequence
  Description of Artificial Sequence: Synthetic peptide
  Seed: PRMCSLMQGSTLPRR
PRMFSLFQASTCPRR

SEQ ID NO: 109121 - protein, 15 aa, Artificial Sequence
  Description of Artificial Sequence: Synthetic peptide
  Seed: PRMCSLMQGSTLPRR
PRMFSLFQASTDPRR

SEQ ID NO: 109122 - protein, 15 aa, Artificial Sequence
  Description of Artificial Sequence: Synthetic peptide
  Seed: PRMCSLMQGSTLPRR
PRMFSLFQASTFPRR

SEQ ID NO: 109123 - protein, 15 aa, Artificial Sequence
  Description of Artificial Sequence: Synthetic peptide
  Seed: PRMCSLMQGSTLPRR
PRMFSLFQASTGPRR

SEQ ID NO: 109124 - protein, 15 aa, Artificial Sequence
  Description of Artificial Sequence: Synthetic peptide
  Seed: PRMCSLMQGSTLPRR
PRMFSLFQASTHPRR

SEQ ID NO: 109125 - protein, 15 aa, Artificial Sequence
  Description of Artificial Sequence: Synthetic peptide
  Seed: PRMCSLMQGSTLPRR
PRMFSLFQASTIPRR

SEQ ID NO: 109126 - protein, 15 aa, Artificial Sequence
  Description of Artificial Sequence: Synthetic peptide
  Seed: PRMCSLMQGSTLPRR
PRMFSLFQASTLPRR

SEQ ID NO: 109127 - protein, 15 aa, Artificial Sequence
  Description of Artificial Sequence: Synthetic peptide
  Seed: PRMCSLMQGSTLPRR
PRMFSLFQASTMPRR

SEQ ID NO: 109128 - protein, 15 aa, Artificial Sequence
  Description of Artificial Sequence: Synthetic peptide
  Seed: PRMCSLMQGSTLPRR
PRMFSLFQASTNPRR

SEQ ID NO: 109129 - protein, 15 aa, Artificial Sequence
  Description of Artificial Sequence: Synthetic peptide
  Seed: PRMCSLMQGSTLPRR
PRMFSLFQASTPPRR

SEQ ID NO: 109130 - protein, 15 aa, Artificial Sequence
  Description of Artificial Sequence: Synthetic peptide
  Seed: PRMCSLMQGSTLPRR
PRMFSLFQASTQPRR

SEQ ID NO: 109131 - protein, 15 aa, Artificial Sequence
  Description of Artificial Sequence: Synthetic peptide
  Seed: PRMCSLMQGSTLPRR
PRMFSLFQASTRPRR

SEQ ID NO: 109132 - protein, 15 aa, Artificial Sequence
  Description of Artificial Sequence: Synthetic peptide
  Seed: PRMCSLMQGSTLPRR
PRMFSLFQASTSPRR

SEQ ID NO: 109133 - protein, 15 aa, Artificial Sequence
  Description of Artificial Sequence: Synthetic peptide
  Seed: PRMCSLMQGSTLPRR
PRMFSLFQASTTPRR

SEQ ID NO: 109134 - protein, 15 aa, Artificial Sequence
  Description of Artificial Sequence: Synthetic peptide
  Seed: PRMCSLMQGSTLPRR
PRMFSLFQASTVPRR

SEQ ID NO: 109135 - protein, 15 aa, Artificial Sequence
  Description of Artificial Sequence: Synthetic peptide
  Seed: PRMCSLMQGSTLPRR
PRMFSLFQFSTFPRR

SEQ ID NO: 109136 - protein, 15 aa, Artificial Sequence
  Description of Artificial Sequence: Synthetic peptide
  Seed: PRMCSLMQGSTLPRR
PRMFSLFQFSTIPRR

SEQ ID NO: 109137 - protein, 15 aa, Artificial Sequence
  Description of Artificial Sequence: Synthetic peptide
  Seed: PRMCSLMQGSTLPRR
PRMFSLFQFSTLPRR

SEQ ID NO: 109138 - protein, 15 aa, Artificial Sequence
  Description of Artificial Sequence: Synthetic peptide
  Seed: PRMCSLMQGSTLPRR
PRMFSLFQFSTMPRR

SEQ ID NO: 109139 - protein, 15 aa, Artificial Sequence
  Description of Artificial Sequence: Synthetic peptide
  Seed: PRMCSLMQGSTLPRR
PRMFSLFQFSTVPRR

SEQ ID NO: 109140 - protein, 15 aa, Artificial Sequence
  Description of Artificial Sequence: Synthetic peptide
  Seed: PRMCSLMQGSTLPRR
PRMFSLFQGSTAPRR

SEQ ID NO: 109141 - protein, 15 aa, Artificial Sequence
  Description of Artificial Sequence: Synthetic peptide
  Seed: PRMCSLMQGSTLPRR
PRMFSLFQGSTFPRR

SEQ ID NO: 109142 - protein, 15 aa, Artificial Sequence
  Description of Artificial Sequence: Synthetic peptide
  Seed: PRMCSLMQGSTLPRR
PRMFSLFQGSTGPRR

SEQ ID NO: 109143 - protein, 15 aa, Artificial Sequence
  Description of Artificial Sequence: Synthetic peptide
  Seed: PRMCSLMQGSTLPRR
PRMFSLFQGSTIPRR

SEQ ID NO: 109144 - protein, 15 aa, Artificial Sequence
  Description of Artificial Sequence: Synthetic peptide
  Seed: PRMCSLMQGSTLPRR
PRMFSLFQGSTLPRR

SEQ ID NO: 109145 - protein, 15 aa, Artificial Sequence
  Description of Artificial Sequence: Synthetic peptide
  Seed: PRMCSLMQGSTLPRR
PRMFSLFQGSTMPRR

SEQ ID NO: 109146 - protein, 15 aa, Artificial Sequence
  Description of Artificial Sequence: Synthetic peptide
  Seed: PRMCSLMQGSTLPRR
PRMFSLFQGSTNPRR

SEQ ID NO: 109147 - protein, 15 aa, Artificial Sequence
  Description of Artificial Sequence: Synthetic peptide
  Seed: PRMCSLMQGSTLPRR
PRMFSLFQGSTSPRR

SEQ ID NO: 109148 - protein, 15 aa, Artificial Sequence
  Description of Artificial Sequence: Synthetic peptide
  Seed: PRMCSLMQGSTLPRR
PRMFSLFQGSTTPRR

SEQ ID NO: 109149 - protein, 15 aa, Artificial Sequence
  Description of Artificial Sequence: Synthetic peptide
  Seed: PRMCSLMQGSTLPRR
PRMFSLFQGSTVPRR

SEQ ID NO: 109150 - protein, 15 aa, Artificial Sequence
  Description of Artificial Sequence: Synthetic peptide
  Seed: PRMCSLMQGSTLPRR
PRMFSLFQISTAPRR

SEQ ID NO: 109151 - protein, 15 aa, Artificial Sequence
  Description of Artificial Sequence: Synthetic peptide
  Seed: PRMCSLMQGSTLPRR
PRMFSLFQISTMPRR

SEQ ID NO: 109152 - protein, 15 aa, Artificial Sequence
  Description of Artificial Sequence: Synthetic peptide
  Seed: PRMCSLMQGSTLPRR
PRMFSLFQISTNPRR

SEQ ID NO: 109153 - protein, 15 aa, Artificial Sequence
  Description of Artificial Sequence: Synthetic peptide
  Seed: PRMCSLMQGSTLPRR
PRMFSLFQISTSPRR

SEQ ID NO: 109154 - protein, 15 aa, Artificial Sequence
  Description of Artificial Sequence: Synthetic peptide
  Seed: PRMCSLMQGSTLPRR
PRMFSLFQISTTPRR

SEQ ID NO: 109155 - protein, 15 aa, Artificial Sequence
  Description of Artificial Sequence: Synthetic peptide
  Seed: PRMCSLMQGSTLPRR
PRMFSLFQISTVPRR

SEQ ID NO: 109156 - protein, 15 aa, Artificial Sequence
  Description of Artificial Sequence: Synthetic peptide
  Seed: PRMCSLMQGSTLPRR
PRMFSLFQLSTAPRR

SEQ ID NO: 109157 - protein, 15 aa, Artificial Sequence
  Description of Artificial Sequence: Synthetic peptide
  Seed: PRMCSLMQGSTLPRR
PRMFSLFQLSTFPRR

SEQ ID NO: 109158 - protein, 15 aa, Artificial Sequence
  Description of Artificial Sequence: Synthetic peptide
  Seed: PRMCSLMQGSTLPRR
PRMFSLFQLSTIPRR

SEQ ID NO: 109159 - protein, 15 aa, Artificial Sequence
  Description of Artificial Sequence: Synthetic peptide
  Seed: PRMCSLMQGSTLPRR
PRMFSLFQLSTLPRR

SEQ ID NO: 109160 - protein, 15 aa, Artificial Sequence
  Description of Artificial Sequence: Synthetic peptide
  Seed: PRMCSLMQGSTLPRR
PRMFSLFQLSTNPRR

SEQ ID NO: 109161 - protein, 15 aa, Artificial Sequence
  Description of Artificial Sequence: Synthetic peptide
  Seed: PRMCSLMQGSTLPRR
PRMFSLFQLSTSPRR

SEQ ID NO: 109162 - protein, 15 aa, Artificial Sequence
  Description of Artificial Sequence: Synthetic peptide
  Seed: PRMCSLMQGSTLPRR
PRMFSLFQMSTAPRR

SEQ ID NO: 109163 - protein, 15 aa, Artificial Sequence
  Description of Artificial Sequence: Synthetic peptide
  Seed: PRMCSLMQGSTLPRR
PRMFSLFQMSTFPRR

SEQ ID NO: 109164 - protein, 15 aa, Artificial Sequence
  Description of Artificial Sequence: Synthetic peptide
  Seed: PRMCSLMQGSTLPRR
PRMFSLFQMSTNPRR

SEQ ID NO: 109165 - protein, 15 aa, Artificial Sequence
  Description of Artificial Sequence: Synthetic peptide
  Seed: PRMCSLMQGSTLPRR
PRMFSLFQMSTSPRR

SEQ ID NO: 109166 - protein, 15 aa, Artificial Sequence
  Description of Artificial Sequence: Synthetic peptide
  Seed: PRMCSLMQGSTLPRR
PRMFSLFQMSTVPRR

SEQ ID NO: 109167 - protein, 15 aa, Artificial Sequence
  Description of Artificial Sequence: Synthetic peptide
  Seed: PRMCSLMQGSTLPRR
PRMFSLFQNSTAPRR

SEQ ID NO: 109168 - protein, 15 aa, Artificial Sequence
  Description of Artificial Sequence: Synthetic peptide
  Seed: PRMCSLMQGSTLPRR
PRMFSLFQNSTIPRR

SEQ ID NO: 109169 - protein, 15 aa, Artificial Sequence
  Description of Artificial Sequence: Synthetic peptide
  Seed: PRMCSLMQGSTLPRR
PRMFSLFQNSTLPRR

SEQ ID NO: 109170 - protein, 15 aa, Artificial Sequence
  Description of Artificial Sequence: Synthetic peptide
  Seed: PRMCSLMQGSTLPRR
PRMFSLFQNSTMPRR

SEQ ID NO: 109171 - protein, 15 aa, Artificial Sequence
  Description of Artificial Sequence: Synthetic peptide
  Seed: PRMCSLMQGSTLPRR
PRMFSLFQNSTNPRR

SEQ ID NO: 109172 - protein, 15 aa, Artificial Sequence
  Description of Artificial Sequence: Synthetic peptide
  Seed: PRMCSLMQGSTLPRR
PRMFSLFQNSTSPRR

SEQ ID NO: 109173 - protein, 15 aa, Artificial Sequence
  Description of Artificial Sequence: Synthetic peptide
  Seed: PRMCSLMQGSTLPRR
PRMFSLFQNSTTPRR

SEQ ID NO: 109174 - protein, 15 aa, Artificial Sequence
  Description of Artificial Sequence: Synthetic peptide
  Seed: PRMCSLMQGSTLPRR
PRMFSLFQNSTVPRR

SEQ ID NO: 109175 - protein, 15 aa, Artificial Sequence
  Description of Artificial Sequence: Synthetic peptide
  Seed: PRMCSLMQGSTLPRR
PRMFSLFQPSTAPRR

SEQ ID NO: 109176 - protein, 15 aa, Artificial Sequence
  Description of Artificial Sequence: Synthetic peptide
  Seed: PRMCSLMQGSTLPRR
PRMFSLFQPSTGPRR

SEQ ID NO: 109177 - protein, 15 aa, Artificial Sequence
  Description of Artificial Sequence: Synthetic peptide
  Seed: PRMCSLMQGSTLPRR
PRMFSLFQPSTHPRR

SEQ ID NO: 109178 - protein, 15 aa, Artificial Sequence
  Description of Artificial Sequence: Synthetic peptide
  Seed: PRMCSLMQGSTLPRR
PRMFSLFQPSTIPRR

SEQ ID NO: 109179 - protein, 15 aa, Artificial Sequence
  Description of Artificial Sequence: Synthetic peptide
  Seed: PRMCSLMQGSTLPRR
PRMFSLFQPSTLPRR

SEQ ID NO: 109180 - protein, 15 aa, Artificial Sequence
  Description of Artificial Sequence: Synthetic peptide
  Seed: PRMCSLMQGSTLPRR
PRMFSLFQPSTMPRR

SEQ ID NO: 109181 - protein, 15 aa, Artificial Sequence
  Description of Artificial Sequence: Synthetic peptide
  Seed: PRMCSLMQGSTLPRR
PRMFSLFQPSTNPRR

SEQ ID NO: 109182 - protein, 15 aa, Artificial Sequence
  Description of Artificial Sequence: Synthetic peptide
  Seed: PRMCSLMQGSTLPRR
PRMFSLFQPSTQPRR

SEQ ID NO: 109183 - protein, 15 aa, Artificial Sequence
  Description of Artificial Sequence: Synthetic peptide
  Seed: PRMCSLMQGSTLPRR
PRMFSLFQPSTSPRR

SEQ ID NO: 109184 - protein, 15 aa, Artificial Sequence
  Description of Artificial Sequence: Synthetic peptide
  Seed: PRMCSLMQGSTLPRR
PRMFSLFQPSTTPRR

SEQ ID NO: 109185 - protein, 15 aa, Artificial Sequence
  Description of Artificial Sequence: Synthetic peptide
  Seed: PRMCSLMQGSTLPRR
PRMFSLFQPSTVPRR

SEQ ID NO: 109186 - protein, 15 aa, Artificial Sequence
  Description of Artificial Sequence: Synthetic peptide
  Seed: PRMCSLMQGSTLPRR
PRMFSLFQSSTAPRR

SEQ ID NO: 109187 - protein, 15 aa, Artificial Sequence
  Description of Artificial Sequence: Synthetic peptide
  Seed: PRMCSLMQGSTLPRR
PRMFSLFQSSTFPRR

SEQ ID NO: 109188 - protein, 15 aa, Artificial Sequence
  Description of Artificial Sequence: Synthetic peptide
  Seed: PRMCSLMQGSTLPRR
PRMFSLFQSSTGPRR

SEQ ID NO: 109189 - protein, 15 aa, Artificial Sequence
  Description of Artificial Sequence: Synthetic peptide
  Seed: PRMCSLMQGSTLPRR
PRMFSLFQSSTHPRR

SEQ ID NO: 109190 - protein, 15 aa, Artificial Sequence
  Description of Artificial Sequence: Synthetic peptide
  Seed: PRMCSLMQGSTLPRR
PRMFSLFQSSTIPRR

SEQ ID NO: 109191 - protein, 15 aa, Artificial Sequence
  Description of Artificial Sequence: Synthetic peptide
  Seed: PRMCSLMQGSTLPRR
PRMFSLFQSSTLPRR

SEQ ID NO: 109192 - protein, 15 aa, Artificial Sequence
  Description of Artificial Sequence: Synthetic peptide
  Seed: PRMCSLMQGSTLPRR
PRMFSLFQSSTMPRR

SEQ ID NO: 109193 - protein, 15 aa, Artificial Sequence
  Description of Artificial Sequence: Synthetic peptide
  Seed: PRMCSLMQGSTLPRR
PRMFSLFQSSTNPRR

SEQ ID NO: 109194 - protein, 15 aa, Artificial Sequence
  Description of Artificial Sequence: Synthetic peptide
  Seed: PRMCSLMQGSTLPRR
PRMFSLFQSSTRPRR

SEQ ID NO: 109195 - protein, 15 aa, Artificial Sequence
  Description of Artificial Sequence: Synthetic peptide
  Seed: PRMCSLMQGSTLPRR
PRMFSLFQSSTSPRR

SEQ ID NO: 109196 - protein, 15 aa, Artificial Sequence
  Description of Artificial Sequence: Synthetic peptide
  Seed: PRMCSLMQGSTLPRR
PRMFSLFQSSTTPRR

SEQ ID NO: 109197 - protein, 15 aa, Artificial Sequence
  Description of Artificial Sequence: Synthetic peptide
  Seed: PRMCSLMQGSTLPRR
PRMFSLFQSSTVPRR

SEQ ID NO: 109198 - protein, 15 aa, Artificial Sequence
  Description of Artificial Sequence: Synthetic peptide
  Seed: PRMCSLMQGSTLPRR
PRMFSLFQTSTAPRR

SEQ ID NO: 109199 - protein, 15 aa, Artificial Sequence
  Description of Artificial Sequence: Synthetic peptide
  Seed: PRMCSLMQGSTLPRR
PRMFSLFQTSTGPRR

SEQ ID NO: 109200 - protein, 15 aa, Artificial Sequence
  Description of Artificial Sequence: Synthetic peptide
  Seed: PRMCSLMQGSTLPRR
PRMFSLFQTSTHPRR

SEQ ID NO: 109201 - protein, 15 aa, Artificial Sequence
  Description of Artificial Sequence: Synthetic peptide
  Seed: PRMCSLMQGSTLPRR
PRMFSLFQTSTIPRR

SEQ ID NO: 109202 - protein, 15 aa, Artificial Sequence
  Description of Artificial Sequence: Synthetic peptide
  Seed: PRMCSLMQGSTLPRR
PRMFSLFQTSTLPRR

SEQ ID NO: 109203 - protein, 15 aa, Artificial Sequence
  Description of Artificial Sequence: Synthetic peptide
  Seed: PRMCSLMQGSTLPRR
PRMFSLFQTSTMPRR

SEQ ID NO: 109204 - protein, 15 aa, Artificial Sequence
  Description of Artificial Sequence: Synthetic peptide
  Seed: PRMCSLMQGSTLPRR
PRMFSLFQTSTNPRR

SEQ ID NO: 109205 - protein, 15 aa, Artificial Sequence
  Description of Artificial Sequence: Synthetic peptide
  Seed: PRMCSLMQGSTLPRR
PRMFSLFQTSTSPRR

SEQ ID NO: 109206 - protein, 15 aa, Artificial Sequence
  Description of Artificial Sequence: Synthetic peptide
  Seed: PRMCSLMQGSTLPRR
PRMFSLFQTSTTPRR

SEQ ID NO: 109207 - protein, 15 aa, Artificial Sequence
  Description of Artificial Sequence: Synthetic peptide
  Seed: PRMCSLMQGSTLPRR
PRMFSLFQTSTVPRR

SEQ ID NO: 109208 - protein, 15 aa, Artificial Sequence
  Description of Artificial Sequence: Synthetic peptide
  Seed: PRMCSLMQGSTLPRR
PRMFSLFQVSTAPRR

SEQ ID NO: 109209 - protein, 15 aa, Artificial Sequence
  Description of Artificial Sequence: Synthetic peptide
  Seed: PRMCSLMQGSTLPRR
PRMFSLFQVSTGPRR

SEQ ID NO: 109210 - protein, 15 aa, Artificial Sequence
  Description of Artificial Sequence: Synthetic peptide
  Seed: PRMCSLMQGSTLPRR
PRMFSLFQVSTHPRR

SEQ ID NO: 109211 - protein, 15 aa, Artificial Sequence
  Description of Artificial Sequence: Synthetic peptide
  Seed: PRMCSLMQGSTLPRR
PRMFSLFQVSTIPRR

SEQ ID NO: 109212 - protein, 15 aa, Artificial Sequence
  Description of Artificial Sequence: Synthetic peptide
  Seed: PRMCSLMQGSTLPRR
PRMFSLFQVSTLPRR

SEQ ID NO: 109213 - protein, 15 aa, Artificial Sequence
  Description of Artificial Sequence: Synthetic peptide
  Seed: PRMCSLMQGSTLPRR
PRMFSLFQVSTMPRR

SEQ ID NO: 109214 - protein, 15 aa, Artificial Sequence
  Description of Artificial Sequence: Synthetic peptide
  Seed: PRMCSLMQGSTLPRR
PRMFSLFQVSTNPRR

SEQ ID NO: 109215 - protein, 15 aa, Artificial Sequence
  Description of Artificial Sequence: Synthetic peptide
  Seed: PRMCSLMQGSTLPRR
PRMFSLFQVSTSPRR

SEQ ID NO: 109216 - protein, 15 aa, Artificial Sequence
  Description of Artificial Sequence: Synthetic peptide
  Seed: PRMCSLMQGSTLPRR
PRMFSLFQVSTTPRR

SEQ ID NO: 109217 - protein, 15 aa, Artificial Sequence
  Description of Artificial Sequence: Synthetic peptide
  Seed: PRMCSLMQGSTLPRR
PRMFSLFQVSTVPRR

SEQ ID NO: 109218 - protein, 15 aa, Artificial Sequence
  Description of Artificial Sequence: Synthetic peptide
  Seed: PRMCSLMQGSTLPRR
PRMFSLGQASTAPRR

SEQ ID NO: 109219 - protein, 15 aa, Artificial Sequence
  Description of Artificial Sequence: Synthetic peptide
  Seed: PRMCSLMQGSTLPRR
PRMFSLGQASTFPRR

SEQ ID NO: 109220 - protein, 15 aa, Artificial Sequence
  Description of Artificial Sequence: Synthetic peptide
  Seed: PRMCSLMQGSTLPRR
PRMFSLGQASTGPRR

SEQ ID NO: 109221 - protein, 15 aa, Artificial Sequence
  Description of Artificial Sequence: Synthetic peptide
  Seed: PRMCSLMQGSTLPRR
PRMFSLGQASTIPRR

SEQ ID NO: 109222 - protein, 15 aa, Artificial Sequence
  Description of Artificial Sequence: Synthetic peptide
  Seed: PRMCSLMQGSTLPRR
PRMFSLGQASTLPRR

SEQ ID NO: 109223 - protein, 15 aa, Artificial Sequence
  Description of Artificial Sequence: Synthetic peptide
  Seed: PRMCSLMQGSTLPRR
PRMFSLGQASTMPRR

SEQ ID NO: 109224 - protein, 15 aa, Artificial Sequence
  Description of Artificial Sequence: Synthetic peptide
  Seed: PRMCSLMQGSTLPRR
PRMFSLGQASTSPRR

SEQ ID NO: 109225 - protein, 15 aa, Artificial Sequence
  Description of Artificial Sequence: Synthetic peptide
  Seed: PRMCSLMQGSTLPRR
PRMFSLGQASTTPRR

SEQ ID NO: 109226 - protein, 15 aa, Artificial Sequence
  Description of Artificial Sequence: Synthetic peptide
  Seed: PRMCSLMQGSTLPRR
PRMFSLGQASTVPRR

SEQ ID NO: 109227 - protein, 15 aa, Artificial Sequence
  Description of Artificial Sequence: Synthetic peptide
  Seed: PRMCSLMQGSTLPRR
PRMFSLGQGSTAPRR

SEQ ID NO: 109228 - protein, 15 aa, Artificial Sequence
  Description of Artificial Sequence: Synthetic peptide
  Seed: PRMCSLMQGSTLPRR
PRMFSLGQGSTIPRR

SEQ ID NO: 109229 - protein, 15 aa, Artificial Sequence
  Description of Artificial Sequence: Synthetic peptide
  Seed: PRMCSLMQGSTLPRR
PRMFSLGQGSTLPRR

SEQ ID NO: 109230 - protein, 15 aa, Artificial Sequence
  Description of Artificial Sequence: Synthetic peptide
  Seed: PRMCSLMQGSTLPRR
PRMFSLGQGSTMPRR

SEQ ID NO: 109231 - protein, 15 aa, Artificial Sequence
  Description of Artificial Sequence: Synthetic peptide
  Seed: PRMCSLMQGSTLPRR
PRMFSLGQGSTTPRR

SEQ ID NO: 109232 - protein, 15 aa, Artificial Sequence
  Description of Artificial Sequence: Synthetic peptide
  Seed: PRMCSLMQGSTLPRR
PRMFSLGQGSTVPRR

SEQ ID NO: 109233 - protein, 15 aa, Artificial Sequence
  Description of Artificial Sequence: Synthetic peptide
  Seed: PRMCSLMQGSTLPRR
PRMFSLGQISTIPRR

SEQ ID NO: 109234 - protein, 15 aa, Artificial Sequence
  Description of Artificial Sequence: Synthetic peptide
  Seed: PRMCSLMQGSTLPRR
PRMFSLGQISTLPRR

SEQ ID NO: 109235 - protein, 15 aa, Artificial Sequence
  Description of Artificial Sequence: Synthetic peptide
  Seed: PRMCSLMQGSTLPRR
PRMFSLGQISTVPRR

SEQ ID NO: 109236 - protein, 15 aa, Artificial Sequence
  Description of Artificial Sequence: Synthetic peptide
  Seed: PRMCSLMQGSTLPRR
PRMFSLGQNSTAPRR

SEQ ID NO: 109237 - protein, 15 aa, Artificial Sequence
  Description of Artificial Sequence: Synthetic peptide
  Seed: PRMCSLMQGSTLPRR
PRMFSLGQNSTIPRR

SEQ ID NO: 109238 - protein, 15 aa, Artificial Sequence
  Description of Artificial Sequence: Synthetic peptide
  Seed: PRMCSLMQGSTLPRR
PRMFSLGQNSTLPRR

SEQ ID NO: 109239 - protein, 15 aa, Artificial Sequence
  Description of Artificial Sequence: Synthetic peptide
  Seed: PRMCSLMQGSTLPRR
PRMFSLGQNSTMPRR

SEQ ID NO: 109240 - protein, 15 aa, Artificial Sequence
  Description of Artificial Sequence: Synthetic peptide
  Seed: PRMCSLMQGSTLPRR
PRMFSLGQNSTVPRR

SEQ ID NO: 109241 - protein, 15 aa, Artificial Sequence
  Description of Artificial Sequence: Synthetic peptide
  Seed: PRMCSLMQGSTLPRR
PRMFSLGQPSTAPRR

SEQ ID NO: 109242 - protein, 15 aa, Artificial Sequence
  Description of Artificial Sequence: Synthetic peptide
  Seed: PRMCSLMQGSTLPRR
PRMFSLGQPSTIPRR

SEQ ID NO: 109243 - protein, 15 aa, Artificial Sequence
  Description of Artificial Sequence: Synthetic peptide
  Seed: PRMCSLMQGSTLPRR
PRMFSLGQPSTLPRR

SEQ ID NO: 109244 - protein, 15 aa, Artificial Sequence
  Description of Artificial Sequence: Synthetic peptide
  Seed: PRMCSLMQGSTLPRR
PRMFSLGQPSTMPRR

SEQ ID NO: 109245 - protein, 15 aa, Artificial Sequence
  Description of Artificial Sequence: Synthetic peptide
  Seed: PRMCSLMQGSTLPRR
PRMFSLGQPSTVPRR

SEQ ID NO: 109246 - protein, 15 aa, Artificial Sequence
  Description of Artificial Sequence: Synthetic peptide
  Seed: PRMCSLMQGSTLPRR
PRMFSLGQSSTAPRR

SEQ ID NO: 109247 - protein, 15 aa, Artificial Sequence
  Description of Artificial Sequence: Synthetic peptide
  Seed: PRMCSLMQGSTLPRR
PRMFSLGQSSTIPRR

SEQ ID NO: 109248 - protein, 15 aa, Artificial Sequence
  Description of Artificial Sequence: Synthetic peptide
  Seed: PRMCSLMQGSTLPRR
PRMFSLGQSSTLPRR

SEQ ID NO: 109249 - protein, 15 aa, Artificial Sequence
  Description of Artificial Sequence: Synthetic peptide
  Seed: PRMCSLMQGSTLPRR
PRMFSLGQSSTMPRR

SEQ ID NO: 109250 - protein, 15 aa, Artificial Sequence
  Description of Artificial Sequence: Synthetic peptide
  Seed: PRMCSLMQGSTLPRR
PRMFSLGQSSTSPRR

SEQ ID NO: 109251 - protein, 15 aa, Artificial Sequence
  Description of Artificial Sequence: Synthetic peptide
  Seed: PRMCSLMQGSTLPRR
PRMFSLGQSSTTPRR

SEQ ID NO: 109252 - protein, 15 aa, Artificial Sequence
  Description of Artificial Sequence: Synthetic peptide
  Seed: PRMCSLMQGSTLPRR
PRMFSLGQSSTVPRR

SEQ ID NO: 109253 - protein, 15 aa, Artificial Sequence
  Description of Artificial Sequence: Synthetic peptide
  Seed: PRMCSLMQGSTLPRR
PRMFSLGQTSTAPRR

SEQ ID NO: 109254 - protein, 15 aa, Artificial Sequence
  Description of Artificial Sequence: Synthetic peptide
  Seed: PRMCSLMQGSTLPRR
PRMFSLGQTSTIPRR

SEQ ID NO: 109255 - protein, 15 aa, Artificial Sequence
  Description of Artificial Sequence: Synthetic peptide
  Seed: PRMCSLMQGSTLPRR
PRMFSLGQTSTLPRR

SEQ ID NO: 109256 - protein, 15 aa, Artificial Sequence
  Description of Artificial Sequence: Synthetic peptide
  Seed: PRMCSLMQGSTLPRR
PRMFSLGQTSTMPRR

SEQ ID NO: 109257 - protein, 15 aa, Artificial Sequence
  Description of Artificial Sequence: Synthetic peptide
  Seed: PRMCSLMQGSTLPRR
PRMFSLGQTSTVPRR

SEQ ID NO: 109258 - protein, 15 aa, Artificial Sequence
  Description of Artificial Sequence: Synthetic peptide
  Seed: PRMCSLMQGSTLPRR
PRMFSLGQVSTAPRR

SEQ ID NO: 109259 - protein, 15 aa, Artificial Sequence
  Description of Artificial Sequence: Synthetic peptide
  Seed: PRMCSLMQGSTLPRR
PRMFSLGQVSTIPRR

SEQ ID NO: 109260 - protein, 15 aa, Artificial Sequence
  Description of Artificial Sequence: Synthetic peptide
  Seed: PRMCSLMQGSTLPRR
PRMFSLGQVSTLPRR

SEQ ID NO: 109261 - protein, 15 aa, Artificial Sequence
  Description of Artificial Sequence: Synthetic peptide
  Seed: PRMCSLMQGSTLPRR
PRMFSLGQVSTMPRR

SEQ ID NO: 109262 - protein, 15 aa, Artificial Sequence
  Description of Artificial Sequence: Synthetic peptide
  Seed: PRMCSLMQGSTLPRR
PRMFSLGQVSTVPRR

SEQ ID NO: 109263 - protein, 15 aa, Artificial Sequence
  Description of Artificial Sequence: Synthetic peptide
  Seed: PRMCSLMQGSTLPRR
PRMFSLHQASTAPRR

SEQ ID NO: 109264 - protein, 15 aa, Artificial Sequence
  Description of Artificial Sequence: Synthetic peptide
  Seed: PRMCSLMQGSTLPRR
PRMFSLHQASTFPRR

SEQ ID NO: 109265 - protein, 15 aa, Artificial Sequence
  Description of Artificial Sequence: Synthetic peptide
  Seed: PRMCSLMQGSTLPRR
PRMFSLHQASTIPRR

SEQ ID NO: 109266 - protein, 15 aa, Artificial Sequence
  Description of Artificial Sequence: Synthetic peptide
  Seed: PRMCSLMQGSTLPRR
PRMFSLHQASTLPRR

SEQ ID NO: 109267 - protein, 15 aa, Artificial Sequence
  Description of Artificial Sequence: Synthetic peptide
  Seed: PRMCSLMQGSTLPRR
PRMFSLHQASTMPRR

SEQ ID NO: 109268 - protein, 15 aa, Artificial Sequence
  Description of Artificial Sequence: Synthetic peptide
  Seed: PRMCSLMQGSTLPRR
PRMFSLHQASTSPRR

SEQ ID NO: 109269 - protein, 15 aa, Artificial Sequence
  Description of Artificial Sequence: Synthetic peptide
  Seed: PRMCSLMQGSTLPRR
PRMFSLHQASTTPRR

SEQ ID NO: 109270 - protein, 15 aa, Artificial Sequence
  Description of Artificial Sequence: Synthetic peptide
  Seed: PRMCSLMQGSTLPRR
PRMFSLHQASTVPRR

SEQ ID NO: 109271 - protein, 15 aa, Artificial Sequence
  Description of Artificial Sequence: Synthetic peptide
  Seed: PRMCSLMQGSTLPRR
PRMFSLHQGSTAPRR

SEQ ID NO: 109272 - protein, 15 aa, Artificial Sequence
  Description of Artificial Sequence: Synthetic peptide
  Seed: PRMCSLMQGSTLPRR
PRMFSLHQGSTIPRR

SEQ ID NO: 109273 - protein, 15 aa, Artificial Sequence
  Description of Artificial Sequence: Synthetic peptide
  Seed: PRMCSLMQGSTLPRR
PRMFSLHQGSTLPRR

SEQ ID NO: 109274 - protein, 15 aa, Artificial Sequence
  Description of Artificial Sequence: Synthetic peptide
  Seed: PRMCSLMQGSTLPRR
PRMFSLHQGSTMPRR

SEQ ID NO: 109275 - protein, 15 aa, Artificial Sequence
  Description of Artificial Sequence: Synthetic peptide
  Seed: PRMCSLMQGSTLPRR
PRMFSLHQGSTVPRR

SEQ ID NO: 109276 - protein, 15 aa, Artificial Sequence
  Description of Artificial Sequence: Synthetic peptide
  Seed: PRMCSLMQGSTLPRR
PRMFSLHQNSTIPRR

SEQ ID NO: 109277 - protein, 15 aa, Artificial Sequence
  Description of Artificial Sequence: Synthetic peptide
  Seed: PRMCSLMQGSTLPRR
PRMFSLHQNSTLPRR

SEQ ID NO: 109278 - protein, 15 aa, Artificial Sequence
  Description of Artificial Sequence: Synthetic peptide
  Seed: PRMCSLMQGSTLPRR
PRMFSLHQNSTVPRR

SEQ ID NO: 109279 - protein, 15 aa, Artificial Sequence
  Description of Artificial Sequence: Synthetic peptide
  Seed: PRMCSLMQGSTLPRR
PRMFSLHQPSTAPRR

SEQ ID NO: 109280 - protein, 15 aa, Artificial Sequence
  Description of Artificial Sequence: Synthetic peptide
  Seed: PRMCSLMQGSTLPRR
PRMFSLHQPSTIPRR

SEQ ID NO: 109281 - protein, 15 aa, Artificial Sequence
  Description of Artificial Sequence: Synthetic peptide
  Seed: PRMCSLMQGSTLPRR
PRMFSLHQPSTLPRR

SEQ ID NO: 109282 - protein, 15 aa, Artificial Sequence
  Description of Artificial Sequence: Synthetic peptide
  Seed: PRMCSLMQGSTLPRR
PRMFSLHQPSTVPRR

SEQ ID NO: 109283 - protein, 15 aa, Artificial Sequence
  Description of Artificial Sequence: Synthetic peptide
  Seed: PRMCSLMQGSTLPRR
PRMFSLHQSSTAPRR

SEQ ID NO: 109284 - protein, 15 aa, Artificial Sequence
  Description of Artificial Sequence: Synthetic peptide
  Seed: PRMCSLMQGSTLPRR
PRMFSLHQSSTFPRR

SEQ ID NO: 109285 - protein, 15 aa, Artificial Sequence
  Description of Artificial Sequence: Synthetic peptide
  Seed: PRMCSLMQGSTLPRR
PRMFSLHQSSTIPRR

SEQ ID NO: 109286 - protein, 15 aa, Artificial Sequence
  Description of Artificial Sequence: Synthetic peptide
  Seed: PRMCSLMQGSTLPRR
PRMFSLHQSSTLPRR

SEQ ID NO: 109287 - protein, 15 aa, Artificial Sequence
  Description of Artificial Sequence: Synthetic peptide
  Seed: PRMCSLMQGSTLPRR
PRMFSLHQSSTMPRR

SEQ ID NO: 109288 - protein, 15 aa, Artificial Sequence
  Description of Artificial Sequence: Synthetic peptide
  Seed: PRMCSLMQGSTLPRR
PRMFSLHQSSTVPRR

SEQ ID NO: 109289 - protein, 15 aa, Artificial Sequence
  Description of Artificial Sequence: Synthetic peptide
  Seed: PRMCSLMQGSTLPRR
PRMFSLHQTSTIPRR

SEQ ID NO: 109290 - protein, 15 aa, Artificial Sequence
  Description of Artificial Sequence: Synthetic peptide
  Seed: PRMCSLMQGSTLPRR
PRMFSLHQTSTLPRR

SEQ ID NO: 109291 - protein, 15 aa, Artificial Sequence
  Description of Artificial Sequence: Synthetic peptide
  Seed: PRMCSLMQGSTLPRR
PRMFSLHQTSTVPRR

SEQ ID NO: 109292 - protein, 15 aa, Artificial Sequence
  Description of Artificial Sequence: Synthetic peptide
  Seed: PRMCSLMQGSTLPRR
PRMFSLIQASTAPRR

SEQ ID NO: 109293 - protein, 15 aa, Artificial Sequence
  Description of Artificial Sequence: Synthetic peptide
  Seed: PRMCSLMQGSTLPRR
PRMFSLIQASTCPRR

SEQ ID NO: 109294 - protein, 15 aa, Artificial Sequence
  Description of Artificial Sequence: Synthetic peptide
  Seed: PRMCSLMQGSTLPRR
PRMFSLIQASTDPRR

SEQ ID NO: 109295 - protein, 15 aa, Artificial Sequence
  Description of Artificial Sequence: Synthetic peptide
  Seed: PRMCSLMQGSTLPRR
PRMFSLIQASTEPRR

SEQ ID NO: 109296 - protein, 15 aa, Artificial Sequence
  Description of Artificial Sequence: Synthetic peptide
  Seed: PRMCSLMQGSTLPRR
PRMFSLIQASTFPRR

SEQ ID NO: 109297 - protein, 15 aa, Artificial Sequence
  Description of Artificial Sequence: Synthetic peptide
  Seed: PRMCSLMQGSTLPRR
PRMFSLIQASTGPRR

SEQ ID NO: 109298 - protein, 15 aa, Artificial Sequence
  Description of Artificial Sequence: Synthetic peptide
  Seed: PRMCSLMQGSTLPRR
PRMFSLIQASTHPRR

SEQ ID NO: 109299 - protein, 15 aa, Artificial Sequence
  Description of Artificial Sequence: Synthetic peptide
  Seed: PRMCSLMQGSTLPRR
PRMFSLIQASTIPRR

SEQ ID NO: 109300 - protein, 15 aa, Artificial Sequence
  Description of Artificial Sequence: Synthetic peptide
  Seed: PRMCSLMQGSTLPRR
PRMFSLIQASTKPRR

SEQ ID NO: 109301 - protein, 15 aa, Artificial Sequence
  Description of Artificial Sequence: Synthetic peptide
  Seed: PRMCSLMQGSTLPRR
PRMFSLIQASTLPRR

SEQ ID NO: 109302 - protein, 15 aa, Artificial Sequence
  Description of Artificial Sequence: Synthetic peptide
  Seed: PRMCSLMQGSTLPRR
PRMFSLIQASTMPRR

SEQ ID NO: 109303 - protein, 15 aa, Artificial Sequence
  Description of Artificial Sequence: Synthetic peptide
  Seed: PRMCSLMQGSTLPRR
PRMFSLIQASTNPRR

SEQ ID NO: 109304 - protein, 15 aa, Artificial Sequence
  Description of Artificial Sequence: Synthetic peptide
  Seed: PRMCSLMQGSTLPRR
PRMFSLIQASTPPRR

SEQ ID NO: 109305 - protein, 15 aa, Artificial Sequence
  Description of Artificial Sequence: Synthetic peptide
  Seed: PRMCSLMQGSTLPRR
PRMFSLIQASTQPRR

SEQ ID NO: 109306 - protein, 15 aa, Artificial Sequence
  Description of Artificial Sequence: Synthetic peptide
  Seed: PRMCSLMQGSTLPRR
PRMFSLIQASTRPRR

SEQ ID NO: 109307 - protein, 15 aa, Artificial Sequence
  Description of Artificial Sequence: Synthetic peptide
  Seed: PRMCSLMQGSTLPRR
PRMFSLIQASTSPRR

SEQ ID NO: 109308 - protein, 15 aa, Artificial Sequence
  Description of Artificial Sequence: Synthetic peptide
  Seed: PRMCSLMQGSTLPRR
PRMFSLIQASTTPRR

SEQ ID NO: 109309 - protein, 15 aa, Artificial Sequence
  Description of Artificial Sequence: Synthetic peptide
  Seed: PRMCSLMQGSTLPRR
PRMFSLIQASTVPRR

SEQ ID NO: 109310 - protein, 15 aa, Artificial Sequence
  Description of Artificial Sequence: Synthetic peptide
  Seed: PRMCSLMQGSTLPRR
PRMFSLIQASTWPRR

SEQ ID NO: 109311 - protein, 15 aa, Artificial Sequence
  Description of Artificial Sequence: Synthetic peptide
  Seed: PRMCSLMQGSTLPRR
PRMFSLIQASTYPRR

SEQ ID NO: 109312 - protein, 15 aa, Artificial Sequence
  Description of Artificial Sequence: Synthetic peptide
  Seed: PRMCSLMQGSTLPRR
PRMFSLIQCSTAPRR

SEQ ID NO: 109313 - protein, 15 aa, Artificial Sequence
  Description of Artificial Sequence: Synthetic peptide
  Seed: PRMCSLMQGSTLPRR
PRMFSLIQCSTIPRR

SEQ ID NO: 109314 - protein, 15 aa, Artificial Sequence
  Description of Artificial Sequence: Synthetic peptide
  Seed: PRMCSLMQGSTLPRR
PRMFSLIQCSTLPRR

SEQ ID NO: 109315 - protein, 15 aa, Artificial Sequence
  Description of Artificial Sequence: Synthetic peptide
  Seed: PRMCSLMQGSTLPRR
PRMFSLIQCSTNPRR

SEQ ID NO: 109316 - protein, 15 aa, Artificial Sequence
  Description of Artificial Sequence: Synthetic peptide
  Seed: PRMCSLMQGSTLPRR
PRMFSLIQCSTSPRR

SEQ ID NO: 109317 - protein, 15 aa, Artificial Sequence
  Description of Artificial Sequence: Synthetic peptide
  Seed: PRMCSLMQGSTLPRR
PRMFSLIQCSTTPRR

SEQ ID NO: 109318 - protein, 15 aa, Artificial Sequence
  Description of Artificial Sequence: Synthetic peptide
  Seed: PRMCSLMQGSTLPRR
PRMFSLIQCSTVPRR

SEQ ID NO: 109319 - protein, 15 aa, Artificial Sequence
  Description of Artificial Sequence: Synthetic peptide
  Seed: PRMCSLMQGSTLPRR
PRMFSLIQDSTLPRR

SEQ ID NO: 109320 - protein, 15 aa, Artificial Sequence
  Description of Artificial Sequence: Synthetic peptide
  Seed: PRMCSLMQGSTLPRR
PRMFSLIQDSTVPRR

SEQ ID NO: 109321 - protein, 15 aa, Artificial Sequence
  Description of Artificial Sequence: Synthetic peptide
  Seed: PRMCSLMQGSTLPRR
PRMFSLIQESTAPRR

SEQ ID NO: 109322 - protein, 15 aa, Artificial Sequence
  Description of Artificial Sequence: Synthetic peptide
  Seed: PRMCSLMQGSTLPRR
PRMFSLIQESTIPRR

SEQ ID NO: 109323 - protein, 15 aa, Artificial Sequence
  Description of Artificial Sequence: Synthetic peptide
  Seed: PRMCSLMQGSTLPRR
PRMFSLIQESTLPRR

SEQ ID NO: 109324 - protein, 15 aa, Artificial Sequence
  Description of Artificial Sequence: Synthetic peptide
  Seed: PRMCSLMQGSTLPRR
PRMFSLIQESTSPRR

SEQ ID NO: 109325 - protein, 15 aa, Artificial Sequence
  Description of Artificial Sequence: Synthetic peptide
  Seed: PRMCSLMQGSTLPRR
PRMFSLIQESTVPRR

SEQ ID NO: 109326 - protein, 15 aa, Artificial Sequence
  Description of Artificial Sequence: Synthetic peptide
  Seed: PRMCSLMQGSTLPRR
PRMFSLIQFSTAPRR

SEQ ID NO: 109327 - protein, 15 aa, Artificial Sequence
  Description of Artificial Sequence: Synthetic peptide
  Seed: PRMCSLMQGSTLPRR
PRMFSLIQFSTFPRR

SEQ ID NO: 109328 - protein, 15 aa, Artificial Sequence
  Description of Artificial Sequence: Synthetic peptide
  Seed: PRMCSLMQGSTLPRR
PRMFSLIQFSTIPRR

SEQ ID NO: 109329 - protein, 15 aa, Artificial Sequence
  Description of Artificial Sequence: Synthetic peptide
  Seed: PRMCSLMQGSTLPRR
PRMFSLIQFSTLPRR

SEQ ID NO: 109330 - protein, 15 aa, Artificial Sequence
  Description of Artificial Sequence: Synthetic peptide
  Seed: PRMCSLMQGSTLPRR
PRMFSLIQFSTMPRR

SEQ ID NO: 109331 - protein, 15 aa, Artificial Sequence
  Description of Artificial Sequence: Synthetic peptide
  Seed: PRMCSLMQGSTLPRR
PRMFSLIQFSTVPRR

SEQ ID NO: 109332 - protein, 15 aa, Artificial Sequence
  Description of Artificial Sequence: Synthetic peptide
  Seed: PRMCSLMQGSTLPRR
PRMFSLIQGSTAPRR

SEQ ID NO: 109333 - protein, 15 aa, Artificial Sequence
  Description of Artificial Sequence: Synthetic peptide
  Seed: PRMCSLMQGSTLPRR
PRMFSLIQGSTCPRR

SEQ ID NO: 109334 - protein, 15 aa, Artificial Sequence
  Description of Artificial Sequence: Synthetic peptide
  Seed: PRMCSLMQGSTLPRR
PRMFSLIQGSTDPRR

SEQ ID NO: 109335 - protein, 15 aa, Artificial Sequence
  Description of Artificial Sequence: Synthetic peptide
  Seed: PRMCSLMQGSTLPRR
PRMFSLIQGSTEPRR

SEQ ID NO: 109336 - protein, 15 aa, Artificial Sequence
  Description of Artificial Sequence: Synthetic peptide
  Seed: PRMCSLMQGSTLPRR
PRMFSLIQGSTFPRR

SEQ ID NO: 109337 - protein, 15 aa, Artificial Sequence
  Description of Artificial Sequence: Synthetic peptide
  Seed: PRMCSLMQGSTLPRR
PRMFSLIQGSTGPRR

SEQ ID NO: 109338 - protein, 15 aa, Artificial Sequence
  Description of Artificial Sequence: Synthetic peptide
  Seed: PRMCSLMQGSTLPRR
PRMFSLIQGSTHPRR

SEQ ID NO: 109339 - protein, 15 aa, Artificial Sequence
  Description of Artificial Sequence: Synthetic peptide
  Seed: PRMCSLMQGSTLPRR
PRMFSLIQGSTIPRR

SEQ ID NO: 109340 - protein, 15 aa, Artificial Sequence
  Description of Artificial Sequence: Synthetic peptide
  Seed: PRMCSLMQGSTLPRR
PRMFSLIQGSTKPRR

SEQ ID NO: 109341 - protein, 15 aa, Artificial Sequence
  Description of Artificial Sequence: Synthetic peptide
  Seed: PRMCSLMQGSTLPRR
PRMFSLIQGSTLPRR

SEQ ID NO: 109342 - protein, 15 aa, Artificial Sequence
  Description of Artificial Sequence: Synthetic peptide
  Seed: PRMCSLMQGSTLPRR
PRMFSLIQGSTMPRR

SEQ ID NO: 109343 - protein, 15 aa, Artificial Sequence
  Description of Artificial Sequence: Synthetic peptide
  Seed: PRMCSLMQGSTLPRR
PRMFSLIQGSTNPRR

SEQ ID NO: 109344 - protein, 15 aa, Artificial Sequence
  Description of Artificial Sequence: Synthetic peptide
  Seed: PRMCSLMQGSTLPRR
PRMFSLIQGSTPPRR

SEQ ID NO: 109345 - protein, 15 aa, Artificial Sequence
  Description of Artificial Sequence: Synthetic peptide
  Seed: PRMCSLMQGSTLPRR
PRMFSLIQGSTQPRR

SEQ ID NO: 109346 - protein, 15 aa, Artificial Sequence
  Description of Artificial Sequence: Synthetic peptide
  Seed: PRMCSLMQGSTLPRR
PRMFSLIQGSTRPRR

SEQ ID NO: 109347 - protein, 15 aa, Artificial Sequence
  Description of Artificial Sequence: Synthetic peptide
  Seed: PRMCSLMQGSTLPRR
PRMFSLIQGSTSPRR

SEQ ID NO: 109348 - protein, 15 aa, Artificial Sequence
  Description of Artificial Sequence: Synthetic peptide
  Seed: PRMCSLMQGSTLPRR
PRMFSLIQGSTTPRR

SEQ ID NO: 109349 - protein, 15 aa, Artificial Sequence
  Description of Artificial Sequence: Synthetic peptide
  Seed: PRMCSLMQGSTLPRR
PRMFSLIQGSTVPRR

SEQ ID NO: 109350 - protein, 15 aa, Artificial Sequence
  Description of Artificial Sequence: Synthetic peptide
  Seed: PRMCSLMQGSTLPRR
PRMFSLIQGSTWPRR

SEQ ID NO: 109351 - protein, 15 aa, Artificial Sequence
  Description of Artificial Sequence: Synthetic peptide
  Seed: PRMCSLMQGSTLPRR
PRMFSLIQGSTYPRR

SEQ ID NO: 109352 - protein, 15 aa, Artificial Sequence
  Description of Artificial Sequence: Synthetic peptide
  Seed: PRMCSLMQGSTLPRR
PRMFSLIQHSTAPRR

SEQ ID NO: 109353 - protein, 15 aa, Artificial Sequence
  Description of Artificial Sequence: Synthetic peptide
  Seed: PRMCSLMQGSTLPRR
PRMFSLIQHSTIPRR

SEQ ID NO: 109354 - protein, 15 aa, Artificial Sequence
  Description of Artificial Sequence: Synthetic peptide
  Seed: PRMCSLMQGSTLPRR
PRMFSLIQHSTLPRR

SEQ ID NO: 109355 - protein, 15 aa, Artificial Sequence
  Description of Artificial Sequence: Synthetic peptide
  Seed: PRMCSLMQGSTLPRR
PRMFSLIQHSTMPRR

SEQ ID NO: 109356 - protein, 15 aa, Artificial Sequence
  Description of Artificial Sequence: Synthetic peptide
  Seed: PRMCSLMQGSTLPRR
PRMFSLIQHSTNPRR

SEQ ID NO: 109357 - protein, 15 aa, Artificial Sequence
  Description of Artificial Sequence: Synthetic peptide
  Seed: PRMCSLMQGSTLPRR
PRMFSLIQHSTSPRR

SEQ ID NO: 109358 - protein, 15 aa, Artificial Sequence
  Description of Artificial Sequence: Synthetic peptide
  Seed: PRMCSLMQGSTLPRR
PRMFSLIQHSTTPRR

SEQ ID NO: 109359 - protein, 15 aa, Artificial Sequence
  Description of Artificial Sequence: Synthetic peptide
  Seed: PRMCSLMQGSTLPRR
PRMFSLIQHSTVPRR

SEQ ID NO: 109360 - protein, 15 aa, Artificial Sequence
  Description of Artificial Sequence: Synthetic peptide
  Seed: PRMCSLMQGSTLPRR
PRMFSLIQISTAPRR

SEQ ID NO: 109361 - protein, 15 aa, Artificial Sequence
  Description of Artificial Sequence: Synthetic peptide
  Seed: PRMCSLMQGSTLPRR
PRMFSLIQISTCPRR

SEQ ID NO: 109362 - protein, 15 aa, Artificial Sequence
  Description of Artificial Sequence: Synthetic peptide
  Seed: PRMCSLMQGSTLPRR
PRMFSLIQISTDPRR

SEQ ID NO: 109363 - protein, 15 aa, Artificial Sequence
  Description of Artificial Sequence: Synthetic peptide
  Seed: PRMCSLMQGSTLPRR
PRMFSLIQISTEPRR

SEQ ID NO: 109364 - protein, 15 aa, Artificial Sequence
  Description of Artificial Sequence: Synthetic peptide
  Seed: PRMCSLMQGSTLPRR
PRMFSLIQISTGPRR

SEQ ID NO: 109365 - protein, 15 aa, Artificial Sequence
  Description of Artificial Sequence: Synthetic peptide
  Seed: PRMCSLMQGSTLPRR
PRMFSLIQISTHPRR

SEQ ID NO: 109366 - protein, 15 aa, Artificial Sequence
  Description of Artificial Sequence: Synthetic peptide
  Seed: PRMCSLMQGSTLPRR
PRMFSLIQISTIPRR

SEQ ID NO: 109367 - protein, 15 aa, Artificial Sequence
  Description of Artificial Sequence: Synthetic peptide
  Seed: PRMCSLMQGSTLPRR
PRMFSLIQISTLPRR

SEQ ID NO: 109368 - protein, 15 aa, Artificial Sequence
  Description of Artificial Sequence: Synthetic peptide
  Seed: PRMCSLMQGSTLPRR
PRMFSLIQISTMPRR

SEQ ID NO: 109369 - protein, 15 aa, Artificial Sequence
  Description of Artificial Sequence: Synthetic peptide
  Seed: PRMCSLMQGSTLPRR
PRMFSLIQISTNPRR

SEQ ID NO: 109370 - protein, 15 aa, Artificial Sequence
  Description of Artificial Sequence: Synthetic peptide
  Seed: PRMCSLMQGSTLPRR
PRMFSLIQISTPPRR

SEQ ID NO: 109371 - protein, 15 aa, Artificial Sequence
  Description of Artificial Sequence: Synthetic peptide
  Seed: PRMCSLMQGSTLPRR
PRMFSLIQISTQPRR

SEQ ID NO: 109372 - protein, 15 aa, Artificial Sequence
  Description of Artificial Sequence: Synthetic peptide
  Seed: PRMCSLMQGSTLPRR
PRMFSLIQISTSPRR

SEQ ID NO: 109373 - protein, 15 aa, Artificial Sequence
  Description of Artificial Sequence: Synthetic peptide
  Seed: PRMCSLMQGSTLPRR
PRMFSLIQISTTPRR

SEQ ID NO: 109374 - protein, 15 aa, Artificial Sequence
  Description of Artificial Sequence: Synthetic peptide
  Seed: PRMCSLMQGSTLPRR
PRMFSLIQISTVPRR

SEQ ID NO: 109375 - protein, 15 aa, Artificial Sequence
  Description of Artificial Sequence: Synthetic peptide
  Seed: PRMCSLMQGSTLPRR
PRMFSLIQLSTAPRR

SEQ ID NO: 109376 - protein, 15 aa, Artificial Sequence
  Description of Artificial Sequence: Synthetic peptide
  Seed: PRMCSLMQGSTLPRR
PRMFSLIQLSTFPRR

SEQ ID NO: 109377 - protein, 15 aa, Artificial Sequence
  Description of Artificial Sequence: Synthetic peptide
  Seed: PRMCSLMQGSTLPRR
PRMFSLIQLSTGPRR

SEQ ID NO: 109378 - protein, 15 aa, Artificial Sequence
  Description of Artificial Sequence: Synthetic peptide
  Seed: PRMCSLMQGSTLPRR
PRMFSLIQLSTHPRR

SEQ ID NO: 109379 - protein, 15 aa, Artificial Sequence
  Description of Artificial Sequence: Synthetic peptide
  Seed: PRMCSLMQGSTLPRR
PRMFSLIQLSTIPRR

SEQ ID NO: 109380 - protein, 15 aa, Artificial Sequence
  Description of Artificial Sequence: Synthetic peptide
  Seed: PRMCSLMQGSTLPRR
PRMFSLIQLSTLPRR

SEQ ID NO: 109381 - protein, 15 aa, Artificial Sequence
  Description of Artificial Sequence: Synthetic peptide
  Seed: PRMCSLMQGSTLPRR
PRMFSLIQLSTMPRR

SEQ ID NO: 109382 - protein, 15 aa, Artificial Sequence
  Description of Artificial Sequence: Synthetic peptide
  Seed: PRMCSLMQGSTLPRR
PRMFSLIQLSTNPRR

SEQ ID NO: 109383 - protein, 15 aa, Artificial Sequence
  Description of Artificial Sequence: Synthetic peptide
  Seed: PRMCSLMQGSTLPRR
PRMFSLIQLSTQPRR

SEQ ID NO: 109384 - protein, 15 aa, Artificial Sequence
  Description of Artificial Sequence: Synthetic peptide
  Seed: PRMCSLMQGSTLPRR
PRMFSLIQLSTSPRR

SEQ ID NO: 109385 - protein, 15 aa, Artificial Sequence
  Description of Artificial Sequence: Synthetic peptide
  Seed: PRMCSLMQGSTLPRR
PRMFSLIQLSTTPRR

SEQ ID NO: 109386 - protein, 15 aa, Artificial Sequence
  Description of Artificial Sequence: Synthetic peptide
  Seed: PRMCSLMQGSTLPRR
PRMFSLIQLSTVPRR

SEQ ID NO: 109387 - protein, 15 aa, Artificial Sequence
  Description of Artificial Sequence: Synthetic peptide
  Seed: PRMCSLMQGSTLPRR
PRMFSLIQMSTAPRR

SEQ ID NO: 109388 - protein, 15 aa, Artificial Sequence
  Description of Artificial Sequence: Synthetic peptide
  Seed: PRMCSLMQGSTLPRR
PRMFSLIQMSTGPRR

SEQ ID NO: 109389 - protein, 15 aa, Artificial Sequence
  Description of Artificial Sequence: Synthetic peptide
  Seed: PRMCSLMQGSTLPRR
PRMFSLIQMSTHPRR

SEQ ID NO: 109390 - protein, 15 aa, Artificial Sequence
  Description of Artificial Sequence: Synthetic peptide
  Seed: PRMCSLMQGSTLPRR
PRMFSLIQMSTIPRR

SEQ ID NO: 109391 - protein, 15 aa, Artificial Sequence
  Description of Artificial Sequence: Synthetic peptide
  Seed: PRMCSLMQGSTLPRR
PRMFSLIQMSTLPRR

SEQ ID NO: 109392 - protein, 15 aa, Artificial Sequence
  Description of Artificial Sequence: Synthetic peptide
  Seed: PRMCSLMQGSTLPRR
PRMFSLIQMSTMPRR

SEQ ID NO: 109393 - protein, 15 aa, Artificial Sequence
  Description of Artificial Sequence: Synthetic peptide
  Seed: PRMCSLMQGSTLPRR
PRMFSLIQMSTNPRR

SEQ ID NO: 109394 - protein, 15 aa, Artificial Sequence
  Description of Artificial Sequence: Synthetic peptide
  Seed: PRMCSLMQGSTLPRR
PRMFSLIQMSTPPRR

SEQ ID NO: 109395 - protein, 15 aa, Artificial Sequence
  Description of Artificial Sequence: Synthetic peptide
  Seed: PRMCSLMQGSTLPRR
PRMFSLIQMSTQPRR

SEQ ID NO: 109396 - protein, 15 aa, Artificial Sequence
  Description of Artificial Sequence: Synthetic peptide
  Seed: PRMCSLMQGSTLPRR
PRMFSLIQMSTSPRR

SEQ ID NO: 109397 - protein, 15 aa, Artificial Sequence
  Description of Artificial Sequence: Synthetic peptide
  Seed: PRMCSLMQGSTLPRR
PRMFSLIQMSTTPRR

SEQ ID NO: 109398 - protein, 15 aa, Artificial Sequence
  Description of Artificial Sequence: Synthetic peptide
  Seed: PRMCSLMQGSTLPRR
PRMFSLIQMSTVPRR

SEQ ID NO: 109399 - protein, 15 aa, Artificial Sequence
  Description of Artificial Sequence: Synthetic peptide
  Seed: PRMCSLMQGSTLPRR
PRMFSLIQNSTAPRR

SEQ ID NO: 109400 - protein, 15 aa, Artificial Sequence
  Description of Artificial Sequence: Synthetic peptide
  Seed: PRMCSLMQGSTLPRR
PRMFSLIQNSTCPRR

SEQ ID NO: 109401 - protein, 15 aa, Artificial Sequence
  Description of Artificial Sequence: Synthetic peptide
  Seed: PRMCSLMQGSTLPRR
PRMFSLIQNSTDPRR

SEQ ID NO: 109402 - protein, 15 aa, Artificial Sequence
  Description of Artificial Sequence: Synthetic peptide
  Seed: PRMCSLMQGSTLPRR
PRMFSLIQNSTEPRR

SEQ ID NO: 109403 - protein, 15 aa, Artificial Sequence
  Description of Artificial Sequence: Synthetic peptide
  Seed: PRMCSLMQGSTLPRR
PRMFSLIQNSTFPRR

SEQ ID NO: 109404 - protein, 15 aa, Artificial Sequence
  Description of Artificial Sequence: Synthetic peptide
  Seed: PRMCSLMQGSTLPRR
PRMFSLIQNSTGPRR

SEQ ID NO: 109405 - protein, 15 aa, Artificial Sequence
  Description of Artificial Sequence: Synthetic peptide
  Seed: PRMCSLMQGSTLPRR
PRMFSLIQNSTHPRR

SEQ ID NO: 109406 - protein, 15 aa, Artificial Sequence
  Description of Artificial Sequence: Synthetic peptide
  Seed: PRMCSLMQGSTLPRR
PRMFSLIQNSTIPRR

SEQ ID NO: 109407 - protein, 15 aa, Artificial Sequence
  Description of Artificial Sequence: Synthetic peptide
  Seed: PRMCSLMQGSTLPRR
PRMFSLIQNSTLPRR

SEQ ID NO: 109408 - protein, 15 aa, Artificial Sequence
  Description of Artificial Sequence: Synthetic peptide
  Seed: PRMCSLMQGSTLPRR
PRMFSLIQNSTMPRR

SEQ ID NO: 109409 - protein, 15 aa, Artificial Sequence
  Description of Artificial Sequence: Synthetic peptide
  Seed: PRMCSLMQGSTLPRR
PRMFSLIQNSTNPRR

SEQ ID NO: 109410 - protein, 15 aa, Artificial Sequence
  Description of Artificial Sequence: Synthetic peptide
  Seed: PRMCSLMQGSTLPRR
PRMFSLIQNSTPPRR

SEQ ID NO: 109411 - protein, 15 aa, Artificial Sequence
  Description of Artificial Sequence: Synthetic peptide
  Seed: PRMCSLMQGSTLPRR
PRMFSLIQNSTQPRR

SEQ ID NO: 109412 - protein, 15 aa, Artificial Sequence
  Description of Artificial Sequence: Synthetic peptide
  Seed: PRMCSLMQGSTLPRR
PRMFSLIQNSTSPRR

SEQ ID NO: 109413 - protein, 15 aa, Artificial Sequence
  Description of Artificial Sequence: Synthetic peptide
  Seed: PRMCSLMQGSTLPRR
PRMFSLIQNSTTPRR

SEQ ID NO: 109414 - protein, 15 aa, Artificial Sequence
  Description of Artificial Sequence: Synthetic peptide
  Seed: PRMCSLMQGSTLPRR
PRMFSLIQNSTVPRR

SEQ ID NO: 109415 - protein, 15 aa, Artificial Sequence
  Description of Artificial Sequence: Synthetic peptide
  Seed: PRMCSLMQGSTLPRR
PRMFSLIQNSTYPRR

SEQ ID NO: 109416 - protein, 15 aa, Artificial Sequence
  Description of Artificial Sequence: Synthetic peptide
  Seed: PRMCSLMQGSTLPRR
PRMFSLIQPSTAPRR

SEQ ID NO: 109417 - protein, 15 aa, Artificial Sequence
  Description of Artificial Sequence: Synthetic peptide
  Seed: PRMCSLMQGSTLPRR
PRMFSLIQPSTCPRR

SEQ ID NO: 109418 - protein, 15 aa, Artificial Sequence
  Description of Artificial Sequence: Synthetic peptide
  Seed: PRMCSLMQGSTLPRR
PRMFSLIQPSTDPRR

SEQ ID NO: 109419 - protein, 15 aa, Artificial Sequence
  Description of Artificial Sequence: Synthetic peptide
  Seed: PRMCSLMQGSTLPRR
PRMFSLIQPSTEPRR

SEQ ID NO: 109420 - protein, 15 aa, Artificial Sequence
  Description of Artificial Sequence: Synthetic peptide
  Seed: PRMCSLMQGSTLPRR
PRMFSLIQPSTFPRR

SEQ ID NO: 109421 - protein, 15 aa, Artificial Sequence
  Description of Artificial Sequence: Synthetic peptide
  Seed: PRMCSLMQGSTLPRR
PRMFSLIQPSTGPRR

SEQ ID NO: 109422 - protein, 15 aa, Artificial Sequence
  Description of Artificial Sequence: Synthetic peptide
  Seed: PRMCSLMQGSTLPRR
PRMFSLIQPSTHPRR

SEQ ID NO: 109423 - protein, 15 aa, Artificial Sequence
  Description of Artificial Sequence: Synthetic peptide
  Seed: PRMCSLMQGSTLPRR
PRMFSLIQPSTIPRR

SEQ ID NO: 109424 - protein, 15 aa, Artificial Sequence
  Description of Artificial Sequence: Synthetic peptide
  Seed: PRMCSLMQGSTLPRR
PRMFSLIQPSTKPRR

SEQ ID NO: 109425 - protein, 15 aa, Artificial Sequence
  Description of Artificial Sequence: Synthetic peptide
  Seed: PRMCSLMQGSTLPRR
PRMFSLIQPSTLPRR

SEQ ID NO: 109426 - protein, 15 aa, Artificial Sequence
  Description of Artificial Sequence: Synthetic peptide
  Seed: PRMCSLMQGSTLPRR
PRMFSLIQPSTMPRR

SEQ ID NO: 109427 - protein, 15 aa, Artificial Sequence
  Description of Artificial Sequence: Synthetic peptide
  Seed: PRMCSLMQGSTLPRR
PRMFSLIQPSTNPRR

SEQ ID NO: 109428 - protein, 15 aa, Artificial Sequence
  Description of Artificial Sequence: Synthetic peptide
  Seed: PRMCSLMQGSTLPRR
PRMFSLIQPSTPPRR

SEQ ID NO: 109429 - protein, 15 aa, Artificial Sequence
  Description of Artificial Sequence: Synthetic peptide
  Seed: PRMCSLMQGSTLPRR
PRMFSLIQPSTQPRR

SEQ ID NO: 109430 - protein, 15 aa, Artificial Sequence
  Description of Artificial Sequence: Synthetic peptide
  Seed: PRMCSLMQGSTLPRR
PRMFSLIQPSTRPRR

SEQ ID NO: 109431 - protein, 15 aa, Artificial Sequence
  Description of Artificial Sequence: Synthetic peptide
  Seed: PRMCSLMQGSTLPRR
PRMFSLIQPSTSPRR

SEQ ID NO: 109432 - protein, 15 aa, Artificial Sequence
  Description of Artificial Sequence: Synthetic peptide
  Seed: PRMCSLMQGSTLPRR
PRMFSLIQPSTTPRR

SEQ ID NO: 109433 - protein, 15 aa, Artificial Sequence
  Description of Artificial Sequence: Synthetic peptide
  Seed: PRMCSLMQGSTLPRR
PRMFSLIQPSTVPRR

SEQ ID NO: 109434 - protein, 15 aa, Artificial Sequence
  Description of Artificial Sequence: Synthetic peptide
  Seed: PRMCSLMQGSTLPRR
PRMFSLIQPSTWPRR

SEQ ID NO: 109435 - protein, 15 aa, Artificial Sequence
  Description of Artificial Sequence: Synthetic peptide
  Seed: PRMCSLMQGSTLPRR
PRMFSLIQPSTYPRR

SEQ ID NO: 109436 - protein, 15 aa, Artificial Sequence
  Description of Artificial Sequence: Synthetic peptide
  Seed: PRMCSLMQGSTLPRR
PRMFSLIQQSTAPRR

SEQ ID NO: 109437 - protein, 15 aa, Artificial Sequence
  Description of Artificial Sequence: Synthetic peptide
  Seed: PRMCSLMQGSTLPRR
PRMFSLIQQSTIPRR

SEQ ID NO: 109438 - protein, 15 aa, Artificial Sequence
  Description of Artificial Sequence: Synthetic peptide
  Seed: PRMCSLMQGSTLPRR
PRMFSLIQQSTLPRR

SEQ ID NO: 109439 - protein, 15 aa, Artificial Sequence
  Description of Artificial Sequence: Synthetic peptide
  Seed: PRMCSLMQGSTLPRR
PRMFSLIQQSTMPRR

SEQ ID NO: 109440 - protein, 15 aa, Artificial Sequence
  Description of Artificial Sequence: Synthetic peptide
  Seed: PRMCSLMQGSTLPRR
PRMFSLIQQSTNPRR

SEQ ID NO: 109441 - protein, 15 aa, Artificial Sequence
  Description of Artificial Sequence: Synthetic peptide
  Seed: PRMCSLMQGSTLPRR
PRMFSLIQQSTSPRR

SEQ ID NO: 109442 - protein, 15 aa, Artificial Sequence
  Description of Artificial Sequence: Synthetic peptide
  Seed: PRMCSLMQGSTLPRR
PRMFSLIQQSTTPRR

SEQ ID NO: 109443 - protein, 15 aa, Artificial Sequence
  Description of Artificial Sequence: Synthetic peptide
  Seed: PRMCSLMQGSTLPRR
PRMFSLIQQSTVPRR

SEQ ID NO: 109444 - protein, 15 aa, Artificial Sequence
  Description of Artificial Sequence: Synthetic peptide
  Seed: PRMCSLMQGSTLPRR
PRMFSLIQSSTAPRR

SEQ ID NO: 109445 - protein, 15 aa, Artificial Sequence
  Description of Artificial Sequence: Synthetic peptide
  Seed: PRMCSLMQGSTLPRR
PRMFSLIQSSTCPRR

SEQ ID NO: 109446 - protein, 15 aa, Artificial Sequence
  Description of Artificial Sequence: Synthetic peptide
  Seed: PRMCSLMQGSTLPRR
PRMFSLIQSSTDPRR

SEQ ID NO: 109447 - protein, 15 aa, Artificial Sequence
  Description of Artificial Sequence: Synthetic peptide
  Seed: PRMCSLMQGSTLPRR
PRMFSLIQSSTEPRR

SEQ ID NO: 109448 - protein, 15 aa, Artificial Sequence
  Description of Artificial Sequence: Synthetic peptide
  Seed: PRMCSLMQGSTLPRR
PRMFSLIQSSTFPRR

SEQ ID NO: 109449 - protein, 15 aa, Artificial Sequence
  Description of Artificial Sequence: Synthetic peptide
  Seed: PRMCSLMQGSTLPRR
PRMFSLIQSSTGPRR

SEQ ID NO: 109450 - protein, 15 aa, Artificial Sequence
  Description of Artificial Sequence: Synthetic peptide
  Seed: PRMCSLMQGSTLPRR
PRMFSLIQSSTHPRR

SEQ ID NO: 109451 - protein, 15 aa, Artificial Sequence
  Description of Artificial Sequence: Synthetic peptide
  Seed: PRMCSLMQGSTLPRR
PRMFSLIQSSTIPRR

SEQ ID NO: 109452 - protein, 15 aa, Artificial Sequence
  Description of Artificial Sequence: Synthetic peptide
  Seed: PRMCSLMQGSTLPRR
PRMFSLIQSSTKPRR

SEQ ID NO: 109453 - protein, 15 aa, Artificial Sequence
  Description of Artificial Sequence: Synthetic peptide
  Seed: PRMCSLMQGSTLPRR
PRMFSLIQSSTLPRR

SEQ ID NO: 109454 - protein, 15 aa, Artificial Sequence
  Description of Artificial Sequence: Synthetic peptide
  Seed: PRMCSLMQGSTLPRR
PRMFSLIQSSTMPRR

SEQ ID NO: 109455 - protein, 15 aa, Artificial Sequence
  Description of Artificial Sequence: Synthetic peptide
  Seed: PRMCSLMQGSTLPRR
PRMFSLIQSSTNPRR

SEQ ID NO: 109456 - protein, 15 aa, Artificial Sequence
  Description of Artificial Sequence: Synthetic peptide
  Seed: PRMCSLMQGSTLPRR
PRMFSLIQSSTPPRR

SEQ ID NO: 109457 - protein, 15 aa, Artificial Sequence
  Description of Artificial Sequence: Synthetic peptide
  Seed: PRMCSLMQGSTLPRR
PRMFSLIQSSTQPRR

SEQ ID NO: 109458 - protein, 15 aa, Artificial Sequence
  Description of Artificial Sequence: Synthetic peptide
  Seed: PRMCSLMQGSTLPRR
PRMFSLIQSSTRPRR

SEQ ID NO: 109459 - protein, 15 aa, Artificial Sequence
  Description of Artificial Sequence: Synthetic peptide
  Seed: PRMCSLMQGSTLPRR
PRMFSLIQSSTSPRR

SEQ ID NO: 109460 - protein, 15 aa, Artificial Sequence
  Description of Artificial Sequence: Synthetic peptide
  Seed: PRMCSLMQGSTLPRR
PRMFSLIQSSTTPRR

SEQ ID NO: 109461 - protein, 15 aa, Artificial Sequence
  Description of Artificial Sequence: Synthetic peptide
  Seed: PRMCSLMQGSTLPRR
PRMFSLIQSSTVPRR

SEQ ID NO: 109462 - protein, 15 aa, Artificial Sequence
  Description of Artificial Sequence: Synthetic peptide
  Seed: PRMCSLMQGSTLPRR
PRMFSLIQSSTWPRR

SEQ ID NO: 109463 - protein, 15 aa, Artificial Sequence
  Description of Artificial Sequence: Synthetic peptide
  Seed: PRMCSLMQGSTLPRR
PRMFSLIQSSTYPRR

SEQ ID NO: 109464 - protein, 15 aa, Artificial Sequence
  Description of Artificial Sequence: Synthetic peptide
  Seed: PRMCSLMQGSTLPRR
PRMFSLIQTSTAPRR

SEQ ID NO: 109465 - protein, 15 aa, Artificial Sequence
  Description of Artificial Sequence: Synthetic peptide
  Seed: PRMCSLMQGSTLPRR
PRMFSLIQTSTCPRR

SEQ ID NO: 109466 - protein, 15 aa, Artificial Sequence
  Description of Artificial Sequence: Synthetic peptide
  Seed: PRMCSLMQGSTLPRR
PRMFSLIQTSTDPRR

SEQ ID NO: 109467 - protein, 15 aa, Artificial Sequence
  Description of Artificial Sequence: Synthetic peptide
  Seed: PRMCSLMQGSTLPRR
PRMFSLIQTSTEPRR

SEQ ID NO: 109468 - protein, 15 aa, Artificial Sequence
  Description of Artificial Sequence: Synthetic peptide
  Seed: PRMCSLMQGSTLPRR
PRMFSLIQTSTFPRR

SEQ ID NO: 109469 - protein, 15 aa, Artificial Sequence
  Description of Artificial Sequence: Synthetic peptide
  Seed: PRMCSLMQGSTLPRR
PRMFSLIQTSTGPRR

SEQ ID NO: 109470 - protein, 15 aa, Artificial Sequence
  Description of Artificial Sequence: Synthetic peptide
  Seed: PRMCSLMQGSTLPRR
PRMFSLIQTSTHPRR

SEQ ID NO: 109471 - protein, 15 aa, Artificial Sequence
  Description of Artificial Sequence: Synthetic peptide
  Seed: PRMCSLMQGSTLPRR
PRMFSLIQTSTIPRR

SEQ ID NO: 109472 - protein, 15 aa, Artificial Sequence
  Description of Artificial Sequence: Synthetic peptide
  Seed: PRMCSLMQGSTLPRR
PRMFSLIQTSTLPRR

SEQ ID NO: 109473 - protein, 15 aa, Artificial Sequence
  Description of Artificial Sequence: Synthetic peptide
  Seed: PRMCSLMQGSTLPRR
PRMFSLIQTSTMPRR

SEQ ID NO: 109474 - protein, 15 aa, Artificial Sequence
  Description of Artificial Sequence: Synthetic peptide
  Seed: PRMCSLMQGSTLPRR
PRMFSLIQTSTNPRR

SEQ ID NO: 109475 - protein, 15 aa, Artificial Sequence
  Description of Artificial Sequence: Synthetic peptide
  Seed: PRMCSLMQGSTLPRR
PRMFSLIQTSTPPRR

SEQ ID NO: 109476 - protein, 15 aa, Artificial Sequence
  Description of Artificial Sequence: Synthetic peptide
  Seed: PRMCSLMQGSTLPRR
PRMFSLIQTSTQPRR

SEQ ID NO: 109477 - protein, 15 aa, Artificial Sequence
  Description of Artificial Sequence: Synthetic peptide
  Seed: PRMCSLMQGSTLPRR
PRMFSLIQTSTSPRR

SEQ ID NO: 109478 - protein, 15 aa, Artificial Sequence
  Description of Artificial Sequence: Synthetic peptide
  Seed: PRMCSLMQGSTLPRR
PRMFSLIQTSTTPRR

SEQ ID NO: 109479 - protein, 15 aa, Artificial Sequence
  Description of Artificial Sequence: Synthetic peptide
  Seed: PRMCSLMQGSTLPRR
PRMFSLIQTSTVPRR

SEQ ID NO: 109480 - protein, 15 aa, Artificial Sequence
  Description of Artificial Sequence: Synthetic peptide
  Seed: PRMCSLMQGSTLPRR
PRMFSLIQTSTWPRR

SEQ ID NO: 109481 - protein, 15 aa, Artificial Sequence
  Description of Artificial Sequence: Synthetic peptide
  Seed: PRMCSLMQGSTLPRR
PRMFSLIQTSTYPRR

SEQ ID NO: 109482 - protein, 15 aa, Artificial Sequence
  Description of Artificial Sequence: Synthetic peptide
  Seed: PRMCSLMQGSTLPRR
PRMFSLIQVSTAPRR

SEQ ID NO: 109483 - protein, 15 aa, Artificial Sequence
  Description of Artificial Sequence: Synthetic peptide
  Seed: PRMCSLMQGSTLPRR
PRMFSLIQVSTCPRR

SEQ ID NO: 109484 - protein, 15 aa, Artificial Sequence
  Description of Artificial Sequence: Synthetic peptide
  Seed: PRMCSLMQGSTLPRR
PRMFSLIQVSTDPRR

SEQ ID NO: 109485 - protein, 15 aa, Artificial Sequence
  Description of Artificial Sequence: Synthetic peptide
  Seed: PRMCSLMQGSTLPRR
PRMFSLIQVSTEPRR

SEQ ID NO: 109486 - protein, 15 aa, Artificial Sequence
  Description of Artificial Sequence: Synthetic peptide
  Seed: PRMCSLMQGSTLPRR
PRMFSLIQVSTFPRR

SEQ ID NO: 109487 - protein, 15 aa, Artificial Sequence
  Description of Artificial Sequence: Synthetic peptide
  Seed: PRMCSLMQGSTLPRR
PRMFSLIQVSTGPRR

SEQ ID NO: 109488 - protein, 15 aa, Artificial Sequence
  Description of Artificial Sequence: Synthetic peptide
  Seed: PRMCSLMQGSTLPRR
PRMFSLIQVSTHPRR

SEQ ID NO: 109489 - protein, 15 aa, Artificial Sequence
  Description of Artificial Sequence: Synthetic peptide
  Seed: PRMCSLMQGSTLPRR
PRMFSLIQVSTIPRR

SEQ ID NO: 109490 - protein, 15 aa, Artificial Sequence
  Description of Artificial Sequence: Synthetic peptide
  Seed: PRMCSLMQGSTLPRR
PRMFSLIQVSTKPRR

SEQ ID NO: 109491 - protein, 15 aa, Artificial Sequence
  Description of Artificial Sequence: Synthetic peptide
  Seed: PRMCSLMQGSTLPRR
PRMFSLIQVSTLPRR

SEQ ID NO: 109492 - protein, 15 aa, Artificial Sequence
  Description of Artificial Sequence: Synthetic peptide
  Seed: PRMCSLMQGSTLPRR
PRMFSLIQVSTMPRR

SEQ ID NO: 109493 - protein, 15 aa, Artificial Sequence
  Description of Artificial Sequence: Synthetic peptide
  Seed: PRMCSLMQGSTLPRR
PRMFSLIQVSTNPRR

SEQ ID NO: 109494 - protein, 15 aa, Artificial Sequence
  Description of Artificial Sequence: Synthetic peptide
  Seed: PRMCSLMQGSTLPRR
PRMFSLIQVSTPPRR

SEQ ID NO: 109495 - protein, 15 aa, Artificial Sequence
  Description of Artificial Sequence: Synthetic peptide
  Seed: PRMCSLMQGSTLPRR
PRMFSLIQVSTQPRR

SEQ ID NO: 109496 - protein, 15 aa, Artificial Sequence
  Description of Artificial Sequence: Synthetic peptide
  Seed: PRMCSLMQGSTLPRR
PRMFSLIQVSTSPRR

SEQ ID NO: 109497 - protein, 15 aa, Artificial Sequence
  Description of Artificial Sequence: Synthetic peptide
  Seed: PRMCSLMQGSTLPRR
PRMFSLIQVSTTPRR

SEQ ID NO: 109498 - protein, 15 aa, Artificial Sequence
  Description of Artificial Sequence: Synthetic peptide
  Seed: PRMCSLMQGSTLPRR
PRMFSLIQVSTVPRR

SEQ ID NO: 109499 - protein, 15 aa, Artificial Sequence
  Description of Artificial Sequence: Synthetic peptide
  Seed: PRMCSLMQGSTLPRR
PRMFSLIQVSTWPRR

SEQ ID NO: 109500 - protein, 15 aa, Artificial Sequence
  Description of Artificial Sequence: Synthetic peptide
  Seed: PRMCSLMQGSTLPRR
PRMFSLIQWSTAPRR

SEQ ID NO: 109501 - protein, 15 aa, Artificial Sequence
  Description of Artificial Sequence: Synthetic peptide
  Seed: PRMCSLMQGSTLPRR
PRMFSLIQWSTIPRR

SEQ ID NO: 109502 - protein, 15 aa, Artificial Sequence
  Description of Artificial Sequence: Synthetic peptide
  Seed: PRMCSLMQGSTLPRR
PRMFSLIQWSTLPRR

SEQ ID NO: 109503 - protein, 15 aa, Artificial Sequence
  Description of Artificial Sequence: Synthetic peptide
  Seed: PRMCSLMQGSTLPRR
PRMFSLIQWSTVPRR

SEQ ID NO: 109504 - protein, 15 aa, Artificial Sequence
  Description of Artificial Sequence: Synthetic peptide
  Seed: PRMCSLMQGSTLPRR
PRMFSLKQASTAPRR

SEQ ID NO: 109505 - protein, 15 aa, Artificial Sequence
  Description of Artificial Sequence: Synthetic peptide
  Seed: PRMCSLMQGSTLPRR
PRMFSLKQASTIPRR

SEQ ID NO: 109506 - protein, 15 aa, Artificial Sequence
  Description of Artificial Sequence: Synthetic peptide
  Seed: PRMCSLMQGSTLPRR
PRMFSLKQASTLPRR

SEQ ID NO: 109507 - protein, 15 aa, Artificial Sequence
  Description of Artificial Sequence: Synthetic peptide
  Seed: PRMCSLMQGSTLPRR
PRMFSLKQASTMPRR

SEQ ID NO: 109508 - protein, 15 aa, Artificial Sequence
  Description of Artificial Sequence: Synthetic peptide
  Seed: PRMCSLMQGSTLPRR
PRMFSLKQASTVPRR

SEQ ID NO: 109509 - protein, 15 aa, Artificial Sequence
  Description of Artificial Sequence: Synthetic peptide
  Seed: PRMCSLMQGSTLPRR
PRMFSLKQGSTIPRR

SEQ ID NO: 109510 - protein, 15 aa, Artificial Sequence
  Description of Artificial Sequence: Synthetic peptide
  Seed: PRMCSLMQGSTLPRR
PRMFSLKQGSTLPRR

SEQ ID NO: 109511 - protein, 15 aa, Artificial Sequence
  Description of Artificial Sequence: Synthetic peptide
  Seed: PRMCSLMQGSTLPRR
PRMFSLKQGSTVPRR

SEQ ID NO: 109512 - protein, 15 aa, Artificial Sequence
  Description of Artificial Sequence: Synthetic peptide
  Seed: PRMCSLMQGSTLPRR
PRMFSLKQSSTAPRR

SEQ ID NO: 109513 - protein, 15 aa, Artificial Sequence
  Description of Artificial Sequence: Synthetic peptide
  Seed: PRMCSLMQGSTLPRR
PRMFSLKQSSTIPRR

SEQ ID NO: 109514 - protein, 15 aa, Artificial Sequence
  Description of Artificial Sequence: Synthetic peptide
  Seed: PRMCSLMQGSTLPRR
PRMFSLKQSSTLPRR

SEQ ID NO: 109515 - protein, 15 aa, Artificial Sequence
  Description of Artificial Sequence: Synthetic peptide
  Seed: PRMCSLMQGSTLPRR
PRMFSLKQSSTVPRR

SEQ ID NO: 109516 - protein, 15 aa, Artificial Sequence
  Description of Artificial Sequence: Synthetic peptide
  Seed: PRMCSLMQGSTLPRR
PRMFSLLQASTAPRR

SEQ ID NO: 109517 - protein, 15 aa, Artificial Sequence
  Description of Artificial Sequence: Synthetic peptide
  Seed: PRMCSLMQGSTLPRR
PRMFSLLQASTCPRR

SEQ ID NO: 109518 - protein, 15 aa, Artificial Sequence
  Description of Artificial Sequence: Synthetic peptide
  Seed: PRMCSLMQGSTLPRR
PRMFSLLQASTDPRR

SEQ ID NO: 109519 - protein, 15 aa, Artificial Sequence
  Description of Artificial Sequence: Synthetic peptide
  Seed: PRMCSLMQGSTLPRR
PRMFSLLQASTEPRR

SEQ ID NO: 109520 - protein, 15 aa, Artificial Sequence
  Description of Artificial Sequence: Synthetic peptide
  Seed: PRMCSLMQGSTLPRR
PRMFSLLQASTFPRR

SEQ ID NO: 109521 - protein, 15 aa, Artificial Sequence
  Description of Artificial Sequence: Synthetic peptide
  Seed: PRMCSLMQGSTLPRR
PRMFSLLQASTGPRR

SEQ ID NO: 109522 - protein, 15 aa, Artificial Sequence
  Description of Artificial Sequence: Synthetic peptide
  Seed: PRMCSLMQGSTLPRR
PRMFSLLQASTHPRR

SEQ ID NO: 109523 - protein, 15 aa, Artificial Sequence
  Description of Artificial Sequence: Synthetic peptide
  Seed: PRMCSLMQGSTLPRR
PRMFSLLQASTIPRR

SEQ ID NO: 109524 - protein, 15 aa, Artificial Sequence
  Description of Artificial Sequence: Synthetic peptide
  Seed: PRMCSLMQGSTLPRR
PRMFSLLQASTKPRR

SEQ ID NO: 109525 - protein, 15 aa, Artificial Sequence
  Description of Artificial Sequence: Synthetic peptide
  Seed: PRMCSLMQGSTLPRR
PRMFSLLQASTLPRR

SEQ ID NO: 109526 - protein, 15 aa, Artificial Sequence
  Description of Artificial Sequence: Synthetic peptide
  Seed: PRMCSLMQGSTLPRR
PRMFSLLQASTMPRR

SEQ ID NO: 109527 - protein, 15 aa, Artificial Sequence
  Description of Artificial Sequence: Synthetic peptide
  Seed: PRMCSLMQGSTLPRR
PRMFSLLQASTNPRR

SEQ ID NO: 109528 - protein, 15 aa, Artificial Sequence
  Description of Artificial Sequence: Synthetic peptide
  Seed: PRMCSLMQGSTLPRR
PRMFSLLQASTPPRR

SEQ ID NO: 109529 - protein, 15 aa, Artificial Sequence
  Description of Artificial Sequence: Synthetic peptide
  Seed: PRMCSLMQGSTLPRR
PRMFSLLQASTQPRR

SEQ ID NO: 109530 - protein, 15 aa, Artificial Sequence
  Description of Artificial Sequence: Synthetic peptide
  Seed: PRMCSLMQGSTLPRR
PRMFSLLQASTRPRR

SEQ ID NO: 109531 - protein, 15 aa, Artificial Sequence
  Description of Artificial Sequence: Synthetic peptide
  Seed: PRMCSLMQGSTLPRR
PRMFSLLQASTSPRR

SEQ ID NO: 109532 - protein, 15 aa, Artificial Sequence
  Description of Artificial Sequence: Synthetic peptide
  Seed: PRMCSLMQGSTLPRR
PRMFSLLQASTTPRR

SEQ ID NO: 109533 - protein, 15 aa, Artificial Sequence
  Description of Artificial Sequence: Synthetic peptide
  Seed: PRMCSLMQGSTLPRR
PRMFSLLQASTVPRR

SEQ ID NO: 109534 - protein, 15 aa, Artificial Sequence
  Description of Artificial Sequence: Synthetic peptide
  Seed: PRMCSLMQGSTLPRR
PRMFSLLQASTWPRR

SEQ ID NO: 109535 - protein, 15 aa, Artificial Sequence
  Description of Artificial Sequence: Synthetic peptide
  Seed: PRMCSLMQGSTLPRR
PRMFSLLQASTYPRR

SEQ ID NO: 109536 - protein, 15 aa, Artificial Sequence
  Description of Artificial Sequence: Synthetic peptide
  Seed: PRMCSLMQGSTLPRR
PRMFSLLQCSTAPRR

SEQ ID NO: 109537 - protein, 15 aa, Artificial Sequence
  Description of Artificial Sequence: Synthetic peptide
  Seed: PRMCSLMQGSTLPRR
PRMFSLLQCSTIPRR

SEQ ID NO: 109538 - protein, 15 aa, Artificial Sequence
  Description of Artificial Sequence: Synthetic peptide
  Seed: PRMCSLMQGSTLPRR
PRMFSLLQCSTLPRR

SEQ ID NO: 109539 - protein, 15 aa, Artificial Sequence
  Description of Artificial Sequence: Synthetic peptide
  Seed: PRMCSLMQGSTLPRR
PRMFSLLQCSTMPRR

SEQ ID NO: 109540 - protein, 15 aa, Artificial Sequence
  Description of Artificial Sequence: Synthetic peptide
  Seed: PRMCSLMQGSTLPRR
PRMFSLLQCSTNPRR

SEQ ID NO: 109541 - protein, 15 aa, Artificial Sequence
  Description of Artificial Sequence: Synthetic peptide
  Seed: PRMCSLMQGSTLPRR
PRMFSLLQCSTSPRR

SEQ ID NO: 109542 - protein, 15 aa, Artificial Sequence
  Description of Artificial Sequence: Synthetic peptide
  Seed: PRMCSLMQGSTLPRR
PRMFSLLQCSTTPRR

SEQ ID NO: 109543 - protein, 15 aa, Artificial Sequence
  Description of Artificial Sequence: Synthetic peptide
  Seed: PRMCSLMQGSTLPRR
PRMFSLLQCSTVPRR

SEQ ID NO: 109544 - protein, 15 aa, Artificial Sequence
  Description of Artificial Sequence: Synthetic peptide
  Seed: PRMCSLMQGSTLPRR
PRMFSLLQDSTAPRR

SEQ ID NO: 109545 - protein, 15 aa, Artificial Sequence
  Description of Artificial Sequence: Synthetic peptide
  Seed: PRMCSLMQGSTLPRR
PRMFSLLQDSTIPRR

SEQ ID NO: 109546 - protein, 15 aa, Artificial Sequence
  Description of Artificial Sequence: Synthetic peptide
  Seed: PRMCSLMQGSTLPRR
PRMFSLLQDSTLPRR

SEQ ID NO: 109547 - protein, 15 aa, Artificial Sequence
  Description of Artificial Sequence: Synthetic peptide
  Seed: PRMCSLMQGSTLPRR
PRMFSLLQDSTVPRR

SEQ ID NO: 109548 - protein, 15 aa, Artificial Sequence
  Description of Artificial Sequence: Synthetic peptide
  Seed: PRMCSLMQGSTLPRR
PRMFSLLQESTAPRR

SEQ ID NO: 109549 - protein, 15 aa, Artificial Sequence
  Description of Artificial Sequence: Synthetic peptide
  Seed: PRMCSLMQGSTLPRR
PRMFSLLQESTIPRR

SEQ ID NO: 109550 - protein, 15 aa, Artificial Sequence
  Description of Artificial Sequence: Synthetic peptide
  Seed: PRMCSLMQGSTLPRR
PRMFSLLQESTLPRR

SEQ ID NO: 109551 - protein, 15 aa, Artificial Sequence
  Description of Artificial Sequence: Synthetic peptide
  Seed: PRMCSLMQGSTLPRR
PRMFSLLQESTMPRR

SEQ ID NO: 109552 - protein, 15 aa, Artificial Sequence
  Description of Artificial Sequence: Synthetic peptide
  Seed: PRMCSLMQGSTLPRR
PRMFSLLQESTNPRR

SEQ ID NO: 109553 - protein, 15 aa, Artificial Sequence
  Description of Artificial Sequence: Synthetic peptide
  Seed: PRMCSLMQGSTLPRR
PRMFSLLQESTSPRR

SEQ ID NO: 109554 - protein, 15 aa, Artificial Sequence
  Description of Artificial Sequence: Synthetic peptide
  Seed: PRMCSLMQGSTLPRR
PRMFSLLQESTTPRR

SEQ ID NO: 109555 - protein, 15 aa, Artificial Sequence
  Description of Artificial Sequence: Synthetic peptide
  Seed: PRMCSLMQGSTLPRR
PRMFSLLQESTVPRR

SEQ ID NO: 109556 - protein, 15 aa, Artificial Sequence
  Description of Artificial Sequence: Synthetic peptide
  Seed: PRMCSLMQGSTLPRR
PRMFSLLQFSTAPRR

SEQ ID NO: 109557 - protein, 15 aa, Artificial Sequence
  Description of Artificial Sequence: Synthetic peptide
  Seed: PRMCSLMQGSTLPRR
PRMFSLLQFSTFPRR

SEQ ID NO: 109558 - protein, 15 aa, Artificial Sequence
  Description of Artificial Sequence: Synthetic peptide
  Seed: PRMCSLMQGSTLPRR
PRMFSLLQFSTIPRR

SEQ ID NO: 109559 - protein, 15 aa, Artificial Sequence
  Description of Artificial Sequence: Synthetic peptide
  Seed: PRMCSLMQGSTLPRR
PRMFSLLQFSTLPRR

SEQ ID NO: 109560 - protein, 15 aa, Artificial Sequence
  Description of Artificial Sequence: Synthetic peptide
  Seed: PRMCSLMQGSTLPRR
PRMFSLLQFSTMPRR

SEQ ID NO: 109561 - protein, 15 aa, Artificial Sequence
  Description of Artificial Sequence: Synthetic peptide
  Seed: PRMCSLMQGSTLPRR
PRMFSLLQFSTSPRR

SEQ ID NO: 109562 - protein, 15 aa, Artificial Sequence
  Description of Artificial Sequence: Synthetic peptide
  Seed: PRMCSLMQGSTLPRR
PRMFSLLQFSTVPRR

SEQ ID NO: 109563 - protein, 15 aa, Artificial Sequence
  Description of Artificial Sequence: Synthetic peptide
  Seed: PRMCSLMQGSTLPRR
PRMFSLLQGSTAPRR

SEQ ID NO: 109564 - protein, 15 aa, Artificial Sequence
  Description of Artificial Sequence: Synthetic peptide
  Seed: PRMCSLMQGSTLPRR
PRMFSLLQGSTCPRR

SEQ ID NO: 109565 - protein, 15 aa, Artificial Sequence
  Description of Artificial Sequence: Synthetic peptide
  Seed: PRMCSLMQGSTLPRR
PRMFSLLQGSTDPRR

SEQ ID NO: 109566 - protein, 15 aa, Artificial Sequence
  Description of Artificial Sequence: Synthetic peptide
  Seed: PRMCSLMQGSTLPRR
PRMFSLLQGSTEPRR

SEQ ID NO: 109567 - protein, 15 aa, Artificial Sequence
  Description of Artificial Sequence: Synthetic peptide
  Seed: PRMCSLMQGSTLPRR
PRMFSLLQGSTFPRR

SEQ ID NO: 109568 - protein, 15 aa, Artificial Sequence
  Description of Artificial Sequence: Synthetic peptide
  Seed: PRMCSLMQGSTLPRR
PRMFSLLQGSTGPRR

SEQ ID NO: 109569 - protein, 15 aa, Artificial Sequence
  Description of Artificial Sequence: Synthetic peptide
  Seed: PRMCSLMQGSTLPRR
PRMFSLLQGSTHPRR

SEQ ID NO: 109570 - protein, 15 aa, Artificial Sequence
  Description of Artificial Sequence: Synthetic peptide
  Seed: PRMCSLMQGSTLPRR
PRMFSLLQGSTIPRR

SEQ ID NO: 109571 - protein, 15 aa, Artificial Sequence
  Description of Artificial Sequence: Synthetic peptide
  Seed: PRMCSLMQGSTLPRR
PRMFSLLQGSTKPRR

SEQ ID NO: 109572 - protein, 15 aa, Artificial Sequence
  Description of Artificial Sequence: Synthetic peptide
  Seed: PRMCSLMQGSTLPRR
PRMFSLLQGSTLPRR

SEQ ID NO: 109573 - protein, 15 aa, Artificial Sequence
  Description of Artificial Sequence: Synthetic peptide
  Seed: PRMCSLMQGSTLPRR
PRMFSLLQGSTMPRR

SEQ ID NO: 109574 - protein, 15 aa, Artificial Sequence
  Description of Artificial Sequence: Synthetic peptide
  Seed: PRMCSLMQGSTLPRR
PRMFSLLQGSTNPRR

SEQ ID NO: 109575 - protein, 15 aa, Artificial Sequence
  Description of Artificial Sequence: Synthetic peptide
  Seed: PRMCSLMQGSTLPRR
PRMFSLLQGSTPPRR

SEQ ID NO: 109576 - protein, 15 aa, Artificial Sequence
  Description of Artificial Sequence: Synthetic peptide
  Seed: PRMCSLMQGSTLPRR
PRMFSLLQGSTQPRR

SEQ ID NO: 109577 - protein, 15 aa, Artificial Sequence
  Description of Artificial Sequence: Synthetic peptide
  Seed: PRMCSLMQGSTLPRR
PRMFSLLQGSTRPRR

SEQ ID NO: 109578 - protein, 15 aa, Artificial Sequence
  Description of Artificial Sequence: Synthetic peptide
  Seed: PRMCSLMQGSTLPRR
PRMFSLLQGSTSPRR

SEQ ID NO: 109579 - protein, 15 aa, Artificial Sequence
  Description of Artificial Sequence: Synthetic peptide
  Seed: PRMCSLMQGSTLPRR
PRMFSLLQGSTTPRR

SEQ ID NO: 109580 - protein, 15 aa, Artificial Sequence
  Description of Artificial Sequence: Synthetic peptide
  Seed: PRMCSLMQGSTLPRR
PRMFSLLQGSTVPRR

SEQ ID NO: 109581 - protein, 15 aa, Artificial Sequence
  Description of Artificial Sequence: Synthetic peptide
  Seed: PRMCSLMQGSTLPRR
PRMFSLLQGSTWPRR

SEQ ID NO: 109582 - protein, 15 aa, Artificial Sequence
  Description of Artificial Sequence: Synthetic peptide
  Seed: PRMCSLMQGSTLPRR
PRMFSLLQGSTYPRR

SEQ ID NO: 109583 - protein, 15 aa, Artificial Sequence
  Description of Artificial Sequence: Synthetic peptide
  Seed: PRMCSLMQGSTLPRR
PRMFSLLQHSTAPRR

SEQ ID NO: 109584 - protein, 15 aa, Artificial Sequence
  Description of Artificial Sequence: Synthetic peptide
  Seed: PRMCSLMQGSTLPRR
PRMFSLLQHSTIPRR

SEQ ID NO: 109585 - protein, 15 aa, Artificial Sequence
  Description of Artificial Sequence: Synthetic peptide
  Seed: PRMCSLMQGSTLPRR
PRMFSLLQHSTLPRR

SEQ ID NO: 109586 - protein, 15 aa, Artificial Sequence
  Description of Artificial Sequence: Synthetic peptide
  Seed: PRMCSLMQGSTLPRR
PRMFSLLQHSTMPRR

SEQ ID NO: 109587 - protein, 15 aa, Artificial Sequence
  Description of Artificial Sequence: Synthetic peptide
  Seed: PRMCSLMQGSTLPRR
PRMFSLLQHSTNPRR

SEQ ID NO: 109588 - protein, 15 aa, Artificial Sequence
  Description of Artificial Sequence: Synthetic peptide
  Seed: PRMCSLMQGSTLPRR
PRMFSLLQHSTSPRR

SEQ ID NO: 109589 - protein, 15 aa, Artificial Sequence
  Description of Artificial Sequence: Synthetic peptide
  Seed: PRMCSLMQGSTLPRR
PRMFSLLQHSTTPRR

SEQ ID NO: 109590 - protein, 15 aa, Artificial Sequence
  Description of Artificial Sequence: Synthetic peptide
  Seed: PRMCSLMQGSTLPRR
PRMFSLLQHSTVPRR

SEQ ID NO: 109591 - protein, 15 aa, Artificial Sequence
  Description of Artificial Sequence: Synthetic peptide
  Seed: PRMCSLMQGSTLPRR
PRMFSLLQISTAPRR

SEQ ID NO: 109592 - protein, 15 aa, Artificial Sequence
  Description of Artificial Sequence: Synthetic peptide
  Seed: PRMCSLMQGSTLPRR
PRMFSLLQISTCPRR

SEQ ID NO: 109593 - protein, 15 aa, Artificial Sequence
  Description of Artificial Sequence: Synthetic peptide
  Seed: PRMCSLMQGSTLPRR
PRMFSLLQISTDPRR

SEQ ID NO: 109594 - protein, 15 aa, Artificial Sequence
  Description of Artificial Sequence: Synthetic peptide
  Seed: PRMCSLMQGSTLPRR
PRMFSLLQISTEPRR

SEQ ID NO: 109595 - protein, 15 aa, Artificial Sequence
  Description of Artificial Sequence: Synthetic peptide
  Seed: PRMCSLMQGSTLPRR
PRMFSLLQISTFPRR

SEQ ID NO: 109596 - protein, 15 aa, Artificial Sequence
  Description of Artificial Sequence: Synthetic peptide
  Seed: PRMCSLMQGSTLPRR
PRMFSLLQISTGPRR

SEQ ID NO: 109597 - protein, 15 aa, Artificial Sequence
  Description of Artificial Sequence: Synthetic peptide
  Seed: PRMCSLMQGSTLPRR
PRMFSLLQISTHPRR

SEQ ID NO: 109598 - protein, 15 aa, Artificial Sequence
  Description of Artificial Sequence: Synthetic peptide
  Seed: PRMCSLMQGSTLPRR
PRMFSLLQISTIPRR

SEQ ID NO: 109599 - protein, 15 aa, Artificial Sequence
  Description of Artificial Sequence: Synthetic peptide
  Seed: PRMCSLMQGSTLPRR
PRMFSLLQISTKPRR

SEQ ID NO: 109600 - protein, 15 aa, Artificial Sequence
  Description of Artificial Sequence: Synthetic peptide
  Seed: PRMCSLMQGSTLPRR
PRMFSLLQISTLPRR

SEQ ID NO: 109601 - protein, 15 aa, Artificial Sequence
  Description of Artificial Sequence: Synthetic peptide
  Seed: PRMCSLMQGSTLPRR
PRMFSLLQISTMPRR

SEQ ID NO: 109602 - protein, 15 aa, Artificial Sequence
  Description of Artificial Sequence: Synthetic peptide
  Seed: PRMCSLMQGSTLPRR
PRMFSLLQISTNPRR

SEQ ID NO: 109603 - protein, 15 aa, Artificial Sequence
  Description of Artificial Sequence: Synthetic peptide
  Seed: PRMCSLMQGSTLPRR
PRMFSLLQISTPPRR

SEQ ID NO: 109604 - protein, 15 aa, Artificial Sequence
  Description of Artificial Sequence: Synthetic peptide
  Seed: PRMCSLMQGSTLPRR
PRMFSLLQISTQPRR

SEQ ID NO: 109605 - protein, 15 aa, Artificial Sequence
  Description of Artificial Sequence: Synthetic peptide
  Seed: PRMCSLMQGSTLPRR
PRMFSLLQISTSPRR

SEQ ID NO: 109606 - protein, 15 aa, Artificial Sequence
  Description of Artificial Sequence: Synthetic peptide
  Seed: PRMCSLMQGSTLPRR
PRMFSLLQISTTPRR

SEQ ID NO: 109607 - protein, 15 aa, Artificial Sequence
  Description of Artificial Sequence: Synthetic peptide
  Seed: PRMCSLMQGSTLPRR
PRMFSLLQISTVPRR

SEQ ID NO: 109608 - protein, 15 aa, Artificial Sequence
  Description of Artificial Sequence: Synthetic peptide
  Seed: PRMCSLMQGSTLPRR
PRMFSLLQLSTAPRR

SEQ ID NO: 109609 - protein, 15 aa, Artificial Sequence
  Description of Artificial Sequence: Synthetic peptide
  Seed: PRMCSLMQGSTLPRR
PRMFSLLQLSTCPRR

SEQ ID NO: 109610 - protein, 15 aa, Artificial Sequence
  Description of Artificial Sequence: Synthetic peptide
  Seed: PRMCSLMQGSTLPRR
PRMFSLLQLSTDPRR

SEQ ID NO: 109611 - protein, 15 aa, Artificial Sequence
  Description of Artificial Sequence: Synthetic peptide
  Seed: PRMCSLMQGSTLPRR
PRMFSLLQLSTFPRR

SEQ ID NO: 109612 - protein, 15 aa, Artificial Sequence
  Description of Artificial Sequence: Synthetic peptide
  Seed: PRMCSLMQGSTLPRR
PRMFSLLQLSTGPRR

SEQ ID NO: 109613 - protein, 15 aa, Artificial Sequence
  Description of Artificial Sequence: Synthetic peptide
  Seed: PRMCSLMQGSTLPRR
PRMFSLLQLSTHPRR

SEQ ID NO: 109614 - protein, 15 aa, Artificial Sequence
  Description of Artificial Sequence: Synthetic peptide
  Seed: PRMCSLMQGSTLPRR
PRMFSLLQLSTIPRR

SEQ ID NO: 109615 - protein, 15 aa, Artificial Sequence
  Description of Artificial Sequence: Synthetic peptide
  Seed: PRMCSLMQGSTLPRR
PRMFSLLQLSTLPRR

SEQ ID NO: 109616 - protein, 15 aa, Artificial Sequence
  Description of Artificial Sequence: Synthetic peptide
  Seed: PRMCSLMQGSTLPRR
PRMFSLLQLSTMPRR

SEQ ID NO: 109617 - protein, 15 aa, Artificial Sequence
  Description of Artificial Sequence: Synthetic peptide
  Seed: PRMCSLMQGSTLPRR
PRMFSLLQLSTNPRR

SEQ ID NO: 109618 - protein, 15 aa, Artificial Sequence
  Description of Artificial Sequence: Synthetic peptide
  Seed: PRMCSLMQGSTLPRR
PRMFSLLQLSTPPRR

SEQ ID NO: 109619 - protein, 15 aa, Artificial Sequence
  Description of Artificial Sequence: Synthetic peptide
  Seed: PRMCSLMQGSTLPRR
PRMFSLLQLSTQPRR

SEQ ID NO: 109620 - protein, 15 aa, Artificial Sequence
  Description of Artificial Sequence: Synthetic peptide
  Seed: PRMCSLMQGSTLPRR
PRMFSLLQLSTSPRR

SEQ ID NO: 109621 - protein, 15 aa, Artificial Sequence
  Description of Artificial Sequence: Synthetic peptide
  Seed: PRMCSLMQGSTLPRR
PRMFSLLQLSTTPRR

SEQ ID NO: 109622 - protein, 15 aa, Artificial Sequence
  Description of Artificial Sequence: Synthetic peptide
  Seed: PRMCSLMQGSTLPRR
PRMFSLLQLSTVPRR

SEQ ID NO: 109623 - protein, 15 aa, Artificial Sequence
  Description of Artificial Sequence: Synthetic peptide
  Seed: PRMCSLMQGSTLPRR
PRMFSLLQMSTAPRR

SEQ ID NO: 109624 - protein, 15 aa, Artificial Sequence
  Description of Artificial Sequence: Synthetic peptide
  Seed: PRMCSLMQGSTLPRR
PRMFSLLQMSTDPRR

SEQ ID NO: 109625 - protein, 15 aa, Artificial Sequence
  Description of Artificial Sequence: Synthetic peptide
  Seed: PRMCSLMQGSTLPRR
PRMFSLLQMSTFPRR

SEQ ID NO: 109626 - protein, 15 aa, Artificial Sequence
  Description of Artificial Sequence: Synthetic peptide
  Seed: PRMCSLMQGSTLPRR
PRMFSLLQMSTGPRR

SEQ ID NO: 109627 - protein, 15 aa, Artificial Sequence
  Description of Artificial Sequence: Synthetic peptide
  Seed: PRMCSLMQGSTLPRR
PRMFSLLQMSTHPRR

SEQ ID NO: 109628 - protein, 15 aa, Artificial Sequence
  Description of Artificial Sequence: Synthetic peptide
  Seed: PRMCSLMQGSTLPRR
PRMFSLLQMSTIPRR

SEQ ID NO: 109629 - protein, 15 aa, Artificial Sequence
  Description of Artificial Sequence: Synthetic peptide
  Seed: PRMCSLMQGSTLPRR
PRMFSLLQMSTLPRR

SEQ ID NO: 109630 - protein, 15 aa, Artificial Sequence
  Description of Artificial Sequence: Synthetic peptide
  Seed: PRMCSLMQGSTLPRR
PRMFSLLQMSTMPRR

SEQ ID NO: 109631 - protein, 15 aa, Artificial Sequence
  Description of Artificial Sequence: Synthetic peptide
  Seed: PRMCSLMQGSTLPRR
PRMFSLLQMSTNPRR

SEQ ID NO: 109632 - protein, 15 aa, Artificial Sequence
  Description of Artificial Sequence: Synthetic peptide
  Seed: PRMCSLMQGSTLPRR
PRMFSLLQMSTPPRR

SEQ ID NO: 109633 - protein, 15 aa, Artificial Sequence
  Description of Artificial Sequence: Synthetic peptide
  Seed: PRMCSLMQGSTLPRR
PRMFSLLQMSTQPRR

SEQ ID NO: 109634 - protein, 15 aa, Artificial Sequence
  Description of Artificial Sequence: Synthetic peptide
  Seed: PRMCSLMQGSTLPRR
PRMFSLLQMSTSPRR

SEQ ID NO: 109635 - protein, 15 aa, Artificial Sequence
  Description of Artificial Sequence: Synthetic peptide
  Seed: PRMCSLMQGSTLPRR
PRMFSLLQMSTTPRR

SEQ ID NO: 109636 - protein, 15 aa, Artificial Sequence
  Description of Artificial Sequence: Synthetic peptide
  Seed: PRMCSLMQGSTLPRR
PRMFSLLQMSTVPRR

SEQ ID NO: 109637 - protein, 15 aa, Artificial Sequence
  Description of Artificial Sequence: Synthetic peptide
  Seed: PRMCSLMQGSTLPRR
PRMFSLLQNSTAPRR

SEQ ID NO: 109638 - protein, 15 aa, Artificial Sequence
  Description of Artificial Sequence: Synthetic peptide
  Seed: PRMCSLMQGSTLPRR
PRMFSLLQNSTCPRR

SEQ ID NO: 109639 - protein, 15 aa, Artificial Sequence
  Description of Artificial Sequence: Synthetic peptide
  Seed: PRMCSLMQGSTLPRR
PRMFSLLQNSTDPRR

SEQ ID NO: 109640 - protein, 15 aa, Artificial Sequence
  Description of Artificial Sequence: Synthetic peptide
  Seed: PRMCSLMQGSTLPRR
PRMFSLLQNSTEPRR

SEQ ID NO: 109641 - protein, 15 aa, Artificial Sequence
  Description of Artificial Sequence: Synthetic peptide
  Seed: PRMCSLMQGSTLPRR
PRMFSLLQNSTFPRR

SEQ ID NO: 109642 - protein, 15 aa, Artificial Sequence
  Description of Artificial Sequence: Synthetic peptide
  Seed: PRMCSLMQGSTLPRR
PRMFSLLQNSTGPRR

SEQ ID NO: 109643 - protein, 15 aa, Artificial Sequence
  Description of Artificial Sequence: Synthetic peptide
  Seed: PRMCSLMQGSTLPRR
PRMFSLLQNSTHPRR

SEQ ID NO: 109644 - protein, 15 aa, Artificial Sequence
  Description of Artificial Sequence: Synthetic peptide
  Seed: PRMCSLMQGSTLPRR
PRMFSLLQNSTIPRR

SEQ ID NO: 109645 - protein, 15 aa, Artificial Sequence
  Description of Artificial Sequence: Synthetic peptide
  Seed: PRMCSLMQGSTLPRR
PRMFSLLQNSTKPRR

SEQ ID NO: 109646 - protein, 15 aa, Artificial Sequence
  Description of Artificial Sequence: Synthetic peptide
  Seed: PRMCSLMQGSTLPRR
PRMFSLLQNSTLPRR

SEQ ID NO: 109647 - protein, 15 aa, Artificial Sequence
  Description of Artificial Sequence: Synthetic peptide
  Seed: PRMCSLMQGSTLPRR
PRMFSLLQNSTMPRR

SEQ ID NO: 109648 - protein, 15 aa, Artificial Sequence
  Description of Artificial Sequence: Synthetic peptide
  Seed: PRMCSLMQGSTLPRR
PRMFSLLQNSTNPRR

SEQ ID NO: 109649 - protein, 15 aa, Artificial Sequence
  Description of Artificial Sequence: Synthetic peptide
  Seed: PRMCSLMQGSTLPRR
PRMFSLLQNSTPPRR

SEQ ID NO: 109650 - protein, 15 aa, Artificial Sequence
  Description of Artificial Sequence: Synthetic peptide
  Seed: PRMCSLMQGSTLPRR
PRMFSLLQNSTQPRR

SEQ ID NO: 109651 - protein, 15 aa, Artificial Sequence
  Description of Artificial Sequence: Synthetic peptide
  Seed: PRMCSLMQGSTLPRR
PRMFSLLQNSTRPRR

SEQ ID NO: 109652 - protein, 15 aa, Artificial Sequence
  Description of Artificial Sequence: Synthetic peptide
  Seed: PRMCSLMQGSTLPRR
PRMFSLLQNSTSPRR

SEQ ID NO: 109653 - protein, 15 aa, Artificial Sequence
  Description of Artificial Sequence: Synthetic peptide
  Seed: PRMCSLMQGSTLPRR
PRMFSLLQNSTTPRR

SEQ ID NO: 109654 - protein, 15 aa, Artificial Sequence
  Description of Artificial Sequence: Synthetic peptide
  Seed: PRMCSLMQGSTLPRR
PRMFSLLQNSTVPRR

SEQ ID NO: 109655 - protein, 15 aa, Artificial Sequence
  Description of Artificial Sequence: Synthetic peptide
  Seed: PRMCSLMQGSTLPRR
PRMFSLLQNSTWPRR

SEQ ID NO: 109656 - protein, 15 aa, Artificial Sequence
  Description of Artificial Sequence: Synthetic peptide
  Seed: PRMCSLMQGSTLPRR
PRMFSLLQNSTYPRR

SEQ ID NO: 109657 - protein, 15 aa, Artificial Sequence
  Description of Artificial Sequence: Synthetic peptide
  Seed: PRMCSLMQGSTLPRR
PRMFSLLQPSTAPRR

SEQ ID NO: 109658 - protein, 15 aa, Artificial Sequence
  Description of Artificial Sequence: Synthetic peptide
  Seed: PRMCSLMQGSTLPRR
PRMFSLLQPSTCPRR

SEQ ID NO: 109659 - protein, 15 aa, Artificial Sequence
  Description of Artificial Sequence: Synthetic peptide
  Seed: PRMCSLMQGSTLPRR
PRMFSLLQPSTDPRR

SEQ ID NO: 109660 - protein, 15 aa, Artificial Sequence
  Description of Artificial Sequence: Synthetic peptide
  Seed: PRMCSLMQGSTLPRR
PRMFSLLQPSTEPRR

SEQ ID NO: 109661 - protein, 15 aa, Artificial Sequence
  Description of Artificial Sequence: Synthetic peptide
  Seed: PRMCSLMQGSTLPRR
PRMFSLLQPSTFPRR

SEQ ID NO: 109662 - protein, 15 aa, Artificial Sequence
  Description of Artificial Sequence: Synthetic peptide
  Seed: PRMCSLMQGSTLPRR
PRMFSLLQPSTGPRR

SEQ ID NO: 109663 - protein, 15 aa, Artificial Sequence
  Description of Artificial Sequence: Synthetic peptide
  Seed: PRMCSLMQGSTLPRR
PRMFSLLQPSTHPRR

SEQ ID NO: 109664 - protein, 15 aa, Artificial Sequence
  Description of Artificial Sequence: Synthetic peptide
  Seed: PRMCSLMQGSTLPRR
PRMFSLLQPSTIPRR

SEQ ID NO: 109665 - protein, 15 aa, Artificial Sequence
  Description of Artificial Sequence: Synthetic peptide
  Seed: PRMCSLMQGSTLPRR
PRMFSLLQPSTKPRR

SEQ ID NO: 109666 - protein, 15 aa, Artificial Sequence
  Description of Artificial Sequence: Synthetic peptide
  Seed: PRMCSLMQGSTLPRR
PRMFSLLQPSTLPRR

SEQ ID NO: 109667 - protein, 15 aa, Artificial Sequence
  Description of Artificial Sequence: Synthetic peptide
  Seed: PRMCSLMQGSTLPRR
PRMFSLLQPSTMPRR

SEQ ID NO: 109668 - protein, 15 aa, Artificial Sequence
  Description of Artificial Sequence: Synthetic peptide
  Seed: PRMCSLMQGSTLPRR
PRMFSLLQPSTNPRR

SEQ ID NO: 109669 - protein, 15 aa, Artificial Sequence
  Description of Artificial Sequence: Synthetic peptide
  Seed: PRMCSLMQGSTLPRR
PRMFSLLQPSTPPRR

SEQ ID NO: 109670 - protein, 15 aa, Artificial Sequence
  Description of Artificial Sequence: Synthetic peptide
  Seed: PRMCSLMQGSTLPRR
PRMFSLLQPSTQPRR

SEQ ID NO: 109671 - protein, 15 aa, Artificial Sequence
  Description of Artificial Sequence: Synthetic peptide
  Seed: PRMCSLMQGSTLPRR
PRMFSLLQPSTRPRR

SEQ ID NO: 109672 - protein, 15 aa, Artificial Sequence
  Description of Artificial Sequence: Synthetic peptide
  Seed: PRMCSLMQGSTLPRR
PRMFSLLQPSTSPRR

SEQ ID NO: 109673 - protein, 15 aa, Artificial Sequence
  Description of Artificial Sequence: Synthetic peptide
  Seed: PRMCSLMQGSTLPRR
PRMFSLLQPSTTPRR

SEQ ID NO: 109674 - protein, 15 aa, Artificial Sequence
  Description of Artificial Sequence: Synthetic peptide
  Seed: PRMCSLMQGSTLPRR
PRMFSLLQPSTVPRR

SEQ ID NO: 109675 - protein, 15 aa, Artificial Sequence
  Description of Artificial Sequence: Synthetic peptide
  Seed: PRMCSLMQGSTLPRR
PRMFSLLQPSTWPRR

SEQ ID NO: 109676 - protein, 15 aa, Artificial Sequence
  Description of Artificial Sequence: Synthetic peptide
  Seed: PRMCSLMQGSTLPRR
PRMFSLLQPSTYPRR

SEQ ID NO: 109677 - protein, 15 aa, Artificial Sequence
  Description of Artificial Sequence: Synthetic peptide
  Seed: PRMCSLMQGSTLPRR
PRMFSLLQQSTAPRR

SEQ ID NO: 109678 - protein, 15 aa, Artificial Sequence
  Description of Artificial Sequence: Synthetic peptide
  Seed: PRMCSLMQGSTLPRR
PRMFSLLQQSTIPRR

SEQ ID NO: 109679 - protein, 15 aa, Artificial Sequence
  Description of Artificial Sequence: Synthetic peptide
  Seed: PRMCSLMQGSTLPRR
PRMFSLLQQSTLPRR

SEQ ID NO: 109680 - protein, 15 aa, Artificial Sequence
  Description of Artificial Sequence: Synthetic peptide
  Seed: PRMCSLMQGSTLPRR
PRMFSLLQQSTMPRR

SEQ ID NO: 109681 - protein, 15 aa, Artificial Sequence
  Description of Artificial Sequence: Synthetic peptide
  Seed: PRMCSLMQGSTLPRR
PRMFSLLQQSTNPRR

SEQ ID NO: 109682 - protein, 15 aa, Artificial Sequence
  Description of Artificial Sequence: Synthetic peptide
  Seed: PRMCSLMQGSTLPRR
PRMFSLLQQSTSPRR

SEQ ID NO: 109683 - protein, 15 aa, Artificial Sequence
  Description of Artificial Sequence: Synthetic peptide
  Seed: PRMCSLMQGSTLPRR
PRMFSLLQQSTTPRR

SEQ ID NO: 109684 - protein, 15 aa, Artificial Sequence
  Description of Artificial Sequence: Synthetic peptide
  Seed: PRMCSLMQGSTLPRR
PRMFSLLQQSTVPRR

SEQ ID NO: 109685 - protein, 15 aa, Artificial Sequence
  Description of Artificial Sequence: Synthetic peptide
  Seed: PRMCSLMQGSTLPRR
PRMFSLLQSSTAPRR

SEQ ID NO: 109686 - protein, 15 aa, Artificial Sequence
  Description of Artificial Sequence: Synthetic peptide
  Seed: PRMCSLMQGSTLPRR
PRMFSLLQSSTCPRR

SEQ ID NO: 109687 - protein, 15 aa, Artificial Sequence
  Description of Artificial Sequence: Synthetic peptide
  Seed: PRMCSLMQGSTLPRR
PRMFSLLQSSTDPRR

SEQ ID NO: 109688 - protein, 15 aa, Artificial Sequence
  Description of Artificial Sequence: Synthetic peptide
  Seed: PRMCSLMQGSTLPRR
PRMFSLLQSSTEPRR

SEQ ID NO: 109689 - protein, 15 aa, Artificial Sequence
  Description of Artificial Sequence: Synthetic peptide
  Seed: PRMCSLMQGSTLPRR
PRMFSLLQSSTFPRR

SEQ ID NO: 109690 - protein, 15 aa, Artificial Sequence
  Description of Artificial Sequence: Synthetic peptide
  Seed: PRMCSLMQGSTLPRR
PRMFSLLQSSTGPRR

SEQ ID NO: 109691 - protein, 15 aa, Artificial Sequence
  Description of Artificial Sequence: Synthetic peptide
  Seed: PRMCSLMQGSTLPRR
PRMFSLLQSSTHPRR

SEQ ID NO: 109692 - protein, 15 aa, Artificial Sequence
  Description of Artificial Sequence: Synthetic peptide
  Seed: PRMCSLMQGSTLPRR
PRMFSLLQSSTIPRR

SEQ ID NO: 109693 - protein, 15 aa, Artificial Sequence
  Description of Artificial Sequence: Synthetic peptide
  Seed: PRMCSLMQGSTLPRR
PRMFSLLQSSTKPRR

SEQ ID NO: 109694 - protein, 15 aa, Artificial Sequence
  Description of Artificial Sequence: Synthetic peptide
  Seed: PRMCSLMQGSTLPRR
PRMFSLLQSSTLPRR

SEQ ID NO: 109695 - protein, 15 aa, Artificial Sequence
  Description of Artificial Sequence: Synthetic peptide
  Seed: PRMCSLMQGSTLPRR
PRMFSLLQSSTMPRR

SEQ ID NO: 109696 - protein, 15 aa, Artificial Sequence
  Description of Artificial Sequence: Synthetic peptide
  Seed: PRMCSLMQGSTLPRR
PRMFSLLQSSTNPRR

SEQ ID NO: 109697 - protein, 15 aa, Artificial Sequence
  Description of Artificial Sequence: Synthetic peptide
  Seed: PRMCSLMQGSTLPRR
PRMFSLLQSSTPPRR

SEQ ID NO: 109698 - protein, 15 aa, Artificial Sequence
  Description of Artificial Sequence: Synthetic peptide
  Seed: PRMCSLMQGSTLPRR
PRMFSLLQSSTQPRR

SEQ ID NO: 109699 - protein, 15 aa, Artificial Sequence
  Description of Artificial Sequence: Synthetic peptide
  Seed: PRMCSLMQGSTLPRR
PRMFSLLQSSTRPRR

SEQ ID NO: 109700 - protein, 15 aa, Artificial Sequence
  Description of Artificial Sequence: Synthetic peptide
  Seed: PRMCSLMQGSTLPRR
PRMFSLLQSSTSPRR

SEQ ID NO: 109701 - protein, 15 aa, Artificial Sequence
  Description of Artificial Sequence: Synthetic peptide
  Seed: PRMCSLMQGSTLPRR
PRMFSLLQSSTTPRR

SEQ ID NO: 109702 - protein, 15 aa, Artificial Sequence
  Description of Artificial Sequence: Synthetic peptide
  Seed: PRMCSLMQGSTLPRR
PRMFSLLQSSTVPRR

SEQ ID NO: 109703 - protein, 15 aa, Artificial Sequence
  Description of Artificial Sequence: Synthetic peptide
  Seed: PRMCSLMQGSTLPRR
PRMFSLLQSSTWPRR

SEQ ID NO: 109704 - protein, 15 aa, Artificial Sequence
  Description of Artificial Sequence: Synthetic peptide
  Seed: PRMCSLMQGSTLPRR
PRMFSLLQSSTYPRR

SEQ ID NO: 109705 - protein, 15 aa, Artificial Sequence
  Description of Artificial Sequence: Synthetic peptide
  Seed: PRMCSLMQGSTLPRR
PRMFSLLQTSTAPRR

SEQ ID NO: 109706 - protein, 15 aa, Artificial Sequence
  Description of Artificial Sequence: Synthetic peptide
  Seed: PRMCSLMQGSTLPRR
PRMFSLLQTSTCPRR

SEQ ID NO: 109707 - protein, 15 aa, Artificial Sequence
  Description of Artificial Sequence: Synthetic peptide
  Seed: PRMCSLMQGSTLPRR
PRMFSLLQTSTDPRR

SEQ ID NO: 109708 - protein, 15 aa, Artificial Sequence
  Description of Artificial Sequence: Synthetic peptide
  Seed: PRMCSLMQGSTLPRR
PRMFSLLQTSTEPRR

SEQ ID NO: 109709 - protein, 15 aa, Artificial Sequence
  Description of Artificial Sequence: Synthetic peptide
  Seed: PRMCSLMQGSTLPRR
PRMFSLLQTSTFPRR

SEQ ID NO: 109710 - protein, 15 aa, Artificial Sequence
  Description of Artificial Sequence: Synthetic peptide
  Seed: PRMCSLMQGSTLPRR
PRMFSLLQTSTGPRR

SEQ ID NO: 109711 - protein, 15 aa, Artificial Sequence
  Description of Artificial Sequence: Synthetic peptide
  Seed: PRMCSLMQGSTLPRR
PRMFSLLQTSTHPRR

SEQ ID NO: 109712 - protein, 15 aa, Artificial Sequence
  Description of Artificial Sequence: Synthetic peptide
  Seed: PRMCSLMQGSTLPRR
PRMFSLLQTSTIPRR

SEQ ID NO: 109713 - protein, 15 aa, Artificial Sequence
  Description of Artificial Sequence: Synthetic peptide
  Seed: PRMCSLMQGSTLPRR
PRMFSLLQTSTKPRR

SEQ ID NO: 109714 - protein, 15 aa, Artificial Sequence
  Description of Artificial Sequence: Synthetic peptide
  Seed: PRMCSLMQGSTLPRR
PRMFSLLQTSTLPRR

SEQ ID NO: 109715 - protein, 15 aa, Artificial Sequence
  Description of Artificial Sequence: Synthetic peptide
  Seed: PRMCSLMQGSTLPRR
PRMFSLLQTSTMPRR

SEQ ID NO: 109716 - protein, 15 aa, Artificial Sequence
  Description of Artificial Sequence: Synthetic peptide
  Seed: PRMCSLMQGSTLPRR
PRMFSLLQTSTNPRR

SEQ ID NO: 109717 - protein, 15 aa, Artificial Sequence
  Description of Artificial Sequence: Synthetic peptide
  Seed: PRMCSLMQGSTLPRR
PRMFSLLQTSTPPRR

SEQ ID NO: 109718 - protein, 15 aa, Artificial Sequence
  Description of Artificial Sequence: Synthetic peptide
  Seed: PRMCSLMQGSTLPRR
PRMFSLLQTSTQPRR

SEQ ID NO: 109719 - protein, 15 aa, Artificial Sequence
  Description of Artificial Sequence: Synthetic peptide
  Seed: PRMCSLMQGSTLPRR
PRMFSLLQTSTRPRR

SEQ ID NO: 109720 - protein, 15 aa, Artificial Sequence
  Description of Artificial Sequence: Synthetic peptide
  Seed: PRMCSLMQGSTLPRR
PRMFSLLQTSTSPRR

SEQ ID NO: 109721 - protein, 15 aa, Artificial Sequence
  Description of Artificial Sequence: Synthetic peptide
  Seed: PRMCSLMQGSTLPRR
PRMFSLLQTSTTPRR

SEQ ID NO: 109722 - protein, 15 aa, Artificial Sequence
  Description of Artificial Sequence: Synthetic peptide
  Seed: PRMCSLMQGSTLPRR
PRMFSLLQTSTVPRR

SEQ ID NO: 109723 - protein, 15 aa, Artificial Sequence
  Description of Artificial Sequence: Synthetic peptide
  Seed: PRMCSLMQGSTLPRR
PRMFSLLQTSTWPRR

SEQ ID NO: 109724 - protein, 15 aa, Artificial Sequence
  Description of Artificial Sequence: Synthetic peptide
  Seed: PRMCSLMQGSTLPRR
PRMFSLLQTSTYPRR

SEQ ID NO: 109725 - protein, 15 aa, Artificial Sequence
  Description of Artificial Sequence: Synthetic peptide
  Seed: PRMCSLMQGSTLPRR
PRMFSLLQVSTAPRR

SEQ ID NO: 109726 - protein, 15 aa, Artificial Sequence
  Description of Artificial Sequence: Synthetic peptide
  Seed: PRMCSLMQGSTLPRR
PRMFSLLQVSTCPRR

SEQ ID NO: 109727 - protein, 15 aa, Artificial Sequence
  Description of Artificial Sequence: Synthetic peptide
  Seed: PRMCSLMQGSTLPRR
PRMFSLLQVSTDPRR

SEQ ID NO: 109728 - protein, 15 aa, Artificial Sequence
  Description of Artificial Sequence: Synthetic peptide
  Seed: PRMCSLMQGSTLPRR
PRMFSLLQVSTEPRR

SEQ ID NO: 109729 - protein, 15 aa, Artificial Sequence
  Description of Artificial Sequence: Synthetic peptide
  Seed: PRMCSLMQGSTLPRR
PRMFSLLQVSTFPRR

SEQ ID NO: 109730 - protein, 15 aa, Artificial Sequence
  Description of Artificial Sequence: Synthetic peptide
  Seed: PRMCSLMQGSTLPRR
PRMFSLLQVSTGPRR

SEQ ID NO: 109731 - protein, 15 aa, Artificial Sequence
  Description of Artificial Sequence: Synthetic peptide
  Seed: PRMCSLMQGSTLPRR
PRMFSLLQVSTHPRR

SEQ ID NO: 109732 - protein, 15 aa, Artificial Sequence
  Description of Artificial Sequence: Synthetic peptide
  Seed: PRMCSLMQGSTLPRR
PRMFSLLQVSTIPRR

SEQ ID NO: 109733 - protein, 15 aa, Artificial Sequence
  Description of Artificial Sequence: Synthetic peptide
  Seed: PRMCSLMQGSTLPRR
PRMFSLLQVSTKPRR

SEQ ID NO: 109734 - protein, 15 aa, Artificial Sequence
  Description of Artificial Sequence: Synthetic peptide
  Seed: PRMCSLMQGSTLPRR
PRMFSLLQVSTLPRR

SEQ ID NO: 109735 - protein, 15 aa, Artificial Sequence
  Description of Artificial Sequence: Synthetic peptide
  Seed: PRMCSLMQGSTLPRR
PRMFSLLQVSTMPRR

SEQ ID NO: 109736 - protein, 15 aa, Artificial Sequence
  Description of Artificial Sequence: Synthetic peptide
  Seed: PRMCSLMQGSTLPRR
PRMFSLLQVSTNPRR

SEQ ID NO: 109737 - protein, 15 aa, Artificial Sequence
  Description of Artificial Sequence: Synthetic peptide
  Seed: PRMCSLMQGSTLPRR
PRMFSLLQVSTPPRR

SEQ ID NO: 109738 - protein, 15 aa, Artificial Sequence
  Description of Artificial Sequence: Synthetic peptide
  Seed: PRMCSLMQGSTLPRR
PRMFSLLQVSTQPRR

SEQ ID NO: 109739 - protein, 15 aa, Artificial Sequence
  Description of Artificial Sequence: Synthetic peptide
  Seed: PRMCSLMQGSTLPRR
PRMFSLLQVSTRPRR

SEQ ID NO: 109740 - protein, 15 aa, Artificial Sequence
  Description of Artificial Sequence: Synthetic peptide
  Seed: PRMCSLMQGSTLPRR
PRMFSLLQVSTSPRR

SEQ ID NO: 109741 - protein, 15 aa, Artificial Sequence
  Description of Artificial Sequence: Synthetic peptide
  Seed: PRMCSLMQGSTLPRR
PRMFSLLQVSTTPRR

SEQ ID NO: 109742 - protein, 15 aa, Artificial Sequence
  Description of Artificial Sequence: Synthetic peptide
  Seed: PRMCSLMQGSTLPRR
PRMFSLLQVSTVPRR

SEQ ID NO: 109743 - protein, 15 aa, Artificial Sequence
  Description of Artificial Sequence: Synthetic peptide
  Seed: PRMCSLMQGSTLPRR
PRMFSLLQVSTWPRR

SEQ ID NO: 109744 - protein, 15 aa, Artificial Sequence
  Description of Artificial Sequence: Synthetic peptide
  Seed: PRMCSLMQGSTLPRR
PRMFSLLQVSTYPRR

SEQ ID NO: 109745 - protein, 15 aa, Artificial Sequence
  Description of Artificial Sequence: Synthetic peptide
  Seed: PRMCSLMQGSTLPRR
PRMFSLLQWSTAPRR

SEQ ID NO: 109746 - protein, 15 aa, Artificial Sequence
  Description of Artificial Sequence: Synthetic peptide
  Seed: PRMCSLMQGSTLPRR
PRMFSLLQWSTIPRR

SEQ ID NO: 109747 - protein, 15 aa, Artificial Sequence
  Description of Artificial Sequence: Synthetic peptide
  Seed: PRMCSLMQGSTLPRR
PRMFSLLQWSTLPRR

SEQ ID NO: 109748 - protein, 15 aa, Artificial Sequence
  Description of Artificial Sequence: Synthetic peptide
  Seed: PRMCSLMQGSTLPRR
PRMFSLLQWSTMPRR

SEQ ID NO: 109749 - protein, 15 aa, Artificial Sequence
  Description of Artificial Sequence: Synthetic peptide
  Seed: PRMCSLMQGSTLPRR
PRMFSLLQWSTSPRR

SEQ ID NO: 109750 - protein, 15 aa, Artificial Sequence
  Description of Artificial Sequence: Synthetic peptide
  Seed: PRMCSLMQGSTLPRR
PRMFSLLQWSTVPRR

SEQ ID NO: 109751 - protein, 15 aa, Artificial Sequence
  Description of Artificial Sequence: Synthetic peptide
  Seed: PRMCSLMQGSTLPRR
PRMFSLLQYSTAPRR

SEQ ID NO: 109752 - protein, 15 aa, Artificial Sequence
  Description of Artificial Sequence: Synthetic peptide
  Seed: PRMCSLMQGSTLPRR
PRMFSLLQYSTIPRR

SEQ ID NO: 109753 - protein, 15 aa, Artificial Sequence
  Description of Artificial Sequence: Synthetic peptide
  Seed: PRMCSLMQGSTLPRR
PRMFSLLQYSTLPRR

SEQ ID NO: 109754 - protein, 15 aa, Artificial Sequence
  Description of Artificial Sequence: Synthetic peptide
  Seed: PRMCSLMQGSTLPRR
PRMFSLLQYSTVPRR

SEQ ID NO: 109755 - protein, 15 aa, Artificial Sequence
  Description of Artificial Sequence: Synthetic peptide
  Seed: PRMCSLMQGSTLPRR
PRMFSLMQASTAPRR

SEQ ID NO: 109756 - protein, 15 aa, Artificial Sequence
  Description of Artificial Sequence: Synthetic peptide
  Seed: PRMCSLMQGSTLPRR
PRMFSLMQASTCPRR

SEQ ID NO: 109757 - protein, 15 aa, Artificial Sequence
  Description of Artificial Sequence: Synthetic peptide
  Seed: PRMCSLMQGSTLPRR
PRMFSLMQASTDPRR

SEQ ID NO: 109758 - protein, 15 aa, Artificial Sequence
  Description of Artificial Sequence: Synthetic peptide
  Seed: PRMCSLMQGSTLPRR
PRMFSLMQASTEPRR

SEQ ID NO: 109759 - protein, 15 aa, Artificial Sequence
  Description of Artificial Sequence: Synthetic peptide
  Seed: PRMCSLMQGSTLPRR
PRMFSLMQASTFPRR

SEQ ID NO: 109760 - protein, 15 aa, Artificial Sequence
  Description of Artificial Sequence: Synthetic peptide
  Seed: PRMCSLMQGSTLPRR
PRMFSLMQASTGPRR

SEQ ID NO: 109761 - protein, 15 aa, Artificial Sequence
  Description of Artificial Sequence: Synthetic peptide
  Seed: PRMCSLMQGSTLPRR
PRMFSLMQASTHPRR

SEQ ID NO: 109762 - protein, 15 aa, Artificial Sequence
  Description of Artificial Sequence: Synthetic peptide
  Seed: PRMCSLMQGSTLPRR
PRMFSLMQASTIPRR

SEQ ID NO: 109763 - protein, 15 aa, Artificial Sequence
  Description of Artificial Sequence: Synthetic peptide
  Seed: PRMCSLMQGSTLPRR
PRMFSLMQASTKPRR

SEQ ID NO: 109764 - protein, 15 aa, Artificial Sequence
  Description of Artificial Sequence: Synthetic peptide
  Seed: PRMCSLMQGSTLPRR
PRMFSLMQASTLPRR

SEQ ID NO: 109765 - protein, 15 aa, Artificial Sequence
  Description of Artificial Sequence: Synthetic peptide
  Seed: PRMCSLMQGSTLPRR
PRMFSLMQASTMPRR

SEQ ID NO: 109766 - protein, 15 aa, Artificial Sequence
  Description of Artificial Sequence: Synthetic peptide
  Seed: PRMCSLMQGSTLPRR
PRMFSLMQASTNPRR

SEQ ID NO: 109767 - protein, 15 aa, Artificial Sequence
  Description of Artificial Sequence: Synthetic peptide
  Seed: PRMCSLMQGSTLPRR
PRMFSLMQASTPPRR

SEQ ID NO: 109768 - protein, 15 aa, Artificial Sequence
  Description of Artificial Sequence: Synthetic peptide
  Seed: PRMCSLMQGSTLPRR
PRMFSLMQASTQPRR

SEQ ID NO: 109769 - protein, 15 aa, Artificial Sequence
  Description of Artificial Sequence: Synthetic peptide
  Seed: PRMCSLMQGSTLPRR
PRMFSLMQASTRPRR

SEQ ID NO: 109770 - protein, 15 aa, Artificial Sequence
  Description of Artificial Sequence: Synthetic peptide
  Seed: PRMCSLMQGSTLPRR
PRMFSLMQASTSPRR

SEQ ID NO: 109771 - protein, 15 aa, Artificial Sequence
  Description of Artificial Sequence: Synthetic peptide
  Seed: PRMCSLMQGSTLPRR
PRMFSLMQASTTPRR

SEQ ID NO: 109772 - protein, 15 aa, Artificial Sequence
  Description of Artificial Sequence: Synthetic peptide
  Seed: PRMCSLMQGSTLPRR
PRMFSLMQASTVPRR

SEQ ID NO: 109773 - protein, 15 aa, Artificial Sequence
  Description of Artificial Sequence: Synthetic peptide
  Seed: PRMCSLMQGSTLPRR
PRMFSLMQASTWPRR

SEQ ID NO: 109774 - protein, 15 aa, Artificial Sequence
  Description of Artificial Sequence: Synthetic peptide
  Seed: PRMCSLMQGSTLPRR
PRMFSLMQASTYPRR

SEQ ID NO: 109775 - protein, 15 aa, Artificial Sequence
  Description of Artificial Sequence: Synthetic peptide
  Seed: PRMCSLMQGSTLPRR
PRMFSLMQCSTAPRR

SEQ ID NO: 109776 - protein, 15 aa, Artificial Sequence
  Description of Artificial Sequence: Synthetic peptide
  Seed: PRMCSLMQGSTLPRR
PRMFSLMQCSTIPRR

SEQ ID NO: 109777 - protein, 15 aa, Artificial Sequence
  Description of Artificial Sequence: Synthetic peptide
  Seed: PRMCSLMQGSTLPRR
PRMFSLMQCSTLPRR

SEQ ID NO: 109778 - protein, 15 aa, Artificial Sequence
  Description of Artificial Sequence: Synthetic peptide
  Seed: PRMCSLMQGSTLPRR
PRMFSLMQCSTMPRR

SEQ ID NO: 109779 - protein, 15 aa, Artificial Sequence
  Description of Artificial Sequence: Synthetic peptide
  Seed: PRMCSLMQGSTLPRR
PRMFSLMQCSTNPRR

SEQ ID NO: 109780 - protein, 15 aa, Artificial Sequence
  Description of Artificial Sequence: Synthetic peptide
  Seed: PRMCSLMQGSTLPRR
PRMFSLMQCSTSPRR

SEQ ID NO: 109781 - protein, 15 aa, Artificial Sequence
  Description of Artificial Sequence: Synthetic peptide
  Seed: PRMCSLMQGSTLPRR
PRMFSLMQCSTTPRR

SEQ ID NO: 109782 - protein, 15 aa, Artificial Sequence
  Description of Artificial Sequence: Synthetic peptide
  Seed: PRMCSLMQGSTLPRR
PRMFSLMQCSTVPRR

SEQ ID NO: 109783 - protein, 15 aa, Artificial Sequence
  Description of Artificial Sequence: Synthetic peptide
  Seed: PRMCSLMQGSTLPRR
PRMFSLMQDSTAPRR

SEQ ID NO: 109784 - protein, 15 aa, Artificial Sequence
  Description of Artificial Sequence: Synthetic peptide
  Seed: PRMCSLMQGSTLPRR
PRMFSLMQDSTIPRR

SEQ ID NO: 109785 - protein, 15 aa, Artificial Sequence
  Description of Artificial Sequence: Synthetic peptide
  Seed: PRMCSLMQGSTLPRR
PRMFSLMQDSTLPRR

SEQ ID NO: 109786 - protein, 15 aa, Artificial Sequence
  Description of Artificial Sequence: Synthetic peptide
  Seed: PRMCSLMQGSTLPRR
PRMFSLMQDSTVPRR

SEQ ID NO: 109787 - protein, 15 aa, Artificial Sequence
  Description of Artificial Sequence: Synthetic peptide
  Seed: PRMCSLMQGSTLPRR
PRMFSLMQESTAPRR

SEQ ID NO: 109788 - protein, 15 aa, Artificial Sequence
  Description of Artificial Sequence: Synthetic peptide
  Seed: PRMCSLMQGSTLPRR
PRMFSLMQESTIPRR

SEQ ID NO: 109789 - protein, 15 aa, Artificial Sequence
  Description of Artificial Sequence: Synthetic peptide
  Seed: PRMCSLMQGSTLPRR
PRMFSLMQESTLPRR

SEQ ID NO: 109790 - protein, 15 aa, Artificial Sequence
  Description of Artificial Sequence: Synthetic peptide
  Seed: PRMCSLMQGSTLPRR
PRMFSLMQESTMPRR

SEQ ID NO: 109791 - protein, 15 aa, Artificial Sequence
  Description of Artificial Sequence: Synthetic peptide
  Seed: PRMCSLMQGSTLPRR
PRMFSLMQESTNPRR

SEQ ID NO: 109792 - protein, 15 aa, Artificial Sequence
  Description of Artificial Sequence: Synthetic peptide
  Seed: PRMCSLMQGSTLPRR
PRMFSLMQESTSPRR

SEQ ID NO: 109793 - protein, 15 aa, Artificial Sequence
  Description of Artificial Sequence: Synthetic peptide
  Seed: PRMCSLMQGSTLPRR
PRMFSLMQESTTPRR

SEQ ID NO: 109794 - protein, 15 aa, Artificial Sequence
  Description of Artificial Sequence: Synthetic peptide
  Seed: PRMCSLMQGSTLPRR
PRMFSLMQESTVPRR

SEQ ID NO: 109795 - protein, 15 aa, Artificial Sequence
  Description of Artificial Sequence: Synthetic peptide
  Seed: PRMCSLMQGSTLPRR
PRMFSLMQFSTAPRR

SEQ ID NO: 109796 - protein, 15 aa, Artificial Sequence
  Description of Artificial Sequence: Synthetic peptide
  Seed: PRMCSLMQGSTLPRR
PRMFSLMQFSTFPRR

SEQ ID NO: 109797 - protein, 15 aa, Artificial Sequence
  Description of Artificial Sequence: Synthetic peptide
  Seed: PRMCSLMQGSTLPRR
PRMFSLMQFSTIPRR

SEQ ID NO: 109798 - protein, 15 aa, Artificial Sequence
  Description of Artificial Sequence: Synthetic peptide
  Seed: PRMCSLMQGSTLPRR
PRMFSLMQFSTLPRR

SEQ ID NO: 109799 - protein, 15 aa, Artificial Sequence
  Description of Artificial Sequence: Synthetic peptide
  Seed: PRMCSLMQGSTLPRR
PRMFSLMQFSTMPRR

SEQ ID NO: 109800 - protein, 15 aa, Artificial Sequence
  Description of Artificial Sequence: Synthetic peptide
  Seed: PRMCSLMQGSTLPRR
PRMFSLMQFSTNPRR

SEQ ID NO: 109801 - protein, 15 aa, Artificial Sequence
  Description of Artificial Sequence: Synthetic peptide
  Seed: PRMCSLMQGSTLPRR
PRMFSLMQFSTSPRR

SEQ ID NO: 109802 - protein, 15 aa, Artificial Sequence
  Description of Artificial Sequence: Synthetic peptide
  Seed: PRMCSLMQGSTLPRR
PRMFSLMQFSTTPRR

SEQ ID NO: 109803 - protein, 15 aa, Artificial Sequence
  Description of Artificial Sequence: Synthetic peptide
  Seed: PRMCSLMQGSTLPRR
PRMFSLMQFSTVPRR

SEQ ID NO: 109804 - protein, 15 aa, Artificial Sequence
  Description of Artificial Sequence: Synthetic peptide
  Seed: PRMCSLMQGSTLPRR
PRMFSLMQGSTAPRR

SEQ ID NO: 109805 - protein, 15 aa, Artificial Sequence
  Description of Artificial Sequence: Synthetic peptide
  Seed: PRMCSLMQGSTLPRR
PRMFSLMQGSTCPRR

SEQ ID NO: 109806 - protein, 15 aa, Artificial Sequence
  Description of Artificial Sequence: Synthetic peptide
  Seed: PRMCSLMQGSTLPRR
PRMFSLMQGSTDPRR

SEQ ID NO: 109807 - protein, 15 aa, Artificial Sequence
  Description of Artificial Sequence: Synthetic peptide
  Seed: PRMCSLMQGSTLPRR
PRMFSLMQGSTEPRR

SEQ ID NO: 109808 - protein, 15 aa, Artificial Sequence
  Description of Artificial Sequence: Synthetic peptide
  Seed: PRMCSLMQGSTLPRR
PRMFSLMQGSTFPRR

SEQ ID NO: 109809 - protein, 15 aa, Artificial Sequence
  Description of Artificial Sequence: Synthetic peptide
  Seed: PRMCSLMQGSTLPRR
PRMFSLMQGSTGPRR

SEQ ID NO: 109810 - protein, 15 aa, Artificial Sequence
  Description of Artificial Sequence: Synthetic peptide
  Seed: PRMCSLMQGSTLPRR
PRMFSLMQGSTHPRR

SEQ ID NO: 109811 - protein, 15 aa, Artificial Sequence
  Description of Artificial Sequence: Synthetic peptide
  Seed: PRMCSLMQGSTLPRR
PRMFSLMQGSTIPRR

SEQ ID NO: 109812 - protein, 15 aa, Artificial Sequence
  Description of Artificial Sequence: Synthetic peptide
  Seed: PRMCSLMQGSTLPRR
PRMFSLMQGSTKPRR

SEQ ID NO: 109813 - protein, 15 aa, Artificial Sequence
  Description of Artificial Sequence: Synthetic peptide
  Seed: PRMCSLMQGSTLPRR
PRMFSLMQGSTLPRR

SEQ ID NO: 109814 - protein, 15 aa, Artificial Sequence
  Description of Artificial Sequence: Synthetic peptide
  Seed: PRMCSLMQGSTLPRR
PRMFSLMQGSTMPRR

SEQ ID NO: 109815 - protein, 15 aa, Artificial Sequence
  Description of Artificial Sequence: Synthetic peptide
  Seed: PRMCSLMQGSTLPRR
PRMFSLMQGSTNPRR

SEQ ID NO: 109816 - protein, 15 aa, Artificial Sequence
  Description of Artificial Sequence: Synthetic peptide
  Seed: PRMCSLMQGSTLPRR
PRMFSLMQGSTPPRR

SEQ ID NO: 109817 - protein, 15 aa, Artificial Sequence
  Description of Artificial Sequence: Synthetic peptide
  Seed: PRMCSLMQGSTLPRR
PRMFSLMQGSTQPRR

SEQ ID NO: 109818 - protein, 15 aa, Artificial Sequence
  Description of Artificial Sequence: Synthetic peptide
  Seed: PRMCSLMQGSTLPRR
PRMFSLMQGSTRPRR

SEQ ID NO: 109819 - protein, 15 aa, Artificial Sequence
  Description of Artificial Sequence: Synthetic peptide
  Seed: PRMCSLMQGSTLPRR
PRMFSLMQGSTSPRR

SEQ ID NO: 109820 - protein, 15 aa, Artificial Sequence
  Description of Artificial Sequence: Synthetic peptide
  Seed: PRMCSLMQGSTLPRR
PRMFSLMQGSTTPRR

SEQ ID NO: 109821 - protein, 15 aa, Artificial Sequence
  Description of Artificial Sequence: Synthetic peptide
  Seed: PRMCSLMQGSTLPRR
PRMFSLMQGSTVPRR

SEQ ID NO: 109822 - protein, 15 aa, Artificial Sequence
  Description of Artificial Sequence: Synthetic peptide
  Seed: PRMCSLMQGSTLPRR
PRMFSLMQGSTWPRR

SEQ ID NO: 109823 - protein, 15 aa, Artificial Sequence
  Description of Artificial Sequence: Synthetic peptide
  Seed: PRMCSLMQGSTLPRR
PRMFSLMQGSTYPRR

SEQ ID NO: 109824 - protein, 15 aa, Artificial Sequence
  Description of Artificial Sequence: Synthetic peptide
  Seed: PRMCSLMQGSTLPRR
PRMFSLMQHSTAPRR

SEQ ID NO: 109825 - protein, 15 aa, Artificial Sequence
  Description of Artificial Sequence: Synthetic peptide
  Seed: PRMCSLMQGSTLPRR
PRMFSLMQHSTFPRR

SEQ ID NO: 109826 - protein, 15 aa, Artificial Sequence
  Description of Artificial Sequence: Synthetic peptide
  Seed: PRMCSLMQGSTLPRR
PRMFSLMQHSTIPRR

SEQ ID NO: 109827 - protein, 15 aa, Artificial Sequence
  Description of Artificial Sequence: Synthetic peptide
  Seed: PRMCSLMQGSTLPRR
PRMFSLMQHSTLPRR

SEQ ID NO: 109828 - protein, 15 aa, Artificial Sequence
  Description of Artificial Sequence: Synthetic peptide
  Seed: PRMCSLMQGSTLPRR
PRMFSLMQHSTMPRR

SEQ ID NO: 109829 - protein, 15 aa, Artificial Sequence
  Description of Artificial Sequence: Synthetic peptide
  Seed: PRMCSLMQGSTLPRR
PRMFSLMQHSTNPRR

SEQ ID NO: 109830 - protein, 15 aa, Artificial Sequence
  Description of Artificial Sequence: Synthetic peptide
  Seed: PRMCSLMQGSTLPRR
PRMFSLMQHSTSPRR

SEQ ID NO: 109831 - protein, 15 aa, Artificial Sequence
  Description of Artificial Sequence: Synthetic peptide
  Seed: PRMCSLMQGSTLPRR
PRMFSLMQHSTTPRR

SEQ ID NO: 109832 - protein, 15 aa, Artificial Sequence
  Description of Artificial Sequence: Synthetic peptide
  Seed: PRMCSLMQGSTLPRR
PRMFSLMQHSTVPRR

SEQ ID NO: 109833 - protein, 15 aa, Artificial Sequence
  Description of Artificial Sequence: Synthetic peptide
  Seed: PRMCSLMQGSTLPRR
PRMFSLMQISTAPRR

SEQ ID NO: 109834 - protein, 15 aa, Artificial Sequence
  Description of Artificial Sequence: Synthetic peptide
  Seed: PRMCSLMQGSTLPRR
PRMFSLMQISTCPRR

SEQ ID NO: 109835 - protein, 15 aa, Artificial Sequence
  Description of Artificial Sequence: Synthetic peptide
  Seed: PRMCSLMQGSTLPRR
PRMFSLMQISTDPRR

SEQ ID NO: 109836 - protein, 15 aa, Artificial Sequence
  Description of Artificial Sequence: Synthetic peptide
  Seed: PRMCSLMQGSTLPRR
PRMFSLMQISTEPRR

SEQ ID NO: 109837 - protein, 15 aa, Artificial Sequence
  Description of Artificial Sequence: Synthetic peptide
  Seed: PRMCSLMQGSTLPRR
PRMFSLMQISTFPRR

SEQ ID NO: 109838 - protein, 15 aa, Artificial Sequence
  Description of Artificial Sequence: Synthetic peptide
  Seed: PRMCSLMQGSTLPRR
PRMFSLMQISTGPRR

SEQ ID NO: 109839 - protein, 15 aa, Artificial Sequence
  Description of Artificial Sequence: Synthetic peptide
  Seed: PRMCSLMQGSTLPRR
PRMFSLMQISTHPRR

SEQ ID NO: 109840 - protein, 15 aa, Artificial Sequence
  Description of Artificial Sequence: Synthetic peptide
  Seed: PRMCSLMQGSTLPRR
PRMFSLMQISTIPRR

SEQ ID NO: 109841 - protein, 15 aa, Artificial Sequence
  Description of Artificial Sequence: Synthetic peptide
  Seed: PRMCSLMQGSTLPRR
PRMFSLMQISTKPRR

SEQ ID NO: 109842 - protein, 15 aa, Artificial Sequence
  Description of Artificial Sequence: Synthetic peptide
  Seed: PRMCSLMQGSTLPRR
PRMFSLMQISTLPRR

SEQ ID NO: 109843 - protein, 15 aa, Artificial Sequence
  Description of Artificial Sequence: Synthetic peptide
  Seed: PRMCSLMQGSTLPRR
PRMFSLMQISTMPRR

SEQ ID NO: 109844 - protein, 15 aa, Artificial Sequence
  Description of Artificial Sequence: Synthetic peptide
  Seed: PRMCSLMQGSTLPRR
PRMFSLMQISTNPRR

SEQ ID NO: 109845 - protein, 15 aa, Artificial Sequence
  Description of Artificial Sequence: Synthetic peptide
  Seed: PRMCSLMQGSTLPRR
PRMFSLMQISTPPRR

SEQ ID NO: 109846 - protein, 15 aa, Artificial Sequence
  Description of Artificial Sequence: Synthetic peptide
  Seed: PRMCSLMQGSTLPRR
PRMFSLMQISTQPRR

SEQ ID NO: 109847 - protein, 15 aa, Artificial Sequence
  Description of Artificial Sequence: Synthetic peptide
  Seed: PRMCSLMQGSTLPRR
PRMFSLMQISTRPRR

SEQ ID NO: 109848 - protein, 15 aa, Artificial Sequence
  Description of Artificial Sequence: Synthetic peptide
  Seed: PRMCSLMQGSTLPRR
PRMFSLMQISTSPRR

SEQ ID NO: 109849 - protein, 15 aa, Artificial Sequence
  Description of Artificial Sequence: Synthetic peptide
  Seed: PRMCSLMQGSTLPRR
PRMFSLMQISTTPRR

SEQ ID NO: 109850 - protein, 15 aa, Artificial Sequence
  Description of Artificial Sequence: Synthetic peptide
  Seed: PRMCSLMQGSTLPRR
PRMFSLMQISTVPRR

SEQ ID NO: 109851 - protein, 15 aa, Artificial Sequence
  Description of Artificial Sequence: Synthetic peptide
  Seed: PRMCSLMQGSTLPRR
PRMFSLMQISTWPRR

SEQ ID NO: 109852 - protein, 15 aa, Artificial Sequence
  Description of Artificial Sequence: Synthetic peptide
  Seed: PRMCSLMQGSTLPRR
PRMFSLMQISTYPRR

SEQ ID NO: 109853 - protein, 15 aa, Artificial Sequence
  Description of Artificial Sequence: Synthetic peptide
  Seed: PRMCSLMQGSTLPRR
PRMFSLMQKSTLPRR

SEQ ID NO: 109854 - protein, 15 aa, Artificial Sequence
  Description of Artificial Sequence: Synthetic peptide
  Seed: PRMCSLMQGSTLPRR
PRMFSLMQKSTVPRR

SEQ ID NO: 109855 - protein, 15 aa, Artificial Sequence
  Description of Artificial Sequence: Synthetic peptide
  Seed: PRMCSLMQGSTLPRR
PRMFSLMQLSTAPRR

SEQ ID NO: 109856 - protein, 15 aa, Artificial Sequence
  Description of Artificial Sequence: Synthetic peptide
  Seed: PRMCSLMQGSTLPRR
PRMFSLMQLSTCPRR

SEQ ID NO: 109857 - protein, 15 aa, Artificial Sequence
  Description of Artificial Sequence: Synthetic peptide
  Seed: PRMCSLMQGSTLPRR
PRMFSLMQLSTDPRR

SEQ ID NO: 109858 - protein, 15 aa, Artificial Sequence
  Description of Artificial Sequence: Synthetic peptide
  Seed: PRMCSLMQGSTLPRR
PRMFSLMQLSTEPRR

SEQ ID NO: 109859 - protein, 15 aa, Artificial Sequence
  Description of Artificial Sequence: Synthetic peptide
  Seed: PRMCSLMQGSTLPRR
PRMFSLMQLSTFPRR

SEQ ID NO: 109860 - protein, 15 aa, Artificial Sequence
  Description of Artificial Sequence: Synthetic peptide
  Seed: PRMCSLMQGSTLPRR
PRMFSLMQLSTGPRR

SEQ ID NO: 109861 - protein, 15 aa, Artificial Sequence
  Description of Artificial Sequence: Synthetic peptide
  Seed: PRMCSLMQGSTLPRR
PRMFSLMQLSTHPRR

SEQ ID NO: 109862 - protein, 15 aa, Artificial Sequence
  Description of Artificial Sequence: Synthetic peptide
  Seed: PRMCSLMQGSTLPRR
PRMFSLMQLSTIPRR

SEQ ID NO: 109863 - protein, 15 aa, Artificial Sequence
  Description of Artificial Sequence: Synthetic peptide
  Seed: PRMCSLMQGSTLPRR
PRMFSLMQLSTKPRR

SEQ ID NO: 109864 - protein, 15 aa, Artificial Sequence
  Description of Artificial Sequence: Synthetic peptide
  Seed: PRMCSLMQGSTLPRR
PRMFSLMQLSTLPRR

SEQ ID NO: 109865 - protein, 15 aa, Artificial Sequence
  Description of Artificial Sequence: Synthetic peptide
  Seed: PRMCSLMQGSTLPRR
PRMFSLMQLSTMPRR

SEQ ID NO: 109866 - protein, 15 aa, Artificial Sequence
  Description of Artificial Sequence: Synthetic peptide
  Seed: PRMCSLMQGSTLPRR
PRMFSLMQLSTNPRR

SEQ ID NO: 109867 - protein, 15 aa, Artificial Sequence
  Description of Artificial Sequence: Synthetic peptide
  Seed: PRMCSLMQGSTLPRR
PRMFSLMQLSTPPRR

SEQ ID NO: 109868 - protein, 15 aa, Artificial Sequence
  Description of Artificial Sequence: Synthetic peptide
  Seed: PRMCSLMQGSTLPRR
PRMFSLMQLSTQPRR

SEQ ID NO: 109869 - protein, 15 aa, Artificial Sequence
  Description of Artificial Sequence: Synthetic peptide
  Seed: PRMCSLMQGSTLPRR
PRMFSLMQLSTSPRR

SEQ ID NO: 109870 - protein, 15 aa, Artificial Sequence
  Description of Artificial Sequence: Synthetic peptide
  Seed: PRMCSLMQGSTLPRR
PRMFSLMQLSTTPRR

SEQ ID NO: 109871 - protein, 15 aa, Artificial Sequence
  Description of Artificial Sequence: Synthetic peptide
  Seed: PRMCSLMQGSTLPRR
PRMFSLMQLSTVPRR

SEQ ID NO: 109872 - protein, 15 aa, Artificial Sequence
  Description of Artificial Sequence: Synthetic peptide
  Seed: PRMCSLMQGSTLPRR
PRMFSLMQMSTAPRR

SEQ ID NO: 109873 - protein, 15 aa, Artificial Sequence
  Description of Artificial Sequence: Synthetic peptide
  Seed: PRMCSLMQGSTLPRR
PRMFSLMQMSTCPRR

SEQ ID NO: 109874 - protein, 15 aa, Artificial Sequence
  Description of Artificial Sequence: Synthetic peptide
  Seed: PRMCSLMQGSTLPRR
PRMFSLMQMSTDPRR

SEQ ID NO: 109875 - protein, 15 aa, Artificial Sequence
  Description of Artificial Sequence: Synthetic peptide
  Seed: PRMCSLMQGSTLPRR
PRMFSLMQMSTEPRR

SEQ ID NO: 109876 - protein, 15 aa, Artificial Sequence
  Description of Artificial Sequence: Synthetic peptide
  Seed: PRMCSLMQGSTLPRR
PRMFSLMQMSTFPRR

SEQ ID NO: 109877 - protein, 15 aa, Artificial Sequence
  Description of Artificial Sequence: Synthetic peptide
  Seed: PRMCSLMQGSTLPRR
PRMFSLMQMSTGPRR

SEQ ID NO: 109878 - protein, 15 aa, Artificial Sequence
  Description of Artificial Sequence: Synthetic peptide
  Seed: PRMCSLMQGSTLPRR
PRMFSLMQMSTHPRR

SEQ ID NO: 109879 - protein, 15 aa, Artificial Sequence
  Description of Artificial Sequence: Synthetic peptide
  Seed: PRMCSLMQGSTLPRR
PRMFSLMQMSTIPRR

SEQ ID NO: 109880 - protein, 15 aa, Artificial Sequence
  Description of Artificial Sequence: Synthetic peptide
  Seed: PRMCSLMQGSTLPRR
PRMFSLMQMSTKPRR

SEQ ID NO: 109881 - protein, 15 aa, Artificial Sequence
  Description of Artificial Sequence: Synthetic peptide
  Seed: PRMCSLMQGSTLPRR
PRMFSLMQMSTLPRR

SEQ ID NO: 109882 - protein, 15 aa, Artificial Sequence
  Description of Artificial Sequence: Synthetic peptide
  Seed: PRMCSLMQGSTLPRR
PRMFSLMQMSTMPRR

SEQ ID NO: 109883 - protein, 15 aa, Artificial Sequence
  Description of Artificial Sequence: Synthetic peptide
  Seed: PRMCSLMQGSTLPRR
PRMFSLMQMSTNPRR

SEQ ID NO: 109884 - protein, 15 aa, Artificial Sequence
  Description of Artificial Sequence: Synthetic peptide
  Seed: PRMCSLMQGSTLPRR
PRMFSLMQMSTPPRR

SEQ ID NO: 109885 - protein, 15 aa, Artificial Sequence
  Description of Artificial Sequence: Synthetic peptide
  Seed: PRMCSLMQGSTLPRR
PRMFSLMQMSTQPRR

SEQ ID NO: 109886 - protein, 15 aa, Artificial Sequence
  Description of Artificial Sequence: Synthetic peptide
  Seed: PRMCSLMQGSTLPRR
PRMFSLMQMSTSPRR

SEQ ID NO: 109887 - protein, 15 aa, Artificial Sequence
  Description of Artificial Sequence: Synthetic peptide
  Seed: PRMCSLMQGSTLPRR
PRMFSLMQMSTTPRR

SEQ ID NO: 109888 - protein, 15 aa, Artificial Sequence
  Description of Artificial Sequence: Synthetic peptide
  Seed: PRMCSLMQGSTLPRR
PRMFSLMQMSTVPRR

SEQ ID NO: 109889 - protein, 15 aa, Artificial Sequence
  Description of Artificial Sequence: Synthetic peptide
  Seed: PRMCSLMQGSTLPRR
PRMFSLMQNSTAPRR

SEQ ID NO: 109890 - protein, 15 aa, Artificial Sequence
  Description of Artificial Sequence: Synthetic peptide
  Seed: PRMCSLMQGSTLPRR
PRMFSLMQNSTCPRR

SEQ ID NO: 109891 - protein, 15 aa, Artificial Sequence
  Description of Artificial Sequence: Synthetic peptide
  Seed: PRMCSLMQGSTLPRR
PRMFSLMQNSTDPRR

SEQ ID NO: 109892 - protein, 15 aa, Artificial Sequence
  Description of Artificial Sequence: Synthetic peptide
  Seed: PRMCSLMQGSTLPRR
PRMFSLMQNSTEPRR

SEQ ID NO: 109893 - protein, 15 aa, Artificial Sequence
  Description of Artificial Sequence: Synthetic peptide
  Seed: PRMCSLMQGSTLPRR
PRMFSLMQNSTFPRR

SEQ ID NO: 109894 - protein, 15 aa, Artificial Sequence
  Description of Artificial Sequence: Synthetic peptide
  Seed: PRMCSLMQGSTLPRR
PRMFSLMQNSTGPRR

SEQ ID NO: 109895 - protein, 15 aa, Artificial Sequence
  Description of Artificial Sequence: Synthetic peptide
  Seed: PRMCSLMQGSTLPRR
PRMFSLMQNSTHPRR

SEQ ID NO: 109896 - protein, 15 aa, Artificial Sequence
  Description of Artificial Sequence: Synthetic peptide
  Seed: PRMCSLMQGSTLPRR
PRMFSLMQNSTIPRR

SEQ ID NO: 109897 - protein, 15 aa, Artificial Sequence
  Description of Artificial Sequence: Synthetic peptide
  Seed: PRMCSLMQGSTLPRR
PRMFSLMQNSTKPRR

SEQ ID NO: 109898 - protein, 15 aa, Artificial Sequence
  Description of Artificial Sequence: Synthetic peptide
  Seed: PRMCSLMQGSTLPRR
PRMFSLMQNSTLPRR

SEQ ID NO: 109899 - protein, 15 aa, Artificial Sequence
  Description of Artificial Sequence: Synthetic peptide
  Seed: PRMCSLMQGSTLPRR
PRMFSLMQNSTMPRR

SEQ ID NO: 109900 - protein, 15 aa, Artificial Sequence
  Description of Artificial Sequence: Synthetic peptide
  Seed: PRMCSLMQGSTLPRR
PRMFSLMQNSTNPRR

SEQ ID NO: 109901 - protein, 15 aa, Artificial Sequence
  Description of Artificial Sequence: Synthetic peptide
  Seed: PRMCSLMQGSTLPRR
PRMFSLMQNSTPPRR

SEQ ID NO: 109902 - protein, 15 aa, Artificial Sequence
  Description of Artificial Sequence: Synthetic peptide
  Seed: PRMCSLMQGSTLPRR
PRMFSLMQNSTQPRR

SEQ ID NO: 109903 - protein, 15 aa, Artificial Sequence
  Description of Artificial Sequence: Synthetic peptide
  Seed: PRMCSLMQGSTLPRR
PRMFSLMQNSTRPRR

SEQ ID NO: 109904 - protein, 15 aa, Artificial Sequence
  Description of Artificial Sequence: Synthetic peptide
  Seed: PRMCSLMQGSTLPRR
PRMFSLMQNSTSPRR

SEQ ID NO: 109905 - protein, 15 aa, Artificial Sequence
  Description of Artificial Sequence: Synthetic peptide
  Seed: PRMCSLMQGSTLPRR
PRMFSLMQNSTTPRR

SEQ ID NO: 109906 - protein, 15 aa, Artificial Sequence
  Description of Artificial Sequence: Synthetic peptide
  Seed: PRMCSLMQGSTLPRR
PRMFSLMQNSTVPRR

SEQ ID NO: 109907 - protein, 15 aa, Artificial Sequence
  Description of Artificial Sequence: Synthetic peptide
  Seed: PRMCSLMQGSTLPRR
PRMFSLMQNSTWPRR

SEQ ID NO: 109908 - protein, 15 aa, Artificial Sequence
  Description of Artificial Sequence: Synthetic peptide
  Seed: PRMCSLMQGSTLPRR
PRMFSLMQNSTYPRR

SEQ ID NO: 109909 - protein, 15 aa, Artificial Sequence
  Description of Artificial Sequence: Synthetic peptide
  Seed: PRMCSLMQGSTLPRR
PRMFSLMQPSTAPRR

SEQ ID NO: 109910 - protein, 15 aa, Artificial Sequence
  Description of Artificial Sequence: Synthetic peptide
  Seed: PRMCSLMQGSTLPRR
PRMFSLMQPSTCPRR

SEQ ID NO: 109911 - protein, 15 aa, Artificial Sequence
  Description of Artificial Sequence: Synthetic peptide
  Seed: PRMCSLMQGSTLPRR
PRMFSLMQPSTDPRR

SEQ ID NO: 109912 - protein, 15 aa, Artificial Sequence
  Description of Artificial Sequence: Synthetic peptide
  Seed: PRMCSLMQGSTLPRR
PRMFSLMQPSTEPRR

SEQ ID NO: 109913 - protein, 15 aa, Artificial Sequence
  Description of Artificial Sequence: Synthetic peptide
  Seed: PRMCSLMQGSTLPRR
PRMFSLMQPSTFPRR

SEQ ID NO: 109914 - protein, 15 aa, Artificial Sequence
  Description of Artificial Sequence: Synthetic peptide
  Seed: PRMCSLMQGSTLPRR
PRMFSLMQPSTGPRR

SEQ ID NO: 109915 - protein, 15 aa, Artificial Sequence
  Description of Artificial Sequence: Synthetic peptide
  Seed: PRMCSLMQGSTLPRR
PRMFSLMQPSTHPRR

SEQ ID NO: 109916 - protein, 15 aa, Artificial Sequence
  Description of Artificial Sequence: Synthetic peptide
  Seed: PRMCSLMQGSTLPRR
PRMFSLMQPSTIPRR

SEQ ID NO: 109917 - protein, 15 aa, Artificial Sequence
  Description of Artificial Sequence: Synthetic peptide
  Seed: PRMCSLMQGSTLPRR
PRMFSLMQPSTKPRR

SEQ ID NO: 109918 - protein, 15 aa, Artificial Sequence
  Description of Artificial Sequence: Synthetic peptide
  Seed: PRMCSLMQGSTLPRR
PRMFSLMQPSTLPRR

SEQ ID NO: 109919 - protein, 15 aa, Artificial Sequence
  Description of Artificial Sequence: Synthetic peptide
  Seed: PRMCSLMQGSTLPRR
PRMFSLMQPSTMPRR

SEQ ID NO: 109920 - protein, 15 aa, Artificial Sequence
  Description of Artificial Sequence: Synthetic peptide
  Seed: PRMCSLMQGSTLPRR
PRMFSLMQPSTNPRR

SEQ ID NO: 109921 - protein, 15 aa, Artificial Sequence
  Description of Artificial Sequence: Synthetic peptide
  Seed: PRMCSLMQGSTLPRR
PRMFSLMQPSTPPRR

SEQ ID NO: 109922 - protein, 15 aa, Artificial Sequence
  Description of Artificial Sequence: Synthetic peptide
  Seed: PRMCSLMQGSTLPRR
PRMFSLMQPSTQPRR

SEQ ID NO: 109923 - protein, 15 aa, Artificial Sequence
  Description of Artificial Sequence: Synthetic peptide
  Seed: PRMCSLMQGSTLPRR
PRMFSLMQPSTRPRR

SEQ ID NO: 109924 - protein, 15 aa, Artificial Sequence
  Description of Artificial Sequence: Synthetic peptide
  Seed: PRMCSLMQGSTLPRR
PRMFSLMQPSTSPRR

SEQ ID NO: 109925 - protein, 15 aa, Artificial Sequence
  Description of Artificial Sequence: Synthetic peptide
  Seed: PRMCSLMQGSTLPRR
PRMFSLMQPSTTPRR

SEQ ID NO: 109926 - protein, 15 aa, Artificial Sequence
  Description of Artificial Sequence: Synthetic peptide
  Seed: PRMCSLMQGSTLPRR
PRMFSLMQPSTVPRR

SEQ ID NO: 109927 - protein, 15 aa, Artificial Sequence
  Description of Artificial Sequence: Synthetic peptide
  Seed: PRMCSLMQGSTLPRR
PRMFSLMQPSTWPRR

SEQ ID NO: 109928 - protein, 15 aa, Artificial Sequence
  Description of Artificial Sequence: Synthetic peptide
  Seed: PRMCSLMQGSTLPRR
PRMFSLMQPSTYPRR

SEQ ID NO: 109929 - protein, 15 aa, Artificial Sequence
  Description of Artificial Sequence: Synthetic peptide
  Seed: PRMCSLMQGSTLPRR
PRMFSLMQQSTAPRR

SEQ ID NO: 109930 - protein, 15 aa, Artificial Sequence
  Description of Artificial Sequence: Synthetic peptide
  Seed: PRMCSLMQGSTLPRR
PRMFSLMQQSTIPRR

SEQ ID NO: 109931 - protein, 15 aa, Artificial Sequence
  Description of Artificial Sequence: Synthetic peptide
  Seed: PRMCSLMQGSTLPRR
PRMFSLMQQSTLPRR

SEQ ID NO: 109932 - protein, 15 aa, Artificial Sequence
  Description of Artificial Sequence: Synthetic peptide
  Seed: PRMCSLMQGSTLPRR
PRMFSLMQQSTMPRR

SEQ ID NO: 109933 - protein, 15 aa, Artificial Sequence
  Description of Artificial Sequence: Synthetic peptide
  Seed: PRMCSLMQGSTLPRR
PRMFSLMQQSTNPRR

SEQ ID NO: 109934 - protein, 15 aa, Artificial Sequence
  Description of Artificial Sequence: Synthetic peptide
  Seed: PRMCSLMQGSTLPRR
PRMFSLMQQSTSPRR

SEQ ID NO: 109935 - protein, 15 aa, Artificial Sequence
  Description of Artificial Sequence: Synthetic peptide
  Seed: PRMCSLMQGSTLPRR
PRMFSLMQQSTTPRR

SEQ ID NO: 109936 - protein, 15 aa, Artificial Sequence
  Description of Artificial Sequence: Synthetic peptide
  Seed: PRMCSLMQGSTLPRR
PRMFSLMQQSTVPRR

SEQ ID NO: 109937 - protein, 15 aa, Artificial Sequence
  Description of Artificial Sequence: Synthetic peptide
  Seed: PRMCSLMQGSTLPRR
PRMFSLMQSSTAPRR

SEQ ID NO: 109938 - protein, 15 aa, Artificial Sequence
  Description of Artificial Sequence: Synthetic peptide
  Seed: PRMCSLMQGSTLPRR
PRMFSLMQSSTCPRR

SEQ ID NO: 109939 - protein, 15 aa, Artificial Sequence
  Description of Artificial Sequence: Synthetic peptide
  Seed: PRMCSLMQGSTLPRR
PRMFSLMQSSTDPRR

SEQ ID NO: 109940 - protein, 15 aa, Artificial Sequence
  Description of Artificial Sequence: Synthetic peptide
  Seed: PRMCSLMQGSTLPRR
PRMFSLMQSSTEPRR

SEQ ID NO: 109941 - protein, 15 aa, Artificial Sequence
  Description of Artificial Sequence: Synthetic peptide
  Seed: PRMCSLMQGSTLPRR
PRMFSLMQSSTFPRR

SEQ ID NO: 109942 - protein, 15 aa, Artificial Sequence
  Description of Artificial Sequence: Synthetic peptide
  Seed: PRMCSLMQGSTLPRR
PRMFSLMQSSTGPRR

SEQ ID NO: 109943 - protein, 15 aa, Artificial Sequence
  Description of Artificial Sequence: Synthetic peptide
  Seed: PRMCSLMQGSTLPRR
PRMFSLMQSSTHPRR

SEQ ID NO: 109944 - protein, 15 aa, Artificial Sequence
  Description of Artificial Sequence: Synthetic peptide
  Seed: PRMCSLMQGSTLPRR
PRMFSLMQSSTIPRR

SEQ ID NO: 109945 - protein, 15 aa, Artificial Sequence
  Description of Artificial Sequence: Synthetic peptide
  Seed: PRMCSLMQGSTLPRR
PRMFSLMQSSTKPRR

SEQ ID NO: 109946 - protein, 15 aa, Artificial Sequence
  Description of Artificial Sequence: Synthetic peptide
  Seed: PRMCSLMQGSTLPRR
PRMFSLMQSSTLPRR

SEQ ID NO: 109947 - protein, 15 aa, Artificial Sequence
  Description of Artificial Sequence: Synthetic peptide
  Seed: PRMCSLMQGSTLPRR
PRMFSLMQSSTMPRR

SEQ ID NO: 109948 - protein, 15 aa, Artificial Sequence
  Description of Artificial Sequence: Synthetic peptide
  Seed: PRMCSLMQGSTLPRR
PRMFSLMQSSTNPRR

SEQ ID NO: 109949 - protein, 15 aa, Artificial Sequence
  Description of Artificial Sequence: Synthetic peptide
  Seed: PRMCSLMQGSTLPRR
PRMFSLMQSSTPPRR

SEQ ID NO: 109950 - protein, 15 aa, Artificial Sequence
  Description of Artificial Sequence: Synthetic peptide
  Seed: PRMCSLMQGSTLPRR
PRMFSLMQSSTQPRR

SEQ ID NO: 109951 - protein, 15 aa, Artificial Sequence
  Description of Artificial Sequence: Synthetic peptide
  Seed: PRMCSLMQGSTLPRR
PRMFSLMQSSTRPRR

SEQ ID NO: 109952 - protein, 15 aa, Artificial Sequence
  Description of Artificial Sequence: Synthetic peptide
  Seed: PRMCSLMQGSTLPRR
PRMFSLMQSSTSPRR

SEQ ID NO: 109953 - protein, 15 aa, Artificial Sequence
  Description of Artificial Sequence: Synthetic peptide
  Seed: PRMCSLMQGSTLPRR
PRMFSLMQSSTTPRR

SEQ ID NO: 109954 - protein, 15 aa, Artificial Sequence
  Description of Artificial Sequence: Synthetic peptide
  Seed: PRMCSLMQGSTLPRR
PRMFSLMQSSTVPRR

SEQ ID NO: 109955 - protein, 15 aa, Artificial Sequence
  Description of Artificial Sequence: Synthetic peptide
  Seed: PRMCSLMQGSTLPRR
PRMFSLMQSSTWPRR

SEQ ID NO: 109956 - protein, 15 aa, Artificial Sequence
  Description of Artificial Sequence: Synthetic peptide
  Seed: PRMCSLMQGSTLPRR
PRMFSLMQSSTYPRR

SEQ ID NO: 109957 - protein, 15 aa, Artificial Sequence
  Description of Artificial Sequence: Synthetic peptide
  Seed: PRMCSLMQGSTLPRR
PRMFSLMQTSTAPRR

SEQ ID NO: 109958 - protein, 15 aa, Artificial Sequence
  Description of Artificial Sequence: Synthetic peptide
  Seed: PRMCSLMQGSTLPRR
PRMFSLMQTSTCPRR

SEQ ID NO: 109959 - protein, 15 aa, Artificial Sequence
  Description of Artificial Sequence: Synthetic peptide
  Seed: PRMCSLMQGSTLPRR
PRMFSLMQTSTDPRR

SEQ ID NO: 109960 - protein, 15 aa, Artificial Sequence
  Description of Artificial Sequence: Synthetic peptide
  Seed: PRMCSLMQGSTLPRR
PRMFSLMQTSTEPRR

SEQ ID NO: 109961 - protein, 15 aa, Artificial Sequence
  Description of Artificial Sequence: Synthetic peptide
  Seed: PRMCSLMQGSTLPRR
PRMFSLMQTSTFPRR

SEQ ID NO: 109962 - protein, 15 aa, Artificial Sequence
  Description of Artificial Sequence: Synthetic peptide
  Seed: PRMCSLMQGSTLPRR
PRMFSLMQTSTGPRR

SEQ ID NO: 109963 - protein, 15 aa, Artificial Sequence
  Description of Artificial Sequence: Synthetic peptide
  Seed: PRMCSLMQGSTLPRR
PRMFSLMQTSTHPRR

SEQ ID NO: 109964 - protein, 15 aa, Artificial Sequence
  Description of Artificial Sequence: Synthetic peptide
  Seed: PRMCSLMQGSTLPRR
PRMFSLMQTSTIPRR

SEQ ID NO: 109965 - protein, 15 aa, Artificial Sequence
  Description of Artificial Sequence: Synthetic peptide
  Seed: PRMCSLMQGSTLPRR
PRMFSLMQTSTKPRR

SEQ ID NO: 109966 - protein, 15 aa, Artificial Sequence
  Description of Artificial Sequence: Synthetic peptide
  Seed: PRMCSLMQGSTLPRR
PRMFSLMQTSTLPRR

SEQ ID NO: 109967 - protein, 15 aa, Artificial Sequence
  Description of Artificial Sequence: Synthetic peptide
  Seed: PRMCSLMQGSTLPRR
PRMFSLMQTSTMPRR

SEQ ID NO: 109968 - protein, 15 aa, Artificial Sequence
  Description of Artificial Sequence: Synthetic peptide
  Seed: PRMCSLMQGSTLPRR
PRMFSLMQTSTNPRR

SEQ ID NO: 109969 - protein, 15 aa, Artificial Sequence
  Description of Artificial Sequence: Synthetic peptide
  Seed: PRMCSLMQGSTLPRR
PRMFSLMQTSTPPRR

SEQ ID NO: 109970 - protein, 15 aa, Artificial Sequence
  Description of Artificial Sequence: Synthetic peptide
  Seed: PRMCSLMQGSTLPRR
PRMFSLMQTSTQPRR

SEQ ID NO: 109971 - protein, 15 aa, Artificial Sequence
  Description of Artificial Sequence: Synthetic peptide
  Seed: PRMCSLMQGSTLPRR
PRMFSLMQTSTRPRR

SEQ ID NO: 109972 - protein, 15 aa, Artificial Sequence
  Description of Artificial Sequence: Synthetic peptide
  Seed: PRMCSLMQGSTLPRR
PRMFSLMQTSTSPRR

SEQ ID NO: 109973 - protein, 15 aa, Artificial Sequence
  Description of Artificial Sequence: Synthetic peptide
  Seed: PRMCSLMQGSTLPRR
PRMFSLMQTSTTPRR

SEQ ID NO: 109974 - protein, 15 aa, Artificial Sequence
  Description of Artificial Sequence: Synthetic peptide
  Seed: PRMCSLMQGSTLPRR
PRMFSLMQTSTVPRR

SEQ ID NO: 109975 - protein, 15 aa, Artificial Sequence
  Description of Artificial Sequence: Synthetic peptide
  Seed: PRMCSLMQGSTLPRR
PRMFSLMQTSTWPRR

SEQ ID NO: 109976 - protein, 15 aa, Artificial Sequence
  Description of Artificial Sequence: Synthetic peptide
  Seed: PRMCSLMQGSTLPRR
PRMFSLMQTSTYPRR

SEQ ID NO: 109977 - protein, 15 aa, Artificial Sequence
  Description of Artificial Sequence: Synthetic peptide
  Seed: PRMCSLMQGSTLPRR
PRMFSLMQVSTAPRR

SEQ ID NO: 109978 - protein, 15 aa, Artificial Sequence
  Description of Artificial Sequence: Synthetic peptide
  Seed: PRMCSLMQGSTLPRR
PRMFSLMQVSTCPRR

SEQ ID NO: 109979 - protein, 15 aa, Artificial Sequence
  Description of Artificial Sequence: Synthetic peptide
  Seed: PRMCSLMQGSTLPRR
PRMFSLMQVSTDPRR

SEQ ID NO: 109980 - protein, 15 aa, Artificial Sequence
  Description of Artificial Sequence: Synthetic peptide
  Seed: PRMCSLMQGSTLPRR
PRMFSLMQVSTEPRR

SEQ ID NO: 109981 - protein, 15 aa, Artificial Sequence
  Description of Artificial Sequence: Synthetic peptide
  Seed: PRMCSLMQGSTLPRR
PRMFSLMQVSTFPRR

SEQ ID NO: 109982 - protein, 15 aa, Artificial Sequence
  Description of Artificial Sequence: Synthetic peptide
  Seed: PRMCSLMQGSTLPRR
PRMFSLMQVSTGPRR

SEQ ID NO: 109983 - protein, 15 aa, Artificial Sequence
  Description of Artificial Sequence: Synthetic peptide
  Seed: PRMCSLMQGSTLPRR
PRMFSLMQVSTHPRR

SEQ ID NO: 109984 - protein, 15 aa, Artificial Sequence
  Description of Artificial Sequence: Synthetic peptide
  Seed: PRMCSLMQGSTLPRR
PRMFSLMQVSTIPRR

SEQ ID NO: 109985 - protein, 15 aa, Artificial Sequence
  Description of Artificial Sequence: Synthetic peptide
  Seed: PRMCSLMQGSTLPRR
PRMFSLMQVSTKPRR

SEQ ID NO: 109986 - protein, 15 aa, Artificial Sequence
  Description of Artificial Sequence: Synthetic peptide
  Seed: PRMCSLMQGSTLPRR
PRMFSLMQVSTLPRR

SEQ ID NO: 109987 - protein, 15 aa, Artificial Sequence
  Description of Artificial Sequence: Synthetic peptide
  Seed: PRMCSLMQGSTLPRR
PRMFSLMQVSTMPRR

SEQ ID NO: 109988 - protein, 15 aa, Artificial Sequence
  Description of Artificial Sequence: Synthetic peptide
  Seed: PRMCSLMQGSTLPRR
PRMFSLMQVSTNPRR

SEQ ID NO: 109989 - protein, 15 aa, Artificial Sequence
  Description of Artificial Sequence: Synthetic peptide
  Seed: PRMCSLMQGSTLPRR
PRMFSLMQVSTPPRR

SEQ ID NO: 109990 - protein, 15 aa, Artificial Sequence
  Description of Artificial Sequence: Synthetic peptide
  Seed: PRMCSLMQGSTLPRR
PRMFSLMQVSTQPRR

SEQ ID NO: 109991 - protein, 15 aa, Artificial Sequence
  Description of Artificial Sequence: Synthetic peptide
  Seed: PRMCSLMQGSTLPRR
PRMFSLMQVSTRPRR

SEQ ID NO: 109992 - protein, 15 aa, Artificial Sequence
  Description of Artificial Sequence: Synthetic peptide
  Seed: PRMCSLMQGSTLPRR
PRMFSLMQVSTSPRR

SEQ ID NO: 109993 - protein, 15 aa, Artificial Sequence
  Description of Artificial Sequence: Synthetic peptide
  Seed: PRMCSLMQGSTLPRR
PRMFSLMQVSTTPRR

SEQ ID NO: 109994 - protein, 15 aa, Artificial Sequence
  Description of Artificial Sequence: Synthetic peptide
  Seed: PRMCSLMQGSTLPRR
PRMFSLMQVSTVPRR

SEQ ID NO: 109995 - protein, 15 aa, Artificial Sequence
  Description of Artificial Sequence: Synthetic peptide
  Seed: PRMCSLMQGSTLPRR
PRMFSLMQVSTWPRR

SEQ ID NO: 109996 - protein, 15 aa, Artificial Sequence
  Description of Artificial Sequence: Synthetic peptide
  Seed: PRMCSLMQGSTLPRR
PRMFSLMQVSTYPRR

SEQ ID NO: 109997 - protein, 15 aa, Artificial Sequence
  Description of Artificial Sequence: Synthetic peptide
  Seed: PRMCSLMQGSTLPRR
PRMFSLMQWSTAPRR

SEQ ID NO: 109998 - protein, 15 aa, Artificial Sequence
  Description of Artificial Sequence: Synthetic peptide
  Seed: PRMCSLMQGSTLPRR
PRMFSLMQWSTIPRR

SEQ ID NO: 109999 - protein, 15 aa, Artificial Sequence
  Description of Artificial Sequence: Synthetic peptide
  Seed: PRMCSLMQGSTLPRR
PRMFSLMQWSTLPRR

SEQ ID NO: 110000 - protein, 15 aa, Artificial Sequence
  Description of Artificial Sequence: Synthetic peptide
  Seed: PRMCSLMQGSTLPRR
PRMFSLMQWSTMPRR

SEQ ID NO: 110001 - protein, 15 aa, Artificial Sequence
  Description of Artificial Sequence: Synthetic peptide
  Seed: PRMCSLMQGSTLPRR
PRMFSLMQWSTSPRR

SEQ ID NO: 110002 - protein, 15 aa, Artificial Sequence
  Description of Artificial Sequence: Synthetic peptide
  Seed: PRMCSLMQGSTLPRR
PRMFSLMQWSTVPRR

SEQ ID NO: 110003 - protein, 15 aa, Artificial Sequence
  Description of Artificial Sequence: Synthetic peptide
  Seed: PRMCSLMQGSTLPRR
PRMFSLMQYSTAPRR

SEQ ID NO: 110004 - protein, 15 aa, Artificial Sequence
  Description of Artificial Sequence: Synthetic peptide
  Seed: PRMCSLMQGSTLPRR
PRMFSLMQYSTIPRR

SEQ ID NO: 110005 - protein, 15 aa, Artificial Sequence
  Description of Artificial Sequence: Synthetic peptide
  Seed: PRMCSLMQGSTLPRR
PRMFSLMQYSTLPRR

SEQ ID NO: 110006 - protein, 15 aa, Artificial Sequence
  Description of Artificial Sequence: Synthetic peptide
  Seed: PRMCSLMQGSTLPRR
PRMFSLMQYSTSPRR

SEQ ID NO: 110007 - protein, 15 aa, Artificial Sequence
  Description of Artificial Sequence: Synthetic peptide
  Seed: PRMCSLMQGSTLPRR
PRMFSLMQYSTVPRR

SEQ ID NO: 110008 - protein, 15 aa, Artificial Sequence
  Description of Artificial Sequence: Synthetic peptide
  Seed: PRMCSLMQGSTLPRR
PRMFSLNQASTAPRR

SEQ ID NO: 110009 - protein, 15 aa, Artificial Sequence
  Description of Artificial Sequence: Synthetic peptide
  Seed: PRMCSLMQGSTLPRR
PRMFSLNQASTFPRR

SEQ ID NO: 110010 - protein, 15 aa, Artificial Sequence
  Description of Artificial Sequence: Synthetic peptide
  Seed: PRMCSLMQGSTLPRR
PRMFSLNQASTIPRR

SEQ ID NO: 110011 - protein, 15 aa, Artificial Sequence
  Description of Artificial Sequence: Synthetic peptide
  Seed: PRMCSLMQGSTLPRR
PRMFSLNQASTLPRR

SEQ ID NO: 110012 - protein, 15 aa, Artificial Sequence
  Description of Artificial Sequence: Synthetic peptide
  Seed: PRMCSLMQGSTLPRR
PRMFSLNQASTMPRR

SEQ ID NO: 110013 - protein, 15 aa, Artificial Sequence
  Description of Artificial Sequence: Synthetic peptide
  Seed: PRMCSLMQGSTLPRR
PRMFSLNQASTSPRR

SEQ ID NO: 110014 - protein, 15 aa, Artificial Sequence
  Description of Artificial Sequence: Synthetic peptide
  Seed: PRMCSLMQGSTLPRR
PRMFSLNQASTTPRR

SEQ ID NO: 110015 - protein, 15 aa, Artificial Sequence
  Description of Artificial Sequence: Synthetic peptide
  Seed: PRMCSLMQGSTLPRR
PRMFSLNQASTVPRR

SEQ ID NO: 110016 - protein, 15 aa, Artificial Sequence
  Description of Artificial Sequence: Synthetic peptide
  Seed: PRMCSLMQGSTLPRR
PRMFSLNQGSTAPRR

SEQ ID NO: 110017 - protein, 15 aa, Artificial Sequence
  Description of Artificial Sequence: Synthetic peptide
  Seed: PRMCSLMQGSTLPRR
PRMFSLNQGSTIPRR

SEQ ID NO: 110018 - protein, 15 aa, Artificial Sequence
  Description of Artificial Sequence: Synthetic peptide
  Seed: PRMCSLMQGSTLPRR
PRMFSLNQGSTLPRR

SEQ ID NO: 110019 - protein, 15 aa, Artificial Sequence
  Description of Artificial Sequence: Synthetic peptide
  Seed: PRMCSLMQGSTLPRR
PRMFSLNQGSTMPRR

SEQ ID NO: 110020 - protein, 15 aa, Artificial Sequence
  Description of Artificial Sequence: Synthetic peptide
  Seed: PRMCSLMQGSTLPRR
PRMFSLNQGSTVPRR

SEQ ID NO: 110021 - protein, 15 aa, Artificial Sequence
  Description of Artificial Sequence: Synthetic peptide
  Seed: PRMCSLMQGSTLPRR
PRMFSLNQNSTIPRR

SEQ ID NO: 110022 - protein, 15 aa, Artificial Sequence
  Description of Artificial Sequence: Synthetic peptide
  Seed: PRMCSLMQGSTLPRR
PRMFSLNQNSTLPRR

SEQ ID NO: 110023 - protein, 15 aa, Artificial Sequence
  Description of Artificial Sequence: Synthetic peptide
  Seed: PRMCSLMQGSTLPRR
PRMFSLNQNSTVPRR

SEQ ID NO: 110024 - protein, 15 aa, Artificial Sequence
  Description of Artificial Sequence: Synthetic peptide
  Seed: PRMCSLMQGSTLPRR
PRMFSLNQPSTAPRR

SEQ ID NO: 110025 - protein, 15 aa, Artificial Sequence
  Description of Artificial Sequence: Synthetic peptide
  Seed: PRMCSLMQGSTLPRR
PRMFSLNQPSTIPRR

SEQ ID NO: 110026 - protein, 15 aa, Artificial Sequence
  Description of Artificial Sequence: Synthetic peptide
  Seed: PRMCSLMQGSTLPRR
PRMFSLNQPSTLPRR

SEQ ID NO: 110027 - protein, 15 aa, Artificial Sequence
  Description of Artificial Sequence: Synthetic peptide
  Seed: PRMCSLMQGSTLPRR
PRMFSLNQPSTMPRR

SEQ ID NO: 110028 - protein, 15 aa, Artificial Sequence
  Description of Artificial Sequence: Synthetic peptide
  Seed: PRMCSLMQGSTLPRR
PRMFSLNQPSTVPRR

SEQ ID NO: 110029 - protein, 15 aa, Artificial Sequence
  Description of Artificial Sequence: Synthetic peptide
  Seed: PRMCSLMQGSTLPRR
PRMFSLNQSSTAPRR

SEQ ID NO: 110030 - protein, 15 aa, Artificial Sequence
  Description of Artificial Sequence: Synthetic peptide
  Seed: PRMCSLMQGSTLPRR
PRMFSLNQSSTIPRR

SEQ ID NO: 110031 - protein, 15 aa, Artificial Sequence
  Description of Artificial Sequence: Synthetic peptide
  Seed: PRMCSLMQGSTLPRR
PRMFSLNQSSTLPRR

SEQ ID NO: 110032 - protein, 15 aa, Artificial Sequence
  Description of Artificial Sequence: Synthetic peptide
  Seed: PRMCSLMQGSTLPRR
PRMFSLNQSSTMPRR

SEQ ID NO: 110033 - protein, 15 aa, Artificial Sequence
  Description of Artificial Sequence: Synthetic peptide
  Seed: PRMCSLMQGSTLPRR
PRMFSLNQSSTVPRR

SEQ ID NO: 110034 - protein, 15 aa, Artificial Sequence
  Description of Artificial Sequence: Synthetic peptide
  Seed: PRMCSLMQGSTLPRR
PRMFSLNQTSTIPRR

SEQ ID NO: 110035 - protein, 15 aa, Artificial Sequence
  Description of Artificial Sequence: Synthetic peptide
  Seed: PRMCSLMQGSTLPRR
PRMFSLNQTSTLPRR

SEQ ID NO: 110036 - protein, 15 aa, Artificial Sequence
  Description of Artificial Sequence: Synthetic peptide
  Seed: PRMCSLMQGSTLPRR
PRMFSLNQTSTVPRR

SEQ ID NO: 110037 - protein, 15 aa, Artificial Sequence
  Description of Artificial Sequence: Synthetic peptide
  Seed: PRMCSLMQGSTLPRR
PRMFSLNQVSTAPRR

SEQ ID NO: 110038 - protein, 15 aa, Artificial Sequence
  Description of Artificial Sequence: Synthetic peptide
  Seed: PRMCSLMQGSTLPRR
PRMFSLNQVSTIPRR

SEQ ID NO: 110039 - protein, 15 aa, Artificial Sequence
  Description of Artificial Sequence: Synthetic peptide
  Seed: PRMCSLMQGSTLPRR
PRMFSLNQVSTLPRR

SEQ ID NO: 110040 - protein, 15 aa, Artificial Sequence
  Description of Artificial Sequence: Synthetic peptide
  Seed: PRMCSLMQGSTLPRR
PRMFSLNQVSTVPRR

SEQ ID NO: 110041 - protein, 15 aa, Artificial Sequence
  Description of Artificial Sequence: Synthetic peptide
  Seed: PRMCSLMQGSTLPRR
PRMFSLQQASTAPRR

SEQ ID NO: 110042 - protein, 15 aa, Artificial Sequence
  Description of Artificial Sequence: Synthetic peptide
  Seed: PRMCSLMQGSTLPRR
PRMFSLQQASTCPRR

SEQ ID NO: 110043 - protein, 15 aa, Artificial Sequence
  Description of Artificial Sequence: Synthetic peptide
  Seed: PRMCSLMQGSTLPRR
PRMFSLQQASTFPRR

SEQ ID NO: 110044 - protein, 15 aa, Artificial Sequence
  Description of Artificial Sequence: Synthetic peptide
  Seed: PRMCSLMQGSTLPRR
PRMFSLQQASTGPRR

SEQ ID NO: 110045 - protein, 15 aa, Artificial Sequence
  Description of Artificial Sequence: Synthetic peptide
  Seed: PRMCSLMQGSTLPRR
PRMFSLQQASTHPRR

SEQ ID NO: 110046 - protein, 15 aa, Artificial Sequence
  Description of Artificial Sequence: Synthetic peptide
  Seed: PRMCSLMQGSTLPRR
PRMFSLQQASTIPRR

SEQ ID NO: 110047 - protein, 15 aa, Artificial Sequence
  Description of Artificial Sequence: Synthetic peptide
  Seed: PRMCSLMQGSTLPRR
PRMFSLQQASTKPRR

SEQ ID NO: 110048 - protein, 15 aa, Artificial Sequence
  Description of Artificial Sequence: Synthetic peptide
  Seed: PRMCSLMQGSTLPRR
PRMFSLQQASTLPRR

SEQ ID NO: 110049 - protein, 15 aa, Artificial Sequence
  Description of Artificial Sequence: Synthetic peptide
  Seed: PRMCSLMQGSTLPRR
PRMFSLQQASTMPRR

SEQ ID NO: 110050 - protein, 15 aa, Artificial Sequence
  Description of Artificial Sequence: Synthetic peptide
  Seed: PRMCSLMQGSTLPRR
PRMFSLQQASTNPRR

SEQ ID NO: 110051 - protein, 15 aa, Artificial Sequence
  Description of Artificial Sequence: Synthetic peptide
  Seed: PRMCSLMQGSTLPRR
PRMFSLQQASTPPRR

SEQ ID NO: 110052 - protein, 15 aa, Artificial Sequence
  Description of Artificial Sequence: Synthetic peptide
  Seed: PRMCSLMQGSTLPRR
PRMFSLQQASTQPRR

SEQ ID NO: 110053 - protein, 15 aa, Artificial Sequence
  Description of Artificial Sequence: Synthetic peptide
  Seed: PRMCSLMQGSTLPRR
PRMFSLQQASTRPRR

SEQ ID NO: 110054 - protein, 15 aa, Artificial Sequence
  Description of Artificial Sequence: Synthetic peptide
  Seed: PRMCSLMQGSTLPRR
PRMFSLQQASTSPRR

SEQ ID NO: 110055 - protein, 15 aa, Artificial Sequence
  Description of Artificial Sequence: Synthetic peptide
  Seed: PRMCSLMQGSTLPRR
PRMFSLQQASTTPRR

SEQ ID NO: 110056 - protein, 15 aa, Artificial Sequence
  Description of Artificial Sequence: Synthetic peptide
  Seed: PRMCSLMQGSTLPRR
PRMFSLQQASTVPRR

SEQ ID NO: 110057 - protein, 15 aa, Artificial Sequence
  Description of Artificial Sequence: Synthetic peptide
  Seed: PRMCSLMQGSTLPRR
PRMFSLQQASTWPRR

SEQ ID NO: 110058 - protein, 15 aa, Artificial Sequence
  Description of Artificial Sequence: Synthetic peptide
  Seed: PRMCSLMQGSTLPRR
PRMFSLQQASTYPRR

SEQ ID NO: 110059 - protein, 15 aa, Artificial Sequence
  Description of Artificial Sequence: Synthetic peptide
  Seed: PRMCSLMQGSTLPRR
PRMFSLQQCSTIPRR

SEQ ID NO: 110060 - protein, 15 aa, Artificial Sequence
  Description of Artificial Sequence: Synthetic peptide
  Seed: PRMCSLMQGSTLPRR
PRMFSLQQCSTLPRR

SEQ ID NO: 110061 - protein, 15 aa, Artificial Sequence
  Description of Artificial Sequence: Synthetic peptide
  Seed: PRMCSLMQGSTLPRR
PRMFSLQQCSTVPRR

SEQ ID NO: 110062 - protein, 15 aa, Artificial Sequence
  Description of Artificial Sequence: Synthetic peptide
  Seed: PRMCSLMQGSTLPRR
PRMFSLQQFSTLPRR

SEQ ID NO: 110063 - protein, 15 aa, Artificial Sequence
  Description of Artificial Sequence: Synthetic peptide
  Seed: PRMCSLMQGSTLPRR
PRMFSLQQGSTAPRR

SEQ ID NO: 110064 - protein, 15 aa, Artificial Sequence
  Description of Artificial Sequence: Synthetic peptide
  Seed: PRMCSLMQGSTLPRR
PRMFSLQQGSTCPRR

SEQ ID NO: 110065 - protein, 15 aa, Artificial Sequence
  Description of Artificial Sequence: Synthetic peptide
  Seed: PRMCSLMQGSTLPRR
PRMFSLQQGSTFPRR

SEQ ID NO: 110066 - protein, 15 aa, Artificial Sequence
  Description of Artificial Sequence: Synthetic peptide
  Seed: PRMCSLMQGSTLPRR
PRMFSLQQGSTGPRR

SEQ ID NO: 110067 - protein, 15 aa, Artificial Sequence
  Description of Artificial Sequence: Synthetic peptide
  Seed: PRMCSLMQGSTLPRR
PRMFSLQQGSTIPRR

SEQ ID NO: 110068 - protein, 15 aa, Artificial Sequence
  Description of Artificial Sequence: Synthetic peptide
  Seed: PRMCSLMQGSTLPRR
PRMFSLQQGSTLPRR

SEQ ID NO: 110069 - protein, 15 aa, Artificial Sequence
  Description of Artificial Sequence: Synthetic peptide
  Seed: PRMCSLMQGSTLPRR
PRMFSLQQGSTMPRR

SEQ ID NO: 110070 - protein, 15 aa, Artificial Sequence
  Description of Artificial Sequence: Synthetic peptide
  Seed: PRMCSLMQGSTLPRR
PRMFSLQQGSTNPRR

SEQ ID NO: 110071 - protein, 15 aa, Artificial Sequence
  Description of Artificial Sequence: Synthetic peptide
  Seed: PRMCSLMQGSTLPRR
PRMFSLQQGSTSPRR

SEQ ID NO: 110072 - protein, 15 aa, Artificial Sequence
  Description of Artificial Sequence: Synthetic peptide
  Seed: PRMCSLMQGSTLPRR
PRMFSLQQGSTTPRR

SEQ ID NO: 110073 - protein, 15 aa, Artificial Sequence
  Description of Artificial Sequence: Synthetic peptide
  Seed: PRMCSLMQGSTLPRR
PRMFSLQQGSTVPRR

SEQ ID NO: 110074 - protein, 15 aa, Artificial Sequence
  Description of Artificial Sequence: Synthetic peptide
  Seed: PRMCSLMQGSTLPRR
PRMFSLQQGSTYPRR

SEQ ID NO: 110075 - protein, 15 aa, Artificial Sequence
  Description of Artificial Sequence: Synthetic peptide
  Seed: PRMCSLMQGSTLPRR
PRMFSLQQHSTLPRR

SEQ ID NO: 110076 - protein, 15 aa, Artificial Sequence
  Description of Artificial Sequence: Synthetic peptide
  Seed: PRMCSLMQGSTLPRR
PRMFSLQQISTAPRR

SEQ ID NO: 110077 - protein, 15 aa, Artificial Sequence
  Description of Artificial Sequence: Synthetic peptide
  Seed: PRMCSLMQGSTLPRR
PRMFSLQQISTIPRR

SEQ ID NO: 110078 - protein, 15 aa, Artificial Sequence
  Description of Artificial Sequence: Synthetic peptide
  Seed: PRMCSLMQGSTLPRR
PRMFSLQQISTLPRR

SEQ ID NO: 110079 - protein, 15 aa, Artificial Sequence
  Description of Artificial Sequence: Synthetic peptide
  Seed: PRMCSLMQGSTLPRR
PRMFSLQQISTMPRR

SEQ ID NO: 110080 - protein, 15 aa, Artificial Sequence
  Description of Artificial Sequence: Synthetic peptide
  Seed: PRMCSLMQGSTLPRR
PRMFSLQQISTNPRR

SEQ ID NO: 110081 - protein, 15 aa, Artificial Sequence
  Description of Artificial Sequence: Synthetic peptide
  Seed: PRMCSLMQGSTLPRR
PRMFSLQQISTSPRR

SEQ ID NO: 110082 - protein, 15 aa, Artificial Sequence
  Description of Artificial Sequence: Synthetic peptide
  Seed: PRMCSLMQGSTLPRR
PRMFSLQQISTTPRR

SEQ ID NO: 110083 - protein, 15 aa, Artificial Sequence
  Description of Artificial Sequence: Synthetic peptide
  Seed: PRMCSLMQGSTLPRR
PRMFSLQQISTVPRR

SEQ ID NO: 110084 - protein, 15 aa, Artificial Sequence
  Description of Artificial Sequence: Synthetic peptide
  Seed: PRMCSLMQGSTLPRR
PRMFSLQQLSTAPRR

SEQ ID NO: 110085 - protein, 15 aa, Artificial Sequence
  Description of Artificial Sequence: Synthetic peptide
  Seed: PRMCSLMQGSTLPRR
PRMFSLQQLSTIPRR

SEQ ID NO: 110086 - protein, 15 aa, Artificial Sequence
  Description of Artificial Sequence: Synthetic peptide
  Seed: PRMCSLMQGSTLPRR
PRMFSLQQLSTLPRR

SEQ ID NO: 110087 - protein, 15 aa, Artificial Sequence
  Description of Artificial Sequence: Synthetic peptide
  Seed: PRMCSLMQGSTLPRR
PRMFSLQQLSTNPRR

SEQ ID NO: 110088 - protein, 15 aa, Artificial Sequence
  Description of Artificial Sequence: Synthetic peptide
  Seed: PRMCSLMQGSTLPRR
PRMFSLQQLSTSPRR

SEQ ID NO: 110089 - protein, 15 aa, Artificial Sequence
  Description of Artificial Sequence: Synthetic peptide
  Seed: PRMCSLMQGSTLPRR
PRMFSLQQLSTVPRR

SEQ ID NO: 110090 - protein, 15 aa, Artificial Sequence
  Description of Artificial Sequence: Synthetic peptide
  Seed: PRMCSLMQGSTLPRR
PRMFSLQQMSTAPRR

SEQ ID NO: 110091 - protein, 15 aa, Artificial Sequence
  Description of Artificial Sequence: Synthetic peptide
  Seed: PRMCSLMQGSTLPRR
PRMFSLQQMSTIPRR

SEQ ID NO: 110092 - protein, 15 aa, Artificial Sequence
  Description of Artificial Sequence: Synthetic peptide
  Seed: PRMCSLMQGSTLPRR
PRMFSLQQMSTLPRR

SEQ ID NO: 110093 - protein, 15 aa, Artificial Sequence
  Description of Artificial Sequence: Synthetic peptide
  Seed: PRMCSLMQGSTLPRR
PRMFSLQQMSTNPRR

SEQ ID NO: 110094 - protein, 15 aa, Artificial Sequence
  Description of Artificial Sequence: Synthetic peptide
  Seed: PRMCSLMQGSTLPRR
PRMFSLQQMSTSPRR

SEQ ID NO: 110095 - protein, 15 aa, Artificial Sequence
  Description of Artificial Sequence: Synthetic peptide
  Seed: PRMCSLMQGSTLPRR
PRMFSLQQMSTVPRR

SEQ ID NO: 110096 - protein, 15 aa, Artificial Sequence
  Description of Artificial Sequence: Synthetic peptide
  Seed: PRMCSLMQGSTLPRR
PRMFSLQQNSTAPRR

SEQ ID NO: 110097 - protein, 15 aa, Artificial Sequence
  Description of Artificial Sequence: Synthetic peptide
  Seed: PRMCSLMQGSTLPRR
PRMFSLQQNSTGPRR

SEQ ID NO: 110098 - protein, 15 aa, Artificial Sequence
  Description of Artificial Sequence: Synthetic peptide
  Seed: PRMCSLMQGSTLPRR
PRMFSLQQNSTIPRR

SEQ ID NO: 110099 - protein, 15 aa, Artificial Sequence
  Description of Artificial Sequence: Synthetic peptide
  Seed: PRMCSLMQGSTLPRR
PRMFSLQQNSTLPRR

SEQ ID NO: 110100 - protein, 15 aa, Artificial Sequence
  Description of Artificial Sequence: Synthetic peptide
  Seed: PRMCSLMQGSTLPRR
PRMFSLQQNSTMPRR

SEQ ID NO: 110101 - protein, 15 aa, Artificial Sequence
  Description of Artificial Sequence: Synthetic peptide
  Seed: PRMCSLMQGSTLPRR
PRMFSLQQNSTNPRR

SEQ ID NO: 110102 - protein, 15 aa, Artificial Sequence
  Description of Artificial Sequence: Synthetic peptide
  Seed: PRMCSLMQGSTLPRR
PRMFSLQQNSTSPRR

SEQ ID NO: 110103 - protein, 15 aa, Artificial Sequence
  Description of Artificial Sequence: Synthetic peptide
  Seed: PRMCSLMQGSTLPRR
PRMFSLQQNSTTPRR

SEQ ID NO: 110104 - protein, 15 aa, Artificial Sequence
  Description of Artificial Sequence: Synthetic peptide
  Seed: PRMCSLMQGSTLPRR
PRMFSLQQNSTVPRR

SEQ ID NO: 110105 - protein, 15 aa, Artificial Sequence
  Description of Artificial Sequence: Synthetic peptide
  Seed: PRMCSLMQGSTLPRR
PRMFSLQQPSTAPRR

SEQ ID NO: 110106 - protein, 15 aa, Artificial Sequence
  Description of Artificial Sequence: Synthetic peptide
  Seed: PRMCSLMQGSTLPRR
PRMFSLQQPSTFPRR

SEQ ID NO: 110107 - protein, 15 aa, Artificial Sequence
  Description of Artificial Sequence: Synthetic peptide
  Seed: PRMCSLMQGSTLPRR
PRMFSLQQPSTGPRR

SEQ ID NO: 110108 - protein, 15 aa, Artificial Sequence
  Description of Artificial Sequence: Synthetic peptide
  Seed: PRMCSLMQGSTLPRR
PRMFSLQQPSTIPRR

SEQ ID NO: 110109 - protein, 15 aa, Artificial Sequence
  Description of Artificial Sequence: Synthetic peptide
  Seed: PRMCSLMQGSTLPRR
PRMFSLQQPSTLPRR

SEQ ID NO: 110110 - protein, 15 aa, Artificial Sequence
  Description of Artificial Sequence: Synthetic peptide
  Seed: PRMCSLMQGSTLPRR
PRMFSLQQPSTMPRR

SEQ ID NO: 110111 - protein, 15 aa, Artificial Sequence
  Description of Artificial Sequence: Synthetic peptide
  Seed: PRMCSLMQGSTLPRR
PRMFSLQQPSTNPRR

SEQ ID NO: 110112 - protein, 15 aa, Artificial Sequence
  Description of Artificial Sequence: Synthetic peptide
  Seed: PRMCSLMQGSTLPRR
PRMFSLQQPSTQPRR

SEQ ID NO: 110113 - protein, 15 aa, Artificial Sequence
  Description of Artificial Sequence: Synthetic peptide
  Seed: PRMCSLMQGSTLPRR
PRMFSLQQPSTSPRR

SEQ ID NO: 110114 - protein, 15 aa, Artificial Sequence
  Description of Artificial Sequence: Synthetic peptide
  Seed: PRMCSLMQGSTLPRR
PRMFSLQQPSTTPRR

SEQ ID NO: 110115 - protein, 15 aa, Artificial Sequence
  Description of Artificial Sequence: Synthetic peptide
  Seed: PRMCSLMQGSTLPRR
PRMFSLQQPSTVPRR

SEQ ID NO: 110116 - protein, 15 aa, Artificial Sequence
  Description of Artificial Sequence: Synthetic peptide
  Seed: PRMCSLMQGSTLPRR
PRMFSLQQSSTAPRR

SEQ ID NO: 110117 - protein, 15 aa, Artificial Sequence
  Description of Artificial Sequence: Synthetic peptide
  Seed: PRMCSLMQGSTLPRR
PRMFSLQQSSTCPRR

SEQ ID NO: 110118 - protein, 15 aa, Artificial Sequence
  Description of Artificial Sequence: Synthetic peptide
  Seed: PRMCSLMQGSTLPRR
PRMFSLQQSSTFPRR

SEQ ID NO: 110119 - protein, 15 aa, Artificial Sequence
  Description of Artificial Sequence: Synthetic peptide
  Seed: PRMCSLMQGSTLPRR
PRMFSLQQSSTGPRR

SEQ ID NO: 110120 - protein, 15 aa, Artificial Sequence
  Description of Artificial Sequence: Synthetic peptide
  Seed: PRMCSLMQGSTLPRR
PRMFSLQQSSTIPRR

SEQ ID NO: 110121 - protein, 15 aa, Artificial Sequence
  Description of Artificial Sequence: Synthetic peptide
  Seed: PRMCSLMQGSTLPRR
PRMFSLQQSSTLPRR

SEQ ID NO: 110122 - protein, 15 aa, Artificial Sequence
  Description of Artificial Sequence: Synthetic peptide
  Seed: PRMCSLMQGSTLPRR
PRMFSLQQSSTMPRR

SEQ ID NO: 110123 - protein, 15 aa, Artificial Sequence
  Description of Artificial Sequence: Synthetic peptide
  Seed: PRMCSLMQGSTLPRR
PRMFSLQQSSTNPRR

SEQ ID NO: 110124 - protein, 15 aa, Artificial Sequence
  Description of Artificial Sequence: Synthetic peptide
  Seed: PRMCSLMQGSTLPRR
PRMFSLQQSSTSPRR

SEQ ID NO: 110125 - protein, 15 aa, Artificial Sequence
  Description of Artificial Sequence: Synthetic peptide
  Seed: PRMCSLMQGSTLPRR
PRMFSLQQSSTTPRR

SEQ ID NO: 110126 - protein, 15 aa, Artificial Sequence
  Description of Artificial Sequence: Synthetic peptide
  Seed: PRMCSLMQGSTLPRR
PRMFSLQQSSTVPRR

SEQ ID NO: 110127 - protein, 15 aa, Artificial Sequence
  Description of Artificial Sequence: Synthetic peptide
  Seed: PRMCSLMQGSTLPRR
PRMFSLQQTSTAPRR

SEQ ID NO: 110128 - protein, 15 aa, Artificial Sequence
  Description of Artificial Sequence: Synthetic peptide
  Seed: PRMCSLMQGSTLPRR
PRMFSLQQTSTIPRR

SEQ ID NO: 110129 - protein, 15 aa, Artificial Sequence
  Description of Artificial Sequence: Synthetic peptide
  Seed: PRMCSLMQGSTLPRR
PRMFSLQQTSTLPRR

SEQ ID NO: 110130 - protein, 15 aa, Artificial Sequence
  Description of Artificial Sequence: Synthetic peptide
  Seed: PRMCSLMQGSTLPRR
PRMFSLQQTSTMPRR

SEQ ID NO: 110131 - protein, 15 aa, Artificial Sequence
  Description of Artificial Sequence: Synthetic peptide
  Seed: PRMCSLMQGSTLPRR
PRMFSLQQTSTNPRR

SEQ ID NO: 110132 - protein, 15 aa, Artificial Sequence
  Description of Artificial Sequence: Synthetic peptide
  Seed: PRMCSLMQGSTLPRR
PRMFSLQQTSTSPRR

SEQ ID NO: 110133 - protein, 15 aa, Artificial Sequence
  Description of Artificial Sequence: Synthetic peptide
  Seed: PRMCSLMQGSTLPRR
PRMFSLQQTSTTPRR

SEQ ID NO: 110134 - protein, 15 aa, Artificial Sequence
  Description of Artificial Sequence: Synthetic peptide
  Seed: PRMCSLMQGSTLPRR
PRMFSLQQTSTVPRR

SEQ ID NO: 110135 - protein, 15 aa, Artificial Sequence
  Description of Artificial Sequence: Synthetic peptide
  Seed: PRMCSLMQGSTLPRR
PRMFSLQQVSTAPRR

SEQ ID NO: 110136 - protein, 15 aa, Artificial Sequence
  Description of Artificial Sequence: Synthetic peptide
  Seed: PRMCSLMQGSTLPRR
PRMFSLQQVSTGPRR

SEQ ID NO: 110137 - protein, 15 aa, Artificial Sequence
  Description of Artificial Sequence: Synthetic peptide
  Seed: PRMCSLMQGSTLPRR
PRMFSLQQVSTHPRR

SEQ ID NO: 110138 - protein, 15 aa, Artificial Sequence
  Description of Artificial Sequence: Synthetic peptide
  Seed: PRMCSLMQGSTLPRR
PRMFSLQQVSTIPRR

SEQ ID NO: 110139 - protein, 15 aa, Artificial Sequence
  Description of Artificial Sequence: Synthetic peptide
  Seed: PRMCSLMQGSTLPRR
PRMFSLQQVSTLPRR

SEQ ID NO: 110140 - protein, 15 aa, Artificial Sequence
  Description of Artificial Sequence: Synthetic peptide
  Seed: PRMCSLMQGSTLPRR
PRMFSLQQVSTMPRR

SEQ ID NO: 110141 - protein, 15 aa, Artificial Sequence
  Description of Artificial Sequence: Synthetic peptide
  Seed: PRMCSLMQGSTLPRR
PRMFSLQQVSTNPRR

SEQ ID NO: 110142 - protein, 15 aa, Artificial Sequence
  Description of Artificial Sequence: Synthetic peptide
  Seed: PRMCSLMQGSTLPRR
PRMFSLQQVSTQPRR

SEQ ID NO: 110143 - protein, 15 aa, Artificial Sequence
  Description of Artificial Sequence: Synthetic peptide
  Seed: PRMCSLMQGSTLPRR
PRMFSLQQVSTSPRR

SEQ ID NO: 110144 - protein, 15 aa, Artificial Sequence
  Description of Artificial Sequence: Synthetic peptide
  Seed: PRMCSLMQGSTLPRR
PRMFSLQQVSTTPRR

SEQ ID NO: 110145 - protein, 15 aa, Artificial Sequence
  Description of Artificial Sequence: Synthetic peptide
  Seed: PRMCSLMQGSTLPRR
PRMFSLQQVSTVPRR

SEQ ID NO: 110146 - protein, 15 aa, Artificial Sequence
  Description of Artificial Sequence: Synthetic peptide
  Seed: PRMCSLMQGSTLPRR
PRMFSLRQASTIPRR

SEQ ID NO: 110147 - protein, 15 aa, Artificial Sequence
  Description of Artificial Sequence: Synthetic peptide
  Seed: PRMCSLMQGSTLPRR
PRMFSLRQASTLPRR

SEQ ID NO: 110148 - protein, 15 aa, Artificial Sequence
  Description of Artificial Sequence: Synthetic peptide
  Seed: PRMCSLMQGSTLPRR
PRMFSLRQASTVPRR

SEQ ID NO: 110149 - protein, 15 aa, Artificial Sequence
  Description of Artificial Sequence: Synthetic peptide
  Seed: PRMCSLMQGSTLPRR
PRMFSLRQGSTLPRR

SEQ ID NO: 110150 - protein, 15 aa, Artificial Sequence
  Description of Artificial Sequence: Synthetic peptide
  Seed: PRMCSLMQGSTLPRR
PRMFSLRQSSTLPRR

SEQ ID NO: 110151 - protein, 15 aa, Artificial Sequence
  Description of Artificial Sequence: Synthetic peptide
  Seed: PRMCSLMQGSTLPRR
PRMFSLSQASTAPRR

SEQ ID NO: 110152 - protein, 15 aa, Artificial Sequence
  Description of Artificial Sequence: Synthetic peptide
  Seed: PRMCSLMQGSTLPRR
PRMFSLSQASTCPRR

SEQ ID NO: 110153 - protein, 15 aa, Artificial Sequence
  Description of Artificial Sequence: Synthetic peptide
  Seed: PRMCSLMQGSTLPRR
PRMFSLSQASTFPRR

SEQ ID NO: 110154 - protein, 15 aa, Artificial Sequence
  Description of Artificial Sequence: Synthetic peptide
  Seed: PRMCSLMQGSTLPRR
PRMFSLSQASTGPRR

SEQ ID NO: 110155 - protein, 15 aa, Artificial Sequence
  Description of Artificial Sequence: Synthetic peptide
  Seed: PRMCSLMQGSTLPRR
PRMFSLSQASTHPRR

SEQ ID NO: 110156 - protein, 15 aa, Artificial Sequence
  Description of Artificial Sequence: Synthetic peptide
  Seed: PRMCSLMQGSTLPRR
PRMFSLSQASTIPRR

SEQ ID NO: 110157 - protein, 15 aa, Artificial Sequence
  Description of Artificial Sequence: Synthetic peptide
  Seed: PRMCSLMQGSTLPRR
PRMFSLSQASTKPRR

SEQ ID NO: 110158 - protein, 15 aa, Artificial Sequence
  Description of Artificial Sequence: Synthetic peptide
  Seed: PRMCSLMQGSTLPRR
PRMFSLSQASTLPRR

SEQ ID NO: 110159 - protein, 15 aa, Artificial Sequence
  Description of Artificial Sequence: Synthetic peptide
  Seed: PRMCSLMQGSTLPRR
PRMFSLSQASTMPRR

SEQ ID NO: 110160 - protein, 15 aa, Artificial Sequence
  Description of Artificial Sequence: Synthetic peptide
  Seed: PRMCSLMQGSTLPRR
PRMFSLSQASTNPRR

SEQ ID NO: 110161 - protein, 15 aa, Artificial Sequence
  Description of Artificial Sequence: Synthetic peptide
  Seed: PRMCSLMQGSTLPRR
PRMFSLSQASTQPRR

SEQ ID NO: 110162 - protein, 15 aa, Artificial Sequence
  Description of Artificial Sequence: Synthetic peptide
  Seed: PRMCSLMQGSTLPRR
PRMFSLSQASTRPRR

SEQ ID NO: 110163 - protein, 15 aa, Artificial Sequence
  Description of Artificial Sequence: Synthetic peptide
  Seed: PRMCSLMQGSTLPRR
PRMFSLSQASTSPRR

SEQ ID NO: 110164 - protein, 15 aa, Artificial Sequence
  Description of Artificial Sequence: Synthetic peptide
  Seed: PRMCSLMQGSTLPRR
PRMFSLSQASTTPRR

SEQ ID NO: 110165 - protein, 15 aa, Artificial Sequence
  Description of Artificial Sequence: Synthetic peptide
  Seed: PRMCSLMQGSTLPRR
PRMFSLSQASTVPRR

SEQ ID NO: 110166 - protein, 15 aa, Artificial Sequence
  Description of Artificial Sequence: Synthetic peptide
  Seed: PRMCSLMQGSTLPRR
PRMFSLSQASTWPRR

SEQ ID NO: 110167 - protein, 15 aa, Artificial Sequence
  Description of Artificial Sequence: Synthetic peptide
  Seed: PRMCSLMQGSTLPRR
PRMFSLSQASTYPRR

SEQ ID NO: 110168 - protein, 15 aa, Artificial Sequence
  Description of Artificial Sequence: Synthetic peptide
  Seed: PRMCSLMQGSTLPRR
PRMFSLSQFSTIPRR

SEQ ID NO: 110169 - protein, 15 aa, Artificial Sequence
  Description of Artificial Sequence: Synthetic peptide
  Seed: PRMCSLMQGSTLPRR
PRMFSLSQFSTLPRR

SEQ ID NO: 110170 - protein, 15 aa, Artificial Sequence
  Description of Artificial Sequence: Synthetic peptide
  Seed: PRMCSLMQGSTLPRR
PRMFSLSQFSTVPRR

SEQ ID NO: 110171 - protein, 15 aa, Artificial Sequence
  Description of Artificial Sequence: Synthetic peptide
  Seed: PRMCSLMQGSTLPRR
PRMFSLSQGSTAPRR

SEQ ID NO: 110172 - protein, 15 aa, Artificial Sequence
  Description of Artificial Sequence: Synthetic peptide
  Seed: PRMCSLMQGSTLPRR
PRMFSLSQGSTFPRR

SEQ ID NO: 110173 - protein, 15 aa, Artificial Sequence
  Description of Artificial Sequence: Synthetic peptide
  Seed: PRMCSLMQGSTLPRR
PRMFSLSQGSTGPRR

SEQ ID NO: 110174 - protein, 15 aa, Artificial Sequence
  Description of Artificial Sequence: Synthetic peptide
  Seed: PRMCSLMQGSTLPRR
PRMFSLSQGSTIPRR

SEQ ID NO: 110175 - protein, 15 aa, Artificial Sequence
  Description of Artificial Sequence: Synthetic peptide
  Seed: PRMCSLMQGSTLPRR
PRMFSLSQGSTLPRR

SEQ ID NO: 110176 - protein, 15 aa, Artificial Sequence
  Description of Artificial Sequence: Synthetic peptide
  Seed: PRMCSLMQGSTLPRR
PRMFSLSQGSTMPRR

SEQ ID NO: 110177 - protein, 15 aa, Artificial Sequence
  Description of Artificial Sequence: Synthetic peptide
  Seed: PRMCSLMQGSTLPRR
PRMFSLSQGSTSPRR

SEQ ID NO: 110178 - protein, 15 aa, Artificial Sequence
  Description of Artificial Sequence: Synthetic peptide
  Seed: PRMCSLMQGSTLPRR
PRMFSLSQGSTTPRR

SEQ ID NO: 110179 - protein, 15 aa, Artificial Sequence
  Description of Artificial Sequence: Synthetic peptide
  Seed: PRMCSLMQGSTLPRR
PRMFSLSQGSTVPRR

SEQ ID NO: 110180 - protein, 15 aa, Artificial Sequence
  Description of Artificial Sequence: Synthetic peptide
  Seed: PRMCSLMQGSTLPRR
PRMFSLSQISTAPRR

SEQ ID NO: 110181 - protein, 15 aa, Artificial Sequence
  Description of Artificial Sequence: Synthetic peptide
  Seed: PRMCSLMQGSTLPRR
PRMFSLSQISTIPRR

SEQ ID NO: 110182 - protein, 15 aa, Artificial Sequence
  Description of Artificial Sequence: Synthetic peptide
  Seed: PRMCSLMQGSTLPRR
PRMFSLSQISTLPRR

SEQ ID NO: 110183 - protein, 15 aa, Artificial Sequence
  Description of Artificial Sequence: Synthetic peptide
  Seed: PRMCSLMQGSTLPRR
PRMFSLSQISTMPRR

SEQ ID NO: 110184 - protein, 15 aa, Artificial Sequence
  Description of Artificial Sequence: Synthetic peptide
  Seed: PRMCSLMQGSTLPRR
PRMFSLSQISTNPRR

SEQ ID NO: 110185 - protein, 15 aa, Artificial Sequence
  Description of Artificial Sequence: Synthetic peptide
  Seed: PRMCSLMQGSTLPRR
PRMFSLSQISTSPRR

SEQ ID NO: 110186 - protein, 15 aa, Artificial Sequence
  Description of Artificial Sequence: Synthetic peptide
  Seed: PRMCSLMQGSTLPRR
PRMFSLSQISTVPRR

SEQ ID NO: 110187 - protein, 15 aa, Artificial Sequence
  Description of Artificial Sequence: Synthetic peptide
  Seed: PRMCSLMQGSTLPRR
PRMFSLSQLSTAPRR

SEQ ID NO: 110188 - protein, 15 aa, Artificial Sequence
  Description of Artificial Sequence: Synthetic peptide
  Seed: PRMCSLMQGSTLPRR
PRMFSLSQLSTLPRR

SEQ ID NO: 110189 - protein, 15 aa, Artificial Sequence
  Description of Artificial Sequence: Synthetic peptide
  Seed: PRMCSLMQGSTLPRR
PRMFSLSQMSTIPRR

SEQ ID NO: 110190 - protein, 15 aa, Artificial Sequence
  Description of Artificial Sequence: Synthetic peptide
  Seed: PRMCSLMQGSTLPRR
PRMFSLSQMSTLPRR

SEQ ID NO: 110191 - protein, 15 aa, Artificial Sequence
  Description of Artificial Sequence: Synthetic peptide
  Seed: PRMCSLMQGSTLPRR
PRMFSLSQMSTVPRR

SEQ ID NO: 110192 - protein, 15 aa, Artificial Sequence
  Description of Artificial Sequence: Synthetic peptide
  Seed: PRMCSLMQGSTLPRR
PRMFSLSQNSTAPRR

SEQ ID NO: 110193 - protein, 15 aa, Artificial Sequence
  Description of Artificial Sequence: Synthetic peptide
  Seed: PRMCSLMQGSTLPRR
PRMFSLSQNSTFPRR

SEQ ID NO: 110194 - protein, 15 aa, Artificial Sequence
  Description of Artificial Sequence: Synthetic peptide
  Seed: PRMCSLMQGSTLPRR
PRMFSLSQNSTIPRR

SEQ ID NO: 110195 - protein, 15 aa, Artificial Sequence
  Description of Artificial Sequence: Synthetic peptide
  Seed: PRMCSLMQGSTLPRR
PRMFSLSQNSTLPRR

SEQ ID NO: 110196 - protein, 15 aa, Artificial Sequence
  Description of Artificial Sequence: Synthetic peptide
  Seed: PRMCSLMQGSTLPRR
PRMFSLSQNSTMPRR

SEQ ID NO: 110197 - protein, 15 aa, Artificial Sequence
  Description of Artificial Sequence: Synthetic peptide
  Seed: PRMCSLMQGSTLPRR
PRMFSLSQNSTSPRR

SEQ ID NO: 110198 - protein, 15 aa, Artificial Sequence
  Description of Artificial Sequence: Synthetic peptide
  Seed: PRMCSLMQGSTLPRR
PRMFSLSQNSTTPRR

SEQ ID NO: 110199 - protein, 15 aa, Artificial Sequence
  Description of Artificial Sequence: Synthetic peptide
  Seed: PRMCSLMQGSTLPRR
PRMFSLSQNSTVPRR

SEQ ID NO: 110200 - protein, 15 aa, Artificial Sequence
  Description of Artificial Sequence: Synthetic peptide
  Seed: PRMCSLMQGSTLPRR
PRMFSLSQPSTAPRR

SEQ ID NO: 110201 - protein, 15 aa, Artificial Sequence
  Description of Artificial Sequence: Synthetic peptide
  Seed: PRMCSLMQGSTLPRR
PRMFSLSQPSTFPRR

SEQ ID NO: 110202 - protein, 15 aa, Artificial Sequence
  Description of Artificial Sequence: Synthetic peptide
  Seed: PRMCSLMQGSTLPRR
PRMFSLSQPSTIPRR

SEQ ID NO: 110203 - protein, 15 aa, Artificial Sequence
  Description of Artificial Sequence: Synthetic peptide
  Seed: PRMCSLMQGSTLPRR
PRMFSLSQPSTLPRR

SEQ ID NO: 110204 - protein, 15 aa, Artificial Sequence
  Description of Artificial Sequence: Synthetic peptide
  Seed: PRMCSLMQGSTLPRR
PRMFSLSQPSTMPRR

SEQ ID NO: 110205 - protein, 15 aa, Artificial Sequence
  Description of Artificial Sequence: Synthetic peptide
  Seed: PRMCSLMQGSTLPRR
PRMFSLSQPSTNPRR

SEQ ID NO: 110206 - protein, 15 aa, Artificial Sequence
  Description of Artificial Sequence: Synthetic peptide
  Seed: PRMCSLMQGSTLPRR
PRMFSLSQPSTSPRR

SEQ ID NO: 110207 - protein, 15 aa, Artificial Sequence
  Description of Artificial Sequence: Synthetic peptide
  Seed: PRMCSLMQGSTLPRR
PRMFSLSQPSTTPRR

SEQ ID NO: 110208 - protein, 15 aa, Artificial Sequence
  Description of Artificial Sequence: Synthetic peptide
  Seed: PRMCSLMQGSTLPRR
PRMFSLSQPSTVPRR

SEQ ID NO: 110209 - protein, 15 aa, Artificial Sequence
  Description of Artificial Sequence: Synthetic peptide
  Seed: PRMCSLMQGSTLPRR
PRMFSLSQSSTAPRR

SEQ ID NO: 110210 - protein, 15 aa, Artificial Sequence
  Description of Artificial Sequence: Synthetic peptide
  Seed: PRMCSLMQGSTLPRR
PRMFSLSQSSTFPRR

SEQ ID NO: 110211 - protein, 15 aa, Artificial Sequence
  Description of Artificial Sequence: Synthetic peptide
  Seed: PRMCSLMQGSTLPRR
PRMFSLSQSSTGPRR

SEQ ID NO: 110212 - protein, 15 aa, Artificial Sequence
  Description of Artificial Sequence: Synthetic peptide
  Seed: PRMCSLMQGSTLPRR
PRMFSLSQSSTIPRR

SEQ ID NO: 110213 - protein, 15 aa, Artificial Sequence
  Description of Artificial Sequence: Synthetic peptide
  Seed: PRMCSLMQGSTLPRR
PRMFSLSQSSTLPRR

SEQ ID NO: 110214 - protein, 15 aa, Artificial Sequence
  Description of Artificial Sequence: Synthetic peptide
  Seed: PRMCSLMQGSTLPRR
PRMFSLSQSSTMPRR

SEQ ID NO: 110215 - protein, 15 aa, Artificial Sequence
  Description of Artificial Sequence: Synthetic peptide
  Seed: PRMCSLMQGSTLPRR
PRMFSLSQSSTNPRR

SEQ ID NO: 110216 - protein, 15 aa, Artificial Sequence
  Description of Artificial Sequence: Synthetic peptide
  Seed: PRMCSLMQGSTLPRR
PRMFSLSQSSTSPRR

SEQ ID NO: 110217 - protein, 15 aa, Artificial Sequence
  Description of Artificial Sequence: Synthetic peptide
  Seed: PRMCSLMQGSTLPRR
PRMFSLSQSSTTPRR

SEQ ID NO: 110218 - protein, 15 aa, Artificial Sequence
  Description of Artificial Sequence: Synthetic peptide
  Seed: PRMCSLMQGSTLPRR
PRMFSLSQSSTVPRR

SEQ ID NO: 110219 - protein, 15 aa, Artificial Sequence
  Description of Artificial Sequence: Synthetic peptide
  Seed: PRMCSLMQGSTLPRR
PRMFSLSQSSTWPRR

SEQ ID NO: 110220 - protein, 15 aa, Artificial Sequence
  Description of Artificial Sequence: Synthetic peptide
  Seed: PRMCSLMQGSTLPRR
PRMFSLSQSSTYPRR

SEQ ID NO: 110221 - protein, 15 aa, Artificial Sequence
  Description of Artificial Sequence: Synthetic peptide
  Seed: PRMCSLMQGSTLPRR
PRMFSLSQTSTAPRR

SEQ ID NO: 110222 - protein, 15 aa, Artificial Sequence
  Description of Artificial Sequence: Synthetic peptide
  Seed: PRMCSLMQGSTLPRR
PRMFSLSQTSTFPRR

SEQ ID NO: 110223 - protein, 15 aa, Artificial Sequence
  Description of Artificial Sequence: Synthetic peptide
  Seed: PRMCSLMQGSTLPRR
PRMFSLSQTSTIPRR

SEQ ID NO: 110224 - protein, 15 aa, Artificial Sequence
  Description of Artificial Sequence: Synthetic peptide
  Seed: PRMCSLMQGSTLPRR
PRMFSLSQTSTLPRR

SEQ ID NO: 110225 - protein, 15 aa, Artificial Sequence
  Description of Artificial Sequence: Synthetic peptide
  Seed: PRMCSLMQGSTLPRR
PRMFSLSQTSTMPRR

SEQ ID NO: 110226 - protein, 15 aa, Artificial Sequence
  Description of Artificial Sequence: Synthetic peptide
  Seed: PRMCSLMQGSTLPRR
PRMFSLSQTSTNPRR

SEQ ID NO: 110227 - protein, 15 aa, Artificial Sequence
  Description of Artificial Sequence: Synthetic peptide
  Seed: PRMCSLMQGSTLPRR
PRMFSLSQTSTSPRR

SEQ ID NO: 110228 - protein, 15 aa, Artificial Sequence
  Description of Artificial Sequence: Synthetic peptide
  Seed: PRMCSLMQGSTLPRR
PRMFSLSQTSTTPRR

SEQ ID NO: 110229 - protein, 15 aa, Artificial Sequence
  Description of Artificial Sequence: Synthetic peptide
  Seed: PRMCSLMQGSTLPRR
PRMFSLSQTSTVPRR

SEQ ID NO: 110230 - protein, 15 aa, Artificial Sequence
  Description of Artificial Sequence: Synthetic peptide
  Seed: PRMCSLMQGSTLPRR
PRMFSLSQVSTAPRR

SEQ ID NO: 110231 - protein, 15 aa, Artificial Sequence
  Description of Artificial Sequence: Synthetic peptide
  Seed: PRMCSLMQGSTLPRR
PRMFSLSQVSTFPRR

SEQ ID NO: 110232 - protein, 15 aa, Artificial Sequence
  Description of Artificial Sequence: Synthetic peptide
  Seed: PRMCSLMQGSTLPRR
PRMFSLSQVSTIPRR

SEQ ID NO: 110233 - protein, 15 aa, Artificial Sequence
  Description of Artificial Sequence: Synthetic peptide
  Seed: PRMCSLMQGSTLPRR
PRMFSLSQVSTLPRR

SEQ ID NO: 110234 - protein, 15 aa, Artificial Sequence
  Description of Artificial Sequence: Synthetic peptide
  Seed: PRMCSLMQGSTLPRR
PRMFSLSQVSTMPRR

SEQ ID NO: 110235 - protein, 15 aa, Artificial Sequence
  Description of Artificial Sequence: Synthetic peptide
  Seed: PRMCSLMQGSTLPRR
PRMFSLSQVSTNPRR

SEQ ID NO: 110236 - protein, 15 aa, Artificial Sequence
  Description of Artificial Sequence: Synthetic peptide
  Seed: PRMCSLMQGSTLPRR
PRMFSLSQVSTSPRR

SEQ ID NO: 110237 - protein, 15 aa, Artificial Sequence
  Description of Artificial Sequence: Synthetic peptide
  Seed: PRMCSLMQGSTLPRR
PRMFSLSQVSTTPRR

SEQ ID NO: 110238 - protein, 15 aa, Artificial Sequence
  Description of Artificial Sequence: Synthetic peptide
  Seed: PRMCSLMQGSTLPRR
PRMFSLSQVSTVPRR

SEQ ID NO: 110239 - protein, 15 aa, Artificial Sequence
  Description of Artificial Sequence: Synthetic peptide
  Seed: PRMCSLMQGSTLPRR
PRMFSLTQASTAPRR

SEQ ID NO: 110240 - protein, 15 aa, Artificial Sequence
  Description of Artificial Sequence: Synthetic peptide
  Seed: PRMCSLMQGSTLPRR
PRMFSLTQASTCPRR

SEQ ID NO: 110241 - protein, 15 aa, Artificial Sequence
  Description of Artificial Sequence: Synthetic peptide
  Seed: PRMCSLMQGSTLPRR
PRMFSLTQASTFPRR

SEQ ID NO: 110242 - protein, 15 aa, Artificial Sequence
  Description of Artificial Sequence: Synthetic peptide
  Seed: PRMCSLMQGSTLPRR
PRMFSLTQASTGPRR

SEQ ID NO: 110243 - protein, 15 aa, Artificial Sequence
  Description of Artificial Sequence: Synthetic peptide
  Seed: PRMCSLMQGSTLPRR
PRMFSLTQASTHPRR

SEQ ID NO: 110244 - protein, 15 aa, Artificial Sequence
  Description of Artificial Sequence: Synthetic peptide
  Seed: PRMCSLMQGSTLPRR
PRMFSLTQASTIPRR

SEQ ID NO: 110245 - protein, 15 aa, Artificial Sequence
  Description of Artificial Sequence: Synthetic peptide
  Seed: PRMCSLMQGSTLPRR
PRMFSLTQASTLPRR

SEQ ID NO: 110246 - protein, 15 aa, Artificial Sequence
  Description of Artificial Sequence: Synthetic peptide
  Seed: PRMCSLMQGSTLPRR
PRMFSLTQASTMPRR

SEQ ID NO: 110247 - protein, 15 aa, Artificial Sequence
  Description of Artificial Sequence: Synthetic peptide
  Seed: PRMCSLMQGSTLPRR
PRMFSLTQASTNPRR

SEQ ID NO: 110248 - protein, 15 aa, Artificial Sequence
  Description of Artificial Sequence: Synthetic peptide
  Seed: PRMCSLMQGSTLPRR
PRMFSLTQASTQPRR

SEQ ID NO: 110249 - protein, 15 aa, Artificial Sequence
  Description of Artificial Sequence: Synthetic peptide
  Seed: PRMCSLMQGSTLPRR
PRMFSLTQASTSPRR

SEQ ID NO: 110250 - protein, 15 aa, Artificial Sequence
  Description of Artificial Sequence: Synthetic peptide
  Seed: PRMCSLMQGSTLPRR
PRMFSLTQASTTPRR

SEQ ID NO: 110251 - protein, 15 aa, Artificial Sequence
  Description of Artificial Sequence: Synthetic peptide
  Seed: PRMCSLMQGSTLPRR
PRMFSLTQASTVPRR

SEQ ID NO: 110252 - protein, 15 aa, Artificial Sequence
  Description of Artificial Sequence: Synthetic peptide
  Seed: PRMCSLMQGSTLPRR
PRMFSLTQASTWPRR

SEQ ID NO: 110253 - protein, 15 aa, Artificial Sequence
  Description of Artificial Sequence: Synthetic peptide
  Seed: PRMCSLMQGSTLPRR
PRMFSLTQASTYPRR

SEQ ID NO: 110254 - protein, 15 aa, Artificial Sequence
  Description of Artificial Sequence: Synthetic peptide
  Seed: PRMCSLMQGSTLPRR
PRMFSLTQFSTFPRR

SEQ ID NO: 110255 - protein, 15 aa, Artificial Sequence
  Description of Artificial Sequence: Synthetic peptide
  Seed: PRMCSLMQGSTLPRR
PRMFSLTQFSTIPRR

SEQ ID NO: 110256 - protein, 15 aa, Artificial Sequence
  Description of Artificial Sequence: Synthetic peptide
  Seed: PRMCSLMQGSTLPRR
PRMFSLTQFSTLPRR

SEQ ID NO: 110257 - protein, 15 aa, Artificial Sequence
  Description of Artificial Sequence: Synthetic peptide
  Seed: PRMCSLMQGSTLPRR
PRMFSLTQFSTMPRR

SEQ ID NO: 110258 - protein, 15 aa, Artificial Sequence
  Description of Artificial Sequence: Synthetic peptide
  Seed: PRMCSLMQGSTLPRR
PRMFSLTQFSTVPRR

SEQ ID NO: 110259 - protein, 15 aa, Artificial Sequence
  Description of Artificial Sequence: Synthetic peptide
  Seed: PRMCSLMQGSTLPRR
PRMFSLTQGSTAPRR

SEQ ID NO: 110260 - protein, 15 aa, Artificial Sequence
  Description of Artificial Sequence: Synthetic peptide
  Seed: PRMCSLMQGSTLPRR
PRMFSLTQGSTFPRR

SEQ ID NO: 110261 - protein, 15 aa, Artificial Sequence
  Description of Artificial Sequence: Synthetic peptide
  Seed: PRMCSLMQGSTLPRR
PRMFSLTQGSTGPRR

SEQ ID NO: 110262 - protein, 15 aa, Artificial Sequence
  Description of Artificial Sequence: Synthetic peptide
  Seed: PRMCSLMQGSTLPRR
PRMFSLTQGSTIPRR

SEQ ID NO: 110263 - protein, 15 aa, Artificial Sequence
  Description of Artificial Sequence: Synthetic peptide
  Seed: PRMCSLMQGSTLPRR
PRMFSLTQGSTLPRR

SEQ ID NO: 110264 - protein, 15 aa, Artificial Sequence
  Description of Artificial Sequence: Synthetic peptide
  Seed: PRMCSLMQGSTLPRR
PRMFSLTQGSTMPRR

SEQ ID NO: 110265 - protein, 15 aa, Artificial Sequence
  Description of Artificial Sequence: Synthetic peptide
  Seed: PRMCSLMQGSTLPRR
PRMFSLTQGSTSPRR

SEQ ID NO: 110266 - protein, 15 aa, Artificial Sequence
  Description of Artificial Sequence: Synthetic peptide
  Seed: PRMCSLMQGSTLPRR
PRMFSLTQGSTTPRR

SEQ ID NO: 110267 - protein, 15 aa, Artificial Sequence
  Description of Artificial Sequence: Synthetic peptide
  Seed: PRMCSLMQGSTLPRR
PRMFSLTQGSTVPRR

SEQ ID NO: 110268 - protein, 15 aa, Artificial Sequence
  Description of Artificial Sequence: Synthetic peptide
  Seed: PRMCSLMQGSTLPRR
PRMFSLTQISTAPRR

SEQ ID NO: 110269 - protein, 15 aa, Artificial Sequence
  Description of Artificial Sequence: Synthetic peptide
  Seed: PRMCSLMQGSTLPRR
PRMFSLTQISTIPRR

SEQ ID NO: 110270 - protein, 15 aa, Artificial Sequence
  Description of Artificial Sequence: Synthetic peptide
  Seed: PRMCSLMQGSTLPRR
PRMFSLTQISTLPRR

SEQ ID NO: 110271 - protein, 15 aa, Artificial Sequence
  Description of Artificial Sequence: Synthetic peptide
  Seed: PRMCSLMQGSTLPRR
PRMFSLTQISTNPRR

SEQ ID NO: 110272 - protein, 15 aa, Artificial Sequence
  Description of Artificial Sequence: Synthetic peptide
  Seed: PRMCSLMQGSTLPRR
PRMFSLTQISTSPRR

SEQ ID NO: 110273 - protein, 15 aa, Artificial Sequence
  Description of Artificial Sequence: Synthetic peptide
  Seed: PRMCSLMQGSTLPRR
PRMFSLTQISTVPRR

SEQ ID NO: 110274 - protein, 15 aa, Artificial Sequence
  Description of Artificial Sequence: Synthetic peptide
  Seed: PRMCSLMQGSTLPRR
PRMFSLTQLSTIPRR

SEQ ID NO: 110275 - protein, 15 aa, Artificial Sequence
  Description of Artificial Sequence: Synthetic peptide
  Seed: PRMCSLMQGSTLPRR
PRMFSLTQLSTLPRR

SEQ ID NO: 110276 - protein, 15 aa, Artificial Sequence
  Description of Artificial Sequence: Synthetic peptide
  Seed: PRMCSLMQGSTLPRR
PRMFSLTQMSTIPRR

SEQ ID NO: 110277 - protein, 15 aa, Artificial Sequence
  Description of Artificial Sequence: Synthetic peptide
  Seed: PRMCSLMQGSTLPRR
PRMFSLTQMSTLPRR

SEQ ID NO: 110278 - protein, 15 aa, Artificial Sequence
  Description of Artificial Sequence: Synthetic peptide
  Seed: PRMCSLMQGSTLPRR
PRMFSLTQMSTVPRR

SEQ ID NO: 110279 - protein, 15 aa, Artificial Sequence
  Description of Artificial Sequence: Synthetic peptide
  Seed: PRMCSLMQGSTLPRR
PRMFSLTQNSTAPRR

SEQ ID NO: 110280 - protein, 15 aa, Artificial Sequence
  Description of Artificial Sequence: Synthetic peptide
  Seed: PRMCSLMQGSTLPRR
PRMFSLTQNSTFPRR

SEQ ID NO: 110281 - protein, 15 aa, Artificial Sequence
  Description of Artificial Sequence: Synthetic peptide
  Seed: PRMCSLMQGSTLPRR
PRMFSLTQNSTIPRR

SEQ ID NO: 110282 - protein, 15 aa, Artificial Sequence
  Description of Artificial Sequence: Synthetic peptide
  Seed: PRMCSLMQGSTLPRR
PRMFSLTQNSTLPRR

SEQ ID NO: 110283 - protein, 15 aa, Artificial Sequence
  Description of Artificial Sequence: Synthetic peptide
  Seed: PRMCSLMQGSTLPRR
PRMFSLTQNSTMPRR

SEQ ID NO: 110284 - protein, 15 aa, Artificial Sequence
  Description of Artificial Sequence: Synthetic peptide
  Seed: PRMCSLMQGSTLPRR
PRMFSLTQNSTVPRR

SEQ ID NO: 110285 - protein, 15 aa, Artificial Sequence
  Description of Artificial Sequence: Synthetic peptide
  Seed: PRMCSLMQGSTLPRR
PRMFSLTQPSTAPRR

SEQ ID NO: 110286 - protein, 15 aa, Artificial Sequence
  Description of Artificial Sequence: Synthetic peptide
  Seed: PRMCSLMQGSTLPRR
PRMFSLTQPSTFPRR

SEQ ID NO: 110287 - protein, 15 aa, Artificial Sequence
  Description of Artificial Sequence: Synthetic peptide
  Seed: PRMCSLMQGSTLPRR
PRMFSLTQPSTIPRR

SEQ ID NO: 110288 - protein, 15 aa, Artificial Sequence
  Description of Artificial Sequence: Synthetic peptide
  Seed: PRMCSLMQGSTLPRR
PRMFSLTQPSTLPRR

SEQ ID NO: 110289 - protein, 15 aa, Artificial Sequence
  Description of Artificial Sequence: Synthetic peptide
  Seed: PRMCSLMQGSTLPRR
PRMFSLTQPSTMPRR

SEQ ID NO: 110290 - protein, 15 aa, Artificial Sequence
  Description of Artificial Sequence: Synthetic peptide
  Seed: PRMCSLMQGSTLPRR
PRMFSLTQPSTNPRR

SEQ ID NO: 110291 - protein, 15 aa, Artificial Sequence
  Description of Artificial Sequence: Synthetic peptide
  Seed: PRMCSLMQGSTLPRR
PRMFSLTQPSTSPRR

SEQ ID NO: 110292 - protein, 15 aa, Artificial Sequence
  Description of Artificial Sequence: Synthetic peptide
  Seed: PRMCSLMQGSTLPRR
PRMFSLTQPSTTPRR

SEQ ID NO: 110293 - protein, 15 aa, Artificial Sequence
  Description of Artificial Sequence: Synthetic peptide
  Seed: PRMCSLMQGSTLPRR
PRMFSLTQPSTVPRR

SEQ ID NO: 110294 - protein, 15 aa, Artificial Sequence
  Description of Artificial Sequence: Synthetic peptide
  Seed: PRMCSLMQGSTLPRR
PRMFSLTQQSTIPRR

SEQ ID NO: 110295 - protein, 15 aa, Artificial Sequence
  Description of Artificial Sequence: Synthetic peptide
  Seed: PRMCSLMQGSTLPRR
PRMFSLTQSSTAPRR

SEQ ID NO: 110296 - protein, 15 aa, Artificial Sequence
  Description of Artificial Sequence: Synthetic peptide
  Seed: PRMCSLMQGSTLPRR
PRMFSLTQSSTFPRR

SEQ ID NO: 110297 - protein, 15 aa, Artificial Sequence
  Description of Artificial Sequence: Synthetic peptide
  Seed: PRMCSLMQGSTLPRR
PRMFSLTQSSTIPRR

SEQ ID NO: 110298 - protein, 15 aa, Artificial Sequence
  Description of Artificial Sequence: Synthetic peptide
  Seed: PRMCSLMQGSTLPRR
PRMFSLTQSSTLPRR

SEQ ID NO: 110299 - protein, 15 aa, Artificial Sequence
  Description of Artificial Sequence: Synthetic peptide
  Seed: PRMCSLMQGSTLPRR
PRMFSLTQSSTMPRR

SEQ ID NO: 110300 - protein, 15 aa, Artificial Sequence
  Description of Artificial Sequence: Synthetic peptide
  Seed: PRMCSLMQGSTLPRR
PRMFSLTQSSTNPRR

SEQ ID NO: 110301 - protein, 15 aa, Artificial Sequence
  Description of Artificial Sequence: Synthetic peptide
  Seed: PRMCSLMQGSTLPRR
PRMFSLTQSSTSPRR

SEQ ID NO: 110302 - protein, 15 aa, Artificial Sequence
  Description of Artificial Sequence: Synthetic peptide
  Seed: PRMCSLMQGSTLPRR
PRMFSLTQSSTTPRR

SEQ ID NO: 110303 - protein, 15 aa, Artificial Sequence
  Description of Artificial Sequence: Synthetic peptide
  Seed: PRMCSLMQGSTLPRR
PRMFSLTQSSTVPRR

SEQ ID NO: 110304 - protein, 15 aa, Artificial Sequence
  Description of Artificial Sequence: Synthetic peptide
  Seed: PRMCSLMQGSTLPRR
PRMFSLTQSSTWPRR

SEQ ID NO: 110305 - protein, 15 aa, Artificial Sequence
  Description of Artificial Sequence: Synthetic peptide
  Seed: PRMCSLMQGSTLPRR
PRMFSLTQSSTYPRR

SEQ ID NO: 110306 - protein, 15 aa, Artificial Sequence
  Description of Artificial Sequence: Synthetic peptide
  Seed: PRMCSLMQGSTLPRR
PRMFSLTQTSTAPRR

SEQ ID NO: 110307 - protein, 15 aa, Artificial Sequence
  Description of Artificial Sequence: Synthetic peptide
  Seed: PRMCSLMQGSTLPRR
PRMFSLTQTSTFPRR

SEQ ID NO: 110308 - protein, 15 aa, Artificial Sequence
  Description of Artificial Sequence: Synthetic peptide
  Seed: PRMCSLMQGSTLPRR
PRMFSLTQTSTIPRR

SEQ ID NO: 110309 - protein, 15 aa, Artificial Sequence
  Description of Artificial Sequence: Synthetic peptide
  Seed: PRMCSLMQGSTLPRR
PRMFSLTQTSTLPRR

SEQ ID NO: 110310 - protein, 15 aa, Artificial Sequence
  Description of Artificial Sequence: Synthetic peptide
  Seed: PRMCSLMQGSTLPRR
PRMFSLTQTSTMPRR

SEQ ID NO: 110311 - protein, 15 aa, Artificial Sequence
  Description of Artificial Sequence: Synthetic peptide
  Seed: PRMCSLMQGSTLPRR
PRMFSLTQTSTNPRR

SEQ ID NO: 110312 - protein, 15 aa, Artificial Sequence
  Description of Artificial Sequence: Synthetic peptide
  Seed: PRMCSLMQGSTLPRR
PRMFSLTQTSTSPRR

SEQ ID NO: 110313 - protein, 15 aa, Artificial Sequence
  Description of Artificial Sequence: Synthetic peptide
  Seed: PRMCSLMQGSTLPRR
PRMFSLTQTSTTPRR

SEQ ID NO: 110314 - protein, 15 aa, Artificial Sequence
  Description of Artificial Sequence: Synthetic peptide
  Seed: PRMCSLMQGSTLPRR
PRMFSLTQTSTVPRR

SEQ ID NO: 110315 - protein, 15 aa, Artificial Sequence
  Description of Artificial Sequence: Synthetic peptide
  Seed: PRMCSLMQGSTLPRR
PRMFSLTQVSTAPRR

SEQ ID NO: 110316 - protein, 15 aa, Artificial Sequence
  Description of Artificial Sequence: Synthetic peptide
  Seed: PRMCSLMQGSTLPRR
PRMFSLTQVSTFPRR

SEQ ID NO: 110317 - protein, 15 aa, Artificial Sequence
  Description of Artificial Sequence: Synthetic peptide
  Seed: PRMCSLMQGSTLPRR
PRMFSLTQVSTIPRR

SEQ ID NO: 110318 - protein, 15 aa, Artificial Sequence
  Description of Artificial Sequence: Synthetic peptide
  Seed: PRMCSLMQGSTLPRR
PRMFSLTQVSTLPRR

SEQ ID NO: 110319 - protein, 15 aa, Artificial Sequence
  Description of Artificial Sequence: Synthetic peptide
  Seed: PRMCSLMQGSTLPRR
PRMFSLTQVSTMPRR

SEQ ID NO: 110320 - protein, 15 aa, Artificial Sequence
  Description of Artificial Sequence: Synthetic peptide
  Seed: PRMCSLMQGSTLPRR
PRMFSLTQVSTNPRR

SEQ ID NO: 110321 - protein, 15 aa, Artificial Sequence
  Description of Artificial Sequence: Synthetic peptide
  Seed: PRMCSLMQGSTLPRR
PRMFSLTQVSTSPRR

SEQ ID NO: 110322 - protein, 15 aa, Artificial Sequence
  Description of Artificial Sequence: Synthetic peptide
  Seed: PRMCSLMQGSTLPRR
PRMFSLTQVSTTPRR

SEQ ID NO: 110323 - protein, 15 aa, Artificial Sequence
  Description of Artificial Sequence: Synthetic peptide
  Seed: PRMCSLMQGSTLPRR
PRMFSLTQVSTVPRR

SEQ ID NO: 110324 - protein, 15 aa, Artificial Sequence
  Description of Artificial Sequence: Synthetic peptide
  Seed: PRMCSLMQGSTLPRR
PRMFSLVQASTAPRR

SEQ ID NO: 110325 - protein, 15 aa, Artificial Sequence
  Description of Artificial Sequence: Synthetic peptide
  Seed: PRMCSLMQGSTLPRR
PRMFSLVQASTCPRR

SEQ ID NO: 110326 - protein, 15 aa, Artificial Sequence
  Description of Artificial Sequence: Synthetic peptide
  Seed: PRMCSLMQGSTLPRR
PRMFSLVQASTDPRR

SEQ ID NO: 110327 - protein, 15 aa, Artificial Sequence
  Description of Artificial Sequence: Synthetic peptide
  Seed: PRMCSLMQGSTLPRR
PRMFSLVQASTEPRR

SEQ ID NO: 110328 - protein, 15 aa, Artificial Sequence
  Description of Artificial Sequence: Synthetic peptide
  Seed: PRMCSLMQGSTLPRR
PRMFSLVQASTFPRR

SEQ ID NO: 110329 - protein, 15 aa, Artificial Sequence
  Description of Artificial Sequence: Synthetic peptide
  Seed: PRMCSLMQGSTLPRR
PRMFSLVQASTGPRR

SEQ ID NO: 110330 - protein, 15 aa, Artificial Sequence
  Description of Artificial Sequence: Synthetic peptide
  Seed: PRMCSLMQGSTLPRR
PRMFSLVQASTHPRR

SEQ ID NO: 110331 - protein, 15 aa, Artificial Sequence
  Description of Artificial Sequence: Synthetic peptide
  Seed: PRMCSLMQGSTLPRR
PRMFSLVQASTIPRR

SEQ ID NO: 110332 - protein, 15 aa, Artificial Sequence
  Description of Artificial Sequence: Synthetic peptide
  Seed: PRMCSLMQGSTLPRR
PRMFSLVQASTKPRR

SEQ ID NO: 110333 - protein, 15 aa, Artificial Sequence
  Description of Artificial Sequence: Synthetic peptide
  Seed: PRMCSLMQGSTLPRR
PRMFSLVQASTLPRR

SEQ ID NO: 110334 - protein, 15 aa, Artificial Sequence
  Description of Artificial Sequence: Synthetic peptide
  Seed: PRMCSLMQGSTLPRR
PRMFSLVQASTMPRR

SEQ ID NO: 110335 - protein, 15 aa, Artificial Sequence
  Description of Artificial Sequence: Synthetic peptide
  Seed: PRMCSLMQGSTLPRR
PRMFSLVQASTNPRR

SEQ ID NO: 110336 - protein, 15 aa, Artificial Sequence
  Description of Artificial Sequence: Synthetic peptide
  Seed: PRMCSLMQGSTLPRR
PRMFSLVQASTPPRR

SEQ ID NO: 110337 - protein, 15 aa, Artificial Sequence
  Description of Artificial Sequence: Synthetic peptide
  Seed: PRMCSLMQGSTLPRR
PRMFSLVQASTQPRR

SEQ ID NO: 110338 - protein, 15 aa, Artificial Sequence
  Description of Artificial Sequence: Synthetic peptide
  Seed: PRMCSLMQGSTLPRR
PRMFSLVQASTRPRR

SEQ ID NO: 110339 - protein, 15 aa, Artificial Sequence
  Description of Artificial Sequence: Synthetic peptide
  Seed: PRMCSLMQGSTLPRR
PRMFSLVQASTSPRR

SEQ ID NO: 110340 - protein, 15 aa, Artificial Sequence
  Description of Artificial Sequence: Synthetic peptide
  Seed: PRMCSLMQGSTLPRR
PRMFSLVQASTTPRR

SEQ ID NO: 110341 - protein, 15 aa, Artificial Sequence
  Description of Artificial Sequence: Synthetic peptide
  Seed: PRMCSLMQGSTLPRR
PRMFSLVQASTVPRR

SEQ ID NO: 110342 - protein, 15 aa, Artificial Sequence
  Description of Artificial Sequence: Synthetic peptide
  Seed: PRMCSLMQGSTLPRR
PRMFSLVQASTWPRR

SEQ ID NO: 110343 - protein, 15 aa, Artificial Sequence
  Description of Artificial Sequence: Synthetic peptide
  Seed: PRMCSLMQGSTLPRR
PRMFSLVQASTYPRR

SEQ ID NO: 110344 - protein, 15 aa, Artificial Sequence
  Description of Artificial Sequence: Synthetic peptide
  Seed: PRMCSLMQGSTLPRR
PRMFSLVQCSTLPRR

SEQ ID NO: 110345 - protein, 15 aa, Artificial Sequence
  Description of Artificial Sequence: Synthetic peptide
  Seed: PRMCSLMQGSTLPRR
PRMFSLVQCSTVPRR

SEQ ID NO: 110346 - protein, 15 aa, Artificial Sequence
  Description of Artificial Sequence: Synthetic peptide
  Seed: PRMCSLMQGSTLPRR
PRMFSLVQFSTFPRR

SEQ ID NO: 110347 - protein, 15 aa, Artificial Sequence
  Description of Artificial Sequence: Synthetic peptide
  Seed: PRMCSLMQGSTLPRR
PRMFSLVQFSTIPRR

SEQ ID NO: 110348 - protein, 15 aa, Artificial Sequence
  Description of Artificial Sequence: Synthetic peptide
  Seed: PRMCSLMQGSTLPRR
PRMFSLVQFSTLPRR

SEQ ID NO: 110349 - protein, 15 aa, Artificial Sequence
  Description of Artificial Sequence: Synthetic peptide
  Seed: PRMCSLMQGSTLPRR
PRMFSLVQFSTMPRR

SEQ ID NO: 110350 - protein, 15 aa, Artificial Sequence
  Description of Artificial Sequence: Synthetic peptide
  Seed: PRMCSLMQGSTLPRR
PRMFSLVQFSTVPRR

SEQ ID NO: 110351 - protein, 15 aa, Artificial Sequence
  Description of Artificial Sequence: Synthetic peptide
  Seed: PRMCSLMQGSTLPRR
PRMFSLVQGSTAPRR

SEQ ID NO: 110352 - protein, 15 aa, Artificial Sequence
  Description of Artificial Sequence: Synthetic peptide
  Seed: PRMCSLMQGSTLPRR
PRMFSLVQGSTCPRR

SEQ ID NO: 110353 - protein, 15 aa, Artificial Sequence
  Description of Artificial Sequence: Synthetic peptide
  Seed: PRMCSLMQGSTLPRR
PRMFSLVQGSTFPRR

SEQ ID NO: 110354 - protein, 15 aa, Artificial Sequence
  Description of Artificial Sequence: Synthetic peptide
  Seed: PRMCSLMQGSTLPRR
PRMFSLVQGSTGPRR

SEQ ID NO: 110355 - protein, 15 aa, Artificial Sequence
  Description of Artificial Sequence: Synthetic peptide
  Seed: PRMCSLMQGSTLPRR
PRMFSLVQGSTHPRR

SEQ ID NO: 110356 - protein, 15 aa, Artificial Sequence
  Description of Artificial Sequence: Synthetic peptide
  Seed: PRMCSLMQGSTLPRR
PRMFSLVQGSTIPRR

SEQ ID NO: 110357 - protein, 15 aa, Artificial Sequence
  Description of Artificial Sequence: Synthetic peptide
  Seed: PRMCSLMQGSTLPRR
PRMFSLVQGSTLPRR

SEQ ID NO: 110358 - protein, 15 aa, Artificial Sequence
  Description of Artificial Sequence: Synthetic peptide
  Seed: PRMCSLMQGSTLPRR
PRMFSLVQGSTMPRR

SEQ ID NO: 110359 - protein, 15 aa, Artificial Sequence
  Description of Artificial Sequence: Synthetic peptide
  Seed: PRMCSLMQGSTLPRR
PRMFSLVQGSTNPRR

SEQ ID NO: 110360 - protein, 15 aa, Artificial Sequence
  Description of Artificial Sequence: Synthetic peptide
  Seed: PRMCSLMQGSTLPRR
PRMFSLVQGSTPPRR

SEQ ID NO: 110361 - protein, 15 aa, Artificial Sequence
  Description of Artificial Sequence: Synthetic peptide
  Seed: PRMCSLMQGSTLPRR
PRMFSLVQGSTQPRR

SEQ ID NO: 110362 - protein, 15 aa, Artificial Sequence
  Description of Artificial Sequence: Synthetic peptide
  Seed: PRMCSLMQGSTLPRR
PRMFSLVQGSTSPRR

SEQ ID NO: 110363 - protein, 15 aa, Artificial Sequence
  Description of Artificial Sequence: Synthetic peptide
  Seed: PRMCSLMQGSTLPRR
PRMFSLVQGSTTPRR

SEQ ID NO: 110364 - protein, 15 aa, Artificial Sequence
  Description of Artificial Sequence: Synthetic peptide
  Seed: PRMCSLMQGSTLPRR
PRMFSLVQGSTVPRR

SEQ ID NO: 110365 - protein, 15 aa, Artificial Sequence
  Description of Artificial Sequence: Synthetic peptide
  Seed: PRMCSLMQGSTLPRR
PRMFSLVQGSTWPRR

SEQ ID NO: 110366 - protein, 15 aa, Artificial Sequence
  Description of Artificial Sequence: Synthetic peptide
  Seed: PRMCSLMQGSTLPRR
PRMFSLVQGSTYPRR

SEQ ID NO: 110367 - protein, 15 aa, Artificial Sequence
  Description of Artificial Sequence: Synthetic peptide
  Seed: PRMCSLMQGSTLPRR
PRMFSLVQHSTAPRR

SEQ ID NO: 110368 - protein, 15 aa, Artificial Sequence
  Description of Artificial Sequence: Synthetic peptide
  Seed: PRMCSLMQGSTLPRR
PRMFSLVQHSTIPRR

SEQ ID NO: 110369 - protein, 15 aa, Artificial Sequence
  Description of Artificial Sequence: Synthetic peptide
  Seed: PRMCSLMQGSTLPRR
PRMFSLVQHSTLPRR

SEQ ID NO: 110370 - protein, 15 aa, Artificial Sequence
  Description of Artificial Sequence: Synthetic peptide
  Seed: PRMCSLMQGSTLPRR
PRMFSLVQHSTVPRR

SEQ ID NO: 110371 - protein, 15 aa, Artificial Sequence
  Description of Artificial Sequence: Synthetic peptide
  Seed: PRMCSLMQGSTLPRR
PRMFSLVQISTAPRR

SEQ ID NO: 110372 - protein, 15 aa, Artificial Sequence
  Description of Artificial Sequence: Synthetic peptide
  Seed: PRMCSLMQGSTLPRR
PRMFSLVQISTGPRR

SEQ ID NO: 110373 - protein, 15 aa, Artificial Sequence
  Description of Artificial Sequence: Synthetic peptide
  Seed: PRMCSLMQGSTLPRR
PRMFSLVQISTHPRR

SEQ ID NO: 110374 - protein, 15 aa, Artificial Sequence
  Description of Artificial Sequence: Synthetic peptide
  Seed: PRMCSLMQGSTLPRR
PRMFSLVQISTIPRR

SEQ ID NO: 110375 - protein, 15 aa, Artificial Sequence
  Description of Artificial Sequence: Synthetic peptide
  Seed: PRMCSLMQGSTLPRR
PRMFSLVQISTLPRR

SEQ ID NO: 110376 - protein, 15 aa, Artificial Sequence
  Description of Artificial Sequence: Synthetic peptide
  Seed: PRMCSLMQGSTLPRR
PRMFSLVQISTMPRR

SEQ ID NO: 110377 - protein, 15 aa, Artificial Sequence
  Description of Artificial Sequence: Synthetic peptide
  Seed: PRMCSLMQGSTLPRR
PRMFSLVQISTNPRR

SEQ ID NO: 110378 - protein, 15 aa, Artificial Sequence
  Description of Artificial Sequence: Synthetic peptide
  Seed: PRMCSLMQGSTLPRR
PRMFSLVQISTQPRR

SEQ ID NO: 110379 - protein, 15 aa, Artificial Sequence
  Description of Artificial Sequence: Synthetic peptide
  Seed: PRMCSLMQGSTLPRR
PRMFSLVQISTSPRR

SEQ ID NO: 110380 - protein, 15 aa, Artificial Sequence
  Description of Artificial Sequence: Synthetic peptide
  Seed: PRMCSLMQGSTLPRR
PRMFSLVQISTTPRR

SEQ ID NO: 110381 - protein, 15 aa, Artificial Sequence
  Description of Artificial Sequence: Synthetic peptide
  Seed: PRMCSLMQGSTLPRR
PRMFSLVQISTVPRR

SEQ ID NO: 110382 - protein, 15 aa, Artificial Sequence
  Description of Artificial Sequence: Synthetic peptide
  Seed: PRMCSLMQGSTLPRR
PRMFSLVQLSTAPRR

SEQ ID NO: 110383 - protein, 15 aa, Artificial Sequence
  Description of Artificial Sequence: Synthetic peptide
  Seed: PRMCSLMQGSTLPRR
PRMFSLVQLSTIPRR

SEQ ID NO: 110384 - protein, 15 aa, Artificial Sequence
  Description of Artificial Sequence: Synthetic peptide
  Seed: PRMCSLMQGSTLPRR
PRMFSLVQLSTLPRR

SEQ ID NO: 110385 - protein, 15 aa, Artificial Sequence
  Description of Artificial Sequence: Synthetic peptide
  Seed: PRMCSLMQGSTLPRR
PRMFSLVQLSTMPRR

SEQ ID NO: 110386 - protein, 15 aa, Artificial Sequence
  Description of Artificial Sequence: Synthetic peptide
  Seed: PRMCSLMQGSTLPRR
PRMFSLVQLSTNPRR

SEQ ID NO: 110387 - protein, 15 aa, Artificial Sequence
  Description of Artificial Sequence: Synthetic peptide
  Seed: PRMCSLMQGSTLPRR
PRMFSLVQLSTSPRR

SEQ ID NO: 110388 - protein, 15 aa, Artificial Sequence
  Description of Artificial Sequence: Synthetic peptide
  Seed: PRMCSLMQGSTLPRR
PRMFSLVQLSTTPRR

SEQ ID NO: 110389 - protein, 15 aa, Artificial Sequence
  Description of Artificial Sequence: Synthetic peptide
  Seed: PRMCSLMQGSTLPRR
PRMFSLVQLSTVPRR

SEQ ID NO: 110390 - protein, 15 aa, Artificial Sequence
  Description of Artificial Sequence: Synthetic peptide
  Seed: PRMCSLMQGSTLPRR
PRMFSLVQMSTAPRR

SEQ ID NO: 110391 - protein, 15 aa, Artificial Sequence
  Description of Artificial Sequence: Synthetic peptide
  Seed: PRMCSLMQGSTLPRR
PRMFSLVQMSTIPRR

SEQ ID NO: 110392 - protein, 15 aa, Artificial Sequence
  Description of Artificial Sequence: Synthetic peptide
  Seed: PRMCSLMQGSTLPRR
PRMFSLVQMSTLPRR

SEQ ID NO: 110393 - protein, 15 aa, Artificial Sequence
  Description of Artificial Sequence: Synthetic peptide
  Seed: PRMCSLMQGSTLPRR
PRMFSLVQMSTMPRR

SEQ ID NO: 110394 - protein, 15 aa, Artificial Sequence
  Description of Artificial Sequence: Synthetic peptide
  Seed: PRMCSLMQGSTLPRR
PRMFSLVQMSTNPRR

SEQ ID NO: 110395 - protein, 15 aa, Artificial Sequence
  Description of Artificial Sequence: Synthetic peptide
  Seed: PRMCSLMQGSTLPRR
PRMFSLVQMSTSPRR

SEQ ID NO: 110396 - protein, 15 aa, Artificial Sequence
  Description of Artificial Sequence: Synthetic peptide
  Seed: PRMCSLMQGSTLPRR
PRMFSLVQMSTTPRR

SEQ ID NO: 110397 - protein, 15 aa, Artificial Sequence
  Description of Artificial Sequence: Synthetic peptide
  Seed: PRMCSLMQGSTLPRR
PRMFSLVQMSTVPRR

SEQ ID NO: 110398 - protein, 15 aa, Artificial Sequence
  Description of Artificial Sequence: Synthetic peptide
  Seed: PRMCSLMQGSTLPRR
PRMFSLVQNSTAPRR

SEQ ID NO: 110399 - protein, 15 aa, Artificial Sequence
  Description of Artificial Sequence: Synthetic peptide
  Seed: PRMCSLMQGSTLPRR
PRMFSLVQNSTCPRR

SEQ ID NO: 110400 - protein, 15 aa, Artificial Sequence
  Description of Artificial Sequence: Synthetic peptide
  Seed: PRMCSLMQGSTLPRR
PRMFSLVQNSTGPRR

SEQ ID NO: 110401 - protein, 15 aa, Artificial Sequence
  Description of Artificial Sequence: Synthetic peptide
  Seed: PRMCSLMQGSTLPRR
PRMFSLVQNSTIPRR

SEQ ID NO: 110402 - protein, 15 aa, Artificial Sequence
  Description of Artificial Sequence: Synthetic peptide
  Seed: PRMCSLMQGSTLPRR
PRMFSLVQNSTLPRR

SEQ ID NO: 110403 - protein, 15 aa, Artificial Sequence
  Description of Artificial Sequence: Synthetic peptide
  Seed: PRMCSLMQGSTLPRR
PRMFSLVQNSTMPRR

SEQ ID NO: 110404 - protein, 15 aa, Artificial Sequence
  Description of Artificial Sequence: Synthetic peptide
  Seed: PRMCSLMQGSTLPRR
PRMFSLVQNSTNPRR

SEQ ID NO: 110405 - protein, 15 aa, Artificial Sequence
  Description of Artificial Sequence: Synthetic peptide
  Seed: PRMCSLMQGSTLPRR
PRMFSLVQNSTQPRR

SEQ ID NO: 110406 - protein, 15 aa, Artificial Sequence
  Description of Artificial Sequence: Synthetic peptide
  Seed: PRMCSLMQGSTLPRR
PRMFSLVQNSTSPRR

SEQ ID NO: 110407 - protein, 15 aa, Artificial Sequence
  Description of Artificial Sequence: Synthetic peptide
  Seed: PRMCSLMQGSTLPRR
PRMFSLVQNSTTPRR

SEQ ID NO: 110408 - protein, 15 aa, Artificial Sequence
  Description of Artificial Sequence: Synthetic peptide
  Seed: PRMCSLMQGSTLPRR
PRMFSLVQNSTVPRR

SEQ ID NO: 110409 - protein, 15 aa, Artificial Sequence
  Description of Artificial Sequence: Synthetic peptide
  Seed: PRMCSLMQGSTLPRR
PRMFSLVQPSTAPRR

SEQ ID NO: 110410 - protein, 15 aa, Artificial Sequence
  Description of Artificial Sequence: Synthetic peptide
  Seed: PRMCSLMQGSTLPRR
PRMFSLVQPSTCPRR

SEQ ID NO: 110411 - protein, 15 aa, Artificial Sequence
  Description of Artificial Sequence: Synthetic peptide
  Seed: PRMCSLMQGSTLPRR
PRMFSLVQPSTDPRR

SEQ ID NO: 110412 - protein, 15 aa, Artificial Sequence
  Description of Artificial Sequence: Synthetic peptide
  Seed: PRMCSLMQGSTLPRR
PRMFSLVQPSTEPRR

SEQ ID NO: 110413 - protein, 15 aa, Artificial Sequence
  Description of Artificial Sequence: Synthetic peptide
  Seed: PRMCSLMQGSTLPRR
PRMFSLVQPSTFPRR

SEQ ID NO: 110414 - protein, 15 aa, Artificial Sequence
  Description of Artificial Sequence: Synthetic peptide
  Seed: PRMCSLMQGSTLPRR
PRMFSLVQPSTGPRR

SEQ ID NO: 110415 - protein, 15 aa, Artificial Sequence
  Description of Artificial Sequence: Synthetic peptide
  Seed: PRMCSLMQGSTLPRR
PRMFSLVQPSTHPRR

SEQ ID NO: 110416 - protein, 15 aa, Artificial Sequence
  Description of Artificial Sequence: Synthetic peptide
  Seed: PRMCSLMQGSTLPRR
PRMFSLVQPSTIPRR

SEQ ID NO: 110417 - protein, 15 aa, Artificial Sequence
  Description of Artificial Sequence: Synthetic peptide
  Seed: PRMCSLMQGSTLPRR
PRMFSLVQPSTLPRR

SEQ ID NO: 110418 - protein, 15 aa, Artificial Sequence
  Description of Artificial Sequence: Synthetic peptide
  Seed: PRMCSLMQGSTLPRR
PRMFSLVQPSTMPRR

SEQ ID NO: 110419 - protein, 15 aa, Artificial Sequence
  Description of Artificial Sequence: Synthetic peptide
  Seed: PRMCSLMQGSTLPRR
PRMFSLVQPSTNPRR

SEQ ID NO: 110420 - protein, 15 aa, Artificial Sequence
  Description of Artificial Sequence: Synthetic peptide
  Seed: PRMCSLMQGSTLPRR
PRMFSLVQPSTPPRR

SEQ ID NO: 110421 - protein, 15 aa, Artificial Sequence
  Description of Artificial Sequence: Synthetic peptide
  Seed: PRMCSLMQGSTLPRR
PRMFSLVQPSTQPRR

SEQ ID NO: 110422 - protein, 15 aa, Artificial Sequence
  Description of Artificial Sequence: Synthetic peptide
  Seed: PRMCSLMQGSTLPRR
PRMFSLVQPSTSPRR

SEQ ID NO: 110423 - protein, 15 aa, Artificial Sequence
  Description of Artificial Sequence: Synthetic peptide
  Seed: PRMCSLMQGSTLPRR
PRMFSLVQPSTTPRR

SEQ ID NO: 110424 - protein, 15 aa, Artificial Sequence
  Description of Artificial Sequence: Synthetic peptide
  Seed: PRMCSLMQGSTLPRR
PRMFSLVQPSTVPRR

SEQ ID NO: 110425 - protein, 15 aa, Artificial Sequence
  Description of Artificial Sequence: Synthetic peptide
  Seed: PRMCSLMQGSTLPRR
PRMFSLVQPSTWPRR

SEQ ID NO: 110426 - protein, 15 aa, Artificial Sequence
  Description of Artificial Sequence: Synthetic peptide
  Seed: PRMCSLMQGSTLPRR
PRMFSLVQQSTLPRR

SEQ ID NO: 110427 - protein, 15 aa, Artificial Sequence
  Description of Artificial Sequence: Synthetic peptide
  Seed: PRMCSLMQGSTLPRR
PRMFSLVQQSTVPRR

SEQ ID NO: 110428 - protein, 15 aa, Artificial Sequence
  Description of Artificial Sequence: Synthetic peptide
  Seed: PRMCSLMQGSTLPRR
PRMFSLVQSSTAPRR

SEQ ID NO: 110429 - protein, 15 aa, Artificial Sequence
  Description of Artificial Sequence: Synthetic peptide
  Seed: PRMCSLMQGSTLPRR
PRMFSLVQSSTCPRR

SEQ ID NO: 110430 - protein, 15 aa, Artificial Sequence
  Description of Artificial Sequence: Synthetic peptide
  Seed: PRMCSLMQGSTLPRR
PRMFSLVQSSTDPRR

SEQ ID NO: 110431 - protein, 15 aa, Artificial Sequence
  Description of Artificial Sequence: Synthetic peptide
  Seed: PRMCSLMQGSTLPRR
PRMFSLVQSSTFPRR

SEQ ID NO: 110432 - protein, 15 aa, Artificial Sequence
  Description of Artificial Sequence: Synthetic peptide
  Seed: PRMCSLMQGSTLPRR
PRMFSLVQSSTGPRR

SEQ ID NO: 110433 - protein, 15 aa, Artificial Sequence
  Description of Artificial Sequence: Synthetic peptide
  Seed: PRMCSLMQGSTLPRR
PRMFSLVQSSTHPRR

SEQ ID NO: 110434 - protein, 15 aa, Artificial Sequence
  Description of Artificial Sequence: Synthetic peptide
  Seed: PRMCSLMQGSTLPRR
PRMFSLVQSSTIPRR

SEQ ID NO: 110435 - protein, 15 aa, Artificial Sequence
  Description of Artificial Sequence: Synthetic peptide
  Seed: PRMCSLMQGSTLPRR
PRMFSLVQSSTLPRR

SEQ ID NO: 110436 - protein, 15 aa, Artificial Sequence
  Description of Artificial Sequence: Synthetic peptide
  Seed: PRMCSLMQGSTLPRR
PRMFSLVQSSTMPRR

SEQ ID NO: 110437 - protein, 15 aa, Artificial Sequence
  Description of Artificial Sequence: Synthetic peptide
  Seed: PRMCSLMQGSTLPRR
PRMFSLVQSSTNPRR

SEQ ID NO: 110438 - protein, 15 aa, Artificial Sequence
  Description of Artificial Sequence: Synthetic peptide
  Seed: PRMCSLMQGSTLPRR
PRMFSLVQSSTPPRR

SEQ ID NO: 110439 - protein, 15 aa, Artificial Sequence
  Description of Artificial Sequence: Synthetic peptide
  Seed: PRMCSLMQGSTLPRR
PRMFSLVQSSTQPRR

SEQ ID NO: 110440 - protein, 15 aa, Artificial Sequence
  Description of Artificial Sequence: Synthetic peptide
  Seed: PRMCSLMQGSTLPRR
PRMFSLVQSSTSPRR

SEQ ID NO: 110441 - protein, 15 aa, Artificial Sequence
  Description of Artificial Sequence: Synthetic peptide
  Seed: PRMCSLMQGSTLPRR
PRMFSLVQSSTTPRR

SEQ ID NO: 110442 - protein, 15 aa, Artificial Sequence
  Description of Artificial Sequence: Synthetic peptide
  Seed: PRMCSLMQGSTLPRR
PRMFSLVQSSTVPRR

SEQ ID NO: 110443 - protein, 15 aa, Artificial Sequence
  Description of Artificial Sequence: Synthetic peptide
  Seed: PRMCSLMQGSTLPRR
PRMFSLVQSSTYPRR

SEQ ID NO: 110444 - protein, 15 aa, Artificial Sequence
  Description of Artificial Sequence: Synthetic peptide
  Seed: PRMCSLMQGSTLPRR
PRMFSLVQTSTAPRR

SEQ ID NO: 110445 - protein, 15 aa, Artificial Sequence
  Description of Artificial Sequence: Synthetic peptide
  Seed: PRMCSLMQGSTLPRR
PRMFSLVQTSTCPRR

SEQ ID NO: 110446 - protein, 15 aa, Artificial Sequence
  Description of Artificial Sequence: Synthetic peptide
  Seed: PRMCSLMQGSTLPRR
PRMFSLVQTSTFPRR

SEQ ID NO: 110447 - protein, 15 aa, Artificial Sequence
  Description of Artificial Sequence: Synthetic peptide
  Seed: PRMCSLMQGSTLPRR
PRMFSLVQTSTGPRR

SEQ ID NO: 110448 - protein, 15 aa, Artificial Sequence
  Description of Artificial Sequence: Synthetic peptide
  Seed: PRMCSLMQGSTLPRR
PRMFSLVQTSTHPRR

SEQ ID NO: 110449 - protein, 15 aa, Artificial Sequence
  Description of Artificial Sequence: Synthetic peptide
  Seed: PRMCSLMQGSTLPRR
PRMFSLVQTSTIPRR

SEQ ID NO: 110450 - protein, 15 aa, Artificial Sequence
  Description of Artificial Sequence: Synthetic peptide
  Seed: PRMCSLMQGSTLPRR
PRMFSLVQTSTLPRR

SEQ ID NO: 110451 - protein, 15 aa, Artificial Sequence
  Description of Artificial Sequence: Synthetic peptide
  Seed: PRMCSLMQGSTLPRR
PRMFSLVQTSTMPRR

SEQ ID NO: 110452 - protein, 15 aa, Artificial Sequence
  Description of Artificial Sequence: Synthetic peptide
  Seed: PRMCSLMQGSTLPRR
PRMFSLVQTSTNPRR

SEQ ID NO: 110453 - protein, 15 aa, Artificial Sequence
  Description of Artificial Sequence: Synthetic peptide
  Seed: PRMCSLMQGSTLPRR
PRMFSLVQTSTPPRR

SEQ ID NO: 110454 - protein, 15 aa, Artificial Sequence
  Description of Artificial Sequence: Synthetic peptide
  Seed: PRMCSLMQGSTLPRR
PRMFSLVQTSTQPRR

SEQ ID NO: 110455 - protein, 15 aa, Artificial Sequence
  Description of Artificial Sequence: Synthetic peptide
  Seed: PRMCSLMQGSTLPRR
PRMFSLVQTSTSPRR

SEQ ID NO: 110456 - protein, 15 aa, Artificial Sequence
  Description of Artificial Sequence: Synthetic peptide
  Seed: PRMCSLMQGSTLPRR
PRMFSLVQTSTTPRR

SEQ ID NO: 110457 - protein, 15 aa, Artificial Sequence
  Description of Artificial Sequence: Synthetic peptide
  Seed: PRMCSLMQGSTLPRR
PRMFSLVQTSTVPRR

SEQ ID NO: 110458 - protein, 15 aa, Artificial Sequence
  Description of Artificial Sequence: Synthetic peptide
  Seed: PRMCSLMQGSTLPRR
PRMFSLVQVSTAPRR

SEQ ID NO: 110459 - protein, 15 aa, Artificial Sequence
  Description of Artificial Sequence: Synthetic peptide
  Seed: PRMCSLMQGSTLPRR
PRMFSLVQVSTCPRR

SEQ ID NO: 110460 - protein, 15 aa, Artificial Sequence
  Description of Artificial Sequence: Synthetic peptide
  Seed: PRMCSLMQGSTLPRR
PRMFSLVQVSTDPRR

SEQ ID NO: 110461 - protein, 15 aa, Artificial Sequence
  Description of Artificial Sequence: Synthetic peptide
  Seed: PRMCSLMQGSTLPRR
PRMFSLVQVSTGPRR

SEQ ID NO: 110462 - protein, 15 aa, Artificial Sequence
  Description of Artificial Sequence: Synthetic peptide
  Seed: PRMCSLMQGSTLPRR
PRMFSLVQVSTHPRR

SEQ ID NO: 110463 - protein, 15 aa, Artificial Sequence
  Description of Artificial Sequence: Synthetic peptide
  Seed: PRMCSLMQGSTLPRR
PRMFSLVQVSTIPRR

SEQ ID NO: 110464 - protein, 15 aa, Artificial Sequence
  Description of Artificial Sequence: Synthetic peptide
  Seed: PRMCSLMQGSTLPRR
PRMFSLVQVSTLPRR

SEQ ID NO: 110465 - protein, 15 aa, Artificial Sequence
  Description of Artificial Sequence: Synthetic peptide
  Seed: PRMCSLMQGSTLPRR
PRMFSLVQVSTMPRR

SEQ ID NO: 110466 - protein, 15 aa, Artificial Sequence
  Description of Artificial Sequence: Synthetic peptide
  Seed: PRMCSLMQGSTLPRR
PRMFSLVQVSTNPRR

SEQ ID NO: 110467 - protein, 15 aa, Artificial Sequence
  Description of Artificial Sequence: Synthetic peptide
  Seed: PRMCSLMQGSTLPRR
PRMFSLVQVSTPPRR

SEQ ID NO: 110468 - protein, 15 aa, Artificial Sequence
  Description of Artificial Sequence: Synthetic peptide
  Seed: PRMCSLMQGSTLPRR
PRMFSLVQVSTQPRR

SEQ ID NO: 110469 - protein, 15 aa, Artificial Sequence
  Description of Artificial Sequence: Synthetic peptide
  Seed: PRMCSLMQGSTLPRR
PRMFSLVQVSTSPRR

SEQ ID NO: 110470 - protein, 15 aa, Artificial Sequence
  Description of Artificial Sequence: Synthetic peptide
  Seed: PRMCSLMQGSTLPRR
PRMFSLVQVSTTPRR

SEQ ID NO: 110471 - protein, 15 aa, Artificial Sequence
  Description of Artificial Sequence: Synthetic peptide
  Seed: PRMCSLMQGSTLPRR
PRMFSLVQVSTVPRR

SEQ ID NO: 110472 - protein, 15 aa, Artificial Sequence
  Description of Artificial Sequence: Synthetic peptide
  Seed: PRMCSLMQGSTLPRR
PRMFSLWQASTAPRR

SEQ ID NO: 110473 - protein, 15 aa, Artificial Sequence
  Description of Artificial Sequence: Synthetic peptide
  Seed: PRMCSLMQGSTLPRR
PRMFSLWQASTIPRR

SEQ ID NO: 110474 - protein, 15 aa, Artificial Sequence
  Description of Artificial Sequence: Synthetic peptide
  Seed: PRMCSLMQGSTLPRR
PRMFSLWQASTLPRR

SEQ ID NO: 110475 - protein, 15 aa, Artificial Sequence
  Description of Artificial Sequence: Synthetic peptide
  Seed: PRMCSLMQGSTLPRR
PRMFSLWQASTMPRR

SEQ ID NO: 110476 - protein, 15 aa, Artificial Sequence
  Description of Artificial Sequence: Synthetic peptide
  Seed: PRMCSLMQGSTLPRR
PRMFSLWQASTSPRR

SEQ ID NO: 110477 - protein, 15 aa, Artificial Sequence
  Description of Artificial Sequence: Synthetic peptide
  Seed: PRMCSLMQGSTLPRR
PRMFSLWQASTTPRR

SEQ ID NO: 110478 - protein, 15 aa, Artificial Sequence
  Description of Artificial Sequence: Synthetic peptide
  Seed: PRMCSLMQGSTLPRR
PRMFSLWQASTVPRR

SEQ ID NO: 110479 - protein, 15 aa, Artificial Sequence
  Description of Artificial Sequence: Synthetic peptide
  Seed: PRMCSLMQGSTLPRR
PRMFSLWQGSTAPRR

SEQ ID NO: 110480 - protein, 15 aa, Artificial Sequence
  Description of Artificial Sequence: Synthetic peptide
  Seed: PRMCSLMQGSTLPRR
PRMFSLWQGSTIPRR

SEQ ID NO: 110481 - protein, 15 aa, Artificial Sequence
  Description of Artificial Sequence: Synthetic peptide
  Seed: PRMCSLMQGSTLPRR
PRMFSLWQGSTLPRR

SEQ ID NO: 110482 - protein, 15 aa, Artificial Sequence
  Description of Artificial Sequence: Synthetic peptide
  Seed: PRMCSLMQGSTLPRR
PRMFSLWQGSTVPRR

SEQ ID NO: 110483 - protein, 15 aa, Artificial Sequence
  Description of Artificial Sequence: Synthetic peptide
  Seed: PRMCSLMQGSTLPRR
PRMFSLWQISTAPRR

SEQ ID NO: 110484 - protein, 15 aa, Artificial Sequence
  Description of Artificial Sequence: Synthetic peptide
  Seed: PRMCSLMQGSTLPRR
PRMFSLWQNSTLPRR

SEQ ID NO: 110485 - protein, 15 aa, Artificial Sequence
  Description of Artificial Sequence: Synthetic peptide
  Seed: PRMCSLMQGSTLPRR
PRMFSLWQNSTVPRR

SEQ ID NO: 110486 - protein, 15 aa, Artificial Sequence
  Description of Artificial Sequence: Synthetic peptide
  Seed: PRMCSLMQGSTLPRR
PRMFSLWQPSTAPRR

SEQ ID NO: 110487 - protein, 15 aa, Artificial Sequence
  Description of Artificial Sequence: Synthetic peptide
  Seed: PRMCSLMQGSTLPRR
PRMFSLWQPSTIPRR

SEQ ID NO: 110488 - protein, 15 aa, Artificial Sequence
  Description of Artificial Sequence: Synthetic peptide
  Seed: PRMCSLMQGSTLPRR
PRMFSLWQPSTLPRR

SEQ ID NO: 110489 - protein, 15 aa, Artificial Sequence
  Description of Artificial Sequence: Synthetic peptide
  Seed: PRMCSLMQGSTLPRR
PRMFSLWQPSTVPRR

SEQ ID NO: 110490 - protein, 15 aa, Artificial Sequence
  Description of Artificial Sequence: Synthetic peptide
  Seed: PRMCSLMQGSTLPRR
PRMFSLWQSSTAPRR

SEQ ID NO: 110491 - protein, 15 aa, Artificial Sequence
  Description of Artificial Sequence: Synthetic peptide
  Seed: PRMCSLMQGSTLPRR
PRMFSLWQSSTIPRR

SEQ ID NO: 110492 - protein, 15 aa, Artificial Sequence
  Description of Artificial Sequence: Synthetic peptide
  Seed: PRMCSLMQGSTLPRR
PRMFSLWQSSTLPRR

SEQ ID NO: 110493 - protein, 15 aa, Artificial Sequence
  Description of Artificial Sequence: Synthetic peptide
  Seed: PRMCSLMQGSTLPRR
PRMFSLWQSSTVPRR

SEQ ID NO: 110494 - protein, 15 aa, Artificial Sequence
  Description of Artificial Sequence: Synthetic peptide
  Seed: PRMCSLMQGSTLPRR
PRMFSLWQTSTAPRR

SEQ ID NO: 110495 - protein, 15 aa, Artificial Sequence
  Description of Artificial Sequence: Synthetic peptide
  Seed: PRMCSLMQGSTLPRR
PRMFSLWQVSTAPRR

SEQ ID NO: 110496 - protein, 15 aa, Artificial Sequence
  Description of Artificial Sequence: Synthetic peptide
  Seed: PRMCSLMQGSTLPRR
PRMFSLYQASTAPRR

SEQ ID NO: 110497 - protein, 15 aa, Artificial Sequence
  Description of Artificial Sequence: Synthetic peptide
  Seed: PRMCSLMQGSTLPRR
PRMFSLYQASTIPRR

SEQ ID NO: 110498 - protein, 15 aa, Artificial Sequence
  Description of Artificial Sequence: Synthetic peptide
  Seed: PRMCSLMQGSTLPRR
PRMFSLYQASTLPRR

SEQ ID NO: 110499 - protein, 15 aa, Artificial Sequence
  Description of Artificial Sequence: Synthetic peptide
  Seed: PRMCSLMQGSTLPRR
PRMFSLYQASTMPRR

SEQ ID NO: 110500 - protein, 15 aa, Artificial Sequence
  Description of Artificial Sequence: Synthetic peptide
  Seed: PRMCSLMQGSTLPRR
PRMFSLYQASTVPRR

SEQ ID NO: 110501 - protein, 15 aa, Artificial Sequence
  Description of Artificial Sequence: Synthetic peptide
  Seed: PRMCSLMQGSTLPRR
PRMFSLYQGSTAPRR

SEQ ID NO: 110502 - protein, 15 aa, Artificial Sequence
  Description of Artificial Sequence: Synthetic peptide
  Seed: PRMCSLMQGSTLPRR
PRMFSLYQGSTLPRR

SEQ ID NO: 110503 - protein, 15 aa, Artificial Sequence
  Description of Artificial Sequence: Synthetic peptide
  Seed: PRMCSLMQGSTLPRR
PRMFSLYQGSTVPRR

SEQ ID NO: 110504 - protein, 15 aa, Artificial Sequence
  Description of Artificial Sequence: Synthetic peptide
  Seed: PRMCSLMQGSTLPRR
PRMFSLYQISTAPRR

SEQ ID NO: 110505 - protein, 15 aa, Artificial Sequence
  Description of Artificial Sequence: Synthetic peptide
  Seed: PRMCSLMQGSTLPRR
PRMFSLYQNSTAPRR

SEQ ID NO: 110506 - protein, 15 aa, Artificial Sequence
  Description of Artificial Sequence: Synthetic peptide
  Seed: PRMCSLMQGSTLPRR
PRMFSLYQNSTIPRR

SEQ ID NO: 110507 - protein, 15 aa, Artificial Sequence
  Description of Artificial Sequence: Synthetic peptide
  Seed: PRMCSLMQGSTLPRR
PRMFSLYQNSTLPRR

SEQ ID NO: 110508 - protein, 15 aa, Artificial Sequence
  Description of Artificial Sequence: Synthetic peptide
  Seed: PRMCSLMQGSTLPRR
PRMFSLYQNSTMPRR

SEQ ID NO: 110509 - protein, 15 aa, Artificial Sequence
  Description of Artificial Sequence: Synthetic peptide
  Seed: PRMCSLMQGSTLPRR
PRMFSLYQNSTVPRR

SEQ ID NO: 110510 - protein, 15 aa, Artificial Sequence
  Description of Artificial Sequence: Synthetic peptide
  Seed: PRMCSLMQGSTLPRR
PRMFSLYQSSTAPRR

SEQ ID NO: 110511 - protein, 15 aa, Artificial Sequence
  Description of Artificial Sequence: Synthetic peptide
  Seed: PRMCSLMQGSTLPRR
PRMFSLYQSSTIPRR

SEQ ID NO: 110512 - protein, 15 aa, Artificial Sequence
  Description of Artificial Sequence: Synthetic peptide
  Seed: PRMCSLMQGSTLPRR
PRMFSLYQSSTLPRR

SEQ ID NO: 110513 - protein, 15 aa, Artificial Sequence
  Description of Artificial Sequence: Synthetic peptide
  Seed: PRMCSLMQGSTLPRR
PRMFSLYQSSTMPRR

SEQ ID NO: 110514 - protein, 15 aa, Artificial Sequence
  Description of Artificial Sequence: Synthetic peptide
  Seed: PRMCSLMQGSTLPRR
PRMFSLYQSSTVPRR

SEQ ID NO: 110515 - protein, 15 aa, Artificial Sequence
  Description of Artificial Sequence: Synthetic peptide
  Seed: PRMCSLMQGSTLPRR
PRMFSLYQTSTLPRR

SEQ ID NO: 110516 - protein, 15 aa, Artificial Sequence
  Description of Artificial Sequence: Synthetic peptide
  Seed: PRMCSLMQGSTLPRR
PRMHSLLQASTIPRR

SEQ ID NO: 110517 - protein, 15 aa, Artificial Sequence
  Description of Artificial Sequence: Synthetic peptide
  Seed: PRMCSLMQGSTLPRR
PRMHSLLQASTLPRR

SEQ ID NO: 110518 - protein, 15 aa, Artificial Sequence
  Description of Artificial Sequence: Synthetic peptide
  Seed: PRMCSLMQGSTLPRR
PRMHSLLQASTVPRR

SEQ ID NO: 110519 - protein, 15 aa, Artificial Sequence
  Description of Artificial Sequence: Synthetic peptide
  Seed: PRMCSLMQGSTLPRR
PRMHSLLQGSTLPRR

SEQ ID NO: 110520 - protein, 15 aa, Artificial Sequence
  Description of Artificial Sequence: Synthetic peptide
  Seed: PRMCSLMQGSTLPRR
PRMHSLMQASTIPRR

SEQ ID NO: 110521 - protein, 15 aa, Artificial Sequence
  Description of Artificial Sequence: Synthetic peptide
  Seed: PRMCSLMQGSTLPRR
PRMHSLMQASTLPRR

SEQ ID NO: 110522 - protein, 15 aa, Artificial Sequence
  Description of Artificial Sequence: Synthetic peptide
  Seed: PRMCSLMQGSTLPRR
PRMHSLMQASTVPRR

SEQ ID NO: 110523 - protein, 15 aa, Artificial Sequence
  Description of Artificial Sequence: Synthetic peptide
  Seed: PRMCSLMQGSTLPRR
PRMISLAQASTAPRR

SEQ ID NO: 110524 - protein, 15 aa, Artificial Sequence
  Description of Artificial Sequence: Synthetic peptide
  Seed: PRMCSLMQGSTLPRR
PRMISLAQASTCPRR

SEQ ID NO: 110525 - protein, 15 aa, Artificial Sequence
  Description of Artificial Sequence: Synthetic peptide
  Seed: PRMCSLMQGSTLPRR
PRMISLAQASTFPRR

SEQ ID NO: 110526 - protein, 15 aa, Artificial Sequence
  Description of Artificial Sequence: Synthetic peptide
  Seed: PRMCSLMQGSTLPRR
PRMISLAQASTGPRR

SEQ ID NO: 110527 - protein, 15 aa, Artificial Sequence
  Description of Artificial Sequence: Synthetic peptide
  Seed: PRMCSLMQGSTLPRR
PRMISLAQASTIPRR

SEQ ID NO: 110528 - protein, 15 aa, Artificial Sequence
  Description of Artificial Sequence: Synthetic peptide
  Seed: PRMCSLMQGSTLPRR
PRMISLAQASTLPRR

SEQ ID NO: 110529 - protein, 15 aa, Artificial Sequence
  Description of Artificial Sequence: Synthetic peptide
  Seed: PRMCSLMQGSTLPRR
PRMISLAQASTMPRR

SEQ ID NO: 110530 - protein, 15 aa, Artificial Sequence
  Description of Artificial Sequence: Synthetic peptide
  Seed: PRMCSLMQGSTLPRR
PRMISLAQASTNPRR

SEQ ID NO: 110531 - protein, 15 aa, Artificial Sequence
  Description of Artificial Sequence: Synthetic peptide
  Seed: PRMCSLMQGSTLPRR
PRMISLAQASTSPRR

SEQ ID NO: 110532 - protein, 15 aa, Artificial Sequence
  Description of Artificial Sequence: Synthetic peptide
  Seed: PRMCSLMQGSTLPRR
PRMISLAQASTTPRR

SEQ ID NO: 110533 - protein, 15 aa, Artificial Sequence
  Description of Artificial Sequence: Synthetic peptide
  Seed: PRMCSLMQGSTLPRR
PRMISLAQASTVPRR

SEQ ID NO: 110534 - protein, 15 aa, Artificial Sequence
  Description of Artificial Sequence: Synthetic peptide
  Seed: PRMCSLMQGSTLPRR
PRMISLAQGSTAPRR

SEQ ID NO: 110535 - protein, 15 aa, Artificial Sequence
  Description of Artificial Sequence: Synthetic peptide
  Seed: PRMCSLMQGSTLPRR
PRMISLAQGSTIPRR

SEQ ID NO: 110536 - protein, 15 aa, Artificial Sequence
  Description of Artificial Sequence: Synthetic peptide
  Seed: PRMCSLMQGSTLPRR
PRMISLAQGSTLPRR

SEQ ID NO: 110537 - protein, 15 aa, Artificial Sequence
  Description of Artificial Sequence: Synthetic peptide
  Seed: PRMCSLMQGSTLPRR
PRMISLAQGSTMPRR

SEQ ID NO: 110538 - protein, 15 aa, Artificial Sequence
  Description of Artificial Sequence: Synthetic peptide
  Seed: PRMCSLMQGSTLPRR
PRMISLAQGSTSPRR

SEQ ID NO: 110539 - protein, 15 aa, Artificial Sequence
  Description of Artificial Sequence: Synthetic peptide
  Seed: PRMCSLMQGSTLPRR
PRMISLAQGSTTPRR

SEQ ID NO: 110540 - protein, 15 aa, Artificial Sequence
  Description of Artificial Sequence: Synthetic peptide
  Seed: PRMCSLMQGSTLPRR
PRMISLAQGSTVPRR

SEQ ID NO: 110541 - protein, 15 aa, Artificial Sequence
  Description of Artificial Sequence: Synthetic peptide
  Seed: PRMCSLMQGSTLPRR
PRMISLAQISTAPRR

SEQ ID NO: 110542 - protein, 15 aa, Artificial Sequence
  Description of Artificial Sequence: Synthetic peptide
  Seed: PRMCSLMQGSTLPRR
PRMISLAQISTLPRR

SEQ ID NO: 110543 - protein, 15 aa, Artificial Sequence
  Description of Artificial Sequence: Synthetic peptide
  Seed: PRMCSLMQGSTLPRR
PRMISLAQNSTAPRR

SEQ ID NO: 110544 - protein, 15 aa, Artificial Sequence
  Description of Artificial Sequence: Synthetic peptide
  Seed: PRMCSLMQGSTLPRR
PRMISLAQNSTIPRR

SEQ ID NO: 110545 - protein, 15 aa, Artificial Sequence
  Description of Artificial Sequence: Synthetic peptide
  Seed: PRMCSLMQGSTLPRR
PRMISLAQNSTLPRR

SEQ ID NO: 110546 - protein, 15 aa, Artificial Sequence
  Description of Artificial Sequence: Synthetic peptide
  Seed: PRMCSLMQGSTLPRR
PRMISLAQNSTVPRR

SEQ ID NO: 110547 - protein, 15 aa, Artificial Sequence
  Description of Artificial Sequence: Synthetic peptide
  Seed: PRMCSLMQGSTLPRR
PRMISLAQPSTAPRR

SEQ ID NO: 110548 - protein, 15 aa, Artificial Sequence
  Description of Artificial Sequence: Synthetic peptide
  Seed: PRMCSLMQGSTLPRR
PRMISLAQPSTIPRR

SEQ ID NO: 110549 - protein, 15 aa, Artificial Sequence
  Description of Artificial Sequence: Synthetic peptide
  Seed: PRMCSLMQGSTLPRR
PRMISLAQPSTLPRR

SEQ ID NO: 110550 - protein, 15 aa, Artificial Sequence
  Description of Artificial Sequence: Synthetic peptide
  Seed: PRMCSLMQGSTLPRR
PRMISLAQPSTMPRR

SEQ ID NO: 110551 - protein, 15 aa, Artificial Sequence
  Description of Artificial Sequence: Synthetic peptide
  Seed: PRMCSLMQGSTLPRR
PRMISLAQPSTVPRR

SEQ ID NO: 110552 - protein, 15 aa, Artificial Sequence
  Description of Artificial Sequence: Synthetic peptide
  Seed: PRMCSLMQGSTLPRR
PRMISLAQSSTAPRR

SEQ ID NO: 110553 - protein, 15 aa, Artificial Sequence
  Description of Artificial Sequence: Synthetic peptide
  Seed: PRMCSLMQGSTLPRR
PRMISLAQSSTIPRR

SEQ ID NO: 110554 - protein, 15 aa, Artificial Sequence
  Description of Artificial Sequence: Synthetic peptide
  Seed: PRMCSLMQGSTLPRR
PRMISLAQSSTLPRR

SEQ ID NO: 110555 - protein, 15 aa, Artificial Sequence
  Description of Artificial Sequence: Synthetic peptide
  Seed: PRMCSLMQGSTLPRR
PRMISLAQSSTMPRR

SEQ ID NO: 110556 - protein, 15 aa, Artificial Sequence
  Description of Artificial Sequence: Synthetic peptide
  Seed: PRMCSLMQGSTLPRR
PRMISLAQSSTSPRR

SEQ ID NO: 110557 - protein, 15 aa, Artificial Sequence
  Description of Artificial Sequence: Synthetic peptide
  Seed: PRMCSLMQGSTLPRR
PRMISLAQSSTTPRR

SEQ ID NO: 110558 - protein, 15 aa, Artificial Sequence
  Description of Artificial Sequence: Synthetic peptide
  Seed: PRMCSLMQGSTLPRR
PRMISLAQSSTVPRR

SEQ ID NO: 110559 - protein, 15 aa, Artificial Sequence
  Description of Artificial Sequence: Synthetic peptide
  Seed: PRMCSLMQGSTLPRR
PRMISLAQTSTAPRR

SEQ ID NO: 110560 - protein, 15 aa, Artificial Sequence
  Description of Artificial Sequence: Synthetic peptide
  Seed: PRMCSLMQGSTLPRR
PRMISLAQTSTIPRR

SEQ ID NO: 110561 - protein, 15 aa, Artificial Sequence
  Description of Artificial Sequence: Synthetic peptide
  Seed: PRMCSLMQGSTLPRR
PRMISLAQTSTLPRR

SEQ ID NO: 110562 - protein, 15 aa, Artificial Sequence
  Description of Artificial Sequence: Synthetic peptide
  Seed: PRMCSLMQGSTLPRR
PRMISLAQTSTMPRR

SEQ ID NO: 110563 - protein, 15 aa, Artificial Sequence
  Description of Artificial Sequence: Synthetic peptide
  Seed: PRMCSLMQGSTLPRR
PRMISLAQTSTVPRR

SEQ ID NO: 110564 - protein, 15 aa, Artificial Sequence
  Description of Artificial Sequence: Synthetic peptide
  Seed: PRMCSLMQGSTLPRR
PRMISLAQVSTAPRR

SEQ ID NO: 110565 - protein, 15 aa, Artificial Sequence
  Description of Artificial Sequence: Synthetic peptide
  Seed: PRMCSLMQGSTLPRR
PRMISLAQVSTIPRR

SEQ ID NO: 110566 - protein, 15 aa, Artificial Sequence
  Description of Artificial Sequence: Synthetic peptide
  Seed: PRMCSLMQGSTLPRR
PRMISLAQVSTLPRR

SEQ ID NO: 110567 - protein, 15 aa, Artificial Sequence
  Description of Artificial Sequence: Synthetic peptide
  Seed: PRMCSLMQGSTLPRR
PRMISLAQVSTSPRR

SEQ ID NO: 110568 - protein, 15 aa, Artificial Sequence
  Description of Artificial Sequence: Synthetic peptide
  Seed: PRMCSLMQGSTLPRR
PRMISLAQVSTVPRR

SEQ ID NO: 110569 - protein, 15 aa, Artificial Sequence
  Description of Artificial Sequence: Synthetic peptide
  Seed: PRMCSLMQGSTLPRR
PRMISLCQASTAPRR

SEQ ID NO: 110570 - protein, 15 aa, Artificial Sequence
  Description of Artificial Sequence: Synthetic peptide
  Seed: PRMCSLMQGSTLPRR
PRMISLCQASTIPRR

SEQ ID NO: 110571 - protein, 15 aa, Artificial Sequence
  Description of Artificial Sequence: Synthetic peptide
  Seed: PRMCSLMQGSTLPRR
PRMISLCQASTLPRR

SEQ ID NO: 110572 - protein, 15 aa, Artificial Sequence
  Description of Artificial Sequence: Synthetic peptide
  Seed: PRMCSLMQGSTLPRR
PRMISLCQASTVPRR

SEQ ID NO: 110573 - protein, 15 aa, Artificial Sequence
  Description of Artificial Sequence: Synthetic peptide
  Seed: PRMCSLMQGSTLPRR
PRMISLEQASTAPRR

SEQ ID NO: 110574 - protein, 15 aa, Artificial Sequence
  Description of Artificial Sequence: Synthetic peptide
  Seed: PRMCSLMQGSTLPRR
PRMISLEQASTIPRR

SEQ ID NO: 110575 - protein, 15 aa, Artificial Sequence
  Description of Artificial Sequence: Synthetic peptide
  Seed: PRMCSLMQGSTLPRR
PRMISLEQASTLPRR

SEQ ID NO: 110576 - protein, 15 aa, Artificial Sequence
  Description of Artificial Sequence: Synthetic peptide
  Seed: PRMCSLMQGSTLPRR
PRMISLEQASTMPRR

SEQ ID NO: 110577 - protein, 15 aa, Artificial Sequence
  Description of Artificial Sequence: Synthetic peptide
  Seed: PRMCSLMQGSTLPRR
PRMISLEQASTVPRR

SEQ ID NO: 110578 - protein, 15 aa, Artificial Sequence
  Description of Artificial Sequence: Synthetic peptide
  Seed: PRMCSLMQGSTLPRR
PRMISLEQGSTAPRR

SEQ ID NO: 110579 - protein, 15 aa, Artificial Sequence
  Description of Artificial Sequence: Synthetic peptide
  Seed: PRMCSLMQGSTLPRR
PRMISLEQGSTIPRR

SEQ ID NO: 110580 - protein, 15 aa, Artificial Sequence
  Description of Artificial Sequence: Synthetic peptide
  Seed: PRMCSLMQGSTLPRR
PRMISLEQGSTLPRR

SEQ ID NO: 110581 - protein, 15 aa, Artificial Sequence
  Description of Artificial Sequence: Synthetic peptide
  Seed: PRMCSLMQGSTLPRR
PRMISLEQGSTVPRR

SEQ ID NO: 110582 - protein, 15 aa, Artificial Sequence
  Description of Artificial Sequence: Synthetic peptide
  Seed: PRMCSLMQGSTLPRR
PRMISLEQSSTAPRR

SEQ ID NO: 110583 - protein, 15 aa, Artificial Sequence
  Description of Artificial Sequence: Synthetic peptide
  Seed: PRMCSLMQGSTLPRR
PRMISLEQSSTIPRR

SEQ ID NO: 110584 - protein, 15 aa, Artificial Sequence
  Description of Artificial Sequence: Synthetic peptide
  Seed: PRMCSLMQGSTLPRR
PRMISLEQSSTLPRR

SEQ ID NO: 110585 - protein, 15 aa, Artificial Sequence
  Description of Artificial Sequence: Synthetic peptide
  Seed: PRMCSLMQGSTLPRR
PRMISLEQSSTVPRR

SEQ ID NO: 110586 - protein, 15 aa, Artificial Sequence
  Description of Artificial Sequence: Synthetic peptide
  Seed: PRMCSLMQGSTLPRR
PRMISLFQASTFPRR

SEQ ID NO: 110587 - protein, 15 aa, Artificial Sequence
  Description of Artificial Sequence: Synthetic peptide
  Seed: PRMCSLMQGSTLPRR
PRMISLFQASTIPRR

SEQ ID NO: 110588 - protein, 15 aa, Artificial Sequence
  Description of Artificial Sequence: Synthetic peptide
  Seed: PRMCSLMQGSTLPRR
PRMISLFQASTMPRR

SEQ ID NO: 110589 - protein, 15 aa, Artificial Sequence
  Description of Artificial Sequence: Synthetic peptide
  Seed: PRMCSLMQGSTLPRR
PRMISLFQASTSPRR

SEQ ID NO: 110590 - protein, 15 aa, Artificial Sequence
  Description of Artificial Sequence: Synthetic peptide
  Seed: PRMCSLMQGSTLPRR
PRMISLFQASTTPRR

SEQ ID NO: 110591 - protein, 15 aa, Artificial Sequence
  Description of Artificial Sequence: Synthetic peptide
  Seed: PRMCSLMQGSTLPRR
PRMISLFQASTVPRR

SEQ ID NO: 110592 - protein, 15 aa, Artificial Sequence
  Description of Artificial Sequence: Synthetic peptide
  Seed: PRMCSLMQGSTLPRR
PRMISLFQFSTFPRR

SEQ ID NO: 110593 - protein, 15 aa, Artificial Sequence
  Description of Artificial Sequence: Synthetic peptide
  Seed: PRMCSLMQGSTLPRR
PRMISLFQFSTLPRR

SEQ ID NO: 110594 - protein, 15 aa, Artificial Sequence
  Description of Artificial Sequence: Synthetic peptide
  Seed: PRMCSLMQGSTLPRR
PRMISLFQGSTAPRR

SEQ ID NO: 110595 - protein, 15 aa, Artificial Sequence
  Description of Artificial Sequence: Synthetic peptide
  Seed: PRMCSLMQGSTLPRR
PRMISLFQGSTFPRR

SEQ ID NO: 110596 - protein, 15 aa, Artificial Sequence
  Description of Artificial Sequence: Synthetic peptide
  Seed: PRMCSLMQGSTLPRR
PRMISLFQGSTIPRR

SEQ ID NO: 110597 - protein, 15 aa, Artificial Sequence
  Description of Artificial Sequence: Synthetic peptide
  Seed: PRMCSLMQGSTLPRR
PRMISLFQGSTLPRR

SEQ ID NO: 110598 - protein, 15 aa, Artificial Sequence
  Description of Artificial Sequence: Synthetic peptide
  Seed: PRMCSLMQGSTLPRR
PRMISLFQGSTMPRR

SEQ ID NO: 110599 - protein, 15 aa, Artificial Sequence
  Description of Artificial Sequence: Synthetic peptide
  Seed: PRMCSLMQGSTLPRR
PRMISLFQGSTSPRR

SEQ ID NO: 110600 - protein, 15 aa, Artificial Sequence
  Description of Artificial Sequence: Synthetic peptide
  Seed: PRMCSLMQGSTLPRR
PRMISLFQGSTTPRR

SEQ ID NO: 110601 - protein, 15 aa, Artificial Sequence
  Description of Artificial Sequence: Synthetic peptide
  Seed: PRMCSLMQGSTLPRR
PRMISLFQGSTVPRR

SEQ ID NO: 110602 - protein, 15 aa, Artificial Sequence
  Description of Artificial Sequence: Synthetic peptide
  Seed: PRMCSLMQGSTLPRR
PRMISLFQISTAPRR

SEQ ID NO: 110603 - protein, 15 aa, Artificial Sequence
  Description of Artificial Sequence: Synthetic peptide
  Seed: PRMCSLMQGSTLPRR
PRMISLFQLSTFPRR

SEQ ID NO: 110604 - protein, 15 aa, Artificial Sequence
  Description of Artificial Sequence: Synthetic peptide
  Seed: PRMCSLMQGSTLPRR
PRMISLFQNSTAPRR

SEQ ID NO: 110605 - protein, 15 aa, Artificial Sequence
  Description of Artificial Sequence: Synthetic peptide
  Seed: PRMCSLMQGSTLPRR
PRMISLFQNSTFPRR

SEQ ID NO: 110606 - protein, 15 aa, Artificial Sequence
  Description of Artificial Sequence: Synthetic peptide
  Seed: PRMCSLMQGSTLPRR
PRMISLFQNSTGPRR

SEQ ID NO: 110607 - protein, 15 aa, Artificial Sequence
  Description of Artificial Sequence: Synthetic peptide
  Seed: PRMCSLMQGSTLPRR
PRMISLFQNSTIPRR

SEQ ID NO: 110608 - protein, 15 aa, Artificial Sequence
  Description of Artificial Sequence: Synthetic peptide
  Seed: PRMCSLMQGSTLPRR
PRMISLFQNSTLPRR

SEQ ID NO: 110609 - protein, 15 aa, Artificial Sequence
  Description of Artificial Sequence: Synthetic peptide
  Seed: PRMCSLMQGSTLPRR
PRMISLFQNSTMPRR

SEQ ID NO: 110610 - protein, 15 aa, Artificial Sequence
  Description of Artificial Sequence: Synthetic peptide
  Seed: PRMCSLMQGSTLPRR
PRMISLFQNSTSPRR

SEQ ID NO: 110611 - protein, 15 aa, Artificial Sequence
  Description of Artificial Sequence: Synthetic peptide
  Seed: PRMCSLMQGSTLPRR
PRMISLFQNSTTPRR

SEQ ID NO: 110612 - protein, 15 aa, Artificial Sequence
  Description of Artificial Sequence: Synthetic peptide
  Seed: PRMCSLMQGSTLPRR
PRMISLFQNSTVPRR

SEQ ID NO: 110613 - protein, 15 aa, Artificial Sequence
  Description of Artificial Sequence: Synthetic peptide
  Seed: PRMCSLMQGSTLPRR
PRMISLFQPSTAPRR

SEQ ID NO: 110614 - protein, 15 aa, Artificial Sequence
  Description of Artificial Sequence: Synthetic peptide
  Seed: PRMCSLMQGSTLPRR
PRMISLFQPSTIPRR

SEQ ID NO: 110615 - protein, 15 aa, Artificial Sequence
  Description of Artificial Sequence: Synthetic peptide
  Seed: PRMCSLMQGSTLPRR
PRMISLFQPSTLPRR

SEQ ID NO: 110616 - protein, 15 aa, Artificial Sequence
  Description of Artificial Sequence: Synthetic peptide
  Seed: PRMCSLMQGSTLPRR
PRMISLFQPSTVPRR

SEQ ID NO: 110617 - protein, 15 aa, Artificial Sequence
  Description of Artificial Sequence: Synthetic peptide
  Seed: PRMCSLMQGSTLPRR
PRMISLFQSSTAPRR

SEQ ID NO: 110618 - protein, 15 aa, Artificial Sequence
  Description of Artificial Sequence: Synthetic peptide
  Seed: PRMCSLMQGSTLPRR
PRMISLFQSSTFPRR

SEQ ID NO: 110619 - protein, 15 aa, Artificial Sequence
  Description of Artificial Sequence: Synthetic peptide
  Seed: PRMCSLMQGSTLPRR
PRMISLFQSSTGPRR

SEQ ID NO: 110620 - protein, 15 aa, Artificial Sequence
  Description of Artificial Sequence: Synthetic peptide
  Seed: PRMCSLMQGSTLPRR
PRMISLFQSSTHPRR

SEQ ID NO: 110621 - protein, 15 aa, Artificial Sequence
  Description of Artificial Sequence: Synthetic peptide
  Seed: PRMCSLMQGSTLPRR
PRMISLFQSSTIPRR

SEQ ID NO: 110622 - protein, 15 aa, Artificial Sequence
  Description of Artificial Sequence: Synthetic peptide
  Seed: PRMCSLMQGSTLPRR
PRMISLFQSSTLPRR

SEQ ID NO: 110623 - protein, 15 aa, Artificial Sequence
  Description of Artificial Sequence: Synthetic peptide
  Seed: PRMCSLMQGSTLPRR
PRMISLFQSSTMPRR

SEQ ID NO: 110624 - protein, 15 aa, Artificial Sequence
  Description of Artificial Sequence: Synthetic peptide
  Seed: PRMCSLMQGSTLPRR
PRMISLFQSSTRPRR

SEQ ID NO: 110625 - protein, 15 aa, Artificial Sequence
  Description of Artificial Sequence: Synthetic peptide
  Seed: PRMCSLMQGSTLPRR
PRMISLFQSSTSPRR

SEQ ID NO: 110626 - protein, 15 aa, Artificial Sequence
  Description of Artificial Sequence: Synthetic peptide
  Seed: PRMCSLMQGSTLPRR
PRMISLFQSSTTPRR

SEQ ID NO: 110627 - protein, 15 aa, Artificial Sequence
  Description of Artificial Sequence: Synthetic peptide
  Seed: PRMCSLMQGSTLPRR
PRMISLFQSSTVPRR

SEQ ID NO: 110628 - protein, 15 aa, Artificial Sequence
  Description of Artificial Sequence: Synthetic peptide
  Seed: PRMCSLMQGSTLPRR
PRMISLFQSSTYPRR

SEQ ID NO: 110629 - protein, 15 aa, Artificial Sequence
  Description of Artificial Sequence: Synthetic peptide
  Seed: PRMCSLMQGSTLPRR
PRMISLFQTSTAPRR

SEQ ID NO: 110630 - protein, 15 aa, Artificial Sequence
  Description of Artificial Sequence: Synthetic peptide
  Seed: PRMCSLMQGSTLPRR
PRMISLFQTSTIPRR

SEQ ID NO: 110631 - protein, 15 aa, Artificial Sequence
  Description of Artificial Sequence: Synthetic peptide
  Seed: PRMCSLMQGSTLPRR
PRMISLFQTSTLPRR

SEQ ID NO: 110632 - protein, 15 aa, Artificial Sequence
  Description of Artificial Sequence: Synthetic peptide
  Seed: PRMCSLMQGSTLPRR
PRMISLFQTSTMPRR

SEQ ID NO: 110633 - protein, 15 aa, Artificial Sequence
  Description of Artificial Sequence: Synthetic peptide
  Seed: PRMCSLMQGSTLPRR
PRMISLFQTSTTPRR

SEQ ID NO: 110634 - protein, 15 aa, Artificial Sequence
  Description of Artificial Sequence: Synthetic peptide
  Seed: PRMCSLMQGSTLPRR
PRMISLFQTSTVPRR

SEQ ID NO: 110635 - protein, 15 aa, Artificial Sequence
  Description of Artificial Sequence: Synthetic peptide
  Seed: PRMCSLMQGSTLPRR
PRMISLFQVSTAPRR

SEQ ID NO: 110636 - protein, 15 aa, Artificial Sequence
  Description of Artificial Sequence: Synthetic peptide
  Seed: PRMCSLMQGSTLPRR
PRMISLFQVSTIPRR

SEQ ID NO: 110637 - protein, 15 aa, Artificial Sequence
  Description of Artificial Sequence: Synthetic peptide
  Seed: PRMCSLMQGSTLPRR
PRMISLFQVSTLPRR

SEQ ID NO: 110638 - protein, 15 aa, Artificial Sequence
  Description of Artificial Sequence: Synthetic peptide
  Seed: PRMCSLMQGSTLPRR
PRMISLFQVSTVPRR

SEQ ID NO: 110639 - protein, 15 aa, Artificial Sequence
  Description of Artificial Sequence: Synthetic peptide
  Seed: PRMCSLMQGSTLPRR
PRMISLGQASTAPRR

SEQ ID NO: 110640 - protein, 15 aa, Artificial Sequence
  Description of Artificial Sequence: Synthetic peptide
  Seed: PRMCSLMQGSTLPRR
PRMISLGQASTIPRR

SEQ ID NO: 110641 - protein, 15 aa, Artificial Sequence
  Description of Artificial Sequence: Synthetic peptide
  Seed: PRMCSLMQGSTLPRR
PRMISLGQASTLPRR

SEQ ID NO: 110642 - protein, 15 aa, Artificial Sequence
  Description of Artificial Sequence: Synthetic peptide
  Seed: PRMCSLMQGSTLPRR
PRMISLGQASTMPRR

SEQ ID NO: 110643 - protein, 15 aa, Artificial Sequence
  Description of Artificial Sequence: Synthetic peptide
  Seed: PRMCSLMQGSTLPRR
PRMISLGQASTVPRR

SEQ ID NO: 110644 - protein, 15 aa, Artificial Sequence
  Description of Artificial Sequence: Synthetic peptide
  Seed: PRMCSLMQGSTLPRR
PRMISLGQGSTLPRR

SEQ ID NO: 110645 - protein, 15 aa, Artificial Sequence
  Description of Artificial Sequence: Synthetic peptide
  Seed: PRMCSLMQGSTLPRR
PRMISLGQSSTIPRR

SEQ ID NO: 110646 - protein, 15 aa, Artificial Sequence
  Description of Artificial Sequence: Synthetic peptide
  Seed: PRMCSLMQGSTLPRR
PRMISLGQSSTLPRR

SEQ ID NO: 110647 - protein, 15 aa, Artificial Sequence
  Description of Artificial Sequence: Synthetic peptide
  Seed: PRMCSLMQGSTLPRR
PRMISLHQASTIPRR

SEQ ID NO: 110648 - protein, 15 aa, Artificial Sequence
  Description of Artificial Sequence: Synthetic peptide
  Seed: PRMCSLMQGSTLPRR
PRMISLHQASTLPRR

SEQ ID NO: 110649 - protein, 15 aa, Artificial Sequence
  Description of Artificial Sequence: Synthetic peptide
  Seed: PRMCSLMQGSTLPRR
PRMISLHQASTVPRR

SEQ ID NO: 110650 - protein, 15 aa, Artificial Sequence
  Description of Artificial Sequence: Synthetic peptide
  Seed: PRMCSLMQGSTLPRR
PRMISLIQASTAPRR

SEQ ID NO: 110651 - protein, 15 aa, Artificial Sequence
  Description of Artificial Sequence: Synthetic peptide
  Seed: PRMCSLMQGSTLPRR
PRMISLIQASTCPRR

SEQ ID NO: 110652 - protein, 15 aa, Artificial Sequence
  Description of Artificial Sequence: Synthetic peptide
  Seed: PRMCSLMQGSTLPRR
PRMISLIQASTFPRR

SEQ ID NO: 110653 - protein, 15 aa, Artificial Sequence
  Description of Artificial Sequence: Synthetic peptide
  Seed: PRMCSLMQGSTLPRR
PRMISLIQASTGPRR

SEQ ID NO: 110654 - protein, 15 aa, Artificial Sequence
  Description of Artificial Sequence: Synthetic peptide
  Seed: PRMCSLMQGSTLPRR
PRMISLIQASTHPRR

SEQ ID NO: 110655 - protein, 15 aa, Artificial Sequence
  Description of Artificial Sequence: Synthetic peptide
  Seed: PRMCSLMQGSTLPRR
PRMISLIQASTIPRR

SEQ ID NO: 110656 - protein, 15 aa, Artificial Sequence
  Description of Artificial Sequence: Synthetic peptide
  Seed: PRMCSLMQGSTLPRR
PRMISLIQASTLPRR

SEQ ID NO: 110657 - protein, 15 aa, Artificial Sequence
  Description of Artificial Sequence: Synthetic peptide
  Seed: PRMCSLMQGSTLPRR
PRMISLIQASTMPRR

SEQ ID NO: 110658 - protein, 15 aa, Artificial Sequence
  Description of Artificial Sequence: Synthetic peptide
  Seed: PRMCSLMQGSTLPRR
PRMISLIQASTNPRR

SEQ ID NO: 110659 - protein, 15 aa, Artificial Sequence
  Description of Artificial Sequence: Synthetic peptide
  Seed: PRMCSLMQGSTLPRR
PRMISLIQASTSPRR

SEQ ID NO: 110660 - protein, 15 aa, Artificial Sequence
  Description of Artificial Sequence: Synthetic peptide
  Seed: PRMCSLMQGSTLPRR
PRMISLIQASTTPRR

SEQ ID NO: 110661 - protein, 15 aa, Artificial Sequence
  Description of Artificial Sequence: Synthetic peptide
  Seed: PRMCSLMQGSTLPRR
PRMISLIQASTVPRR

SEQ ID NO: 110662 - protein, 15 aa, Artificial Sequence
  Description of Artificial Sequence: Synthetic peptide
  Seed: PRMCSLMQGSTLPRR
PRMISLIQFSTLPRR

SEQ ID NO: 110663 - protein, 15 aa, Artificial Sequence
  Description of Artificial Sequence: Synthetic peptide
  Seed: PRMCSLMQGSTLPRR
PRMISLIQGSTAPRR

SEQ ID NO: 110664 - protein, 15 aa, Artificial Sequence
  Description of Artificial Sequence: Synthetic peptide
  Seed: PRMCSLMQGSTLPRR
PRMISLIQGSTCPRR

SEQ ID NO: 110665 - protein, 15 aa, Artificial Sequence
  Description of Artificial Sequence: Synthetic peptide
  Seed: PRMCSLMQGSTLPRR
PRMISLIQGSTGPRR

SEQ ID NO: 110666 - protein, 15 aa, Artificial Sequence
  Description of Artificial Sequence: Synthetic peptide
  Seed: PRMCSLMQGSTLPRR
PRMISLIQGSTIPRR

SEQ ID NO: 110667 - protein, 15 aa, Artificial Sequence
  Description of Artificial Sequence: Synthetic peptide
  Seed: PRMCSLMQGSTLPRR
PRMISLIQGSTLPRR

SEQ ID NO: 110668 - protein, 15 aa, Artificial Sequence
  Description of Artificial Sequence: Synthetic peptide
  Seed: PRMCSLMQGSTLPRR
PRMISLIQGSTMPRR

SEQ ID NO: 110669 - protein, 15 aa, Artificial Sequence
  Description of Artificial Sequence: Synthetic peptide
  Seed: PRMCSLMQGSTLPRR
PRMISLIQGSTNPRR

SEQ ID NO: 110670 - protein, 15 aa, Artificial Sequence
  Description of Artificial Sequence: Synthetic peptide
  Seed: PRMCSLMQGSTLPRR
PRMISLIQGSTSPRR

SEQ ID NO: 110671 - protein, 15 aa, Artificial Sequence
  Description of Artificial Sequence: Synthetic peptide
  Seed: PRMCSLMQGSTLPRR
PRMISLIQGSTTPRR

SEQ ID NO: 110672 - protein, 15 aa, Artificial Sequence
  Description of Artificial Sequence: Synthetic peptide
  Seed: PRMCSLMQGSTLPRR
PRMISLIQGSTVPRR

SEQ ID NO: 110673 - protein, 15 aa, Artificial Sequence
  Description of Artificial Sequence: Synthetic peptide
  Seed: PRMCSLMQGSTLPRR
PRMISLIQISTAPRR

SEQ ID NO: 110674 - protein, 15 aa, Artificial Sequence
  Description of Artificial Sequence: Synthetic peptide
  Seed: PRMCSLMQGSTLPRR
PRMISLIQISTLPRR

SEQ ID NO: 110675 - protein, 15 aa, Artificial Sequence
  Description of Artificial Sequence: Synthetic peptide
  Seed: PRMCSLMQGSTLPRR
PRMISLIQISTNPRR

SEQ ID NO: 110676 - protein, 15 aa, Artificial Sequence
  Description of Artificial Sequence: Synthetic peptide
  Seed: PRMCSLMQGSTLPRR
PRMISLIQISTSPRR

SEQ ID NO: 110677 - protein, 15 aa, Artificial Sequence
  Description of Artificial Sequence: Synthetic peptide
  Seed: PRMCSLMQGSTLPRR
PRMISLIQISTVPRR

SEQ ID NO: 110678 - protein, 15 aa, Artificial Sequence
  Description of Artificial Sequence: Synthetic peptide
  Seed: PRMCSLMQGSTLPRR
PRMISLIQLSTAPRR

SEQ ID NO: 110679 - protein, 15 aa, Artificial Sequence
  Description of Artificial Sequence: Synthetic peptide
  Seed: PRMCSLMQGSTLPRR
PRMISLIQMSTAPRR

SEQ ID NO: 110680 - protein, 15 aa, Artificial Sequence
  Description of Artificial Sequence: Synthetic peptide
  Seed: PRMCSLMQGSTLPRR
PRMISLIQNSTAPRR

SEQ ID NO: 110681 - protein, 15 aa, Artificial Sequence
  Description of Artificial Sequence: Synthetic peptide
  Seed: PRMCSLMQGSTLPRR
PRMISLIQNSTIPRR

SEQ ID NO: 110682 - protein, 15 aa, Artificial Sequence
  Description of Artificial Sequence: Synthetic peptide
  Seed: PRMCSLMQGSTLPRR
PRMISLIQNSTLPRR

SEQ ID NO: 110683 - protein, 15 aa, Artificial Sequence
  Description of Artificial Sequence: Synthetic peptide
  Seed: PRMCSLMQGSTLPRR
PRMISLIQNSTMPRR

SEQ ID NO: 110684 - protein, 15 aa, Artificial Sequence
  Description of Artificial Sequence: Synthetic peptide
  Seed: PRMCSLMQGSTLPRR
PRMISLIQNSTSPRR

SEQ ID NO: 110685 - protein, 15 aa, Artificial Sequence
  Description of Artificial Sequence: Synthetic peptide
  Seed: PRMCSLMQGSTLPRR
PRMISLIQNSTTPRR

SEQ ID NO: 110686 - protein, 15 aa, Artificial Sequence
  Description of Artificial Sequence: Synthetic peptide
  Seed: PRMCSLMQGSTLPRR
PRMISLIQNSTVPRR

SEQ ID NO: 110687 - protein, 15 aa, Artificial Sequence
  Description of Artificial Sequence: Synthetic peptide
  Seed: PRMCSLMQGSTLPRR
PRMISLIQPSTAPRR

SEQ ID NO: 110688 - protein, 15 aa, Artificial Sequence
  Description of Artificial Sequence: Synthetic peptide
  Seed: PRMCSLMQGSTLPRR
PRMISLIQPSTIPRR

SEQ ID NO: 110689 - protein, 15 aa, Artificial Sequence
  Description of Artificial Sequence: Synthetic peptide
  Seed: PRMCSLMQGSTLPRR
PRMISLIQPSTLPRR

SEQ ID NO: 110690 - protein, 15 aa, Artificial Sequence
  Description of Artificial Sequence: Synthetic peptide
  Seed: PRMCSLMQGSTLPRR
PRMISLIQPSTMPRR

SEQ ID NO: 110691 - protein, 15 aa, Artificial Sequence
  Description of Artificial Sequence: Synthetic peptide
  Seed: PRMCSLMQGSTLPRR
PRMISLIQPSTNPRR

SEQ ID NO: 110692 - protein, 15 aa, Artificial Sequence
  Description of Artificial Sequence: Synthetic peptide
  Seed: PRMCSLMQGSTLPRR
PRMISLIQPSTSPRR

SEQ ID NO: 110693 - protein, 15 aa, Artificial Sequence
  Description of Artificial Sequence: Synthetic peptide
  Seed: PRMCSLMQGSTLPRR
PRMISLIQPSTTPRR

SEQ ID NO: 110694 - protein, 15 aa, Artificial Sequence
  Description of Artificial Sequence: Synthetic peptide
  Seed: PRMCSLMQGSTLPRR
PRMISLIQPSTVPRR

SEQ ID NO: 110695 - protein, 15 aa, Artificial Sequence
  Description of Artificial Sequence: Synthetic peptide
  Seed: PRMCSLMQGSTLPRR
PRMISLIQSSTAPRR

SEQ ID NO: 110696 - protein, 15 aa, Artificial Sequence
  Description of Artificial Sequence: Synthetic peptide
  Seed: PRMCSLMQGSTLPRR
PRMISLIQSSTCPRR

SEQ ID NO: 110697 - protein, 15 aa, Artificial Sequence
  Description of Artificial Sequence: Synthetic peptide
  Seed: PRMCSLMQGSTLPRR
PRMISLIQSSTGPRR

SEQ ID NO: 110698 - protein, 15 aa, Artificial Sequence
  Description of Artificial Sequence: Synthetic peptide
  Seed: PRMCSLMQGSTLPRR
PRMISLIQSSTIPRR

SEQ ID NO: 110699 - protein, 15 aa, Artificial Sequence
  Description of Artificial Sequence: Synthetic peptide
  Seed: PRMCSLMQGSTLPRR
PRMISLIQSSTLPRR

SEQ ID NO: 110700 - protein, 15 aa, Artificial Sequence
  Description of Artificial Sequence: Synthetic peptide
  Seed: PRMCSLMQGSTLPRR
PRMISLIQSSTMPRR

SEQ ID NO: 110701 - protein, 15 aa, Artificial Sequence
  Description of Artificial Sequence: Synthetic peptide
  Seed: PRMCSLMQGSTLPRR
PRMISLIQSSTNPRR

SEQ ID NO: 110702 - protein, 15 aa, Artificial Sequence
  Description of Artificial Sequence: Synthetic peptide
  Seed: PRMCSLMQGSTLPRR
PRMISLIQSSTSPRR

SEQ ID NO: 110703 - protein, 15 aa, Artificial Sequence
  Description of Artificial Sequence: Synthetic peptide
  Seed: PRMCSLMQGSTLPRR
PRMISLIQSSTTPRR

SEQ ID NO: 110704 - protein, 15 aa, Artificial Sequence
  Description of Artificial Sequence: Synthetic peptide
  Seed: PRMCSLMQGSTLPRR
PRMISLIQSSTVPRR

SEQ ID NO: 110705 - protein, 15 aa, Artificial Sequence
  Description of Artificial Sequence: Synthetic peptide
  Seed: PRMCSLMQGSTLPRR
PRMISLIQTSTAPRR

SEQ ID NO: 110706 - protein, 15 aa, Artificial Sequence
  Description of Artificial Sequence: Synthetic peptide
  Seed: PRMCSLMQGSTLPRR
PRMISLIQTSTIPRR

SEQ ID NO: 110707 - protein, 15 aa, Artificial Sequence
  Description of Artificial Sequence: Synthetic peptide
  Seed: PRMCSLMQGSTLPRR
PRMISLIQTSTLPRR

SEQ ID NO: 110708 - protein, 15 aa, Artificial Sequence
  Description of Artificial Sequence: Synthetic peptide
  Seed: PRMCSLMQGSTLPRR
PRMISLIQTSTMPRR

SEQ ID NO: 110709 - protein, 15 aa, Artificial Sequence
  Description of Artificial Sequence: Synthetic peptide
  Seed: PRMCSLMQGSTLPRR
PRMISLIQTSTNPRR

SEQ ID NO: 110710 - protein, 15 aa, Artificial Sequence
  Description of Artificial Sequence: Synthetic peptide
  Seed: PRMCSLMQGSTLPRR
PRMISLIQTSTSPRR

SEQ ID NO: 110711 - protein, 15 aa, Artificial Sequence
  Description of Artificial Sequence: Synthetic peptide
  Seed: PRMCSLMQGSTLPRR
PRMISLIQTSTTPRR

SEQ ID NO: 110712 - protein, 15 aa, Artificial Sequence
  Description of Artificial Sequence: Synthetic peptide
  Seed: PRMCSLMQGSTLPRR
PRMISLIQTSTVPRR

SEQ ID NO: 110713 - protein, 15 aa, Artificial Sequence
  Description of Artificial Sequence: Synthetic peptide
  Seed: PRMCSLMQGSTLPRR
PRMISLIQVSTAPRR

SEQ ID NO: 110714 - protein, 15 aa, Artificial Sequence
  Description of Artificial Sequence: Synthetic peptide
  Seed: PRMCSLMQGSTLPRR
PRMISLIQVSTIPRR

SEQ ID NO: 110715 - protein, 15 aa, Artificial Sequence
  Description of Artificial Sequence: Synthetic peptide
  Seed: PRMCSLMQGSTLPRR
PRMISLIQVSTLPRR

SEQ ID NO: 110716 - protein, 15 aa, Artificial Sequence
  Description of Artificial Sequence: Synthetic peptide
  Seed: PRMCSLMQGSTLPRR
PRMISLIQVSTMPRR

SEQ ID NO: 110717 - protein, 15 aa, Artificial Sequence
  Description of Artificial Sequence: Synthetic peptide
  Seed: PRMCSLMQGSTLPRR
PRMISLIQVSTNPRR

SEQ ID NO: 110718 - protein, 15 aa, Artificial Sequence
  Description of Artificial Sequence: Synthetic peptide
  Seed: PRMCSLMQGSTLPRR
PRMISLIQVSTSPRR

SEQ ID NO: 110719 - protein, 15 aa, Artificial Sequence
  Description of Artificial Sequence: Synthetic peptide
  Seed: PRMCSLMQGSTLPRR
PRMISLIQVSTTPRR

SEQ ID NO: 110720 - protein, 15 aa, Artificial Sequence
  Description of Artificial Sequence: Synthetic peptide
  Seed: PRMCSLMQGSTLPRR
PRMISLIQVSTVPRR

SEQ ID NO: 110721 - protein, 15 aa, Artificial Sequence
  Description of Artificial Sequence: Synthetic peptide
  Seed: PRMCSLMQGSTLPRR
PRMISLLQASTAPRR

SEQ ID NO: 110722 - protein, 15 aa, Artificial Sequence
  Description of Artificial Sequence: Synthetic peptide
  Seed: PRMCSLMQGSTLPRR
PRMISLLQASTCPRR

SEQ ID NO: 110723 - protein, 15 aa, Artificial Sequence
  Description of Artificial Sequence: Synthetic peptide
  Seed: PRMCSLMQGSTLPRR
PRMISLLQASTFPRR

SEQ ID NO: 110724 - protein, 15 aa, Artificial Sequence
  Description of Artificial Sequence: Synthetic peptide
  Seed: PRMCSLMQGSTLPRR
PRMISLLQASTGPRR

SEQ ID NO: 110725 - protein, 15 aa, Artificial Sequence
  Description of Artificial Sequence: Synthetic peptide
  Seed: PRMCSLMQGSTLPRR
PRMISLLQASTHPRR

SEQ ID NO: 110726 - protein, 15 aa, Artificial Sequence
  Description of Artificial Sequence: Synthetic peptide
  Seed: PRMCSLMQGSTLPRR
PRMISLLQASTIPRR

SEQ ID NO: 110727 - protein, 15 aa, Artificial Sequence
  Description of Artificial Sequence: Synthetic peptide
  Seed: PRMCSLMQGSTLPRR
PRMISLLQASTKPRR

SEQ ID NO: 110728 - protein, 15 aa, Artificial Sequence
  Description of Artificial Sequence: Synthetic peptide
  Seed: PRMCSLMQGSTLPRR
PRMISLLQASTLPRR

SEQ ID NO: 110729 - protein, 15 aa, Artificial Sequence
  Description of Artificial Sequence: Synthetic peptide
  Seed: PRMCSLMQGSTLPRR
PRMISLLQASTMPRR

SEQ ID NO: 110730 - protein, 15 aa, Artificial Sequence
  Description of Artificial Sequence: Synthetic peptide
  Seed: PRMCSLMQGSTLPRR
PRMISLLQASTNPRR

SEQ ID NO: 110731 - protein, 15 aa, Artificial Sequence
  Description of Artificial Sequence: Synthetic peptide
  Seed: PRMCSLMQGSTLPRR
PRMISLLQASTPPRR

SEQ ID NO: 110732 - protein, 15 aa, Artificial Sequence
  Description of Artificial Sequence: Synthetic peptide
  Seed: PRMCSLMQGSTLPRR
PRMISLLQASTQPRR

SEQ ID NO: 110733 - protein, 15 aa, Artificial Sequence
  Description of Artificial Sequence: Synthetic peptide
  Seed: PRMCSLMQGSTLPRR
PRMISLLQASTRPRR

SEQ ID NO: 110734 - protein, 15 aa, Artificial Sequence
  Description of Artificial Sequence: Synthetic peptide
  Seed: PRMCSLMQGSTLPRR
PRMISLLQASTSPRR

SEQ ID NO: 110735 - protein, 15 aa, Artificial Sequence
  Description of Artificial Sequence: Synthetic peptide
  Seed: PRMCSLMQGSTLPRR
PRMISLLQASTTPRR

SEQ ID NO: 110736 - protein, 15 aa, Artificial Sequence
  Description of Artificial Sequence: Synthetic peptide
  Seed: PRMCSLMQGSTLPRR
PRMISLLQASTVPRR

SEQ ID NO: 110737 - protein, 15 aa, Artificial Sequence
  Description of Artificial Sequence: Synthetic peptide
  Seed: PRMCSLMQGSTLPRR
PRMISLLQASTWPRR

SEQ ID NO: 110738 - protein, 15 aa, Artificial Sequence
  Description of Artificial Sequence: Synthetic peptide
  Seed: PRMCSLMQGSTLPRR
PRMISLLQASTYPRR

SEQ ID NO: 110739 - protein, 15 aa, Artificial Sequence
  Description of Artificial Sequence: Synthetic peptide
  Seed: PRMCSLMQGSTLPRR
PRMISLLQCSTLPRR

SEQ ID NO: 110740 - protein, 15 aa, Artificial Sequence
  Description of Artificial Sequence: Synthetic peptide
  Seed: PRMCSLMQGSTLPRR
PRMISLLQCSTVPRR

SEQ ID NO: 110741 - protein, 15 aa, Artificial Sequence
  Description of Artificial Sequence: Synthetic peptide
  Seed: PRMCSLMQGSTLPRR
PRMISLLQFSTLPRR

SEQ ID NO: 110742 - protein, 15 aa, Artificial Sequence
  Description of Artificial Sequence: Synthetic peptide
  Seed: PRMCSLMQGSTLPRR
PRMISLLQGSTAPRR

SEQ ID NO: 110743 - protein, 15 aa, Artificial Sequence
  Description of Artificial Sequence: Synthetic peptide
  Seed: PRMCSLMQGSTLPRR
PRMISLLQGSTCPRR

SEQ ID NO: 110744 - protein, 15 aa, Artificial Sequence
  Description of Artificial Sequence: Synthetic peptide
  Seed: PRMCSLMQGSTLPRR
PRMISLLQGSTFPRR

SEQ ID NO: 110745 - protein, 15 aa, Artificial Sequence
  Description of Artificial Sequence: Synthetic peptide
  Seed: PRMCSLMQGSTLPRR
PRMISLLQGSTGPRR

SEQ ID NO: 110746 - protein, 15 aa, Artificial Sequence
  Description of Artificial Sequence: Synthetic peptide
  Seed: PRMCSLMQGSTLPRR
PRMISLLQGSTHPRR

SEQ ID NO: 110747 - protein, 15 aa, Artificial Sequence
  Description of Artificial Sequence: Synthetic peptide
  Seed: PRMCSLMQGSTLPRR
PRMISLLQGSTIPRR

SEQ ID NO: 110748 - protein, 15 aa, Artificial Sequence
  Description of Artificial Sequence: Synthetic peptide
  Seed: PRMCSLMQGSTLPRR
PRMISLLQGSTLPRR

SEQ ID NO: 110749 - protein, 15 aa, Artificial Sequence
  Description of Artificial Sequence: Synthetic peptide
  Seed: PRMCSLMQGSTLPRR
PRMISLLQGSTMPRR

SEQ ID NO: 110750 - protein, 15 aa, Artificial Sequence
  Description of Artificial Sequence: Synthetic peptide
  Seed: PRMCSLMQGSTLPRR
PRMISLLQGSTNPRR

SEQ ID NO: 110751 - protein, 15 aa, Artificial Sequence
  Description of Artificial Sequence: Synthetic peptide
  Seed: PRMCSLMQGSTLPRR
PRMISLLQGSTPPRR

SEQ ID NO: 110752 - protein, 15 aa, Artificial Sequence
  Description of Artificial Sequence: Synthetic peptide
  Seed: PRMCSLMQGSTLPRR
PRMISLLQGSTQPRR

SEQ ID NO: 110753 - protein, 15 aa, Artificial Sequence
  Description of Artificial Sequence: Synthetic peptide
  Seed: PRMCSLMQGSTLPRR
PRMISLLQGSTSPRR

SEQ ID NO: 110754 - protein, 15 aa, Artificial Sequence
  Description of Artificial Sequence: Synthetic peptide
  Seed: PRMCSLMQGSTLPRR
PRMISLLQGSTTPRR

SEQ ID NO: 110755 - protein, 15 aa, Artificial Sequence
  Description of Artificial Sequence: Synthetic peptide
  Seed: PRMCSLMQGSTLPRR
PRMISLLQGSTVPRR

SEQ ID NO: 110756 - protein, 15 aa, Artificial Sequence
  Description of Artificial Sequence: Synthetic peptide
  Seed: PRMCSLMQGSTLPRR
PRMISLLQGSTYPRR

SEQ ID NO: 110757 - protein, 15 aa, Artificial Sequence
  Description of Artificial Sequence: Synthetic peptide
  Seed: PRMCSLMQGSTLPRR
PRMISLLQHSTAPRR

SEQ ID NO: 110758 - protein, 15 aa, Artificial Sequence
  Description of Artificial Sequence: Synthetic peptide
  Seed: PRMCSLMQGSTLPRR
PRMISLLQHSTIPRR

SEQ ID NO: 110759 - protein, 15 aa, Artificial Sequence
  Description of Artificial Sequence: Synthetic peptide
  Seed: PRMCSLMQGSTLPRR
PRMISLLQHSTLPRR

SEQ ID NO: 110760 - protein, 15 aa, Artificial Sequence
  Description of Artificial Sequence: Synthetic peptide
  Seed: PRMCSLMQGSTLPRR
PRMISLLQHSTVPRR

SEQ ID NO: 110761 - protein, 15 aa, Artificial Sequence
  Description of Artificial Sequence: Synthetic peptide
  Seed: PRMCSLMQGSTLPRR
PRMISLLQISTAPRR

SEQ ID NO: 110762 - protein, 15 aa, Artificial Sequence
  Description of Artificial Sequence: Synthetic peptide
  Seed: PRMCSLMQGSTLPRR
PRMISLLQISTHPRR

SEQ ID NO: 110763 - protein, 15 aa, Artificial Sequence
  Description of Artificial Sequence: Synthetic peptide
  Seed: PRMCSLMQGSTLPRR
PRMISLLQISTIPRR

SEQ ID NO: 110764 - protein, 15 aa, Artificial Sequence
  Description of Artificial Sequence: Synthetic peptide
  Seed: PRMCSLMQGSTLPRR
PRMISLLQISTLPRR

SEQ ID NO: 110765 - protein, 15 aa, Artificial Sequence
  Description of Artificial Sequence: Synthetic peptide
  Seed: PRMCSLMQGSTLPRR
PRMISLLQISTMPRR

SEQ ID NO: 110766 - protein, 15 aa, Artificial Sequence
  Description of Artificial Sequence: Synthetic peptide
  Seed: PRMCSLMQGSTLPRR
PRMISLLQISTNPRR

SEQ ID NO: 110767 - protein, 15 aa, Artificial Sequence
  Description of Artificial Sequence: Synthetic peptide
  Seed: PRMCSLMQGSTLPRR
PRMISLLQISTSPRR

SEQ ID NO: 110768 - protein, 15 aa, Artificial Sequence
  Description of Artificial Sequence: Synthetic peptide
  Seed: PRMCSLMQGSTLPRR
PRMISLLQISTTPRR

SEQ ID NO: 110769 - protein, 15 aa, Artificial Sequence
  Description of Artificial Sequence: Synthetic peptide
  Seed: PRMCSLMQGSTLPRR
PRMISLLQISTVPRR

SEQ ID NO: 110770 - protein, 15 aa, Artificial Sequence
  Description of Artificial Sequence: Synthetic peptide
  Seed: PRMCSLMQGSTLPRR
PRMISLLQLSTAPRR

SEQ ID NO: 110771 - protein, 15 aa, Artificial Sequence
  Description of Artificial Sequence: Synthetic peptide
  Seed: PRMCSLMQGSTLPRR
PRMISLLQLSTIPRR

SEQ ID NO: 110772 - protein, 15 aa, Artificial Sequence
  Description of Artificial Sequence: Synthetic peptide
  Seed: PRMCSLMQGSTLPRR
PRMISLLQLSTLPRR

SEQ ID NO: 110773 - protein, 15 aa, Artificial Sequence
  Description of Artificial Sequence: Synthetic peptide
  Seed: PRMCSLMQGSTLPRR
PRMISLLQLSTNPRR

SEQ ID NO: 110774 - protein, 15 aa, Artificial Sequence
  Description of Artificial Sequence: Synthetic peptide
  Seed: PRMCSLMQGSTLPRR
PRMISLLQLSTSPRR

SEQ ID NO: 110775 - protein, 15 aa, Artificial Sequence
  Description of Artificial Sequence: Synthetic peptide
  Seed: PRMCSLMQGSTLPRR
PRMISLLQLSTVPRR

SEQ ID NO: 110776 - protein, 15 aa, Artificial Sequence
  Description of Artificial Sequence: Synthetic peptide
  Seed: PRMCSLMQGSTLPRR
PRMISLLQMSTAPRR

SEQ ID NO: 110777 - protein, 15 aa, Artificial Sequence
  Description of Artificial Sequence: Synthetic peptide
  Seed: PRMCSLMQGSTLPRR
PRMISLLQMSTIPRR

SEQ ID NO: 110778 - protein, 15 aa, Artificial Sequence
  Description of Artificial Sequence: Synthetic peptide
  Seed: PRMCSLMQGSTLPRR
PRMISLLQMSTLPRR

SEQ ID NO: 110779 - protein, 15 aa, Artificial Sequence
  Description of Artificial Sequence: Synthetic peptide
  Seed: PRMCSLMQGSTLPRR
PRMISLLQMSTMPRR

SEQ ID NO: 110780 - protein, 15 aa, Artificial Sequence
  Description of Artificial Sequence: Synthetic peptide
  Seed: PRMCSLMQGSTLPRR
PRMISLLQMSTSPRR

SEQ ID NO: 110781 - protein, 15 aa, Artificial Sequence
  Description of Artificial Sequence: Synthetic peptide
  Seed: PRMCSLMQGSTLPRR
PRMISLLQMSTVPRR

SEQ ID NO: 110782 - protein, 15 aa, Artificial Sequence
  Description of Artificial Sequence: Synthetic peptide
  Seed: PRMCSLMQGSTLPRR
PRMISLLQNSTAPRR

SEQ ID NO: 110783 - protein, 15 aa, Artificial Sequence
  Description of Artificial Sequence: Synthetic peptide
  Seed: PRMCSLMQGSTLPRR
PRMISLLQNSTCPRR

SEQ ID NO: 110784 - protein, 15 aa, Artificial Sequence
  Description of Artificial Sequence: Synthetic peptide
  Seed: PRMCSLMQGSTLPRR
PRMISLLQNSTGPRR

SEQ ID NO: 110785 - protein, 15 aa, Artificial Sequence
  Description of Artificial Sequence: Synthetic peptide
  Seed: PRMCSLMQGSTLPRR
PRMISLLQNSTIPRR

SEQ ID NO: 110786 - protein, 15 aa, Artificial Sequence
  Description of Artificial Sequence: Synthetic peptide
  Seed: PRMCSLMQGSTLPRR
PRMISLLQNSTLPRR

SEQ ID NO: 110787 - protein, 15 aa, Artificial Sequence
  Description of Artificial Sequence: Synthetic peptide
  Seed: PRMCSLMQGSTLPRR
PRMISLLQNSTMPRR

SEQ ID NO: 110788 - protein, 15 aa, Artificial Sequence
  Description of Artificial Sequence: Synthetic peptide
  Seed: PRMCSLMQGSTLPRR
PRMISLLQNSTNPRR

SEQ ID NO: 110789 - protein, 15 aa, Artificial Sequence
  Description of Artificial Sequence: Synthetic peptide
  Seed: PRMCSLMQGSTLPRR
PRMISLLQNSTSPRR

SEQ ID NO: 110790 - protein, 15 aa, Artificial Sequence
  Description of Artificial Sequence: Synthetic peptide
  Seed: PRMCSLMQGSTLPRR
PRMISLLQNSTTPRR

SEQ ID NO: 110791 - protein, 15 aa, Artificial Sequence
  Description of Artificial Sequence: Synthetic peptide
  Seed: PRMCSLMQGSTLPRR
PRMISLLQNSTVPRR

SEQ ID NO: 110792 - protein, 15 aa, Artificial Sequence
  Description of Artificial Sequence: Synthetic peptide
  Seed: PRMCSLMQGSTLPRR
PRMISLLQPSTAPRR

SEQ ID NO: 110793 - protein, 15 aa, Artificial Sequence
  Description of Artificial Sequence: Synthetic peptide
  Seed: PRMCSLMQGSTLPRR
PRMISLLQPSTCPRR

SEQ ID NO: 110794 - protein, 15 aa, Artificial Sequence
  Description of Artificial Sequence: Synthetic peptide
  Seed: PRMCSLMQGSTLPRR
PRMISLLQPSTFPRR

SEQ ID NO: 110795 - protein, 15 aa, Artificial Sequence
  Description of Artificial Sequence: Synthetic peptide
  Seed: PRMCSLMQGSTLPRR
PRMISLLQPSTGPRR

SEQ ID NO: 110796 - protein, 15 aa, Artificial Sequence
  Description of Artificial Sequence: Synthetic peptide
  Seed: PRMCSLMQGSTLPRR
PRMISLLQPSTHPRR

SEQ ID NO: 110797 - protein, 15 aa, Artificial Sequence
  Description of Artificial Sequence: Synthetic peptide
  Seed: PRMCSLMQGSTLPRR
PRMISLLQPSTIPRR

SEQ ID NO: 110798 - protein, 15 aa, Artificial Sequence
  Description of Artificial Sequence: Synthetic peptide
  Seed: PRMCSLMQGSTLPRR
PRMISLLQPSTLPRR

SEQ ID NO: 110799 - protein, 15 aa, Artificial Sequence
  Description of Artificial Sequence: Synthetic peptide
  Seed: PRMCSLMQGSTLPRR
PRMISLLQPSTMPRR

SEQ ID NO: 110800 - protein, 15 aa, Artificial Sequence
  Description of Artificial Sequence: Synthetic peptide
  Seed: PRMCSLMQGSTLPRR
PRMISLLQPSTNPRR

SEQ ID NO: 110801 - protein, 15 aa, Artificial Sequence
  Description of Artificial Sequence: Synthetic peptide
  Seed: PRMCSLMQGSTLPRR
PRMISLLQPSTQPRR

SEQ ID NO: 110802 - protein, 15 aa, Artificial Sequence
  Description of Artificial Sequence: Synthetic peptide
  Seed: PRMCSLMQGSTLPRR
PRMISLLQPSTSPRR

SEQ ID NO: 110803 - protein, 15 aa, Artificial Sequence
  Description of Artificial Sequence: Synthetic peptide
  Seed: PRMCSLMQGSTLPRR
PRMISLLQPSTTPRR

SEQ ID NO: 110804 - protein, 15 aa, Artificial Sequence
  Description of Artificial Sequence: Synthetic peptide
  Seed: PRMCSLMQGSTLPRR
PRMISLLQPSTVPRR

SEQ ID NO: 110805 - protein, 15 aa, Artificial Sequence
  Description of Artificial Sequence: Synthetic peptide
  Seed: PRMCSLMQGSTLPRR
PRMISLLQSSTAPRR

SEQ ID NO: 110806 - protein, 15 aa, Artificial Sequence
  Description of Artificial Sequence: Synthetic peptide
  Seed: PRMCSLMQGSTLPRR
PRMISLLQSSTCPRR

SEQ ID NO: 110807 - protein, 15 aa, Artificial Sequence
  Description of Artificial Sequence: Synthetic peptide
  Seed: PRMCSLMQGSTLPRR
PRMISLLQSSTFPRR

SEQ ID NO: 110808 - protein, 15 aa, Artificial Sequence
  Description of Artificial Sequence: Synthetic peptide
  Seed: PRMCSLMQGSTLPRR
PRMISLLQSSTGPRR

SEQ ID NO: 110809 - protein, 15 aa, Artificial Sequence
  Description of Artificial Sequence: Synthetic peptide
  Seed: PRMCSLMQGSTLPRR
PRMISLLQSSTHPRR

SEQ ID NO: 110810 - protein, 15 aa, Artificial Sequence
  Description of Artificial Sequence: Synthetic peptide
  Seed: PRMCSLMQGSTLPRR
PRMISLLQSSTIPRR

SEQ ID NO: 110811 - protein, 15 aa, Artificial Sequence
  Description of Artificial Sequence: Synthetic peptide
  Seed: PRMCSLMQGSTLPRR
PRMISLLQSSTKPRR

SEQ ID NO: 110812 - protein, 15 aa, Artificial Sequence
  Description of Artificial Sequence: Synthetic peptide
  Seed: PRMCSLMQGSTLPRR
PRMISLLQSSTLPRR

SEQ ID NO: 110813 - protein, 15 aa, Artificial Sequence
  Description of Artificial Sequence: Synthetic peptide
  Seed: PRMCSLMQGSTLPRR
PRMISLLQSSTMPRR

SEQ ID NO: 110814 - protein, 15 aa, Artificial Sequence
  Description of Artificial Sequence: Synthetic peptide
  Seed: PRMCSLMQGSTLPRR
PRMISLLQSSTNPRR

SEQ ID NO: 110815 - protein, 15 aa, Artificial Sequence
  Description of Artificial Sequence: Synthetic peptide
  Seed: PRMCSLMQGSTLPRR
PRMISLLQSSTPPRR

SEQ ID NO: 110816 - protein, 15 aa, Artificial Sequence
  Description of Artificial Sequence: Synthetic peptide
  Seed: PRMCSLMQGSTLPRR
PRMISLLQSSTQPRR

SEQ ID NO: 110817 - protein, 15 aa, Artificial Sequence
  Description of Artificial Sequence: Synthetic peptide
  Seed: PRMCSLMQGSTLPRR
PRMISLLQSSTSPRR

SEQ ID NO: 110818 - protein, 15 aa, Artificial Sequence
  Description of Artificial Sequence: Synthetic peptide
  Seed: PRMCSLMQGSTLPRR
PRMISLLQSSTTPRR

SEQ ID NO: 110819 - protein, 15 aa, Artificial Sequence
  Description of Artificial Sequence: Synthetic peptide
  Seed: PRMCSLMQGSTLPRR
PRMISLLQSSTVPRR

SEQ ID NO: 110820 - protein, 15 aa, Artificial Sequence
  Description of Artificial Sequence: Synthetic peptide
  Seed: PRMCSLMQGSTLPRR
PRMISLLQSSTYPRR

SEQ ID NO: 110821 - protein, 15 aa, Artificial Sequence
  Description of Artificial Sequence: Synthetic peptide
  Seed: PRMCSLMQGSTLPRR
PRMISLLQTSTAPRR

SEQ ID NO: 110822 - protein, 15 aa, Artificial Sequence
  Description of Artificial Sequence: Synthetic peptide
  Seed: PRMCSLMQGSTLPRR
PRMISLLQTSTCPRR

SEQ ID NO: 110823 - protein, 15 aa, Artificial Sequence
  Description of Artificial Sequence: Synthetic peptide
  Seed: PRMCSLMQGSTLPRR
PRMISLLQTSTGPRR

SEQ ID NO: 110824 - protein, 15 aa, Artificial Sequence
  Description of Artificial Sequence: Synthetic peptide
  Seed: PRMCSLMQGSTLPRR
PRMISLLQTSTHPRR

SEQ ID NO: 110825 - protein, 15 aa, Artificial Sequence
  Description of Artificial Sequence: Synthetic peptide
  Seed: PRMCSLMQGSTLPRR
PRMISLLQTSTIPRR

SEQ ID NO: 110826 - protein, 15 aa, Artificial Sequence
  Description of Artificial Sequence: Synthetic peptide
  Seed: PRMCSLMQGSTLPRR
PRMISLLQTSTLPRR

SEQ ID NO: 110827 - protein, 15 aa, Artificial Sequence
  Description of Artificial Sequence: Synthetic peptide
  Seed: PRMCSLMQGSTLPRR
PRMISLLQTSTMPRR

SEQ ID NO: 110828 - protein, 15 aa, Artificial Sequence
  Description of Artificial Sequence: Synthetic peptide
  Seed: PRMCSLMQGSTLPRR
PRMISLLQTSTNPRR

SEQ ID NO: 110829 - protein, 15 aa, Artificial Sequence
  Description of Artificial Sequence: Synthetic peptide
  Seed: PRMCSLMQGSTLPRR
PRMISLLQTSTSPRR

SEQ ID NO: 110830 - protein, 15 aa, Artificial Sequence
  Description of Artificial Sequence: Synthetic peptide
  Seed: PRMCSLMQGSTLPRR
PRMISLLQTSTTPRR

SEQ ID NO: 110831 - protein, 15 aa, Artificial Sequence
  Description of Artificial Sequence: Synthetic peptide
  Seed: PRMCSLMQGSTLPRR
PRMISLLQTSTVPRR

SEQ ID NO: 110832 - protein, 15 aa, Artificial Sequence
  Description of Artificial Sequence: Synthetic peptide
  Seed: PRMCSLMQGSTLPRR
PRMISLLQVSTAPRR

SEQ ID NO: 110833 - protein, 15 aa, Artificial Sequence
  Description of Artificial Sequence: Synthetic peptide
  Seed: PRMCSLMQGSTLPRR
PRMISLLQVSTGPRR

SEQ ID NO: 110834 - protein, 15 aa, Artificial Sequence
  Description of Artificial Sequence: Synthetic peptide
  Seed: PRMCSLMQGSTLPRR
PRMISLLQVSTHPRR

SEQ ID NO: 110835 - protein, 15 aa, Artificial Sequence
  Description of Artificial Sequence: Synthetic peptide
  Seed: PRMCSLMQGSTLPRR
PRMISLLQVSTIPRR

SEQ ID NO: 110836 - protein, 15 aa, Artificial Sequence
  Description of Artificial Sequence: Synthetic peptide
  Seed: PRMCSLMQGSTLPRR
PRMISLLQVSTLPRR

SEQ ID NO: 110837 - protein, 15 aa, Artificial Sequence
  Description of Artificial Sequence: Synthetic peptide
  Seed: PRMCSLMQGSTLPRR
PRMISLLQVSTMPRR

SEQ ID NO: 110838 - protein, 15 aa, Artificial Sequence
  Description of Artificial Sequence: Synthetic peptide
  Seed: PRMCSLMQGSTLPRR
PRMISLLQVSTNPRR

SEQ ID NO: 110839 - protein, 15 aa, Artificial Sequence
  Description of Artificial Sequence: Synthetic peptide
  Seed: PRMCSLMQGSTLPRR
PRMISLLQVSTSPRR

SEQ ID NO: 110840 - protein, 15 aa, Artificial Sequence
  Description of Artificial Sequence: Synthetic peptide
  Seed: PRMCSLMQGSTLPRR
PRMISLLQVSTTPRR

SEQ ID NO: 110841 - protein, 15 aa, Artificial Sequence
  Description of Artificial Sequence: Synthetic peptide
  Seed: PRMCSLMQGSTLPRR
PRMISLLQVSTVPRR

SEQ ID NO: 110842 - protein, 15 aa, Artificial Sequence
  Description of Artificial Sequence: Synthetic peptide
  Seed: PRMCSLMQGSTLPRR
PRMISLMQASTAPRR

SEQ ID NO: 110843 - protein, 15 aa, Artificial Sequence
  Description of Artificial Sequence: Synthetic peptide
  Seed: PRMCSLMQGSTLPRR
PRMISLMQASTCPRR

SEQ ID NO: 110844 - protein, 15 aa, Artificial Sequence
  Description of Artificial Sequence: Synthetic peptide
  Seed: PRMCSLMQGSTLPRR
PRMISLMQASTFPRR

SEQ ID NO: 110845 - protein, 15 aa, Artificial Sequence
  Description of Artificial Sequence: Synthetic peptide
  Seed: PRMCSLMQGSTLPRR
PRMISLMQASTGPRR

SEQ ID NO: 110846 - protein, 15 aa, Artificial Sequence
  Description of Artificial Sequence: Synthetic peptide
  Seed: PRMCSLMQGSTLPRR
PRMISLMQASTHPRR

SEQ ID NO: 110847 - protein, 15 aa, Artificial Sequence
  Description of Artificial Sequence: Synthetic peptide
  Seed: PRMCSLMQGSTLPRR
PRMISLMQASTIPRR

SEQ ID NO: 110848 - protein, 15 aa, Artificial Sequence
  Description of Artificial Sequence: Synthetic peptide
  Seed: PRMCSLMQGSTLPRR
PRMISLMQASTKPRR

SEQ ID NO: 110849 - protein, 15 aa, Artificial Sequence
  Description of Artificial Sequence: Synthetic peptide
  Seed: PRMCSLMQGSTLPRR
PRMISLMQASTLPRR

SEQ ID NO: 110850 - protein, 15 aa, Artificial Sequence
  Description of Artificial Sequence: Synthetic peptide
  Seed: PRMCSLMQGSTLPRR
PRMISLMQASTMPRR

SEQ ID NO: 110851 - protein, 15 aa, Artificial Sequence
  Description of Artificial Sequence: Synthetic peptide
  Seed: PRMCSLMQGSTLPRR
PRMISLMQASTNPRR

SEQ ID NO: 110852 - protein, 15 aa, Artificial Sequence
  Description of Artificial Sequence: Synthetic peptide
  Seed: PRMCSLMQGSTLPRR
PRMISLMQASTPPRR

SEQ ID NO: 110853 - protein, 15 aa, Artificial Sequence
  Description of Artificial Sequence: Synthetic peptide
  Seed: PRMCSLMQGSTLPRR
PRMISLMQASTQPRR

SEQ ID NO: 110854 - protein, 15 aa, Artificial Sequence
  Description of Artificial Sequence: Synthetic peptide
  Seed: PRMCSLMQGSTLPRR
PRMISLMQASTRPRR

SEQ ID NO: 110855 - protein, 15 aa, Artificial Sequence
  Description of Artificial Sequence: Synthetic peptide
  Seed: PRMCSLMQGSTLPRR
PRMISLMQASTSPRR

SEQ ID NO: 110856 - protein, 15 aa, Artificial Sequence
  Description of Artificial Sequence: Synthetic peptide
  Seed: PRMCSLMQGSTLPRR
PRMISLMQASTTPRR

SEQ ID NO: 110857 - protein, 15 aa, Artificial Sequence
  Description of Artificial Sequence: Synthetic peptide
  Seed: PRMCSLMQGSTLPRR
PRMISLMQASTVPRR

SEQ ID NO: 110858 - protein, 15 aa, Artificial Sequence
  Description of Artificial Sequence: Synthetic peptide
  Seed: PRMCSLMQGSTLPRR
PRMISLMQASTWPRR

SEQ ID NO: 110859 - protein, 15 aa, Artificial Sequence
  Description of Artificial Sequence: Synthetic peptide
  Seed: PRMCSLMQGSTLPRR
PRMISLMQASTYPRR

SEQ ID NO: 110860 - protein, 15 aa, Artificial Sequence
  Description of Artificial Sequence: Synthetic peptide
  Seed: PRMCSLMQGSTLPRR
PRMISLMQCSTLPRR

SEQ ID NO: 110861 - protein, 15 aa, Artificial Sequence
  Description of Artificial Sequence: Synthetic peptide
  Seed: PRMCSLMQGSTLPRR
PRMISLMQCSTVPRR

SEQ ID NO: 110862 - protein, 15 aa, Artificial Sequence
  Description of Artificial Sequence: Synthetic peptide
  Seed: PRMCSLMQGSTLPRR
PRMISLMQFSTLPRR

SEQ ID NO: 110863 - protein, 15 aa, Artificial Sequence
  Description of Artificial Sequence: Synthetic peptide
  Seed: PRMCSLMQGSTLPRR
PRMISLMQGSTAPRR

SEQ ID NO: 110864 - protein, 15 aa, Artificial Sequence
  Description of Artificial Sequence: Synthetic peptide
  Seed: PRMCSLMQGSTLPRR
PRMISLMQGSTCPRR

SEQ ID NO: 110865 - protein, 15 aa, Artificial Sequence
  Description of Artificial Sequence: Synthetic peptide
  Seed: PRMCSLMQGSTLPRR
PRMISLMQGSTFPRR

SEQ ID NO: 110866 - protein, 15 aa, Artificial Sequence
  Description of Artificial Sequence: Synthetic peptide
  Seed: PRMCSLMQGSTLPRR
PRMISLMQGSTGPRR

SEQ ID NO: 110867 - protein, 15 aa, Artificial Sequence
  Description of Artificial Sequence: Synthetic peptide
  Seed: PRMCSLMQGSTLPRR
PRMISLMQGSTHPRR

SEQ ID NO: 110868 - protein, 15 aa, Artificial Sequence
  Description of Artificial Sequence: Synthetic peptide
  Seed: PRMCSLMQGSTLPRR
PRMISLMQGSTIPRR

SEQ ID NO: 110869 - protein, 15 aa, Artificial Sequence
  Description of Artificial Sequence: Synthetic peptide
  Seed: PRMCSLMQGSTLPRR
PRMISLMQGSTLPRR

SEQ ID NO: 110870 - protein, 15 aa, Artificial Sequence
  Description of Artificial Sequence: Synthetic peptide
  Seed: PRMCSLMQGSTLPRR
PRMISLMQGSTMPRR

SEQ ID NO: 110871 - protein, 15 aa, Artificial Sequence
  Description of Artificial Sequence: Synthetic peptide
  Seed: PRMCSLMQGSTLPRR
PRMISLMQGSTNPRR

SEQ ID NO: 110872 - protein, 15 aa, Artificial Sequence
  Description of Artificial Sequence: Synthetic peptide
  Seed: PRMCSLMQGSTLPRR
PRMISLMQGSTPPRR

SEQ ID NO: 110873 - protein, 15 aa, Artificial Sequence
  Description of Artificial Sequence: Synthetic peptide
  Seed: PRMCSLMQGSTLPRR
PRMISLMQGSTQPRR

SEQ ID NO: 110874 - protein, 15 aa, Artificial Sequence
  Description of Artificial Sequence: Synthetic peptide
  Seed: PRMCSLMQGSTLPRR
PRMISLMQGSTSPRR

SEQ ID NO: 110875 - protein, 15 aa, Artificial Sequence
  Description of Artificial Sequence: Synthetic peptide
  Seed: PRMCSLMQGSTLPRR
PRMISLMQGSTTPRR

SEQ ID NO: 110876 - protein, 15 aa, Artificial Sequence
  Description of Artificial Sequence: Synthetic peptide
  Seed: PRMCSLMQGSTLPRR
PRMISLMQGSTVPRR

SEQ ID NO: 110877 - protein, 15 aa, Artificial Sequence
  Description of Artificial Sequence: Synthetic peptide
  Seed: PRMCSLMQGSTLPRR
PRMISLMQGSTYPRR

SEQ ID NO: 110878 - protein, 15 aa, Artificial Sequence
  Description of Artificial Sequence: Synthetic peptide
  Seed: PRMCSLMQGSTLPRR
PRMISLMQHSTAPRR

SEQ ID NO: 110879 - protein, 15 aa, Artificial Sequence
  Description of Artificial Sequence: Synthetic peptide
  Seed: PRMCSLMQGSTLPRR
PRMISLMQHSTIPRR

SEQ ID NO: 110880 - protein, 15 aa, Artificial Sequence
  Description of Artificial Sequence: Synthetic peptide
  Seed: PRMCSLMQGSTLPRR
PRMISLMQHSTLPRR

SEQ ID NO: 110881 - protein, 15 aa, Artificial Sequence
  Description of Artificial Sequence: Synthetic peptide
  Seed: PRMCSLMQGSTLPRR
PRMISLMQHSTVPRR

SEQ ID NO: 110882 - protein, 15 aa, Artificial Sequence
  Description of Artificial Sequence: Synthetic peptide
  Seed: PRMCSLMQGSTLPRR
PRMISLMQISTAPRR

SEQ ID NO: 110883 - protein, 15 aa, Artificial Sequence
  Description of Artificial Sequence: Synthetic peptide
  Seed: PRMCSLMQGSTLPRR
PRMISLMQISTHPRR

SEQ ID NO: 110884 - protein, 15 aa, Artificial Sequence
  Description of Artificial Sequence: Synthetic peptide
  Seed: PRMCSLMQGSTLPRR
PRMISLMQISTIPRR

SEQ ID NO: 110885 - protein, 15 aa, Artificial Sequence
  Description of Artificial Sequence: Synthetic peptide
  Seed: PRMCSLMQGSTLPRR
PRMISLMQISTLPRR

SEQ ID NO: 110886 - protein, 15 aa, Artificial Sequence
  Description of Artificial Sequence: Synthetic peptide
  Seed: PRMCSLMQGSTLPRR
PRMISLMQISTMPRR

SEQ ID NO: 110887 - protein, 15 aa, Artificial Sequence
  Description of Artificial Sequence: Synthetic peptide
  Seed: PRMCSLMQGSTLPRR
PRMISLMQISTNPRR

SEQ ID NO: 110888 - protein, 15 aa, Artificial Sequence
  Description of Artificial Sequence: Synthetic peptide
  Seed: PRMCSLMQGSTLPRR
PRMISLMQISTSPRR

SEQ ID NO: 110889 - protein, 15 aa, Artificial Sequence
  Description of Artificial Sequence: Synthetic peptide
  Seed: PRMCSLMQGSTLPRR
PRMISLMQISTTPRR

SEQ ID NO: 110890 - protein, 15 aa, Artificial Sequence
  Description of Artificial Sequence: Synthetic peptide
  Seed: PRMCSLMQGSTLPRR
PRMISLMQISTVPRR

SEQ ID NO: 110891 - protein, 15 aa, Artificial Sequence
  Description of Artificial Sequence: Synthetic peptide
  Seed: PRMCSLMQGSTLPRR
PRMISLMQLSTAPRR

SEQ ID NO: 110892 - protein, 15 aa, Artificial Sequence
  Description of Artificial Sequence: Synthetic peptide
  Seed: PRMCSLMQGSTLPRR
PRMISLMQLSTIPRR

SEQ ID NO: 110893 - protein, 15 aa, Artificial Sequence
  Description of Artificial Sequence: Synthetic peptide
  Seed: PRMCSLMQGSTLPRR
PRMISLMQLSTLPRR

SEQ ID NO: 110894 - protein, 15 aa, Artificial Sequence
  Description of Artificial Sequence: Synthetic peptide
  Seed: PRMCSLMQGSTLPRR
PRMISLMQLSTMPRR

SEQ ID NO: 110895 - protein, 15 aa, Artificial Sequence
  Description of Artificial Sequence: Synthetic peptide
  Seed: PRMCSLMQGSTLPRR
PRMISLMQLSTNPRR

SEQ ID NO: 110896 - protein, 15 aa, Artificial Sequence
  Description of Artificial Sequence: Synthetic peptide
  Seed: PRMCSLMQGSTLPRR
PRMISLMQLSTSPRR

SEQ ID NO: 110897 - protein, 15 aa, Artificial Sequence
  Description of Artificial Sequence: Synthetic peptide
  Seed: PRMCSLMQGSTLPRR
PRMISLMQLSTTPRR

SEQ ID NO: 110898 - protein, 15 aa, Artificial Sequence
  Description of Artificial Sequence: Synthetic peptide
  Seed: PRMCSLMQGSTLPRR
PRMISLMQLSTVPRR

SEQ ID NO: 110899 - protein, 15 aa, Artificial Sequence
  Description of Artificial Sequence: Synthetic peptide
  Seed: PRMCSLMQGSTLPRR
PRMISLMQMSTAPRR

SEQ ID NO: 110900 - protein, 15 aa, Artificial Sequence
  Description of Artificial Sequence: Synthetic peptide
  Seed: PRMCSLMQGSTLPRR
PRMISLMQMSTIPRR

SEQ ID NO: 110901 - protein, 15 aa, Artificial Sequence
  Description of Artificial Sequence: Synthetic peptide
  Seed: PRMCSLMQGSTLPRR
PRMISLMQMSTLPRR

SEQ ID NO: 110902 - protein, 15 aa, Artificial Sequence
  Description of Artificial Sequence: Synthetic peptide
  Seed: PRMCSLMQGSTLPRR
PRMISLMQMSTNPRR

SEQ ID NO: 110903 - protein, 15 aa, Artificial Sequence
  Description of Artificial Sequence: Synthetic peptide
  Seed: PRMCSLMQGSTLPRR
PRMISLMQMSTSPRR

SEQ ID NO: 110904 - protein, 15 aa, Artificial Sequence
  Description of Artificial Sequence: Synthetic peptide
  Seed: PRMCSLMQGSTLPRR
PRMISLMQMSTVPRR

SEQ ID NO: 110905 - protein, 15 aa, Artificial Sequence
  Description of Artificial Sequence: Synthetic peptide
  Seed: PRMCSLMQGSTLPRR
PRMISLMQNSTAPRR

SEQ ID NO: 110906 - protein, 15 aa, Artificial Sequence
  Description of Artificial Sequence: Synthetic peptide
  Seed: PRMCSLMQGSTLPRR
PRMISLMQNSTFPRR

SEQ ID NO: 110907 - protein, 15 aa, Artificial Sequence
  Description of Artificial Sequence: Synthetic peptide
  Seed: PRMCSLMQGSTLPRR
PRMISLMQNSTGPRR

SEQ ID NO: 110908 - protein, 15 aa, Artificial Sequence
  Description of Artificial Sequence: Synthetic peptide
  Seed: PRMCSLMQGSTLPRR
PRMISLMQNSTIPRR

SEQ ID NO: 110909 - protein, 15 aa, Artificial Sequence
  Description of Artificial Sequence: Synthetic peptide
  Seed: PRMCSLMQGSTLPRR
PRMISLMQNSTLPRR

SEQ ID NO: 110910 - protein, 15 aa, Artificial Sequence
  Description of Artificial Sequence: Synthetic peptide
  Seed: PRMCSLMQGSTLPRR
PRMISLMQNSTMPRR

SEQ ID NO: 110911 - protein, 15 aa, Artificial Sequence
  Description of Artificial Sequence: Synthetic peptide
  Seed: PRMCSLMQGSTLPRR
PRMISLMQNSTNPRR

SEQ ID NO: 110912 - protein, 15 aa, Artificial Sequence
  Description of Artificial Sequence: Synthetic peptide
  Seed: PRMCSLMQGSTLPRR
PRMISLMQNSTSPRR

SEQ ID NO: 110913 - protein, 15 aa, Artificial Sequence
  Description of Artificial Sequence: Synthetic peptide
  Seed: PRMCSLMQGSTLPRR
PRMISLMQNSTTPRR

SEQ ID NO: 110914 - protein, 15 aa, Artificial Sequence
  Description of Artificial Sequence: Synthetic peptide
  Seed: PRMCSLMQGSTLPRR
PRMISLMQNSTVPRR

SEQ ID NO: 110915 - protein, 15 aa, Artificial Sequence
  Description of Artificial Sequence: Synthetic peptide
  Seed: PRMCSLMQGSTLPRR
PRMISLMQPSTAPRR

SEQ ID NO: 110916 - protein, 15 aa, Artificial Sequence
  Description of Artificial Sequence: Synthetic peptide
  Seed: PRMCSLMQGSTLPRR
PRMISLMQPSTCPRR

SEQ ID NO: 110917 - protein, 15 aa, Artificial Sequence
  Description of Artificial Sequence: Synthetic peptide
  Seed: PRMCSLMQGSTLPRR
PRMISLMQPSTFPRR

SEQ ID NO: 110918 - protein, 15 aa, Artificial Sequence
  Description of Artificial Sequence: Synthetic peptide
  Seed: PRMCSLMQGSTLPRR
PRMISLMQPSTGPRR

SEQ ID NO: 110919 - protein, 15 aa, Artificial Sequence
  Description of Artificial Sequence: Synthetic peptide
  Seed: PRMCSLMQGSTLPRR
PRMISLMQPSTHPRR

SEQ ID NO: 110920 - protein, 15 aa, Artificial Sequence
  Description of Artificial Sequence: Synthetic peptide
  Seed: PRMCSLMQGSTLPRR
PRMISLMQPSTIPRR

SEQ ID NO: 110921 - protein, 15 aa, Artificial Sequence
  Description of Artificial Sequence: Synthetic peptide
  Seed: PRMCSLMQGSTLPRR
PRMISLMQPSTLPRR

SEQ ID NO: 110922 - protein, 15 aa, Artificial Sequence
  Description of Artificial Sequence: Synthetic peptide
  Seed: PRMCSLMQGSTLPRR
PRMISLMQPSTMPRR

SEQ ID NO: 110923 - protein, 15 aa, Artificial Sequence
  Description of Artificial Sequence: Synthetic peptide
  Seed: PRMCSLMQGSTLPRR
PRMISLMQPSTNPRR

SEQ ID NO: 110924 - protein, 15 aa, Artificial Sequence
  Description of Artificial Sequence: Synthetic peptide
  Seed: PRMCSLMQGSTLPRR
PRMISLMQPSTQPRR

SEQ ID NO: 110925 - protein, 15 aa, Artificial Sequence
  Description of Artificial Sequence: Synthetic peptide
  Seed: PRMCSLMQGSTLPRR
PRMISLMQPSTSPRR

SEQ ID NO: 110926 - protein, 15 aa, Artificial Sequence
  Description of Artificial Sequence: Synthetic peptide
  Seed: PRMCSLMQGSTLPRR
PRMISLMQPSTTPRR

SEQ ID NO: 110927 - protein, 15 aa, Artificial Sequence
  Description of Artificial Sequence: Synthetic peptide
  Seed: PRMCSLMQGSTLPRR
PRMISLMQPSTVPRR

SEQ ID NO: 110928 - protein, 15 aa, Artificial Sequence
  Description of Artificial Sequence: Synthetic peptide
  Seed: PRMCSLMQGSTLPRR
PRMISLMQPSTYPRR

SEQ ID NO: 110929 - protein, 15 aa, Artificial Sequence
  Description of Artificial Sequence: Synthetic peptide
  Seed: PRMCSLMQGSTLPRR
PRMISLMQSSTAPRR

SEQ ID NO: 110930 - protein, 15 aa, Artificial Sequence
  Description of Artificial Sequence: Synthetic peptide
  Seed: PRMCSLMQGSTLPRR
PRMISLMQSSTCPRR

SEQ ID NO: 110931 - protein, 15 aa, Artificial Sequence
  Description of Artificial Sequence: Synthetic peptide
  Seed: PRMCSLMQGSTLPRR
PRMISLMQSSTFPRR

SEQ ID NO: 110932 - protein, 15 aa, Artificial Sequence
  Description of Artificial Sequence: Synthetic peptide
  Seed: PRMCSLMQGSTLPRR
PRMISLMQSSTGPRR

SEQ ID NO: 110933 - protein, 15 aa, Artificial Sequence
  Description of Artificial Sequence: Synthetic peptide
  Seed: PRMCSLMQGSTLPRR
PRMISLMQSSTHPRR

SEQ ID NO: 110934 - protein, 15 aa, Artificial Sequence
  Description of Artificial Sequence: Synthetic peptide
  Seed: PRMCSLMQGSTLPRR
PRMISLMQSSTIPRR

SEQ ID NO: 110935 - protein, 15 aa, Artificial Sequence
  Description of Artificial Sequence: Synthetic peptide
  Seed: PRMCSLMQGSTLPRR
PRMISLMQSSTLPRR

SEQ ID NO: 110936 - protein, 15 aa, Artificial Sequence
  Description of Artificial Sequence: Synthetic peptide
  Seed: PRMCSLMQGSTLPRR
PRMISLMQSSTMPRR

SEQ ID NO: 110937 - protein, 15 aa, Artificial Sequence
  Description of Artificial Sequence: Synthetic peptide
  Seed: PRMCSLMQGSTLPRR
PRMISLMQSSTNPRR

SEQ ID NO: 110938 - protein, 15 aa, Artificial Sequence
  Description of Artificial Sequence: Synthetic peptide
  Seed: PRMCSLMQGSTLPRR
PRMISLMQSSTQPRR

SEQ ID NO: 110939 - protein, 15 aa, Artificial Sequence
  Description of Artificial Sequence: Synthetic peptide
  Seed: PRMCSLMQGSTLPRR
PRMISLMQSSTRPRR

SEQ ID NO: 110940 - protein, 15 aa, Artificial Sequence
  Description of Artificial Sequence: Synthetic peptide
  Seed: PRMCSLMQGSTLPRR
PRMISLMQSSTSPRR

SEQ ID NO: 110941 - protein, 15 aa, Artificial Sequence
  Description of Artificial Sequence: Synthetic peptide
  Seed: PRMCSLMQGSTLPRR
PRMISLMQSSTTPRR

SEQ ID NO: 110942 - protein, 15 aa, Artificial Sequence
  Description of Artificial Sequence: Synthetic peptide
  Seed: PRMCSLMQGSTLPRR
PRMISLMQSSTVPRR

SEQ ID NO: 110943 - protein, 15 aa, Artificial Sequence
  Description of Artificial Sequence: Synthetic peptide
  Seed: PRMCSLMQGSTLPRR
PRMISLMQSSTYPRR

SEQ ID NO: 110944 - protein, 15 aa, Artificial Sequence
  Description of Artificial Sequence: Synthetic peptide
  Seed: PRMCSLMQGSTLPRR
PRMISLMQTSTAPRR

SEQ ID NO: 110945 - protein, 15 aa, Artificial Sequence
  Description of Artificial Sequence: Synthetic peptide
  Seed: PRMCSLMQGSTLPRR
PRMISLMQTSTCPRR

SEQ ID NO: 110946 - protein, 15 aa, Artificial Sequence
  Description of Artificial Sequence: Synthetic peptide
  Seed: PRMCSLMQGSTLPRR
PRMISLMQTSTGPRR

SEQ ID NO: 110947 - protein, 15 aa, Artificial Sequence
  Description of Artificial Sequence: Synthetic peptide
  Seed: PRMCSLMQGSTLPRR
PRMISLMQTSTIPRR

SEQ ID NO: 110948 - protein, 15 aa, Artificial Sequence
  Description of Artificial Sequence: Synthetic peptide
  Seed: PRMCSLMQGSTLPRR
PRMISLMQTSTLPRR

SEQ ID NO: 110949 - protein, 15 aa, Artificial Sequence
  Description of Artificial Sequence: Synthetic peptide
  Seed: PRMCSLMQGSTLPRR
PRMISLMQTSTMPRR

SEQ ID NO: 110950 - protein, 15 aa, Artificial Sequence
  Description of Artificial Sequence: Synthetic peptide
  Seed: PRMCSLMQGSTLPRR
PRMISLMQTSTNPRR

SEQ ID NO: 110951 - protein, 15 aa, Artificial Sequence
  Description of Artificial Sequence: Synthetic peptide
  Seed: PRMCSLMQGSTLPRR
PRMISLMQTSTSPRR

SEQ ID NO: 110952 - protein, 15 aa, Artificial Sequence
  Description of Artificial Sequence: Synthetic peptide
  Seed: PRMCSLMQGSTLPRR
PRMISLMQTSTTPRR

SEQ ID NO: 110953 - protein, 15 aa, Artificial Sequence
  Description of Artificial Sequence: Synthetic peptide
  Seed: PRMCSLMQGSTLPRR
PRMISLMQTSTVPRR

SEQ ID NO: 110954 - protein, 15 aa, Artificial Sequence
  Description of Artificial Sequence: Synthetic peptide
  Seed: PRMCSLMQGSTLPRR
PRMISLMQVSTAPRR

SEQ ID NO: 110955 - protein, 15 aa, Artificial Sequence
  Description of Artificial Sequence: Synthetic peptide
  Seed: PRMCSLMQGSTLPRR
PRMISLMQVSTGPRR

SEQ ID NO: 110956 - protein, 15 aa, Artificial Sequence
  Description of Artificial Sequence: Synthetic peptide
  Seed: PRMCSLMQGSTLPRR
PRMISLMQVSTHPRR

SEQ ID NO: 110957 - protein, 15 aa, Artificial Sequence
  Description of Artificial Sequence: Synthetic peptide
  Seed: PRMCSLMQGSTLPRR
PRMISLMQVSTIPRR

SEQ ID NO: 110958 - protein, 15 aa, Artificial Sequence
  Description of Artificial Sequence: Synthetic peptide
  Seed: PRMCSLMQGSTLPRR
PRMISLMQVSTLPRR

SEQ ID NO: 110959 - protein, 15 aa, Artificial Sequence
  Description of Artificial Sequence: Synthetic peptide
  Seed: PRMCSLMQGSTLPRR
PRMISLMQVSTMPRR

SEQ ID NO: 110960 - protein, 15 aa, Artificial Sequence
  Description of Artificial Sequence: Synthetic peptide
  Seed: PRMCSLMQGSTLPRR
PRMISLMQVSTNPRR

SEQ ID NO: 110961 - protein, 15 aa, Artificial Sequence
  Description of Artificial Sequence: Synthetic peptide
  Seed: PRMCSLMQGSTLPRR
PRMISLMQVSTQPRR

SEQ ID NO: 110962 - protein, 15 aa, Artificial Sequence
  Description of Artificial Sequence: Synthetic peptide
  Seed: PRMCSLMQGSTLPRR
PRMISLMQVSTSPRR

SEQ ID NO: 110963 - protein, 15 aa, Artificial Sequence
  Description of Artificial Sequence: Synthetic peptide
  Seed: PRMCSLMQGSTLPRR
PRMISLMQVSTTPRR

SEQ ID NO: 110964 - protein, 15 aa, Artificial Sequence
  Description of Artificial Sequence: Synthetic peptide
  Seed: PRMCSLMQGSTLPRR
PRMISLMQVSTVPRR

SEQ ID NO: 110965 - protein, 15 aa, Artificial Sequence
  Description of Artificial Sequence: Synthetic peptide
  Seed: PRMCSLMQGSTLPRR
PRMISLNQASTIPRR

SEQ ID NO: 110966 - protein, 15 aa, Artificial Sequence
  Description of Artificial Sequence: Synthetic peptide
  Seed: PRMCSLMQGSTLPRR
PRMISLNQASTLPRR

SEQ ID NO: 110967 - protein, 15 aa, Artificial Sequence
  Description of Artificial Sequence: Synthetic peptide
  Seed: PRMCSLMQGSTLPRR
PRMISLQQASTAPRR

SEQ ID NO: 110968 - protein, 15 aa, Artificial Sequence
  Description of Artificial Sequence: Synthetic peptide
  Seed: PRMCSLMQGSTLPRR
PRMISLQQASTFPRR

SEQ ID NO: 110969 - protein, 15 aa, Artificial Sequence
  Description of Artificial Sequence: Synthetic peptide
  Seed: PRMCSLMQGSTLPRR
PRMISLQQASTIPRR

SEQ ID NO: 110970 - protein, 15 aa, Artificial Sequence
  Description of Artificial Sequence: Synthetic peptide
  Seed: PRMCSLMQGSTLPRR
PRMISLQQASTLPRR

SEQ ID NO: 110971 - protein, 15 aa, Artificial Sequence
  Description of Artificial Sequence: Synthetic peptide
  Seed: PRMCSLMQGSTLPRR
PRMISLQQASTMPRR

SEQ ID NO: 110972 - protein, 15 aa, Artificial Sequence
  Description of Artificial Sequence: Synthetic peptide
  Seed: PRMCSLMQGSTLPRR
PRMISLQQASTSPRR

SEQ ID NO: 110973 - protein, 15 aa, Artificial Sequence
  Description of Artificial Sequence: Synthetic peptide
  Seed: PRMCSLMQGSTLPRR
PRMISLQQASTTPRR

SEQ ID NO: 110974 - protein, 15 aa, Artificial Sequence
  Description of Artificial Sequence: Synthetic peptide
  Seed: PRMCSLMQGSTLPRR
PRMISLQQASTVPRR

SEQ ID NO: 110975 - protein, 15 aa, Artificial Sequence
  Description of Artificial Sequence: Synthetic peptide
  Seed: PRMCSLMQGSTLPRR
PRMISLQQGSTAPRR

SEQ ID NO: 110976 - protein, 15 aa, Artificial Sequence
  Description of Artificial Sequence: Synthetic peptide
  Seed: PRMCSLMQGSTLPRR
PRMISLQQGSTIPRR

SEQ ID NO: 110977 - protein, 15 aa, Artificial Sequence
  Description of Artificial Sequence: Synthetic peptide
  Seed: PRMCSLMQGSTLPRR
PRMISLQQGSTLPRR

SEQ ID NO: 110978 - protein, 15 aa, Artificial Sequence
  Description of Artificial Sequence: Synthetic peptide
  Seed: PRMCSLMQGSTLPRR
PRMISLQQGSTMPRR

SEQ ID NO: 110979 - protein, 15 aa, Artificial Sequence
  Description of Artificial Sequence: Synthetic peptide
  Seed: PRMCSLMQGSTLPRR
PRMISLQQGSTSPRR

SEQ ID NO: 110980 - protein, 15 aa, Artificial Sequence
  Description of Artificial Sequence: Synthetic peptide
  Seed: PRMCSLMQGSTLPRR
PRMISLQQGSTTPRR

SEQ ID NO: 110981 - protein, 15 aa, Artificial Sequence
  Description of Artificial Sequence: Synthetic peptide
  Seed: PRMCSLMQGSTLPRR
PRMISLQQGSTVPRR

SEQ ID NO: 110982 - protein, 15 aa, Artificial Sequence
  Description of Artificial Sequence: Synthetic peptide
  Seed: PRMCSLMQGSTLPRR
PRMISLQQNSTAPRR

SEQ ID NO: 110983 - protein, 15 aa, Artificial Sequence
  Description of Artificial Sequence: Synthetic peptide
  Seed: PRMCSLMQGSTLPRR
PRMISLQQNSTIPRR

SEQ ID NO: 110984 - protein, 15 aa, Artificial Sequence
  Description of Artificial Sequence: Synthetic peptide
  Seed: PRMCSLMQGSTLPRR
PRMISLQQNSTLPRR

SEQ ID NO: 110985 - protein, 15 aa, Artificial Sequence
  Description of Artificial Sequence: Synthetic peptide
  Seed: PRMCSLMQGSTLPRR
PRMISLQQNSTVPRR

SEQ ID NO: 110986 - protein, 15 aa, Artificial Sequence
  Description of Artificial Sequence: Synthetic peptide
  Seed: PRMCSLMQGSTLPRR
PRMISLQQPSTAPRR

SEQ ID NO: 110987 - protein, 15 aa, Artificial Sequence
  Description of Artificial Sequence: Synthetic peptide
  Seed: PRMCSLMQGSTLPRR
PRMISLQQPSTIPRR

SEQ ID NO: 110988 - protein, 15 aa, Artificial Sequence
  Description of Artificial Sequence: Synthetic peptide
  Seed: PRMCSLMQGSTLPRR
PRMISLQQPSTLPRR

SEQ ID NO: 110989 - protein, 15 aa, Artificial Sequence
  Description of Artificial Sequence: Synthetic peptide
  Seed: PRMCSLMQGSTLPRR
PRMISLQQPSTVPRR

SEQ ID NO: 110990 - protein, 15 aa, Artificial Sequence
  Description of Artificial Sequence: Synthetic peptide
  Seed: PRMCSLMQGSTLPRR
PRMISLQQSSTAPRR

SEQ ID NO: 110991 - protein, 15 aa, Artificial Sequence
  Description of Artificial Sequence: Synthetic peptide
  Seed: PRMCSLMQGSTLPRR
PRMISLQQSSTIPRR

SEQ ID NO: 110992 - protein, 15 aa, Artificial Sequence
  Description of Artificial Sequence: Synthetic peptide
  Seed: PRMCSLMQGSTLPRR
PRMISLQQSSTLPRR

SEQ ID NO: 110993 - protein, 15 aa, Artificial Sequence
  Description of Artificial Sequence: Synthetic peptide
  Seed: PRMCSLMQGSTLPRR
PRMISLQQSSTMPRR

SEQ ID NO: 110994 - protein, 15 aa, Artificial Sequence
  Description of Artificial Sequence: Synthetic peptide
  Seed: PRMCSLMQGSTLPRR
PRMISLQQSSTSPRR

SEQ ID NO: 110995 - protein, 15 aa, Artificial Sequence
  Description of Artificial Sequence: Synthetic peptide
  Seed: PRMCSLMQGSTLPRR
PRMISLQQSSTTPRR

SEQ ID NO: 110996 - protein, 15 aa, Artificial Sequence
  Description of Artificial Sequence: Synthetic peptide
  Seed: PRMCSLMQGSTLPRR
PRMISLQQSSTVPRR

SEQ ID NO: 110997 - protein, 15 aa, Artificial Sequence
  Description of Artificial Sequence: Synthetic peptide
  Seed: PRMCSLMQGSTLPRR
PRMISLQQTSTAPRR

SEQ ID NO: 110998 - protein, 15 aa, Artificial Sequence
  Description of Artificial Sequence: Synthetic peptide
  Seed: PRMCSLMQGSTLPRR
PRMISLQQTSTIPRR

SEQ ID NO: 110999 - protein, 15 aa, Artificial Sequence
  Description of Artificial Sequence: Synthetic peptide
  Seed: PRMCSLMQGSTLPRR
PRMISLQQTSTLPRR

SEQ ID NO: 111000 - protein, 15 aa, Artificial Sequence
  Description of Artificial Sequence: Synthetic peptide
  Seed: PRMCSLMQGSTLPRR
PRMISLQQTSTVPRR

SEQ ID NO: 111001 - protein, 15 aa, Artificial Sequence
  Description of Artificial Sequence: Synthetic peptide
  Seed: PRMCSLMQGSTLPRR
PRMISLQQVSTLPRR

SEQ ID NO: 111002 - protein, 15 aa, Artificial Sequence
  Description of Artificial Sequence: Synthetic peptide
  Seed: PRMCSLMQGSTLPRR
PRMISLQQVSTVPRR

SEQ ID NO: 111003 - protein, 15 aa, Artificial Sequence
  Description of Artificial Sequence: Synthetic peptide
  Seed: PRMCSLMQGSTLPRR
PRMISLSQASTAPRR

SEQ ID NO: 111004 - protein, 15 aa, Artificial Sequence
  Description of Artificial Sequence: Synthetic peptide
  Seed: PRMCSLMQGSTLPRR
PRMISLSQASTFPRR

SEQ ID NO: 111005 - protein, 15 aa, Artificial Sequence
  Description of Artificial Sequence: Synthetic peptide
  Seed: PRMCSLMQGSTLPRR
PRMISLSQASTIPRR

SEQ ID NO: 111006 - protein, 15 aa, Artificial Sequence
  Description of Artificial Sequence: Synthetic peptide
  Seed: PRMCSLMQGSTLPRR
PRMISLSQASTLPRR

SEQ ID NO: 111007 - protein, 15 aa, Artificial Sequence
  Description of Artificial Sequence: Synthetic peptide
  Seed: PRMCSLMQGSTLPRR
PRMISLSQASTMPRR

SEQ ID NO: 111008 - protein, 15 aa, Artificial Sequence
  Description of Artificial Sequence: Synthetic peptide
  Seed: PRMCSLMQGSTLPRR
PRMISLSQASTTPRR

SEQ ID NO: 111009 - protein, 15 aa, Artificial Sequence
  Description of Artificial Sequence: Synthetic peptide
  Seed: PRMCSLMQGSTLPRR
PRMISLSQASTVPRR

SEQ ID NO: 111010 - protein, 15 aa, Artificial Sequence
  Description of Artificial Sequence: Synthetic peptide
  Seed: PRMCSLMQGSTLPRR
PRMISLSQGSTAPRR

SEQ ID NO: 111011 - protein, 15 aa, Artificial Sequence
  Description of Artificial Sequence: Synthetic peptide
  Seed: PRMCSLMQGSTLPRR
PRMISLSQGSTIPRR

SEQ ID NO: 111012 - protein, 15 aa, Artificial Sequence
  Description of Artificial Sequence: Synthetic peptide
  Seed: PRMCSLMQGSTLPRR
PRMISLSQGSTLPRR

SEQ ID NO: 111013 - protein, 15 aa, Artificial Sequence
  Description of Artificial Sequence: Synthetic peptide
  Seed: PRMCSLMQGSTLPRR
PRMISLSQGSTVPRR

SEQ ID NO: 111014 - protein, 15 aa, Artificial Sequence
  Description of Artificial Sequence: Synthetic peptide
  Seed: PRMCSLMQGSTLPRR
PRMISLSQPSTIPRR

SEQ ID NO: 111015 - protein, 15 aa, Artificial Sequence
  Description of Artificial Sequence: Synthetic peptide
  Seed: PRMCSLMQGSTLPRR
PRMISLSQPSTLPRR

SEQ ID NO: 111016 - protein, 15 aa, Artificial Sequence
  Description of Artificial Sequence: Synthetic peptide
  Seed: PRMCSLMQGSTLPRR
PRMISLSQPSTVPRR

SEQ ID NO: 111017 - protein, 15 aa, Artificial Sequence
  Description of Artificial Sequence: Synthetic peptide
  Seed: PRMCSLMQGSTLPRR
PRMISLSQSSTAPRR

SEQ ID NO: 111018 - protein, 15 aa, Artificial Sequence
  Description of Artificial Sequence: Synthetic peptide
  Seed: PRMCSLMQGSTLPRR
PRMISLSQSSTFPRR

SEQ ID NO: 111019 - protein, 15 aa, Artificial Sequence
  Description of Artificial Sequence: Synthetic peptide
  Seed: PRMCSLMQGSTLPRR
PRMISLSQSSTIPRR

SEQ ID NO: 111020 - protein, 15 aa, Artificial Sequence
  Description of Artificial Sequence: Synthetic peptide
  Seed: PRMCSLMQGSTLPRR
PRMISLSQSSTLPRR

SEQ ID NO: 111021 - protein, 15 aa, Artificial Sequence
  Description of Artificial Sequence: Synthetic peptide
  Seed: PRMCSLMQGSTLPRR
PRMISLSQSSTMPRR

SEQ ID NO: 111022 - protein, 15 aa, Artificial Sequence
  Description of Artificial Sequence: Synthetic peptide
  Seed: PRMCSLMQGSTLPRR
PRMISLSQSSTVPRR

SEQ ID NO: 111023 - protein, 15 aa, Artificial Sequence
  Description of Artificial Sequence: Synthetic peptide
  Seed: PRMCSLMQGSTLPRR
PRMISLSQTSTIPRR

SEQ ID NO: 111024 - protein, 15 aa, Artificial Sequence
  Description of Artificial Sequence: Synthetic peptide
  Seed: PRMCSLMQGSTLPRR
PRMISLTQASTAPRR

SEQ ID NO: 111025 - protein, 15 aa, Artificial Sequence
  Description of Artificial Sequence: Synthetic peptide
  Seed: PRMCSLMQGSTLPRR
PRMISLTQASTFPRR

SEQ ID NO: 111026 - protein, 15 aa, Artificial Sequence
  Description of Artificial Sequence: Synthetic peptide
  Seed: PRMCSLMQGSTLPRR
PRMISLTQASTIPRR

SEQ ID NO: 111027 - protein, 15 aa, Artificial Sequence
  Description of Artificial Sequence: Synthetic peptide
  Seed: PRMCSLMQGSTLPRR
PRMISLTQASTLPRR

SEQ ID NO: 111028 - protein, 15 aa, Artificial Sequence
  Description of Artificial Sequence: Synthetic peptide
  Seed: PRMCSLMQGSTLPRR
PRMISLTQASTMPRR

SEQ ID NO: 111029 - protein, 15 aa, Artificial Sequence
  Description of Artificial Sequence: Synthetic peptide
  Seed: PRMCSLMQGSTLPRR
PRMISLTQASTVPRR

SEQ ID NO: 111030 - protein, 15 aa, Artificial Sequence
  Description of Artificial Sequence: Synthetic peptide
  Seed: PRMCSLMQGSTLPRR
PRMISLTQFSTLPRR

SEQ ID NO: 111031 - protein, 15 aa, Artificial Sequence
  Description of Artificial Sequence: Synthetic peptide
  Seed: PRMCSLMQGSTLPRR
PRMISLTQGSTAPRR

SEQ ID NO: 111032 - protein, 15 aa, Artificial Sequence
  Description of Artificial Sequence: Synthetic peptide
  Seed: PRMCSLMQGSTLPRR
PRMISLTQGSTIPRR

SEQ ID NO: 111033 - protein, 15 aa, Artificial Sequence
  Description of Artificial Sequence: Synthetic peptide
  Seed: PRMCSLMQGSTLPRR
PRMISLTQGSTLPRR

SEQ ID NO: 111034 - protein, 15 aa, Artificial Sequence
  Description of Artificial Sequence: Synthetic peptide
  Seed: PRMCSLMQGSTLPRR
PRMISLTQGSTVPRR

SEQ ID NO: 111035 - protein, 15 aa, Artificial Sequence
  Description of Artificial Sequence: Synthetic peptide
  Seed: PRMCSLMQGSTLPRR
PRMISLTQPSTIPRR

SEQ ID NO: 111036 - protein, 15 aa, Artificial Sequence
  Description of Artificial Sequence: Synthetic peptide
  Seed: PRMCSLMQGSTLPRR
PRMISLTQPSTLPRR

SEQ ID NO: 111037 - protein, 15 aa, Artificial Sequence
  Description of Artificial Sequence: Synthetic peptide
  Seed: PRMCSLMQGSTLPRR
PRMISLTQPSTVPRR

SEQ ID NO: 111038 - protein, 15 aa, Artificial Sequence
  Description of Artificial Sequence: Synthetic peptide
  Seed: PRMCSLMQGSTLPRR
PRMISLTQSSTFPRR

SEQ ID NO: 111039 - protein, 15 aa, Artificial Sequence
  Description of Artificial Sequence: Synthetic peptide
  Seed: PRMCSLMQGSTLPRR
PRMISLTQSSTIPRR

SEQ ID NO: 111040 - protein, 15 aa, Artificial Sequence
  Description of Artificial Sequence: Synthetic peptide
  Seed: PRMCSLMQGSTLPRR
PRMISLTQSSTLPRR

SEQ ID NO: 111041 - protein, 15 aa, Artificial Sequence
  Description of Artificial Sequence: Synthetic peptide
  Seed: PRMCSLMQGSTLPRR
PRMISLTQSSTMPRR

SEQ ID NO: 111042 - protein, 15 aa, Artificial Sequence
  Description of Artificial Sequence: Synthetic peptide
  Seed: PRMCSLMQGSTLPRR
PRMISLTQSSTVPRR

SEQ ID NO: 111043 - protein, 15 aa, Artificial Sequence
  Description of Artificial Sequence: Synthetic peptide
  Seed: PRMCSLMQGSTLPRR
PRMISLTQTSTIPRR

SEQ ID NO: 111044 - protein, 15 aa, Artificial Sequence
  Description of Artificial Sequence: Synthetic peptide
  Seed: PRMCSLMQGSTLPRR
PRMISLTQTSTLPRR

SEQ ID NO: 111045 - protein, 15 aa, Artificial Sequence
  Description of Artificial Sequence: Synthetic peptide
  Seed: PRMCSLMQGSTLPRR
PRMISLTQVSTIPRR

SEQ ID NO: 111046 - protein, 15 aa, Artificial Sequence
  Description of Artificial Sequence: Synthetic peptide
  Seed: PRMCSLMQGSTLPRR
PRMISLVQASTAPRR

SEQ ID NO: 111047 - protein, 15 aa, Artificial Sequence
  Description of Artificial Sequence: Synthetic peptide
  Seed: PRMCSLMQGSTLPRR
PRMISLVQASTGPRR

SEQ ID NO: 111048 - protein, 15 aa, Artificial Sequence
  Description of Artificial Sequence: Synthetic peptide
  Seed: PRMCSLMQGSTLPRR
PRMISLVQASTIPRR

SEQ ID NO: 111049 - protein, 15 aa, Artificial Sequence
  Description of Artificial Sequence: Synthetic peptide
  Seed: PRMCSLMQGSTLPRR
PRMISLVQASTLPRR

SEQ ID NO: 111050 - protein, 15 aa, Artificial Sequence
  Description of Artificial Sequence: Synthetic peptide
  Seed: PRMCSLMQGSTLPRR
PRMISLVQASTMPRR

SEQ ID NO: 111051 - protein, 15 aa, Artificial Sequence
  Description of Artificial Sequence: Synthetic peptide
  Seed: PRMCSLMQGSTLPRR
PRMISLVQASTNPRR

SEQ ID NO: 111052 - protein, 15 aa, Artificial Sequence
  Description of Artificial Sequence: Synthetic peptide
  Seed: PRMCSLMQGSTLPRR
PRMISLVQASTSPRR

SEQ ID NO: 111053 - protein, 15 aa, Artificial Sequence
  Description of Artificial Sequence: Synthetic peptide
  Seed: PRMCSLMQGSTLPRR
PRMISLVQASTTPRR

SEQ ID NO: 111054 - protein, 15 aa, Artificial Sequence
  Description of Artificial Sequence: Synthetic peptide
  Seed: PRMCSLMQGSTLPRR
PRMISLVQASTVPRR

SEQ ID NO: 111055 - protein, 15 aa, Artificial Sequence
  Description of Artificial Sequence: Synthetic peptide
  Seed: PRMCSLMQGSTLPRR
PRMISLVQFSTLPRR

SEQ ID NO: 111056 - protein, 15 aa, Artificial Sequence
  Description of Artificial Sequence: Synthetic peptide
  Seed: PRMCSLMQGSTLPRR
PRMISLVQGSTAPRR

SEQ ID NO: 111057 - protein, 15 aa, Artificial Sequence
  Description of Artificial Sequence: Synthetic peptide
  Seed: PRMCSLMQGSTLPRR
PRMISLVQGSTIPRR

SEQ ID NO: 111058 - protein, 15 aa, Artificial Sequence
  Description of Artificial Sequence: Synthetic peptide
  Seed: PRMCSLMQGSTLPRR
PRMISLVQGSTLPRR

SEQ ID NO: 111059 - protein, 15 aa, Artificial Sequence
  Description of Artificial Sequence: Synthetic peptide
  Seed: PRMCSLMQGSTLPRR
PRMISLVQGSTMPRR

SEQ ID NO: 111060 - protein, 15 aa, Artificial Sequence
  Description of Artificial Sequence: Synthetic peptide
  Seed: PRMCSLMQGSTLPRR
PRMISLVQGSTSPRR

SEQ ID NO: 111061 - protein, 15 aa, Artificial Sequence
  Description of Artificial Sequence: Synthetic peptide
  Seed: PRMCSLMQGSTLPRR
PRMISLVQGSTTPRR

SEQ ID NO: 111062 - protein, 15 aa, Artificial Sequence
  Description of Artificial Sequence: Synthetic peptide
  Seed: PRMCSLMQGSTLPRR
PRMISLVQGSTVPRR

SEQ ID NO: 111063 - protein, 15 aa, Artificial Sequence
  Description of Artificial Sequence: Synthetic peptide
  Seed: PRMCSLMQGSTLPRR
PRMISLVQNSTAPRR

SEQ ID NO: 111064 - protein, 15 aa, Artificial Sequence
  Description of Artificial Sequence: Synthetic peptide
  Seed: PRMCSLMQGSTLPRR
PRMISLVQNSTIPRR

SEQ ID NO: 111065 - protein, 15 aa, Artificial Sequence
  Description of Artificial Sequence: Synthetic peptide
  Seed: PRMCSLMQGSTLPRR
PRMISLVQNSTLPRR

SEQ ID NO: 111066 - protein, 15 aa, Artificial Sequence
  Description of Artificial Sequence: Synthetic peptide
  Seed: PRMCSLMQGSTLPRR
PRMISLVQNSTVPRR

SEQ ID NO: 111067 - protein, 15 aa, Artificial Sequence
  Description of Artificial Sequence: Synthetic peptide
  Seed: PRMCSLMQGSTLPRR
PRMISLVQPSTAPRR

SEQ ID NO: 111068 - protein, 15 aa, Artificial Sequence
  Description of Artificial Sequence: Synthetic peptide
  Seed: PRMCSLMQGSTLPRR
PRMISLVQPSTIPRR

SEQ ID NO: 111069 - protein, 15 aa, Artificial Sequence
  Description of Artificial Sequence: Synthetic peptide
  Seed: PRMCSLMQGSTLPRR
PRMISLVQPSTLPRR

SEQ ID NO: 111070 - protein, 15 aa, Artificial Sequence
  Description of Artificial Sequence: Synthetic peptide
  Seed: PRMCSLMQGSTLPRR
PRMISLVQPSTMPRR

SEQ ID NO: 111071 - protein, 15 aa, Artificial Sequence
  Description of Artificial Sequence: Synthetic peptide
  Seed: PRMCSLMQGSTLPRR
PRMISLVQPSTSPRR

SEQ ID NO: 111072 - protein, 15 aa, Artificial Sequence
  Description of Artificial Sequence: Synthetic peptide
  Seed: PRMCSLMQGSTLPRR
PRMISLVQPSTVPRR

SEQ ID NO: 111073 - protein, 15 aa, Artificial Sequence
  Description of Artificial Sequence: Synthetic peptide
  Seed: PRMCSLMQGSTLPRR
PRMISLVQSSTAPRR

SEQ ID NO: 111074 - protein, 15 aa, Artificial Sequence
  Description of Artificial Sequence: Synthetic peptide
  Seed: PRMCSLMQGSTLPRR
PRMISLVQSSTIPRR

SEQ ID NO: 111075 - protein, 15 aa, Artificial Sequence
  Description of Artificial Sequence: Synthetic peptide
  Seed: PRMCSLMQGSTLPRR
PRMISLVQSSTLPRR

SEQ ID NO: 111076 - protein, 15 aa, Artificial Sequence
  Description of Artificial Sequence: Synthetic peptide
  Seed: PRMCSLMQGSTLPRR
PRMISLVQSSTMPRR

SEQ ID NO: 111077 - protein, 15 aa, Artificial Sequence
  Description of Artificial Sequence: Synthetic peptide
  Seed: PRMCSLMQGSTLPRR
PRMISLVQSSTSPRR

SEQ ID NO: 111078 - protein, 15 aa, Artificial Sequence
  Description of Artificial Sequence: Synthetic peptide
  Seed: PRMCSLMQGSTLPRR
PRMISLVQSSTTPRR

SEQ ID NO: 111079 - protein, 15 aa, Artificial Sequence
  Description of Artificial Sequence: Synthetic peptide
  Seed: PRMCSLMQGSTLPRR
PRMISLVQSSTVPRR

SEQ ID NO: 111080 - protein, 15 aa, Artificial Sequence
  Description of Artificial Sequence: Synthetic peptide
  Seed: PRMCSLMQGSTLPRR
PRMISLVQTSTAPRR

SEQ ID NO: 111081 - protein, 15 aa, Artificial Sequence
  Description of Artificial Sequence: Synthetic peptide
  Seed: PRMCSLMQGSTLPRR
PRMISLVQTSTIPRR

SEQ ID NO: 111082 - protein, 15 aa, Artificial Sequence
  Description of Artificial Sequence: Synthetic peptide
  Seed: PRMCSLMQGSTLPRR
PRMISLVQTSTLPRR

SEQ ID NO: 111083 - protein, 15 aa, Artificial Sequence
  Description of Artificial Sequence: Synthetic peptide
  Seed: PRMCSLMQGSTLPRR
PRMISLVQTSTVPRR

SEQ ID NO: 111084 - protein, 15 aa, Artificial Sequence
  Description of Artificial Sequence: Synthetic peptide
  Seed: PRMCSLMQGSTLPRR
PRMISLWQASTIPRR

SEQ ID NO: 111085 - protein, 15 aa, Artificial Sequence
  Description of Artificial Sequence: Synthetic peptide
  Seed: PRMCSLMQGSTLPRR
PRMISLWQASTLPRR

SEQ ID NO: 111086 - protein, 15 aa, Artificial Sequence
  Description of Artificial Sequence: Synthetic peptide
  Seed: PRMCSLMQGSTLPRR
PRMISLWQASTVPRR

SEQ ID NO: 111087 - protein, 15 aa, Artificial Sequence
  Description of Artificial Sequence: Synthetic peptide
  Seed: PRMCSLMQGSTLPRR
PRMISLWQGSTIPRR

SEQ ID NO: 111088 - protein, 15 aa, Artificial Sequence
  Description of Artificial Sequence: Synthetic peptide
  Seed: PRMCSLMQGSTLPRR
PRMISLWQGSTLPRR

SEQ ID NO: 111089 - protein, 15 aa, Artificial Sequence
  Description of Artificial Sequence: Synthetic peptide
  Seed: PRMCSLMQGSTLPRR
PRMISLWQGSTVPRR

SEQ ID NO: 111090 - protein, 15 aa, Artificial Sequence
  Description of Artificial Sequence: Synthetic peptide
  Seed: PRMCSLMQGSTLPRR
PRMISLWQNSTAPRR

SEQ ID NO: 111091 - protein, 15 aa, Artificial Sequence
  Description of Artificial Sequence: Synthetic peptide
  Seed: PRMCSLMQGSTLPRR
PRMISLWQNSTIPRR

SEQ ID NO: 111092 - protein, 15 aa, Artificial Sequence
  Description of Artificial Sequence: Synthetic peptide
  Seed: PRMCSLMQGSTLPRR
PRMISLWQNSTLPRR

SEQ ID NO: 111093 - protein, 15 aa, Artificial Sequence
  Description of Artificial Sequence: Synthetic peptide
  Seed: PRMCSLMQGSTLPRR
PRMISLWQNSTMPRR

SEQ ID NO: 111094 - protein, 15 aa, Artificial Sequence
  Description of Artificial Sequence: Synthetic peptide
  Seed: PRMCSLMQGSTLPRR
PRMISLWQNSTVPRR

SEQ ID NO: 111095 - protein, 15 aa, Artificial Sequence
  Description of Artificial Sequence: Synthetic peptide
  Seed: PRMCSLMQGSTLPRR
PRMISLWQSSTAPRR

SEQ ID NO: 111096 - protein, 15 aa, Artificial Sequence
  Description of Artificial Sequence: Synthetic peptide
  Seed: PRMCSLMQGSTLPRR
PRMISLWQSSTFPRR

SEQ ID NO: 111097 - protein, 15 aa, Artificial Sequence
  Description of Artificial Sequence: Synthetic peptide
  Seed: PRMCSLMQGSTLPRR
PRMISLWQSSTIPRR

SEQ ID NO: 111098 - protein, 15 aa, Artificial Sequence
  Description of Artificial Sequence: Synthetic peptide
  Seed: PRMCSLMQGSTLPRR
PRMISLWQSSTLPRR

SEQ ID NO: 111099 - protein, 15 aa, Artificial Sequence
  Description of Artificial Sequence: Synthetic peptide
  Seed: PRMCSLMQGSTLPRR
PRMISLWQSSTMPRR

SEQ ID NO: 111100 - protein, 15 aa, Artificial Sequence
  Description of Artificial Sequence: Synthetic peptide
  Seed: PRMCSLMQGSTLPRR
PRMISLWQSSTTPRR

SEQ ID NO: 111101 - protein, 15 aa, Artificial Sequence
  Description of Artificial Sequence: Synthetic peptide
  Seed: PRMCSLMQGSTLPRR
PRMISLWQSSTVPRR

SEQ ID NO: 111102 - protein, 15 aa, Artificial Sequence
  Description of Artificial Sequence: Synthetic peptide
  Seed: PRMCSLMQGSTLPRR
PRMISLWQTSTIPRR

SEQ ID NO: 111103 - protein, 15 aa, Artificial Sequence
  Description of Artificial Sequence: Synthetic peptide
  Seed: PRMCSLMQGSTLPRR
PRMISLWQTSTLPRR

SEQ ID NO: 111104 - protein, 15 aa, Artificial Sequence
  Description of Artificial Sequence: Synthetic peptide
  Seed: PRMCSLMQGSTLPRR
PRMISLWQTSTVPRR

SEQ ID NO: 111105 - protein, 15 aa, Artificial Sequence
  Description of Artificial Sequence: Synthetic peptide
  Seed: PRMCSLMQGSTLPRR
PRMISLYQASTAPRR

SEQ ID NO: 111106 - protein, 15 aa, Artificial Sequence
  Description of Artificial Sequence: Synthetic peptide
  Seed: PRMCSLMQGSTLPRR
PRMISLYQASTIPRR

SEQ ID NO: 111107 - protein, 15 aa, Artificial Sequence
  Description of Artificial Sequence: Synthetic peptide
  Seed: PRMCSLMQGSTLPRR
PRMISLYQASTLPRR

SEQ ID NO: 111108 - protein, 15 aa, Artificial Sequence
  Description of Artificial Sequence: Synthetic peptide
  Seed: PRMCSLMQGSTLPRR
PRMISLYQASTMPRR

SEQ ID NO: 111109 - protein, 15 aa, Artificial Sequence
  Description of Artificial Sequence: Synthetic peptide
  Seed: PRMCSLMQGSTLPRR
PRMISLYQASTSPRR

SEQ ID NO: 111110 - protein, 15 aa, Artificial Sequence
  Description of Artificial Sequence: Synthetic peptide
  Seed: PRMCSLMQGSTLPRR
PRMISLYQASTTPRR

SEQ ID NO: 111111 - protein, 15 aa, Artificial Sequence
  Description of Artificial Sequence: Synthetic peptide
  Seed: PRMCSLMQGSTLPRR
PRMISLYQASTVPRR

SEQ ID NO: 111112 - protein, 15 aa, Artificial Sequence
  Description of Artificial Sequence: Synthetic peptide
  Seed: PRMCSLMQGSTLPRR
PRMISLYQGSTAPRR

SEQ ID NO: 111113 - protein, 15 aa, Artificial Sequence
  Description of Artificial Sequence: Synthetic peptide
  Seed: PRMCSLMQGSTLPRR
PRMISLYQGSTFPRR

SEQ ID NO: 111114 - protein, 15 aa, Artificial Sequence
  Description of Artificial Sequence: Synthetic peptide
  Seed: PRMCSLMQGSTLPRR
PRMISLYQGSTIPRR

SEQ ID NO: 111115 - protein, 15 aa, Artificial Sequence
  Description of Artificial Sequence: Synthetic peptide
  Seed: PRMCSLMQGSTLPRR
PRMISLYQGSTLPRR

SEQ ID NO: 111116 - protein, 15 aa, Artificial Sequence
  Description of Artificial Sequence: Synthetic peptide
  Seed: PRMCSLMQGSTLPRR
PRMISLYQGSTMPRR

SEQ ID NO: 111117 - protein, 15 aa, Artificial Sequence
  Description of Artificial Sequence: Synthetic peptide
  Seed: PRMCSLMQGSTLPRR
PRMISLYQGSTSPRR

SEQ ID NO: 111118 - protein, 15 aa, Artificial Sequence
  Description of Artificial Sequence: Synthetic peptide
  Seed: PRMCSLMQGSTLPRR
PRMISLYQGSTTPRR

SEQ ID NO: 111119 - protein, 15 aa, Artificial Sequence
  Description of Artificial Sequence: Synthetic peptide
  Seed: PRMCSLMQGSTLPRR
PRMISLYQGSTVPRR

SEQ ID NO: 111120 - protein, 15 aa, Artificial Sequence
  Description of Artificial Sequence: Synthetic peptide
  Seed: PRMCSLMQGSTLPRR
PRMISLYQNSTAPRR

SEQ ID NO: 111121 - protein, 15 aa, Artificial Sequence
  Description of Artificial Sequence: Synthetic peptide
  Seed: PRMCSLMQGSTLPRR
PRMISLYQNSTFPRR

SEQ ID NO: 111122 - protein, 15 aa, Artificial Sequence
  Description of Artificial Sequence: Synthetic peptide
  Seed: PRMCSLMQGSTLPRR
PRMISLYQNSTIPRR

SEQ ID NO: 111123 - protein, 15 aa, Artificial Sequence
  Description of Artificial Sequence: Synthetic peptide
  Seed: PRMCSLMQGSTLPRR
PRMISLYQNSTLPRR

SEQ ID NO: 111124 - protein, 15 aa, Artificial Sequence
  Description of Artificial Sequence: Synthetic peptide
  Seed: PRMCSLMQGSTLPRR
PRMISLYQNSTMPRR

SEQ ID NO: 111125 - protein, 15 aa, Artificial Sequence
  Description of Artificial Sequence: Synthetic peptide
  Seed: PRMCSLMQGSTLPRR
PRMISLYQNSTSPRR

SEQ ID NO: 111126 - protein, 15 aa, Artificial Sequence
  Description of Artificial Sequence: Synthetic peptide
  Seed: PRMCSLMQGSTLPRR
PRMISLYQNSTTPRR

SEQ ID NO: 111127 - protein, 15 aa, Artificial Sequence
  Description of Artificial Sequence: Synthetic peptide
  Seed: PRMCSLMQGSTLPRR
PRMISLYQNSTVPRR

SEQ ID NO: 111128 - protein, 15 aa, Artificial Sequence
  Description of Artificial Sequence: Synthetic peptide
  Seed: PRMCSLMQGSTLPRR
PRMISLYQPSTLPRR

SEQ ID NO: 111129 - protein, 15 aa, Artificial Sequence
  Description of Artificial Sequence: Synthetic peptide
  Seed: PRMCSLMQGSTLPRR
PRMISLYQSSTAPRR

SEQ ID NO: 111130 - protein, 15 aa, Artificial Sequence
  Description of Artificial Sequence: Synthetic peptide
  Seed: PRMCSLMQGSTLPRR
PRMISLYQSSTFPRR

SEQ ID NO: 111131 - protein, 15 aa, Artificial Sequence
  Description of Artificial Sequence: Synthetic peptide
  Seed: PRMCSLMQGSTLPRR
PRMISLYQSSTGPRR

SEQ ID NO: 111132 - protein, 15 aa, Artificial Sequence
  Description of Artificial Sequence: Synthetic peptide
  Seed: PRMCSLMQGSTLPRR
PRMISLYQSSTHPRR

SEQ ID NO: 111133 - protein, 15 aa, Artificial Sequence
  Description of Artificial Sequence: Synthetic peptide
  Seed: PRMCSLMQGSTLPRR
PRMISLYQSSTIPRR

SEQ ID NO: 111134 - protein, 15 aa, Artificial Sequence
  Description of Artificial Sequence: Synthetic peptide
  Seed: PRMCSLMQGSTLPRR
PRMISLYQSSTLPRR

SEQ ID NO: 111135 - protein, 15 aa, Artificial Sequence
  Description of Artificial Sequence: Synthetic peptide
  Seed: PRMCSLMQGSTLPRR
PRMISLYQSSTMPRR

SEQ ID NO: 111136 - protein, 15 aa, Artificial Sequence
  Description of Artificial Sequence: Synthetic peptide
  Seed: PRMCSLMQGSTLPRR
PRMISLYQSSTSPRR

SEQ ID NO: 111137 - protein, 15 aa, Artificial Sequence
  Description of Artificial Sequence: Synthetic peptide
  Seed: PRMCSLMQGSTLPRR
PRMISLYQSSTTPRR

SEQ ID NO: 111138 - protein, 15 aa, Artificial Sequence
  Description of Artificial Sequence: Synthetic peptide
  Seed: PRMCSLMQGSTLPRR
PRMISLYQSSTVPRR

SEQ ID NO: 111139 - protein, 15 aa, Artificial Sequence
  Description of Artificial Sequence: Synthetic peptide
  Seed: PRMCSLMQGSTLPRR
PRMISLYQTSTAPRR

SEQ ID NO: 111140 - protein, 15 aa, Artificial Sequence
  Description of Artificial Sequence: Synthetic peptide
  Seed: PRMCSLMQGSTLPRR
PRMISLYQTSTIPRR

SEQ ID NO: 111141 - protein, 15 aa, Artificial Sequence
  Description of Artificial Sequence: Synthetic peptide
  Seed: PRMCSLMQGSTLPRR
PRMISLYQTSTLPRR

SEQ ID NO: 111142 - protein, 15 aa, Artificial Sequence
  Description of Artificial Sequence: Synthetic peptide
  Seed: PRMCSLMQGSTLPRR
PRMISLYQTSTMPRR

SEQ ID NO: 111143 - protein, 15 aa, Artificial Sequence
  Description of Artificial Sequence: Synthetic peptide
  Seed: PRMCSLMQGSTLPRR
PRMISLYQTSTTPRR

SEQ ID NO: 111144 - protein, 15 aa, Artificial Sequence
  Description of Artificial Sequence: Synthetic peptide
  Seed: PRMCSLMQGSTLPRR
PRMISLYQTSTVPRR

SEQ ID NO: 111145 - protein, 15 aa, Artificial Sequence
  Description of Artificial Sequence: Synthetic peptide
  Seed: PRMCSLMQGSTLPRR
PRMISLYQVSTIPRR

SEQ ID NO: 111146 - protein, 15 aa, Artificial Sequence
  Description of Artificial Sequence: Synthetic peptide
  Seed: PRMCSLMQGSTLPRR
PRMISLYQVSTLPRR

SEQ ID NO: 111147 - protein, 15 aa, Artificial Sequence
  Description of Artificial Sequence: Synthetic peptide
  Seed: PRMCSLMQGSTLPRR
PRMISLYQVSTVPRR

SEQ ID NO: 111148 - protein, 15 aa, Artificial Sequence
  Description of Artificial Sequence: Synthetic peptide
  Seed: PRMCSLMQGSTLPRR
PRMLSLAQASTAPRR

SEQ ID NO: 111149 - protein, 15 aa, Artificial Sequence
  Description of Artificial Sequence: Synthetic peptide
  Seed: PRMCSLMQGSTLPRR
PRMLSLAQASTFPRR

SEQ ID NO: 111150 - protein, 15 aa, Artificial Sequence
  Description of Artificial Sequence: Synthetic peptide
  Seed: PRMCSLMQGSTLPRR
PRMLSLAQASTGPRR

SEQ ID NO: 111151 - protein, 15 aa, Artificial Sequence
  Description of Artificial Sequence: Synthetic peptide
  Seed: PRMCSLMQGSTLPRR
PRMLSLAQASTIPRR

SEQ ID NO: 111152 - protein, 15 aa, Artificial Sequence
  Description of Artificial Sequence: Synthetic peptide
  Seed: PRMCSLMQGSTLPRR
PRMLSLAQASTLPRR

SEQ ID NO: 111153 - protein, 15 aa, Artificial Sequence
  Description of Artificial Sequence: Synthetic peptide
  Seed: PRMCSLMQGSTLPRR
PRMLSLAQASTMPRR

SEQ ID NO: 111154 - protein, 15 aa, Artificial Sequence
  Description of Artificial Sequence: Synthetic peptide
  Seed: PRMCSLMQGSTLPRR
PRMLSLAQASTNPRR

SEQ ID NO: 111155 - protein, 15 aa, Artificial Sequence
  Description of Artificial Sequence: Synthetic peptide
  Seed: PRMCSLMQGSTLPRR
PRMLSLAQASTSPRR

SEQ ID NO: 111156 - protein, 15 aa, Artificial Sequence
  Description of Artificial Sequence: Synthetic peptide
  Seed: PRMCSLMQGSTLPRR
PRMLSLAQASTTPRR

SEQ ID NO: 111157 - protein, 15 aa, Artificial Sequence
  Description of Artificial Sequence: Synthetic peptide
  Seed: PRMCSLMQGSTLPRR
PRMLSLAQASTVPRR

SEQ ID NO: 111158 - protein, 15 aa, Artificial Sequence
  Description of Artificial Sequence: Synthetic peptide
  Seed: PRMCSLMQGSTLPRR
PRMLSLAQGSTAPRR

SEQ ID NO: 111159 - protein, 15 aa, Artificial Sequence
  Description of Artificial Sequence: Synthetic peptide
  Seed: PRMCSLMQGSTLPRR
PRMLSLAQGSTIPRR

SEQ ID NO: 111160 - protein, 15 aa, Artificial Sequence
  Description of Artificial Sequence: Synthetic peptide
  Seed: PRMCSLMQGSTLPRR
PRMLSLAQGSTLPRR

SEQ ID NO: 111161 - protein, 15 aa, Artificial Sequence
  Description of Artificial Sequence: Synthetic peptide
  Seed: PRMCSLMQGSTLPRR
PRMLSLAQGSTMPRR

SEQ ID NO: 111162 - protein, 15 aa, Artificial Sequence
  Description of Artificial Sequence: Synthetic peptide
  Seed: PRMCSLMQGSTLPRR
PRMLSLAQGSTSPRR

SEQ ID NO: 111163 - protein, 15 aa, Artificial Sequence
  Description of Artificial Sequence: Synthetic peptide
  Seed: PRMCSLMQGSTLPRR
PRMLSLAQGSTTPRR

SEQ ID NO: 111164 - protein, 15 aa, Artificial Sequence
  Description of Artificial Sequence: Synthetic peptide
  Seed: PRMCSLMQGSTLPRR
PRMLSLAQGSTVPRR

SEQ ID NO: 111165 - protein, 15 aa, Artificial Sequence
  Description of Artificial Sequence: Synthetic peptide
  Seed: PRMCSLMQGSTLPRR
PRMLSLAQISTAPRR

SEQ ID NO: 111166 - protein, 15 aa, Artificial Sequence
  Description of Artificial Sequence: Synthetic peptide
  Seed: PRMCSLMQGSTLPRR
PRMLSLAQNSTAPRR

SEQ ID NO: 111167 - protein, 15 aa, Artificial Sequence
  Description of Artificial Sequence: Synthetic peptide
  Seed: PRMCSLMQGSTLPRR
PRMLSLAQNSTIPRR

SEQ ID NO: 111168 - protein, 15 aa, Artificial Sequence
  Description of Artificial Sequence: Synthetic peptide
  Seed: PRMCSLMQGSTLPRR
PRMLSLAQNSTLPRR

SEQ ID NO: 111169 - protein, 15 aa, Artificial Sequence
  Description of Artificial Sequence: Synthetic peptide
  Seed: PRMCSLMQGSTLPRR
PRMLSLAQNSTVPRR

SEQ ID NO: 111170 - protein, 15 aa, Artificial Sequence
  Description of Artificial Sequence: Synthetic peptide
  Seed: PRMCSLMQGSTLPRR
PRMLSLAQPSTAPRR

SEQ ID NO: 111171 - protein, 15 aa, Artificial Sequence
  Description of Artificial Sequence: Synthetic peptide
  Seed: PRMCSLMQGSTLPRR
PRMLSLAQPSTIPRR

SEQ ID NO: 111172 - protein, 15 aa, Artificial Sequence
  Description of Artificial Sequence: Synthetic peptide
  Seed: PRMCSLMQGSTLPRR
PRMLSLAQPSTLPRR

SEQ ID NO: 111173 - protein, 15 aa, Artificial Sequence
  Description of Artificial Sequence: Synthetic peptide
  Seed: PRMCSLMQGSTLPRR
PRMLSLAQPSTMPRR

SEQ ID NO: 111174 - protein, 15 aa, Artificial Sequence
  Description of Artificial Sequence: Synthetic peptide
  Seed: PRMCSLMQGSTLPRR
PRMLSLAQPSTVPRR

SEQ ID NO: 111175 - protein, 15 aa, Artificial Sequence
  Description of Artificial Sequence: Synthetic peptide
  Seed: PRMCSLMQGSTLPRR
PRMLSLAQSSTAPRR

SEQ ID NO: 111176 - protein, 15 aa, Artificial Sequence
  Description of Artificial Sequence: Synthetic peptide
  Seed: PRMCSLMQGSTLPRR
PRMLSLAQSSTIPRR

SEQ ID NO: 111177 - protein, 15 aa, Artificial Sequence
  Description of Artificial Sequence: Synthetic peptide
  Seed: PRMCSLMQGSTLPRR
PRMLSLAQSSTLPRR

SEQ ID NO: 111178 - protein, 15 aa, Artificial Sequence
  Description of Artificial Sequence: Synthetic peptide
  Seed: PRMCSLMQGSTLPRR
PRMLSLAQSSTMPRR

SEQ ID NO: 111179 - protein, 15 aa, Artificial Sequence
  Description of Artificial Sequence: Synthetic peptide
  Seed: PRMCSLMQGSTLPRR
PRMLSLAQSSTSPRR

SEQ ID NO: 111180 - protein, 15 aa, Artificial Sequence
  Description of Artificial Sequence: Synthetic peptide
  Seed: PRMCSLMQGSTLPRR
PRMLSLAQSSTTPRR

SEQ ID NO: 111181 - protein, 15 aa, Artificial Sequence
  Description of Artificial Sequence: Synthetic peptide
  Seed: PRMCSLMQGSTLPRR
PRMLSLAQSSTVPRR

SEQ ID NO: 111182 - protein, 15 aa, Artificial Sequence
  Description of Artificial Sequence: Synthetic peptide
  Seed: PRMCSLMQGSTLPRR
PRMLSLAQTSTAPRR

SEQ ID NO: 111183 - protein, 15 aa, Artificial Sequence
  Description of Artificial Sequence: Synthetic peptide
  Seed: PRMCSLMQGSTLPRR
PRMLSLAQTSTIPRR

SEQ ID NO: 111184 - protein, 15 aa, Artificial Sequence
  Description of Artificial Sequence: Synthetic peptide
  Seed: PRMCSLMQGSTLPRR
PRMLSLAQTSTLPRR

SEQ ID NO: 111185 - protein, 15 aa, Artificial Sequence
  Description of Artificial Sequence: Synthetic peptide
  Seed: PRMCSLMQGSTLPRR
PRMLSLAQTSTVPRR

SEQ ID NO: 111186 - protein, 15 aa, Artificial Sequence
  Description of Artificial Sequence: Synthetic peptide
  Seed: PRMCSLMQGSTLPRR
PRMLSLAQVSTAPRR

SEQ ID NO: 111187 - protein, 15 aa, Artificial Sequence
  Description of Artificial Sequence: Synthetic peptide
  Seed: PRMCSLMQGSTLPRR
PRMLSLAQVSTIPRR

SEQ ID NO: 111188 - protein, 15 aa, Artificial Sequence
  Description of Artificial Sequence: Synthetic peptide
  Seed: PRMCSLMQGSTLPRR
PRMLSLAQVSTLPRR

SEQ ID NO: 111189 - protein, 15 aa, Artificial Sequence
  Description of Artificial Sequence: Synthetic peptide
  Seed: PRMCSLMQGSTLPRR
PRMLSLAQVSTSPRR

SEQ ID NO: 111190 - protein, 15 aa, Artificial Sequence
  Description of Artificial Sequence: Synthetic peptide
  Seed: PRMCSLMQGSTLPRR
PRMLSLAQVSTVPRR

SEQ ID NO: 111191 - protein, 15 aa, Artificial Sequence
  Description of Artificial Sequence: Synthetic peptide
  Seed: PRMCSLMQGSTLPRR
PRMLSLCQASTIPRR

SEQ ID NO: 111192 - protein, 15 aa, Artificial Sequence
  Description of Artificial Sequence: Synthetic peptide
  Seed: PRMCSLMQGSTLPRR
PRMLSLCQASTLPRR

SEQ ID NO: 111193 - protein, 15 aa, Artificial Sequence
  Description of Artificial Sequence: Synthetic peptide
  Seed: PRMCSLMQGSTLPRR
PRMLSLCQASTVPRR

SEQ ID NO: 111194 - protein, 15 aa, Artificial Sequence
  Description of Artificial Sequence: Synthetic peptide
  Seed: PRMCSLMQGSTLPRR
PRMLSLEQASTAPRR

SEQ ID NO: 111195 - protein, 15 aa, Artificial Sequence
  Description of Artificial Sequence: Synthetic peptide
  Seed: PRMCSLMQGSTLPRR
PRMLSLEQASTIPRR

SEQ ID NO: 111196 - protein, 15 aa, Artificial Sequence
  Description of Artificial Sequence: Synthetic peptide
  Seed: PRMCSLMQGSTLPRR
PRMLSLEQASTLPRR

SEQ ID NO: 111197 - protein, 15 aa, Artificial Sequence
  Description of Artificial Sequence: Synthetic peptide
  Seed: PRMCSLMQGSTLPRR
PRMLSLEQASTVPRR

SEQ ID NO: 111198 - protein, 15 aa, Artificial Sequence
  Description of Artificial Sequence: Synthetic peptide
  Seed: PRMCSLMQGSTLPRR
PRMLSLEQGSTAPRR

SEQ ID NO: 111199 - protein, 15 aa, Artificial Sequence
  Description of Artificial Sequence: Synthetic peptide
  Seed: PRMCSLMQGSTLPRR
PRMLSLEQGSTIPRR

SEQ ID NO: 111200 - protein, 15 aa, Artificial Sequence
  Description of Artificial Sequence: Synthetic peptide
  Seed: PRMCSLMQGSTLPRR
PRMLSLEQGSTLPRR

SEQ ID NO: 111201 - protein, 15 aa, Artificial Sequence
  Description of Artificial Sequence: Synthetic peptide
  Seed: PRMCSLMQGSTLPRR
PRMLSLEQGSTVPRR

SEQ ID NO: 111202 - protein, 15 aa, Artificial Sequence
  Description of Artificial Sequence: Synthetic peptide
  Seed: PRMCSLMQGSTLPRR
PRMLSLEQSSTLPRR

SEQ ID NO: 111203 - protein, 15 aa, Artificial Sequence
  Description of Artificial Sequence: Synthetic peptide
  Seed: PRMCSLMQGSTLPRR
PRMLSLEQSSTVPRR

SEQ ID NO: 111204 - protein, 15 aa, Artificial Sequence
  Description of Artificial Sequence: Synthetic peptide
  Seed: PRMCSLMQGSTLPRR
PRMLSLFQASTAPRR

SEQ ID NO: 111205 - protein, 15 aa, Artificial Sequence
  Description of Artificial Sequence: Synthetic peptide
  Seed: PRMCSLMQGSTLPRR
PRMLSLFQASTIPRR

SEQ ID NO: 111206 - protein, 15 aa, Artificial Sequence
  Description of Artificial Sequence: Synthetic peptide
  Seed: PRMCSLMQGSTLPRR
PRMLSLFQASTLPRR

SEQ ID NO: 111207 - protein, 15 aa, Artificial Sequence
  Description of Artificial Sequence: Synthetic peptide
  Seed: PRMCSLMQGSTLPRR
PRMLSLFQASTMPRR

SEQ ID NO: 111208 - protein, 15 aa, Artificial Sequence
  Description of Artificial Sequence: Synthetic peptide
  Seed: PRMCSLMQGSTLPRR
PRMLSLFQASTSPRR

SEQ ID NO: 111209 - protein, 15 aa, Artificial Sequence
  Description of Artificial Sequence: Synthetic peptide
  Seed: PRMCSLMQGSTLPRR
PRMLSLFQASTVPRR

SEQ ID NO: 111210 - protein, 15 aa, Artificial Sequence
  Description of Artificial Sequence: Synthetic peptide
  Seed: PRMCSLMQGSTLPRR
PRMLSLFQFSTFPRR

SEQ ID NO: 111211 - protein, 15 aa, Artificial Sequence
  Description of Artificial Sequence: Synthetic peptide
  Seed: PRMCSLMQGSTLPRR
PRMLSLFQFSTLPRR

SEQ ID NO: 111212 - protein, 15 aa, Artificial Sequence
  Description of Artificial Sequence: Synthetic peptide
  Seed: PRMCSLMQGSTLPRR
PRMLSLFQGSTAPRR

SEQ ID NO: 111213 - protein, 15 aa, Artificial Sequence
  Description of Artificial Sequence: Synthetic peptide
  Seed: PRMCSLMQGSTLPRR
PRMLSLFQGSTIPRR

SEQ ID NO: 111214 - protein, 15 aa, Artificial Sequence
  Description of Artificial Sequence: Synthetic peptide
  Seed: PRMCSLMQGSTLPRR
PRMLSLFQGSTLPRR

SEQ ID NO: 111215 - protein, 15 aa, Artificial Sequence
  Description of Artificial Sequence: Synthetic peptide
  Seed: PRMCSLMQGSTLPRR
PRMLSLFQGSTMPRR

SEQ ID NO: 111216 - protein, 15 aa, Artificial Sequence
  Description of Artificial Sequence: Synthetic peptide
  Seed: PRMCSLMQGSTLPRR
PRMLSLFQGSTVPRR

SEQ ID NO: 111217 - protein, 15 aa, Artificial Sequence
  Description of Artificial Sequence: Synthetic peptide
  Seed: PRMCSLMQGSTLPRR
PRMLSLFQLSTFPRR

SEQ ID NO: 111218 - protein, 15 aa, Artificial Sequence
  Description of Artificial Sequence: Synthetic peptide
  Seed: PRMCSLMQGSTLPRR
PRMLSLFQLSTLPRR

SEQ ID NO: 111219 - protein, 15 aa, Artificial Sequence
  Description of Artificial Sequence: Synthetic peptide
  Seed: PRMCSLMQGSTLPRR
PRMLSLFQNSTAPRR

SEQ ID NO: 111220 - protein, 15 aa, Artificial Sequence
  Description of Artificial Sequence: Synthetic peptide
  Seed: PRMCSLMQGSTLPRR
PRMLSLFQNSTFPRR

SEQ ID NO: 111221 - protein, 15 aa, Artificial Sequence
  Description of Artificial Sequence: Synthetic peptide
  Seed: PRMCSLMQGSTLPRR
PRMLSLFQNSTIPRR

SEQ ID NO: 111222 - protein, 15 aa, Artificial Sequence
  Description of Artificial Sequence: Synthetic peptide
  Seed: PRMCSLMQGSTLPRR
PRMLSLFQNSTLPRR

SEQ ID NO: 111223 - protein, 15 aa, Artificial Sequence
  Description of Artificial Sequence: Synthetic peptide
  Seed: PRMCSLMQGSTLPRR
PRMLSLFQNSTMPRR

SEQ ID NO: 111224 - protein, 15 aa, Artificial Sequence
  Description of Artificial Sequence: Synthetic peptide
  Seed: PRMCSLMQGSTLPRR
PRMLSLFQNSTSPRR

SEQ ID NO: 111225 - protein, 15 aa, Artificial Sequence
  Description of Artificial Sequence: Synthetic peptide
  Seed: PRMCSLMQGSTLPRR
PRMLSLFQNSTTPRR

SEQ ID NO: 111226 - protein, 15 aa, Artificial Sequence
  Description of Artificial Sequence: Synthetic peptide
  Seed: PRMCSLMQGSTLPRR
PRMLSLFQNSTVPRR

SEQ ID NO: 111227 - protein, 15 aa, Artificial Sequence
  Description of Artificial Sequence: Synthetic peptide
  Seed: PRMCSLMQGSTLPRR
PRMLSLFQPSTAPRR

SEQ ID NO: 111228 - protein, 15 aa, Artificial Sequence
  Description of Artificial Sequence: Synthetic peptide
  Seed: PRMCSLMQGSTLPRR
PRMLSLFQPSTVPRR

SEQ ID NO: 111229 - protein, 15 aa, Artificial Sequence
  Description of Artificial Sequence: Synthetic peptide
  Seed: PRMCSLMQGSTLPRR
PRMLSLFQSSTAPRR

SEQ ID NO: 111230 - protein, 15 aa, Artificial Sequence
  Description of Artificial Sequence: Synthetic peptide
  Seed: PRMCSLMQGSTLPRR
PRMLSLFQSSTFPRR

SEQ ID NO: 111231 - protein, 15 aa, Artificial Sequence
  Description of Artificial Sequence: Synthetic peptide
  Seed: PRMCSLMQGSTLPRR
PRMLSLFQSSTIPRR

SEQ ID NO: 111232 - protein, 15 aa, Artificial Sequence
  Description of Artificial Sequence: Synthetic peptide
  Seed: PRMCSLMQGSTLPRR
PRMLSLFQSSTLPRR

SEQ ID NO: 111233 - protein, 15 aa, Artificial Sequence
  Description of Artificial Sequence: Synthetic peptide
  Seed: PRMCSLMQGSTLPRR
PRMLSLFQSSTMPRR

SEQ ID NO: 111234 - protein, 15 aa, Artificial Sequence
  Description of Artificial Sequence: Synthetic peptide
  Seed: PRMCSLMQGSTLPRR
PRMLSLFQSSTSPRR

SEQ ID NO: 111235 - protein, 15 aa, Artificial Sequence
  Description of Artificial Sequence: Synthetic peptide
  Seed: PRMCSLMQGSTLPRR
PRMLSLFQSSTTPRR

SEQ ID NO: 111236 - protein, 15 aa, Artificial Sequence
  Description of Artificial Sequence: Synthetic peptide
  Seed: PRMCSLMQGSTLPRR
PRMLSLFQSSTVPRR

SEQ ID NO: 111237 - protein, 15 aa, Artificial Sequence
  Description of Artificial Sequence: Synthetic peptide
  Seed: PRMCSLMQGSTLPRR
PRMLSLFQTSTIPRR

SEQ ID NO: 111238 - protein, 15 aa, Artificial Sequence
  Description of Artificial Sequence: Synthetic peptide
  Seed: PRMCSLMQGSTLPRR
PRMLSLFQTSTLPRR

SEQ ID NO: 111239 - protein, 15 aa, Artificial Sequence
  Description of Artificial Sequence: Synthetic peptide
  Seed: PRMCSLMQGSTLPRR
PRMLSLFQTSTVPRR

SEQ ID NO: 111240 - protein, 15 aa, Artificial Sequence
  Description of Artificial Sequence: Synthetic peptide
  Seed: PRMCSLMQGSTLPRR
PRMLSLGQASTAPRR

SEQ ID NO: 111241 - protein, 15 aa, Artificial Sequence
  Description of Artificial Sequence: Synthetic peptide
  Seed: PRMCSLMQGSTLPRR
PRMLSLGQASTIPRR

SEQ ID NO: 111242 - protein, 15 aa, Artificial Sequence
  Description of Artificial Sequence: Synthetic peptide
  Seed: PRMCSLMQGSTLPRR
PRMLSLGQASTLPRR

SEQ ID NO: 111243 - protein, 15 aa, Artificial Sequence
  Description of Artificial Sequence: Synthetic peptide
  Seed: PRMCSLMQGSTLPRR
PRMLSLGQASTVPRR

SEQ ID NO: 111244 - protein, 15 aa, Artificial Sequence
  Description of Artificial Sequence: Synthetic peptide
  Seed: PRMCSLMQGSTLPRR
PRMLSLGQGSTLPRR

SEQ ID NO: 111245 - protein, 15 aa, Artificial Sequence
  Description of Artificial Sequence: Synthetic peptide
  Seed: PRMCSLMQGSTLPRR
PRMLSLGQSSTLPRR

SEQ ID NO: 111246 - protein, 15 aa, Artificial Sequence
  Description of Artificial Sequence: Synthetic peptide
  Seed: PRMCSLMQGSTLPRR
PRMLSLHQASTLPRR

SEQ ID NO: 111247 - protein, 15 aa, Artificial Sequence
  Description of Artificial Sequence: Synthetic peptide
  Seed: PRMCSLMQGSTLPRR
PRMLSLIQASTAPRR

SEQ ID NO: 111248 - protein, 15 aa, Artificial Sequence
  Description of Artificial Sequence: Synthetic peptide
  Seed: PRMCSLMQGSTLPRR
PRMLSLIQASTCPRR

SEQ ID NO: 111249 - protein, 15 aa, Artificial Sequence
  Description of Artificial Sequence: Synthetic peptide
  Seed: PRMCSLMQGSTLPRR
PRMLSLIQASTFPRR

SEQ ID NO: 111250 - protein, 15 aa, Artificial Sequence
  Description of Artificial Sequence: Synthetic peptide
  Seed: PRMCSLMQGSTLPRR
PRMLSLIQASTGPRR

SEQ ID NO: 111251 - protein, 15 aa, Artificial Sequence
  Description of Artificial Sequence: Synthetic peptide
  Seed: PRMCSLMQGSTLPRR
PRMLSLIQASTHPRR

SEQ ID NO: 111252 - protein, 15 aa, Artificial Sequence
  Description of Artificial Sequence: Synthetic peptide
  Seed: PRMCSLMQGSTLPRR
PRMLSLIQASTIPRR

SEQ ID NO: 111253 - protein, 15 aa, Artificial Sequence
  Description of Artificial Sequence: Synthetic peptide
  Seed: PRMCSLMQGSTLPRR
PRMLSLIQASTLPRR

SEQ ID NO: 111254 - protein, 15 aa, Artificial Sequence
  Description of Artificial Sequence: Synthetic peptide
  Seed: PRMCSLMQGSTLPRR
PRMLSLIQASTMPRR

SEQ ID NO: 111255 - protein, 15 aa, Artificial Sequence
  Description of Artificial Sequence: Synthetic peptide
  Seed: PRMCSLMQGSTLPRR
PRMLSLIQASTNPRR

SEQ ID NO: 111256 - protein, 15 aa, Artificial Sequence
  Description of Artificial Sequence: Synthetic peptide
  Seed: PRMCSLMQGSTLPRR
PRMLSLIQASTQPRR

SEQ ID NO: 111257 - protein, 15 aa, Artificial Sequence
  Description of Artificial Sequence: Synthetic peptide
  Seed: PRMCSLMQGSTLPRR
PRMLSLIQASTSPRR

SEQ ID NO: 111258 - protein, 15 aa, Artificial Sequence
  Description of Artificial Sequence: Synthetic peptide
  Seed: PRMCSLMQGSTLPRR
PRMLSLIQASTTPRR

SEQ ID NO: 111259 - protein, 15 aa, Artificial Sequence
  Description of Artificial Sequence: Synthetic peptide
  Seed: PRMCSLMQGSTLPRR
PRMLSLIQASTVPRR

SEQ ID NO: 111260 - protein, 15 aa, Artificial Sequence
  Description of Artificial Sequence: Synthetic peptide
  Seed: PRMCSLMQGSTLPRR
PRMLSLIQFSTIPRR

SEQ ID NO: 111261 - protein, 15 aa, Artificial Sequence
  Description of Artificial Sequence: Synthetic peptide
  Seed: PRMCSLMQGSTLPRR
PRMLSLIQFSTLPRR

SEQ ID NO: 111262 - protein, 15 aa, Artificial Sequence
  Description of Artificial Sequence: Synthetic peptide
  Seed: PRMCSLMQGSTLPRR
PRMLSLIQFSTVPRR

SEQ ID NO: 111263 - protein, 15 aa, Artificial Sequence
  Description of Artificial Sequence: Synthetic peptide
  Seed: PRMCSLMQGSTLPRR
PRMLSLIQGSTAPRR

SEQ ID NO: 111264 - protein, 15 aa, Artificial Sequence
  Description of Artificial Sequence: Synthetic peptide
  Seed: PRMCSLMQGSTLPRR
PRMLSLIQGSTCPRR

SEQ ID NO: 111265 - protein, 15 aa, Artificial Sequence
  Description of Artificial Sequence: Synthetic peptide
  Seed: PRMCSLMQGSTLPRR
PRMLSLIQGSTGPRR

SEQ ID NO: 111266 - protein, 15 aa, Artificial Sequence
  Description of Artificial Sequence: Synthetic peptide
  Seed: PRMCSLMQGSTLPRR
PRMLSLIQGSTIPRR

SEQ ID NO: 111267 - protein, 15 aa, Artificial Sequence
  Description of Artificial Sequence: Synthetic peptide
  Seed: PRMCSLMQGSTLPRR
PRMLSLIQGSTLPRR

SEQ ID NO: 111268 - protein, 15 aa, Artificial Sequence
  Description of Artificial Sequence: Synthetic peptide
  Seed: PRMCSLMQGSTLPRR
PRMLSLIQGSTMPRR

SEQ ID NO: 111269 - protein, 15 aa, Artificial Sequence
  Description of Artificial Sequence: Synthetic peptide
  Seed: PRMCSLMQGSTLPRR
PRMLSLIQGSTNPRR

SEQ ID NO: 111270 - protein, 15 aa, Artificial Sequence
  Description of Artificial Sequence: Synthetic peptide
  Seed: PRMCSLMQGSTLPRR
PRMLSLIQGSTSPRR

SEQ ID NO: 111271 - protein, 15 aa, Artificial Sequence
  Description of Artificial Sequence: Synthetic peptide
  Seed: PRMCSLMQGSTLPRR
PRMLSLIQGSTTPRR

SEQ ID NO: 111272 - protein, 15 aa, Artificial Sequence
  Description of Artificial Sequence: Synthetic peptide
  Seed: PRMCSLMQGSTLPRR
PRMLSLIQGSTVPRR

SEQ ID NO: 111273 - protein, 15 aa, Artificial Sequence
  Description of Artificial Sequence: Synthetic peptide
  Seed: PRMCSLMQGSTLPRR
PRMLSLIQISTAPRR

SEQ ID NO: 111274 - protein, 15 aa, Artificial Sequence
  Description of Artificial Sequence: Synthetic peptide
  Seed: PRMCSLMQGSTLPRR
PRMLSLIQISTNPRR

SEQ ID NO: 111275 - protein, 15 aa, Artificial Sequence
  Description of Artificial Sequence: Synthetic peptide
  Seed: PRMCSLMQGSTLPRR
PRMLSLIQISTSPRR

SEQ ID NO: 111276 - protein, 15 aa, Artificial Sequence
  Description of Artificial Sequence: Synthetic peptide
  Seed: PRMCSLMQGSTLPRR
PRMLSLIQLSTAPRR

SEQ ID NO: 111277 - protein, 15 aa, Artificial Sequence
  Description of Artificial Sequence: Synthetic peptide
  Seed: PRMCSLMQGSTLPRR
PRMLSLIQNSTAPRR

SEQ ID NO: 111278 - protein, 15 aa, Artificial Sequence
  Description of Artificial Sequence: Synthetic peptide
  Seed: PRMCSLMQGSTLPRR
PRMLSLIQNSTIPRR

SEQ ID NO: 111279 - protein, 15 aa, Artificial Sequence
  Description of Artificial Sequence: Synthetic peptide
  Seed: PRMCSLMQGSTLPRR
PRMLSLIQNSTLPRR

SEQ ID NO: 111280 - protein, 15 aa, Artificial Sequence
  Description of Artificial Sequence: Synthetic peptide
  Seed: PRMCSLMQGSTLPRR
PRMLSLIQNSTTPRR

SEQ ID NO: 111281 - protein, 15 aa, Artificial Sequence
  Description of Artificial Sequence: Synthetic peptide
  Seed: PRMCSLMQGSTLPRR
PRMLSLIQNSTVPRR

SEQ ID NO: 111282 - protein, 15 aa, Artificial Sequence
  Description of Artificial Sequence: Synthetic peptide
  Seed: PRMCSLMQGSTLPRR
PRMLSLIQPSTAPRR

SEQ ID NO: 111283 - protein, 15 aa, Artificial Sequence
  Description of Artificial Sequence: Synthetic peptide
  Seed: PRMCSLMQGSTLPRR
PRMLSLIQPSTIPRR

SEQ ID NO: 111284 - protein, 15 aa, Artificial Sequence
  Description of Artificial Sequence: Synthetic peptide
  Seed: PRMCSLMQGSTLPRR
PRMLSLIQPSTLPRR

SEQ ID NO: 111285 - protein, 15 aa, Artificial Sequence
  Description of Artificial Sequence: Synthetic peptide
  Seed: PRMCSLMQGSTLPRR
PRMLSLIQPSTMPRR

SEQ ID NO: 111286 - protein, 15 aa, Artificial Sequence
  Description of Artificial Sequence: Synthetic peptide
  Seed: PRMCSLMQGSTLPRR
PRMLSLIQPSTNPRR

SEQ ID NO: 111287 - protein, 15 aa, Artificial Sequence
  Description of Artificial Sequence: Synthetic peptide
  Seed: PRMCSLMQGSTLPRR
PRMLSLIQPSTSPRR

SEQ ID NO: 111288 - protein, 15 aa, Artificial Sequence
  Description of Artificial Sequence: Synthetic peptide
  Seed: PRMCSLMQGSTLPRR
PRMLSLIQPSTTPRR

SEQ ID NO: 111289 - protein, 15 aa, Artificial Sequence
  Description of Artificial Sequence: Synthetic peptide
  Seed: PRMCSLMQGSTLPRR
PRMLSLIQPSTVPRR

SEQ ID NO: 111290 - protein, 15 aa, Artificial Sequence
  Description of Artificial Sequence: Synthetic peptide
  Seed: PRMCSLMQGSTLPRR
PRMLSLIQSSTAPRR

SEQ ID NO: 111291 - protein, 15 aa, Artificial Sequence
  Description of Artificial Sequence: Synthetic peptide
  Seed: PRMCSLMQGSTLPRR
PRMLSLIQSSTCPRR

SEQ ID NO: 111292 - protein, 15 aa, Artificial Sequence
  Description of Artificial Sequence: Synthetic peptide
  Seed: PRMCSLMQGSTLPRR
PRMLSLIQSSTGPRR

SEQ ID NO: 111293 - protein, 15 aa, Artificial Sequence
  Description of Artificial Sequence: Synthetic peptide
  Seed: PRMCSLMQGSTLPRR
PRMLSLIQSSTIPRR

SEQ ID NO: 111294 - protein, 15 aa, Artificial Sequence
  Description of Artificial Sequence: Synthetic peptide
  Seed: PRMCSLMQGSTLPRR
PRMLSLIQSSTLPRR

SEQ ID NO: 111295 - protein, 15 aa, Artificial Sequence
  Description of Artificial Sequence: Synthetic peptide
  Seed: PRMCSLMQGSTLPRR
PRMLSLIQSSTMPRR

SEQ ID NO: 111296 - protein, 15 aa, Artificial Sequence
  Description of Artificial Sequence: Synthetic peptide
  Seed: PRMCSLMQGSTLPRR
PRMLSLIQSSTNPRR

SEQ ID NO: 111297 - protein, 15 aa, Artificial Sequence
  Description of Artificial Sequence: Synthetic peptide
  Seed: PRMCSLMQGSTLPRR
PRMLSLIQSSTSPRR

SEQ ID NO: 111298 - protein, 15 aa, Artificial Sequence
  Description of Artificial Sequence: Synthetic peptide
  Seed: PRMCSLMQGSTLPRR
PRMLSLIQSSTTPRR

SEQ ID NO: 111299 - protein, 15 aa, Artificial Sequence
  Description of Artificial Sequence: Synthetic peptide
  Seed: PRMCSLMQGSTLPRR
PRMLSLIQSSTVPRR

SEQ ID NO: 111300 - protein, 15 aa, Artificial Sequence
  Description of Artificial Sequence: Synthetic peptide
  Seed: PRMCSLMQGSTLPRR
PRMLSLIQTSTAPRR

SEQ ID NO: 111301 - protein, 15 aa, Artificial Sequence
  Description of Artificial Sequence: Synthetic peptide
  Seed: PRMCSLMQGSTLPRR
PRMLSLIQTSTIPRR

SEQ ID NO: 111302 - protein, 15 aa, Artificial Sequence
  Description of Artificial Sequence: Synthetic peptide
  Seed: PRMCSLMQGSTLPRR
PRMLSLIQTSTLPRR

SEQ ID NO: 111303 - protein, 15 aa, Artificial Sequence
  Description of Artificial Sequence: Synthetic peptide
  Seed: PRMCSLMQGSTLPRR
PRMLSLIQTSTMPRR

SEQ ID NO: 111304 - protein, 15 aa, Artificial Sequence
  Description of Artificial Sequence: Synthetic peptide
  Seed: PRMCSLMQGSTLPRR
PRMLSLIQTSTNPRR

SEQ ID NO: 111305 - protein, 15 aa, Artificial Sequence
  Description of Artificial Sequence: Synthetic peptide
  Seed: PRMCSLMQGSTLPRR
PRMLSLIQTSTSPRR

SEQ ID NO: 111306 - protein, 15 aa, Artificial Sequence
  Description of Artificial Sequence: Synthetic peptide
  Seed: PRMCSLMQGSTLPRR
PRMLSLIQTSTTPRR

SEQ ID NO: 111307 - protein, 15 aa, Artificial Sequence
  Description of Artificial Sequence: Synthetic peptide
  Seed: PRMCSLMQGSTLPRR
PRMLSLIQTSTVPRR

SEQ ID NO: 111308 - protein, 15 aa, Artificial Sequence
  Description of Artificial Sequence: Synthetic peptide
  Seed: PRMCSLMQGSTLPRR
PRMLSLIQVSTAPRR

SEQ ID NO: 111309 - protein, 15 aa, Artificial Sequence
  Description of Artificial Sequence: Synthetic peptide
  Seed: PRMCSLMQGSTLPRR
PRMLSLIQVSTIPRR

SEQ ID NO: 111310 - protein, 15 aa, Artificial Sequence
  Description of Artificial Sequence: Synthetic peptide
  Seed: PRMCSLMQGSTLPRR
PRMLSLIQVSTLPRR

SEQ ID NO: 111311 - protein, 15 aa, Artificial Sequence
  Description of Artificial Sequence: Synthetic peptide
  Seed: PRMCSLMQGSTLPRR
PRMLSLIQVSTNPRR

SEQ ID NO: 111312 - protein, 15 aa, Artificial Sequence
  Description of Artificial Sequence: Synthetic peptide
  Seed: PRMCSLMQGSTLPRR
PRMLSLIQVSTSPRR

SEQ ID NO: 111313 - protein, 15 aa, Artificial Sequence
  Description of Artificial Sequence: Synthetic peptide
  Seed: PRMCSLMQGSTLPRR
PRMLSLIQVSTTPRR

SEQ ID NO: 111314 - protein, 15 aa, Artificial Sequence
  Description of Artificial Sequence: Synthetic peptide
  Seed: PRMCSLMQGSTLPRR
PRMLSLIQVSTVPRR

SEQ ID NO: 111315 - protein, 15 aa, Artificial Sequence
  Description of Artificial Sequence: Synthetic peptide
  Seed: PRMCSLMQGSTLPRR
PRMLSLLQASTAPRR

SEQ ID NO: 111316 - protein, 15 aa, Artificial Sequence
  Description of Artificial Sequence: Synthetic peptide
  Seed: PRMCSLMQGSTLPRR
PRMLSLLQASTCPRR

SEQ ID NO: 111317 - protein, 15 aa, Artificial Sequence
  Description of Artificial Sequence: Synthetic peptide
  Seed: PRMCSLMQGSTLPRR
PRMLSLLQASTFPRR

SEQ ID NO: 111318 - protein, 15 aa, Artificial Sequence
  Description of Artificial Sequence: Synthetic peptide
  Seed: PRMCSLMQGSTLPRR
PRMLSLLQASTGPRR

SEQ ID NO: 111319 - protein, 15 aa, Artificial Sequence
  Description of Artificial Sequence: Synthetic peptide
  Seed: PRMCSLMQGSTLPRR
PRMLSLLQASTHPRR

SEQ ID NO: 111320 - protein, 15 aa, Artificial Sequence
  Description of Artificial Sequence: Synthetic peptide
  Seed: PRMCSLMQGSTLPRR
PRMLSLLQASTIPRR

SEQ ID NO: 111321 - protein, 15 aa, Artificial Sequence
  Description of Artificial Sequence: Synthetic peptide
  Seed: PRMCSLMQGSTLPRR
PRMLSLLQASTKPRR

SEQ ID NO: 111322 - protein, 15 aa, Artificial Sequence
  Description of Artificial Sequence: Synthetic peptide
  Seed: PRMCSLMQGSTLPRR
PRMLSLLQASTLPRR

SEQ ID NO: 111323 - protein, 15 aa, Artificial Sequence
  Description of Artificial Sequence: Synthetic peptide
  Seed: PRMCSLMQGSTLPRR
PRMLSLLQASTMPRR

SEQ ID NO: 111324 - protein, 15 aa, Artificial Sequence
  Description of Artificial Sequence: Synthetic peptide
  Seed: PRMCSLMQGSTLPRR
PRMLSLLQASTNPRR

SEQ ID NO: 111325 - protein, 15 aa, Artificial Sequence
  Description of Artificial Sequence: Synthetic peptide
  Seed: PRMCSLMQGSTLPRR
PRMLSLLQASTPPRR

SEQ ID NO: 111326 - protein, 15 aa, Artificial Sequence
  Description of Artificial Sequence: Synthetic peptide
  Seed: PRMCSLMQGSTLPRR
PRMLSLLQASTQPRR

SEQ ID NO: 111327 - protein, 15 aa, Artificial Sequence
  Description of Artificial Sequence: Synthetic peptide
  Seed: PRMCSLMQGSTLPRR
PRMLSLLQASTRPRR

SEQ ID NO: 111328 - protein, 15 aa, Artificial Sequence
  Description of Artificial Sequence: Synthetic peptide
  Seed: PRMCSLMQGSTLPRR
PRMLSLLQASTSPRR

SEQ ID NO: 111329 - protein, 15 aa, Artificial Sequence
  Description of Artificial Sequence: Synthetic peptide
  Seed: PRMCSLMQGSTLPRR
PRMLSLLQASTTPRR

SEQ ID NO: 111330 - protein, 15 aa, Artificial Sequence
  Description of Artificial Sequence: Synthetic peptide
  Seed: PRMCSLMQGSTLPRR
PRMLSLLQASTVPRR

SEQ ID NO: 111331 - protein, 15 aa, Artificial Sequence
  Description of Artificial Sequence: Synthetic peptide
  Seed: PRMCSLMQGSTLPRR
PRMLSLLQASTWPRR

SEQ ID NO: 111332 - protein, 15 aa, Artificial Sequence
  Description of Artificial Sequence: Synthetic peptide
  Seed: PRMCSLMQGSTLPRR
PRMLSLLQASTYPRR

SEQ ID NO: 111333 - protein, 15 aa, Artificial Sequence
  Description of Artificial Sequence: Synthetic peptide
  Seed: PRMCSLMQGSTLPRR
PRMLSLLQFSTIPRR

SEQ ID NO: 111334 - protein, 15 aa, Artificial Sequence
  Description of Artificial Sequence: Synthetic peptide
  Seed: PRMCSLMQGSTLPRR
PRMLSLLQFSTLPRR

SEQ ID NO: 111335 - protein, 15 aa, Artificial Sequence
  Description of Artificial Sequence: Synthetic peptide
  Seed: PRMCSLMQGSTLPRR
PRMLSLLQFSTVPRR

SEQ ID NO: 111336 - protein, 15 aa, Artificial Sequence
  Description of Artificial Sequence: Synthetic peptide
  Seed: PRMCSLMQGSTLPRR
PRMLSLLQGSTAPRR

SEQ ID NO: 111337 - protein, 15 aa, Artificial Sequence
  Description of Artificial Sequence: Synthetic peptide
  Seed: PRMCSLMQGSTLPRR
PRMLSLLQGSTCPRR

SEQ ID NO: 111338 - protein, 15 aa, Artificial Sequence
  Description of Artificial Sequence: Synthetic peptide
  Seed: PRMCSLMQGSTLPRR
PRMLSLLQGSTFPRR

SEQ ID NO: 111339 - protein, 15 aa, Artificial Sequence
  Description of Artificial Sequence: Synthetic peptide
  Seed: PRMCSLMQGSTLPRR
PRMLSLLQGSTGPRR

SEQ ID NO: 111340 - protein, 15 aa, Artificial Sequence
  Description of Artificial Sequence: Synthetic peptide
  Seed: PRMCSLMQGSTLPRR
PRMLSLLQGSTHPRR

SEQ ID NO: 111341 - protein, 15 aa, Artificial Sequence
  Description of Artificial Sequence: Synthetic peptide
  Seed: PRMCSLMQGSTLPRR
PRMLSLLQGSTIPRR

SEQ ID NO: 111342 - protein, 15 aa, Artificial Sequence
  Description of Artificial Sequence: Synthetic peptide
  Seed: PRMCSLMQGSTLPRR
PRMLSLLQGSTLPRR

SEQ ID NO: 111343 - protein, 15 aa, Artificial Sequence
  Description of Artificial Sequence: Synthetic peptide
  Seed: PRMCSLMQGSTLPRR
PRMLSLLQGSTMPRR

SEQ ID NO: 111344 - protein, 15 aa, Artificial Sequence
  Description of Artificial Sequence: Synthetic peptide
  Seed: PRMCSLMQGSTLPRR
PRMLSLLQGSTNPRR

SEQ ID NO: 111345 - protein, 15 aa, Artificial Sequence
  Description of Artificial Sequence: Synthetic peptide
  Seed: PRMCSLMQGSTLPRR
PRMLSLLQGSTPPRR

SEQ ID NO: 111346 - protein, 15 aa, Artificial Sequence
  Description of Artificial Sequence: Synthetic peptide
  Seed: PRMCSLMQGSTLPRR
PRMLSLLQGSTQPRR

SEQ ID NO: 111347 - protein, 15 aa, Artificial Sequence
  Description of Artificial Sequence: Synthetic peptide
  Seed: PRMCSLMQGSTLPRR
PRMLSLLQGSTSPRR

SEQ ID NO: 111348 - protein, 15 aa, Artificial Sequence
  Description of Artificial Sequence: Synthetic peptide
  Seed: PRMCSLMQGSTLPRR
PRMLSLLQGSTTPRR

SEQ ID NO: 111349 - protein, 15 aa, Artificial Sequence
  Description of Artificial Sequence: Synthetic peptide
  Seed: PRMCSLMQGSTLPRR
PRMLSLLQGSTVPRR

SEQ ID NO: 111350 - protein, 15 aa, Artificial Sequence
  Description of Artificial Sequence: Synthetic peptide
  Seed: PRMCSLMQGSTLPRR
PRMLSLLQISTAPRR

SEQ ID NO: 111351 - protein, 15 aa, Artificial Sequence
  Description of Artificial Sequence: Synthetic peptide
  Seed: PRMCSLMQGSTLPRR
PRMLSLLQISTIPRR

SEQ ID NO: 111352 - protein, 15 aa, Artificial Sequence
  Description of Artificial Sequence: Synthetic peptide
  Seed: PRMCSLMQGSTLPRR
PRMLSLLQISTLPRR

SEQ ID NO: 111353 - protein, 15 aa, Artificial Sequence
  Description of Artificial Sequence: Synthetic peptide
  Seed: PRMCSLMQGSTLPRR
PRMLSLLQISTMPRR

SEQ ID NO: 111354 - protein, 15 aa, Artificial Sequence
  Description of Artificial Sequence: Synthetic peptide
  Seed: PRMCSLMQGSTLPRR
PRMLSLLQISTNPRR

SEQ ID NO: 111355 - protein, 15 aa, Artificial Sequence
  Description of Artificial Sequence: Synthetic peptide
  Seed: PRMCSLMQGSTLPRR
PRMLSLLQISTSPRR

SEQ ID NO: 111356 - protein, 15 aa, Artificial Sequence
  Description of Artificial Sequence: Synthetic peptide
  Seed: PRMCSLMQGSTLPRR
PRMLSLLQISTTPRR

SEQ ID NO: 111357 - protein, 15 aa, Artificial Sequence
  Description of Artificial Sequence: Synthetic peptide
  Seed: PRMCSLMQGSTLPRR
PRMLSLLQISTVPRR

SEQ ID NO: 111358 - protein, 15 aa, Artificial Sequence
  Description of Artificial Sequence: Synthetic peptide
  Seed: PRMCSLMQGSTLPRR
PRMLSLLQLSTAPRR

SEQ ID NO: 111359 - protein, 15 aa, Artificial Sequence
  Description of Artificial Sequence: Synthetic peptide
  Seed: PRMCSLMQGSTLPRR
PRMLSLLQLSTLPRR

SEQ ID NO: 111360 - protein, 15 aa, Artificial Sequence
  Description of Artificial Sequence: Synthetic peptide
  Seed: PRMCSLMQGSTLPRR
PRMLSLLQLSTSPRR

SEQ ID NO: 111361 - protein, 15 aa, Artificial Sequence
  Description of Artificial Sequence: Synthetic peptide
  Seed: PRMCSLMQGSTLPRR
PRMLSLLQLSTVPRR

SEQ ID NO: 111362 - protein, 15 aa, Artificial Sequence
  Description of Artificial Sequence: Synthetic peptide
  Seed: PRMCSLMQGSTLPRR
PRMLSLLQMSTAPRR

SEQ ID NO: 111363 - protein, 15 aa, Artificial Sequence
  Description of Artificial Sequence: Synthetic peptide
  Seed: PRMCSLMQGSTLPRR
PRMLSLLQMSTIPRR

SEQ ID NO: 111364 - protein, 15 aa, Artificial Sequence
  Description of Artificial Sequence: Synthetic peptide
  Seed: PRMCSLMQGSTLPRR
PRMLSLLQMSTLPRR

SEQ ID NO: 111365 - protein, 15 aa, Artificial Sequence
  Description of Artificial Sequence: Synthetic peptide
  Seed: PRMCSLMQGSTLPRR
PRMLSLLQMSTSPRR

SEQ ID NO: 111366 - protein, 15 aa, Artificial Sequence
  Description of Artificial Sequence: Synthetic peptide
  Seed: PRMCSLMQGSTLPRR
PRMLSLLQMSTVPRR

SEQ ID NO: 111367 - protein, 15 aa, Artificial Sequence
  Description of Artificial Sequence: Synthetic peptide
  Seed: PRMCSLMQGSTLPRR
PRMLSLLQNSTAPRR

SEQ ID NO: 111368 - protein, 15 aa, Artificial Sequence
  Description of Artificial Sequence: Synthetic peptide
  Seed: PRMCSLMQGSTLPRR
PRMLSLLQNSTGPRR

SEQ ID NO: 111369 - protein, 15 aa, Artificial Sequence
  Description of Artificial Sequence: Synthetic peptide
  Seed: PRMCSLMQGSTLPRR
PRMLSLLQNSTIPRR

SEQ ID NO: 111370 - protein, 15 aa, Artificial Sequence
  Description of Artificial Sequence: Synthetic peptide
  Seed: PRMCSLMQGSTLPRR
PRMLSLLQNSTLPRR

SEQ ID NO: 111371 - protein, 15 aa, Artificial Sequence
  Description of Artificial Sequence: Synthetic peptide
  Seed: PRMCSLMQGSTLPRR
PRMLSLLQNSTMPRR

SEQ ID NO: 111372 - protein, 15 aa, Artificial Sequence
  Description of Artificial Sequence: Synthetic peptide
  Seed: PRMCSLMQGSTLPRR
PRMLSLLQNSTNPRR

SEQ ID NO: 111373 - protein, 15 aa, Artificial Sequence
  Description of Artificial Sequence: Synthetic peptide
  Seed: PRMCSLMQGSTLPRR
PRMLSLLQNSTSPRR

SEQ ID NO: 111374 - protein, 15 aa, Artificial Sequence
  Description of Artificial Sequence: Synthetic peptide
  Seed: PRMCSLMQGSTLPRR
PRMLSLLQNSTTPRR

SEQ ID NO: 111375 - protein, 15 aa, Artificial Sequence
  Description of Artificial Sequence: Synthetic peptide
  Seed: PRMCSLMQGSTLPRR
PRMLSLLQNSTVPRR

SEQ ID NO: 111376 - protein, 15 aa, Artificial Sequence
  Description of Artificial Sequence: Synthetic peptide
  Seed: PRMCSLMQGSTLPRR
PRMLSLLQPSTAPRR

SEQ ID NO: 111377 - protein, 15 aa, Artificial Sequence
  Description of Artificial Sequence: Synthetic peptide
  Seed: PRMCSLMQGSTLPRR
PRMLSLLQPSTCPRR

SEQ ID NO: 111378 - protein, 15 aa, Artificial Sequence
  Description of Artificial Sequence: Synthetic peptide
  Seed: PRMCSLMQGSTLPRR
PRMLSLLQPSTFPRR

SEQ ID NO: 111379 - protein, 15 aa, Artificial Sequence
  Description of Artificial Sequence: Synthetic peptide
  Seed: PRMCSLMQGSTLPRR
PRMLSLLQPSTGPRR

SEQ ID NO: 111380 - protein, 15 aa, Artificial Sequence
  Description of Artificial Sequence: Synthetic peptide
  Seed: PRMCSLMQGSTLPRR
PRMLSLLQPSTHPRR

SEQ ID NO: 111381 - protein, 15 aa, Artificial Sequence
  Description of Artificial Sequence: Synthetic peptide
  Seed: PRMCSLMQGSTLPRR
PRMLSLLQPSTIPRR

SEQ ID NO: 111382 - protein, 15 aa, Artificial Sequence
  Description of Artificial Sequence: Synthetic peptide
  Seed: PRMCSLMQGSTLPRR
PRMLSLLQPSTLPRR

SEQ ID NO: 111383 - protein, 15 aa, Artificial Sequence
  Description of Artificial Sequence: Synthetic peptide
  Seed: PRMCSLMQGSTLPRR
PRMLSLLQPSTMPRR

SEQ ID NO: 111384 - protein, 15 aa, Artificial Sequence
  Description of Artificial Sequence: Synthetic peptide
  Seed: PRMCSLMQGSTLPRR
PRMLSLLQPSTNPRR

SEQ ID NO: 111385 - protein, 15 aa, Artificial Sequence
  Description of Artificial Sequence: Synthetic peptide
  Seed: PRMCSLMQGSTLPRR
PRMLSLLQPSTQPRR

SEQ ID NO: 111386 - protein, 15 aa, Artificial Sequence
  Description of Artificial Sequence: Synthetic peptide
  Seed: PRMCSLMQGSTLPRR
PRMLSLLQPSTSPRR

SEQ ID NO: 111387 - protein, 15 aa, Artificial Sequence
  Description of Artificial Sequence: Synthetic peptide
  Seed: PRMCSLMQGSTLPRR
PRMLSLLQPSTTPRR

SEQ ID NO: 111388 - protein, 15 aa, Artificial Sequence
  Description of Artificial Sequence: Synthetic peptide
  Seed: PRMCSLMQGSTLPRR
PRMLSLLQPSTVPRR

SEQ ID NO: 111389 - protein, 15 aa, Artificial Sequence
  Description of Artificial Sequence: Synthetic peptide
  Seed: PRMCSLMQGSTLPRR
PRMLSLLQSSTAPRR

SEQ ID NO: 111390 - protein, 15 aa, Artificial Sequence
  Description of Artificial Sequence: Synthetic peptide
  Seed: PRMCSLMQGSTLPRR
PRMLSLLQSSTCPRR

SEQ ID NO: 111391 - protein, 15 aa, Artificial Sequence
  Description of Artificial Sequence: Synthetic peptide
  Seed: PRMCSLMQGSTLPRR
PRMLSLLQSSTFPRR

SEQ ID NO: 111392 - protein, 15 aa, Artificial Sequence
  Description of Artificial Sequence: Synthetic peptide
  Seed: PRMCSLMQGSTLPRR
PRMLSLLQSSTGPRR

SEQ ID NO: 111393 - protein, 15 aa, Artificial Sequence
  Description of Artificial Sequence: Synthetic peptide
  Seed: PRMCSLMQGSTLPRR
PRMLSLLQSSTHPRR

SEQ ID NO: 111394 - protein, 15 aa, Artificial Sequence
  Description of Artificial Sequence: Synthetic peptide
  Seed: PRMCSLMQGSTLPRR
PRMLSLLQSSTIPRR

SEQ ID NO: 111395 - protein, 15 aa, Artificial Sequence
  Description of Artificial Sequence: Synthetic peptide
  Seed: PRMCSLMQGSTLPRR
PRMLSLLQSSTLPRR

SEQ ID NO: 111396 - protein, 15 aa, Artificial Sequence
  Description of Artificial Sequence: Synthetic peptide
  Seed: PRMCSLMQGSTLPRR
PRMLSLLQSSTMPRR

SEQ ID NO: 111397 - protein, 15 aa, Artificial Sequence
  Description of Artificial Sequence: Synthetic peptide
  Seed: PRMCSLMQGSTLPRR
PRMLSLLQSSTNPRR

SEQ ID NO: 111398 - protein, 15 aa, Artificial Sequence
  Description of Artificial Sequence: Synthetic peptide
  Seed: PRMCSLMQGSTLPRR
PRMLSLLQSSTSPRR

SEQ ID NO: 111399 - protein, 15 aa, Artificial Sequence
  Description of Artificial Sequence: Synthetic peptide
  Seed: PRMCSLMQGSTLPRR
PRMLSLLQSSTTPRR

SEQ ID NO: 111400 - protein, 15 aa, Artificial Sequence
  Description of Artificial Sequence: Synthetic peptide
  Seed: PRMCSLMQGSTLPRR
PRMLSLLQSSTVPRR

SEQ ID NO: 111401 - protein, 15 aa, Artificial Sequence
  Description of Artificial Sequence: Synthetic peptide
  Seed: PRMCSLMQGSTLPRR
PRMLSLLQTSTAPRR

SEQ ID NO: 111402 - protein, 15 aa, Artificial Sequence
  Description of Artificial Sequence: Synthetic peptide
  Seed: PRMCSLMQGSTLPRR
PRMLSLLQTSTGPRR

SEQ ID NO: 111403 - protein, 15 aa, Artificial Sequence
  Description of Artificial Sequence: Synthetic peptide
  Seed: PRMCSLMQGSTLPRR
PRMLSLLQTSTIPRR

SEQ ID NO: 111404 - protein, 15 aa, Artificial Sequence
  Description of Artificial Sequence: Synthetic peptide
  Seed: PRMCSLMQGSTLPRR
PRMLSLLQTSTLPRR

SEQ ID NO: 111405 - protein, 15 aa, Artificial Sequence
  Description of Artificial Sequence: Synthetic peptide
  Seed: PRMCSLMQGSTLPRR
PRMLSLLQTSTMPRR

SEQ ID NO: 111406 - protein, 15 aa, Artificial Sequence
  Description of Artificial Sequence: Synthetic peptide
  Seed: PRMCSLMQGSTLPRR
PRMLSLLQTSTNPRR

SEQ ID NO: 111407 - protein, 15 aa, Artificial Sequence
  Description of Artificial Sequence: Synthetic peptide
  Seed: PRMCSLMQGSTLPRR
PRMLSLLQTSTSPRR

SEQ ID NO: 111408 - protein, 15 aa, Artificial Sequence
  Description of Artificial Sequence: Synthetic peptide
  Seed: PRMCSLMQGSTLPRR
PRMLSLLQTSTTPRR

SEQ ID NO: 111409 - protein, 15 aa, Artificial Sequence
  Description of Artificial Sequence: Synthetic peptide
  Seed: PRMCSLMQGSTLPRR
PRMLSLLQTSTVPRR

SEQ ID NO: 111410 - protein, 15 aa, Artificial Sequence
  Description of Artificial Sequence: Synthetic peptide
  Seed: PRMCSLMQGSTLPRR
PRMLSLLQVSTAPRR

SEQ ID NO: 111411 - protein, 15 aa, Artificial Sequence
  Description of Artificial Sequence: Synthetic peptide
  Seed: PRMCSLMQGSTLPRR
PRMLSLLQVSTGPRR

SEQ ID NO: 111412 - protein, 15 aa, Artificial Sequence
  Description of Artificial Sequence: Synthetic peptide
  Seed: PRMCSLMQGSTLPRR
PRMLSLLQVSTHPRR

SEQ ID NO: 111413 - protein, 15 aa, Artificial Sequence
  Description of Artificial Sequence: Synthetic peptide
  Seed: PRMCSLMQGSTLPRR
PRMLSLLQVSTIPRR

SEQ ID NO: 111414 - protein, 15 aa, Artificial Sequence
  Description of Artificial Sequence: Synthetic peptide
  Seed: PRMCSLMQGSTLPRR
PRMLSLLQVSTLPRR

SEQ ID NO: 111415 - protein, 15 aa, Artificial Sequence
  Description of Artificial Sequence: Synthetic peptide
  Seed: PRMCSLMQGSTLPRR
PRMLSLLQVSTMPRR

SEQ ID NO: 111416 - protein, 15 aa, Artificial Sequence
  Description of Artificial Sequence: Synthetic peptide
  Seed: PRMCSLMQGSTLPRR
PRMLSLLQVSTNPRR

SEQ ID NO: 111417 - protein, 15 aa, Artificial Sequence
  Description of Artificial Sequence: Synthetic peptide
  Seed: PRMCSLMQGSTLPRR
PRMLSLLQVSTSPRR

SEQ ID NO: 111418 - protein, 15 aa, Artificial Sequence
  Description of Artificial Sequence: Synthetic peptide
  Seed: PRMCSLMQGSTLPRR
PRMLSLLQVSTTPRR

SEQ ID NO: 111419 - protein, 15 aa, Artificial Sequence
  Description of Artificial Sequence: Synthetic peptide
  Seed: PRMCSLMQGSTLPRR
PRMLSLLQVSTVPRR

SEQ ID NO: 111420 - protein, 15 aa, Artificial Sequence
  Description of Artificial Sequence: Synthetic peptide
  Seed: PRMCSLMQGSTLPRR
PRMLSLMQASTAPRR

SEQ ID NO: 111421 - protein, 15 aa, Artificial Sequence
  Description of Artificial Sequence: Synthetic peptide
  Seed: PRMCSLMQGSTLPRR
PRMLSLMQASTCPRR

SEQ ID NO: 111422 - protein, 15 aa, Artificial Sequence
  Description of Artificial Sequence: Synthetic peptide
  Seed: PRMCSLMQGSTLPRR
PRMLSLMQASTFPRR

SEQ ID NO: 111423 - protein, 15 aa, Artificial Sequence
  Description of Artificial Sequence: Synthetic peptide
  Seed: PRMCSLMQGSTLPRR
PRMLSLMQASTGPRR

SEQ ID NO: 111424 - protein, 15 aa, Artificial Sequence
  Description of Artificial Sequence: Synthetic peptide
  Seed: PRMCSLMQGSTLPRR
PRMLSLMQASTHPRR

SEQ ID NO: 111425 - protein, 15 aa, Artificial Sequence
  Description of Artificial Sequence: Synthetic peptide
  Seed: PRMCSLMQGSTLPRR
PRMLSLMQASTIPRR

SEQ ID NO: 111426 - protein, 15 aa, Artificial Sequence
  Description of Artificial Sequence: Synthetic peptide
  Seed: PRMCSLMQGSTLPRR
PRMLSLMQASTKPRR

SEQ ID NO: 111427 - protein, 15 aa, Artificial Sequence
  Description of Artificial Sequence: Synthetic peptide
  Seed: PRMCSLMQGSTLPRR
PRMLSLMQASTLPRR

SEQ ID NO: 111428 - protein, 15 aa, Artificial Sequence
  Description of Artificial Sequence: Synthetic peptide
  Seed: PRMCSLMQGSTLPRR
PRMLSLMQASTMPRR

SEQ ID NO: 111429 - protein, 15 aa, Artificial Sequence
  Description of Artificial Sequence: Synthetic peptide
  Seed: PRMCSLMQGSTLPRR
PRMLSLMQASTNPRR

SEQ ID NO: 111430 - protein, 15 aa, Artificial Sequence
  Description of Artificial Sequence: Synthetic peptide
  Seed: PRMCSLMQGSTLPRR
PRMLSLMQASTPPRR

SEQ ID NO: 111431 - protein, 15 aa, Artificial Sequence
  Description of Artificial Sequence: Synthetic peptide
  Seed: PRMCSLMQGSTLPRR
PRMLSLMQASTQPRR

SEQ ID NO: 111432 - protein, 15 aa, Artificial Sequence
  Description of Artificial Sequence: Synthetic peptide
  Seed: PRMCSLMQGSTLPRR
PRMLSLMQASTRPRR

SEQ ID NO: 111433 - protein, 15 aa, Artificial Sequence
  Description of Artificial Sequence: Synthetic peptide
  Seed: PRMCSLMQGSTLPRR
PRMLSLMQASTSPRR

SEQ ID NO: 111434 - protein, 15 aa, Artificial Sequence
  Description of Artificial Sequence: Synthetic peptide
  Seed: PRMCSLMQGSTLPRR
PRMLSLMQASTTPRR

SEQ ID NO: 111435 - protein, 15 aa, Artificial Sequence
  Description of Artificial Sequence: Synthetic peptide
  Seed: PRMCSLMQGSTLPRR
PRMLSLMQASTVPRR

SEQ ID NO: 111436 - protein, 15 aa, Artificial Sequence
  Description of Artificial Sequence: Synthetic peptide
  Seed: PRMCSLMQGSTLPRR
PRMLSLMQASTWPRR

SEQ ID NO: 111437 - protein, 15 aa, Artificial Sequence
  Description of Artificial Sequence: Synthetic peptide
  Seed: PRMCSLMQGSTLPRR
PRMLSLMQASTYPRR

SEQ ID NO: 111438 - protein, 15 aa, Artificial Sequence
  Description of Artificial Sequence: Synthetic peptide
  Seed: PRMCSLMQGSTLPRR
PRMLSLMQFSTLPRR

SEQ ID NO: 111439 - protein, 15 aa, Artificial Sequence
  Description of Artificial Sequence: Synthetic peptide
  Seed: PRMCSLMQGSTLPRR
PRMLSLMQGSTAPRR

SEQ ID NO: 111440 - protein, 15 aa, Artificial Sequence
  Description of Artificial Sequence: Synthetic peptide
  Seed: PRMCSLMQGSTLPRR
PRMLSLMQGSTCPRR

SEQ ID NO: 111441 - protein, 15 aa, Artificial Sequence
  Description of Artificial Sequence: Synthetic peptide
  Seed: PRMCSLMQGSTLPRR
PRMLSLMQGSTFPRR

SEQ ID NO: 111442 - protein, 15 aa, Artificial Sequence
  Description of Artificial Sequence: Synthetic peptide
  Seed: PRMCSLMQGSTLPRR
PRMLSLMQGSTGPRR

SEQ ID NO: 111443 - protein, 15 aa, Artificial Sequence
  Description of Artificial Sequence: Synthetic peptide
  Seed: PRMCSLMQGSTLPRR
PRMLSLMQGSTHPRR

SEQ ID NO: 111444 - protein, 15 aa, Artificial Sequence
  Description of Artificial Sequence: Synthetic peptide
  Seed: PRMCSLMQGSTLPRR
PRMLSLMQGSTIPRR

SEQ ID NO: 111445 - protein, 15 aa, Artificial Sequence
  Description of Artificial Sequence: Synthetic peptide
  Seed: PRMCSLMQGSTLPRR
PRMLSLMQGSTLPRR

SEQ ID NO: 111446 - protein, 15 aa, Artificial Sequence
  Description of Artificial Sequence: Synthetic peptide
  Seed: PRMCSLMQGSTLPRR
PRMLSLMQGSTMPRR

SEQ ID NO: 111447 - protein, 15 aa, Artificial Sequence
  Description of Artificial Sequence: Synthetic peptide
  Seed: PRMCSLMQGSTLPRR
PRMLSLMQGSTNPRR

SEQ ID NO: 111448 - protein, 15 aa, Artificial Sequence
  Description of Artificial Sequence: Synthetic peptide
  Seed: PRMCSLMQGSTLPRR
PRMLSLMQGSTQPRR

SEQ ID NO: 111449 - protein, 15 aa, Artificial Sequence
  Description of Artificial Sequence: Synthetic peptide
  Seed: PRMCSLMQGSTLPRR
PRMLSLMQGSTSPRR

SEQ ID NO: 111450 - protein, 15 aa, Artificial Sequence
  Description of Artificial Sequence: Synthetic peptide
  Seed: PRMCSLMQGSTLPRR
PRMLSLMQGSTTPRR

SEQ ID NO: 111451 - protein, 15 aa, Artificial Sequence
  Description of Artificial Sequence: Synthetic peptide
  Seed: PRMCSLMQGSTLPRR
PRMLSLMQGSTVPRR

SEQ ID NO: 111452 - protein, 15 aa, Artificial Sequence
  Description of Artificial Sequence: Synthetic peptide
  Seed: PRMCSLMQGSTLPRR
PRMLSLMQGSTYPRR

SEQ ID NO: 111453 - protein, 15 aa, Artificial Sequence
  Description of Artificial Sequence: Synthetic peptide
  Seed: PRMCSLMQGSTLPRR
PRMLSLMQHSTLPRR

SEQ ID NO: 111454 - protein, 15 aa, Artificial Sequence
  Description of Artificial Sequence: Synthetic peptide
  Seed: PRMCSLMQGSTLPRR
PRMLSLMQHSTVPRR

SEQ ID NO: 111455 - protein, 15 aa, Artificial Sequence
  Description of Artificial Sequence: Synthetic peptide
  Seed: PRMCSLMQGSTLPRR
PRMLSLMQISTAPRR

SEQ ID NO: 111456 - protein, 15 aa, Artificial Sequence
  Description of Artificial Sequence: Synthetic peptide
  Seed: PRMCSLMQGSTLPRR
PRMLSLMQISTHPRR

SEQ ID NO: 111457 - protein, 15 aa, Artificial Sequence
  Description of Artificial Sequence: Synthetic peptide
  Seed: PRMCSLMQGSTLPRR
PRMLSLMQISTIPRR

SEQ ID NO: 111458 - protein, 15 aa, Artificial Sequence
  Description of Artificial Sequence: Synthetic peptide
  Seed: PRMCSLMQGSTLPRR
PRMLSLMQISTLPRR

SEQ ID NO: 111459 - protein, 15 aa, Artificial Sequence
  Description of Artificial Sequence: Synthetic peptide
  Seed: PRMCSLMQGSTLPRR
PRMLSLMQISTMPRR

SEQ ID NO: 111460 - protein, 15 aa, Artificial Sequence
  Description of Artificial Sequence: Synthetic peptide
  Seed: PRMCSLMQGSTLPRR
PRMLSLMQISTNPRR

SEQ ID NO: 111461 - protein, 15 aa, Artificial Sequence
  Description of Artificial Sequence: Synthetic peptide
  Seed: PRMCSLMQGSTLPRR
PRMLSLMQISTSPRR

SEQ ID NO: 111462 - protein, 15 aa, Artificial Sequence
  Description of Artificial Sequence: Synthetic peptide
  Seed: PRMCSLMQGSTLPRR
PRMLSLMQISTTPRR

SEQ ID NO: 111463 - protein, 15 aa, Artificial Sequence
  Description of Artificial Sequence: Synthetic peptide
  Seed: PRMCSLMQGSTLPRR
PRMLSLMQISTVPRR

SEQ ID NO: 111464 - protein, 15 aa, Artificial Sequence
  Description of Artificial Sequence: Synthetic peptide
  Seed: PRMCSLMQGSTLPRR
PRMLSLMQLSTAPRR

SEQ ID NO: 111465 - protein, 15 aa, Artificial Sequence
  Description of Artificial Sequence: Synthetic peptide
  Seed: PRMCSLMQGSTLPRR
PRMLSLMQLSTLPRR

SEQ ID NO: 111466 - protein, 15 aa, Artificial Sequence
  Description of Artificial Sequence: Synthetic peptide
  Seed: PRMCSLMQGSTLPRR
PRMLSLMQLSTNPRR

SEQ ID NO: 111467 - protein, 15 aa, Artificial Sequence
  Description of Artificial Sequence: Synthetic peptide
  Seed: PRMCSLMQGSTLPRR
PRMLSLMQLSTSPRR

SEQ ID NO: 111468 - protein, 15 aa, Artificial Sequence
  Description of Artificial Sequence: Synthetic peptide
  Seed: PRMCSLMQGSTLPRR
PRMLSLMQLSTTPRR

SEQ ID NO: 111469 - protein, 15 aa, Artificial Sequence
  Description of Artificial Sequence: Synthetic peptide
  Seed: PRMCSLMQGSTLPRR
PRMLSLMQLSTVPRR

SEQ ID NO: 111470 - protein, 15 aa, Artificial Sequence
  Description of Artificial Sequence: Synthetic peptide
  Seed: PRMCSLMQGSTLPRR
PRMLSLMQMSTAPRR

SEQ ID NO: 111471 - protein, 15 aa, Artificial Sequence
  Description of Artificial Sequence: Synthetic peptide
  Seed: PRMCSLMQGSTLPRR
PRMLSLMQMSTIPRR

SEQ ID NO: 111472 - protein, 15 aa, Artificial Sequence
  Description of Artificial Sequence: Synthetic peptide
  Seed: PRMCSLMQGSTLPRR
PRMLSLMQMSTLPRR

SEQ ID NO: 111473 - protein, 15 aa, Artificial Sequence
  Description of Artificial Sequence: Synthetic peptide
  Seed: PRMCSLMQGSTLPRR
PRMLSLMQMSTNPRR

SEQ ID NO: 111474 - protein, 15 aa, Artificial Sequence
  Description of Artificial Sequence: Synthetic peptide
  Seed: PRMCSLMQGSTLPRR
PRMLSLMQMSTSPRR

SEQ ID NO: 111475 - protein, 15 aa, Artificial Sequence
  Description of Artificial Sequence: Synthetic peptide
  Seed: PRMCSLMQGSTLPRR
PRMLSLMQMSTVPRR

SEQ ID NO: 111476 - protein, 15 aa, Artificial Sequence
  Description of Artificial Sequence: Synthetic peptide
  Seed: PRMCSLMQGSTLPRR
PRMLSLMQNSTAPRR

SEQ ID NO: 111477 - protein, 15 aa, Artificial Sequence
  Description of Artificial Sequence: Synthetic peptide
  Seed: PRMCSLMQGSTLPRR
PRMLSLMQNSTGPRR

SEQ ID NO: 111478 - protein, 15 aa, Artificial Sequence
  Description of Artificial Sequence: Synthetic peptide
  Seed: PRMCSLMQGSTLPRR
PRMLSLMQNSTIPRR

SEQ ID NO: 111479 - protein, 15 aa, Artificial Sequence
  Description of Artificial Sequence: Synthetic peptide
  Seed: PRMCSLMQGSTLPRR
PRMLSLMQNSTLPRR

SEQ ID NO: 111480 - protein, 15 aa, Artificial Sequence
  Description of Artificial Sequence: Synthetic peptide
  Seed: PRMCSLMQGSTLPRR
PRMLSLMQNSTMPRR

SEQ ID NO: 111481 - protein, 15 aa, Artificial Sequence
  Description of Artificial Sequence: Synthetic peptide
  Seed: PRMCSLMQGSTLPRR
PRMLSLMQNSTNPRR

SEQ ID NO: 111482 - protein, 15 aa, Artificial Sequence
  Description of Artificial Sequence: Synthetic peptide
  Seed: PRMCSLMQGSTLPRR
PRMLSLMQNSTSPRR

SEQ ID NO: 111483 - protein, 15 aa, Artificial Sequence
  Description of Artificial Sequence: Synthetic peptide
  Seed: PRMCSLMQGSTLPRR
PRMLSLMQNSTTPRR

SEQ ID NO: 111484 - protein, 15 aa, Artificial Sequence
  Description of Artificial Sequence: Synthetic peptide
  Seed: PRMCSLMQGSTLPRR
PRMLSLMQNSTVPRR

SEQ ID NO: 111485 - protein, 15 aa, Artificial Sequence
  Description of Artificial Sequence: Synthetic peptide
  Seed: PRMCSLMQGSTLPRR
PRMLSLMQPSTAPRR

SEQ ID NO: 111486 - protein, 15 aa, Artificial Sequence
  Description of Artificial Sequence: Synthetic peptide
  Seed: PRMCSLMQGSTLPRR
PRMLSLMQPSTCPRR

SEQ ID NO: 111487 - protein, 15 aa, Artificial Sequence
  Description of Artificial Sequence: Synthetic peptide
  Seed: PRMCSLMQGSTLPRR
PRMLSLMQPSTFPRR

SEQ ID NO: 111488 - protein, 15 aa, Artificial Sequence
  Description of Artificial Sequence: Synthetic peptide
  Seed: PRMCSLMQGSTLPRR
PRMLSLMQPSTGPRR

SEQ ID NO: 111489 - protein, 15 aa, Artificial Sequence
  Description of Artificial Sequence: Synthetic peptide
  Seed: PRMCSLMQGSTLPRR
PRMLSLMQPSTHPRR

SEQ ID NO: 111490 - protein, 15 aa, Artificial Sequence
  Description of Artificial Sequence: Synthetic peptide
  Seed: PRMCSLMQGSTLPRR
PRMLSLMQPSTIPRR

SEQ ID NO: 111491 - protein, 15 aa, Artificial Sequence
  Description of Artificial Sequence: Synthetic peptide
  Seed: PRMCSLMQGSTLPRR
PRMLSLMQPSTLPRR

SEQ ID NO: 111492 - protein, 15 aa, Artificial Sequence
  Description of Artificial Sequence: Synthetic peptide
  Seed: PRMCSLMQGSTLPRR
PRMLSLMQPSTMPRR

SEQ ID NO: 111493 - protein, 15 aa, Artificial Sequence
  Description of Artificial Sequence: Synthetic peptide
  Seed: PRMCSLMQGSTLPRR
PRMLSLMQPSTNPRR

SEQ ID NO: 111494 - protein, 15 aa, Artificial Sequence
  Description of Artificial Sequence: Synthetic peptide
  Seed: PRMCSLMQGSTLPRR
PRMLSLMQPSTQPRR

SEQ ID NO: 111495 - protein, 15 aa, Artificial Sequence
  Description of Artificial Sequence: Synthetic peptide
  Seed: PRMCSLMQGSTLPRR
PRMLSLMQPSTSPRR

SEQ ID NO: 111496 - protein, 15 aa, Artificial Sequence
  Description of Artificial Sequence: Synthetic peptide
  Seed: PRMCSLMQGSTLPRR
PRMLSLMQPSTTPRR

SEQ ID NO: 111497 - protein, 15 aa, Artificial Sequence
  Description of Artificial Sequence: Synthetic peptide
  Seed: PRMCSLMQGSTLPRR
PRMLSLMQPSTVPRR

SEQ ID NO: 111498 - protein, 15 aa, Artificial Sequence
  Description of Artificial Sequence: Synthetic peptide
  Seed: PRMCSLMQGSTLPRR
PRMLSLMQSSTAPRR

SEQ ID NO: 111499 - protein, 15 aa, Artificial Sequence
  Description of Artificial Sequence: Synthetic peptide
  Seed: PRMCSLMQGSTLPRR
PRMLSLMQSSTCPRR

SEQ ID NO: 111500 - protein, 15 aa, Artificial Sequence
  Description of Artificial Sequence: Synthetic peptide
  Seed: PRMCSLMQGSTLPRR
PRMLSLMQSSTFPRR

SEQ ID NO: 111501 - protein, 15 aa, Artificial Sequence
  Description of Artificial Sequence: Synthetic peptide
  Seed: PRMCSLMQGSTLPRR
PRMLSLMQSSTGPRR

SEQ ID NO: 111502 - protein, 15 aa, Artificial Sequence
  Description of Artificial Sequence: Synthetic peptide
  Seed: PRMCSLMQGSTLPRR
PRMLSLMQSSTHPRR

SEQ ID NO: 111503 - protein, 15 aa, Artificial Sequence
  Description of Artificial Sequence: Synthetic peptide
  Seed: PRMCSLMQGSTLPRR
PRMLSLMQSSTIPRR

SEQ ID NO: 111504 - protein, 15 aa, Artificial Sequence
  Description of Artificial Sequence: Synthetic peptide
  Seed: PRMCSLMQGSTLPRR
PRMLSLMQSSTLPRR

SEQ ID NO: 111505 - protein, 15 aa, Artificial Sequence
  Description of Artificial Sequence: Synthetic peptide
  Seed: PRMCSLMQGSTLPRR
PRMLSLMQSSTMPRR

SEQ ID NO: 111506 - protein, 15 aa, Artificial Sequence
  Description of Artificial Sequence: Synthetic peptide
  Seed: PRMCSLMQGSTLPRR
PRMLSLMQSSTNPRR

SEQ ID NO: 111507 - protein, 15 aa, Artificial Sequence
  Description of Artificial Sequence: Synthetic peptide
  Seed: PRMCSLMQGSTLPRR
PRMLSLMQSSTSPRR

SEQ ID NO: 111508 - protein, 15 aa, Artificial Sequence
  Description of Artificial Sequence: Synthetic peptide
  Seed: PRMCSLMQGSTLPRR
PRMLSLMQSSTTPRR

SEQ ID NO: 111509 - protein, 15 aa, Artificial Sequence
  Description of Artificial Sequence: Synthetic peptide
  Seed: PRMCSLMQGSTLPRR
PRMLSLMQSSTVPRR

SEQ ID NO: 111510 - protein, 15 aa, Artificial Sequence
  Description of Artificial Sequence: Synthetic peptide
  Seed: PRMCSLMQGSTLPRR
PRMLSLMQTSTAPRR

SEQ ID NO: 111511 - protein, 15 aa, Artificial Sequence
  Description of Artificial Sequence: Synthetic peptide
  Seed: PRMCSLMQGSTLPRR
PRMLSLMQTSTIPRR

SEQ ID NO: 111512 - protein, 15 aa, Artificial Sequence
  Description of Artificial Sequence: Synthetic peptide
  Seed: PRMCSLMQGSTLPRR
PRMLSLMQTSTLPRR

SEQ ID NO: 111513 - protein, 15 aa, Artificial Sequence
  Description of Artificial Sequence: Synthetic peptide
  Seed: PRMCSLMQGSTLPRR
PRMLSLMQTSTMPRR

SEQ ID NO: 111514 - protein, 15 aa, Artificial Sequence
  Description of Artificial Sequence: Synthetic peptide
  Seed: PRMCSLMQGSTLPRR
PRMLSLMQTSTNPRR

SEQ ID NO: 111515 - protein, 15 aa, Artificial Sequence
  Description of Artificial Sequence: Synthetic peptide
  Seed: PRMCSLMQGSTLPRR
PRMLSLMQTSTSPRR

SEQ ID NO: 111516 - protein, 15 aa, Artificial Sequence
  Description of Artificial Sequence: Synthetic peptide
  Seed: PRMCSLMQGSTLPRR
PRMLSLMQTSTTPRR

SEQ ID NO: 111517 - protein, 15 aa, Artificial Sequence
  Description of Artificial Sequence: Synthetic peptide
  Seed: PRMCSLMQGSTLPRR
PRMLSLMQTSTVPRR

SEQ ID NO: 111518 - protein, 15 aa, Artificial Sequence
  Description of Artificial Sequence: Synthetic peptide
  Seed: PRMCSLMQGSTLPRR
PRMLSLMQVSTAPRR

SEQ ID NO: 111519 - protein, 15 aa, Artificial Sequence
  Description of Artificial Sequence: Synthetic peptide
  Seed: PRMCSLMQGSTLPRR
PRMLSLMQVSTGPRR

SEQ ID NO: 111520 - protein, 15 aa, Artificial Sequence
  Description of Artificial Sequence: Synthetic peptide
  Seed: PRMCSLMQGSTLPRR
PRMLSLMQVSTHPRR

SEQ ID NO: 111521 - protein, 15 aa, Artificial Sequence
  Description of Artificial Sequence: Synthetic peptide
  Seed: PRMCSLMQGSTLPRR
PRMLSLMQVSTIPRR

SEQ ID NO: 111522 - protein, 15 aa, Artificial Sequence
  Description of Artificial Sequence: Synthetic peptide
  Seed: PRMCSLMQGSTLPRR
PRMLSLMQVSTLPRR

SEQ ID NO: 111523 - protein, 15 aa, Artificial Sequence
  Description of Artificial Sequence: Synthetic peptide
  Seed: PRMCSLMQGSTLPRR
PRMLSLMQVSTMPRR

SEQ ID NO: 111524 - protein, 15 aa, Artificial Sequence
  Description of Artificial Sequence: Synthetic peptide
  Seed: PRMCSLMQGSTLPRR
PRMLSLMQVSTNPRR

SEQ ID NO: 111525 - protein, 15 aa, Artificial Sequence
  Description of Artificial Sequence: Synthetic peptide
  Seed: PRMCSLMQGSTLPRR
PRMLSLMQVSTQPRR

SEQ ID NO: 111526 - protein, 15 aa, Artificial Sequence
  Description of Artificial Sequence: Synthetic peptide
  Seed: PRMCSLMQGSTLPRR
PRMLSLMQVSTSPRR

SEQ ID NO: 111527 - protein, 15 aa, Artificial Sequence
  Description of Artificial Sequence: Synthetic peptide
  Seed: PRMCSLMQGSTLPRR
PRMLSLMQVSTTPRR

SEQ ID NO: 111528 - protein, 15 aa, Artificial Sequence
  Description of Artificial Sequence: Synthetic peptide
  Seed: PRMCSLMQGSTLPRR
PRMLSLMQVSTVPRR

SEQ ID NO: 111529 - protein, 15 aa, Artificial Sequence
  Description of Artificial Sequence: Synthetic peptide
  Seed: PRMCSLMQGSTLPRR
PRMLSLNQASTLPRR

SEQ ID NO: 111530 - protein, 15 aa, Artificial Sequence
  Description of Artificial Sequence: Synthetic peptide
  Seed: PRMCSLMQGSTLPRR
PRMLSLQQASTAPRR

SEQ ID NO: 111531 - protein, 15 aa, Artificial Sequence
  Description of Artificial Sequence: Synthetic peptide
  Seed: PRMCSLMQGSTLPRR
PRMLSLQQASTIPRR

SEQ ID NO: 111532 - protein, 15 aa, Artificial Sequence
  Description of Artificial Sequence: Synthetic peptide
  Seed: PRMCSLMQGSTLPRR
PRMLSLQQASTLPRR

SEQ ID NO: 111533 - protein, 15 aa, Artificial Sequence
  Description of Artificial Sequence: Synthetic peptide
  Seed: PRMCSLMQGSTLPRR
PRMLSLQQASTMPRR

SEQ ID NO: 111534 - protein, 15 aa, Artificial Sequence
  Description of Artificial Sequence: Synthetic peptide
  Seed: PRMCSLMQGSTLPRR
PRMLSLQQASTSPRR

SEQ ID NO: 111535 - protein, 15 aa, Artificial Sequence
  Description of Artificial Sequence: Synthetic peptide
  Seed: PRMCSLMQGSTLPRR
PRMLSLQQASTTPRR

SEQ ID NO: 111536 - protein, 15 aa, Artificial Sequence
  Description of Artificial Sequence: Synthetic peptide
  Seed: PRMCSLMQGSTLPRR
PRMLSLQQASTVPRR

SEQ ID NO: 111537 - protein, 15 aa, Artificial Sequence
  Description of Artificial Sequence: Synthetic peptide
  Seed: PRMCSLMQGSTLPRR
PRMLSLQQGSTAPRR

SEQ ID NO: 111538 - protein, 15 aa, Artificial Sequence
  Description of Artificial Sequence: Synthetic peptide
  Seed: PRMCSLMQGSTLPRR
PRMLSLQQGSTIPRR

SEQ ID NO: 111539 - protein, 15 aa, Artificial Sequence
  Description of Artificial Sequence: Synthetic peptide
  Seed: PRMCSLMQGSTLPRR
PRMLSLQQGSTLPRR

SEQ ID NO: 111540 - protein, 15 aa, Artificial Sequence
  Description of Artificial Sequence: Synthetic peptide
  Seed: PRMCSLMQGSTLPRR
PRMLSLQQGSTMPRR

SEQ ID NO: 111541 - protein, 15 aa, Artificial Sequence
  Description of Artificial Sequence: Synthetic peptide
  Seed: PRMCSLMQGSTLPRR
PRMLSLQQGSTSPRR

SEQ ID NO: 111542 - protein, 15 aa, Artificial Sequence
  Description of Artificial Sequence: Synthetic peptide
  Seed: PRMCSLMQGSTLPRR
PRMLSLQQGSTTPRR

SEQ ID NO: 111543 - protein, 15 aa, Artificial Sequence
  Description of Artificial Sequence: Synthetic peptide
  Seed: PRMCSLMQGSTLPRR
PRMLSLQQGSTVPRR

SEQ ID NO: 111544 - protein, 15 aa, Artificial Sequence
  Description of Artificial Sequence: Synthetic peptide
  Seed: PRMCSLMQGSTLPRR
PRMLSLQQNSTLPRR

SEQ ID NO: 111545 - protein, 15 aa, Artificial Sequence
  Description of Artificial Sequence: Synthetic peptide
  Seed: PRMCSLMQGSTLPRR
PRMLSLQQNSTVPRR

SEQ ID NO: 111546 - protein, 15 aa, Artificial Sequence
  Description of Artificial Sequence: Synthetic peptide
  Seed: PRMCSLMQGSTLPRR
PRMLSLQQPSTIPRR

SEQ ID NO: 111547 - protein, 15 aa, Artificial Sequence
  Description of Artificial Sequence: Synthetic peptide
  Seed: PRMCSLMQGSTLPRR
PRMLSLQQPSTLPRR

SEQ ID NO: 111548 - protein, 15 aa, Artificial Sequence
  Description of Artificial Sequence: Synthetic peptide
  Seed: PRMCSLMQGSTLPRR
PRMLSLQQPSTVPRR

SEQ ID NO: 111549 - protein, 15 aa, Artificial Sequence
  Description of Artificial Sequence: Synthetic peptide
  Seed: PRMCSLMQGSTLPRR
PRMLSLQQSSTAPRR

SEQ ID NO: 111550 - protein, 15 aa, Artificial Sequence
  Description of Artificial Sequence: Synthetic peptide
  Seed: PRMCSLMQGSTLPRR
PRMLSLQQSSTIPRR

SEQ ID NO: 111551 - protein, 15 aa, Artificial Sequence
  Description of Artificial Sequence: Synthetic peptide
  Seed: PRMCSLMQGSTLPRR
PRMLSLQQSSTLPRR

SEQ ID NO: 111552 - protein, 15 aa, Artificial Sequence
  Description of Artificial Sequence: Synthetic peptide
  Seed: PRMCSLMQGSTLPRR
PRMLSLQQSSTMPRR

SEQ ID NO: 111553 - protein, 15 aa, Artificial Sequence
  Description of Artificial Sequence: Synthetic peptide
  Seed: PRMCSLMQGSTLPRR
PRMLSLQQSSTTPRR

SEQ ID NO: 111554 - protein, 15 aa, Artificial Sequence
  Description of Artificial Sequence: Synthetic peptide
  Seed: PRMCSLMQGSTLPRR
PRMLSLQQSSTVPRR

SEQ ID NO: 111555 - protein, 15 aa, Artificial Sequence
  Description of Artificial Sequence: Synthetic peptide
  Seed: PRMCSLMQGSTLPRR
PRMLSLQQTSTLPRR

SEQ ID NO: 111556 - protein, 15 aa, Artificial Sequence
  Description of Artificial Sequence: Synthetic peptide
  Seed: PRMCSLMQGSTLPRR
PRMLSLSQASTAPRR

SEQ ID NO: 111557 - protein, 15 aa, Artificial Sequence
  Description of Artificial Sequence: Synthetic peptide
  Seed: PRMCSLMQGSTLPRR
PRMLSLSQASTIPRR

SEQ ID NO: 111558 - protein, 15 aa, Artificial Sequence
  Description of Artificial Sequence: Synthetic peptide
  Seed: PRMCSLMQGSTLPRR
PRMLSLSQASTLPRR

SEQ ID NO: 111559 - protein, 15 aa, Artificial Sequence
  Description of Artificial Sequence: Synthetic peptide
  Seed: PRMCSLMQGSTLPRR
PRMLSLSQASTMPRR

SEQ ID NO: 111560 - protein, 15 aa, Artificial Sequence
  Description of Artificial Sequence: Synthetic peptide
  Seed: PRMCSLMQGSTLPRR
PRMLSLSQASTVPRR

SEQ ID NO: 111561 - protein, 15 aa, Artificial Sequence
  Description of Artificial Sequence: Synthetic peptide
  Seed: PRMCSLMQGSTLPRR
PRMLSLSQGSTAPRR

SEQ ID NO: 111562 - protein, 15 aa, Artificial Sequence
  Description of Artificial Sequence: Synthetic peptide
  Seed: PRMCSLMQGSTLPRR
PRMLSLSQGSTIPRR

SEQ ID NO: 111563 - protein, 15 aa, Artificial Sequence
  Description of Artificial Sequence: Synthetic peptide
  Seed: PRMCSLMQGSTLPRR
PRMLSLSQGSTLPRR

SEQ ID NO: 111564 - protein, 15 aa, Artificial Sequence
  Description of Artificial Sequence: Synthetic peptide
  Seed: PRMCSLMQGSTLPRR
PRMLSLSQGSTVPRR

SEQ ID NO: 111565 - protein, 15 aa, Artificial Sequence
  Description of Artificial Sequence: Synthetic peptide
  Seed: PRMCSLMQGSTLPRR
PRMLSLSQPSTLPRR

SEQ ID NO: 111566 - protein, 15 aa, Artificial Sequence
  Description of Artificial Sequence: Synthetic peptide
  Seed: PRMCSLMQGSTLPRR
PRMLSLSQSSTFPRR

SEQ ID NO: 111567 - protein, 15 aa, Artificial Sequence
  Description of Artificial Sequence: Synthetic peptide
  Seed: PRMCSLMQGSTLPRR
PRMLSLSQSSTIPRR

SEQ ID NO: 111568 - protein, 15 aa, Artificial Sequence
  Description of Artificial Sequence: Synthetic peptide
  Seed: PRMCSLMQGSTLPRR
PRMLSLSQSSTLPRR

SEQ ID NO: 111569 - protein, 15 aa, Artificial Sequence
  Description of Artificial Sequence: Synthetic peptide
  Seed: PRMCSLMQGSTLPRR
PRMLSLSQSSTMPRR

SEQ ID NO: 111570 - protein, 15 aa, Artificial Sequence
  Description of Artificial Sequence: Synthetic peptide
  Seed: PRMCSLMQGSTLPRR
PRMLSLSQSSTVPRR

SEQ ID NO: 111571 - protein, 15 aa, Artificial Sequence
  Description of Artificial Sequence: Synthetic peptide
  Seed: PRMCSLMQGSTLPRR
PRMLSLTQASTAPRR

SEQ ID NO: 111572 - protein, 15 aa, Artificial Sequence
  Description of Artificial Sequence: Synthetic peptide
  Seed: PRMCSLMQGSTLPRR
PRMLSLTQASTFPRR

SEQ ID NO: 111573 - protein, 15 aa, Artificial Sequence
  Description of Artificial Sequence: Synthetic peptide
  Seed: PRMCSLMQGSTLPRR
PRMLSLTQASTIPRR

SEQ ID NO: 111574 - protein, 15 aa, Artificial Sequence
  Description of Artificial Sequence: Synthetic peptide
  Seed: PRMCSLMQGSTLPRR
PRMLSLTQASTLPRR

SEQ ID NO: 111575 - protein, 15 aa, Artificial Sequence
  Description of Artificial Sequence: Synthetic peptide
  Seed: PRMCSLMQGSTLPRR
PRMLSLTQASTMPRR

SEQ ID NO: 111576 - protein, 15 aa, Artificial Sequence
  Description of Artificial Sequence: Synthetic peptide
  Seed: PRMCSLMQGSTLPRR
PRMLSLTQASTVPRR

SEQ ID NO: 111577 - protein, 15 aa, Artificial Sequence
  Description of Artificial Sequence: Synthetic peptide
  Seed: PRMCSLMQGSTLPRR
PRMLSLTQFSTLPRR

SEQ ID NO: 111578 - protein, 15 aa, Artificial Sequence
  Description of Artificial Sequence: Synthetic peptide
  Seed: PRMCSLMQGSTLPRR
PRMLSLTQGSTIPRR

SEQ ID NO: 111579 - protein, 15 aa, Artificial Sequence
  Description of Artificial Sequence: Synthetic peptide
  Seed: PRMCSLMQGSTLPRR
PRMLSLTQGSTLPRR

SEQ ID NO: 111580 - protein, 15 aa, Artificial Sequence
  Description of Artificial Sequence: Synthetic peptide
  Seed: PRMCSLMQGSTLPRR
PRMLSLTQGSTVPRR

SEQ ID NO: 111581 - protein, 15 aa, Artificial Sequence
  Description of Artificial Sequence: Synthetic peptide
  Seed: PRMCSLMQGSTLPRR
PRMLSLTQPSTIPRR

SEQ ID NO: 111582 - protein, 15 aa, Artificial Sequence
  Description of Artificial Sequence: Synthetic peptide
  Seed: PRMCSLMQGSTLPRR
PRMLSLTQPSTLPRR

SEQ ID NO: 111583 - protein, 15 aa, Artificial Sequence
  Description of Artificial Sequence: Synthetic peptide
  Seed: PRMCSLMQGSTLPRR
PRMLSLTQSSTFPRR

SEQ ID NO: 111584 - protein, 15 aa, Artificial Sequence
  Description of Artificial Sequence: Synthetic peptide
  Seed: PRMCSLMQGSTLPRR
PRMLSLTQSSTIPRR

SEQ ID NO: 111585 - protein, 15 aa, Artificial Sequence
  Description of Artificial Sequence: Synthetic peptide
  Seed: PRMCSLMQGSTLPRR
PRMLSLTQSSTLPRR

SEQ ID NO: 111586 - protein, 15 aa, Artificial Sequence
  Description of Artificial Sequence: Synthetic peptide
  Seed: PRMCSLMQGSTLPRR
PRMLSLTQSSTMPRR

SEQ ID NO: 111587 - protein, 15 aa, Artificial Sequence
  Description of Artificial Sequence: Synthetic peptide
  Seed: PRMCSLMQGSTLPRR
PRMLSLTQSSTVPRR

SEQ ID NO: 111588 - protein, 15 aa, Artificial Sequence
  Description of Artificial Sequence: Synthetic peptide
  Seed: PRMCSLMQGSTLPRR
PRMLSLTQTSTIPRR

SEQ ID NO: 111589 - protein, 15 aa, Artificial Sequence
  Description of Artificial Sequence: Synthetic peptide
  Seed: PRMCSLMQGSTLPRR
PRMLSLTQTSTLPRR

SEQ ID NO: 111590 - protein, 15 aa, Artificial Sequence
  Description of Artificial Sequence: Synthetic peptide
  Seed: PRMCSLMQGSTLPRR
PRMLSLVQASTAPRR

SEQ ID NO: 111591 - protein, 15 aa, Artificial Sequence
  Description of Artificial Sequence: Synthetic peptide
  Seed: PRMCSLMQGSTLPRR
PRMLSLVQASTIPRR

SEQ ID NO: 111592 - protein, 15 aa, Artificial Sequence
  Description of Artificial Sequence: Synthetic peptide
  Seed: PRMCSLMQGSTLPRR
PRMLSLVQASTLPRR

SEQ ID NO: 111593 - protein, 15 aa, Artificial Sequence
  Description of Artificial Sequence: Synthetic peptide
  Seed: PRMCSLMQGSTLPRR
PRMLSLVQASTMPRR

SEQ ID NO: 111594 - protein, 15 aa, Artificial Sequence
  Description of Artificial Sequence: Synthetic peptide
  Seed: PRMCSLMQGSTLPRR
PRMLSLVQASTNPRR

SEQ ID NO: 111595 - protein, 15 aa, Artificial Sequence
  Description of Artificial Sequence: Synthetic peptide
  Seed: PRMCSLMQGSTLPRR
PRMLSLVQASTSPRR

SEQ ID NO: 111596 - protein, 15 aa, Artificial Sequence
  Description of Artificial Sequence: Synthetic peptide
  Seed: PRMCSLMQGSTLPRR
PRMLSLVQASTTPRR

SEQ ID NO: 111597 - protein, 15 aa, Artificial Sequence
  Description of Artificial Sequence: Synthetic peptide
  Seed: PRMCSLMQGSTLPRR
PRMLSLVQASTVPRR

SEQ ID NO: 111598 - protein, 15 aa, Artificial Sequence
  Description of Artificial Sequence: Synthetic peptide
  Seed: PRMCSLMQGSTLPRR
PRMLSLVQFSTLPRR

SEQ ID NO: 111599 - protein, 15 aa, Artificial Sequence
  Description of Artificial Sequence: Synthetic peptide
  Seed: PRMCSLMQGSTLPRR
PRMLSLVQGSTAPRR

SEQ ID NO: 111600 - protein, 15 aa, Artificial Sequence
  Description of Artificial Sequence: Synthetic peptide
  Seed: PRMCSLMQGSTLPRR
PRMLSLVQGSTIPRR

SEQ ID NO: 111601 - protein, 15 aa, Artificial Sequence
  Description of Artificial Sequence: Synthetic peptide
  Seed: PRMCSLMQGSTLPRR
PRMLSLVQGSTLPRR

SEQ ID NO: 111602 - protein, 15 aa, Artificial Sequence
  Description of Artificial Sequence: Synthetic peptide
  Seed: PRMCSLMQGSTLPRR
PRMLSLVQGSTMPRR

SEQ ID NO: 111603 - protein, 15 aa, Artificial Sequence
  Description of Artificial Sequence: Synthetic peptide
  Seed: PRMCSLMQGSTLPRR
PRMLSLVQGSTSPRR

SEQ ID NO: 111604 - protein, 15 aa, Artificial Sequence
  Description of Artificial Sequence: Synthetic peptide
  Seed: PRMCSLMQGSTLPRR
PRMLSLVQGSTTPRR

SEQ ID NO: 111605 - protein, 15 aa, Artificial Sequence
  Description of Artificial Sequence: Synthetic peptide
  Seed: PRMCSLMQGSTLPRR
PRMLSLVQGSTVPRR

SEQ ID NO: 111606 - protein, 15 aa, Artificial Sequence
  Description of Artificial Sequence: Synthetic peptide
  Seed: PRMCSLMQGSTLPRR
PRMLSLVQNSTLPRR

SEQ ID NO: 111607 - protein, 15 aa, Artificial Sequence
  Description of Artificial Sequence: Synthetic peptide
  Seed: PRMCSLMQGSTLPRR
PRMLSLVQNSTVPRR

SEQ ID NO: 111608 - protein, 15 aa, Artificial Sequence
  Description of Artificial Sequence: Synthetic peptide
  Seed: PRMCSLMQGSTLPRR
PRMLSLVQPSTAPRR

SEQ ID NO: 111609 - protein, 15 aa, Artificial Sequence
  Description of Artificial Sequence: Synthetic peptide
  Seed: PRMCSLMQGSTLPRR
PRMLSLVQPSTIPRR

SEQ ID NO: 111610 - protein, 15 aa, Artificial Sequence
  Description of Artificial Sequence: Synthetic peptide
  Seed: PRMCSLMQGSTLPRR
PRMLSLVQPSTLPRR

SEQ ID NO: 111611 - protein, 15 aa, Artificial Sequence
  Description of Artificial Sequence: Synthetic peptide
  Seed: PRMCSLMQGSTLPRR
PRMLSLVQPSTVPRR

SEQ ID NO: 111612 - protein, 15 aa, Artificial Sequence
  Description of Artificial Sequence: Synthetic peptide
  Seed: PRMCSLMQGSTLPRR
PRMLSLVQSSTAPRR

SEQ ID NO: 111613 - protein, 15 aa, Artificial Sequence
  Description of Artificial Sequence: Synthetic peptide
  Seed: PRMCSLMQGSTLPRR
PRMLSLVQSSTIPRR

SEQ ID NO: 111614 - protein, 15 aa, Artificial Sequence
  Description of Artificial Sequence: Synthetic peptide
  Seed: PRMCSLMQGSTLPRR
PRMLSLVQSSTLPRR

SEQ ID NO: 111615 - protein, 15 aa, Artificial Sequence
  Description of Artificial Sequence: Synthetic peptide
  Seed: PRMCSLMQGSTLPRR
PRMLSLVQSSTMPRR

SEQ ID NO: 111616 - protein, 15 aa, Artificial Sequence
  Description of Artificial Sequence: Synthetic peptide
  Seed: PRMCSLMQGSTLPRR
PRMLSLVQSSTTPRR

SEQ ID NO: 111617 - protein, 15 aa, Artificial Sequence
  Description of Artificial Sequence: Synthetic peptide
  Seed: PRMCSLMQGSTLPRR
PRMLSLVQSSTVPRR

SEQ ID NO: 111618 - protein, 15 aa, Artificial Sequence
  Description of Artificial Sequence: Synthetic peptide
  Seed: PRMCSLMQGSTLPRR
PRMLSLVQTSTLPRR

SEQ ID NO: 111619 - protein, 15 aa, Artificial Sequence
  Description of Artificial Sequence: Synthetic peptide
  Seed: PRMCSLMQGSTLPRR
PRMLSLVQTSTVPRR

SEQ ID NO: 111620 - protein, 15 aa, Artificial Sequence
  Description of Artificial Sequence: Synthetic peptide
  Seed: PRMCSLMQGSTLPRR
PRMLSLWQASTLPRR

SEQ ID NO: 111621 - protein, 15 aa, Artificial Sequence
  Description of Artificial Sequence: Synthetic peptide
  Seed: PRMCSLMQGSTLPRR
PRMLSLWQNSTIPRR

SEQ ID NO: 111622 - protein, 15 aa, Artificial Sequence
  Description of Artificial Sequence: Synthetic peptide
  Seed: PRMCSLMQGSTLPRR
PRMLSLWQNSTLPRR

SEQ ID NO: 111623 - protein, 15 aa, Artificial Sequence
  Description of Artificial Sequence: Synthetic peptide
  Seed: PRMCSLMQGSTLPRR
PRMLSLWQNSTVPRR

SEQ ID NO: 111624 - protein, 15 aa, Artificial Sequence
  Description of Artificial Sequence: Synthetic peptide
  Seed: PRMCSLMQGSTLPRR
PRMLSLWQSSTAPRR

SEQ ID NO: 111625 - protein, 15 aa, Artificial Sequence
  Description of Artificial Sequence: Synthetic peptide
  Seed: PRMCSLMQGSTLPRR
PRMLSLWQSSTIPRR

SEQ ID NO: 111626 - protein, 15 aa, Artificial Sequence
  Description of Artificial Sequence: Synthetic peptide
  Seed: PRMCSLMQGSTLPRR
PRMLSLWQSSTLPRR

SEQ ID NO: 111627 - protein, 15 aa, Artificial Sequence
  Description of Artificial Sequence: Synthetic peptide
  Seed: PRMCSLMQGSTLPRR
PRMLSLWQSSTVPRR

SEQ ID NO: 111628 - protein, 15 aa, Artificial Sequence
  Description of Artificial Sequence: Synthetic peptide
  Seed: PRMCSLMQGSTLPRR
PRMLSLYQASTAPRR

SEQ ID NO: 111629 - protein, 15 aa, Artificial Sequence
  Description of Artificial Sequence: Synthetic peptide
  Seed: PRMCSLMQGSTLPRR
PRMLSLYQASTIPRR

SEQ ID NO: 111630 - protein, 15 aa, Artificial Sequence
  Description of Artificial Sequence: Synthetic peptide
  Seed: PRMCSLMQGSTLPRR
PRMLSLYQASTLPRR

SEQ ID NO: 111631 - protein, 15 aa, Artificial Sequence
  Description of Artificial Sequence: Synthetic peptide
  Seed: PRMCSLMQGSTLPRR
PRMLSLYQASTMPRR

SEQ ID NO: 111632 - protein, 15 aa, Artificial Sequence
  Description of Artificial Sequence: Synthetic peptide
  Seed: PRMCSLMQGSTLPRR
PRMLSLYQASTVPRR

SEQ ID NO: 111633 - protein, 15 aa, Artificial Sequence
  Description of Artificial Sequence: Synthetic peptide
  Seed: PRMCSLMQGSTLPRR
PRMLSLYQGSTAPRR

SEQ ID NO: 111634 - protein, 15 aa, Artificial Sequence
  Description of Artificial Sequence: Synthetic peptide
  Seed: PRMCSLMQGSTLPRR
PRMLSLYQGSTIPRR

SEQ ID NO: 111635 - protein, 15 aa, Artificial Sequence
  Description of Artificial Sequence: Synthetic peptide
  Seed: PRMCSLMQGSTLPRR
PRMLSLYQGSTLPRR

SEQ ID NO: 111636 - protein, 15 aa, Artificial Sequence
  Description of Artificial Sequence: Synthetic peptide
  Seed: PRMCSLMQGSTLPRR
PRMLSLYQGSTMPRR

SEQ ID NO: 111637 - protein, 15 aa, Artificial Sequence
  Description of Artificial Sequence: Synthetic peptide
  Seed: PRMCSLMQGSTLPRR
PRMLSLYQGSTVPRR

SEQ ID NO: 111638 - protein, 15 aa, Artificial Sequence
  Description of Artificial Sequence: Synthetic peptide
  Seed: PRMCSLMQGSTLPRR
PRMLSLYQNSTAPRR

SEQ ID NO: 111639 - protein, 15 aa, Artificial Sequence
  Description of Artificial Sequence: Synthetic peptide
  Seed: PRMCSLMQGSTLPRR
PRMLSLYQNSTIPRR

SEQ ID NO: 111640 - protein, 15 aa, Artificial Sequence
  Description of Artificial Sequence: Synthetic peptide
  Seed: PRMCSLMQGSTLPRR
PRMLSLYQNSTLPRR

SEQ ID NO: 111641 - protein, 15 aa, Artificial Sequence
  Description of Artificial Sequence: Synthetic peptide
  Seed: PRMCSLMQGSTLPRR
PRMLSLYQNSTMPRR

SEQ ID NO: 111642 - protein, 15 aa, Artificial Sequence
  Description of Artificial Sequence: Synthetic peptide
  Seed: PRMCSLMQGSTLPRR
PRMLSLYQNSTSPRR

SEQ ID NO: 111643 - protein, 15 aa, Artificial Sequence
  Description of Artificial Sequence: Synthetic peptide
  Seed: PRMCSLMQGSTLPRR
PRMLSLYQNSTTPRR

SEQ ID NO: 111644 - protein, 15 aa, Artificial Sequence
  Description of Artificial Sequence: Synthetic peptide
  Seed: PRMCSLMQGSTLPRR
PRMLSLYQNSTVPRR

SEQ ID NO: 111645 - protein, 15 aa, Artificial Sequence
  Description of Artificial Sequence: Synthetic peptide
  Seed: PRMCSLMQGSTLPRR
PRMLSLYQSSTAPRR

SEQ ID NO: 111646 - protein, 15 aa, Artificial Sequence
  Description of Artificial Sequence: Synthetic peptide
  Seed: PRMCSLMQGSTLPRR
PRMLSLYQSSTFPRR

SEQ ID NO: 111647 - protein, 15 aa, Artificial Sequence
  Description of Artificial Sequence: Synthetic peptide
  Seed: PRMCSLMQGSTLPRR
PRMLSLYQSSTIPRR

SEQ ID NO: 111648 - protein, 15 aa, Artificial Sequence
  Description of Artificial Sequence: Synthetic peptide
  Seed: PRMCSLMQGSTLPRR
PRMLSLYQSSTLPRR

SEQ ID NO: 111649 - protein, 15 aa, Artificial Sequence
  Description of Artificial Sequence: Synthetic peptide
  Seed: PRMCSLMQGSTLPRR
PRMLSLYQSSTMPRR

SEQ ID NO: 111650 - protein, 15 aa, Artificial Sequence
  Description of Artificial Sequence: Synthetic peptide
  Seed: PRMCSLMQGSTLPRR
PRMLSLYQSSTSPRR

SEQ ID NO: 111651 - protein, 15 aa, Artificial Sequence
  Description of Artificial Sequence: Synthetic peptide
  Seed: PRMCSLMQGSTLPRR
PRMLSLYQSSTTPRR

SEQ ID NO: 111652 - protein, 15 aa, Artificial Sequence
  Description of Artificial Sequence: Synthetic peptide
  Seed: PRMCSLMQGSTLPRR
PRMLSLYQSSTVPRR

SEQ ID NO: 111653 - protein, 15 aa, Artificial Sequence
  Description of Artificial Sequence: Synthetic peptide
  Seed: PRMCSLMQGSTLPRR
PRMLSLYQTSTAPRR

SEQ ID NO: 111654 - protein, 15 aa, Artificial Sequence
  Description of Artificial Sequence: Synthetic peptide
  Seed: PRMCSLMQGSTLPRR
PRMLSLYQTSTIPRR

SEQ ID NO: 111655 - protein, 15 aa, Artificial Sequence
  Description of Artificial Sequence: Synthetic peptide
  Seed: PRMCSLMQGSTLPRR
PRMLSLYQTSTLPRR

SEQ ID NO: 111656 - protein, 15 aa, Artificial Sequence
  Description of Artificial Sequence: Synthetic peptide
  Seed: PRMCSLMQGSTLPRR
PRMLSLYQTSTVPRR

SEQ ID NO: 111657 - protein, 15 aa, Artificial Sequence
  Description of Artificial Sequence: Synthetic peptide
  Seed: PRMCSLMQGSTLPRR
PRMMSLAQASTAPRR

SEQ ID NO: 111658 - protein, 15 aa, Artificial Sequence
  Description of Artificial Sequence: Synthetic peptide
  Seed: PRMCSLMQGSTLPRR
PRMMSLAQASTIPRR

SEQ ID NO: 111659 - protein, 15 aa, Artificial Sequence
  Description of Artificial Sequence: Synthetic peptide
  Seed: PRMCSLMQGSTLPRR
PRMMSLAQASTLPRR

SEQ ID NO: 111660 - protein, 15 aa, Artificial Sequence
  Description of Artificial Sequence: Synthetic peptide
  Seed: PRMCSLMQGSTLPRR
PRMMSLAQASTMPRR

SEQ ID NO: 111661 - protein, 15 aa, Artificial Sequence
  Description of Artificial Sequence: Synthetic peptide
  Seed: PRMCSLMQGSTLPRR
PRMMSLAQASTTPRR

SEQ ID NO: 111662 - protein, 15 aa, Artificial Sequence
  Description of Artificial Sequence: Synthetic peptide
  Seed: PRMCSLMQGSTLPRR
PRMMSLAQASTVPRR

SEQ ID NO: 111663 - protein, 15 aa, Artificial Sequence
  Description of Artificial Sequence: Synthetic peptide
  Seed: PRMCSLMQGSTLPRR
PRMMSLAQGSTAPRR

SEQ ID NO: 111664 - protein, 15 aa, Artificial Sequence
  Description of Artificial Sequence: Synthetic peptide
  Seed: PRMCSLMQGSTLPRR
PRMMSLAQGSTIPRR

SEQ ID NO: 111665 - protein, 15 aa, Artificial Sequence
  Description of Artificial Sequence: Synthetic peptide
  Seed: PRMCSLMQGSTLPRR
PRMMSLAQGSTLPRR

SEQ ID NO: 111666 - protein, 15 aa, Artificial Sequence
  Description of Artificial Sequence: Synthetic peptide
  Seed: PRMCSLMQGSTLPRR
PRMMSLAQGSTMPRR

SEQ ID NO: 111667 - protein, 15 aa, Artificial Sequence
  Description of Artificial Sequence: Synthetic peptide
  Seed: PRMCSLMQGSTLPRR
PRMMSLAQGSTVPRR

SEQ ID NO: 111668 - protein, 15 aa, Artificial Sequence
  Description of Artificial Sequence: Synthetic peptide
  Seed: PRMCSLMQGSTLPRR
PRMMSLAQPSTIPRR

SEQ ID NO: 111669 - protein, 15 aa, Artificial Sequence
  Description of Artificial Sequence: Synthetic peptide
  Seed: PRMCSLMQGSTLPRR
PRMMSLAQPSTLPRR

SEQ ID NO: 111670 - protein, 15 aa, Artificial Sequence
  Description of Artificial Sequence: Synthetic peptide
  Seed: PRMCSLMQGSTLPRR
PRMMSLAQPSTVPRR

SEQ ID NO: 111671 - protein, 15 aa, Artificial Sequence
  Description of Artificial Sequence: Synthetic peptide
  Seed: PRMCSLMQGSTLPRR
PRMMSLAQSSTAPRR

SEQ ID NO: 111672 - protein, 15 aa, Artificial Sequence
  Description of Artificial Sequence: Synthetic peptide
  Seed: PRMCSLMQGSTLPRR
PRMMSLAQSSTIPRR

SEQ ID NO: 111673 - protein, 15 aa, Artificial Sequence
  Description of Artificial Sequence: Synthetic peptide
  Seed: PRMCSLMQGSTLPRR
PRMMSLAQSSTLPRR

SEQ ID NO: 111674 - protein, 15 aa, Artificial Sequence
  Description of Artificial Sequence: Synthetic peptide
  Seed: PRMCSLMQGSTLPRR
PRMMSLAQSSTMPRR

SEQ ID NO: 111675 - protein, 15 aa, Artificial Sequence
  Description of Artificial Sequence: Synthetic peptide
  Seed: PRMCSLMQGSTLPRR
PRMMSLAQSSTVPRR

SEQ ID NO: 111676 - protein, 15 aa, Artificial Sequence
  Description of Artificial Sequence: Synthetic peptide
  Seed: PRMCSLMQGSTLPRR
PRMMSLEQASTLPRR

SEQ ID NO: 111677 - protein, 15 aa, Artificial Sequence
  Description of Artificial Sequence: Synthetic peptide
  Seed: PRMCSLMQGSTLPRR
PRMMSLFQASTAPRR

SEQ ID NO: 111678 - protein, 15 aa, Artificial Sequence
  Description of Artificial Sequence: Synthetic peptide
  Seed: PRMCSLMQGSTLPRR
PRMMSLFQASTIPRR

SEQ ID NO: 111679 - protein, 15 aa, Artificial Sequence
  Description of Artificial Sequence: Synthetic peptide
  Seed: PRMCSLMQGSTLPRR
PRMMSLFQASTLPRR

SEQ ID NO: 111680 - protein, 15 aa, Artificial Sequence
  Description of Artificial Sequence: Synthetic peptide
  Seed: PRMCSLMQGSTLPRR
PRMMSLFQASTVPRR

SEQ ID NO: 111681 - protein, 15 aa, Artificial Sequence
  Description of Artificial Sequence: Synthetic peptide
  Seed: PRMCSLMQGSTLPRR
PRMMSLFQGSTLPRR

SEQ ID NO: 111682 - protein, 15 aa, Artificial Sequence
  Description of Artificial Sequence: Synthetic peptide
  Seed: PRMCSLMQGSTLPRR
PRMMSLFQNSTIPRR

SEQ ID NO: 111683 - protein, 15 aa, Artificial Sequence
  Description of Artificial Sequence: Synthetic peptide
  Seed: PRMCSLMQGSTLPRR
PRMMSLFQNSTLPRR

SEQ ID NO: 111684 - protein, 15 aa, Artificial Sequence
  Description of Artificial Sequence: Synthetic peptide
  Seed: PRMCSLMQGSTLPRR
PRMMSLFQNSTVPRR

SEQ ID NO: 111685 - protein, 15 aa, Artificial Sequence
  Description of Artificial Sequence: Synthetic peptide
  Seed: PRMCSLMQGSTLPRR
PRMMSLFQSSTAPRR

SEQ ID NO: 111686 - protein, 15 aa, Artificial Sequence
  Description of Artificial Sequence: Synthetic peptide
  Seed: PRMCSLMQGSTLPRR
PRMMSLFQSSTIPRR

SEQ ID NO: 111687 - protein, 15 aa, Artificial Sequence
  Description of Artificial Sequence: Synthetic peptide
  Seed: PRMCSLMQGSTLPRR
PRMMSLFQSSTLPRR

SEQ ID NO: 111688 - protein, 15 aa, Artificial Sequence
  Description of Artificial Sequence: Synthetic peptide
  Seed: PRMCSLMQGSTLPRR
PRMMSLFQSSTMPRR

SEQ ID NO: 111689 - protein, 15 aa, Artificial Sequence
  Description of Artificial Sequence: Synthetic peptide
  Seed: PRMCSLMQGSTLPRR
PRMMSLFQSSTVPRR

SEQ ID NO: 111690 - protein, 15 aa, Artificial Sequence
  Description of Artificial Sequence: Synthetic peptide
  Seed: PRMCSLMQGSTLPRR
PRMMSLGQASTLPRR

SEQ ID NO: 111691 - protein, 15 aa, Artificial Sequence
  Description of Artificial Sequence: Synthetic peptide
  Seed: PRMCSLMQGSTLPRR
PRMMSLIQASTAPRR

SEQ ID NO: 111692 - protein, 15 aa, Artificial Sequence
  Description of Artificial Sequence: Synthetic peptide
  Seed: PRMCSLMQGSTLPRR
PRMMSLIQASTIPRR

SEQ ID NO: 111693 - protein, 15 aa, Artificial Sequence
  Description of Artificial Sequence: Synthetic peptide
  Seed: PRMCSLMQGSTLPRR
PRMMSLIQASTLPRR

SEQ ID NO: 111694 - protein, 15 aa, Artificial Sequence
  Description of Artificial Sequence: Synthetic peptide
  Seed: PRMCSLMQGSTLPRR
PRMMSLIQASTMPRR

SEQ ID NO: 111695 - protein, 15 aa, Artificial Sequence
  Description of Artificial Sequence: Synthetic peptide
  Seed: PRMCSLMQGSTLPRR
PRMMSLIQASTNPRR

SEQ ID NO: 111696 - protein, 15 aa, Artificial Sequence
  Description of Artificial Sequence: Synthetic peptide
  Seed: PRMCSLMQGSTLPRR
PRMMSLIQASTSPRR

SEQ ID NO: 111697 - protein, 15 aa, Artificial Sequence
  Description of Artificial Sequence: Synthetic peptide
  Seed: PRMCSLMQGSTLPRR
PRMMSLIQASTTPRR

SEQ ID NO: 111698 - protein, 15 aa, Artificial Sequence
  Description of Artificial Sequence: Synthetic peptide
  Seed: PRMCSLMQGSTLPRR
PRMMSLIQASTVPRR

SEQ ID NO: 111699 - protein, 15 aa, Artificial Sequence
  Description of Artificial Sequence: Synthetic peptide
  Seed: PRMCSLMQGSTLPRR
PRMMSLIQGSTAPRR

SEQ ID NO: 111700 - protein, 15 aa, Artificial Sequence
  Description of Artificial Sequence: Synthetic peptide
  Seed: PRMCSLMQGSTLPRR
PRMMSLIQGSTIPRR

SEQ ID NO: 111701 - protein, 15 aa, Artificial Sequence
  Description of Artificial Sequence: Synthetic peptide
  Seed: PRMCSLMQGSTLPRR
PRMMSLIQGSTLPRR

SEQ ID NO: 111702 - protein, 15 aa, Artificial Sequence
  Description of Artificial Sequence: Synthetic peptide
  Seed: PRMCSLMQGSTLPRR
PRMMSLIQGSTMPRR

SEQ ID NO: 111703 - protein, 15 aa, Artificial Sequence
  Description of Artificial Sequence: Synthetic peptide
  Seed: PRMCSLMQGSTLPRR
PRMMSLIQGSTSPRR

SEQ ID NO: 111704 - protein, 15 aa, Artificial Sequence
  Description of Artificial Sequence: Synthetic peptide
  Seed: PRMCSLMQGSTLPRR
PRMMSLIQGSTTPRR

SEQ ID NO: 111705 - protein, 15 aa, Artificial Sequence
  Description of Artificial Sequence: Synthetic peptide
  Seed: PRMCSLMQGSTLPRR
PRMMSLIQGSTVPRR

SEQ ID NO: 111706 - protein, 15 aa, Artificial Sequence
  Description of Artificial Sequence: Synthetic peptide
  Seed: PRMCSLMQGSTLPRR
PRMMSLIQISTAPRR

SEQ ID NO: 111707 - protein, 15 aa, Artificial Sequence
  Description of Artificial Sequence: Synthetic peptide
  Seed: PRMCSLMQGSTLPRR
PRMMSLIQISTSPRR

SEQ ID NO: 111708 - protein, 15 aa, Artificial Sequence
  Description of Artificial Sequence: Synthetic peptide
  Seed: PRMCSLMQGSTLPRR
PRMMSLIQNSTAPRR

SEQ ID NO: 111709 - protein, 15 aa, Artificial Sequence
  Description of Artificial Sequence: Synthetic peptide
  Seed: PRMCSLMQGSTLPRR
PRMMSLIQNSTLPRR

SEQ ID NO: 111710 - protein, 15 aa, Artificial Sequence
  Description of Artificial Sequence: Synthetic peptide
  Seed: PRMCSLMQGSTLPRR
PRMMSLIQNSTVPRR

SEQ ID NO: 111711 - protein, 15 aa, Artificial Sequence
  Description of Artificial Sequence: Synthetic peptide
  Seed: PRMCSLMQGSTLPRR
PRMMSLIQPSTAPRR

SEQ ID NO: 111712 - protein, 15 aa, Artificial Sequence
  Description of Artificial Sequence: Synthetic peptide
  Seed: PRMCSLMQGSTLPRR
PRMMSLIQPSTIPRR

SEQ ID NO: 111713 - protein, 15 aa, Artificial Sequence
  Description of Artificial Sequence: Synthetic peptide
  Seed: PRMCSLMQGSTLPRR
PRMMSLIQPSTLPRR

SEQ ID NO: 111714 - protein, 15 aa, Artificial Sequence
  Description of Artificial Sequence: Synthetic peptide
  Seed: PRMCSLMQGSTLPRR
PRMMSLIQPSTMPRR

SEQ ID NO: 111715 - protein, 15 aa, Artificial Sequence
  Description of Artificial Sequence: Synthetic peptide
  Seed: PRMCSLMQGSTLPRR
PRMMSLIQPSTNPRR

SEQ ID NO: 111716 - protein, 15 aa, Artificial Sequence
  Description of Artificial Sequence: Synthetic peptide
  Seed: PRMCSLMQGSTLPRR
PRMMSLIQPSTSPRR

SEQ ID NO: 111717 - protein, 15 aa, Artificial Sequence
  Description of Artificial Sequence: Synthetic peptide
  Seed: PRMCSLMQGSTLPRR
PRMMSLIQPSTVPRR

SEQ ID NO: 111718 - protein, 15 aa, Artificial Sequence
  Description of Artificial Sequence: Synthetic peptide
  Seed: PRMCSLMQGSTLPRR
PRMMSLIQSSTAPRR

SEQ ID NO: 111719 - protein, 15 aa, Artificial Sequence
  Description of Artificial Sequence: Synthetic peptide
  Seed: PRMCSLMQGSTLPRR
PRMMSLIQSSTIPRR

SEQ ID NO: 111720 - protein, 15 aa, Artificial Sequence
  Description of Artificial Sequence: Synthetic peptide
  Seed: PRMCSLMQGSTLPRR
PRMMSLIQSSTLPRR

SEQ ID NO: 111721 - protein, 15 aa, Artificial Sequence
  Description of Artificial Sequence: Synthetic peptide
  Seed: PRMCSLMQGSTLPRR
PRMMSLIQSSTMPRR

SEQ ID NO: 111722 - protein, 15 aa, Artificial Sequence
  Description of Artificial Sequence: Synthetic peptide
  Seed: PRMCSLMQGSTLPRR
PRMMSLIQSSTNPRR

SEQ ID NO: 111723 - protein, 15 aa, Artificial Sequence
  Description of Artificial Sequence: Synthetic peptide
  Seed: PRMCSLMQGSTLPRR
PRMMSLIQSSTSPRR

SEQ ID NO: 111724 - protein, 15 aa, Artificial Sequence
  Description of Artificial Sequence: Synthetic peptide
  Seed: PRMCSLMQGSTLPRR
PRMMSLIQSSTTPRR

SEQ ID NO: 111725 - protein, 15 aa, Artificial Sequence
  Description of Artificial Sequence: Synthetic peptide
  Seed: PRMCSLMQGSTLPRR
PRMMSLIQSSTVPRR

SEQ ID NO: 111726 - protein, 15 aa, Artificial Sequence
  Description of Artificial Sequence: Synthetic peptide
  Seed: PRMCSLMQGSTLPRR
PRMMSLIQTSTAPRR

SEQ ID NO: 111727 - protein, 15 aa, Artificial Sequence
  Description of Artificial Sequence: Synthetic peptide
  Seed: PRMCSLMQGSTLPRR
PRMMSLIQTSTIPRR

SEQ ID NO: 111728 - protein, 15 aa, Artificial Sequence
  Description of Artificial Sequence: Synthetic peptide
  Seed: PRMCSLMQGSTLPRR
PRMMSLIQTSTLPRR

SEQ ID NO: 111729 - protein, 15 aa, Artificial Sequence
  Description of Artificial Sequence: Synthetic peptide
  Seed: PRMCSLMQGSTLPRR
PRMMSLIQTSTVPRR

SEQ ID NO: 111730 - protein, 15 aa, Artificial Sequence
  Description of Artificial Sequence: Synthetic peptide
  Seed: PRMCSLMQGSTLPRR
PRMMSLIQVSTAPRR

SEQ ID NO: 111731 - protein, 15 aa, Artificial Sequence
  Description of Artificial Sequence: Synthetic peptide
  Seed: PRMCSLMQGSTLPRR
PRMMSLIQVSTNPRR

SEQ ID NO: 111732 - protein, 15 aa, Artificial Sequence
  Description of Artificial Sequence: Synthetic peptide
  Seed: PRMCSLMQGSTLPRR
PRMMSLIQVSTSPRR

SEQ ID NO: 111733 - protein, 15 aa, Artificial Sequence
  Description of Artificial Sequence: Synthetic peptide
  Seed: PRMCSLMQGSTLPRR
PRMMSLLQASTAPRR

SEQ ID NO: 111734 - protein, 15 aa, Artificial Sequence
  Description of Artificial Sequence: Synthetic peptide
  Seed: PRMCSLMQGSTLPRR
PRMMSLLQASTCPRR

SEQ ID NO: 111735 - protein, 15 aa, Artificial Sequence
  Description of Artificial Sequence: Synthetic peptide
  Seed: PRMCSLMQGSTLPRR
PRMMSLLQASTFPRR

SEQ ID NO: 111736 - protein, 15 aa, Artificial Sequence
  Description of Artificial Sequence: Synthetic peptide
  Seed: PRMCSLMQGSTLPRR
PRMMSLLQASTGPRR

SEQ ID NO: 111737 - protein, 15 aa, Artificial Sequence
  Description of Artificial Sequence: Synthetic peptide
  Seed: PRMCSLMQGSTLPRR
PRMMSLLQASTIPRR

SEQ ID NO: 111738 - protein, 15 aa, Artificial Sequence
  Description of Artificial Sequence: Synthetic peptide
  Seed: PRMCSLMQGSTLPRR
PRMMSLLQASTLPRR

SEQ ID NO: 111739 - protein, 15 aa, Artificial Sequence
  Description of Artificial Sequence: Synthetic peptide
  Seed: PRMCSLMQGSTLPRR
PRMMSLLQASTMPRR

SEQ ID NO: 111740 - protein, 15 aa, Artificial Sequence
  Description of Artificial Sequence: Synthetic peptide
  Seed: PRMCSLMQGSTLPRR
PRMMSLLQASTNPRR

SEQ ID NO: 111741 - protein, 15 aa, Artificial Sequence
  Description of Artificial Sequence: Synthetic peptide
  Seed: PRMCSLMQGSTLPRR
PRMMSLLQASTSPRR

SEQ ID NO: 111742 - protein, 15 aa, Artificial Sequence
  Description of Artificial Sequence: Synthetic peptide
  Seed: PRMCSLMQGSTLPRR
PRMMSLLQASTTPRR

SEQ ID NO: 111743 - protein, 15 aa, Artificial Sequence
  Description of Artificial Sequence: Synthetic peptide
  Seed: PRMCSLMQGSTLPRR
PRMMSLLQASTVPRR

SEQ ID NO: 111744 - protein, 15 aa, Artificial Sequence
  Description of Artificial Sequence: Synthetic peptide
  Seed: PRMCSLMQGSTLPRR
PRMMSLLQFSTLPRR

SEQ ID NO: 111745 - protein, 15 aa, Artificial Sequence
  Description of Artificial Sequence: Synthetic peptide
  Seed: PRMCSLMQGSTLPRR
PRMMSLLQGSTAPRR

SEQ ID NO: 111746 - protein, 15 aa, Artificial Sequence
  Description of Artificial Sequence: Synthetic peptide
  Seed: PRMCSLMQGSTLPRR
PRMMSLLQGSTCPRR

SEQ ID NO: 111747 - protein, 15 aa, Artificial Sequence
  Description of Artificial Sequence: Synthetic peptide
  Seed: PRMCSLMQGSTLPRR
PRMMSLLQGSTFPRR

SEQ ID NO: 111748 - protein, 15 aa, Artificial Sequence
  Description of Artificial Sequence: Synthetic peptide
  Seed: PRMCSLMQGSTLPRR
PRMMSLLQGSTGPRR

SEQ ID NO: 111749 - protein, 15 aa, Artificial Sequence
  Description of Artificial Sequence: Synthetic peptide
  Seed: PRMCSLMQGSTLPRR
PRMMSLLQGSTIPRR

SEQ ID NO: 111750 - protein, 15 aa, Artificial Sequence
  Description of Artificial Sequence: Synthetic peptide
  Seed: PRMCSLMQGSTLPRR
PRMMSLLQGSTLPRR

SEQ ID NO: 111751 - protein, 15 aa, Artificial Sequence
  Description of Artificial Sequence: Synthetic peptide
  Seed: PRMCSLMQGSTLPRR
PRMMSLLQGSTMPRR

SEQ ID NO: 111752 - protein, 15 aa, Artificial Sequence
  Description of Artificial Sequence: Synthetic peptide
  Seed: PRMCSLMQGSTLPRR
PRMMSLLQGSTNPRR

SEQ ID NO: 111753 - protein, 15 aa, Artificial Sequence
  Description of Artificial Sequence: Synthetic peptide
  Seed: PRMCSLMQGSTLPRR
PRMMSLLQGSTSPRR

SEQ ID NO: 111754 - protein, 15 aa, Artificial Sequence
  Description of Artificial Sequence: Synthetic peptide
  Seed: PRMCSLMQGSTLPRR
PRMMSLLQGSTTPRR

SEQ ID NO: 111755 - protein, 15 aa, Artificial Sequence
  Description of Artificial Sequence: Synthetic peptide
  Seed: PRMCSLMQGSTLPRR
PRMMSLLQGSTVPRR

SEQ ID NO: 111756 - protein, 15 aa, Artificial Sequence
  Description of Artificial Sequence: Synthetic peptide
  Seed: PRMCSLMQGSTLPRR
PRMMSLLQISTAPRR

SEQ ID NO: 111757 - protein, 15 aa, Artificial Sequence
  Description of Artificial Sequence: Synthetic peptide
  Seed: PRMCSLMQGSTLPRR
PRMMSLLQISTIPRR

SEQ ID NO: 111758 - protein, 15 aa, Artificial Sequence
  Description of Artificial Sequence: Synthetic peptide
  Seed: PRMCSLMQGSTLPRR
PRMMSLLQISTLPRR

SEQ ID NO: 111759 - protein, 15 aa, Artificial Sequence
  Description of Artificial Sequence: Synthetic peptide
  Seed: PRMCSLMQGSTLPRR
PRMMSLLQISTNPRR

SEQ ID NO: 111760 - protein, 15 aa, Artificial Sequence
  Description of Artificial Sequence: Synthetic peptide
  Seed: PRMCSLMQGSTLPRR
PRMMSLLQISTSPRR

SEQ ID NO: 111761 - protein, 15 aa, Artificial Sequence
  Description of Artificial Sequence: Synthetic peptide
  Seed: PRMCSLMQGSTLPRR
PRMMSLLQISTTPRR

SEQ ID NO: 111762 - protein, 15 aa, Artificial Sequence
  Description of Artificial Sequence: Synthetic peptide
  Seed: PRMCSLMQGSTLPRR
PRMMSLLQISTVPRR

SEQ ID NO: 111763 - protein, 15 aa, Artificial Sequence
  Description of Artificial Sequence: Synthetic peptide
  Seed: PRMCSLMQGSTLPRR
PRMMSLLQLSTAPRR

SEQ ID NO: 111764 - protein, 15 aa, Artificial Sequence
  Description of Artificial Sequence: Synthetic peptide
  Seed: PRMCSLMQGSTLPRR
PRMMSLLQMSTAPRR

SEQ ID NO: 111765 - protein, 15 aa, Artificial Sequence
  Description of Artificial Sequence: Synthetic peptide
  Seed: PRMCSLMQGSTLPRR
PRMMSLLQMSTLPRR

SEQ ID NO: 111766 - protein, 15 aa, Artificial Sequence
  Description of Artificial Sequence: Synthetic peptide
  Seed: PRMCSLMQGSTLPRR
PRMMSLLQMSTVPRR

SEQ ID NO: 111767 - protein, 15 aa, Artificial Sequence
  Description of Artificial Sequence: Synthetic peptide
  Seed: PRMCSLMQGSTLPRR
PRMMSLLQNSTAPRR

SEQ ID NO: 111768 - protein, 15 aa, Artificial Sequence
  Description of Artificial Sequence: Synthetic peptide
  Seed: PRMCSLMQGSTLPRR
PRMMSLLQNSTIPRR

SEQ ID NO: 111769 - protein, 15 aa, Artificial Sequence
  Description of Artificial Sequence: Synthetic peptide
  Seed: PRMCSLMQGSTLPRR
PRMMSLLQNSTLPRR

SEQ ID NO: 111770 - protein, 15 aa, Artificial Sequence
  Description of Artificial Sequence: Synthetic peptide
  Seed: PRMCSLMQGSTLPRR
PRMMSLLQNSTMPRR

SEQ ID NO: 111771 - protein, 15 aa, Artificial Sequence
  Description of Artificial Sequence: Synthetic peptide
  Seed: PRMCSLMQGSTLPRR
PRMMSLLQNSTSPRR

SEQ ID NO: 111772 - protein, 15 aa, Artificial Sequence
  Description of Artificial Sequence: Synthetic peptide
  Seed: PRMCSLMQGSTLPRR
PRMMSLLQNSTTPRR

SEQ ID NO: 111773 - protein, 15 aa, Artificial Sequence
  Description of Artificial Sequence: Synthetic peptide
  Seed: PRMCSLMQGSTLPRR
PRMMSLLQNSTVPRR

SEQ ID NO: 111774 - protein, 15 aa, Artificial Sequence
  Description of Artificial Sequence: Synthetic peptide
  Seed: PRMCSLMQGSTLPRR
PRMMSLLQPSTAPRR

SEQ ID NO: 111775 - protein, 15 aa, Artificial Sequence
  Description of Artificial Sequence: Synthetic peptide
  Seed: PRMCSLMQGSTLPRR
PRMMSLLQPSTIPRR

SEQ ID NO: 111776 - protein, 15 aa, Artificial Sequence
  Description of Artificial Sequence: Synthetic peptide
  Seed: PRMCSLMQGSTLPRR
PRMMSLLQPSTLPRR

SEQ ID NO: 111777 - protein, 15 aa, Artificial Sequence
  Description of Artificial Sequence: Synthetic peptide
  Seed: PRMCSLMQGSTLPRR
PRMMSLLQPSTMPRR

SEQ ID NO: 111778 - protein, 15 aa, Artificial Sequence
  Description of Artificial Sequence: Synthetic peptide
  Seed: PRMCSLMQGSTLPRR
PRMMSLLQPSTNPRR

SEQ ID NO: 111779 - protein, 15 aa, Artificial Sequence
  Description of Artificial Sequence: Synthetic peptide
  Seed: PRMCSLMQGSTLPRR
PRMMSLLQPSTSPRR

SEQ ID NO: 111780 - protein, 15 aa, Artificial Sequence
  Description of Artificial Sequence: Synthetic peptide
  Seed: PRMCSLMQGSTLPRR
PRMMSLLQPSTTPRR

SEQ ID NO: 111781 - protein, 15 aa, Artificial Sequence
  Description of Artificial Sequence: Synthetic peptide
  Seed: PRMCSLMQGSTLPRR
PRMMSLLQPSTVPRR

SEQ ID NO: 111782 - protein, 15 aa, Artificial Sequence
  Description of Artificial Sequence: Synthetic peptide
  Seed: PRMCSLMQGSTLPRR
PRMMSLLQSSTAPRR

SEQ ID NO: 111783 - protein, 15 aa, Artificial Sequence
  Description of Artificial Sequence: Synthetic peptide
  Seed: PRMCSLMQGSTLPRR
PRMMSLLQSSTCPRR

SEQ ID NO: 111784 - protein, 15 aa, Artificial Sequence
  Description of Artificial Sequence: Synthetic peptide
  Seed: PRMCSLMQGSTLPRR
PRMMSLLQSSTGPRR

SEQ ID NO: 111785 - protein, 15 aa, Artificial Sequence
  Description of Artificial Sequence: Synthetic peptide
  Seed: PRMCSLMQGSTLPRR
PRMMSLLQSSTIPRR

SEQ ID NO: 111786 - protein, 15 aa, Artificial Sequence
  Description of Artificial Sequence: Synthetic peptide
  Seed: PRMCSLMQGSTLPRR
PRMMSLLQSSTLPRR

SEQ ID NO: 111787 - protein, 15 aa, Artificial Sequence
  Description of Artificial Sequence: Synthetic peptide
  Seed: PRMCSLMQGSTLPRR
PRMMSLLQSSTMPRR

SEQ ID NO: 111788 - protein, 15 aa, Artificial Sequence
  Description of Artificial Sequence: Synthetic peptide
  Seed: PRMCSLMQGSTLPRR
PRMMSLLQSSTNPRR

SEQ ID NO: 111789 - protein, 15 aa, Artificial Sequence
  Description of Artificial Sequence: Synthetic peptide
  Seed: PRMCSLMQGSTLPRR
PRMMSLLQSSTSPRR

SEQ ID NO: 111790 - protein, 15 aa, Artificial Sequence
  Description of Artificial Sequence: Synthetic peptide
  Seed: PRMCSLMQGSTLPRR
PRMMSLLQSSTTPRR

SEQ ID NO: 111791 - protein, 15 aa, Artificial Sequence
  Description of Artificial Sequence: Synthetic peptide
  Seed: PRMCSLMQGSTLPRR
PRMMSLLQSSTVPRR

SEQ ID NO: 111792 - protein, 15 aa, Artificial Sequence
  Description of Artificial Sequence: Synthetic peptide
  Seed: PRMCSLMQGSTLPRR
PRMMSLLQTSTAPRR

SEQ ID NO: 111793 - protein, 15 aa, Artificial Sequence
  Description of Artificial Sequence: Synthetic peptide
  Seed: PRMCSLMQGSTLPRR
PRMMSLLQTSTIPRR

SEQ ID NO: 111794 - protein, 15 aa, Artificial Sequence
  Description of Artificial Sequence: Synthetic peptide
  Seed: PRMCSLMQGSTLPRR
PRMMSLLQTSTLPRR

SEQ ID NO: 111795 - protein, 15 aa, Artificial Sequence
  Description of Artificial Sequence: Synthetic peptide
  Seed: PRMCSLMQGSTLPRR
PRMMSLLQTSTMPRR

SEQ ID NO: 111796 - protein, 15 aa, Artificial Sequence
  Description of Artificial Sequence: Synthetic peptide
  Seed: PRMCSLMQGSTLPRR
PRMMSLLQTSTNPRR

SEQ ID NO: 111797 - protein, 15 aa, Artificial Sequence
  Description of Artificial Sequence: Synthetic peptide
  Seed: PRMCSLMQGSTLPRR
PRMMSLLQTSTSPRR

SEQ ID NO: 111798 - protein, 15 aa, Artificial Sequence
  Description of Artificial Sequence: Synthetic peptide
  Seed: PRMCSLMQGSTLPRR
PRMMSLLQTSTTPRR

SEQ ID NO: 111799 - protein, 15 aa, Artificial Sequence
  Description of Artificial Sequence: Synthetic peptide
  Seed: PRMCSLMQGSTLPRR
PRMMSLLQTSTVPRR

SEQ ID NO: 111800 - protein, 15 aa, Artificial Sequence
  Description of Artificial Sequence: Synthetic peptide
  Seed: PRMCSLMQGSTLPRR
PRMMSLLQVSTAPRR

SEQ ID NO: 111801 - protein, 15 aa, Artificial Sequence
  Description of Artificial Sequence: Synthetic peptide
  Seed: PRMCSLMQGSTLPRR
PRMMSLLQVSTIPRR

SEQ ID NO: 111802 - protein, 15 aa, Artificial Sequence
  Description of Artificial Sequence: Synthetic peptide
  Seed: PRMCSLMQGSTLPRR
PRMMSLLQVSTLPRR

SEQ ID NO: 111803 - protein, 15 aa, Artificial Sequence
  Description of Artificial Sequence: Synthetic peptide
  Seed: PRMCSLMQGSTLPRR
PRMMSLLQVSTMPRR

SEQ ID NO: 111804 - protein, 15 aa, Artificial Sequence
  Description of Artificial Sequence: Synthetic peptide
  Seed: PRMCSLMQGSTLPRR
PRMMSLLQVSTNPRR

SEQ ID NO: 111805 - protein, 15 aa, Artificial Sequence
  Description of Artificial Sequence: Synthetic peptide
  Seed: PRMCSLMQGSTLPRR
PRMMSLLQVSTSPRR

SEQ ID NO: 111806 - protein, 15 aa, Artificial Sequence
  Description of Artificial Sequence: Synthetic peptide
  Seed: PRMCSLMQGSTLPRR
PRMMSLLQVSTTPRR

SEQ ID NO: 111807 - protein, 15 aa, Artificial Sequence
  Description of Artificial Sequence: Synthetic peptide
  Seed: PRMCSLMQGSTLPRR
PRMMSLLQVSTVPRR

SEQ ID NO: 111808 - protein, 15 aa, Artificial Sequence
  Description of Artificial Sequence: Synthetic peptide
  Seed: PRMCSLMQGSTLPRR
PRMMSLMQASTAPRR

SEQ ID NO: 111809 - protein, 15 aa, Artificial Sequence
  Description of Artificial Sequence: Synthetic peptide
  Seed: PRMCSLMQGSTLPRR
PRMMSLMQASTCPRR

SEQ ID NO: 111810 - protein, 15 aa, Artificial Sequence
  Description of Artificial Sequence: Synthetic peptide
  Seed: PRMCSLMQGSTLPRR
PRMMSLMQASTFPRR

SEQ ID NO: 111811 - protein, 15 aa, Artificial Sequence
  Description of Artificial Sequence: Synthetic peptide
  Seed: PRMCSLMQGSTLPRR
PRMMSLMQASTGPRR

SEQ ID NO: 111812 - protein, 15 aa, Artificial Sequence
  Description of Artificial Sequence: Synthetic peptide
  Seed: PRMCSLMQGSTLPRR
PRMMSLMQASTIPRR

SEQ ID NO: 111813 - protein, 15 aa, Artificial Sequence
  Description of Artificial Sequence: Synthetic peptide
  Seed: PRMCSLMQGSTLPRR
PRMMSLMQASTLPRR

SEQ ID NO: 111814 - protein, 15 aa, Artificial Sequence
  Description of Artificial Sequence: Synthetic peptide
  Seed: PRMCSLMQGSTLPRR
PRMMSLMQASTMPRR

SEQ ID NO: 111815 - protein, 15 aa, Artificial Sequence
  Description of Artificial Sequence: Synthetic peptide
  Seed: PRMCSLMQGSTLPRR
PRMMSLMQASTNPRR

SEQ ID NO: 111816 - protein, 15 aa, Artificial Sequence
  Description of Artificial Sequence: Synthetic peptide
  Seed: PRMCSLMQGSTLPRR
PRMMSLMQASTSPRR

SEQ ID NO: 111817 - protein, 15 aa, Artificial Sequence
  Description of Artificial Sequence: Synthetic peptide
  Seed: PRMCSLMQGSTLPRR
PRMMSLMQASTTPRR

SEQ ID NO: 111818 - protein, 15 aa, Artificial Sequence
  Description of Artificial Sequence: Synthetic peptide
  Seed: PRMCSLMQGSTLPRR
PRMMSLMQASTVPRR

SEQ ID NO: 111819 - protein, 15 aa, Artificial Sequence
  Description of Artificial Sequence: Synthetic peptide
  Seed: PRMCSLMQGSTLPRR
PRMMSLMQGSTAPRR

SEQ ID NO: 111820 - protein, 15 aa, Artificial Sequence
  Description of Artificial Sequence: Synthetic peptide
  Seed: PRMCSLMQGSTLPRR
PRMMSLMQGSTCPRR

SEQ ID NO: 111821 - protein, 15 aa, Artificial Sequence
  Description of Artificial Sequence: Synthetic peptide
  Seed: PRMCSLMQGSTLPRR
PRMMSLMQGSTFPRR

SEQ ID NO: 111822 - protein, 15 aa, Artificial Sequence
  Description of Artificial Sequence: Synthetic peptide
  Seed: PRMCSLMQGSTLPRR
PRMMSLMQGSTGPRR

SEQ ID NO: 111823 - protein, 15 aa, Artificial Sequence
  Description of Artificial Sequence: Synthetic peptide
  Seed: PRMCSLMQGSTLPRR
PRMMSLMQGSTIPRR

SEQ ID NO: 111824 - protein, 15 aa, Artificial Sequence
  Description of Artificial Sequence: Synthetic peptide
  Seed: PRMCSLMQGSTLPRR
PRMMSLMQGSTLPRR

SEQ ID NO: 111825 - protein, 15 aa, Artificial Sequence
  Description of Artificial Sequence: Synthetic peptide
  Seed: PRMCSLMQGSTLPRR
PRMMSLMQGSTMPRR

SEQ ID NO: 111826 - protein, 15 aa, Artificial Sequence
  Description of Artificial Sequence: Synthetic peptide
  Seed: PRMCSLMQGSTLPRR
PRMMSLMQGSTSPRR

SEQ ID NO: 111827 - protein, 15 aa, Artificial Sequence
  Description of Artificial Sequence: Synthetic peptide
  Seed: PRMCSLMQGSTLPRR
PRMMSLMQGSTTPRR

SEQ ID NO: 111828 - protein, 15 aa, Artificial Sequence
  Description of Artificial Sequence: Synthetic peptide
  Seed: PRMCSLMQGSTLPRR
PRMMSLMQGSTVPRR

SEQ ID NO: 111829 - protein, 15 aa, Artificial Sequence
  Description of Artificial Sequence: Synthetic peptide
  Seed: PRMCSLMQGSTLPRR
PRMMSLMQISTAPRR

SEQ ID NO: 111830 - protein, 15 aa, Artificial Sequence
  Description of Artificial Sequence: Synthetic peptide
  Seed: PRMCSLMQGSTLPRR
PRMMSLMQISTIPRR

SEQ ID NO: 111831 - protein, 15 aa, Artificial Sequence
  Description of Artificial Sequence: Synthetic peptide
  Seed: PRMCSLMQGSTLPRR
PRMMSLMQISTLPRR

SEQ ID NO: 111832 - protein, 15 aa, Artificial Sequence
  Description of Artificial Sequence: Synthetic peptide
  Seed: PRMCSLMQGSTLPRR
PRMMSLMQISTMPRR

SEQ ID NO: 111833 - protein, 15 aa, Artificial Sequence
  Description of Artificial Sequence: Synthetic peptide
  Seed: PRMCSLMQGSTLPRR
PRMMSLMQISTNPRR

SEQ ID NO: 111834 - protein, 15 aa, Artificial Sequence
  Description of Artificial Sequence: Synthetic peptide
  Seed: PRMCSLMQGSTLPRR
PRMMSLMQISTSPRR

SEQ ID NO: 111835 - protein, 15 aa, Artificial Sequence
  Description of Artificial Sequence: Synthetic peptide
  Seed: PRMCSLMQGSTLPRR
PRMMSLMQISTTPRR

SEQ ID NO: 111836 - protein, 15 aa, Artificial Sequence
  Description of Artificial Sequence: Synthetic peptide
  Seed: PRMCSLMQGSTLPRR
PRMMSLMQISTVPRR

SEQ ID NO: 111837 - protein, 15 aa, Artificial Sequence
  Description of Artificial Sequence: Synthetic peptide
  Seed: PRMCSLMQGSTLPRR
PRMMSLMQLSTAPRR

SEQ ID NO: 111838 - protein, 15 aa, Artificial Sequence
  Description of Artificial Sequence: Synthetic peptide
  Seed: PRMCSLMQGSTLPRR
PRMMSLMQLSTNPRR

SEQ ID NO: 111839 - protein, 15 aa, Artificial Sequence
  Description of Artificial Sequence: Synthetic peptide
  Seed: PRMCSLMQGSTLPRR
PRMMSLMQLSTSPRR

SEQ ID NO: 111840 - protein, 15 aa, Artificial Sequence
  Description of Artificial Sequence: Synthetic peptide
  Seed: PRMCSLMQGSTLPRR
PRMMSLMQMSTAPRR

SEQ ID NO: 111841 - protein, 15 aa, Artificial Sequence
  Description of Artificial Sequence: Synthetic peptide
  Seed: PRMCSLMQGSTLPRR
PRMMSLMQMSTLPRR

SEQ ID NO: 111842 - protein, 15 aa, Artificial Sequence
  Description of Artificial Sequence: Synthetic peptide
  Seed: PRMCSLMQGSTLPRR
PRMMSLMQNSTAPRR

SEQ ID NO: 111843 - protein, 15 aa, Artificial Sequence
  Description of Artificial Sequence: Synthetic peptide
  Seed: PRMCSLMQGSTLPRR
PRMMSLMQNSTIPRR

SEQ ID NO: 111844 - protein, 15 aa, Artificial Sequence
  Description of Artificial Sequence: Synthetic peptide
  Seed: PRMCSLMQGSTLPRR
PRMMSLMQNSTLPRR

SEQ ID NO: 111845 - protein, 15 aa, Artificial Sequence
  Description of Artificial Sequence: Synthetic peptide
  Seed: PRMCSLMQGSTLPRR
PRMMSLMQNSTMPRR

SEQ ID NO: 111846 - protein, 15 aa, Artificial Sequence
  Description of Artificial Sequence: Synthetic peptide
  Seed: PRMCSLMQGSTLPRR
PRMMSLMQNSTSPRR

SEQ ID NO: 111847 - protein, 15 aa, Artificial Sequence
  Description of Artificial Sequence: Synthetic peptide
  Seed: PRMCSLMQGSTLPRR
PRMMSLMQNSTTPRR

SEQ ID NO: 111848 - protein, 15 aa, Artificial Sequence
  Description of Artificial Sequence: Synthetic peptide
  Seed: PRMCSLMQGSTLPRR
PRMMSLMQNSTVPRR

SEQ ID NO: 111849 - protein, 15 aa, Artificial Sequence
  Description of Artificial Sequence: Synthetic peptide
  Seed: PRMCSLMQGSTLPRR
PRMMSLMQPSTAPRR

SEQ ID NO: 111850 - protein, 15 aa, Artificial Sequence
  Description of Artificial Sequence: Synthetic peptide
  Seed: PRMCSLMQGSTLPRR
PRMMSLMQPSTIPRR

SEQ ID NO: 111851 - protein, 15 aa, Artificial Sequence
  Description of Artificial Sequence: Synthetic peptide
  Seed: PRMCSLMQGSTLPRR
PRMMSLMQPSTLPRR

SEQ ID NO: 111852 - protein, 15 aa, Artificial Sequence
  Description of Artificial Sequence: Synthetic peptide
  Seed: PRMCSLMQGSTLPRR
PRMMSLMQPSTMPRR

SEQ ID NO: 111853 - protein, 15 aa, Artificial Sequence
  Description of Artificial Sequence: Synthetic peptide
  Seed: PRMCSLMQGSTLPRR
PRMMSLMQPSTNPRR

SEQ ID NO: 111854 - protein, 15 aa, Artificial Sequence
  Description of Artificial Sequence: Synthetic peptide
  Seed: PRMCSLMQGSTLPRR
PRMMSLMQPSTSPRR

SEQ ID NO: 111855 - protein, 15 aa, Artificial Sequence
  Description of Artificial Sequence: Synthetic peptide
  Seed: PRMCSLMQGSTLPRR
PRMMSLMQPSTTPRR

SEQ ID NO: 111856 - protein, 15 aa, Artificial Sequence
  Description of Artificial Sequence: Synthetic peptide
  Seed: PRMCSLMQGSTLPRR
PRMMSLMQPSTVPRR

SEQ ID NO: 111857 - protein, 15 aa, Artificial Sequence
  Description of Artificial Sequence: Synthetic peptide
  Seed: PRMCSLMQGSTLPRR
PRMMSLMQSSTAPRR

SEQ ID NO: 111858 - protein, 15 aa, Artificial Sequence
  Description of Artificial Sequence: Synthetic peptide
  Seed: PRMCSLMQGSTLPRR
PRMMSLMQSSTCPRR

SEQ ID NO: 111859 - protein, 15 aa, Artificial Sequence
  Description of Artificial Sequence: Synthetic peptide
  Seed: PRMCSLMQGSTLPRR
PRMMSLMQSSTGPRR

SEQ ID NO: 111860 - protein, 15 aa, Artificial Sequence
  Description of Artificial Sequence: Synthetic peptide
  Seed: PRMCSLMQGSTLPRR
PRMMSLMQSSTIPRR

SEQ ID NO: 111861 - protein, 15 aa, Artificial Sequence
  Description of Artificial Sequence: Synthetic peptide
  Seed: PRMCSLMQGSTLPRR
PRMMSLMQSSTLPRR

SEQ ID NO: 111862 - protein, 15 aa, Artificial Sequence
  Description of Artificial Sequence: Synthetic peptide
  Seed: PRMCSLMQGSTLPRR
PRMMSLMQSSTMPRR

SEQ ID NO: 111863 - protein, 15 aa, Artificial Sequence
  Description of Artificial Sequence: Synthetic peptide
  Seed: PRMCSLMQGSTLPRR
PRMMSLMQSSTNPRR

SEQ ID NO: 111864 - protein, 15 aa, Artificial Sequence
  Description of Artificial Sequence: Synthetic peptide
  Seed: PRMCSLMQGSTLPRR
PRMMSLMQSSTSPRR

SEQ ID NO: 111865 - protein, 15 aa, Artificial Sequence
  Description of Artificial Sequence: Synthetic peptide
  Seed: PRMCSLMQGSTLPRR
PRMMSLMQSSTTPRR

SEQ ID NO: 111866 - protein, 15 aa, Artificial Sequence
  Description of Artificial Sequence: Synthetic peptide
  Seed: PRMCSLMQGSTLPRR
PRMMSLMQSSTVPRR

SEQ ID NO: 111867 - protein, 15 aa, Artificial Sequence
  Description of Artificial Sequence: Synthetic peptide
  Seed: PRMCSLMQGSTLPRR
PRMMSLMQTSTAPRR

SEQ ID NO: 111868 - protein, 15 aa, Artificial Sequence
  Description of Artificial Sequence: Synthetic peptide
  Seed: PRMCSLMQGSTLPRR
PRMMSLMQTSTIPRR

SEQ ID NO: 111869 - protein, 15 aa, Artificial Sequence
  Description of Artificial Sequence: Synthetic peptide
  Seed: PRMCSLMQGSTLPRR
PRMMSLMQTSTLPRR

SEQ ID NO: 111870 - protein, 15 aa, Artificial Sequence
  Description of Artificial Sequence: Synthetic peptide
  Seed: PRMCSLMQGSTLPRR
PRMMSLMQTSTMPRR

SEQ ID NO: 111871 - protein, 15 aa, Artificial Sequence
  Description of Artificial Sequence: Synthetic peptide
  Seed: PRMCSLMQGSTLPRR
PRMMSLMQTSTNPRR

SEQ ID NO: 111872 - protein, 15 aa, Artificial Sequence
  Description of Artificial Sequence: Synthetic peptide
  Seed: PRMCSLMQGSTLPRR
PRMMSLMQTSTSPRR

SEQ ID NO: 111873 - protein, 15 aa, Artificial Sequence
  Description of Artificial Sequence: Synthetic peptide
  Seed: PRMCSLMQGSTLPRR
PRMMSLMQTSTTPRR

SEQ ID NO: 111874 - protein, 15 aa, Artificial Sequence
  Description of Artificial Sequence: Synthetic peptide
  Seed: PRMCSLMQGSTLPRR
PRMMSLMQTSTVPRR

SEQ ID NO: 111875 - protein, 15 aa, Artificial Sequence
  Description of Artificial Sequence: Synthetic peptide
  Seed: PRMCSLMQGSTLPRR
PRMMSLMQVSTAPRR

SEQ ID NO: 111876 - protein, 15 aa, Artificial Sequence
  Description of Artificial Sequence: Synthetic peptide
  Seed: PRMCSLMQGSTLPRR
PRMMSLMQVSTIPRR

SEQ ID NO: 111877 - protein, 15 aa, Artificial Sequence
  Description of Artificial Sequence: Synthetic peptide
  Seed: PRMCSLMQGSTLPRR
PRMMSLMQVSTLPRR

SEQ ID NO: 111878 - protein, 15 aa, Artificial Sequence
  Description of Artificial Sequence: Synthetic peptide
  Seed: PRMCSLMQGSTLPRR
PRMMSLMQVSTMPRR

SEQ ID NO: 111879 - protein, 15 aa, Artificial Sequence
  Description of Artificial Sequence: Synthetic peptide
  Seed: PRMCSLMQGSTLPRR
PRMMSLMQVSTNPRR

SEQ ID NO: 111880 - protein, 15 aa, Artificial Sequence
  Description of Artificial Sequence: Synthetic peptide
  Seed: PRMCSLMQGSTLPRR
PRMMSLMQVSTSPRR

SEQ ID NO: 111881 - protein, 15 aa, Artificial Sequence
  Description of Artificial Sequence: Synthetic peptide
  Seed: PRMCSLMQGSTLPRR
PRMMSLMQVSTTPRR

SEQ ID NO: 111882 - protein, 15 aa, Artificial Sequence
  Description of Artificial Sequence: Synthetic peptide
  Seed: PRMCSLMQGSTLPRR
PRMMSLMQVSTVPRR

SEQ ID NO: 111883 - protein, 15 aa, Artificial Sequence
  Description of Artificial Sequence: Synthetic peptide
  Seed: PRMCSLMQGSTLPRR
PRMMSLQQASTAPRR

SEQ ID NO: 111884 - protein, 15 aa, Artificial Sequence
  Description of Artificial Sequence: Synthetic peptide
  Seed: PRMCSLMQGSTLPRR
PRMMSLQQASTIPRR

SEQ ID NO: 111885 - protein, 15 aa, Artificial Sequence
  Description of Artificial Sequence: Synthetic peptide
  Seed: PRMCSLMQGSTLPRR
PRMMSLQQASTLPRR

SEQ ID NO: 111886 - protein, 15 aa, Artificial Sequence
  Description of Artificial Sequence: Synthetic peptide
  Seed: PRMCSLMQGSTLPRR
PRMMSLQQASTMPRR

SEQ ID NO: 111887 - protein, 15 aa, Artificial Sequence
  Description of Artificial Sequence: Synthetic peptide
  Seed: PRMCSLMQGSTLPRR
PRMMSLQQASTVPRR

SEQ ID NO: 111888 - protein, 15 aa, Artificial Sequence
  Description of Artificial Sequence: Synthetic peptide
  Seed: PRMCSLMQGSTLPRR
PRMMSLQQGSTAPRR

SEQ ID NO: 111889 - protein, 15 aa, Artificial Sequence
  Description of Artificial Sequence: Synthetic peptide
  Seed: PRMCSLMQGSTLPRR
PRMMSLQQGSTIPRR

SEQ ID NO: 111890 - protein, 15 aa, Artificial Sequence
  Description of Artificial Sequence: Synthetic peptide
  Seed: PRMCSLMQGSTLPRR
PRMMSLQQGSTLPRR

SEQ ID NO: 111891 - protein, 15 aa, Artificial Sequence
  Description of Artificial Sequence: Synthetic peptide
  Seed: PRMCSLMQGSTLPRR
PRMMSLQQGSTVPRR

SEQ ID NO: 111892 - protein, 15 aa, Artificial Sequence
  Description of Artificial Sequence: Synthetic peptide
  Seed: PRMCSLMQGSTLPRR
PRMMSLQQSSTAPRR

SEQ ID NO: 111893 - protein, 15 aa, Artificial Sequence
  Description of Artificial Sequence: Synthetic peptide
  Seed: PRMCSLMQGSTLPRR
PRMMSLQQSSTIPRR

SEQ ID NO: 111894 - protein, 15 aa, Artificial Sequence
  Description of Artificial Sequence: Synthetic peptide
  Seed: PRMCSLMQGSTLPRR
PRMMSLQQSSTLPRR

SEQ ID NO: 111895 - protein, 15 aa, Artificial Sequence
  Description of Artificial Sequence: Synthetic peptide
  Seed: PRMCSLMQGSTLPRR
PRMMSLQQSSTVPRR

SEQ ID NO: 111896 - protein, 15 aa, Artificial Sequence
  Description of Artificial Sequence: Synthetic peptide
  Seed: PRMCSLMQGSTLPRR
PRMMSLSQASTIPRR

SEQ ID NO: 111897 - protein, 15 aa, Artificial Sequence
  Description of Artificial Sequence: Synthetic peptide
  Seed: PRMCSLMQGSTLPRR
PRMMSLSQASTLPRR

SEQ ID NO: 111898 - protein, 15 aa, Artificial Sequence
  Description of Artificial Sequence: Synthetic peptide
  Seed: PRMCSLMQGSTLPRR
PRMMSLSQASTVPRR

SEQ ID NO: 111899 - protein, 15 aa, Artificial Sequence
  Description of Artificial Sequence: Synthetic peptide
  Seed: PRMCSLMQGSTLPRR
PRMMSLSQSSTIPRR

SEQ ID NO: 111900 - protein, 15 aa, Artificial Sequence
  Description of Artificial Sequence: Synthetic peptide
  Seed: PRMCSLMQGSTLPRR
PRMMSLSQSSTLPRR

SEQ ID NO: 111901 - protein, 15 aa, Artificial Sequence
  Description of Artificial Sequence: Synthetic peptide
  Seed: PRMCSLMQGSTLPRR
PRMMSLSQSSTVPRR

SEQ ID NO: 111902 - protein, 15 aa, Artificial Sequence
  Description of Artificial Sequence: Synthetic peptide
  Seed: PRMCSLMQGSTLPRR
PRMMSLTQASTIPRR

SEQ ID NO: 111903 - protein, 15 aa, Artificial Sequence
  Description of Artificial Sequence: Synthetic peptide
  Seed: PRMCSLMQGSTLPRR
PRMMSLTQASTLPRR

SEQ ID NO: 111904 - protein, 15 aa, Artificial Sequence
  Description of Artificial Sequence: Synthetic peptide
  Seed: PRMCSLMQGSTLPRR
PRMMSLTQASTVPRR

SEQ ID NO: 111905 - protein, 15 aa, Artificial Sequence
  Description of Artificial Sequence: Synthetic peptide
  Seed: PRMCSLMQGSTLPRR
PRMMSLTQGSTIPRR

SEQ ID NO: 111906 - protein, 15 aa, Artificial Sequence
  Description of Artificial Sequence: Synthetic peptide
  Seed: PRMCSLMQGSTLPRR
PRMMSLTQSSTIPRR

SEQ ID NO: 111907 - protein, 15 aa, Artificial Sequence
  Description of Artificial Sequence: Synthetic peptide
  Seed: PRMCSLMQGSTLPRR
PRMMSLTQSSTLPRR

SEQ ID NO: 111908 - protein, 15 aa, Artificial Sequence
  Description of Artificial Sequence: Synthetic peptide
  Seed: PRMCSLMQGSTLPRR
PRMMSLTQSSTVPRR

SEQ ID NO: 111909 - protein, 15 aa, Artificial Sequence
  Description of Artificial Sequence: Synthetic peptide
  Seed: PRMCSLMQGSTLPRR
PRMMSLVQASTAPRR

SEQ ID NO: 111910 - protein, 15 aa, Artificial Sequence
  Description of Artificial Sequence: Synthetic peptide
  Seed: PRMCSLMQGSTLPRR
PRMMSLVQASTIPRR

SEQ ID NO: 111911 - protein, 15 aa, Artificial Sequence
  Description of Artificial Sequence: Synthetic peptide
  Seed: PRMCSLMQGSTLPRR
PRMMSLVQASTLPRR

SEQ ID NO: 111912 - protein, 15 aa, Artificial Sequence
  Description of Artificial Sequence: Synthetic peptide
  Seed: PRMCSLMQGSTLPRR
PRMMSLVQASTMPRR

SEQ ID NO: 111913 - protein, 15 aa, Artificial Sequence
  Description of Artificial Sequence: Synthetic peptide
  Seed: PRMCSLMQGSTLPRR
PRMMSLVQASTVPRR

SEQ ID NO: 111914 - protein, 15 aa, Artificial Sequence
  Description of Artificial Sequence: Synthetic peptide
  Seed: PRMCSLMQGSTLPRR
PRMMSLVQGSTAPRR

SEQ ID NO: 111915 - protein, 15 aa, Artificial Sequence
  Description of Artificial Sequence: Synthetic peptide
  Seed: PRMCSLMQGSTLPRR
PRMMSLVQGSTIPRR

SEQ ID NO: 111916 - protein, 15 aa, Artificial Sequence
  Description of Artificial Sequence: Synthetic peptide
  Seed: PRMCSLMQGSTLPRR
PRMMSLVQGSTLPRR

SEQ ID NO: 111917 - protein, 15 aa, Artificial Sequence
  Description of Artificial Sequence: Synthetic peptide
  Seed: PRMCSLMQGSTLPRR
PRMMSLVQGSTVPRR

SEQ ID NO: 111918 - protein, 15 aa, Artificial Sequence
  Description of Artificial Sequence: Synthetic peptide
  Seed: PRMCSLMQGSTLPRR
PRMMSLVQPSTLPRR

SEQ ID NO: 111919 - protein, 15 aa, Artificial Sequence
  Description of Artificial Sequence: Synthetic peptide
  Seed: PRMCSLMQGSTLPRR
PRMMSLVQPSTVPRR

SEQ ID NO: 111920 - protein, 15 aa, Artificial Sequence
  Description of Artificial Sequence: Synthetic peptide
  Seed: PRMCSLMQGSTLPRR
PRMMSLVQSSTAPRR

SEQ ID NO: 111921 - protein, 15 aa, Artificial Sequence
  Description of Artificial Sequence: Synthetic peptide
  Seed: PRMCSLMQGSTLPRR
PRMMSLVQSSTIPRR

SEQ ID NO: 111922 - protein, 15 aa, Artificial Sequence
  Description of Artificial Sequence: Synthetic peptide
  Seed: PRMCSLMQGSTLPRR
PRMMSLVQSSTLPRR

SEQ ID NO: 111923 - protein, 15 aa, Artificial Sequence
  Description of Artificial Sequence: Synthetic peptide
  Seed: PRMCSLMQGSTLPRR
PRMMSLVQSSTVPRR

SEQ ID NO: 111924 - protein, 15 aa, Artificial Sequence
  Description of Artificial Sequence: Synthetic peptide
  Seed: PRMCSLMQGSTLPRR
PRMMSLWQSSTLPRR

SEQ ID NO: 111925 - protein, 15 aa, Artificial Sequence
  Description of Artificial Sequence: Synthetic peptide
  Seed: PRMCSLMQGSTLPRR
PRMMSLYQGSTLPRR

SEQ ID NO: 111926 - protein, 15 aa, Artificial Sequence
  Description of Artificial Sequence: Synthetic peptide
  Seed: PRMCSLMQGSTLPRR
PRMMSLYQNSTAPRR

SEQ ID NO: 111927 - protein, 15 aa, Artificial Sequence
  Description of Artificial Sequence: Synthetic peptide
  Seed: PRMCSLMQGSTLPRR
PRMMSLYQNSTIPRR

SEQ ID NO: 111928 - protein, 15 aa, Artificial Sequence
  Description of Artificial Sequence: Synthetic peptide
  Seed: PRMCSLMQGSTLPRR
PRMMSLYQNSTLPRR

SEQ ID NO: 111929 - protein, 15 aa, Artificial Sequence
  Description of Artificial Sequence: Synthetic peptide
  Seed: PRMCSLMQGSTLPRR
PRMMSLYQNSTVPRR

SEQ ID NO: 111930 - protein, 15 aa, Artificial Sequence
  Description of Artificial Sequence: Synthetic peptide
  Seed: PRMCSLMQGSTLPRR
PRMMSLYQSSTAPRR

SEQ ID NO: 111931 - protein, 15 aa, Artificial Sequence
  Description of Artificial Sequence: Synthetic peptide
  Seed: PRMCSLMQGSTLPRR
PRMMSLYQSSTIPRR

SEQ ID NO: 111932 - protein, 15 aa, Artificial Sequence
  Description of Artificial Sequence: Synthetic peptide
  Seed: PRMCSLMQGSTLPRR
PRMMSLYQSSTLPRR

SEQ ID NO: 111933 - protein, 15 aa, Artificial Sequence
  Description of Artificial Sequence: Synthetic peptide
  Seed: PRMCSLMQGSTLPRR
PRMMSLYQSSTVPRR

SEQ ID NO: 111934 - protein, 15 aa, Artificial Sequence
  Description of Artificial Sequence: Synthetic peptide
  Seed: PRMCSLMQGSTLPRR
PRMTSLLQASTLPRR

SEQ ID NO: 111935 - protein, 15 aa, Artificial Sequence
  Description of Artificial Sequence: Synthetic peptide
  Seed: PRMCSLMQGSTLPRR
PRMTSLMQASTLPRR

SEQ ID NO: 111936 - protein, 15 aa, Artificial Sequence
  Description of Artificial Sequence: Synthetic peptide
  Seed: PRMCSLMQGSTLPRR
PRMVSLAQASTAPRR

SEQ ID NO: 111937 - protein, 15 aa, Artificial Sequence
  Description of Artificial Sequence: Synthetic peptide
  Seed: PRMCSLMQGSTLPRR
PRMVSLAQASTIPRR

SEQ ID NO: 111938 - protein, 15 aa, Artificial Sequence
  Description of Artificial Sequence: Synthetic peptide
  Seed: PRMCSLMQGSTLPRR
PRMVSLAQASTLPRR

SEQ ID NO: 111939 - protein, 15 aa, Artificial Sequence
  Description of Artificial Sequence: Synthetic peptide
  Seed: PRMCSLMQGSTLPRR
PRMVSLAQASTMPRR

SEQ ID NO: 111940 - protein, 15 aa, Artificial Sequence
  Description of Artificial Sequence: Synthetic peptide
  Seed: PRMCSLMQGSTLPRR
PRMVSLAQASTVPRR

SEQ ID NO: 111941 - protein, 15 aa, Artificial Sequence
  Description of Artificial Sequence: Synthetic peptide
  Seed: PRMCSLMQGSTLPRR
PRMVSLAQGSTAPRR

SEQ ID NO: 111942 - protein, 15 aa, Artificial Sequence
  Description of Artificial Sequence: Synthetic peptide
  Seed: PRMCSLMQGSTLPRR
PRMVSLAQGSTIPRR

SEQ ID NO: 111943 - protein, 15 aa, Artificial Sequence
  Description of Artificial Sequence: Synthetic peptide
  Seed: PRMCSLMQGSTLPRR
PRMVSLAQGSTLPRR

SEQ ID NO: 111944 - protein, 15 aa, Artificial Sequence
  Description of Artificial Sequence: Synthetic peptide
  Seed: PRMCSLMQGSTLPRR
PRMVSLAQGSTVPRR

SEQ ID NO: 111945 - protein, 15 aa, Artificial Sequence
  Description of Artificial Sequence: Synthetic peptide
  Seed: PRMCSLMQGSTLPRR
PRMVSLAQPSTLPRR

SEQ ID NO: 111946 - protein, 15 aa, Artificial Sequence
  Description of Artificial Sequence: Synthetic peptide
  Seed: PRMCSLMQGSTLPRR
PRMVSLAQSSTAPRR

SEQ ID NO: 111947 - protein, 15 aa, Artificial Sequence
  Description of Artificial Sequence: Synthetic peptide
  Seed: PRMCSLMQGSTLPRR
PRMVSLAQSSTIPRR

SEQ ID NO: 111948 - protein, 15 aa, Artificial Sequence
  Description of Artificial Sequence: Synthetic peptide
  Seed: PRMCSLMQGSTLPRR
PRMVSLAQSSTLPRR

SEQ ID NO: 111949 - protein, 15 aa, Artificial Sequence
  Description of Artificial Sequence: Synthetic peptide
  Seed: PRMCSLMQGSTLPRR
PRMVSLAQSSTVPRR

SEQ ID NO: 111950 - protein, 15 aa, Artificial Sequence
  Description of Artificial Sequence: Synthetic peptide
  Seed: PRMCSLMQGSTLPRR
PRMVSLEQASTLPRR

SEQ ID NO: 111951 - protein, 15 aa, Artificial Sequence
  Description of Artificial Sequence: Synthetic peptide
  Seed: PRMCSLMQGSTLPRR
PRMVSLFQASTAPRR

SEQ ID NO: 111952 - protein, 15 aa, Artificial Sequence
  Description of Artificial Sequence: Synthetic peptide
  Seed: PRMCSLMQGSTLPRR
PRMVSLFQASTIPRR

SEQ ID NO: 111953 - protein, 15 aa, Artificial Sequence
  Description of Artificial Sequence: Synthetic peptide
  Seed: PRMCSLMQGSTLPRR
PRMVSLFQASTLPRR

SEQ ID NO: 111954 - protein, 15 aa, Artificial Sequence
  Description of Artificial Sequence: Synthetic peptide
  Seed: PRMCSLMQGSTLPRR
PRMVSLFQASTVPRR

SEQ ID NO: 111955 - protein, 15 aa, Artificial Sequence
  Description of Artificial Sequence: Synthetic peptide
  Seed: PRMCSLMQGSTLPRR
PRMVSLFQGSTIPRR

SEQ ID NO: 111956 - protein, 15 aa, Artificial Sequence
  Description of Artificial Sequence: Synthetic peptide
  Seed: PRMCSLMQGSTLPRR
PRMVSLFQGSTLPRR

SEQ ID NO: 111957 - protein, 15 aa, Artificial Sequence
  Description of Artificial Sequence: Synthetic peptide
  Seed: PRMCSLMQGSTLPRR
PRMVSLFQGSTVPRR

SEQ ID NO: 111958 - protein, 15 aa, Artificial Sequence
  Description of Artificial Sequence: Synthetic peptide
  Seed: PRMCSLMQGSTLPRR
PRMVSLFQNSTAPRR

SEQ ID NO: 111959 - protein, 15 aa, Artificial Sequence
  Description of Artificial Sequence: Synthetic peptide
  Seed: PRMCSLMQGSTLPRR
PRMVSLFQNSTIPRR

SEQ ID NO: 111960 - protein, 15 aa, Artificial Sequence
  Description of Artificial Sequence: Synthetic peptide
  Seed: PRMCSLMQGSTLPRR
PRMVSLFQNSTLPRR

SEQ ID NO: 111961 - protein, 15 aa, Artificial Sequence
  Description of Artificial Sequence: Synthetic peptide
  Seed: PRMCSLMQGSTLPRR
PRMVSLFQNSTMPRR

SEQ ID NO: 111962 - protein, 15 aa, Artificial Sequence
  Description of Artificial Sequence: Synthetic peptide
  Seed: PRMCSLMQGSTLPRR
PRMVSLFQNSTTPRR

SEQ ID NO: 111963 - protein, 15 aa, Artificial Sequence
  Description of Artificial Sequence: Synthetic peptide
  Seed: PRMCSLMQGSTLPRR
PRMVSLFQNSTVPRR

SEQ ID NO: 111964 - protein, 15 aa, Artificial Sequence
  Description of Artificial Sequence: Synthetic peptide
  Seed: PRMCSLMQGSTLPRR
PRMVSLFQSSTAPRR

SEQ ID NO: 111965 - protein, 15 aa, Artificial Sequence
  Description of Artificial Sequence: Synthetic peptide
  Seed: PRMCSLMQGSTLPRR
PRMVSLFQSSTIPRR

SEQ ID NO: 111966 - protein, 15 aa, Artificial Sequence
  Description of Artificial Sequence: Synthetic peptide
  Seed: PRMCSLMQGSTLPRR
PRMVSLFQSSTLPRR

SEQ ID NO: 111967 - protein, 15 aa, Artificial Sequence
  Description of Artificial Sequence: Synthetic peptide
  Seed: PRMCSLMQGSTLPRR
PRMVSLFQSSTMPRR

SEQ ID NO: 111968 - protein, 15 aa, Artificial Sequence
  Description of Artificial Sequence: Synthetic peptide
  Seed: PRMCSLMQGSTLPRR
PRMVSLFQSSTTPRR

SEQ ID NO: 111969 - protein, 15 aa, Artificial Sequence
  Description of Artificial Sequence: Synthetic peptide
  Seed: PRMCSLMQGSTLPRR
PRMVSLFQSSTVPRR

SEQ ID NO: 111970 - protein, 15 aa, Artificial Sequence
  Description of Artificial Sequence: Synthetic peptide
  Seed: PRMCSLMQGSTLPRR
PRMVSLFQTSTIPRR

SEQ ID NO: 111971 - protein, 15 aa, Artificial Sequence
  Description of Artificial Sequence: Synthetic peptide
  Seed: PRMCSLMQGSTLPRR
PRMVSLFQTSTLPRR

SEQ ID NO: 111972 - protein, 15 aa, Artificial Sequence
  Description of Artificial Sequence: Synthetic peptide
  Seed: PRMCSLMQGSTLPRR
PRMVSLFQTSTVPRR

SEQ ID NO: 111973 - protein, 15 aa, Artificial Sequence
  Description of Artificial Sequence: Synthetic peptide
  Seed: PRMCSLMQGSTLPRR
PRMVSLIQASTAPRR

SEQ ID NO: 111974 - protein, 15 aa, Artificial Sequence
  Description of Artificial Sequence: Synthetic peptide
  Seed: PRMCSLMQGSTLPRR
PRMVSLIQASTIPRR

SEQ ID NO: 111975 - protein, 15 aa, Artificial Sequence
  Description of Artificial Sequence: Synthetic peptide
  Seed: PRMCSLMQGSTLPRR
PRMVSLIQASTLPRR

SEQ ID NO: 111976 - protein, 15 aa, Artificial Sequence
  Description of Artificial Sequence: Synthetic peptide
  Seed: PRMCSLMQGSTLPRR
PRMVSLIQASTMPRR

SEQ ID NO: 111977 - protein, 15 aa, Artificial Sequence
  Description of Artificial Sequence: Synthetic peptide
  Seed: PRMCSLMQGSTLPRR
PRMVSLIQASTNPRR

SEQ ID NO: 111978 - protein, 15 aa, Artificial Sequence
  Description of Artificial Sequence: Synthetic peptide
  Seed: PRMCSLMQGSTLPRR
PRMVSLIQASTSPRR

SEQ ID NO: 111979 - protein, 15 aa, Artificial Sequence
  Description of Artificial Sequence: Synthetic peptide
  Seed: PRMCSLMQGSTLPRR
PRMVSLIQASTTPRR

SEQ ID NO: 111980 - protein, 15 aa, Artificial Sequence
  Description of Artificial Sequence: Synthetic peptide
  Seed: PRMCSLMQGSTLPRR
PRMVSLIQASTVPRR

SEQ ID NO: 111981 - protein, 15 aa, Artificial Sequence
  Description of Artificial Sequence: Synthetic peptide
  Seed: PRMCSLMQGSTLPRR
PRMVSLIQGSTAPRR

SEQ ID NO: 111982 - protein, 15 aa, Artificial Sequence
  Description of Artificial Sequence: Synthetic peptide
  Seed: PRMCSLMQGSTLPRR
PRMVSLIQGSTIPRR

SEQ ID NO: 111983 - protein, 15 aa, Artificial Sequence
  Description of Artificial Sequence: Synthetic peptide
  Seed: PRMCSLMQGSTLPRR
PRMVSLIQGSTLPRR

SEQ ID NO: 111984 - protein, 15 aa, Artificial Sequence
  Description of Artificial Sequence: Synthetic peptide
  Seed: PRMCSLMQGSTLPRR
PRMVSLIQGSTMPRR

SEQ ID NO: 111985 - protein, 15 aa, Artificial Sequence
  Description of Artificial Sequence: Synthetic peptide
  Seed: PRMCSLMQGSTLPRR
PRMVSLIQGSTSPRR

SEQ ID NO: 111986 - protein, 15 aa, Artificial Sequence
  Description of Artificial Sequence: Synthetic peptide
  Seed: PRMCSLMQGSTLPRR
PRMVSLIQGSTTPRR

SEQ ID NO: 111987 - protein, 15 aa, Artificial Sequence
  Description of Artificial Sequence: Synthetic peptide
  Seed: PRMCSLMQGSTLPRR
PRMVSLIQGSTVPRR

SEQ ID NO: 111988 - protein, 15 aa, Artificial Sequence
  Description of Artificial Sequence: Synthetic peptide
  Seed: PRMCSLMQGSTLPRR
PRMVSLIQNSTIPRR

SEQ ID NO: 111989 - protein, 15 aa, Artificial Sequence
  Description of Artificial Sequence: Synthetic peptide
  Seed: PRMCSLMQGSTLPRR
PRMVSLIQNSTLPRR

SEQ ID NO: 111990 - protein, 15 aa, Artificial Sequence
  Description of Artificial Sequence: Synthetic peptide
  Seed: PRMCSLMQGSTLPRR
PRMVSLIQNSTVPRR

SEQ ID NO: 111991 - protein, 15 aa, Artificial Sequence
  Description of Artificial Sequence: Synthetic peptide
  Seed: PRMCSLMQGSTLPRR
PRMVSLIQPSTAPRR

SEQ ID NO: 111992 - protein, 15 aa, Artificial Sequence
  Description of Artificial Sequence: Synthetic peptide
  Seed: PRMCSLMQGSTLPRR
PRMVSLIQPSTIPRR

SEQ ID NO: 111993 - protein, 15 aa, Artificial Sequence
  Description of Artificial Sequence: Synthetic peptide
  Seed: PRMCSLMQGSTLPRR
PRMVSLIQPSTLPRR

SEQ ID NO: 111994 - protein, 15 aa, Artificial Sequence
  Description of Artificial Sequence: Synthetic peptide
  Seed: PRMCSLMQGSTLPRR
PRMVSLIQPSTMPRR

SEQ ID NO: 111995 - protein, 15 aa, Artificial Sequence
  Description of Artificial Sequence: Synthetic peptide
  Seed: PRMCSLMQGSTLPRR
PRMVSLIQPSTVPRR

SEQ ID NO: 111996 - protein, 15 aa, Artificial Sequence
  Description of Artificial Sequence: Synthetic peptide
  Seed: PRMCSLMQGSTLPRR
PRMVSLIQSSTAPRR

SEQ ID NO: 111997 - protein, 15 aa, Artificial Sequence
  Description of Artificial Sequence: Synthetic peptide
  Seed: PRMCSLMQGSTLPRR
PRMVSLIQSSTIPRR

SEQ ID NO: 111998 - protein, 15 aa, Artificial Sequence
  Description of Artificial Sequence: Synthetic peptide
  Seed: PRMCSLMQGSTLPRR
PRMVSLIQSSTLPRR

SEQ ID NO: 111999 - protein, 15 aa, Artificial Sequence
  Description of Artificial Sequence: Synthetic peptide
  Seed: PRMCSLMQGSTLPRR
PRMVSLIQSSTMPRR

SEQ ID NO: 112000 - protein, 15 aa, Artificial Sequence
  Description of Artificial Sequence: Synthetic peptide
  Seed: PRMCSLMQGSTLPRR
PRMVSLIQSSTTPRR

SEQ ID NO: 112001 - protein, 15 aa, Artificial Sequence
  Description of Artificial Sequence: Synthetic peptide
  Seed: PRMCSLMQGSTLPRR
PRMVSLIQSSTVPRR

SEQ ID NO: 112002 - protein, 15 aa, Artificial Sequence
  Description of Artificial Sequence: Synthetic peptide
  Seed: PRMCSLMQGSTLPRR
PRMVSLIQTSTIPRR

SEQ ID NO: 112003 - protein, 15 aa, Artificial Sequence
  Description of Artificial Sequence: Synthetic peptide
  Seed: PRMCSLMQGSTLPRR
PRMVSLIQTSTLPRR

SEQ ID NO: 112004 - protein, 15 aa, Artificial Sequence
  Description of Artificial Sequence: Synthetic peptide
  Seed: PRMCSLMQGSTLPRR
PRMVSLIQTSTVPRR

SEQ ID NO: 112005 - protein, 15 aa, Artificial Sequence
  Description of Artificial Sequence: Synthetic peptide
  Seed: PRMCSLMQGSTLPRR
PRMVSLLQASTAPRR

SEQ ID NO: 112006 - protein, 15 aa, Artificial Sequence
  Description of Artificial Sequence: Synthetic peptide
  Seed: PRMCSLMQGSTLPRR
PRMVSLLQASTCPRR

SEQ ID NO: 112007 - protein, 15 aa, Artificial Sequence
  Description of Artificial Sequence: Synthetic peptide
  Seed: PRMCSLMQGSTLPRR
PRMVSLLQASTFPRR

SEQ ID NO: 112008 - protein, 15 aa, Artificial Sequence
  Description of Artificial Sequence: Synthetic peptide
  Seed: PRMCSLMQGSTLPRR
PRMVSLLQASTGPRR

SEQ ID NO: 112009 - protein, 15 aa, Artificial Sequence
  Description of Artificial Sequence: Synthetic peptide
  Seed: PRMCSLMQGSTLPRR
PRMVSLLQASTIPRR

SEQ ID NO: 112010 - protein, 15 aa, Artificial Sequence
  Description of Artificial Sequence: Synthetic peptide
  Seed: PRMCSLMQGSTLPRR
PRMVSLLQASTLPRR

SEQ ID NO: 112011 - protein, 15 aa, Artificial Sequence
  Description of Artificial Sequence: Synthetic peptide
  Seed: PRMCSLMQGSTLPRR
PRMVSLLQASTMPRR

SEQ ID NO: 112012 - protein, 15 aa, Artificial Sequence
  Description of Artificial Sequence: Synthetic peptide
  Seed: PRMCSLMQGSTLPRR
PRMVSLLQASTNPRR

SEQ ID NO: 112013 - protein, 15 aa, Artificial Sequence
  Description of Artificial Sequence: Synthetic peptide
  Seed: PRMCSLMQGSTLPRR
PRMVSLLQASTSPRR

SEQ ID NO: 112014 - protein, 15 aa, Artificial Sequence
  Description of Artificial Sequence: Synthetic peptide
  Seed: PRMCSLMQGSTLPRR
PRMVSLLQASTTPRR

SEQ ID NO: 112015 - protein, 15 aa, Artificial Sequence
  Description of Artificial Sequence: Synthetic peptide
  Seed: PRMCSLMQGSTLPRR
PRMVSLLQASTVPRR

SEQ ID NO: 112016 - protein, 15 aa, Artificial Sequence
  Description of Artificial Sequence: Synthetic peptide
  Seed: PRMCSLMQGSTLPRR
PRMVSLLQGSTAPRR

SEQ ID NO: 112017 - protein, 15 aa, Artificial Sequence
  Description of Artificial Sequence: Synthetic peptide
  Seed: PRMCSLMQGSTLPRR
PRMVSLLQGSTCPRR

SEQ ID NO: 112018 - protein, 15 aa, Artificial Sequence
  Description of Artificial Sequence: Synthetic peptide
  Seed: PRMCSLMQGSTLPRR
PRMVSLLQGSTFPRR

SEQ ID NO: 112019 - protein, 15 aa, Artificial Sequence
  Description of Artificial Sequence: Synthetic peptide
  Seed: PRMCSLMQGSTLPRR
PRMVSLLQGSTGPRR

SEQ ID NO: 112020 - protein, 15 aa, Artificial Sequence
  Description of Artificial Sequence: Synthetic peptide
  Seed: PRMCSLMQGSTLPRR
PRMVSLLQGSTIPRR

SEQ ID NO: 112021 - protein, 15 aa, Artificial Sequence
  Description of Artificial Sequence: Synthetic peptide
  Seed: PRMCSLMQGSTLPRR
PRMVSLLQGSTLPRR

SEQ ID NO: 112022 - protein, 15 aa, Artificial Sequence
  Description of Artificial Sequence: Synthetic peptide
  Seed: PRMCSLMQGSTLPRR
PRMVSLLQGSTMPRR

SEQ ID NO: 112023 - protein, 15 aa, Artificial Sequence
  Description of Artificial Sequence: Synthetic peptide
  Seed: PRMCSLMQGSTLPRR
PRMVSLLQGSTSPRR

SEQ ID NO: 112024 - protein, 15 aa, Artificial Sequence
  Description of Artificial Sequence: Synthetic peptide
  Seed: PRMCSLMQGSTLPRR
PRMVSLLQGSTTPRR

SEQ ID NO: 112025 - protein, 15 aa, Artificial Sequence
  Description of Artificial Sequence: Synthetic peptide
  Seed: PRMCSLMQGSTLPRR
PRMVSLLQGSTVPRR

SEQ ID NO: 112026 - protein, 15 aa, Artificial Sequence
  Description of Artificial Sequence: Synthetic peptide
  Seed: PRMCSLMQGSTLPRR
PRMVSLLQISTAPRR

SEQ ID NO: 112027 - protein, 15 aa, Artificial Sequence
  Description of Artificial Sequence: Synthetic peptide
  Seed: PRMCSLMQGSTLPRR
PRMVSLLQISTIPRR

SEQ ID NO: 112028 - protein, 15 aa, Artificial Sequence
  Description of Artificial Sequence: Synthetic peptide
  Seed: PRMCSLMQGSTLPRR
PRMVSLLQISTLPRR

SEQ ID NO: 112029 - protein, 15 aa, Artificial Sequence
  Description of Artificial Sequence: Synthetic peptide
  Seed: PRMCSLMQGSTLPRR
PRMVSLLQISTSPRR

SEQ ID NO: 112030 - protein, 15 aa, Artificial Sequence
  Description of Artificial Sequence: Synthetic peptide
  Seed: PRMCSLMQGSTLPRR
PRMVSLLQISTVPRR

SEQ ID NO: 112031 - protein, 15 aa, Artificial Sequence
  Description of Artificial Sequence: Synthetic peptide
  Seed: PRMCSLMQGSTLPRR
PRMVSLLQNSTAPRR

SEQ ID NO: 112032 - protein, 15 aa, Artificial Sequence
  Description of Artificial Sequence: Synthetic peptide
  Seed: PRMCSLMQGSTLPRR
PRMVSLLQNSTIPRR

SEQ ID NO: 112033 - protein, 15 aa, Artificial Sequence
  Description of Artificial Sequence: Synthetic peptide
  Seed: PRMCSLMQGSTLPRR
PRMVSLLQNSTLPRR

SEQ ID NO: 112034 - protein, 15 aa, Artificial Sequence
  Description of Artificial Sequence: Synthetic peptide
  Seed: PRMCSLMQGSTLPRR
PRMVSLLQNSTMPRR

SEQ ID NO: 112035 - protein, 15 aa, Artificial Sequence
  Description of Artificial Sequence: Synthetic peptide
  Seed: PRMCSLMQGSTLPRR
PRMVSLLQNSTSPRR

SEQ ID NO: 112036 - protein, 15 aa, Artificial Sequence
  Description of Artificial Sequence: Synthetic peptide
  Seed: PRMCSLMQGSTLPRR
PRMVSLLQNSTTPRR

SEQ ID NO: 112037 - protein, 15 aa, Artificial Sequence
  Description of Artificial Sequence: Synthetic peptide
  Seed: PRMCSLMQGSTLPRR
PRMVSLLQNSTVPRR

SEQ ID NO: 112038 - protein, 15 aa, Artificial Sequence
  Description of Artificial Sequence: Synthetic peptide
  Seed: PRMCSLMQGSTLPRR
PRMVSLLQPSTAPRR

SEQ ID NO: 112039 - protein, 15 aa, Artificial Sequence
  Description of Artificial Sequence: Synthetic peptide
  Seed: PRMCSLMQGSTLPRR
PRMVSLLQPSTIPRR

SEQ ID NO: 112040 - protein, 15 aa, Artificial Sequence
  Description of Artificial Sequence: Synthetic peptide
  Seed: PRMCSLMQGSTLPRR
PRMVSLLQPSTLPRR

SEQ ID NO: 112041 - protein, 15 aa, Artificial Sequence
  Description of Artificial Sequence: Synthetic peptide
  Seed: PRMCSLMQGSTLPRR
PRMVSLLQPSTMPRR

SEQ ID NO: 112042 - protein, 15 aa, Artificial Sequence
  Description of Artificial Sequence: Synthetic peptide
  Seed: PRMCSLMQGSTLPRR
PRMVSLLQPSTNPRR

SEQ ID NO: 112043 - protein, 15 aa, Artificial Sequence
  Description of Artificial Sequence: Synthetic peptide
  Seed: PRMCSLMQGSTLPRR
PRMVSLLQPSTSPRR

SEQ ID NO: 112044 - protein, 15 aa, Artificial Sequence
  Description of Artificial Sequence: Synthetic peptide
  Seed: PRMCSLMQGSTLPRR
PRMVSLLQPSTTPRR

SEQ ID NO: 112045 - protein, 15 aa, Artificial Sequence
  Description of Artificial Sequence: Synthetic peptide
  Seed: PRMCSLMQGSTLPRR
PRMVSLLQPSTVPRR

SEQ ID NO: 112046 - protein, 15 aa, Artificial Sequence
  Description of Artificial Sequence: Synthetic peptide
  Seed: PRMCSLMQGSTLPRR
PRMVSLLQSSTAPRR

SEQ ID NO: 112047 - protein, 15 aa, Artificial Sequence
  Description of Artificial Sequence: Synthetic peptide
  Seed: PRMCSLMQGSTLPRR
PRMVSLLQSSTCPRR

SEQ ID NO: 112048 - protein, 15 aa, Artificial Sequence
  Description of Artificial Sequence: Synthetic peptide
  Seed: PRMCSLMQGSTLPRR
PRMVSLLQSSTGPRR

SEQ ID NO: 112049 - protein, 15 aa, Artificial Sequence
  Description of Artificial Sequence: Synthetic peptide
  Seed: PRMCSLMQGSTLPRR
PRMVSLLQSSTIPRR

SEQ ID NO: 112050 - protein, 15 aa, Artificial Sequence
  Description of Artificial Sequence: Synthetic peptide
  Seed: PRMCSLMQGSTLPRR
PRMVSLLQSSTLPRR

SEQ ID NO: 112051 - protein, 15 aa, Artificial Sequence
  Description of Artificial Sequence: Synthetic peptide
  Seed: PRMCSLMQGSTLPRR
PRMVSLLQSSTMPRR

SEQ ID NO: 112052 - protein, 15 aa, Artificial Sequence
  Description of Artificial Sequence: Synthetic peptide
  Seed: PRMCSLMQGSTLPRR
PRMVSLLQSSTNPRR

SEQ ID NO: 112053 - protein, 15 aa, Artificial Sequence
  Description of Artificial Sequence: Synthetic peptide
  Seed: PRMCSLMQGSTLPRR
PRMVSLLQSSTSPRR

SEQ ID NO: 112054 - protein, 15 aa, Artificial Sequence
  Description of Artificial Sequence: Synthetic peptide
  Seed: PRMCSLMQGSTLPRR
PRMVSLLQSSTTPRR

SEQ ID NO: 112055 - protein, 15 aa, Artificial Sequence
  Description of Artificial Sequence: Synthetic peptide
  Seed: PRMCSLMQGSTLPRR
PRMVSLLQSSTVPRR

SEQ ID NO: 112056 - protein, 15 aa, Artificial Sequence
  Description of Artificial Sequence: Synthetic peptide
  Seed: PRMCSLMQGSTLPRR
PRMVSLLQTSTAPRR

SEQ ID NO: 112057 - protein, 15 aa, Artificial Sequence
  Description of Artificial Sequence: Synthetic peptide
  Seed: PRMCSLMQGSTLPRR
PRMVSLLQTSTIPRR

SEQ ID NO: 112058 - protein, 15 aa, Artificial Sequence
  Description of Artificial Sequence: Synthetic peptide
  Seed: PRMCSLMQGSTLPRR
PRMVSLLQTSTLPRR

SEQ ID NO: 112059 - protein, 15 aa, Artificial Sequence
  Description of Artificial Sequence: Synthetic peptide
  Seed: PRMCSLMQGSTLPRR
PRMVSLLQTSTMPRR

SEQ ID NO: 112060 - protein, 15 aa, Artificial Sequence
  Description of Artificial Sequence: Synthetic peptide
  Seed: PRMCSLMQGSTLPRR
PRMVSLLQTSTNPRR

SEQ ID NO: 112061 - protein, 15 aa, Artificial Sequence
  Description of Artificial Sequence: Synthetic peptide
  Seed: PRMCSLMQGSTLPRR
PRMVSLLQTSTSPRR

SEQ ID NO: 112062 - protein, 15 aa, Artificial Sequence
  Description of Artificial Sequence: Synthetic peptide
  Seed: PRMCSLMQGSTLPRR
PRMVSLLQTSTTPRR

SEQ ID NO: 112063 - protein, 15 aa, Artificial Sequence
  Description of Artificial Sequence: Synthetic peptide
  Seed: PRMCSLMQGSTLPRR
PRMVSLLQTSTVPRR

SEQ ID NO: 112064 - protein, 15 aa, Artificial Sequence
  Description of Artificial Sequence: Synthetic peptide
  Seed: PRMCSLMQGSTLPRR
PRMVSLLQVSTAPRR

SEQ ID NO: 112065 - protein, 15 aa, Artificial Sequence
  Description of Artificial Sequence: Synthetic peptide
  Seed: PRMCSLMQGSTLPRR
PRMVSLLQVSTIPRR

SEQ ID NO: 112066 - protein, 15 aa, Artificial Sequence
  Description of Artificial Sequence: Synthetic peptide
  Seed: PRMCSLMQGSTLPRR
PRMVSLLQVSTLPRR

SEQ ID NO: 112067 - protein, 15 aa, Artificial Sequence
  Description of Artificial Sequence: Synthetic peptide
  Seed: PRMCSLMQGSTLPRR
PRMVSLLQVSTMPRR

SEQ ID NO: 112068 - protein, 15 aa, Artificial Sequence
  Description of Artificial Sequence: Synthetic peptide
  Seed: PRMCSLMQGSTLPRR
PRMVSLLQVSTNPRR

SEQ ID NO: 112069 - protein, 15 aa, Artificial Sequence
  Description of Artificial Sequence: Synthetic peptide
  Seed: PRMCSLMQGSTLPRR
PRMVSLLQVSTSPRR

SEQ ID NO: 112070 - protein, 15 aa, Artificial Sequence
  Description of Artificial Sequence: Synthetic peptide
  Seed: PRMCSLMQGSTLPRR
PRMVSLLQVSTVPRR

SEQ ID NO: 112071 - protein, 15 aa, Artificial Sequence
  Description of Artificial Sequence: Synthetic peptide
  Seed: PRMCSLMQGSTLPRR
PRMVSLMQASTAPRR

SEQ ID NO: 112072 - protein, 15 aa, Artificial Sequence
  Description of Artificial Sequence: Synthetic peptide
  Seed: PRMCSLMQGSTLPRR
PRMVSLMQASTCPRR

SEQ ID NO: 112073 - protein, 15 aa, Artificial Sequence
  Description of Artificial Sequence: Synthetic peptide
  Seed: PRMCSLMQGSTLPRR
PRMVSLMQASTFPRR

SEQ ID NO: 112074 - protein, 15 aa, Artificial Sequence
  Description of Artificial Sequence: Synthetic peptide
  Seed: PRMCSLMQGSTLPRR
PRMVSLMQASTGPRR

SEQ ID NO: 112075 - protein, 15 aa, Artificial Sequence
  Description of Artificial Sequence: Synthetic peptide
  Seed: PRMCSLMQGSTLPRR
PRMVSLMQASTIPRR

SEQ ID NO: 112076 - protein, 15 aa, Artificial Sequence
  Description of Artificial Sequence: Synthetic peptide
  Seed: PRMCSLMQGSTLPRR
PRMVSLMQASTLPRR

SEQ ID NO: 112077 - protein, 15 aa, Artificial Sequence
  Description of Artificial Sequence: Synthetic peptide
  Seed: PRMCSLMQGSTLPRR
PRMVSLMQASTMPRR

SEQ ID NO: 112078 - protein, 15 aa, Artificial Sequence
  Description of Artificial Sequence: Synthetic peptide
  Seed: PRMCSLMQGSTLPRR
PRMVSLMQASTNPRR

SEQ ID NO: 112079 - protein, 15 aa, Artificial Sequence
  Description of Artificial Sequence: Synthetic peptide
  Seed: PRMCSLMQGSTLPRR
PRMVSLMQASTSPRR

SEQ ID NO: 112080 - protein, 15 aa, Artificial Sequence
  Description of Artificial Sequence: Synthetic peptide
  Seed: PRMCSLMQGSTLPRR
PRMVSLMQASTTPRR

SEQ ID NO: 112081 - protein, 15 aa, Artificial Sequence
  Description of Artificial Sequence: Synthetic peptide
  Seed: PRMCSLMQGSTLPRR
PRMVSLMQASTVPRR

SEQ ID NO: 112082 - protein, 15 aa, Artificial Sequence
  Description of Artificial Sequence: Synthetic peptide
  Seed: PRMCSLMQGSTLPRR
PRMVSLMQGSTAPRR

SEQ ID NO: 112083 - protein, 15 aa, Artificial Sequence
  Description of Artificial Sequence: Synthetic peptide
  Seed: PRMCSLMQGSTLPRR
PRMVSLMQGSTFPRR

SEQ ID NO: 112084 - protein, 15 aa, Artificial Sequence
  Description of Artificial Sequence: Synthetic peptide
  Seed: PRMCSLMQGSTLPRR
PRMVSLMQGSTGPRR

SEQ ID NO: 112085 - protein, 15 aa, Artificial Sequence
  Description of Artificial Sequence: Synthetic peptide
  Seed: PRMCSLMQGSTLPRR
PRMVSLMQGSTIPRR

SEQ ID NO: 112086 - protein, 15 aa, Artificial Sequence
  Description of Artificial Sequence: Synthetic peptide
  Seed: PRMCSLMQGSTLPRR
PRMVSLMQGSTLPRR

SEQ ID NO: 112087 - protein, 15 aa, Artificial Sequence
  Description of Artificial Sequence: Synthetic peptide
  Seed: PRMCSLMQGSTLPRR
PRMVSLMQGSTMPRR

SEQ ID NO: 112088 - protein, 15 aa, Artificial Sequence
  Description of Artificial Sequence: Synthetic peptide
  Seed: PRMCSLMQGSTLPRR
PRMVSLMQGSTSPRR

SEQ ID NO: 112089 - protein, 15 aa, Artificial Sequence
  Description of Artificial Sequence: Synthetic peptide
  Seed: PRMCSLMQGSTLPRR
PRMVSLMQGSTTPRR

SEQ ID NO: 112090 - protein, 15 aa, Artificial Sequence
  Description of Artificial Sequence: Synthetic peptide
  Seed: PRMCSLMQGSTLPRR
PRMVSLMQGSTVPRR

SEQ ID NO: 112091 - protein, 15 aa, Artificial Sequence
  Description of Artificial Sequence: Synthetic peptide
  Seed: PRMCSLMQGSTLPRR
PRMVSLMQISTAPRR

SEQ ID NO: 112092 - protein, 15 aa, Artificial Sequence
  Description of Artificial Sequence: Synthetic peptide
  Seed: PRMCSLMQGSTLPRR
PRMVSLMQISTLPRR

SEQ ID NO: 112093 - protein, 15 aa, Artificial Sequence
  Description of Artificial Sequence: Synthetic peptide
  Seed: PRMCSLMQGSTLPRR
PRMVSLMQISTSPRR

SEQ ID NO: 112094 - protein, 15 aa, Artificial Sequence
  Description of Artificial Sequence: Synthetic peptide
  Seed: PRMCSLMQGSTLPRR
PRMVSLMQISTVPRR

SEQ ID NO: 112095 - protein, 15 aa, Artificial Sequence
  Description of Artificial Sequence: Synthetic peptide
  Seed: PRMCSLMQGSTLPRR
PRMVSLMQLSTAPRR

SEQ ID NO: 112096 - protein, 15 aa, Artificial Sequence
  Description of Artificial Sequence: Synthetic peptide
  Seed: PRMCSLMQGSTLPRR
PRMVSLMQNSTAPRR

SEQ ID NO: 112097 - protein, 15 aa, Artificial Sequence
  Description of Artificial Sequence: Synthetic peptide
  Seed: PRMCSLMQGSTLPRR
PRMVSLMQNSTIPRR

SEQ ID NO: 112098 - protein, 15 aa, Artificial Sequence
  Description of Artificial Sequence: Synthetic peptide
  Seed: PRMCSLMQGSTLPRR
PRMVSLMQNSTLPRR

SEQ ID NO: 112099 - protein, 15 aa, Artificial Sequence
  Description of Artificial Sequence: Synthetic peptide
  Seed: PRMCSLMQGSTLPRR
PRMVSLMQNSTMPRR

SEQ ID NO: 112100 - protein, 15 aa, Artificial Sequence
  Description of Artificial Sequence: Synthetic peptide
  Seed: PRMCSLMQGSTLPRR
PRMVSLMQNSTTPRR

SEQ ID NO: 112101 - protein, 15 aa, Artificial Sequence
  Description of Artificial Sequence: Synthetic peptide
  Seed: PRMCSLMQGSTLPRR
PRMVSLMQNSTVPRR

SEQ ID NO: 112102 - protein, 15 aa, Artificial Sequence
  Description of Artificial Sequence: Synthetic peptide
  Seed: PRMCSLMQGSTLPRR
PRMVSLMQPSTAPRR

SEQ ID NO: 112103 - protein, 15 aa, Artificial Sequence
  Description of Artificial Sequence: Synthetic peptide
  Seed: PRMCSLMQGSTLPRR
PRMVSLMQPSTIPRR

SEQ ID NO: 112104 - protein, 15 aa, Artificial Sequence
  Description of Artificial Sequence: Synthetic peptide
  Seed: PRMCSLMQGSTLPRR
PRMVSLMQPSTLPRR

SEQ ID NO: 112105 - protein, 15 aa, Artificial Sequence
  Description of Artificial Sequence: Synthetic peptide
  Seed: PRMCSLMQGSTLPRR
PRMVSLMQPSTMPRR

SEQ ID NO: 112106 - protein, 15 aa, Artificial Sequence
  Description of Artificial Sequence: Synthetic peptide
  Seed: PRMCSLMQGSTLPRR
PRMVSLMQPSTSPRR

SEQ ID NO: 112107 - protein, 15 aa, Artificial Sequence
  Description of Artificial Sequence: Synthetic peptide
  Seed: PRMCSLMQGSTLPRR
PRMVSLMQPSTTPRR

SEQ ID NO: 112108 - protein, 15 aa, Artificial Sequence
  Description of Artificial Sequence: Synthetic peptide
  Seed: PRMCSLMQGSTLPRR
PRMVSLMQPSTVPRR

SEQ ID NO: 112109 - protein, 15 aa, Artificial Sequence
  Description of Artificial Sequence: Synthetic peptide
  Seed: PRMCSLMQGSTLPRR
PRMVSLMQSSTAPRR

SEQ ID NO: 112110 - protein, 15 aa, Artificial Sequence
  Description of Artificial Sequence: Synthetic peptide
  Seed: PRMCSLMQGSTLPRR
PRMVSLMQSSTIPRR

SEQ ID NO: 112111 - protein, 15 aa, Artificial Sequence
  Description of Artificial Sequence: Synthetic peptide
  Seed: PRMCSLMQGSTLPRR
PRMVSLMQSSTLPRR

SEQ ID NO: 112112 - protein, 15 aa, Artificial Sequence
  Description of Artificial Sequence: Synthetic peptide
  Seed: PRMCSLMQGSTLPRR
PRMVSLMQSSTMPRR

SEQ ID NO: 112113 - protein, 15 aa, Artificial Sequence
  Description of Artificial Sequence: Synthetic peptide
  Seed: PRMCSLMQGSTLPRR
PRMVSLMQSSTNPRR

SEQ ID NO: 112114 - protein, 15 aa, Artificial Sequence
  Description of Artificial Sequence: Synthetic peptide
  Seed: PRMCSLMQGSTLPRR
PRMVSLMQSSTSPRR

SEQ ID NO: 112115 - protein, 15 aa, Artificial Sequence
  Description of Artificial Sequence: Synthetic peptide
  Seed: PRMCSLMQGSTLPRR
PRMVSLMQSSTTPRR

SEQ ID NO: 112116 - protein, 15 aa, Artificial Sequence
  Description of Artificial Sequence: Synthetic peptide
  Seed: PRMCSLMQGSTLPRR
PRMVSLMQSSTVPRR

SEQ ID NO: 112117 - protein, 15 aa, Artificial Sequence
  Description of Artificial Sequence: Synthetic peptide
  Seed: PRMCSLMQGSTLPRR
PRMVSLMQTSTAPRR

SEQ ID NO: 112118 - protein, 15 aa, Artificial Sequence
  Description of Artificial Sequence: Synthetic peptide
  Seed: PRMCSLMQGSTLPRR
PRMVSLMQTSTIPRR

SEQ ID NO: 112119 - protein, 15 aa, Artificial Sequence
  Description of Artificial Sequence: Synthetic peptide
  Seed: PRMCSLMQGSTLPRR
PRMVSLMQTSTLPRR

SEQ ID NO: 112120 - protein, 15 aa, Artificial Sequence
  Description of Artificial Sequence: Synthetic peptide
  Seed: PRMCSLMQGSTLPRR
PRMVSLMQTSTMPRR

SEQ ID NO: 112121 - protein, 15 aa, Artificial Sequence
  Description of Artificial Sequence: Synthetic peptide
  Seed: PRMCSLMQGSTLPRR
PRMVSLMQTSTTPRR

SEQ ID NO: 112122 - protein, 15 aa, Artificial Sequence
  Description of Artificial Sequence: Synthetic peptide
  Seed: PRMCSLMQGSTLPRR
PRMVSLMQTSTVPRR

SEQ ID NO: 112123 - protein, 15 aa, Artificial Sequence
  Description of Artificial Sequence: Synthetic peptide
  Seed: PRMCSLMQGSTLPRR
PRMVSLMQVSTAPRR

SEQ ID NO: 112124 - protein, 15 aa, Artificial Sequence
  Description of Artificial Sequence: Synthetic peptide
  Seed: PRMCSLMQGSTLPRR
PRMVSLMQVSTIPRR

SEQ ID NO: 112125 - protein, 15 aa, Artificial Sequence
  Description of Artificial Sequence: Synthetic peptide
  Seed: PRMCSLMQGSTLPRR
PRMVSLMQVSTLPRR

SEQ ID NO: 112126 - protein, 15 aa, Artificial Sequence
  Description of Artificial Sequence: Synthetic peptide
  Seed: PRMCSLMQGSTLPRR
PRMVSLMQVSTMPRR

SEQ ID NO: 112127 - protein, 15 aa, Artificial Sequence
  Description of Artificial Sequence: Synthetic peptide
  Seed: PRMCSLMQGSTLPRR
PRMVSLMQVSTNPRR

SEQ ID NO: 112128 - protein, 15 aa, Artificial Sequence
  Description of Artificial Sequence: Synthetic peptide
  Seed: PRMCSLMQGSTLPRR
PRMVSLMQVSTSPRR

SEQ ID NO: 112129 - protein, 15 aa, Artificial Sequence
  Description of Artificial Sequence: Synthetic peptide
  Seed: PRMCSLMQGSTLPRR
PRMVSLMQVSTTPRR

SEQ ID NO: 112130 - protein, 15 aa, Artificial Sequence
  Description of Artificial Sequence: Synthetic peptide
  Seed: PRMCSLMQGSTLPRR
PRMVSLMQVSTVPRR

SEQ ID NO: 112131 - protein, 15 aa, Artificial Sequence
  Description of Artificial Sequence: Synthetic peptide
  Seed: PRMCSLMQGSTLPRR
PRMVSLQQASTAPRR

SEQ ID NO: 112132 - protein, 15 aa, Artificial Sequence
  Description of Artificial Sequence: Synthetic peptide
  Seed: PRMCSLMQGSTLPRR
PRMVSLQQASTIPRR

SEQ ID NO: 112133 - protein, 15 aa, Artificial Sequence
  Description of Artificial Sequence: Synthetic peptide
  Seed: PRMCSLMQGSTLPRR
PRMVSLQQASTLPRR

SEQ ID NO: 112134 - protein, 15 aa, Artificial Sequence
  Description of Artificial Sequence: Synthetic peptide
  Seed: PRMCSLMQGSTLPRR
PRMVSLQQASTMPRR

SEQ ID NO: 112135 - protein, 15 aa, Artificial Sequence
  Description of Artificial Sequence: Synthetic peptide
  Seed: PRMCSLMQGSTLPRR
PRMVSLQQASTVPRR

SEQ ID NO: 112136 - protein, 15 aa, Artificial Sequence
  Description of Artificial Sequence: Synthetic peptide
  Seed: PRMCSLMQGSTLPRR
PRMVSLQQGSTAPRR

SEQ ID NO: 112137 - protein, 15 aa, Artificial Sequence
  Description of Artificial Sequence: Synthetic peptide
  Seed: PRMCSLMQGSTLPRR
PRMVSLQQGSTIPRR

SEQ ID NO: 112138 - protein, 15 aa, Artificial Sequence
  Description of Artificial Sequence: Synthetic peptide
  Seed: PRMCSLMQGSTLPRR
PRMVSLQQGSTLPRR

SEQ ID NO: 112139 - protein, 15 aa, Artificial Sequence
  Description of Artificial Sequence: Synthetic peptide
  Seed: PRMCSLMQGSTLPRR
PRMVSLQQGSTVPRR

SEQ ID NO: 112140 - protein, 15 aa, Artificial Sequence
  Description of Artificial Sequence: Synthetic peptide
  Seed: PRMCSLMQGSTLPRR
PRMVSLQQSSTIPRR

SEQ ID NO: 112141 - protein, 15 aa, Artificial Sequence
  Description of Artificial Sequence: Synthetic peptide
  Seed: PRMCSLMQGSTLPRR
PRMVSLQQSSTLPRR

SEQ ID NO: 112142 - protein, 15 aa, Artificial Sequence
  Description of Artificial Sequence: Synthetic peptide
  Seed: PRMCSLMQGSTLPRR
PRMVSLQQSSTVPRR

SEQ ID NO: 112143 - protein, 15 aa, Artificial Sequence
  Description of Artificial Sequence: Synthetic peptide
  Seed: PRMCSLMQGSTLPRR
PRMVSLSQASTIPRR

SEQ ID NO: 112144 - protein, 15 aa, Artificial Sequence
  Description of Artificial Sequence: Synthetic peptide
  Seed: PRMCSLMQGSTLPRR
PRMVSLSQASTLPRR

SEQ ID NO: 112145 - protein, 15 aa, Artificial Sequence
  Description of Artificial Sequence: Synthetic peptide
  Seed: PRMCSLMQGSTLPRR
PRMVSLSQSSTIPRR

SEQ ID NO: 112146 - protein, 15 aa, Artificial Sequence
  Description of Artificial Sequence: Synthetic peptide
  Seed: PRMCSLMQGSTLPRR
PRMVSLSQSSTLPRR

SEQ ID NO: 112147 - protein, 15 aa, Artificial Sequence
  Description of Artificial Sequence: Synthetic peptide
  Seed: PRMCSLMQGSTLPRR
PRMVSLTQASTIPRR

SEQ ID NO: 112148 - protein, 15 aa, Artificial Sequence
  Description of Artificial Sequence: Synthetic peptide
  Seed: PRMCSLMQGSTLPRR
PRMVSLTQASTLPRR

SEQ ID NO: 112149 - protein, 15 aa, Artificial Sequence
  Description of Artificial Sequence: Synthetic peptide
  Seed: PRMCSLMQGSTLPRR
PRMVSLTQGSTIPRR

SEQ ID NO: 112150 - protein, 15 aa, Artificial Sequence
  Description of Artificial Sequence: Synthetic peptide
  Seed: PRMCSLMQGSTLPRR
PRMVSLTQSSTIPRR

SEQ ID NO: 112151 - protein, 15 aa, Artificial Sequence
  Description of Artificial Sequence: Synthetic peptide
  Seed: PRMCSLMQGSTLPRR
PRMVSLTQSSTLPRR

SEQ ID NO: 112152 - protein, 15 aa, Artificial Sequence
  Description of Artificial Sequence: Synthetic peptide
  Seed: PRMCSLMQGSTLPRR
PRMVSLTQSSTVPRR

SEQ ID NO: 112153 - protein, 15 aa, Artificial Sequence
  Description of Artificial Sequence: Synthetic peptide
  Seed: PRMCSLMQGSTLPRR
PRMVSLVQASTAPRR

SEQ ID NO: 112154 - protein, 15 aa, Artificial Sequence
  Description of Artificial Sequence: Synthetic peptide
  Seed: PRMCSLMQGSTLPRR
PRMVSLVQASTIPRR

SEQ ID NO: 112155 - protein, 15 aa, Artificial Sequence
  Description of Artificial Sequence: Synthetic peptide
  Seed: PRMCSLMQGSTLPRR
PRMVSLVQASTLPRR

SEQ ID NO: 112156 - protein, 15 aa, Artificial Sequence
  Description of Artificial Sequence: Synthetic peptide
  Seed: PRMCSLMQGSTLPRR
PRMVSLVQASTMPRR

SEQ ID NO: 112157 - protein, 15 aa, Artificial Sequence
  Description of Artificial Sequence: Synthetic peptide
  Seed: PRMCSLMQGSTLPRR
PRMVSLVQASTVPRR

SEQ ID NO: 112158 - protein, 15 aa, Artificial Sequence
  Description of Artificial Sequence: Synthetic peptide
  Seed: PRMCSLMQGSTLPRR
PRMVSLVQGSTAPRR

SEQ ID NO: 112159 - protein, 15 aa, Artificial Sequence
  Description of Artificial Sequence: Synthetic peptide
  Seed: PRMCSLMQGSTLPRR
PRMVSLVQGSTIPRR

SEQ ID NO: 112160 - protein, 15 aa, Artificial Sequence
  Description of Artificial Sequence: Synthetic peptide
  Seed: PRMCSLMQGSTLPRR
PRMVSLVQGSTLPRR

SEQ ID NO: 112161 - protein, 15 aa, Artificial Sequence
  Description of Artificial Sequence: Synthetic peptide
  Seed: PRMCSLMQGSTLPRR
PRMVSLVQGSTVPRR

SEQ ID NO: 112162 - protein, 15 aa, Artificial Sequence
  Description of Artificial Sequence: Synthetic peptide
  Seed: PRMCSLMQGSTLPRR
PRMVSLVQPSTLPRR

SEQ ID NO: 112163 - protein, 15 aa, Artificial Sequence
  Description of Artificial Sequence: Synthetic peptide
  Seed: PRMCSLMQGSTLPRR
PRMVSLVQSSTAPRR

SEQ ID NO: 112164 - protein, 15 aa, Artificial Sequence
  Description of Artificial Sequence: Synthetic peptide
  Seed: PRMCSLMQGSTLPRR
PRMVSLVQSSTIPRR

SEQ ID NO: 112165 - protein, 15 aa, Artificial Sequence
  Description of Artificial Sequence: Synthetic peptide
  Seed: PRMCSLMQGSTLPRR
PRMVSLVQSSTLPRR

SEQ ID NO: 112166 - protein, 15 aa, Artificial Sequence
  Description of Artificial Sequence: Synthetic peptide
  Seed: PRMCSLMQGSTLPRR
PRMVSLVQSSTVPRR

SEQ ID NO: 112167 - protein, 15 aa, Artificial Sequence
  Description of Artificial Sequence: Synthetic peptide
  Seed: PRMCSLMQGSTLPRR
PRMVSLWQNSTIPRR

SEQ ID NO: 112168 - protein, 15 aa, Artificial Sequence
  Description of Artificial Sequence: Synthetic peptide
  Seed: PRMCSLMQGSTLPRR
PRMVSLWQNSTLPRR

SEQ ID NO: 112169 - protein, 15 aa, Artificial Sequence
  Description of Artificial Sequence: Synthetic peptide
  Seed: PRMCSLMQGSTLPRR
PRMVSLWQSSTIPRR

SEQ ID NO: 112170 - protein, 15 aa, Artificial Sequence
  Description of Artificial Sequence: Synthetic peptide
  Seed: PRMCSLMQGSTLPRR
PRMVSLWQSSTLPRR

SEQ ID NO: 112171 - protein, 15 aa, Artificial Sequence
  Description of Artificial Sequence: Synthetic peptide
  Seed: PRMCSLMQGSTLPRR
PRMVSLWQSSTVPRR

SEQ ID NO: 112172 - protein, 15 aa, Artificial Sequence
  Description of Artificial Sequence: Synthetic peptide
  Seed: PRMCSLMQGSTLPRR
PRMVSLYQASTLPRR

SEQ ID NO: 112173 - protein, 15 aa, Artificial Sequence
  Description of Artificial Sequence: Synthetic peptide
  Seed: PRMCSLMQGSTLPRR
PRMVSLYQGSTAPRR

SEQ ID NO: 112174 - protein, 15 aa, Artificial Sequence
  Description of Artificial Sequence: Synthetic peptide
  Seed: PRMCSLMQGSTLPRR
PRMVSLYQGSTIPRR

SEQ ID NO: 112175 - protein, 15 aa, Artificial Sequence
  Description of Artificial Sequence: Synthetic peptide
  Seed: PRMCSLMQGSTLPRR
PRMVSLYQGSTLPRR

SEQ ID NO: 112176 - protein, 15 aa, Artificial Sequence
  Description of Artificial Sequence: Synthetic peptide
  Seed: PRMCSLMQGSTLPRR
PRMVSLYQGSTVPRR

SEQ ID NO: 112177 - protein, 15 aa, Artificial Sequence
  Description of Artificial Sequence: Synthetic peptide
  Seed: PRMCSLMQGSTLPRR
PRMVSLYQNSTAPRR

SEQ ID NO: 112178 - protein, 15 aa, Artificial Sequence
  Description of Artificial Sequence: Synthetic peptide
  Seed: PRMCSLMQGSTLPRR
PRMVSLYQNSTIPRR

SEQ ID NO: 112179 - protein, 15 aa, Artificial Sequence
  Description of Artificial Sequence: Synthetic peptide
  Seed: PRMCSLMQGSTLPRR
PRMVSLYQNSTLPRR

SEQ ID NO: 112180 - protein, 15 aa, Artificial Sequence
  Description of Artificial Sequence: Synthetic peptide
  Seed: PRMCSLMQGSTLPRR
PRMVSLYQNSTMPRR

SEQ ID NO: 112181 - protein, 15 aa, Artificial Sequence
  Description of Artificial Sequence: Synthetic peptide
  Seed: PRMCSLMQGSTLPRR
PRMVSLYQNSTVPRR

SEQ ID NO: 112182 - protein, 15 aa, Artificial Sequence
  Description of Artificial Sequence: Synthetic peptide
  Seed: PRMCSLMQGSTLPRR
PRMVSLYQSSTAPRR

SEQ ID NO: 112183 - protein, 15 aa, Artificial Sequence
  Description of Artificial Sequence: Synthetic peptide
  Seed: PRMCSLMQGSTLPRR
PRMVSLYQSSTIPRR

SEQ ID NO: 112184 - protein, 15 aa, Artificial Sequence
  Description of Artificial Sequence: Synthetic peptide
  Seed: PRMCSLMQGSTLPRR
PRMVSLYQSSTLPRR

SEQ ID NO: 112185 - protein, 15 aa, Artificial Sequence
  Description of Artificial Sequence: Synthetic peptide
  Seed: PRMCSLMQGSTLPRR
PRMVSLYQSSTMPRR

SEQ ID NO: 112186 - protein, 15 aa, Artificial Sequence
  Description of Artificial Sequence: Synthetic peptide
  Seed: PRMCSLMQGSTLPRR
PRMVSLYQSSTTPRR

SEQ ID NO: 112187 - protein, 15 aa, Artificial Sequence
  Description of Artificial Sequence: Synthetic peptide
  Seed: PRMCSLMQGSTLPRR
PRMVSLYQSSTVPRR

SEQ ID NO: 112188 - protein, 15 aa, Artificial Sequence
  Description of Artificial Sequence: Synthetic peptide
  Seed: PRMCSLMQGSTLPRR
PRMVSLYQTSTLPRR

SEQ ID NO: 112189 - protein, 15 aa, Artificial Sequence
  Description of Artificial Sequence: Synthetic peptide
  Seed: PRMCSLMQGSTLPRR
PRMVSLYQTSTVPRR

SEQ ID NO: 112190 - protein, 15 aa, Artificial Sequence
  Description of Artificial Sequence: Synthetic peptide
  Seed: PRMCSLMQGSTLPRR
PRMWSLAQASTAPRR

SEQ ID NO: 112191 - protein, 15 aa, Artificial Sequence
  Description of Artificial Sequence: Synthetic peptide
  Seed: PRMCSLMQGSTLPRR
PRMWSLAQASTCPRR

SEQ ID NO: 112192 - protein, 15 aa, Artificial Sequence
  Description of Artificial Sequence: Synthetic peptide
  Seed: PRMCSLMQGSTLPRR
PRMWSLAQASTFPRR

SEQ ID NO: 112193 - protein, 15 aa, Artificial Sequence
  Description of Artificial Sequence: Synthetic peptide
  Seed: PRMCSLMQGSTLPRR
PRMWSLAQASTGPRR

SEQ ID NO: 112194 - protein, 15 aa, Artificial Sequence
  Description of Artificial Sequence: Synthetic peptide
  Seed: PRMCSLMQGSTLPRR
PRMWSLAQASTIPRR

SEQ ID NO: 112195 - protein, 15 aa, Artificial Sequence
  Description of Artificial Sequence: Synthetic peptide
  Seed: PRMCSLMQGSTLPRR
PRMWSLAQASTLPRR

SEQ ID NO: 112196 - protein, 15 aa, Artificial Sequence
  Description of Artificial Sequence: Synthetic peptide
  Seed: PRMCSLMQGSTLPRR
PRMWSLAQASTMPRR

SEQ ID NO: 112197 - protein, 15 aa, Artificial Sequence
  Description of Artificial Sequence: Synthetic peptide
  Seed: PRMCSLMQGSTLPRR
PRMWSLAQASTNPRR

SEQ ID NO: 112198 - protein, 15 aa, Artificial Sequence
  Description of Artificial Sequence: Synthetic peptide
  Seed: PRMCSLMQGSTLPRR
PRMWSLAQASTQPRR

SEQ ID NO: 112199 - protein, 15 aa, Artificial Sequence
  Description of Artificial Sequence: Synthetic peptide
  Seed: PRMCSLMQGSTLPRR
PRMWSLAQASTSPRR

SEQ ID NO: 112200 - protein, 15 aa, Artificial Sequence
  Description of Artificial Sequence: Synthetic peptide
  Seed: PRMCSLMQGSTLPRR
PRMWSLAQASTTPRR

SEQ ID NO: 112201 - protein, 15 aa, Artificial Sequence
  Description of Artificial Sequence: Synthetic peptide
  Seed: PRMCSLMQGSTLPRR
PRMWSLAQASTVPRR

SEQ ID NO: 112202 - protein, 15 aa, Artificial Sequence
  Description of Artificial Sequence: Synthetic peptide
  Seed: PRMCSLMQGSTLPRR
PRMWSLAQGSTAPRR

SEQ ID NO: 112203 - protein, 15 aa, Artificial Sequence
  Description of Artificial Sequence: Synthetic peptide
  Seed: PRMCSLMQGSTLPRR
PRMWSLAQGSTGPRR

SEQ ID NO: 112204 - protein, 15 aa, Artificial Sequence
  Description of Artificial Sequence: Synthetic peptide
  Seed: PRMCSLMQGSTLPRR
PRMWSLAQGSTIPRR

SEQ ID NO: 112205 - protein, 15 aa, Artificial Sequence
  Description of Artificial Sequence: Synthetic peptide
  Seed: PRMCSLMQGSTLPRR
PRMWSLAQGSTLPRR

SEQ ID NO: 112206 - protein, 15 aa, Artificial Sequence
  Description of Artificial Sequence: Synthetic peptide
  Seed: PRMCSLMQGSTLPRR
PRMWSLAQGSTMPRR

SEQ ID NO: 112207 - protein, 15 aa, Artificial Sequence
  Description of Artificial Sequence: Synthetic peptide
  Seed: PRMCSLMQGSTLPRR
PRMWSLAQGSTSPRR

SEQ ID NO: 112208 - protein, 15 aa, Artificial Sequence
  Description of Artificial Sequence: Synthetic peptide
  Seed: PRMCSLMQGSTLPRR
PRMWSLAQGSTTPRR

SEQ ID NO: 112209 - protein, 15 aa, Artificial Sequence
  Description of Artificial Sequence: Synthetic peptide
  Seed: PRMCSLMQGSTLPRR
PRMWSLAQGSTVPRR

SEQ ID NO: 112210 - protein, 15 aa, Artificial Sequence
  Description of Artificial Sequence: Synthetic peptide
  Seed: PRMCSLMQGSTLPRR
PRMWSLAQISTAPRR

SEQ ID NO: 112211 - protein, 15 aa, Artificial Sequence
  Description of Artificial Sequence: Synthetic peptide
  Seed: PRMCSLMQGSTLPRR
PRMWSLAQISTIPRR

SEQ ID NO: 112212 - protein, 15 aa, Artificial Sequence
  Description of Artificial Sequence: Synthetic peptide
  Seed: PRMCSLMQGSTLPRR
PRMWSLAQISTLPRR

SEQ ID NO: 112213 - protein, 15 aa, Artificial Sequence
  Description of Artificial Sequence: Synthetic peptide
  Seed: PRMCSLMQGSTLPRR
PRMWSLAQISTNPRR

SEQ ID NO: 112214 - protein, 15 aa, Artificial Sequence
  Description of Artificial Sequence: Synthetic peptide
  Seed: PRMCSLMQGSTLPRR
PRMWSLAQISTSPRR

SEQ ID NO: 112215 - protein, 15 aa, Artificial Sequence
  Description of Artificial Sequence: Synthetic peptide
  Seed: PRMCSLMQGSTLPRR
PRMWSLAQISTTPRR

SEQ ID NO: 112216 - protein, 15 aa, Artificial Sequence
  Description of Artificial Sequence: Synthetic peptide
  Seed: PRMCSLMQGSTLPRR
PRMWSLAQISTVPRR

SEQ ID NO: 112217 - protein, 15 aa, Artificial Sequence
  Description of Artificial Sequence: Synthetic peptide
  Seed: PRMCSLMQGSTLPRR
PRMWSLAQLSTAPRR

SEQ ID NO: 112218 - protein, 15 aa, Artificial Sequence
  Description of Artificial Sequence: Synthetic peptide
  Seed: PRMCSLMQGSTLPRR
PRMWSLAQNSTAPRR

SEQ ID NO: 112219 - protein, 15 aa, Artificial Sequence
  Description of Artificial Sequence: Synthetic peptide
  Seed: PRMCSLMQGSTLPRR
PRMWSLAQNSTIPRR

SEQ ID NO: 112220 - protein, 15 aa, Artificial Sequence
  Description of Artificial Sequence: Synthetic peptide
  Seed: PRMCSLMQGSTLPRR
PRMWSLAQNSTLPRR

SEQ ID NO: 112221 - protein, 15 aa, Artificial Sequence
  Description of Artificial Sequence: Synthetic peptide
  Seed: PRMCSLMQGSTLPRR
PRMWSLAQNSTMPRR

SEQ ID NO: 112222 - protein, 15 aa, Artificial Sequence
  Description of Artificial Sequence: Synthetic peptide
  Seed: PRMCSLMQGSTLPRR
PRMWSLAQNSTSPRR

SEQ ID NO: 112223 - protein, 15 aa, Artificial Sequence
  Description of Artificial Sequence: Synthetic peptide
  Seed: PRMCSLMQGSTLPRR
PRMWSLAQNSTTPRR

SEQ ID NO: 112224 - protein, 15 aa, Artificial Sequence
  Description of Artificial Sequence: Synthetic peptide
  Seed: PRMCSLMQGSTLPRR
PRMWSLAQNSTVPRR

SEQ ID NO: 112225 - protein, 15 aa, Artificial Sequence
  Description of Artificial Sequence: Synthetic peptide
  Seed: PRMCSLMQGSTLPRR
PRMWSLAQPSTAPRR

SEQ ID NO: 112226 - protein, 15 aa, Artificial Sequence
  Description of Artificial Sequence: Synthetic peptide
  Seed: PRMCSLMQGSTLPRR
PRMWSLAQPSTIPRR

SEQ ID NO: 112227 - protein, 15 aa, Artificial Sequence
  Description of Artificial Sequence: Synthetic peptide
  Seed: PRMCSLMQGSTLPRR
PRMWSLAQPSTLPRR

SEQ ID NO: 112228 - protein, 15 aa, Artificial Sequence
  Description of Artificial Sequence: Synthetic peptide
  Seed: PRMCSLMQGSTLPRR
PRMWSLAQPSTMPRR

SEQ ID NO: 112229 - protein, 15 aa, Artificial Sequence
  Description of Artificial Sequence: Synthetic peptide
  Seed: PRMCSLMQGSTLPRR
PRMWSLAQPSTNPRR

SEQ ID NO: 112230 - protein, 15 aa, Artificial Sequence
  Description of Artificial Sequence: Synthetic peptide
  Seed: PRMCSLMQGSTLPRR
PRMWSLAQPSTSPRR

SEQ ID NO: 112231 - protein, 15 aa, Artificial Sequence
  Description of Artificial Sequence: Synthetic peptide
  Seed: PRMCSLMQGSTLPRR
PRMWSLAQPSTTPRR

SEQ ID NO: 112232 - protein, 15 aa, Artificial Sequence
  Description of Artificial Sequence: Synthetic peptide
  Seed: PRMCSLMQGSTLPRR
PRMWSLAQPSTVPRR

SEQ ID NO: 112233 - protein, 15 aa, Artificial Sequence
  Description of Artificial Sequence: Synthetic peptide
  Seed: PRMCSLMQGSTLPRR
PRMWSLAQSSTAPRR

SEQ ID NO: 112234 - protein, 15 aa, Artificial Sequence
  Description of Artificial Sequence: Synthetic peptide
  Seed: PRMCSLMQGSTLPRR
PRMWSLAQSSTGPRR

SEQ ID NO: 112235 - protein, 15 aa, Artificial Sequence
  Description of Artificial Sequence: Synthetic peptide
  Seed: PRMCSLMQGSTLPRR
PRMWSLAQSSTIPRR

SEQ ID NO: 112236 - protein, 15 aa, Artificial Sequence
  Description of Artificial Sequence: Synthetic peptide
  Seed: PRMCSLMQGSTLPRR
PRMWSLAQSSTLPRR

SEQ ID NO: 112237 - protein, 15 aa, Artificial Sequence
  Description of Artificial Sequence: Synthetic peptide
  Seed: PRMCSLMQGSTLPRR
PRMWSLAQSSTMPRR

SEQ ID NO: 112238 - protein, 15 aa, Artificial Sequence
  Description of Artificial Sequence: Synthetic peptide
  Seed: PRMCSLMQGSTLPRR
PRMWSLAQSSTNPRR

SEQ ID NO: 112239 - protein, 15 aa, Artificial Sequence
  Description of Artificial Sequence: Synthetic peptide
  Seed: PRMCSLMQGSTLPRR
PRMWSLAQSSTSPRR

SEQ ID NO: 112240 - protein, 15 aa, Artificial Sequence
  Description of Artificial Sequence: Synthetic peptide
  Seed: PRMCSLMQGSTLPRR
PRMWSLAQSSTTPRR

SEQ ID NO: 112241 - protein, 15 aa, Artificial Sequence
  Description of Artificial Sequence: Synthetic peptide
  Seed: PRMCSLMQGSTLPRR
PRMWSLAQSSTVPRR

SEQ ID NO: 112242 - protein, 15 aa, Artificial Sequence
  Description of Artificial Sequence: Synthetic peptide
  Seed: PRMCSLMQGSTLPRR
PRMWSLAQTSTAPRR

SEQ ID NO: 112243 - protein, 15 aa, Artificial Sequence
  Description of Artificial Sequence: Synthetic peptide
  Seed: PRMCSLMQGSTLPRR
PRMWSLAQTSTIPRR

SEQ ID NO: 112244 - protein, 15 aa, Artificial Sequence
  Description of Artificial Sequence: Synthetic peptide
  Seed: PRMCSLMQGSTLPRR
PRMWSLAQTSTLPRR

SEQ ID NO: 112245 - protein, 15 aa, Artificial Sequence
  Description of Artificial Sequence: Synthetic peptide
  Seed: PRMCSLMQGSTLPRR
PRMWSLAQTSTMPRR

SEQ ID NO: 112246 - protein, 15 aa, Artificial Sequence
  Description of Artificial Sequence: Synthetic peptide
  Seed: PRMCSLMQGSTLPRR
PRMWSLAQTSTNPRR

SEQ ID NO: 112247 - protein, 15 aa, Artificial Sequence
  Description of Artificial Sequence: Synthetic peptide
  Seed: PRMCSLMQGSTLPRR
PRMWSLAQTSTSPRR

SEQ ID NO: 112248 - protein, 15 aa, Artificial Sequence
  Description of Artificial Sequence: Synthetic peptide
  Seed: PRMCSLMQGSTLPRR
PRMWSLAQTSTTPRR

SEQ ID NO: 112249 - protein, 15 aa, Artificial Sequence
  Description of Artificial Sequence: Synthetic peptide
  Seed: PRMCSLMQGSTLPRR
PRMWSLAQTSTVPRR

SEQ ID NO: 112250 - protein, 15 aa, Artificial Sequence
  Description of Artificial Sequence: Synthetic peptide
  Seed: PRMCSLMQGSTLPRR
PRMWSLAQVSTAPRR

SEQ ID NO: 112251 - protein, 15 aa, Artificial Sequence
  Description of Artificial Sequence: Synthetic peptide
  Seed: PRMCSLMQGSTLPRR
PRMWSLAQVSTIPRR

SEQ ID NO: 112252 - protein, 15 aa, Artificial Sequence
  Description of Artificial Sequence: Synthetic peptide
  Seed: PRMCSLMQGSTLPRR
PRMWSLAQVSTLPRR

SEQ ID NO: 112253 - protein, 15 aa, Artificial Sequence
  Description of Artificial Sequence: Synthetic peptide
  Seed: PRMCSLMQGSTLPRR
PRMWSLAQVSTMPRR

SEQ ID NO: 112254 - protein, 15 aa, Artificial Sequence
  Description of Artificial Sequence: Synthetic peptide
  Seed: PRMCSLMQGSTLPRR
PRMWSLAQVSTNPRR

SEQ ID NO: 112255 - protein, 15 aa, Artificial Sequence
  Description of Artificial Sequence: Synthetic peptide
  Seed: PRMCSLMQGSTLPRR
PRMWSLAQVSTSPRR

SEQ ID NO: 112256 - protein, 15 aa, Artificial Sequence
  Description of Artificial Sequence: Synthetic peptide
  Seed: PRMCSLMQGSTLPRR
PRMWSLAQVSTTPRR

SEQ ID NO: 112257 - protein, 15 aa, Artificial Sequence
  Description of Artificial Sequence: Synthetic peptide
  Seed: PRMCSLMQGSTLPRR
PRMWSLAQVSTVPRR

SEQ ID NO: 112258 - protein, 15 aa, Artificial Sequence
  Description of Artificial Sequence: Synthetic peptide
  Seed: PRMCSLMQGSTLPRR
PRMWSLCQASTAPRR

SEQ ID NO: 112259 - protein, 15 aa, Artificial Sequence
  Description of Artificial Sequence: Synthetic peptide
  Seed: PRMCSLMQGSTLPRR
PRMWSLCQASTIPRR

SEQ ID NO: 112260 - protein, 15 aa, Artificial Sequence
  Description of Artificial Sequence: Synthetic peptide
  Seed: PRMCSLMQGSTLPRR
PRMWSLCQASTLPRR

SEQ ID NO: 112261 - protein, 15 aa, Artificial Sequence
  Description of Artificial Sequence: Synthetic peptide
  Seed: PRMCSLMQGSTLPRR
PRMWSLCQASTVPRR

SEQ ID NO: 112262 - protein, 15 aa, Artificial Sequence
  Description of Artificial Sequence: Synthetic peptide
  Seed: PRMCSLMQGSTLPRR
PRMWSLCQGSTLPRR

SEQ ID NO: 112263 - protein, 15 aa, Artificial Sequence
  Description of Artificial Sequence: Synthetic peptide
  Seed: PRMCSLMQGSTLPRR
PRMWSLCQSSTLPRR

SEQ ID NO: 112264 - protein, 15 aa, Artificial Sequence
  Description of Artificial Sequence: Synthetic peptide
  Seed: PRMCSLMQGSTLPRR
PRMWSLCQSSTVPRR

SEQ ID NO: 112265 - protein, 15 aa, Artificial Sequence
  Description of Artificial Sequence: Synthetic peptide
  Seed: PRMCSLMQGSTLPRR
PRMWSLEQASTAPRR

SEQ ID NO: 112266 - protein, 15 aa, Artificial Sequence
  Description of Artificial Sequence: Synthetic peptide
  Seed: PRMCSLMQGSTLPRR
PRMWSLEQASTIPRR

SEQ ID NO: 112267 - protein, 15 aa, Artificial Sequence
  Description of Artificial Sequence: Synthetic peptide
  Seed: PRMCSLMQGSTLPRR
PRMWSLEQASTLPRR

SEQ ID NO: 112268 - protein, 15 aa, Artificial Sequence
  Description of Artificial Sequence: Synthetic peptide
  Seed: PRMCSLMQGSTLPRR
PRMWSLEQASTMPRR

SEQ ID NO: 112269 - protein, 15 aa, Artificial Sequence
  Description of Artificial Sequence: Synthetic peptide
  Seed: PRMCSLMQGSTLPRR
PRMWSLEQASTVPRR

SEQ ID NO: 112270 - protein, 15 aa, Artificial Sequence
  Description of Artificial Sequence: Synthetic peptide
  Seed: PRMCSLMQGSTLPRR
PRMWSLEQGSTAPRR

SEQ ID NO: 112271 - protein, 15 aa, Artificial Sequence
  Description of Artificial Sequence: Synthetic peptide
  Seed: PRMCSLMQGSTLPRR
PRMWSLEQGSTIPRR

SEQ ID NO: 112272 - protein, 15 aa, Artificial Sequence
  Description of Artificial Sequence: Synthetic peptide
  Seed: PRMCSLMQGSTLPRR
PRMWSLEQGSTLPRR

SEQ ID NO: 112273 - protein, 15 aa, Artificial Sequence
  Description of Artificial Sequence: Synthetic peptide
  Seed: PRMCSLMQGSTLPRR
PRMWSLEQGSTVPRR

SEQ ID NO: 112274 - protein, 15 aa, Artificial Sequence
  Description of Artificial Sequence: Synthetic peptide
  Seed: PRMCSLMQGSTLPRR
PRMWSLEQSSTAPRR

SEQ ID NO: 112275 - protein, 15 aa, Artificial Sequence
  Description of Artificial Sequence: Synthetic peptide
  Seed: PRMCSLMQGSTLPRR
PRMWSLEQSSTIPRR

SEQ ID NO: 112276 - protein, 15 aa, Artificial Sequence
  Description of Artificial Sequence: Synthetic peptide
  Seed: PRMCSLMQGSTLPRR
PRMWSLEQSSTLPRR

SEQ ID NO: 112277 - protein, 15 aa, Artificial Sequence
  Description of Artificial Sequence: Synthetic peptide
  Seed: PRMCSLMQGSTLPRR
PRMWSLEQSSTVPRR

SEQ ID NO: 112278 - protein, 15 aa, Artificial Sequence
  Description of Artificial Sequence: Synthetic peptide
  Seed: PRMCSLMQGSTLPRR
PRMWSLFQASTAPRR

SEQ ID NO: 112279 - protein, 15 aa, Artificial Sequence
  Description of Artificial Sequence: Synthetic peptide
  Seed: PRMCSLMQGSTLPRR
PRMWSLFQASTIPRR

SEQ ID NO: 112280 - protein, 15 aa, Artificial Sequence
  Description of Artificial Sequence: Synthetic peptide
  Seed: PRMCSLMQGSTLPRR
PRMWSLFQASTLPRR

SEQ ID NO: 112281 - protein, 15 aa, Artificial Sequence
  Description of Artificial Sequence: Synthetic peptide
  Seed: PRMCSLMQGSTLPRR
PRMWSLFQASTMPRR

SEQ ID NO: 112282 - protein, 15 aa, Artificial Sequence
  Description of Artificial Sequence: Synthetic peptide
  Seed: PRMCSLMQGSTLPRR
PRMWSLFQASTNPRR

SEQ ID NO: 112283 - protein, 15 aa, Artificial Sequence
  Description of Artificial Sequence: Synthetic peptide
  Seed: PRMCSLMQGSTLPRR
PRMWSLFQASTSPRR

SEQ ID NO: 112284 - protein, 15 aa, Artificial Sequence
  Description of Artificial Sequence: Synthetic peptide
  Seed: PRMCSLMQGSTLPRR
PRMWSLFQASTTPRR

SEQ ID NO: 112285 - protein, 15 aa, Artificial Sequence
  Description of Artificial Sequence: Synthetic peptide
  Seed: PRMCSLMQGSTLPRR
PRMWSLFQASTVPRR

SEQ ID NO: 112286 - protein, 15 aa, Artificial Sequence
  Description of Artificial Sequence: Synthetic peptide
  Seed: PRMCSLMQGSTLPRR
PRMWSLFQGSTAPRR

SEQ ID NO: 112287 - protein, 15 aa, Artificial Sequence
  Description of Artificial Sequence: Synthetic peptide
  Seed: PRMCSLMQGSTLPRR
PRMWSLFQGSTIPRR

SEQ ID NO: 112288 - protein, 15 aa, Artificial Sequence
  Description of Artificial Sequence: Synthetic peptide
  Seed: PRMCSLMQGSTLPRR
PRMWSLFQGSTLPRR

SEQ ID NO: 112289 - protein, 15 aa, Artificial Sequence
  Description of Artificial Sequence: Synthetic peptide
  Seed: PRMCSLMQGSTLPRR
PRMWSLFQGSTMPRR

SEQ ID NO: 112290 - protein, 15 aa, Artificial Sequence
  Description of Artificial Sequence: Synthetic peptide
  Seed: PRMCSLMQGSTLPRR
PRMWSLFQGSTVPRR

SEQ ID NO: 112291 - protein, 15 aa, Artificial Sequence
  Description of Artificial Sequence: Synthetic peptide
  Seed: PRMCSLMQGSTLPRR
PRMWSLFQISTAPRR

SEQ ID NO: 112292 - protein, 15 aa, Artificial Sequence
  Description of Artificial Sequence: Synthetic peptide
  Seed: PRMCSLMQGSTLPRR
PRMWSLFQMSTAPRR

SEQ ID NO: 112293 - protein, 15 aa, Artificial Sequence
  Description of Artificial Sequence: Synthetic peptide
  Seed: PRMCSLMQGSTLPRR
PRMWSLFQPSTAPRR

SEQ ID NO: 112294 - protein, 15 aa, Artificial Sequence
  Description of Artificial Sequence: Synthetic peptide
  Seed: PRMCSLMQGSTLPRR
PRMWSLFQPSTIPRR

SEQ ID NO: 112295 - protein, 15 aa, Artificial Sequence
  Description of Artificial Sequence: Synthetic peptide
  Seed: PRMCSLMQGSTLPRR
PRMWSLFQPSTLPRR

SEQ ID NO: 112296 - protein, 15 aa, Artificial Sequence
  Description of Artificial Sequence: Synthetic peptide
  Seed: PRMCSLMQGSTLPRR
PRMWSLFQPSTVPRR

SEQ ID NO: 112297 - protein, 15 aa, Artificial Sequence
  Description of Artificial Sequence: Synthetic peptide
  Seed: PRMCSLMQGSTLPRR
PRMWSLFQSSTAPRR

SEQ ID NO: 112298 - protein, 15 aa, Artificial Sequence
  Description of Artificial Sequence: Synthetic peptide
  Seed: PRMCSLMQGSTLPRR
PRMWSLFQSSTIPRR

SEQ ID NO: 112299 - protein, 15 aa, Artificial Sequence
  Description of Artificial Sequence: Synthetic peptide
  Seed: PRMCSLMQGSTLPRR
PRMWSLFQSSTLPRR

SEQ ID NO: 112300 - protein, 15 aa, Artificial Sequence
  Description of Artificial Sequence: Synthetic peptide
  Seed: PRMCSLMQGSTLPRR
PRMWSLFQSSTMPRR

SEQ ID NO: 112301 - protein, 15 aa, Artificial Sequence
  Description of Artificial Sequence: Synthetic peptide
  Seed: PRMCSLMQGSTLPRR
PRMWSLFQSSTVPRR

SEQ ID NO: 112302 - protein, 15 aa, Artificial Sequence
  Description of Artificial Sequence: Synthetic peptide
  Seed: PRMCSLMQGSTLPRR
PRMWSLFQTSTAPRR

SEQ ID NO: 112303 - protein, 15 aa, Artificial Sequence
  Description of Artificial Sequence: Synthetic peptide
  Seed: PRMCSLMQGSTLPRR
PRMWSLFQTSTVPRR

SEQ ID NO: 112304 - protein, 15 aa, Artificial Sequence
  Description of Artificial Sequence: Synthetic peptide
  Seed: PRMCSLMQGSTLPRR
PRMWSLFQVSTAPRR

SEQ ID NO: 112305 - protein, 15 aa, Artificial Sequence
  Description of Artificial Sequence: Synthetic peptide
  Seed: PRMCSLMQGSTLPRR
PRMWSLGQASTAPRR

SEQ ID NO: 112306 - protein, 15 aa, Artificial Sequence
  Description of Artificial Sequence: Synthetic peptide
  Seed: PRMCSLMQGSTLPRR
PRMWSLGQASTIPRR

SEQ ID NO: 112307 - protein, 15 aa, Artificial Sequence
  Description of Artificial Sequence: Synthetic peptide
  Seed: PRMCSLMQGSTLPRR
PRMWSLGQASTLPRR

SEQ ID NO: 112308 - protein, 15 aa, Artificial Sequence
  Description of Artificial Sequence: Synthetic peptide
  Seed: PRMCSLMQGSTLPRR
PRMWSLGQASTMPRR

SEQ ID NO: 112309 - protein, 15 aa, Artificial Sequence
  Description of Artificial Sequence: Synthetic peptide
  Seed: PRMCSLMQGSTLPRR
PRMWSLGQASTVPRR

SEQ ID NO: 112310 - protein, 15 aa, Artificial Sequence
  Description of Artificial Sequence: Synthetic peptide
  Seed: PRMCSLMQGSTLPRR
PRMWSLGQGSTIPRR

SEQ ID NO: 112311 - protein, 15 aa, Artificial Sequence
  Description of Artificial Sequence: Synthetic peptide
  Seed: PRMCSLMQGSTLPRR
PRMWSLGQGSTLPRR

SEQ ID NO: 112312 - protein, 15 aa, Artificial Sequence
  Description of Artificial Sequence: Synthetic peptide
  Seed: PRMCSLMQGSTLPRR
PRMWSLGQGSTVPRR

SEQ ID NO: 112313 - protein, 15 aa, Artificial Sequence
  Description of Artificial Sequence: Synthetic peptide
  Seed: PRMCSLMQGSTLPRR
PRMWSLGQPSTLPRR

SEQ ID NO: 112314 - protein, 15 aa, Artificial Sequence
  Description of Artificial Sequence: Synthetic peptide
  Seed: PRMCSLMQGSTLPRR
PRMWSLGQSSTIPRR

SEQ ID NO: 112315 - protein, 15 aa, Artificial Sequence
  Description of Artificial Sequence: Synthetic peptide
  Seed: PRMCSLMQGSTLPRR
PRMWSLGQSSTLPRR

SEQ ID NO: 112316 - protein, 15 aa, Artificial Sequence
  Description of Artificial Sequence: Synthetic peptide
  Seed: PRMCSLMQGSTLPRR
PRMWSLGQSSTVPRR

SEQ ID NO: 112317 - protein, 15 aa, Artificial Sequence
  Description of Artificial Sequence: Synthetic peptide
  Seed: PRMCSLMQGSTLPRR
PRMWSLHQASTAPRR

SEQ ID NO: 112318 - protein, 15 aa, Artificial Sequence
  Description of Artificial Sequence: Synthetic peptide
  Seed: PRMCSLMQGSTLPRR
PRMWSLHQASTIPRR

SEQ ID NO: 112319 - protein, 15 aa, Artificial Sequence
  Description of Artificial Sequence: Synthetic peptide
  Seed: PRMCSLMQGSTLPRR
PRMWSLHQASTLPRR

SEQ ID NO: 112320 - protein, 15 aa, Artificial Sequence
  Description of Artificial Sequence: Synthetic peptide
  Seed: PRMCSLMQGSTLPRR
PRMWSLHQASTVPRR

SEQ ID NO: 112321 - protein, 15 aa, Artificial Sequence
  Description of Artificial Sequence: Synthetic peptide
  Seed: PRMCSLMQGSTLPRR
PRMWSLHQGSTLPRR

SEQ ID NO: 112322 - protein, 15 aa, Artificial Sequence
  Description of Artificial Sequence: Synthetic peptide
  Seed: PRMCSLMQGSTLPRR
PRMWSLHQSSTIPRR

SEQ ID NO: 112323 - protein, 15 aa, Artificial Sequence
  Description of Artificial Sequence: Synthetic peptide
  Seed: PRMCSLMQGSTLPRR
PRMWSLHQSSTLPRR

SEQ ID NO: 112324 - protein, 15 aa, Artificial Sequence
  Description of Artificial Sequence: Synthetic peptide
  Seed: PRMCSLMQGSTLPRR
PRMWSLIQASTAPRR

SEQ ID NO: 112325 - protein, 15 aa, Artificial Sequence
  Description of Artificial Sequence: Synthetic peptide
  Seed: PRMCSLMQGSTLPRR
PRMWSLIQASTCPRR

SEQ ID NO: 112326 - protein, 15 aa, Artificial Sequence
  Description of Artificial Sequence: Synthetic peptide
  Seed: PRMCSLMQGSTLPRR
PRMWSLIQASTFPRR

SEQ ID NO: 112327 - protein, 15 aa, Artificial Sequence
  Description of Artificial Sequence: Synthetic peptide
  Seed: PRMCSLMQGSTLPRR
PRMWSLIQASTGPRR

SEQ ID NO: 112328 - protein, 15 aa, Artificial Sequence
  Description of Artificial Sequence: Synthetic peptide
  Seed: PRMCSLMQGSTLPRR
PRMWSLIQASTHPRR

SEQ ID NO: 112329 - protein, 15 aa, Artificial Sequence
  Description of Artificial Sequence: Synthetic peptide
  Seed: PRMCSLMQGSTLPRR
PRMWSLIQASTIPRR

SEQ ID NO: 112330 - protein, 15 aa, Artificial Sequence
  Description of Artificial Sequence: Synthetic peptide
  Seed: PRMCSLMQGSTLPRR
PRMWSLIQASTLPRR

SEQ ID NO: 112331 - protein, 15 aa, Artificial Sequence
  Description of Artificial Sequence: Synthetic peptide
  Seed: PRMCSLMQGSTLPRR
PRMWSLIQASTMPRR

SEQ ID NO: 112332 - protein, 15 aa, Artificial Sequence
  Description of Artificial Sequence: Synthetic peptide
  Seed: PRMCSLMQGSTLPRR
PRMWSLIQASTNPRR

SEQ ID NO: 112333 - protein, 15 aa, Artificial Sequence
  Description of Artificial Sequence: Synthetic peptide
  Seed: PRMCSLMQGSTLPRR
PRMWSLIQASTQPRR

SEQ ID NO: 112334 - protein, 15 aa, Artificial Sequence
  Description of Artificial Sequence: Synthetic peptide
  Seed: PRMCSLMQGSTLPRR
PRMWSLIQASTSPRR

SEQ ID NO: 112335 - protein, 15 aa, Artificial Sequence
  Description of Artificial Sequence: Synthetic peptide
  Seed: PRMCSLMQGSTLPRR
PRMWSLIQASTTPRR

SEQ ID NO: 112336 - protein, 15 aa, Artificial Sequence
  Description of Artificial Sequence: Synthetic peptide
  Seed: PRMCSLMQGSTLPRR
PRMWSLIQASTVPRR

SEQ ID NO: 112337 - protein, 15 aa, Artificial Sequence
  Description of Artificial Sequence: Synthetic peptide
  Seed: PRMCSLMQGSTLPRR
PRMWSLIQGSTAPRR

SEQ ID NO: 112338 - protein, 15 aa, Artificial Sequence
  Description of Artificial Sequence: Synthetic peptide
  Seed: PRMCSLMQGSTLPRR
PRMWSLIQGSTCPRR

SEQ ID NO: 112339 - protein, 15 aa, Artificial Sequence
  Description of Artificial Sequence: Synthetic peptide
  Seed: PRMCSLMQGSTLPRR
PRMWSLIQGSTFPRR

SEQ ID NO: 112340 - protein, 15 aa, Artificial Sequence
  Description of Artificial Sequence: Synthetic peptide
  Seed: PRMCSLMQGSTLPRR
PRMWSLIQGSTGPRR

SEQ ID NO: 112341 - protein, 15 aa, Artificial Sequence
  Description of Artificial Sequence: Synthetic peptide
  Seed: PRMCSLMQGSTLPRR
PRMWSLIQGSTIPRR

SEQ ID NO: 112342 - protein, 15 aa, Artificial Sequence
  Description of Artificial Sequence: Synthetic peptide
  Seed: PRMCSLMQGSTLPRR
PRMWSLIQGSTLPRR

SEQ ID NO: 112343 - protein, 15 aa, Artificial Sequence
  Description of Artificial Sequence: Synthetic peptide
  Seed: PRMCSLMQGSTLPRR
PRMWSLIQGSTMPRR

SEQ ID NO: 112344 - protein, 15 aa, Artificial Sequence
  Description of Artificial Sequence: Synthetic peptide
  Seed: PRMCSLMQGSTLPRR
PRMWSLIQGSTNPRR

SEQ ID NO: 112345 - protein, 15 aa, Artificial Sequence
  Description of Artificial Sequence: Synthetic peptide
  Seed: PRMCSLMQGSTLPRR
PRMWSLIQGSTSPRR

SEQ ID NO: 112346 - protein, 15 aa, Artificial Sequence
  Description of Artificial Sequence: Synthetic peptide
  Seed: PRMCSLMQGSTLPRR
PRMWSLIQGSTTPRR

SEQ ID NO: 112347 - protein, 15 aa, Artificial Sequence
  Description of Artificial Sequence: Synthetic peptide
  Seed: PRMCSLMQGSTLPRR
PRMWSLIQGSTVPRR

SEQ ID NO: 112348 - protein, 15 aa, Artificial Sequence
  Description of Artificial Sequence: Synthetic peptide
  Seed: PRMCSLMQGSTLPRR
PRMWSLIQISTAPRR

SEQ ID NO: 112349 - protein, 15 aa, Artificial Sequence
  Description of Artificial Sequence: Synthetic peptide
  Seed: PRMCSLMQGSTLPRR
PRMWSLIQISTGPRR

SEQ ID NO: 112350 - protein, 15 aa, Artificial Sequence
  Description of Artificial Sequence: Synthetic peptide
  Seed: PRMCSLMQGSTLPRR
PRMWSLIQISTHPRR

SEQ ID NO: 112351 - protein, 15 aa, Artificial Sequence
  Description of Artificial Sequence: Synthetic peptide
  Seed: PRMCSLMQGSTLPRR
PRMWSLIQISTIPRR

SEQ ID NO: 112352 - protein, 15 aa, Artificial Sequence
  Description of Artificial Sequence: Synthetic peptide
  Seed: PRMCSLMQGSTLPRR
PRMWSLIQISTLPRR

SEQ ID NO: 112353 - protein, 15 aa, Artificial Sequence
  Description of Artificial Sequence: Synthetic peptide
  Seed: PRMCSLMQGSTLPRR
PRMWSLIQISTMPRR

SEQ ID NO: 112354 - protein, 15 aa, Artificial Sequence
  Description of Artificial Sequence: Synthetic peptide
  Seed: PRMCSLMQGSTLPRR
PRMWSLIQISTNPRR

SEQ ID NO: 112355 - protein, 15 aa, Artificial Sequence
  Description of Artificial Sequence: Synthetic peptide
  Seed: PRMCSLMQGSTLPRR
PRMWSLIQISTSPRR

SEQ ID NO: 112356 - protein, 15 aa, Artificial Sequence
  Description of Artificial Sequence: Synthetic peptide
  Seed: PRMCSLMQGSTLPRR
PRMWSLIQISTTPRR

SEQ ID NO: 112357 - protein, 15 aa, Artificial Sequence
  Description of Artificial Sequence: Synthetic peptide
  Seed: PRMCSLMQGSTLPRR
PRMWSLIQISTVPRR

SEQ ID NO: 112358 - protein, 15 aa, Artificial Sequence
  Description of Artificial Sequence: Synthetic peptide
  Seed: PRMCSLMQGSTLPRR
PRMWSLIQLSTAPRR

SEQ ID NO: 112359 - protein, 15 aa, Artificial Sequence
  Description of Artificial Sequence: Synthetic peptide
  Seed: PRMCSLMQGSTLPRR
PRMWSLIQLSTNPRR

SEQ ID NO: 112360 - protein, 15 aa, Artificial Sequence
  Description of Artificial Sequence: Synthetic peptide
  Seed: PRMCSLMQGSTLPRR
PRMWSLIQLSTSPRR

SEQ ID NO: 112361 - protein, 15 aa, Artificial Sequence
  Description of Artificial Sequence: Synthetic peptide
  Seed: PRMCSLMQGSTLPRR
PRMWSLIQMSTAPRR

SEQ ID NO: 112362 - protein, 15 aa, Artificial Sequence
  Description of Artificial Sequence: Synthetic peptide
  Seed: PRMCSLMQGSTLPRR
PRMWSLIQMSTSPRR

SEQ ID NO: 112363 - protein, 15 aa, Artificial Sequence
  Description of Artificial Sequence: Synthetic peptide
  Seed: PRMCSLMQGSTLPRR
PRMWSLIQNSTAPRR

SEQ ID NO: 112364 - protein, 15 aa, Artificial Sequence
  Description of Artificial Sequence: Synthetic peptide
  Seed: PRMCSLMQGSTLPRR
PRMWSLIQNSTIPRR

SEQ ID NO: 112365 - protein, 15 aa, Artificial Sequence
  Description of Artificial Sequence: Synthetic peptide
  Seed: PRMCSLMQGSTLPRR
PRMWSLIQNSTLPRR

SEQ ID NO: 112366 - protein, 15 aa, Artificial Sequence
  Description of Artificial Sequence: Synthetic peptide
  Seed: PRMCSLMQGSTLPRR
PRMWSLIQNSTMPRR

SEQ ID NO: 112367 - protein, 15 aa, Artificial Sequence
  Description of Artificial Sequence: Synthetic peptide
  Seed: PRMCSLMQGSTLPRR
PRMWSLIQNSTNPRR

SEQ ID NO: 112368 - protein, 15 aa, Artificial Sequence
  Description of Artificial Sequence: Synthetic peptide
  Seed: PRMCSLMQGSTLPRR
PRMWSLIQNSTSPRR

SEQ ID NO: 112369 - protein, 15 aa, Artificial Sequence
  Description of Artificial Sequence: Synthetic peptide
  Seed: PRMCSLMQGSTLPRR
PRMWSLIQNSTTPRR

SEQ ID NO: 112370 - protein, 15 aa, Artificial Sequence
  Description of Artificial Sequence: Synthetic peptide
  Seed: PRMCSLMQGSTLPRR
PRMWSLIQNSTVPRR

SEQ ID NO: 112371 - protein, 15 aa, Artificial Sequence
  Description of Artificial Sequence: Synthetic peptide
  Seed: PRMCSLMQGSTLPRR
PRMWSLIQPSTAPRR

SEQ ID NO: 112372 - protein, 15 aa, Artificial Sequence
  Description of Artificial Sequence: Synthetic peptide
  Seed: PRMCSLMQGSTLPRR
PRMWSLIQPSTGPRR

SEQ ID NO: 112373 - protein, 15 aa, Artificial Sequence
  Description of Artificial Sequence: Synthetic peptide
  Seed: PRMCSLMQGSTLPRR
PRMWSLIQPSTHPRR

SEQ ID NO: 112374 - protein, 15 aa, Artificial Sequence
  Description of Artificial Sequence: Synthetic peptide
  Seed: PRMCSLMQGSTLPRR
PRMWSLIQPSTIPRR

SEQ ID NO: 112375 - protein, 15 aa, Artificial Sequence
  Description of Artificial Sequence: Synthetic peptide
  Seed: PRMCSLMQGSTLPRR
PRMWSLIQPSTLPRR

SEQ ID NO: 112376 - protein, 15 aa, Artificial Sequence
  Description of Artificial Sequence: Synthetic peptide
  Seed: PRMCSLMQGSTLPRR
PRMWSLIQPSTMPRR

SEQ ID NO: 112377 - protein, 15 aa, Artificial Sequence
  Description of Artificial Sequence: Synthetic peptide
  Seed: PRMCSLMQGSTLPRR
PRMWSLIQPSTNPRR

SEQ ID NO: 112378 - protein, 15 aa, Artificial Sequence
  Description of Artificial Sequence: Synthetic peptide
  Seed: PRMCSLMQGSTLPRR
PRMWSLIQPSTQPRR

SEQ ID NO: 112379 - protein, 15 aa, Artificial Sequence
  Description of Artificial Sequence: Synthetic peptide
  Seed: PRMCSLMQGSTLPRR
PRMWSLIQPSTSPRR

SEQ ID NO: 112380 - protein, 15 aa, Artificial Sequence
  Description of Artificial Sequence: Synthetic peptide
  Seed: PRMCSLMQGSTLPRR
PRMWSLIQPSTTPRR

SEQ ID NO: 112381 - protein, 15 aa, Artificial Sequence
  Description of Artificial Sequence: Synthetic peptide
  Seed: PRMCSLMQGSTLPRR
PRMWSLIQPSTVPRR

SEQ ID NO: 112382 - protein, 15 aa, Artificial Sequence
  Description of Artificial Sequence: Synthetic peptide
  Seed: PRMCSLMQGSTLPRR
PRMWSLIQSSTAPRR

SEQ ID NO: 112383 - protein, 15 aa, Artificial Sequence
  Description of Artificial Sequence: Synthetic peptide
  Seed: PRMCSLMQGSTLPRR
PRMWSLIQSSTCPRR

SEQ ID NO: 112384 - protein, 15 aa, Artificial Sequence
  Description of Artificial Sequence: Synthetic peptide
  Seed: PRMCSLMQGSTLPRR
PRMWSLIQSSTFPRR

SEQ ID NO: 112385 - protein, 15 aa, Artificial Sequence
  Description of Artificial Sequence: Synthetic peptide
  Seed: PRMCSLMQGSTLPRR
PRMWSLIQSSTGPRR

SEQ ID NO: 112386 - protein, 15 aa, Artificial Sequence
  Description of Artificial Sequence: Synthetic peptide
  Seed: PRMCSLMQGSTLPRR
PRMWSLIQSSTHPRR

SEQ ID NO: 112387 - protein, 15 aa, Artificial Sequence
  Description of Artificial Sequence: Synthetic peptide
  Seed: PRMCSLMQGSTLPRR
PRMWSLIQSSTIPRR

SEQ ID NO: 112388 - protein, 15 aa, Artificial Sequence
  Description of Artificial Sequence: Synthetic peptide
  Seed: PRMCSLMQGSTLPRR
PRMWSLIQSSTLPRR

SEQ ID NO: 112389 - protein, 15 aa, Artificial Sequence
  Description of Artificial Sequence: Synthetic peptide
  Seed: PRMCSLMQGSTLPRR
PRMWSLIQSSTMPRR

SEQ ID NO: 112390 - protein, 15 aa, Artificial Sequence
  Description of Artificial Sequence: Synthetic peptide
  Seed: PRMCSLMQGSTLPRR
PRMWSLIQSSTNPRR

SEQ ID NO: 112391 - protein, 15 aa, Artificial Sequence
  Description of Artificial Sequence: Synthetic peptide
  Seed: PRMCSLMQGSTLPRR
PRMWSLIQSSTQPRR

SEQ ID NO: 112392 - protein, 15 aa, Artificial Sequence
  Description of Artificial Sequence: Synthetic peptide
  Seed: PRMCSLMQGSTLPRR
PRMWSLIQSSTSPRR

SEQ ID NO: 112393 - protein, 15 aa, Artificial Sequence
  Description of Artificial Sequence: Synthetic peptide
  Seed: PRMCSLMQGSTLPRR
PRMWSLIQSSTTPRR

SEQ ID NO: 112394 - protein, 15 aa, Artificial Sequence
  Description of Artificial Sequence: Synthetic peptide
  Seed: PRMCSLMQGSTLPRR
PRMWSLIQSSTVPRR

SEQ ID NO: 112395 - protein, 15 aa, Artificial Sequence
  Description of Artificial Sequence: Synthetic peptide
  Seed: PRMCSLMQGSTLPRR
PRMWSLIQTSTAPRR

SEQ ID NO: 112396 - protein, 15 aa, Artificial Sequence
  Description of Artificial Sequence: Synthetic peptide
  Seed: PRMCSLMQGSTLPRR
PRMWSLIQTSTGPRR

SEQ ID NO: 112397 - protein, 15 aa, Artificial Sequence
  Description of Artificial Sequence: Synthetic peptide
  Seed: PRMCSLMQGSTLPRR
PRMWSLIQTSTHPRR

SEQ ID NO: 112398 - protein, 15 aa, Artificial Sequence
  Description of Artificial Sequence: Synthetic peptide
  Seed: PRMCSLMQGSTLPRR
PRMWSLIQTSTIPRR

SEQ ID NO: 112399 - protein, 15 aa, Artificial Sequence
  Description of Artificial Sequence: Synthetic peptide
  Seed: PRMCSLMQGSTLPRR
PRMWSLIQTSTLPRR

SEQ ID NO: 112400 - protein, 15 aa, Artificial Sequence
  Description of Artificial Sequence: Synthetic peptide
  Seed: PRMCSLMQGSTLPRR
PRMWSLIQTSTMPRR

SEQ ID NO: 112401 - protein, 15 aa, Artificial Sequence
  Description of Artificial Sequence: Synthetic peptide
  Seed: PRMCSLMQGSTLPRR
PRMWSLIQTSTNPRR

SEQ ID NO: 112402 - protein, 15 aa, Artificial Sequence
  Description of Artificial Sequence: Synthetic peptide
  Seed: PRMCSLMQGSTLPRR
PRMWSLIQTSTQPRR

SEQ ID NO: 112403 - protein, 15 aa, Artificial Sequence
  Description of Artificial Sequence: Synthetic peptide
  Seed: PRMCSLMQGSTLPRR
PRMWSLIQTSTSPRR

SEQ ID NO: 112404 - protein, 15 aa, Artificial Sequence
  Description of Artificial Sequence: Synthetic peptide
  Seed: PRMCSLMQGSTLPRR
PRMWSLIQTSTTPRR

SEQ ID NO: 112405 - protein, 15 aa, Artificial Sequence
  Description of Artificial Sequence: Synthetic peptide
  Seed: PRMCSLMQGSTLPRR
PRMWSLIQTSTVPRR

SEQ ID NO: 112406 - protein, 15 aa, Artificial Sequence
  Description of Artificial Sequence: Synthetic peptide
  Seed: PRMCSLMQGSTLPRR
PRMWSLIQVSTAPRR

SEQ ID NO: 112407 - protein, 15 aa, Artificial Sequence
  Description of Artificial Sequence: Synthetic peptide
  Seed: PRMCSLMQGSTLPRR
PRMWSLIQVSTGPRR

SEQ ID NO: 112408 - protein, 15 aa, Artificial Sequence
  Description of Artificial Sequence: Synthetic peptide
  Seed: PRMCSLMQGSTLPRR
PRMWSLIQVSTHPRR

SEQ ID NO: 112409 - protein, 15 aa, Artificial Sequence
  Description of Artificial Sequence: Synthetic peptide
  Seed: PRMCSLMQGSTLPRR
PRMWSLIQVSTIPRR

SEQ ID NO: 112410 - protein, 15 aa, Artificial Sequence
  Description of Artificial Sequence: Synthetic peptide
  Seed: PRMCSLMQGSTLPRR
PRMWSLIQVSTLPRR

SEQ ID NO: 112411 - protein, 15 aa, Artificial Sequence
  Description of Artificial Sequence: Synthetic peptide
  Seed: PRMCSLMQGSTLPRR
PRMWSLIQVSTMPRR

SEQ ID NO: 112412 - protein, 15 aa, Artificial Sequence
  Description of Artificial Sequence: Synthetic peptide
  Seed: PRMCSLMQGSTLPRR
PRMWSLIQVSTNPRR

SEQ ID NO: 112413 - protein, 15 aa, Artificial Sequence
  Description of Artificial Sequence: Synthetic peptide
  Seed: PRMCSLMQGSTLPRR
PRMWSLIQVSTQPRR

SEQ ID NO: 112414 - protein, 15 aa, Artificial Sequence
  Description of Artificial Sequence: Synthetic peptide
  Seed: PRMCSLMQGSTLPRR
PRMWSLIQVSTSPRR

SEQ ID NO: 112415 - protein, 15 aa, Artificial Sequence
  Description of Artificial Sequence: Synthetic peptide
  Seed: PRMCSLMQGSTLPRR
PRMWSLIQVSTTPRR

SEQ ID NO: 112416 - protein, 15 aa, Artificial Sequence
  Description of Artificial Sequence: Synthetic peptide
  Seed: PRMCSLMQGSTLPRR
PRMWSLIQVSTVPRR

SEQ ID NO: 112417 - protein, 15 aa, Artificial Sequence
  Description of Artificial Sequence: Synthetic peptide
  Seed: PRMCSLMQGSTLPRR
PRMWSLLQASTAPRR

SEQ ID NO: 112418 - protein, 15 aa, Artificial Sequence
  Description of Artificial Sequence: Synthetic peptide
  Seed: PRMCSLMQGSTLPRR
PRMWSLLQASTCPRR

SEQ ID NO: 112419 - protein, 15 aa, Artificial Sequence
  Description of Artificial Sequence: Synthetic peptide
  Seed: PRMCSLMQGSTLPRR
PRMWSLLQASTDPRR

SEQ ID NO: 112420 - protein, 15 aa, Artificial Sequence
  Description of Artificial Sequence: Synthetic peptide
  Seed: PRMCSLMQGSTLPRR
PRMWSLLQASTEPRR

SEQ ID NO: 112421 - protein, 15 aa, Artificial Sequence
  Description of Artificial Sequence: Synthetic peptide
  Seed: PRMCSLMQGSTLPRR
PRMWSLLQASTFPRR

SEQ ID NO: 112422 - protein, 15 aa, Artificial Sequence
  Description of Artificial Sequence: Synthetic peptide
  Seed: PRMCSLMQGSTLPRR
PRMWSLLQASTGPRR

SEQ ID NO: 112423 - protein, 15 aa, Artificial Sequence
  Description of Artificial Sequence: Synthetic peptide
  Seed: PRMCSLMQGSTLPRR
PRMWSLLQASTHPRR

SEQ ID NO: 112424 - protein, 15 aa, Artificial Sequence
  Description of Artificial Sequence: Synthetic peptide
  Seed: PRMCSLMQGSTLPRR
PRMWSLLQASTIPRR

SEQ ID NO: 112425 - protein, 15 aa, Artificial Sequence
  Description of Artificial Sequence: Synthetic peptide
  Seed: PRMCSLMQGSTLPRR
PRMWSLLQASTKPRR

SEQ ID NO: 112426 - protein, 15 aa, Artificial Sequence
  Description of Artificial Sequence: Synthetic peptide
  Seed: PRMCSLMQGSTLPRR
PRMWSLLQASTLPRR

SEQ ID NO: 112427 - protein, 15 aa, Artificial Sequence
  Description of Artificial Sequence: Synthetic peptide
  Seed: PRMCSLMQGSTLPRR
PRMWSLLQASTMPRR

SEQ ID NO: 112428 - protein, 15 aa, Artificial Sequence
  Description of Artificial Sequence: Synthetic peptide
  Seed: PRMCSLMQGSTLPRR
PRMWSLLQASTNPRR

SEQ ID NO: 112429 - protein, 15 aa, Artificial Sequence
  Description of Artificial Sequence: Synthetic peptide
  Seed: PRMCSLMQGSTLPRR
PRMWSLLQASTPPRR

SEQ ID NO: 112430 - protein, 15 aa, Artificial Sequence
  Description of Artificial Sequence: Synthetic peptide
  Seed: PRMCSLMQGSTLPRR
PRMWSLLQASTQPRR

SEQ ID NO: 112431 - protein, 15 aa, Artificial Sequence
  Description of Artificial Sequence: Synthetic peptide
  Seed: PRMCSLMQGSTLPRR
PRMWSLLQASTRPRR

SEQ ID NO: 112432 - protein, 15 aa, Artificial Sequence
  Description of Artificial Sequence: Synthetic peptide
  Seed: PRMCSLMQGSTLPRR
PRMWSLLQASTSPRR

SEQ ID NO: 112433 - protein, 15 aa, Artificial Sequence
  Description of Artificial Sequence: Synthetic peptide
  Seed: PRMCSLMQGSTLPRR
PRMWSLLQASTTPRR

SEQ ID NO: 112434 - protein, 15 aa, Artificial Sequence
  Description of Artificial Sequence: Synthetic peptide
  Seed: PRMCSLMQGSTLPRR
PRMWSLLQASTVPRR

SEQ ID NO: 112435 - protein, 15 aa, Artificial Sequence
  Description of Artificial Sequence: Synthetic peptide
  Seed: PRMCSLMQGSTLPRR
PRMWSLLQASTWPRR

SEQ ID NO: 112436 - protein, 15 aa, Artificial Sequence
  Description of Artificial Sequence: Synthetic peptide
  Seed: PRMCSLMQGSTLPRR
PRMWSLLQASTYPRR

SEQ ID NO: 112437 - protein, 15 aa, Artificial Sequence
  Description of Artificial Sequence: Synthetic peptide
  Seed: PRMCSLMQGSTLPRR
PRMWSLLQCSTLPRR

SEQ ID NO: 112438 - protein, 15 aa, Artificial Sequence
  Description of Artificial Sequence: Synthetic peptide
  Seed: PRMCSLMQGSTLPRR
PRMWSLLQCSTVPRR

SEQ ID NO: 112439 - protein, 15 aa, Artificial Sequence
  Description of Artificial Sequence: Synthetic peptide
  Seed: PRMCSLMQGSTLPRR
PRMWSLLQGSTAPRR

SEQ ID NO: 112440 - protein, 15 aa, Artificial Sequence
  Description of Artificial Sequence: Synthetic peptide
  Seed: PRMCSLMQGSTLPRR
PRMWSLLQGSTCPRR

SEQ ID NO: 112441 - protein, 15 aa, Artificial Sequence
  Description of Artificial Sequence: Synthetic peptide
  Seed: PRMCSLMQGSTLPRR
PRMWSLLQGSTFPRR

SEQ ID NO: 112442 - protein, 15 aa, Artificial Sequence
  Description of Artificial Sequence: Synthetic peptide
  Seed: PRMCSLMQGSTLPRR
PRMWSLLQGSTGPRR

SEQ ID NO: 112443 - protein, 15 aa, Artificial Sequence
  Description of Artificial Sequence: Synthetic peptide
  Seed: PRMCSLMQGSTLPRR
PRMWSLLQGSTHPRR

SEQ ID NO: 112444 - protein, 15 aa, Artificial Sequence
  Description of Artificial Sequence: Synthetic peptide
  Seed: PRMCSLMQGSTLPRR
PRMWSLLQGSTIPRR

SEQ ID NO: 112445 - protein, 15 aa, Artificial Sequence
  Description of Artificial Sequence: Synthetic peptide
  Seed: PRMCSLMQGSTLPRR
PRMWSLLQGSTKPRR

SEQ ID NO: 112446 - protein, 15 aa, Artificial Sequence
  Description of Artificial Sequence: Synthetic peptide
  Seed: PRMCSLMQGSTLPRR
PRMWSLLQGSTLPRR

SEQ ID NO: 112447 - protein, 15 aa, Artificial Sequence
  Description of Artificial Sequence: Synthetic peptide
  Seed: PRMCSLMQGSTLPRR
PRMWSLLQGSTMPRR

SEQ ID NO: 112448 - protein, 15 aa, Artificial Sequence
  Description of Artificial Sequence: Synthetic peptide
  Seed: PRMCSLMQGSTLPRR
PRMWSLLQGSTNPRR

SEQ ID NO: 112449 - protein, 15 aa, Artificial Sequence
  Description of Artificial Sequence: Synthetic peptide
  Seed: PRMCSLMQGSTLPRR
PRMWSLLQGSTPPRR

SEQ ID NO: 112450 - protein, 15 aa, Artificial Sequence
  Description of Artificial Sequence: Synthetic peptide
  Seed: PRMCSLMQGSTLPRR
PRMWSLLQGSTQPRR

SEQ ID NO: 112451 - protein, 15 aa, Artificial Sequence
  Description of Artificial Sequence: Synthetic peptide
  Seed: PRMCSLMQGSTLPRR
PRMWSLLQGSTSPRR

SEQ ID NO: 112452 - protein, 15 aa, Artificial Sequence
  Description of Artificial Sequence: Synthetic peptide
  Seed: PRMCSLMQGSTLPRR
PRMWSLLQGSTTPRR

SEQ ID NO: 112453 - protein, 15 aa, Artificial Sequence
  Description of Artificial Sequence: Synthetic peptide
  Seed: PRMCSLMQGSTLPRR
PRMWSLLQGSTVPRR

SEQ ID NO: 112454 - protein, 15 aa, Artificial Sequence
  Description of Artificial Sequence: Synthetic peptide
  Seed: PRMCSLMQGSTLPRR
PRMWSLLQGSTWPRR

SEQ ID NO: 112455 - protein, 15 aa, Artificial Sequence
  Description of Artificial Sequence: Synthetic peptide
  Seed: PRMCSLMQGSTLPRR
PRMWSLLQGSTYPRR

SEQ ID NO: 112456 - protein, 15 aa, Artificial Sequence
  Description of Artificial Sequence: Synthetic peptide
  Seed: PRMCSLMQGSTLPRR
PRMWSLLQHSTAPRR

SEQ ID NO: 112457 - protein, 15 aa, Artificial Sequence
  Description of Artificial Sequence: Synthetic peptide
  Seed: PRMCSLMQGSTLPRR
PRMWSLLQHSTIPRR

SEQ ID NO: 112458 - protein, 15 aa, Artificial Sequence
  Description of Artificial Sequence: Synthetic peptide
  Seed: PRMCSLMQGSTLPRR
PRMWSLLQHSTLPRR

SEQ ID NO: 112459 - protein, 15 aa, Artificial Sequence
  Description of Artificial Sequence: Synthetic peptide
  Seed: PRMCSLMQGSTLPRR
PRMWSLLQHSTVPRR

SEQ ID NO: 112460 - protein, 15 aa, Artificial Sequence
  Description of Artificial Sequence: Synthetic peptide
  Seed: PRMCSLMQGSTLPRR
PRMWSLLQISTAPRR

SEQ ID NO: 112461 - protein, 15 aa, Artificial Sequence
  Description of Artificial Sequence: Synthetic peptide
  Seed: PRMCSLMQGSTLPRR
PRMWSLLQISTGPRR

SEQ ID NO: 112462 - protein, 15 aa, Artificial Sequence
  Description of Artificial Sequence: Synthetic peptide
  Seed: PRMCSLMQGSTLPRR
PRMWSLLQISTHPRR

SEQ ID NO: 112463 - protein, 15 aa, Artificial Sequence
  Description of Artificial Sequence: Synthetic peptide
  Seed: PRMCSLMQGSTLPRR
PRMWSLLQISTIPRR

SEQ ID NO: 112464 - protein, 15 aa, Artificial Sequence
  Description of Artificial Sequence: Synthetic peptide
  Seed: PRMCSLMQGSTLPRR
PRMWSLLQISTLPRR

SEQ ID NO: 112465 - protein, 15 aa, Artificial Sequence
  Description of Artificial Sequence: Synthetic peptide
  Seed: PRMCSLMQGSTLPRR
PRMWSLLQISTMPRR

SEQ ID NO: 112466 - protein, 15 aa, Artificial Sequence
  Description of Artificial Sequence: Synthetic peptide
  Seed: PRMCSLMQGSTLPRR
PRMWSLLQISTNPRR

SEQ ID NO: 112467 - protein, 15 aa, Artificial Sequence
  Description of Artificial Sequence: Synthetic peptide
  Seed: PRMCSLMQGSTLPRR
PRMWSLLQISTQPRR

SEQ ID NO: 112468 - protein, 15 aa, Artificial Sequence
  Description of Artificial Sequence: Synthetic peptide
  Seed: PRMCSLMQGSTLPRR
PRMWSLLQISTSPRR

SEQ ID NO: 112469 - protein, 15 aa, Artificial Sequence
  Description of Artificial Sequence: Synthetic peptide
  Seed: PRMCSLMQGSTLPRR
PRMWSLLQISTTPRR

SEQ ID NO: 112470 - protein, 15 aa, Artificial Sequence
  Description of Artificial Sequence: Synthetic peptide
  Seed: PRMCSLMQGSTLPRR
PRMWSLLQISTVPRR

SEQ ID NO: 112471 - protein, 15 aa, Artificial Sequence
  Description of Artificial Sequence: Synthetic peptide
  Seed: PRMCSLMQGSTLPRR
PRMWSLLQLSTAPRR

SEQ ID NO: 112472 - protein, 15 aa, Artificial Sequence
  Description of Artificial Sequence: Synthetic peptide
  Seed: PRMCSLMQGSTLPRR
PRMWSLLQLSTIPRR

SEQ ID NO: 112473 - protein, 15 aa, Artificial Sequence
  Description of Artificial Sequence: Synthetic peptide
  Seed: PRMCSLMQGSTLPRR
PRMWSLLQLSTLPRR

SEQ ID NO: 112474 - protein, 15 aa, Artificial Sequence
  Description of Artificial Sequence: Synthetic peptide
  Seed: PRMCSLMQGSTLPRR
PRMWSLLQLSTNPRR

SEQ ID NO: 112475 - protein, 15 aa, Artificial Sequence
  Description of Artificial Sequence: Synthetic peptide
  Seed: PRMCSLMQGSTLPRR
PRMWSLLQLSTSPRR

SEQ ID NO: 112476 - protein, 15 aa, Artificial Sequence
  Description of Artificial Sequence: Synthetic peptide
  Seed: PRMCSLMQGSTLPRR
PRMWSLLQLSTTPRR

SEQ ID NO: 112477 - protein, 15 aa, Artificial Sequence
  Description of Artificial Sequence: Synthetic peptide
  Seed: PRMCSLMQGSTLPRR
PRMWSLLQLSTVPRR

SEQ ID NO: 112478 - protein, 15 aa, Artificial Sequence
  Description of Artificial Sequence: Synthetic peptide
  Seed: PRMCSLMQGSTLPRR
PRMWSLLQMSTAPRR

SEQ ID NO: 112479 - protein, 15 aa, Artificial Sequence
  Description of Artificial Sequence: Synthetic peptide
  Seed: PRMCSLMQGSTLPRR
PRMWSLLQMSTIPRR

SEQ ID NO: 112480 - protein, 15 aa, Artificial Sequence
  Description of Artificial Sequence: Synthetic peptide
  Seed: PRMCSLMQGSTLPRR
PRMWSLLQMSTLPRR

SEQ ID NO: 112481 - protein, 15 aa, Artificial Sequence
  Description of Artificial Sequence: Synthetic peptide
  Seed: PRMCSLMQGSTLPRR
PRMWSLLQMSTNPRR

SEQ ID NO: 112482 - protein, 15 aa, Artificial Sequence
  Description of Artificial Sequence: Synthetic peptide
  Seed: PRMCSLMQGSTLPRR
PRMWSLLQMSTSPRR

SEQ ID NO: 112483 - protein, 15 aa, Artificial Sequence
  Description of Artificial Sequence: Synthetic peptide
  Seed: PRMCSLMQGSTLPRR
PRMWSLLQMSTTPRR

SEQ ID NO: 112484 - protein, 15 aa, Artificial Sequence
  Description of Artificial Sequence: Synthetic peptide
  Seed: PRMCSLMQGSTLPRR
PRMWSLLQMSTVPRR

SEQ ID NO: 112485 - protein, 15 aa, Artificial Sequence
  Description of Artificial Sequence: Synthetic peptide
  Seed: PRMCSLMQGSTLPRR
PRMWSLLQNSTAPRR

SEQ ID NO: 112486 - protein, 15 aa, Artificial Sequence
  Description of Artificial Sequence: Synthetic peptide
  Seed: PRMCSLMQGSTLPRR
PRMWSLLQNSTCPRR

SEQ ID NO: 112487 - protein, 15 aa, Artificial Sequence
  Description of Artificial Sequence: Synthetic peptide
  Seed: PRMCSLMQGSTLPRR
PRMWSLLQNSTFPRR

SEQ ID NO: 112488 - protein, 15 aa, Artificial Sequence
  Description of Artificial Sequence: Synthetic peptide
  Seed: PRMCSLMQGSTLPRR
PRMWSLLQNSTGPRR

SEQ ID NO: 112489 - protein, 15 aa, Artificial Sequence
  Description of Artificial Sequence: Synthetic peptide
  Seed: PRMCSLMQGSTLPRR
PRMWSLLQNSTIPRR

SEQ ID NO: 112490 - protein, 15 aa, Artificial Sequence
  Description of Artificial Sequence: Synthetic peptide
  Seed: PRMCSLMQGSTLPRR
PRMWSLLQNSTLPRR

SEQ ID NO: 112491 - protein, 15 aa, Artificial Sequence
  Description of Artificial Sequence: Synthetic peptide
  Seed: PRMCSLMQGSTLPRR
PRMWSLLQNSTMPRR

SEQ ID NO: 112492 - protein, 15 aa, Artificial Sequence
  Description of Artificial Sequence: Synthetic peptide
  Seed: PRMCSLMQGSTLPRR
PRMWSLLQNSTNPRR

SEQ ID NO: 112493 - protein, 15 aa, Artificial Sequence
  Description of Artificial Sequence: Synthetic peptide
  Seed: PRMCSLMQGSTLPRR
PRMWSLLQNSTSPRR

SEQ ID NO: 112494 - protein, 15 aa, Artificial Sequence
  Description of Artificial Sequence: Synthetic peptide
  Seed: PRMCSLMQGSTLPRR
PRMWSLLQNSTTPRR

SEQ ID NO: 112495 - protein, 15 aa, Artificial Sequence
  Description of Artificial Sequence: Synthetic peptide
  Seed: PRMCSLMQGSTLPRR
PRMWSLLQNSTVPRR

SEQ ID NO: 112496 - protein, 15 aa, Artificial Sequence
  Description of Artificial Sequence: Synthetic peptide
  Seed: PRMCSLMQGSTLPRR
PRMWSLLQPSTAPRR

SEQ ID NO: 112497 - protein, 15 aa, Artificial Sequence
  Description of Artificial Sequence: Synthetic peptide
  Seed: PRMCSLMQGSTLPRR
PRMWSLLQPSTCPRR

SEQ ID NO: 112498 - protein, 15 aa, Artificial Sequence
  Description of Artificial Sequence: Synthetic peptide
  Seed: PRMCSLMQGSTLPRR
PRMWSLLQPSTFPRR

SEQ ID NO: 112499 - protein, 15 aa, Artificial Sequence
  Description of Artificial Sequence: Synthetic peptide
  Seed: PRMCSLMQGSTLPRR
PRMWSLLQPSTGPRR

SEQ ID NO: 112500 - protein, 15 aa, Artificial Sequence
  Description of Artificial Sequence: Synthetic peptide
  Seed: PRMCSLMQGSTLPRR
PRMWSLLQPSTHPRR

SEQ ID NO: 112501 - protein, 15 aa, Artificial Sequence
  Description of Artificial Sequence: Synthetic peptide
  Seed: PRMCSLMQGSTLPRR
PRMWSLLQPSTIPRR

SEQ ID NO: 112502 - protein, 15 aa, Artificial Sequence
  Description of Artificial Sequence: Synthetic peptide
  Seed: PRMCSLMQGSTLPRR
PRMWSLLQPSTLPRR

SEQ ID NO: 112503 - protein, 15 aa, Artificial Sequence
  Description of Artificial Sequence: Synthetic peptide
  Seed: PRMCSLMQGSTLPRR
PRMWSLLQPSTMPRR

SEQ ID NO: 112504 - protein, 15 aa, Artificial Sequence
  Description of Artificial Sequence: Synthetic peptide
  Seed: PRMCSLMQGSTLPRR
PRMWSLLQPSTNPRR

SEQ ID NO: 112505 - protein, 15 aa, Artificial Sequence
  Description of Artificial Sequence: Synthetic peptide
  Seed: PRMCSLMQGSTLPRR
PRMWSLLQPSTPPRR

SEQ ID NO: 112506 - protein, 15 aa, Artificial Sequence
  Description of Artificial Sequence: Synthetic peptide
  Seed: PRMCSLMQGSTLPRR
PRMWSLLQPSTQPRR

SEQ ID NO: 112507 - protein, 15 aa, Artificial Sequence
  Description of Artificial Sequence: Synthetic peptide
  Seed: PRMCSLMQGSTLPRR
PRMWSLLQPSTSPRR

SEQ ID NO: 112508 - protein, 15 aa, Artificial Sequence
  Description of Artificial Sequence: Synthetic peptide
  Seed: PRMCSLMQGSTLPRR
PRMWSLLQPSTTPRR

SEQ ID NO: 112509 - protein, 15 aa, Artificial Sequence
  Description of Artificial Sequence: Synthetic peptide
  Seed: PRMCSLMQGSTLPRR
PRMWSLLQPSTVPRR

SEQ ID NO: 112510 - protein, 15 aa, Artificial Sequence
  Description of Artificial Sequence: Synthetic peptide
  Seed: PRMCSLMQGSTLPRR
PRMWSLLQQSTLPRR

SEQ ID NO: 112511 - protein, 15 aa, Artificial Sequence
  Description of Artificial Sequence: Synthetic peptide
  Seed: PRMCSLMQGSTLPRR
PRMWSLLQQSTVPRR

SEQ ID NO: 112512 - protein, 15 aa, Artificial Sequence
  Description of Artificial Sequence: Synthetic peptide
  Seed: PRMCSLMQGSTLPRR
PRMWSLLQSSTAPRR

SEQ ID NO: 112513 - protein, 15 aa, Artificial Sequence
  Description of Artificial Sequence: Synthetic peptide
  Seed: PRMCSLMQGSTLPRR
PRMWSLLQSSTCPRR

SEQ ID NO: 112514 - protein, 15 aa, Artificial Sequence
  Description of Artificial Sequence: Synthetic peptide
  Seed: PRMCSLMQGSTLPRR
PRMWSLLQSSTFPRR

SEQ ID NO: 112515 - protein, 15 aa, Artificial Sequence
  Description of Artificial Sequence: Synthetic peptide
  Seed: PRMCSLMQGSTLPRR
PRMWSLLQSSTGPRR

SEQ ID NO: 112516 - protein, 15 aa, Artificial Sequence
  Description of Artificial Sequence: Synthetic peptide
  Seed: PRMCSLMQGSTLPRR
PRMWSLLQSSTHPRR

SEQ ID NO: 112517 - protein, 15 aa, Artificial Sequence
  Description of Artificial Sequence: Synthetic peptide
  Seed: PRMCSLMQGSTLPRR
PRMWSLLQSSTIPRR

SEQ ID NO: 112518 - protein, 15 aa, Artificial Sequence
  Description of Artificial Sequence: Synthetic peptide
  Seed: PRMCSLMQGSTLPRR
PRMWSLLQSSTKPRR

SEQ ID NO: 112519 - protein, 15 aa, Artificial Sequence
  Description of Artificial Sequence: Synthetic peptide
  Seed: PRMCSLMQGSTLPRR
PRMWSLLQSSTLPRR

SEQ ID NO: 112520 - protein, 15 aa, Artificial Sequence
  Description of Artificial Sequence: Synthetic peptide
  Seed: PRMCSLMQGSTLPRR
PRMWSLLQSSTMPRR

SEQ ID NO: 112521 - protein, 15 aa, Artificial Sequence
  Description of Artificial Sequence: Synthetic peptide
  Seed: PRMCSLMQGSTLPRR
PRMWSLLQSSTNPRR

SEQ ID NO: 112522 - protein, 15 aa, Artificial Sequence
  Description of Artificial Sequence: Synthetic peptide
  Seed: PRMCSLMQGSTLPRR
PRMWSLLQSSTPPRR

SEQ ID NO: 112523 - protein, 15 aa, Artificial Sequence
  Description of Artificial Sequence: Synthetic peptide
  Seed: PRMCSLMQGSTLPRR
PRMWSLLQSSTQPRR

SEQ ID NO: 112524 - protein, 15 aa, Artificial Sequence
  Description of Artificial Sequence: Synthetic peptide
  Seed: PRMCSLMQGSTLPRR
PRMWSLLQSSTRPRR

SEQ ID NO: 112525 - protein, 15 aa, Artificial Sequence
  Description of Artificial Sequence: Synthetic peptide
  Seed: PRMCSLMQGSTLPRR
PRMWSLLQSSTSPRR

SEQ ID NO: 112526 - protein, 15 aa, Artificial Sequence
  Description of Artificial Sequence: Synthetic peptide
  Seed: PRMCSLMQGSTLPRR
PRMWSLLQSSTTPRR

SEQ ID NO: 112527 - protein, 15 aa, Artificial Sequence
  Description of Artificial Sequence: Synthetic peptide
  Seed: PRMCSLMQGSTLPRR
PRMWSLLQSSTVPRR

SEQ ID NO: 112528 - protein, 15 aa, Artificial Sequence
  Description of Artificial Sequence: Synthetic peptide
  Seed: PRMCSLMQGSTLPRR
PRMWSLLQSSTWPRR

SEQ ID NO: 112529 - protein, 15 aa, Artificial Sequence
  Description of Artificial Sequence: Synthetic peptide
  Seed: PRMCSLMQGSTLPRR
PRMWSLLQSSTYPRR

SEQ ID NO: 112530 - protein, 15 aa, Artificial Sequence
  Description of Artificial Sequence: Synthetic peptide
  Seed: PRMCSLMQGSTLPRR
PRMWSLLQTSTAPRR

SEQ ID NO: 112531 - protein, 15 aa, Artificial Sequence
  Description of Artificial Sequence: Synthetic peptide
  Seed: PRMCSLMQGSTLPRR
PRMWSLLQTSTCPRR

SEQ ID NO: 112532 - protein, 15 aa, Artificial Sequence
  Description of Artificial Sequence: Synthetic peptide
  Seed: PRMCSLMQGSTLPRR
PRMWSLLQTSTFPRR

SEQ ID NO: 112533 - protein, 15 aa, Artificial Sequence
  Description of Artificial Sequence: Synthetic peptide
  Seed: PRMCSLMQGSTLPRR
PRMWSLLQTSTGPRR

SEQ ID NO: 112534 - protein, 15 aa, Artificial Sequence
  Description of Artificial Sequence: Synthetic peptide
  Seed: PRMCSLMQGSTLPRR
PRMWSLLQTSTHPRR

SEQ ID NO: 112535 - protein, 15 aa, Artificial Sequence
  Description of Artificial Sequence: Synthetic peptide
  Seed: PRMCSLMQGSTLPRR
PRMWSLLQTSTIPRR

SEQ ID NO: 112536 - protein, 15 aa, Artificial Sequence
  Description of Artificial Sequence: Synthetic peptide
  Seed: PRMCSLMQGSTLPRR
PRMWSLLQTSTLPRR

SEQ ID NO: 112537 - protein, 15 aa, Artificial Sequence
  Description of Artificial Sequence: Synthetic peptide
  Seed: PRMCSLMQGSTLPRR
PRMWSLLQTSTMPRR

SEQ ID NO: 112538 - protein, 15 aa, Artificial Sequence
  Description of Artificial Sequence: Synthetic peptide
  Seed: PRMCSLMQGSTLPRR
PRMWSLLQTSTNPRR

SEQ ID NO: 112539 - protein, 15 aa, Artificial Sequence
  Description of Artificial Sequence: Synthetic peptide
  Seed: PRMCSLMQGSTLPRR
PRMWSLLQTSTQPRR

SEQ ID NO: 112540 - protein, 15 aa, Artificial Sequence
  Description of Artificial Sequence: Synthetic peptide
  Seed: PRMCSLMQGSTLPRR
PRMWSLLQTSTSPRR

SEQ ID NO: 112541 - protein, 15 aa, Artificial Sequence
  Description of Artificial Sequence: Synthetic peptide
  Seed: PRMCSLMQGSTLPRR
PRMWSLLQTSTTPRR

SEQ ID NO: 112542 - protein, 15 aa, Artificial Sequence
  Description of Artificial Sequence: Synthetic peptide
  Seed: PRMCSLMQGSTLPRR
PRMWSLLQTSTVPRR

SEQ ID NO: 112543 - protein, 15 aa, Artificial Sequence
  Description of Artificial Sequence: Synthetic peptide
  Seed: PRMCSLMQGSTLPRR
PRMWSLLQVSTAPRR

SEQ ID NO: 112544 - protein, 15 aa, Artificial Sequence
  Description of Artificial Sequence: Synthetic peptide
  Seed: PRMCSLMQGSTLPRR
PRMWSLLQVSTGPRR

SEQ ID NO: 112545 - protein, 15 aa, Artificial Sequence
  Description of Artificial Sequence: Synthetic peptide
  Seed: PRMCSLMQGSTLPRR
PRMWSLLQVSTHPRR

SEQ ID NO: 112546 - protein, 15 aa, Artificial Sequence
  Description of Artificial Sequence: Synthetic peptide
  Seed: PRMCSLMQGSTLPRR
PRMWSLLQVSTIPRR

SEQ ID NO: 112547 - protein, 15 aa, Artificial Sequence
  Description of Artificial Sequence: Synthetic peptide
  Seed: PRMCSLMQGSTLPRR
PRMWSLLQVSTLPRR

SEQ ID NO: 112548 - protein, 15 aa, Artificial Sequence
  Description of Artificial Sequence: Synthetic peptide
  Seed: PRMCSLMQGSTLPRR
PRMWSLLQVSTMPRR

SEQ ID NO: 112549 - protein, 15 aa, Artificial Sequence
  Description of Artificial Sequence: Synthetic peptide
  Seed: PRMCSLMQGSTLPRR
PRMWSLLQVSTNPRR

SEQ ID NO: 112550 - protein, 15 aa, Artificial Sequence
  Description of Artificial Sequence: Synthetic peptide
  Seed: PRMCSLMQGSTLPRR
PRMWSLLQVSTQPRR

SEQ ID NO: 112551 - protein, 15 aa, Artificial Sequence
  Description of Artificial Sequence: Synthetic peptide
  Seed: PRMCSLMQGSTLPRR
PRMWSLLQVSTSPRR

SEQ ID NO: 112552 - protein, 15 aa, Artificial Sequence
  Description of Artificial Sequence: Synthetic peptide
  Seed: PRMCSLMQGSTLPRR
PRMWSLLQVSTTPRR

SEQ ID NO: 112553 - protein, 15 aa, Artificial Sequence
  Description of Artificial Sequence: Synthetic peptide
  Seed: PRMCSLMQGSTLPRR
PRMWSLLQVSTVPRR

SEQ ID NO: 112554 - protein, 15 aa, Artificial Sequence
  Description of Artificial Sequence: Synthetic peptide
  Seed: PRMCSLMQGSTLPRR
PRMWSLMQASTAPRR

SEQ ID NO: 112555 - protein, 15 aa, Artificial Sequence
  Description of Artificial Sequence: Synthetic peptide
  Seed: PRMCSLMQGSTLPRR
PRMWSLMQASTCPRR

SEQ ID NO: 112556 - protein, 15 aa, Artificial Sequence
  Description of Artificial Sequence: Synthetic peptide
  Seed: PRMCSLMQGSTLPRR
PRMWSLMQASTDPRR

SEQ ID NO: 112557 - protein, 15 aa, Artificial Sequence
  Description of Artificial Sequence: Synthetic peptide
  Seed: PRMCSLMQGSTLPRR
PRMWSLMQASTEPRR

SEQ ID NO: 112558 - protein, 15 aa, Artificial Sequence
  Description of Artificial Sequence: Synthetic peptide
  Seed: PRMCSLMQGSTLPRR
PRMWSLMQASTFPRR

SEQ ID NO: 112559 - protein, 15 aa, Artificial Sequence
  Description of Artificial Sequence: Synthetic peptide
  Seed: PRMCSLMQGSTLPRR
PRMWSLMQASTGPRR

SEQ ID NO: 112560 - protein, 15 aa, Artificial Sequence
  Description of Artificial Sequence: Synthetic peptide
  Seed: PRMCSLMQGSTLPRR
PRMWSLMQASTHPRR

SEQ ID NO: 112561 - protein, 15 aa, Artificial Sequence
  Description of Artificial Sequence: Synthetic peptide
  Seed: PRMCSLMQGSTLPRR
PRMWSLMQASTIPRR

SEQ ID NO: 112562 - protein, 15 aa, Artificial Sequence
  Description of Artificial Sequence: Synthetic peptide
  Seed: PRMCSLMQGSTLPRR
PRMWSLMQASTKPRR

SEQ ID NO: 112563 - protein, 15 aa, Artificial Sequence
  Description of Artificial Sequence: Synthetic peptide
  Seed: PRMCSLMQGSTLPRR
PRMWSLMQASTLPRR

SEQ ID NO: 112564 - protein, 15 aa, Artificial Sequence
  Description of Artificial Sequence: Synthetic peptide
  Seed: PRMCSLMQGSTLPRR
PRMWSLMQASTMPRR

SEQ ID NO: 112565 - protein, 15 aa, Artificial Sequence
  Description of Artificial Sequence: Synthetic peptide
  Seed: PRMCSLMQGSTLPRR
PRMWSLMQASTNPRR

SEQ ID NO: 112566 - protein, 15 aa, Artificial Sequence
  Description of Artificial Sequence: Synthetic peptide
  Seed: PRMCSLMQGSTLPRR
PRMWSLMQASTPPRR

SEQ ID NO: 112567 - protein, 15 aa, Artificial Sequence
  Description of Artificial Sequence: Synthetic peptide
  Seed: PRMCSLMQGSTLPRR
PRMWSLMQASTQPRR

SEQ ID NO: 112568 - protein, 15 aa, Artificial Sequence
  Description of Artificial Sequence: Synthetic peptide
  Seed: PRMCSLMQGSTLPRR
PRMWSLMQASTRPRR

SEQ ID NO: 112569 - protein, 15 aa, Artificial Sequence
  Description of Artificial Sequence: Synthetic peptide
  Seed: PRMCSLMQGSTLPRR
PRMWSLMQASTSPRR

SEQ ID NO: 112570 - protein, 15 aa, Artificial Sequence
  Description of Artificial Sequence: Synthetic peptide
  Seed: PRMCSLMQGSTLPRR
PRMWSLMQASTTPRR

SEQ ID NO: 112571 - protein, 15 aa, Artificial Sequence
  Description of Artificial Sequence: Synthetic peptide
  Seed: PRMCSLMQGSTLPRR
PRMWSLMQASTVPRR

SEQ ID NO: 112572 - protein, 15 aa, Artificial Sequence
  Description of Artificial Sequence: Synthetic peptide
  Seed: PRMCSLMQGSTLPRR
PRMWSLMQASTWPRR

SEQ ID NO: 112573 - protein, 15 aa, Artificial Sequence
  Description of Artificial Sequence: Synthetic peptide
  Seed: PRMCSLMQGSTLPRR
PRMWSLMQASTYPRR

SEQ ID NO: 112574 - protein, 15 aa, Artificial Sequence
  Description of Artificial Sequence: Synthetic peptide
  Seed: PRMCSLMQGSTLPRR
PRMWSLMQCSTLPRR

SEQ ID NO: 112575 - protein, 15 aa, Artificial Sequence
  Description of Artificial Sequence: Synthetic peptide
  Seed: PRMCSLMQGSTLPRR
PRMWSLMQCSTVPRR

SEQ ID NO: 112576 - protein, 15 aa, Artificial Sequence
  Description of Artificial Sequence: Synthetic peptide
  Seed: PRMCSLMQGSTLPRR
PRMWSLMQESTLPRR

SEQ ID NO: 112577 - protein, 15 aa, Artificial Sequence
  Description of Artificial Sequence: Synthetic peptide
  Seed: PRMCSLMQGSTLPRR
PRMWSLMQGSTAPRR

SEQ ID NO: 112578 - protein, 15 aa, Artificial Sequence
  Description of Artificial Sequence: Synthetic peptide
  Seed: PRMCSLMQGSTLPRR
PRMWSLMQGSTCPRR

SEQ ID NO: 112579 - protein, 15 aa, Artificial Sequence
  Description of Artificial Sequence: Synthetic peptide
  Seed: PRMCSLMQGSTLPRR
PRMWSLMQGSTFPRR

SEQ ID NO: 112580 - protein, 15 aa, Artificial Sequence
  Description of Artificial Sequence: Synthetic peptide
  Seed: PRMCSLMQGSTLPRR
PRMWSLMQGSTGPRR

SEQ ID NO: 112581 - protein, 15 aa, Artificial Sequence
  Description of Artificial Sequence: Synthetic peptide
  Seed: PRMCSLMQGSTLPRR
PRMWSLMQGSTHPRR

SEQ ID NO: 112582 - protein, 15 aa, Artificial Sequence
  Description of Artificial Sequence: Synthetic peptide
  Seed: PRMCSLMQGSTLPRR
PRMWSLMQGSTIPRR

SEQ ID NO: 112583 - protein, 15 aa, Artificial Sequence
  Description of Artificial Sequence: Synthetic peptide
  Seed: PRMCSLMQGSTLPRR
PRMWSLMQGSTLPRR

SEQ ID NO: 112584 - protein, 15 aa, Artificial Sequence
  Description of Artificial Sequence: Synthetic peptide
  Seed: PRMCSLMQGSTLPRR
PRMWSLMQGSTMPRR

SEQ ID NO: 112585 - protein, 15 aa, Artificial Sequence
  Description of Artificial Sequence: Synthetic peptide
  Seed: PRMCSLMQGSTLPRR
PRMWSLMQGSTNPRR

SEQ ID NO: 112586 - protein, 15 aa, Artificial Sequence
  Description of Artificial Sequence: Synthetic peptide
  Seed: PRMCSLMQGSTLPRR
PRMWSLMQGSTPPRR

SEQ ID NO: 112587 - protein, 15 aa, Artificial Sequence
  Description of Artificial Sequence: Synthetic peptide
  Seed: PRMCSLMQGSTLPRR
PRMWSLMQGSTQPRR

SEQ ID NO: 112588 - protein, 15 aa, Artificial Sequence
  Description of Artificial Sequence: Synthetic peptide
  Seed: PRMCSLMQGSTLPRR
PRMWSLMQGSTSPRR

SEQ ID NO: 112589 - protein, 15 aa, Artificial Sequence
  Description of Artificial Sequence: Synthetic peptide
  Seed: PRMCSLMQGSTLPRR
PRMWSLMQGSTTPRR

SEQ ID NO: 112590 - protein, 15 aa, Artificial Sequence
  Description of Artificial Sequence: Synthetic peptide
  Seed: PRMCSLMQGSTLPRR
PRMWSLMQGSTVPRR

SEQ ID NO: 112591 - protein, 15 aa, Artificial Sequence
  Description of Artificial Sequence: Synthetic peptide
  Seed: PRMCSLMQGSTLPRR
PRMWSLMQGSTWPRR

SEQ ID NO: 112592 - protein, 15 aa, Artificial Sequence
  Description of Artificial Sequence: Synthetic peptide
  Seed: PRMCSLMQGSTLPRR
PRMWSLMQGSTYPRR

SEQ ID NO: 112593 - protein, 15 aa, Artificial Sequence
  Description of Artificial Sequence: Synthetic peptide
  Seed: PRMCSLMQGSTLPRR
PRMWSLMQHSTAPRR

SEQ ID NO: 112594 - protein, 15 aa, Artificial Sequence
  Description of Artificial Sequence: Synthetic peptide
  Seed: PRMCSLMQGSTLPRR
PRMWSLMQHSTIPRR

SEQ ID NO: 112595 - protein, 15 aa, Artificial Sequence
  Description of Artificial Sequence: Synthetic peptide
  Seed: PRMCSLMQGSTLPRR
PRMWSLMQHSTLPRR

SEQ ID NO: 112596 - protein, 15 aa, Artificial Sequence
  Description of Artificial Sequence: Synthetic peptide
  Seed: PRMCSLMQGSTLPRR
PRMWSLMQHSTVPRR

SEQ ID NO: 112597 - protein, 15 aa, Artificial Sequence
  Description of Artificial Sequence: Synthetic peptide
  Seed: PRMCSLMQGSTLPRR
PRMWSLMQISTAPRR

SEQ ID NO: 112598 - protein, 15 aa, Artificial Sequence
  Description of Artificial Sequence: Synthetic peptide
  Seed: PRMCSLMQGSTLPRR
PRMWSLMQISTGPRR

SEQ ID NO: 112599 - protein, 15 aa, Artificial Sequence
  Description of Artificial Sequence: Synthetic peptide
  Seed: PRMCSLMQGSTLPRR
PRMWSLMQISTHPRR

SEQ ID NO: 112600 - protein, 15 aa, Artificial Sequence
  Description of Artificial Sequence: Synthetic peptide
  Seed: PRMCSLMQGSTLPRR
PRMWSLMQISTIPRR

SEQ ID NO: 112601 - protein, 15 aa, Artificial Sequence
  Description of Artificial Sequence: Synthetic peptide
  Seed: PRMCSLMQGSTLPRR
PRMWSLMQISTLPRR

SEQ ID NO: 112602 - protein, 15 aa, Artificial Sequence
  Description of Artificial Sequence: Synthetic peptide
  Seed: PRMCSLMQGSTLPRR
PRMWSLMQISTMPRR

SEQ ID NO: 112603 - protein, 15 aa, Artificial Sequence
  Description of Artificial Sequence: Synthetic peptide
  Seed: PRMCSLMQGSTLPRR
PRMWSLMQISTNPRR

SEQ ID NO: 112604 - protein, 15 aa, Artificial Sequence
  Description of Artificial Sequence: Synthetic peptide
  Seed: PRMCSLMQGSTLPRR
PRMWSLMQISTQPRR

SEQ ID NO: 112605 - protein, 15 aa, Artificial Sequence
  Description of Artificial Sequence: Synthetic peptide
  Seed: PRMCSLMQGSTLPRR
PRMWSLMQISTSPRR

SEQ ID NO: 112606 - protein, 15 aa, Artificial Sequence
  Description of Artificial Sequence: Synthetic peptide
  Seed: PRMCSLMQGSTLPRR
PRMWSLMQISTTPRR

SEQ ID NO: 112607 - protein, 15 aa, Artificial Sequence
  Description of Artificial Sequence: Synthetic peptide
  Seed: PRMCSLMQGSTLPRR
PRMWSLMQISTVPRR

SEQ ID NO: 112608 - protein, 15 aa, Artificial Sequence
  Description of Artificial Sequence: Synthetic peptide
  Seed: PRMCSLMQGSTLPRR
PRMWSLMQLSTAPRR

SEQ ID NO: 112609 - protein, 15 aa, Artificial Sequence
  Description of Artificial Sequence: Synthetic peptide
  Seed: PRMCSLMQGSTLPRR
PRMWSLMQLSTIPRR

SEQ ID NO: 112610 - protein, 15 aa, Artificial Sequence
  Description of Artificial Sequence: Synthetic peptide
  Seed: PRMCSLMQGSTLPRR
PRMWSLMQLSTLPRR

SEQ ID NO: 112611 - protein, 15 aa, Artificial Sequence
  Description of Artificial Sequence: Synthetic peptide
  Seed: PRMCSLMQGSTLPRR
PRMWSLMQLSTMPRR

SEQ ID NO: 112612 - protein, 15 aa, Artificial Sequence
  Description of Artificial Sequence: Synthetic peptide
  Seed: PRMCSLMQGSTLPRR
PRMWSLMQLSTNPRR

SEQ ID NO: 112613 - protein, 15 aa, Artificial Sequence
  Description of Artificial Sequence: Synthetic peptide
  Seed: PRMCSLMQGSTLPRR
PRMWSLMQLSTSPRR

SEQ ID NO: 112614 - protein, 15 aa, Artificial Sequence
  Description of Artificial Sequence: Synthetic peptide
  Seed: PRMCSLMQGSTLPRR
PRMWSLMQLSTTPRR

SEQ ID NO: 112615 - protein, 15 aa, Artificial Sequence
  Description of Artificial Sequence: Synthetic peptide
  Seed: PRMCSLMQGSTLPRR
PRMWSLMQLSTVPRR

SEQ ID NO: 112616 - protein, 15 aa, Artificial Sequence
  Description of Artificial Sequence: Synthetic peptide
  Seed: PRMCSLMQGSTLPRR
PRMWSLMQMSTAPRR

SEQ ID NO: 112617 - protein, 15 aa, Artificial Sequence
  Description of Artificial Sequence: Synthetic peptide
  Seed: PRMCSLMQGSTLPRR
PRMWSLMQMSTIPRR

SEQ ID NO: 112618 - protein, 15 aa, Artificial Sequence
  Description of Artificial Sequence: Synthetic peptide
  Seed: PRMCSLMQGSTLPRR
PRMWSLMQMSTLPRR

SEQ ID NO: 112619 - protein, 15 aa, Artificial Sequence
  Description of Artificial Sequence: Synthetic peptide
  Seed: PRMCSLMQGSTLPRR
PRMWSLMQMSTNPRR

SEQ ID NO: 112620 - protein, 15 aa, Artificial Sequence
  Description of Artificial Sequence: Synthetic peptide
  Seed: PRMCSLMQGSTLPRR
PRMWSLMQMSTSPRR

SEQ ID NO: 112621 - protein, 15 aa, Artificial Sequence
  Description of Artificial Sequence: Synthetic peptide
  Seed: PRMCSLMQGSTLPRR
PRMWSLMQMSTTPRR

SEQ ID NO: 112622 - protein, 15 aa, Artificial Sequence
  Description of Artificial Sequence: Synthetic peptide
  Seed: PRMCSLMQGSTLPRR
PRMWSLMQMSTVPRR

SEQ ID NO: 112623 - protein, 15 aa, Artificial Sequence
  Description of Artificial Sequence: Synthetic peptide
  Seed: PRMCSLMQGSTLPRR
PRMWSLMQNSTAPRR

SEQ ID NO: 112624 - protein, 15 aa, Artificial Sequence
  Description of Artificial Sequence: Synthetic peptide
  Seed: PRMCSLMQGSTLPRR
PRMWSLMQNSTCPRR

SEQ ID NO: 112625 - protein, 15 aa, Artificial Sequence
  Description of Artificial Sequence: Synthetic peptide
  Seed: PRMCSLMQGSTLPRR
PRMWSLMQNSTFPRR

SEQ ID NO: 112626 - protein, 15 aa, Artificial Sequence
  Description of Artificial Sequence: Synthetic peptide
  Seed: PRMCSLMQGSTLPRR
PRMWSLMQNSTGPRR

SEQ ID NO: 112627 - protein, 15 aa, Artificial Sequence
  Description of Artificial Sequence: Synthetic peptide
  Seed: PRMCSLMQGSTLPRR
PRMWSLMQNSTIPRR

SEQ ID NO: 112628 - protein, 15 aa, Artificial Sequence
  Description of Artificial Sequence: Synthetic peptide
  Seed: PRMCSLMQGSTLPRR
PRMWSLMQNSTLPRR

SEQ ID NO: 112629 - protein, 15 aa, Artificial Sequence
  Description of Artificial Sequence: Synthetic peptide
  Seed: PRMCSLMQGSTLPRR
PRMWSLMQNSTMPRR

SEQ ID NO: 112630 - protein, 15 aa, Artificial Sequence
  Description of Artificial Sequence: Synthetic peptide
  Seed: PRMCSLMQGSTLPRR
PRMWSLMQNSTNPRR

SEQ ID NO: 112631 - protein, 15 aa, Artificial Sequence
  Description of Artificial Sequence: Synthetic peptide
  Seed: PRMCSLMQGSTLPRR
PRMWSLMQNSTSPRR

SEQ ID NO: 112632 - protein, 15 aa, Artificial Sequence
  Description of Artificial Sequence: Synthetic peptide
  Seed: PRMCSLMQGSTLPRR
PRMWSLMQNSTTPRR

SEQ ID NO: 112633 - protein, 15 aa, Artificial Sequence
  Description of Artificial Sequence: Synthetic peptide
  Seed: PRMCSLMQGSTLPRR
PRMWSLMQNSTVPRR

SEQ ID NO: 112634 - protein, 15 aa, Artificial Sequence
  Description of Artificial Sequence: Synthetic peptide
  Seed: PRMCSLMQGSTLPRR
PRMWSLMQPSTAPRR

SEQ ID NO: 112635 - protein, 15 aa, Artificial Sequence
  Description of Artificial Sequence: Synthetic peptide
  Seed: PRMCSLMQGSTLPRR
PRMWSLMQPSTCPRR

SEQ ID NO: 112636 - protein, 15 aa, Artificial Sequence
  Description of Artificial Sequence: Synthetic peptide
  Seed: PRMCSLMQGSTLPRR
PRMWSLMQPSTFPRR

SEQ ID NO: 112637 - protein, 15 aa, Artificial Sequence
  Description of Artificial Sequence: Synthetic peptide
  Seed: PRMCSLMQGSTLPRR
PRMWSLMQPSTGPRR

SEQ ID NO: 112638 - protein, 15 aa, Artificial Sequence
  Description of Artificial Sequence: Synthetic peptide
  Seed: PRMCSLMQGSTLPRR
PRMWSLMQPSTHPRR

SEQ ID NO: 112639 - protein, 15 aa, Artificial Sequence
  Description of Artificial Sequence: Synthetic peptide
  Seed: PRMCSLMQGSTLPRR
PRMWSLMQPSTIPRR

SEQ ID NO: 112640 - protein, 15 aa, Artificial Sequence
  Description of Artificial Sequence: Synthetic peptide
  Seed: PRMCSLMQGSTLPRR
PRMWSLMQPSTLPRR

SEQ ID NO: 112641 - protein, 15 aa, Artificial Sequence
  Description of Artificial Sequence: Synthetic peptide
  Seed: PRMCSLMQGSTLPRR
PRMWSLMQPSTMPRR

SEQ ID NO: 112642 - protein, 15 aa, Artificial Sequence
  Description of Artificial Sequence: Synthetic peptide
  Seed: PRMCSLMQGSTLPRR
PRMWSLMQPSTNPRR

SEQ ID NO: 112643 - protein, 15 aa, Artificial Sequence
  Description of Artificial Sequence: Synthetic peptide
  Seed: PRMCSLMQGSTLPRR
PRMWSLMQPSTQPRR

SEQ ID NO: 112644 - protein, 15 aa, Artificial Sequence
  Description of Artificial Sequence: Synthetic peptide
  Seed: PRMCSLMQGSTLPRR
PRMWSLMQPSTSPRR

SEQ ID NO: 112645 - protein, 15 aa, Artificial Sequence
  Description of Artificial Sequence: Synthetic peptide
  Seed: PRMCSLMQGSTLPRR
PRMWSLMQPSTTPRR

SEQ ID NO: 112646 - protein, 15 aa, Artificial Sequence
  Description of Artificial Sequence: Synthetic peptide
  Seed: PRMCSLMQGSTLPRR
PRMWSLMQPSTVPRR

SEQ ID NO: 112647 - protein, 15 aa, Artificial Sequence
  Description of Artificial Sequence: Synthetic peptide
  Seed: PRMCSLMQGSTLPRR
PRMWSLMQQSTIPRR

SEQ ID NO: 112648 - protein, 15 aa, Artificial Sequence
  Description of Artificial Sequence: Synthetic peptide
  Seed: PRMCSLMQGSTLPRR
PRMWSLMQQSTLPRR

SEQ ID NO: 112649 - protein, 15 aa, Artificial Sequence
  Description of Artificial Sequence: Synthetic peptide
  Seed: PRMCSLMQGSTLPRR
PRMWSLMQQSTVPRR

SEQ ID NO: 112650 - protein, 15 aa, Artificial Sequence
  Description of Artificial Sequence: Synthetic peptide
  Seed: PRMCSLMQGSTLPRR
PRMWSLMQSSTAPRR

SEQ ID NO: 112651 - protein, 15 aa, Artificial Sequence
  Description of Artificial Sequence: Synthetic peptide
  Seed: PRMCSLMQGSTLPRR
PRMWSLMQSSTCPRR

SEQ ID NO: 112652 - protein, 15 aa, Artificial Sequence
  Description of Artificial Sequence: Synthetic peptide
  Seed: PRMCSLMQGSTLPRR
PRMWSLMQSSTFPRR

SEQ ID NO: 112653 - protein, 15 aa, Artificial Sequence
  Description of Artificial Sequence: Synthetic peptide
  Seed: PRMCSLMQGSTLPRR
PRMWSLMQSSTGPRR

SEQ ID NO: 112654 - protein, 15 aa, Artificial Sequence
  Description of Artificial Sequence: Synthetic peptide
  Seed: PRMCSLMQGSTLPRR
PRMWSLMQSSTHPRR

SEQ ID NO: 112655 - protein, 15 aa, Artificial Sequence
  Description of Artificial Sequence: Synthetic peptide
  Seed: PRMCSLMQGSTLPRR
PRMWSLMQSSTIPRR

SEQ ID NO: 112656 - protein, 15 aa, Artificial Sequence
  Description of Artificial Sequence: Synthetic peptide
  Seed: PRMCSLMQGSTLPRR
PRMWSLMQSSTKPRR

SEQ ID NO: 112657 - protein, 15 aa, Artificial Sequence
  Description of Artificial Sequence: Synthetic peptide
  Seed: PRMCSLMQGSTLPRR
PRMWSLMQSSTLPRR

SEQ ID NO: 112658 - protein, 15 aa, Artificial Sequence
  Description of Artificial Sequence: Synthetic peptide
  Seed: PRMCSLMQGSTLPRR
PRMWSLMQSSTMPRR

SEQ ID NO: 112659 - protein, 15 aa, Artificial Sequence
  Description of Artificial Sequence: Synthetic peptide
  Seed: PRMCSLMQGSTLPRR
PRMWSLMQSSTNPRR

SEQ ID NO: 112660 - protein, 15 aa, Artificial Sequence
  Description of Artificial Sequence: Synthetic peptide
  Seed: PRMCSLMQGSTLPRR
PRMWSLMQSSTPPRR

SEQ ID NO: 112661 - protein, 15 aa, Artificial Sequence
  Description of Artificial Sequence: Synthetic peptide
  Seed: PRMCSLMQGSTLPRR
PRMWSLMQSSTQPRR

SEQ ID NO: 112662 - protein, 15 aa, Artificial Sequence
  Description of Artificial Sequence: Synthetic peptide
  Seed: PRMCSLMQGSTLPRR
PRMWSLMQSSTRPRR

SEQ ID NO: 112663 - protein, 15 aa, Artificial Sequence
  Description of Artificial Sequence: Synthetic peptide
  Seed: PRMCSLMQGSTLPRR
PRMWSLMQSSTSPRR

SEQ ID NO: 112664 - protein, 15 aa, Artificial Sequence
  Description of Artificial Sequence: Synthetic peptide
  Seed: PRMCSLMQGSTLPRR
PRMWSLMQSSTTPRR

SEQ ID NO: 112665 - protein, 15 aa, Artificial Sequence
  Description of Artificial Sequence: Synthetic peptide
  Seed: PRMCSLMQGSTLPRR
PRMWSLMQSSTVPRR

SEQ ID NO: 112666 - protein, 15 aa, Artificial Sequence
  Description of Artificial Sequence: Synthetic peptide
  Seed: PRMCSLMQGSTLPRR
PRMWSLMQSSTYPRR

SEQ ID NO: 112667 - protein, 15 aa, Artificial Sequence
  Description of Artificial Sequence: Synthetic peptide
  Seed: PRMCSLMQGSTLPRR
PRMWSLMQTSTAPRR

SEQ ID NO: 112668 - protein, 15 aa, Artificial Sequence
  Description of Artificial Sequence: Synthetic peptide
  Seed: PRMCSLMQGSTLPRR
PRMWSLMQTSTCPRR

SEQ ID NO: 112669 - protein, 15 aa, Artificial Sequence
  Description of Artificial Sequence: Synthetic peptide
  Seed: PRMCSLMQGSTLPRR
PRMWSLMQTSTFPRR

SEQ ID NO: 112670 - protein, 15 aa, Artificial Sequence
  Description of Artificial Sequence: Synthetic peptide
  Seed: PRMCSLMQGSTLPRR
PRMWSLMQTSTGPRR

SEQ ID NO: 112671 - protein, 15 aa, Artificial Sequence
  Description of Artificial Sequence: Synthetic peptide
  Seed: PRMCSLMQGSTLPRR
PRMWSLMQTSTHPRR

SEQ ID NO: 112672 - protein, 15 aa, Artificial Sequence
  Description of Artificial Sequence: Synthetic peptide
  Seed: PRMCSLMQGSTLPRR
PRMWSLMQTSTIPRR

SEQ ID NO: 112673 - protein, 15 aa, Artificial Sequence
  Description of Artificial Sequence: Synthetic peptide
  Seed: PRMCSLMQGSTLPRR
PRMWSLMQTSTLPRR

SEQ ID NO: 112674 - protein, 15 aa, Artificial Sequence
  Description of Artificial Sequence: Synthetic peptide
  Seed: PRMCSLMQGSTLPRR
PRMWSLMQTSTMPRR

SEQ ID NO: 112675 - protein, 15 aa, Artificial Sequence
  Description of Artificial Sequence: Synthetic peptide
  Seed: PRMCSLMQGSTLPRR
PRMWSLMQTSTNPRR

SEQ ID NO: 112676 - protein, 15 aa, Artificial Sequence
  Description of Artificial Sequence: Synthetic peptide
  Seed: PRMCSLMQGSTLPRR
PRMWSLMQTSTQPRR

SEQ ID NO: 112677 - protein, 15 aa, Artificial Sequence
  Description of Artificial Sequence: Synthetic peptide
  Seed: PRMCSLMQGSTLPRR
PRMWSLMQTSTSPRR

SEQ ID NO: 112678 - protein, 15 aa, Artificial Sequence
  Description of Artificial Sequence: Synthetic peptide
  Seed: PRMCSLMQGSTLPRR
PRMWSLMQTSTTPRR

SEQ ID NO: 112679 - protein, 15 aa, Artificial Sequence
  Description of Artificial Sequence: Synthetic peptide
  Seed: PRMCSLMQGSTLPRR
PRMWSLMQTSTVPRR

SEQ ID NO: 112680 - protein, 15 aa, Artificial Sequence
  Description of Artificial Sequence: Synthetic peptide
  Seed: PRMCSLMQGSTLPRR
PRMWSLMQVSTAPRR

SEQ ID NO: 112681 - protein, 15 aa, Artificial Sequence
  Description of Artificial Sequence: Synthetic peptide
  Seed: PRMCSLMQGSTLPRR
PRMWSLMQVSTGPRR

SEQ ID NO: 112682 - protein, 15 aa, Artificial Sequence
  Description of Artificial Sequence: Synthetic peptide
  Seed: PRMCSLMQGSTLPRR
PRMWSLMQVSTHPRR

SEQ ID NO: 112683 - protein, 15 aa, Artificial Sequence
  Description of Artificial Sequence: Synthetic peptide
  Seed: PRMCSLMQGSTLPRR
PRMWSLMQVSTIPRR

SEQ ID NO: 112684 - protein, 15 aa, Artificial Sequence
  Description of Artificial Sequence: Synthetic peptide
  Seed: PRMCSLMQGSTLPRR
PRMWSLMQVSTLPRR

SEQ ID NO: 112685 - protein, 15 aa, Artificial Sequence
  Description of Artificial Sequence: Synthetic peptide
  Seed: PRMCSLMQGSTLPRR
PRMWSLMQVSTMPRR

SEQ ID NO: 112686 - protein, 15 aa, Artificial Sequence
  Description of Artificial Sequence: Synthetic peptide
  Seed: PRMCSLMQGSTLPRR
PRMWSLMQVSTNPRR

SEQ ID NO: 112687 - protein, 15 aa, Artificial Sequence
  Description of Artificial Sequence: Synthetic peptide
  Seed: PRMCSLMQGSTLPRR
PRMWSLMQVSTPPRR

SEQ ID NO: 112688 - protein, 15 aa, Artificial Sequence
  Description of Artificial Sequence: Synthetic peptide
  Seed: PRMCSLMQGSTLPRR
PRMWSLMQVSTQPRR

SEQ ID NO: 112689 - protein, 15 aa, Artificial Sequence
  Description of Artificial Sequence: Synthetic peptide
  Seed: PRMCSLMQGSTLPRR
PRMWSLMQVSTSPRR

SEQ ID NO: 112690 - protein, 15 aa, Artificial Sequence
  Description of Artificial Sequence: Synthetic peptide
  Seed: PRMCSLMQGSTLPRR
PRMWSLMQVSTTPRR

SEQ ID NO: 112691 - protein, 15 aa, Artificial Sequence
  Description of Artificial Sequence: Synthetic peptide
  Seed: PRMCSLMQGSTLPRR
PRMWSLMQVSTVPRR

SEQ ID NO: 112692 - protein, 15 aa, Artificial Sequence
  Description of Artificial Sequence: Synthetic peptide
  Seed: PRMCSLMQGSTLPRR
PRMWSLNQASTAPRR

SEQ ID NO: 112693 - protein, 15 aa, Artificial Sequence
  Description of Artificial Sequence: Synthetic peptide
  Seed: PRMCSLMQGSTLPRR
PRMWSLNQASTIPRR

SEQ ID NO: 112694 - protein, 15 aa, Artificial Sequence
  Description of Artificial Sequence: Synthetic peptide
  Seed: PRMCSLMQGSTLPRR
PRMWSLNQASTLPRR

SEQ ID NO: 112695 - protein, 15 aa, Artificial Sequence
  Description of Artificial Sequence: Synthetic peptide
  Seed: PRMCSLMQGSTLPRR
PRMWSLNQASTVPRR

SEQ ID NO: 112696 - protein, 15 aa, Artificial Sequence
  Description of Artificial Sequence: Synthetic peptide
  Seed: PRMCSLMQGSTLPRR
PRMWSLNQGSTLPRR

SEQ ID NO: 112697 - protein, 15 aa, Artificial Sequence
  Description of Artificial Sequence: Synthetic peptide
  Seed: PRMCSLMQGSTLPRR
PRMWSLNQSSTLPRR

SEQ ID NO: 112698 - protein, 15 aa, Artificial Sequence
  Description of Artificial Sequence: Synthetic peptide
  Seed: PRMCSLMQGSTLPRR
PRMWSLQQASTAPRR

SEQ ID NO: 112699 - protein, 15 aa, Artificial Sequence
  Description of Artificial Sequence: Synthetic peptide
  Seed: PRMCSLMQGSTLPRR
PRMWSLQQASTFPRR

SEQ ID NO: 112700 - protein, 15 aa, Artificial Sequence
  Description of Artificial Sequence: Synthetic peptide
  Seed: PRMCSLMQGSTLPRR
PRMWSLQQASTGPRR

SEQ ID NO: 112701 - protein, 15 aa, Artificial Sequence
  Description of Artificial Sequence: Synthetic peptide
  Seed: PRMCSLMQGSTLPRR
PRMWSLQQASTIPRR

SEQ ID NO: 112702 - protein, 15 aa, Artificial Sequence
  Description of Artificial Sequence: Synthetic peptide
  Seed: PRMCSLMQGSTLPRR
PRMWSLQQASTLPRR

SEQ ID NO: 112703 - protein, 15 aa, Artificial Sequence
  Description of Artificial Sequence: Synthetic peptide
  Seed: PRMCSLMQGSTLPRR
PRMWSLQQASTMPRR

SEQ ID NO: 112704 - protein, 15 aa, Artificial Sequence
  Description of Artificial Sequence: Synthetic peptide
  Seed: PRMCSLMQGSTLPRR
PRMWSLQQASTSPRR

SEQ ID NO: 112705 - protein, 15 aa, Artificial Sequence
  Description of Artificial Sequence: Synthetic peptide
  Seed: PRMCSLMQGSTLPRR
PRMWSLQQASTTPRR

SEQ ID NO: 112706 - protein, 15 aa, Artificial Sequence
  Description of Artificial Sequence: Synthetic peptide
  Seed: PRMCSLMQGSTLPRR
PRMWSLQQASTVPRR

SEQ ID NO: 112707 - protein, 15 aa, Artificial Sequence
  Description of Artificial Sequence: Synthetic peptide
  Seed: PRMCSLMQGSTLPRR
PRMWSLQQGSTAPRR

SEQ ID NO: 112708 - protein, 15 aa, Artificial Sequence
  Description of Artificial Sequence: Synthetic peptide
  Seed: PRMCSLMQGSTLPRR
PRMWSLQQGSTIPRR

SEQ ID NO: 112709 - protein, 15 aa, Artificial Sequence
  Description of Artificial Sequence: Synthetic peptide
  Seed: PRMCSLMQGSTLPRR
PRMWSLQQGSTLPRR

SEQ ID NO: 112710 - protein, 15 aa, Artificial Sequence
  Description of Artificial Sequence: Synthetic peptide
  Seed: PRMCSLMQGSTLPRR
PRMWSLQQGSTMPRR

SEQ ID NO: 112711 - protein, 15 aa, Artificial Sequence
  Description of Artificial Sequence: Synthetic peptide
  Seed: PRMCSLMQGSTLPRR
PRMWSLQQGSTSPRR

SEQ ID NO: 112712 - protein, 15 aa, Artificial Sequence
  Description of Artificial Sequence: Synthetic peptide
  Seed: PRMCSLMQGSTLPRR
PRMWSLQQGSTTPRR

SEQ ID NO: 112713 - protein, 15 aa, Artificial Sequence
  Description of Artificial Sequence: Synthetic peptide
  Seed: PRMCSLMQGSTLPRR
PRMWSLQQGSTVPRR

SEQ ID NO: 112714 - protein, 15 aa, Artificial Sequence
  Description of Artificial Sequence: Synthetic peptide
  Seed: PRMCSLMQGSTLPRR
PRMWSLQQNSTAPRR

SEQ ID NO: 112715 - protein, 15 aa, Artificial Sequence
  Description of Artificial Sequence: Synthetic peptide
  Seed: PRMCSLMQGSTLPRR
PRMWSLQQNSTIPRR

SEQ ID NO: 112716 - protein, 15 aa, Artificial Sequence
  Description of Artificial Sequence: Synthetic peptide
  Seed: PRMCSLMQGSTLPRR
PRMWSLQQNSTLPRR

SEQ ID NO: 112717 - protein, 15 aa, Artificial Sequence
  Description of Artificial Sequence: Synthetic peptide
  Seed: PRMCSLMQGSTLPRR
PRMWSLQQNSTVPRR

SEQ ID NO: 112718 - protein, 15 aa, Artificial Sequence
  Description of Artificial Sequence: Synthetic peptide
  Seed: PRMCSLMQGSTLPRR
PRMWSLQQPSTAPRR

SEQ ID NO: 112719 - protein, 15 aa, Artificial Sequence
  Description of Artificial Sequence: Synthetic peptide
  Seed: PRMCSLMQGSTLPRR
PRMWSLQQPSTIPRR

SEQ ID NO: 112720 - protein, 15 aa, Artificial Sequence
  Description of Artificial Sequence: Synthetic peptide
  Seed: PRMCSLMQGSTLPRR
PRMWSLQQPSTLPRR

SEQ ID NO: 112721 - protein, 15 aa, Artificial Sequence
  Description of Artificial Sequence: Synthetic peptide
  Seed: PRMCSLMQGSTLPRR
PRMWSLQQPSTMPRR

SEQ ID NO: 112722 - protein, 15 aa, Artificial Sequence
  Description of Artificial Sequence: Synthetic peptide
  Seed: PRMCSLMQGSTLPRR
PRMWSLQQPSTVPRR

SEQ ID NO: 112723 - protein, 15 aa, Artificial Sequence
  Description of Artificial Sequence: Synthetic peptide
  Seed: PRMCSLMQGSTLPRR
PRMWSLQQSSTAPRR

SEQ ID NO: 112724 - protein, 15 aa, Artificial Sequence
  Description of Artificial Sequence: Synthetic peptide
  Seed: PRMCSLMQGSTLPRR
PRMWSLQQSSTIPRR

SEQ ID NO: 112725 - protein, 15 aa, Artificial Sequence
  Description of Artificial Sequence: Synthetic peptide
  Seed: PRMCSLMQGSTLPRR
PRMWSLQQSSTLPRR

SEQ ID NO: 112726 - protein, 15 aa, Artificial Sequence
  Description of Artificial Sequence: Synthetic peptide
  Seed: PRMCSLMQGSTLPRR
PRMWSLQQSSTMPRR

SEQ ID NO: 112727 - protein, 15 aa, Artificial Sequence
  Description of Artificial Sequence: Synthetic peptide
  Seed: PRMCSLMQGSTLPRR
PRMWSLQQSSTSPRR

SEQ ID NO: 112728 - protein, 15 aa, Artificial Sequence
  Description of Artificial Sequence: Synthetic peptide
  Seed: PRMCSLMQGSTLPRR
PRMWSLQQSSTTPRR

SEQ ID NO: 112729 - protein, 15 aa, Artificial Sequence
  Description of Artificial Sequence: Synthetic peptide
  Seed: PRMCSLMQGSTLPRR
PRMWSLQQSSTVPRR

SEQ ID NO: 112730 - protein, 15 aa, Artificial Sequence
  Description of Artificial Sequence: Synthetic peptide
  Seed: PRMCSLMQGSTLPRR
PRMWSLQQTSTAPRR

SEQ ID NO: 112731 - protein, 15 aa, Artificial Sequence
  Description of Artificial Sequence: Synthetic peptide
  Seed: PRMCSLMQGSTLPRR
PRMWSLQQTSTIPRR

SEQ ID NO: 112732 - protein, 15 aa, Artificial Sequence
  Description of Artificial Sequence: Synthetic peptide
  Seed: PRMCSLMQGSTLPRR
PRMWSLQQTSTLPRR

SEQ ID NO: 112733 - protein, 15 aa, Artificial Sequence
  Description of Artificial Sequence: Synthetic peptide
  Seed: PRMCSLMQGSTLPRR
PRMWSLQQTSTVPRR

SEQ ID NO: 112734 - protein, 15 aa, Artificial Sequence
  Description of Artificial Sequence: Synthetic peptide
  Seed: PRMCSLMQGSTLPRR
PRMWSLQQVSTAPRR

SEQ ID NO: 112735 - protein, 15 aa, Artificial Sequence
  Description of Artificial Sequence: Synthetic peptide
  Seed: PRMCSLMQGSTLPRR
PRMWSLQQVSTIPRR

SEQ ID NO: 112736 - protein, 15 aa, Artificial Sequence
  Description of Artificial Sequence: Synthetic peptide
  Seed: PRMCSLMQGSTLPRR
PRMWSLQQVSTLPRR

SEQ ID NO: 112737 - protein, 15 aa, Artificial Sequence
  Description of Artificial Sequence: Synthetic peptide
  Seed: PRMCSLMQGSTLPRR
PRMWSLQQVSTVPRR

SEQ ID NO: 112738 - protein, 15 aa, Artificial Sequence
  Description of Artificial Sequence: Synthetic peptide
  Seed: PRMCSLMQGSTLPRR
PRMWSLSQASTAPRR

SEQ ID NO: 112739 - protein, 15 aa, Artificial Sequence
  Description of Artificial Sequence: Synthetic peptide
  Seed: PRMCSLMQGSTLPRR
PRMWSLSQASTFPRR

SEQ ID NO: 112740 - protein, 15 aa, Artificial Sequence
  Description of Artificial Sequence: Synthetic peptide
  Seed: PRMCSLMQGSTLPRR
PRMWSLSQASTIPRR

SEQ ID NO: 112741 - protein, 15 aa, Artificial Sequence
  Description of Artificial Sequence: Synthetic peptide
  Seed: PRMCSLMQGSTLPRR
PRMWSLSQASTLPRR

SEQ ID NO: 112742 - protein, 15 aa, Artificial Sequence
  Description of Artificial Sequence: Synthetic peptide
  Seed: PRMCSLMQGSTLPRR
PRMWSLSQASTMPRR

SEQ ID NO: 112743 - protein, 15 aa, Artificial Sequence
  Description of Artificial Sequence: Synthetic peptide
  Seed: PRMCSLMQGSTLPRR
PRMWSLSQASTSPRR

SEQ ID NO: 112744 - protein, 15 aa, Artificial Sequence
  Description of Artificial Sequence: Synthetic peptide
  Seed: PRMCSLMQGSTLPRR
PRMWSLSQASTTPRR

SEQ ID NO: 112745 - protein, 15 aa, Artificial Sequence
  Description of Artificial Sequence: Synthetic peptide
  Seed: PRMCSLMQGSTLPRR
PRMWSLSQASTVPRR

SEQ ID NO: 112746 - protein, 15 aa, Artificial Sequence
  Description of Artificial Sequence: Synthetic peptide
  Seed: PRMCSLMQGSTLPRR
PRMWSLSQGSTAPRR

SEQ ID NO: 112747 - protein, 15 aa, Artificial Sequence
  Description of Artificial Sequence: Synthetic peptide
  Seed: PRMCSLMQGSTLPRR
PRMWSLSQGSTIPRR

SEQ ID NO: 112748 - protein, 15 aa, Artificial Sequence
  Description of Artificial Sequence: Synthetic peptide
  Seed: PRMCSLMQGSTLPRR
PRMWSLSQGSTLPRR

SEQ ID NO: 112749 - protein, 15 aa, Artificial Sequence
  Description of Artificial Sequence: Synthetic peptide
  Seed: PRMCSLMQGSTLPRR
PRMWSLSQGSTMPRR

SEQ ID NO: 112750 - protein, 15 aa, Artificial Sequence
  Description of Artificial Sequence: Synthetic peptide
  Seed: PRMCSLMQGSTLPRR
PRMWSLSQGSTVPRR

SEQ ID NO: 112751 - protein, 15 aa, Artificial Sequence
  Description of Artificial Sequence: Synthetic peptide
  Seed: PRMCSLMQGSTLPRR
PRMWSLSQNSTLPRR

SEQ ID NO: 112752 - protein, 15 aa, Artificial Sequence
  Description of Artificial Sequence: Synthetic peptide
  Seed: PRMCSLMQGSTLPRR
PRMWSLSQPSTAPRR

SEQ ID NO: 112753 - protein, 15 aa, Artificial Sequence
  Description of Artificial Sequence: Synthetic peptide
  Seed: PRMCSLMQGSTLPRR
PRMWSLSQPSTIPRR

SEQ ID NO: 112754 - protein, 15 aa, Artificial Sequence
  Description of Artificial Sequence: Synthetic peptide
  Seed: PRMCSLMQGSTLPRR
PRMWSLSQPSTLPRR

SEQ ID NO: 112755 - protein, 15 aa, Artificial Sequence
  Description of Artificial Sequence: Synthetic peptide
  Seed: PRMCSLMQGSTLPRR
PRMWSLSQPSTVPRR

SEQ ID NO: 112756 - protein, 15 aa, Artificial Sequence
  Description of Artificial Sequence: Synthetic peptide
  Seed: PRMCSLMQGSTLPRR
PRMWSLSQSSTAPRR

SEQ ID NO: 112757 - protein, 15 aa, Artificial Sequence
  Description of Artificial Sequence: Synthetic peptide
  Seed: PRMCSLMQGSTLPRR
PRMWSLSQSSTFPRR

SEQ ID NO: 112758 - protein, 15 aa, Artificial Sequence
  Description of Artificial Sequence: Synthetic peptide
  Seed: PRMCSLMQGSTLPRR
PRMWSLSQSSTIPRR

SEQ ID NO: 112759 - protein, 15 aa, Artificial Sequence
  Description of Artificial Sequence: Synthetic peptide
  Seed: PRMCSLMQGSTLPRR
PRMWSLSQSSTLPRR

SEQ ID NO: 112760 - protein, 15 aa, Artificial Sequence
  Description of Artificial Sequence: Synthetic peptide
  Seed: PRMCSLMQGSTLPRR
PRMWSLSQSSTMPRR

SEQ ID NO: 112761 - protein, 15 aa, Artificial Sequence
  Description of Artificial Sequence: Synthetic peptide
  Seed: PRMCSLMQGSTLPRR
PRMWSLSQSSTVPRR

SEQ ID NO: 112762 - protein, 15 aa, Artificial Sequence
  Description of Artificial Sequence: Synthetic peptide
  Seed: PRMCSLMQGSTLPRR
PRMWSLSQTSTIPRR

SEQ ID NO: 112763 - protein, 15 aa, Artificial Sequence
  Description of Artificial Sequence: Synthetic peptide
  Seed: PRMCSLMQGSTLPRR
PRMWSLSQTSTLPRR

SEQ ID NO: 112764 - protein, 15 aa, Artificial Sequence
  Description of Artificial Sequence: Synthetic peptide
  Seed: PRMCSLMQGSTLPRR
PRMWSLTQASTAPRR

SEQ ID NO: 112765 - protein, 15 aa, Artificial Sequence
  Description of Artificial Sequence: Synthetic peptide
  Seed: PRMCSLMQGSTLPRR
PRMWSLTQASTFPRR

SEQ ID NO: 112766 - protein, 15 aa, Artificial Sequence
  Description of Artificial Sequence: Synthetic peptide
  Seed: PRMCSLMQGSTLPRR
PRMWSLTQASTIPRR

SEQ ID NO: 112767 - protein, 15 aa, Artificial Sequence
  Description of Artificial Sequence: Synthetic peptide
  Seed: PRMCSLMQGSTLPRR
PRMWSLTQASTLPRR

SEQ ID NO: 112768 - protein, 15 aa, Artificial Sequence
  Description of Artificial Sequence: Synthetic peptide
  Seed: PRMCSLMQGSTLPRR
PRMWSLTQASTMPRR

SEQ ID NO: 112769 - protein, 15 aa, Artificial Sequence
  Description of Artificial Sequence: Synthetic peptide
  Seed: PRMCSLMQGSTLPRR
PRMWSLTQASTTPRR

SEQ ID NO: 112770 - protein, 15 aa, Artificial Sequence
  Description of Artificial Sequence: Synthetic peptide
  Seed: PRMCSLMQGSTLPRR
PRMWSLTQASTVPRR

SEQ ID NO: 112771 - protein, 15 aa, Artificial Sequence
  Description of Artificial Sequence: Synthetic peptide
  Seed: PRMCSLMQGSTLPRR
PRMWSLTQGSTAPRR

SEQ ID NO: 112772 - protein, 15 aa, Artificial Sequence
  Description of Artificial Sequence: Synthetic peptide
  Seed: PRMCSLMQGSTLPRR
PRMWSLTQGSTIPRR

SEQ ID NO: 112773 - protein, 15 aa, Artificial Sequence
  Description of Artificial Sequence: Synthetic peptide
  Seed: PRMCSLMQGSTLPRR
PRMWSLTQGSTLPRR

SEQ ID NO: 112774 - protein, 15 aa, Artificial Sequence
  Description of Artificial Sequence: Synthetic peptide
  Seed: PRMCSLMQGSTLPRR
PRMWSLTQGSTVPRR

SEQ ID NO: 112775 - protein, 15 aa, Artificial Sequence
  Description of Artificial Sequence: Synthetic peptide
  Seed: PRMCSLMQGSTLPRR
PRMWSLTQNSTIPRR

SEQ ID NO: 112776 - protein, 15 aa, Artificial Sequence
  Description of Artificial Sequence: Synthetic peptide
  Seed: PRMCSLMQGSTLPRR
PRMWSLTQNSTLPRR

SEQ ID NO: 112777 - protein, 15 aa, Artificial Sequence
  Description of Artificial Sequence: Synthetic peptide
  Seed: PRMCSLMQGSTLPRR
PRMWSLTQPSTIPRR

SEQ ID NO: 112778 - protein, 15 aa, Artificial Sequence
  Description of Artificial Sequence: Synthetic peptide
  Seed: PRMCSLMQGSTLPRR
PRMWSLTQPSTLPRR

SEQ ID NO: 112779 - protein, 15 aa, Artificial Sequence
  Description of Artificial Sequence: Synthetic peptide
  Seed: PRMCSLMQGSTLPRR
PRMWSLTQSSTAPRR

SEQ ID NO: 112780 - protein, 15 aa, Artificial Sequence
  Description of Artificial Sequence: Synthetic peptide
  Seed: PRMCSLMQGSTLPRR
PRMWSLTQSSTFPRR

SEQ ID NO: 112781 - protein, 15 aa, Artificial Sequence
  Description of Artificial Sequence: Synthetic peptide
  Seed: PRMCSLMQGSTLPRR
PRMWSLTQSSTIPRR

SEQ ID NO: 112782 - protein, 15 aa, Artificial Sequence
  Description of Artificial Sequence: Synthetic peptide
  Seed: PRMCSLMQGSTLPRR
PRMWSLTQSSTLPRR

SEQ ID NO: 112783 - protein, 15 aa, Artificial Sequence
  Description of Artificial Sequence: Synthetic peptide
  Seed: PRMCSLMQGSTLPRR
PRMWSLTQSSTMPRR

SEQ ID NO: 112784 - protein, 15 aa, Artificial Sequence
  Description of Artificial Sequence: Synthetic peptide
  Seed: PRMCSLMQGSTLPRR
PRMWSLTQSSTVPRR

SEQ ID NO: 112785 - protein, 15 aa, Artificial Sequence
  Description of Artificial Sequence: Synthetic peptide
  Seed: PRMCSLMQGSTLPRR
PRMWSLTQTSTIPRR

SEQ ID NO: 112786 - protein, 15 aa, Artificial Sequence
  Description of Artificial Sequence: Synthetic peptide
  Seed: PRMCSLMQGSTLPRR
PRMWSLTQTSTLPRR

SEQ ID NO: 112787 - protein, 15 aa, Artificial Sequence
  Description of Artificial Sequence: Synthetic peptide
  Seed: PRMCSLMQGSTLPRR
PRMWSLTQTSTVPRR

SEQ ID NO: 112788 - protein, 15 aa, Artificial Sequence
  Description of Artificial Sequence: Synthetic peptide
  Seed: PRMCSLMQGSTLPRR
PRMWSLTQVSTIPRR

SEQ ID NO: 112789 - protein, 15 aa, Artificial Sequence
  Description of Artificial Sequence: Synthetic peptide
  Seed: PRMCSLMQGSTLPRR
PRMWSLVQASTAPRR

SEQ ID NO: 112790 - protein, 15 aa, Artificial Sequence
  Description of Artificial Sequence: Synthetic peptide
  Seed: PRMCSLMQGSTLPRR
PRMWSLVQASTGPRR

SEQ ID NO: 112791 - protein, 15 aa, Artificial Sequence
  Description of Artificial Sequence: Synthetic peptide
  Seed: PRMCSLMQGSTLPRR
PRMWSLVQASTIPRR

SEQ ID NO: 112792 - protein, 15 aa, Artificial Sequence
  Description of Artificial Sequence: Synthetic peptide
  Seed: PRMCSLMQGSTLPRR
PRMWSLVQASTLPRR

SEQ ID NO: 112793 - protein, 15 aa, Artificial Sequence
  Description of Artificial Sequence: Synthetic peptide
  Seed: PRMCSLMQGSTLPRR
PRMWSLVQASTMPRR

SEQ ID NO: 112794 - protein, 15 aa, Artificial Sequence
  Description of Artificial Sequence: Synthetic peptide
  Seed: PRMCSLMQGSTLPRR
PRMWSLVQASTNPRR

SEQ ID NO: 112795 - protein, 15 aa, Artificial Sequence
  Description of Artificial Sequence: Synthetic peptide
  Seed: PRMCSLMQGSTLPRR
PRMWSLVQASTQPRR

SEQ ID NO: 112796 - protein, 15 aa, Artificial Sequence
  Description of Artificial Sequence: Synthetic peptide
  Seed: PRMCSLMQGSTLPRR
PRMWSLVQASTSPRR

SEQ ID NO: 112797 - protein, 15 aa, Artificial Sequence
  Description of Artificial Sequence: Synthetic peptide
  Seed: PRMCSLMQGSTLPRR
PRMWSLVQASTTPRR

SEQ ID NO: 112798 - protein, 15 aa, Artificial Sequence
  Description of Artificial Sequence: Synthetic peptide
  Seed: PRMCSLMQGSTLPRR
PRMWSLVQASTVPRR

SEQ ID NO: 112799 - protein, 15 aa, Artificial Sequence
  Description of Artificial Sequence: Synthetic peptide
  Seed: PRMCSLMQGSTLPRR
PRMWSLVQGSTAPRR

SEQ ID NO: 112800 - protein, 15 aa, Artificial Sequence
  Description of Artificial Sequence: Synthetic peptide
  Seed: PRMCSLMQGSTLPRR
PRMWSLVQGSTGPRR

SEQ ID NO: 112801 - protein, 15 aa, Artificial Sequence
  Description of Artificial Sequence: Synthetic peptide
  Seed: PRMCSLMQGSTLPRR
PRMWSLVQGSTIPRR

SEQ ID NO: 112802 - protein, 15 aa, Artificial Sequence
  Description of Artificial Sequence: Synthetic peptide
  Seed: PRMCSLMQGSTLPRR
PRMWSLVQGSTLPRR

SEQ ID NO: 112803 - protein, 15 aa, Artificial Sequence
  Description of Artificial Sequence: Synthetic peptide
  Seed: PRMCSLMQGSTLPRR
PRMWSLVQGSTMPRR

SEQ ID NO: 112804 - protein, 15 aa, Artificial Sequence
  Description of Artificial Sequence: Synthetic peptide
  Seed: PRMCSLMQGSTLPRR
PRMWSLVQGSTSPRR

SEQ ID NO: 112805 - protein, 15 aa, Artificial Sequence
  Description of Artificial Sequence: Synthetic peptide
  Seed: PRMCSLMQGSTLPRR
PRMWSLVQGSTTPRR

SEQ ID NO: 112806 - protein, 15 aa, Artificial Sequence
  Description of Artificial Sequence: Synthetic peptide
  Seed: PRMCSLMQGSTLPRR
PRMWSLVQGSTVPRR

SEQ ID NO: 112807 - protein, 15 aa, Artificial Sequence
  Description of Artificial Sequence: Synthetic peptide
  Seed: PRMCSLMQGSTLPRR
PRMWSLVQISTAPRR

SEQ ID NO: 112808 - protein, 15 aa, Artificial Sequence
  Description of Artificial Sequence: Synthetic peptide
  Seed: PRMCSLMQGSTLPRR
PRMWSLVQISTNPRR

SEQ ID NO: 112809 - protein, 15 aa, Artificial Sequence
  Description of Artificial Sequence: Synthetic peptide
  Seed: PRMCSLMQGSTLPRR
PRMWSLVQISTSPRR

SEQ ID NO: 112810 - protein, 15 aa, Artificial Sequence
  Description of Artificial Sequence: Synthetic peptide
  Seed: PRMCSLMQGSTLPRR
PRMWSLVQNSTAPRR

SEQ ID NO: 112811 - protein, 15 aa, Artificial Sequence
  Description of Artificial Sequence: Synthetic peptide
  Seed: PRMCSLMQGSTLPRR
PRMWSLVQNSTIPRR

SEQ ID NO: 112812 - protein, 15 aa, Artificial Sequence
  Description of Artificial Sequence: Synthetic peptide
  Seed: PRMCSLMQGSTLPRR
PRMWSLVQNSTLPRR

SEQ ID NO: 112813 - protein, 15 aa, Artificial Sequence
  Description of Artificial Sequence: Synthetic peptide
  Seed: PRMCSLMQGSTLPRR
PRMWSLVQNSTVPRR

SEQ ID NO: 112814 - protein, 15 aa, Artificial Sequence
  Description of Artificial Sequence: Synthetic peptide
  Seed: PRMCSLMQGSTLPRR
PRMWSLVQPSTAPRR

SEQ ID NO: 112815 - protein, 15 aa, Artificial Sequence
  Description of Artificial Sequence: Synthetic peptide
  Seed: PRMCSLMQGSTLPRR
PRMWSLVQPSTIPRR

SEQ ID NO: 112816 - protein, 15 aa, Artificial Sequence
  Description of Artificial Sequence: Synthetic peptide
  Seed: PRMCSLMQGSTLPRR
PRMWSLVQPSTLPRR

SEQ ID NO: 112817 - protein, 15 aa, Artificial Sequence
  Description of Artificial Sequence: Synthetic peptide
  Seed: PRMCSLMQGSTLPRR
PRMWSLVQPSTMPRR

SEQ ID NO: 112818 - protein, 15 aa, Artificial Sequence
  Description of Artificial Sequence: Synthetic peptide
  Seed: PRMCSLMQGSTLPRR
PRMWSLVQPSTNPRR

SEQ ID NO: 112819 - protein, 15 aa, Artificial Sequence
  Description of Artificial Sequence: Synthetic peptide
  Seed: PRMCSLMQGSTLPRR
PRMWSLVQPSTSPRR

SEQ ID NO: 112820 - protein, 15 aa, Artificial Sequence
  Description of Artificial Sequence: Synthetic peptide
  Seed: PRMCSLMQGSTLPRR
PRMWSLVQPSTTPRR

SEQ ID NO: 112821 - protein, 15 aa, Artificial Sequence
  Description of Artificial Sequence: Synthetic peptide
  Seed: PRMCSLMQGSTLPRR
PRMWSLVQPSTVPRR

SEQ ID NO: 112822 - protein, 15 aa, Artificial Sequence
  Description of Artificial Sequence: Synthetic peptide
  Seed: PRMCSLMQGSTLPRR
PRMWSLVQSSTAPRR

SEQ ID NO: 112823 - protein, 15 aa, Artificial Sequence
  Description of Artificial Sequence: Synthetic peptide
  Seed: PRMCSLMQGSTLPRR
PRMWSLVQSSTFPRR

SEQ ID NO: 112824 - protein, 15 aa, Artificial Sequence
  Description of Artificial Sequence: Synthetic peptide
  Seed: PRMCSLMQGSTLPRR
PRMWSLVQSSTIPRR

SEQ ID NO: 112825 - protein, 15 aa, Artificial Sequence
  Description of Artificial Sequence: Synthetic peptide
  Seed: PRMCSLMQGSTLPRR
PRMWSLVQSSTLPRR

SEQ ID NO: 112826 - protein, 15 aa, Artificial Sequence
  Description of Artificial Sequence: Synthetic peptide
  Seed: PRMCSLMQGSTLPRR
PRMWSLVQSSTMPRR

SEQ ID NO: 112827 - protein, 15 aa, Artificial Sequence
  Description of Artificial Sequence: Synthetic peptide
  Seed: PRMCSLMQGSTLPRR
PRMWSLVQSSTNPRR

SEQ ID NO: 112828 - protein, 15 aa, Artificial Sequence
  Description of Artificial Sequence: Synthetic peptide
  Seed: PRMCSLMQGSTLPRR
PRMWSLVQSSTSPRR

SEQ ID NO: 112829 - protein, 15 aa, Artificial Sequence
  Description of Artificial Sequence: Synthetic peptide
  Seed: PRMCSLMQGSTLPRR
PRMWSLVQSSTTPRR

SEQ ID NO: 112830 - protein, 15 aa, Artificial Sequence
  Description of Artificial Sequence: Synthetic peptide
  Seed: PRMCSLMQGSTLPRR
PRMWSLVQSSTVPRR

SEQ ID NO: 112831 - protein, 15 aa, Artificial Sequence
  Description of Artificial Sequence: Synthetic peptide
  Seed: PRMCSLMQGSTLPRR
PRMWSLVQTSTAPRR

SEQ ID NO: 112832 - protein, 15 aa, Artificial Sequence
  Description of Artificial Sequence: Synthetic peptide
  Seed: PRMCSLMQGSTLPRR
PRMWSLVQTSTIPRR

SEQ ID NO: 112833 - protein, 15 aa, Artificial Sequence
  Description of Artificial Sequence: Synthetic peptide
  Seed: PRMCSLMQGSTLPRR
PRMWSLVQTSTLPRR

SEQ ID NO: 112834 - protein, 15 aa, Artificial Sequence
  Description of Artificial Sequence: Synthetic peptide
  Seed: PRMCSLMQGSTLPRR
PRMWSLVQTSTMPRR

SEQ ID NO: 112835 - protein, 15 aa, Artificial Sequence
  Description of Artificial Sequence: Synthetic peptide
  Seed: PRMCSLMQGSTLPRR
PRMWSLVQTSTNPRR

SEQ ID NO: 112836 - protein, 15 aa, Artificial Sequence
  Description of Artificial Sequence: Synthetic peptide
  Seed: PRMCSLMQGSTLPRR
PRMWSLVQTSTSPRR

SEQ ID NO: 112837 - protein, 15 aa, Artificial Sequence
  Description of Artificial Sequence: Synthetic peptide
  Seed: PRMCSLMQGSTLPRR
PRMWSLVQTSTTPRR

SEQ ID NO: 112838 - protein, 15 aa, Artificial Sequence
  Description of Artificial Sequence: Synthetic peptide
  Seed: PRMCSLMQGSTLPRR
PRMWSLVQTSTVPRR

SEQ ID NO: 112839 - protein, 15 aa, Artificial Sequence
  Description of Artificial Sequence: Synthetic peptide
  Seed: PRMCSLMQGSTLPRR
PRMWSLVQVSTAPRR

SEQ ID NO: 112840 - protein, 15 aa, Artificial Sequence
  Description of Artificial Sequence: Synthetic peptide
  Seed: PRMCSLMQGSTLPRR
PRMWSLVQVSTIPRR

SEQ ID NO: 112841 - protein, 15 aa, Artificial Sequence
  Description of Artificial Sequence: Synthetic peptide
  Seed: PRMCSLMQGSTLPRR
PRMWSLVQVSTLPRR

SEQ ID NO: 112842 - protein, 15 aa, Artificial Sequence
  Description of Artificial Sequence: Synthetic peptide
  Seed: PRMCSLMQGSTLPRR
PRMWSLVQVSTNPRR

SEQ ID NO: 112843 - protein, 15 aa, Artificial Sequence
  Description of Artificial Sequence: Synthetic peptide
  Seed: PRMCSLMQGSTLPRR
PRMWSLVQVSTSPRR

SEQ ID NO: 112844 - protein, 15 aa, Artificial Sequence
  Description of Artificial Sequence: Synthetic peptide
  Seed: PRMCSLMQGSTLPRR
PRMWSLVQVSTTPRR

SEQ ID NO: 112845 - protein, 15 aa, Artificial Sequence
  Description of Artificial Sequence: Synthetic peptide
  Seed: PRMCSLMQGSTLPRR
PRMWSLVQVSTVPRR

SEQ ID NO: 112846 - protein, 15 aa, Artificial Sequence
  Description of Artificial Sequence: Synthetic peptide
  Seed: PRMCSLMQGSTLPRR
PRMWSLWQASTLPRR

SEQ ID NO: 112847 - protein, 15 aa, Artificial Sequence
  Description of Artificial Sequence: Synthetic peptide
  Seed: PRMCSLMQGSTLPRR
PRMWSLWQASTVPRR

SEQ ID NO: 112848 - protein, 15 aa, Artificial Sequence
  Description of Artificial Sequence: Synthetic peptide
  Seed: PRMCSLMQGSTLPRR
PRMYSLAQASTAPRR

SEQ ID NO: 112849 - protein, 15 aa, Artificial Sequence
  Description of Artificial Sequence: Synthetic peptide
  Seed: PRMCSLMQGSTLPRR
PRMYSLAQASTCPRR

SEQ ID NO: 112850 - protein, 15 aa, Artificial Sequence
  Description of Artificial Sequence: Synthetic peptide
  Seed: PRMCSLMQGSTLPRR
PRMYSLAQASTEPRR

SEQ ID NO: 112851 - protein, 15 aa, Artificial Sequence
  Description of Artificial Sequence: Synthetic peptide
  Seed: PRMCSLMQGSTLPRR
PRMYSLAQASTFPRR

SEQ ID NO: 112852 - protein, 15 aa, Artificial Sequence
  Description of Artificial Sequence: Synthetic peptide
  Seed: PRMCSLMQGSTLPRR
PRMYSLAQASTGPRR

SEQ ID NO: 112853 - protein, 15 aa, Artificial Sequence
  Description of Artificial Sequence: Synthetic peptide
  Seed: PRMCSLMQGSTLPRR
PRMYSLAQASTHPRR

SEQ ID NO: 112854 - protein, 15 aa, Artificial Sequence
  Description of Artificial Sequence: Synthetic peptide
  Seed: PRMCSLMQGSTLPRR
PRMYSLAQASTIPRR

SEQ ID NO: 112855 - protein, 15 aa, Artificial Sequence
  Description of Artificial Sequence: Synthetic peptide
  Seed: PRMCSLMQGSTLPRR
PRMYSLAQASTKPRR

SEQ ID NO: 112856 - protein, 15 aa, Artificial Sequence
  Description of Artificial Sequence: Synthetic peptide
  Seed: PRMCSLMQGSTLPRR
PRMYSLAQASTLPRR

SEQ ID NO: 112857 - protein, 15 aa, Artificial Sequence
  Description of Artificial Sequence: Synthetic peptide
  Seed: PRMCSLMQGSTLPRR
PRMYSLAQASTMPRR

SEQ ID NO: 112858 - protein, 15 aa, Artificial Sequence
  Description of Artificial Sequence: Synthetic peptide
  Seed: PRMCSLMQGSTLPRR
PRMYSLAQASTNPRR

SEQ ID NO: 112859 - protein, 15 aa, Artificial Sequence
  Description of Artificial Sequence: Synthetic peptide
  Seed: PRMCSLMQGSTLPRR
PRMYSLAQASTPPRR

SEQ ID NO: 112860 - protein, 15 aa, Artificial Sequence
  Description of Artificial Sequence: Synthetic peptide
  Seed: PRMCSLMQGSTLPRR
PRMYSLAQASTQPRR

SEQ ID NO: 112861 - protein, 15 aa, Artificial Sequence
  Description of Artificial Sequence: Synthetic peptide
  Seed: PRMCSLMQGSTLPRR
PRMYSLAQASTRPRR

SEQ ID NO: 112862 - protein, 15 aa, Artificial Sequence
  Description of Artificial Sequence: Synthetic peptide
  Seed: PRMCSLMQGSTLPRR
PRMYSLAQASTSPRR

SEQ ID NO: 112863 - protein, 15 aa, Artificial Sequence
  Description of Artificial Sequence: Synthetic peptide
  Seed: PRMCSLMQGSTLPRR
PRMYSLAQASTTPRR

SEQ ID NO: 112864 - protein, 15 aa, Artificial Sequence
  Description of Artificial Sequence: Synthetic peptide
  Seed: PRMCSLMQGSTLPRR
PRMYSLAQASTVPRR

SEQ ID NO: 112865 - protein, 15 aa, Artificial Sequence
  Description of Artificial Sequence: Synthetic peptide
  Seed: PRMCSLMQGSTLPRR
PRMYSLAQASTWPRR

SEQ ID NO: 112866 - protein, 15 aa, Artificial Sequence
  Description of Artificial Sequence: Synthetic peptide
  Seed: PRMCSLMQGSTLPRR
PRMYSLAQASTYPRR

SEQ ID NO: 112867 - protein, 15 aa, Artificial Sequence
  Description of Artificial Sequence: Synthetic peptide
  Seed: PRMCSLMQGSTLPRR
PRMYSLAQCSTLPRR

SEQ ID NO: 112868 - protein, 15 aa, Artificial Sequence
  Description of Artificial Sequence: Synthetic peptide
  Seed: PRMCSLMQGSTLPRR
PRMYSLAQCSTVPRR

SEQ ID NO: 112869 - protein, 15 aa, Artificial Sequence
  Description of Artificial Sequence: Synthetic peptide
  Seed: PRMCSLMQGSTLPRR
PRMYSLAQGSTAPRR

SEQ ID NO: 112870 - protein, 15 aa, Artificial Sequence
  Description of Artificial Sequence: Synthetic peptide
  Seed: PRMCSLMQGSTLPRR
PRMYSLAQGSTCPRR

SEQ ID NO: 112871 - protein, 15 aa, Artificial Sequence
  Description of Artificial Sequence: Synthetic peptide
  Seed: PRMCSLMQGSTLPRR
PRMYSLAQGSTFPRR

SEQ ID NO: 112872 - protein, 15 aa, Artificial Sequence
  Description of Artificial Sequence: Synthetic peptide
  Seed: PRMCSLMQGSTLPRR
PRMYSLAQGSTGPRR

SEQ ID NO: 112873 - protein, 15 aa, Artificial Sequence
  Description of Artificial Sequence: Synthetic peptide
  Seed: PRMCSLMQGSTLPRR
PRMYSLAQGSTIPRR

SEQ ID NO: 112874 - protein, 15 aa, Artificial Sequence
  Description of Artificial Sequence: Synthetic peptide
  Seed: PRMCSLMQGSTLPRR
PRMYSLAQGSTLPRR

SEQ ID NO: 112875 - protein, 15 aa, Artificial Sequence
  Description of Artificial Sequence: Synthetic peptide
  Seed: PRMCSLMQGSTLPRR
PRMYSLAQGSTMPRR

SEQ ID NO: 112876 - protein, 15 aa, Artificial Sequence
  Description of Artificial Sequence: Synthetic peptide
  Seed: PRMCSLMQGSTLPRR
PRMYSLAQGSTNPRR

SEQ ID NO: 112877 - protein, 15 aa, Artificial Sequence
  Description of Artificial Sequence: Synthetic peptide
  Seed: PRMCSLMQGSTLPRR
PRMYSLAQGSTQPRR

SEQ ID NO: 112878 - protein, 15 aa, Artificial Sequence
  Description of Artificial Sequence: Synthetic peptide
  Seed: PRMCSLMQGSTLPRR
PRMYSLAQGSTSPRR

SEQ ID NO: 112879 - protein, 15 aa, Artificial Sequence
  Description of Artificial Sequence: Synthetic peptide
  Seed: PRMCSLMQGSTLPRR
PRMYSLAQGSTTPRR

SEQ ID NO: 112880 - protein, 15 aa, Artificial Sequence
  Description of Artificial Sequence: Synthetic peptide
  Seed: PRMCSLMQGSTLPRR
PRMYSLAQGSTVPRR

SEQ ID NO: 112881 - protein, 15 aa, Artificial Sequence
  Description of Artificial Sequence: Synthetic peptide
  Seed: PRMCSLMQGSTLPRR
PRMYSLAQGSTYPRR

SEQ ID NO: 112882 - protein, 15 aa, Artificial Sequence
  Description of Artificial Sequence: Synthetic peptide
  Seed: PRMCSLMQGSTLPRR
PRMYSLAQHSTIPRR

SEQ ID NO: 112883 - protein, 15 aa, Artificial Sequence
  Description of Artificial Sequence: Synthetic peptide
  Seed: PRMCSLMQGSTLPRR
PRMYSLAQHSTLPRR

SEQ ID NO: 112884 - protein, 15 aa, Artificial Sequence
  Description of Artificial Sequence: Synthetic peptide
  Seed: PRMCSLMQGSTLPRR
PRMYSLAQHSTVPRR

SEQ ID NO: 112885 - protein, 15 aa, Artificial Sequence
  Description of Artificial Sequence: Synthetic peptide
  Seed: PRMCSLMQGSTLPRR
PRMYSLAQISTAPRR

SEQ ID NO: 112886 - protein, 15 aa, Artificial Sequence
  Description of Artificial Sequence: Synthetic peptide
  Seed: PRMCSLMQGSTLPRR
PRMYSLAQISTGPRR

SEQ ID NO: 112887 - protein, 15 aa, Artificial Sequence
  Description of Artificial Sequence: Synthetic peptide
  Seed: PRMCSLMQGSTLPRR
PRMYSLAQISTHPRR

SEQ ID NO: 112888 - protein, 15 aa, Artificial Sequence
  Description of Artificial Sequence: Synthetic peptide
  Seed: PRMCSLMQGSTLPRR
PRMYSLAQISTIPRR

SEQ ID NO: 112889 - protein, 15 aa, Artificial Sequence
  Description of Artificial Sequence: Synthetic peptide
  Seed: PRMCSLMQGSTLPRR
PRMYSLAQISTLPRR

SEQ ID NO: 112890 - protein, 15 aa, Artificial Sequence
  Description of Artificial Sequence: Synthetic peptide
  Seed: PRMCSLMQGSTLPRR
PRMYSLAQISTMPRR

SEQ ID NO: 112891 - protein, 15 aa, Artificial Sequence
  Description of Artificial Sequence: Synthetic peptide
  Seed: PRMCSLMQGSTLPRR
PRMYSLAQISTNPRR

SEQ ID NO: 112892 - protein, 15 aa, Artificial Sequence
  Description of Artificial Sequence: Synthetic peptide
  Seed: PRMCSLMQGSTLPRR
PRMYSLAQISTQPRR

SEQ ID NO: 112893 - protein, 15 aa, Artificial Sequence
  Description of Artificial Sequence: Synthetic peptide
  Seed: PRMCSLMQGSTLPRR
PRMYSLAQISTSPRR

SEQ ID NO: 112894 - protein, 15 aa, Artificial Sequence
  Description of Artificial Sequence: Synthetic peptide
  Seed: PRMCSLMQGSTLPRR
PRMYSLAQISTTPRR

SEQ ID NO: 112895 - protein, 15 aa, Artificial Sequence
  Description of Artificial Sequence: Synthetic peptide
  Seed: PRMCSLMQGSTLPRR
PRMYSLAQISTVPRR

SEQ ID NO: 112896 - protein, 15 aa, Artificial Sequence
  Description of Artificial Sequence: Synthetic peptide
  Seed: PRMCSLMQGSTLPRR
PRMYSLAQLSTAPRR

SEQ ID NO: 112897 - protein, 15 aa, Artificial Sequence
  Description of Artificial Sequence: Synthetic peptide
  Seed: PRMCSLMQGSTLPRR
PRMYSLAQLSTIPRR

SEQ ID NO: 112898 - protein, 15 aa, Artificial Sequence
  Description of Artificial Sequence: Synthetic peptide
  Seed: PRMCSLMQGSTLPRR
PRMYSLAQLSTLPRR

SEQ ID NO: 112899 - protein, 15 aa, Artificial Sequence
  Description of Artificial Sequence: Synthetic peptide
  Seed: PRMCSLMQGSTLPRR
PRMYSLAQLSTMPRR

SEQ ID NO: 112900 - protein, 15 aa, Artificial Sequence
  Description of Artificial Sequence: Synthetic peptide
  Seed: PRMCSLMQGSTLPRR
PRMYSLAQLSTNPRR

SEQ ID NO: 112901 - protein, 15 aa, Artificial Sequence
  Description of Artificial Sequence: Synthetic peptide
  Seed: PRMCSLMQGSTLPRR
PRMYSLAQLSTSPRR

SEQ ID NO: 112902 - protein, 15 aa, Artificial Sequence
  Description of Artificial Sequence: Synthetic peptide
  Seed: PRMCSLMQGSTLPRR
PRMYSLAQLSTTPRR

SEQ ID NO: 112903 - protein, 15 aa, Artificial Sequence
  Description of Artificial Sequence: Synthetic peptide
  Seed: PRMCSLMQGSTLPRR
PRMYSLAQLSTVPRR

SEQ ID NO: 112904 - protein, 15 aa, Artificial Sequence
  Description of Artificial Sequence: Synthetic peptide
  Seed: PRMCSLMQGSTLPRR
PRMYSLAQMSTAPRR

SEQ ID NO: 112905 - protein, 15 aa, Artificial Sequence
  Description of Artificial Sequence: Synthetic peptide
  Seed: PRMCSLMQGSTLPRR
PRMYSLAQMSTIPRR

SEQ ID NO: 112906 - protein, 15 aa, Artificial Sequence
  Description of Artificial Sequence: Synthetic peptide
  Seed: PRMCSLMQGSTLPRR
PRMYSLAQMSTLPRR

SEQ ID NO: 112907 - protein, 15 aa, Artificial Sequence
  Description of Artificial Sequence: Synthetic peptide
  Seed: PRMCSLMQGSTLPRR
PRMYSLAQMSTMPRR

SEQ ID NO: 112908 - protein, 15 aa, Artificial Sequence
  Description of Artificial Sequence: Synthetic peptide
  Seed: PRMCSLMQGSTLPRR
PRMYSLAQMSTNPRR

SEQ ID NO: 112909 - protein, 15 aa, Artificial Sequence
  Description of Artificial Sequence: Synthetic peptide
  Seed: PRMCSLMQGSTLPRR
PRMYSLAQMSTSPRR

SEQ ID NO: 112910 - protein, 15 aa, Artificial Sequence
  Description of Artificial Sequence: Synthetic peptide
  Seed: PRMCSLMQGSTLPRR
PRMYSLAQMSTVPRR

SEQ ID NO: 112911 - protein, 15 aa, Artificial Sequence
  Description of Artificial Sequence: Synthetic peptide
  Seed: PRMCSLMQGSTLPRR
PRMYSLAQNSTAPRR

SEQ ID NO: 112912 - protein, 15 aa, Artificial Sequence
  Description of Artificial Sequence: Synthetic peptide
  Seed: PRMCSLMQGSTLPRR
PRMYSLAQNSTGPRR

SEQ ID NO: 112913 - protein, 15 aa, Artificial Sequence
  Description of Artificial Sequence: Synthetic peptide
  Seed: PRMCSLMQGSTLPRR
PRMYSLAQNSTIPRR

SEQ ID NO: 112914 - protein, 15 aa, Artificial Sequence
  Description of Artificial Sequence: Synthetic peptide
  Seed: PRMCSLMQGSTLPRR
PRMYSLAQNSTLPRR

SEQ ID NO: 112915 - protein, 15 aa, Artificial Sequence
  Description of Artificial Sequence: Synthetic peptide
  Seed: PRMCSLMQGSTLPRR
PRMYSLAQNSTMPRR

SEQ ID NO: 112916 - protein, 15 aa, Artificial Sequence
  Description of Artificial Sequence: Synthetic peptide
  Seed: PRMCSLMQGSTLPRR
PRMYSLAQNSTNPRR

SEQ ID NO: 112917 - protein, 15 aa, Artificial Sequence
  Description of Artificial Sequence: Synthetic peptide
  Seed: PRMCSLMQGSTLPRR
PRMYSLAQNSTSPRR

SEQ ID NO: 112918 - protein, 15 aa, Artificial Sequence
  Description of Artificial Sequence: Synthetic peptide
  Seed: PRMCSLMQGSTLPRR
PRMYSLAQNSTTPRR

SEQ ID NO: 112919 - protein, 15 aa, Artificial Sequence
  Description of Artificial Sequence: Synthetic peptide
  Seed: PRMCSLMQGSTLPRR
PRMYSLAQNSTVPRR

SEQ ID NO: 112920 - protein, 15 aa, Artificial Sequence
  Description of Artificial Sequence: Synthetic peptide
  Seed: PRMCSLMQGSTLPRR
PRMYSLAQPSTAPRR

SEQ ID NO: 112921 - protein, 15 aa, Artificial Sequence
  Description of Artificial Sequence: Synthetic peptide
  Seed: PRMCSLMQGSTLPRR
PRMYSLAQPSTCPRR

SEQ ID NO: 112922 - protein, 15 aa, Artificial Sequence
  Description of Artificial Sequence: Synthetic peptide
  Seed: PRMCSLMQGSTLPRR
PRMYSLAQPSTFPRR

SEQ ID NO: 112923 - protein, 15 aa, Artificial Sequence
  Description of Artificial Sequence: Synthetic peptide
  Seed: PRMCSLMQGSTLPRR
PRMYSLAQPSTGPRR

SEQ ID NO: 112924 - protein, 15 aa, Artificial Sequence
  Description of Artificial Sequence: Synthetic peptide
  Seed: PRMCSLMQGSTLPRR
PRMYSLAQPSTHPRR

SEQ ID NO: 112925 - protein, 15 aa, Artificial Sequence
  Description of Artificial Sequence: Synthetic peptide
  Seed: PRMCSLMQGSTLPRR
PRMYSLAQPSTIPRR

SEQ ID NO: 112926 - protein, 15 aa, Artificial Sequence
  Description of Artificial Sequence: Synthetic peptide
  Seed: PRMCSLMQGSTLPRR
PRMYSLAQPSTLPRR

SEQ ID NO: 112927 - protein, 15 aa, Artificial Sequence
  Description of Artificial Sequence: Synthetic peptide
  Seed: PRMCSLMQGSTLPRR
PRMYSLAQPSTMPRR

SEQ ID NO: 112928 - protein, 15 aa, Artificial Sequence
  Description of Artificial Sequence: Synthetic peptide
  Seed: PRMCSLMQGSTLPRR
PRMYSLAQPSTNPRR

SEQ ID NO: 112929 - protein, 15 aa, Artificial Sequence
  Description of Artificial Sequence: Synthetic peptide
  Seed: PRMCSLMQGSTLPRR
PRMYSLAQPSTQPRR

SEQ ID NO: 112930 - protein, 15 aa, Artificial Sequence
  Description of Artificial Sequence: Synthetic peptide
  Seed: PRMCSLMQGSTLPRR
PRMYSLAQPSTSPRR

SEQ ID NO: 112931 - protein, 15 aa, Artificial Sequence
  Description of Artificial Sequence: Synthetic peptide
  Seed: PRMCSLMQGSTLPRR
PRMYSLAQPSTTPRR

SEQ ID NO: 112932 - protein, 15 aa, Artificial Sequence
  Description of Artificial Sequence: Synthetic peptide
  Seed: PRMCSLMQGSTLPRR
PRMYSLAQPSTVPRR

SEQ ID NO: 112933 - protein, 15 aa, Artificial Sequence
  Description of Artificial Sequence: Synthetic peptide
  Seed: PRMCSLMQGSTLPRR
PRMYSLAQPSTYPRR

SEQ ID NO: 112934 - protein, 15 aa, Artificial Sequence
  Description of Artificial Sequence: Synthetic peptide
  Seed: PRMCSLMQGSTLPRR
PRMYSLAQQSTIPRR

SEQ ID NO: 112935 - protein, 15 aa, Artificial Sequence
  Description of Artificial Sequence: Synthetic peptide
  Seed: PRMCSLMQGSTLPRR
PRMYSLAQQSTLPRR

SEQ ID NO: 112936 - protein, 15 aa, Artificial Sequence
  Description of Artificial Sequence: Synthetic peptide
  Seed: PRMCSLMQGSTLPRR
PRMYSLAQQSTVPRR

SEQ ID NO: 112937 - protein, 15 aa, Artificial Sequence
  Description of Artificial Sequence: Synthetic peptide
  Seed: PRMCSLMQGSTLPRR
PRMYSLAQSSTAPRR

SEQ ID NO: 112938 - protein, 15 aa, Artificial Sequence
  Description of Artificial Sequence: Synthetic peptide
  Seed: PRMCSLMQGSTLPRR
PRMYSLAQSSTCPRR

SEQ ID NO: 112939 - protein, 15 aa, Artificial Sequence
  Description of Artificial Sequence: Synthetic peptide
  Seed: PRMCSLMQGSTLPRR
PRMYSLAQSSTFPRR

SEQ ID NO: 112940 - protein, 15 aa, Artificial Sequence
  Description of Artificial Sequence: Synthetic peptide
  Seed: PRMCSLMQGSTLPRR
PRMYSLAQSSTGPRR

SEQ ID NO: 112941 - protein, 15 aa, Artificial Sequence
  Description of Artificial Sequence: Synthetic peptide
  Seed: PRMCSLMQGSTLPRR
PRMYSLAQSSTHPRR

SEQ ID NO: 112942 - protein, 15 aa, Artificial Sequence
  Description of Artificial Sequence: Synthetic peptide
  Seed: PRMCSLMQGSTLPRR
PRMYSLAQSSTIPRR

SEQ ID NO: 112943 - protein, 15 aa, Artificial Sequence
  Description of Artificial Sequence: Synthetic peptide
  Seed: PRMCSLMQGSTLPRR
PRMYSLAQSSTLPRR

SEQ ID NO: 112944 - protein, 15 aa, Artificial Sequence
  Description of Artificial Sequence: Synthetic peptide
  Seed: PRMCSLMQGSTLPRR
PRMYSLAQSSTMPRR

SEQ ID NO: 112945 - protein, 15 aa, Artificial Sequence
  Description of Artificial Sequence: Synthetic peptide
  Seed: PRMCSLMQGSTLPRR
PRMYSLAQSSTNPRR

SEQ ID NO: 112946 - protein, 15 aa, Artificial Sequence
  Description of Artificial Sequence: Synthetic peptide
  Seed: PRMCSLMQGSTLPRR
PRMYSLAQSSTQPRR

SEQ ID NO: 112947 - protein, 15 aa, Artificial Sequence
  Description of Artificial Sequence: Synthetic peptide
  Seed: PRMCSLMQGSTLPRR
PRMYSLAQSSTSPRR

SEQ ID NO: 112948 - protein, 15 aa, Artificial Sequence
  Description of Artificial Sequence: Synthetic peptide
  Seed: PRMCSLMQGSTLPRR
PRMYSLAQSSTTPRR

SEQ ID NO: 112949 - protein, 15 aa, Artificial Sequence
  Description of Artificial Sequence: Synthetic peptide
  Seed: PRMCSLMQGSTLPRR
PRMYSLAQSSTVPRR

SEQ ID NO: 112950 - protein, 15 aa, Artificial Sequence
  Description of Artificial Sequence: Synthetic peptide
  Seed: PRMCSLMQGSTLPRR
PRMYSLAQSSTYPRR

SEQ ID NO: 112951 - protein, 15 aa, Artificial Sequence
  Description of Artificial Sequence: Synthetic peptide
  Seed: PRMCSLMQGSTLPRR
PRMYSLAQTSTAPRR

SEQ ID NO: 112952 - protein, 15 aa, Artificial Sequence
  Description of Artificial Sequence: Synthetic peptide
  Seed: PRMCSLMQGSTLPRR
PRMYSLAQTSTIPRR

SEQ ID NO: 112953 - protein, 15 aa, Artificial Sequence
  Description of Artificial Sequence: Synthetic peptide
  Seed: PRMCSLMQGSTLPRR
PRMYSLAQTSTLPRR

SEQ ID NO: 112954 - protein, 15 aa, Artificial Sequence
  Description of Artificial Sequence: Synthetic peptide
  Seed: PRMCSLMQGSTLPRR
PRMYSLAQTSTMPRR

SEQ ID NO: 112955 - protein, 15 aa, Artificial Sequence
  Description of Artificial Sequence: Synthetic peptide
  Seed: PRMCSLMQGSTLPRR
PRMYSLAQTSTNPRR

SEQ ID NO: 112956 - protein, 15 aa, Artificial Sequence
  Description of Artificial Sequence: Synthetic peptide
  Seed: PRMCSLMQGSTLPRR
PRMYSLAQTSTQPRR

SEQ ID NO: 112957 - protein, 15 aa, Artificial Sequence
  Description of Artificial Sequence: Synthetic peptide
  Seed: PRMCSLMQGSTLPRR
PRMYSLAQTSTSPRR

SEQ ID NO: 112958 - protein, 15 aa, Artificial Sequence
  Description of Artificial Sequence: Synthetic peptide
  Seed: PRMCSLMQGSTLPRR
PRMYSLAQTSTTPRR

SEQ ID NO: 112959 - protein, 15 aa, Artificial Sequence
  Description of Artificial Sequence: Synthetic peptide
  Seed: PRMCSLMQGSTLPRR
PRMYSLAQTSTVPRR

SEQ ID NO: 112960 - protein, 15 aa, Artificial Sequence
  Description of Artificial Sequence: Synthetic peptide
  Seed: PRMCSLMQGSTLPRR
PRMYSLAQVSTAPRR

SEQ ID NO: 112961 - protein, 15 aa, Artificial Sequence
  Description of Artificial Sequence: Synthetic peptide
  Seed: PRMCSLMQGSTLPRR
PRMYSLAQVSTFPRR

SEQ ID NO: 112962 - protein, 15 aa, Artificial Sequence
  Description of Artificial Sequence: Synthetic peptide
  Seed: PRMCSLMQGSTLPRR
PRMYSLAQVSTGPRR

SEQ ID NO: 112963 - protein, 15 aa, Artificial Sequence
  Description of Artificial Sequence: Synthetic peptide
  Seed: PRMCSLMQGSTLPRR
PRMYSLAQVSTHPRR

SEQ ID NO: 112964 - protein, 15 aa, Artificial Sequence
  Description of Artificial Sequence: Synthetic peptide
  Seed: PRMCSLMQGSTLPRR
PRMYSLAQVSTIPRR

SEQ ID NO: 112965 - protein, 15 aa, Artificial Sequence
  Description of Artificial Sequence: Synthetic peptide
  Seed: PRMCSLMQGSTLPRR
PRMYSLAQVSTLPRR

SEQ ID NO: 112966 - protein, 15 aa, Artificial Sequence
  Description of Artificial Sequence: Synthetic peptide
  Seed: PRMCSLMQGSTLPRR
PRMYSLAQVSTMPRR

SEQ ID NO: 112967 - protein, 15 aa, Artificial Sequence
  Description of Artificial Sequence: Synthetic peptide
  Seed: PRMCSLMQGSTLPRR
PRMYSLAQVSTNPRR

SEQ ID NO: 112968 - protein, 15 aa, Artificial Sequence
  Description of Artificial Sequence: Synthetic peptide
  Seed: PRMCSLMQGSTLPRR
PRMYSLAQVSTPPRR

SEQ ID NO: 112969 - protein, 15 aa, Artificial Sequence
  Description of Artificial Sequence: Synthetic peptide
  Seed: PRMCSLMQGSTLPRR
PRMYSLAQVSTQPRR

SEQ ID NO: 112970 - protein, 15 aa, Artificial Sequence
  Description of Artificial Sequence: Synthetic peptide
  Seed: PRMCSLMQGSTLPRR
PRMYSLAQVSTSPRR

SEQ ID NO: 112971 - protein, 15 aa, Artificial Sequence
  Description of Artificial Sequence: Synthetic peptide
  Seed: PRMCSLMQGSTLPRR
PRMYSLAQVSTTPRR

SEQ ID NO: 112972 - protein, 15 aa, Artificial Sequence
  Description of Artificial Sequence: Synthetic peptide
  Seed: PRMCSLMQGSTLPRR
PRMYSLAQVSTVPRR

SEQ ID NO: 112973 - protein, 15 aa, Artificial Sequence
  Description of Artificial Sequence: Synthetic peptide
  Seed: PRMCSLMQGSTLPRR
PRMYSLCQASTAPRR

SEQ ID NO: 112974 - protein, 15 aa, Artificial Sequence
  Description of Artificial Sequence: Synthetic peptide
  Seed: PRMCSLMQGSTLPRR
PRMYSLCQASTIPRR

SEQ ID NO: 112975 - protein, 15 aa, Artificial Sequence
  Description of Artificial Sequence: Synthetic peptide
  Seed: PRMCSLMQGSTLPRR
PRMYSLCQASTLPRR

SEQ ID NO: 112976 - protein, 15 aa, Artificial Sequence
  Description of Artificial Sequence: Synthetic peptide
  Seed: PRMCSLMQGSTLPRR
PRMYSLCQASTMPRR

SEQ ID NO: 112977 - protein, 15 aa, Artificial Sequence
  Description of Artificial Sequence: Synthetic peptide
  Seed: PRMCSLMQGSTLPRR
PRMYSLCQASTVPRR

SEQ ID NO: 112978 - protein, 15 aa, Artificial Sequence
  Description of Artificial Sequence: Synthetic peptide
  Seed: PRMCSLMQGSTLPRR
PRMYSLCQGSTAPRR

SEQ ID NO: 112979 - protein, 15 aa, Artificial Sequence
  Description of Artificial Sequence: Synthetic peptide
  Seed: PRMCSLMQGSTLPRR
PRMYSLCQGSTIPRR

SEQ ID NO: 112980 - protein, 15 aa, Artificial Sequence
  Description of Artificial Sequence: Synthetic peptide
  Seed: PRMCSLMQGSTLPRR
PRMYSLCQGSTLPRR

SEQ ID NO: 112981 - protein, 15 aa, Artificial Sequence
  Description of Artificial Sequence: Synthetic peptide
  Seed: PRMCSLMQGSTLPRR
PRMYSLCQGSTVPRR

SEQ ID NO: 112982 - protein, 15 aa, Artificial Sequence
  Description of Artificial Sequence: Synthetic peptide
  Seed: PRMCSLMQGSTLPRR
PRMYSLCQPSTLPRR

SEQ ID NO: 112983 - protein, 15 aa, Artificial Sequence
  Description of Artificial Sequence: Synthetic peptide
  Seed: PRMCSLMQGSTLPRR
PRMYSLCQSSTAPRR

SEQ ID NO: 112984 - protein, 15 aa, Artificial Sequence
  Description of Artificial Sequence: Synthetic peptide
  Seed: PRMCSLMQGSTLPRR
PRMYSLCQSSTIPRR

SEQ ID NO: 112985 - protein, 15 aa, Artificial Sequence
  Description of Artificial Sequence: Synthetic peptide
  Seed: PRMCSLMQGSTLPRR
PRMYSLCQSSTLPRR

SEQ ID NO: 112986 - protein, 15 aa, Artificial Sequence
  Description of Artificial Sequence: Synthetic peptide
  Seed: PRMCSLMQGSTLPRR
PRMYSLCQSSTVPRR

SEQ ID NO: 112987 - protein, 15 aa, Artificial Sequence
  Description of Artificial Sequence: Synthetic peptide
  Seed: PRMCSLMQGSTLPRR
PRMYSLEQASTAPRR

SEQ ID NO: 112988 - protein, 15 aa, Artificial Sequence
  Description of Artificial Sequence: Synthetic peptide
  Seed: PRMCSLMQGSTLPRR
PRMYSLEQASTIPRR

SEQ ID NO: 112989 - protein, 15 aa, Artificial Sequence
  Description of Artificial Sequence: Synthetic peptide
  Seed: PRMCSLMQGSTLPRR
PRMYSLEQASTLPRR

SEQ ID NO: 112990 - protein, 15 aa, Artificial Sequence
  Description of Artificial Sequence: Synthetic peptide
  Seed: PRMCSLMQGSTLPRR
PRMYSLEQASTMPRR

SEQ ID NO: 112991 - protein, 15 aa, Artificial Sequence
  Description of Artificial Sequence: Synthetic peptide
  Seed: PRMCSLMQGSTLPRR
PRMYSLEQASTSPRR

SEQ ID NO: 112992 - protein, 15 aa, Artificial Sequence
  Description of Artificial Sequence: Synthetic peptide
  Seed: PRMCSLMQGSTLPRR
PRMYSLEQASTTPRR

SEQ ID NO: 112993 - protein, 15 aa, Artificial Sequence
  Description of Artificial Sequence: Synthetic peptide
  Seed: PRMCSLMQGSTLPRR
PRMYSLEQASTVPRR

SEQ ID NO: 112994 - protein, 15 aa, Artificial Sequence
  Description of Artificial Sequence: Synthetic peptide
  Seed: PRMCSLMQGSTLPRR
PRMYSLEQGSTAPRR

SEQ ID NO: 112995 - protein, 15 aa, Artificial Sequence
  Description of Artificial Sequence: Synthetic peptide
  Seed: PRMCSLMQGSTLPRR
PRMYSLEQGSTIPRR

SEQ ID NO: 112996 - protein, 15 aa, Artificial Sequence
  Description of Artificial Sequence: Synthetic peptide
  Seed: PRMCSLMQGSTLPRR
PRMYSLEQGSTLPRR

SEQ ID NO: 112997 - protein, 15 aa, Artificial Sequence
  Description of Artificial Sequence: Synthetic peptide
  Seed: PRMCSLMQGSTLPRR
PRMYSLEQGSTMPRR

SEQ ID NO: 112998 - protein, 15 aa, Artificial Sequence
  Description of Artificial Sequence: Synthetic peptide
  Seed: PRMCSLMQGSTLPRR
PRMYSLEQGSTSPRR

SEQ ID NO: 112999 - protein, 15 aa, Artificial Sequence
  Description of Artificial Sequence: Synthetic peptide
  Seed: PRMCSLMQGSTLPRR
PRMYSLEQGSTTPRR

SEQ ID NO: 113000 - protein, 15 aa, Artificial Sequence
  Description of Artificial Sequence: Synthetic peptide
  Seed: PRMCSLMQGSTLPRR
PRMYSLEQGSTVPRR

SEQ ID NO: 113001 - protein, 15 aa, Artificial Sequence
  Description of Artificial Sequence: Synthetic peptide
  Seed: PRMCSLMQGSTLPRR
PRMYSLEQNSTIPRR

SEQ ID NO: 113002 - protein, 15 aa, Artificial Sequence
  Description of Artificial Sequence: Synthetic peptide
  Seed: PRMCSLMQGSTLPRR
PRMYSLEQNSTLPRR

SEQ ID NO: 113003 - protein, 15 aa, Artificial Sequence
  Description of Artificial Sequence: Synthetic peptide
  Seed: PRMCSLMQGSTLPRR
PRMYSLEQNSTVPRR

SEQ ID NO: 113004 - protein, 15 aa, Artificial Sequence
  Description of Artificial Sequence: Synthetic peptide
  Seed: PRMCSLMQGSTLPRR
PRMYSLEQPSTAPRR

SEQ ID NO: 113005 - protein, 15 aa, Artificial Sequence
  Description of Artificial Sequence: Synthetic peptide
  Seed: PRMCSLMQGSTLPRR
PRMYSLEQPSTIPRR

SEQ ID NO: 113006 - protein, 15 aa, Artificial Sequence
  Description of Artificial Sequence: Synthetic peptide
  Seed: PRMCSLMQGSTLPRR
PRMYSLEQPSTLPRR

SEQ ID NO: 113007 - protein, 15 aa, Artificial Sequence
  Description of Artificial Sequence: Synthetic peptide
  Seed: PRMCSLMQGSTLPRR
PRMYSLEQPSTVPRR

SEQ ID NO: 113008 - protein, 15 aa, Artificial Sequence
  Description of Artificial Sequence: Synthetic peptide
  Seed: PRMCSLMQGSTLPRR
PRMYSLEQSSTAPRR

SEQ ID NO: 113009 - protein, 15 aa, Artificial Sequence
  Description of Artificial Sequence: Synthetic peptide
  Seed: PRMCSLMQGSTLPRR
PRMYSLEQSSTIPRR

SEQ ID NO: 113010 - protein, 15 aa, Artificial Sequence
  Description of Artificial Sequence: Synthetic peptide
  Seed: PRMCSLMQGSTLPRR
PRMYSLEQSSTLPRR

SEQ ID NO: 113011 - protein, 15 aa, Artificial Sequence
  Description of Artificial Sequence: Synthetic peptide
  Seed: PRMCSLMQGSTLPRR
PRMYSLEQSSTMPRR

SEQ ID NO: 113012 - protein, 15 aa, Artificial Sequence
  Description of Artificial Sequence: Synthetic peptide
  Seed: PRMCSLMQGSTLPRR
PRMYSLEQSSTSPRR

SEQ ID NO: 113013 - protein, 15 aa, Artificial Sequence
  Description of Artificial Sequence: Synthetic peptide
  Seed: PRMCSLMQGSTLPRR
PRMYSLEQSSTTPRR

SEQ ID NO: 113014 - protein, 15 aa, Artificial Sequence
  Description of Artificial Sequence: Synthetic peptide
  Seed: PRMCSLMQGSTLPRR
PRMYSLEQSSTVPRR

SEQ ID NO: 113015 - protein, 15 aa, Artificial Sequence
  Description of Artificial Sequence: Synthetic peptide
  Seed: PRMCSLMQGSTLPRR
PRMYSLEQTSTIPRR

SEQ ID NO: 113016 - protein, 15 aa, Artificial Sequence
  Description of Artificial Sequence: Synthetic peptide
  Seed: PRMCSLMQGSTLPRR
PRMYSLEQTSTLPRR

SEQ ID NO: 113017 - protein, 15 aa, Artificial Sequence
  Description of Artificial Sequence: Synthetic peptide
  Seed: PRMCSLMQGSTLPRR
PRMYSLEQTSTVPRR

SEQ ID NO: 113018 - protein, 15 aa, Artificial Sequence
  Description of Artificial Sequence: Synthetic peptide
  Seed: PRMCSLMQGSTLPRR
PRMYSLEQVSTAPRR

SEQ ID NO: 113019 - protein, 15 aa, Artificial Sequence
  Description of Artificial Sequence: Synthetic peptide
  Seed: PRMCSLMQGSTLPRR
PRMYSLEQVSTLPRR

SEQ ID NO: 113020 - protein, 15 aa, Artificial Sequence
  Description of Artificial Sequence: Synthetic peptide
  Seed: PRMCSLMQGSTLPRR
PRMYSLFQASTAPRR

SEQ ID NO: 113021 - protein, 15 aa, Artificial Sequence
  Description of Artificial Sequence: Synthetic peptide
  Seed: PRMCSLMQGSTLPRR
PRMYSLFQASTFPRR

SEQ ID NO: 113022 - protein, 15 aa, Artificial Sequence
  Description of Artificial Sequence: Synthetic peptide
  Seed: PRMCSLMQGSTLPRR
PRMYSLFQASTGPRR

SEQ ID NO: 113023 - protein, 15 aa, Artificial Sequence
  Description of Artificial Sequence: Synthetic peptide
  Seed: PRMCSLMQGSTLPRR
PRMYSLFQASTHPRR

SEQ ID NO: 113024 - protein, 15 aa, Artificial Sequence
  Description of Artificial Sequence: Synthetic peptide
  Seed: PRMCSLMQGSTLPRR
PRMYSLFQASTIPRR

SEQ ID NO: 113025 - protein, 15 aa, Artificial Sequence
  Description of Artificial Sequence: Synthetic peptide
  Seed: PRMCSLMQGSTLPRR
PRMYSLFQASTLPRR

SEQ ID NO: 113026 - protein, 15 aa, Artificial Sequence
  Description of Artificial Sequence: Synthetic peptide
  Seed: PRMCSLMQGSTLPRR
PRMYSLFQASTMPRR

SEQ ID NO: 113027 - protein, 15 aa, Artificial Sequence
  Description of Artificial Sequence: Synthetic peptide
  Seed: PRMCSLMQGSTLPRR
PRMYSLFQASTNPRR

SEQ ID NO: 113028 - protein, 15 aa, Artificial Sequence
  Description of Artificial Sequence: Synthetic peptide
  Seed: PRMCSLMQGSTLPRR
PRMYSLFQASTQPRR

SEQ ID NO: 113029 - protein, 15 aa, Artificial Sequence
  Description of Artificial Sequence: Synthetic peptide
  Seed: PRMCSLMQGSTLPRR
PRMYSLFQASTSPRR

SEQ ID NO: 113030 - protein, 15 aa, Artificial Sequence
  Description of Artificial Sequence: Synthetic peptide
  Seed: PRMCSLMQGSTLPRR
PRMYSLFQASTTPRR

SEQ ID NO: 113031 - protein, 15 aa, Artificial Sequence
  Description of Artificial Sequence: Synthetic peptide
  Seed: PRMCSLMQGSTLPRR
PRMYSLFQASTVPRR

SEQ ID NO: 113032 - protein, 15 aa, Artificial Sequence
  Description of Artificial Sequence: Synthetic peptide
  Seed: PRMCSLMQGSTLPRR
PRMYSLFQFSTLPRR

SEQ ID NO: 113033 - protein, 15 aa, Artificial Sequence
  Description of Artificial Sequence: Synthetic peptide
  Seed: PRMCSLMQGSTLPRR
PRMYSLFQGSTAPRR

SEQ ID NO: 113034 - protein, 15 aa, Artificial Sequence
  Description of Artificial Sequence: Synthetic peptide
  Seed: PRMCSLMQGSTLPRR
PRMYSLFQGSTGPRR

SEQ ID NO: 113035 - protein, 15 aa, Artificial Sequence
  Description of Artificial Sequence: Synthetic peptide
  Seed: PRMCSLMQGSTLPRR
PRMYSLFQGSTIPRR

SEQ ID NO: 113036 - protein, 15 aa, Artificial Sequence
  Description of Artificial Sequence: Synthetic peptide
  Seed: PRMCSLMQGSTLPRR
PRMYSLFQGSTLPRR

SEQ ID NO: 113037 - protein, 15 aa, Artificial Sequence
  Description of Artificial Sequence: Synthetic peptide
  Seed: PRMCSLMQGSTLPRR
PRMYSLFQGSTMPRR

SEQ ID NO: 113038 - protein, 15 aa, Artificial Sequence
  Description of Artificial Sequence: Synthetic peptide
  Seed: PRMCSLMQGSTLPRR
PRMYSLFQGSTSPRR

SEQ ID NO: 113039 - protein, 15 aa, Artificial Sequence
  Description of Artificial Sequence: Synthetic peptide
  Seed: PRMCSLMQGSTLPRR
PRMYSLFQGSTTPRR

SEQ ID NO: 113040 - protein, 15 aa, Artificial Sequence
  Description of Artificial Sequence: Synthetic peptide
  Seed: PRMCSLMQGSTLPRR
PRMYSLFQGSTVPRR

SEQ ID NO: 113041 - protein, 15 aa, Artificial Sequence
  Description of Artificial Sequence: Synthetic peptide
  Seed: PRMCSLMQGSTLPRR
PRMYSLFQISTAPRR

SEQ ID NO: 113042 - protein, 15 aa, Artificial Sequence
  Description of Artificial Sequence: Synthetic peptide
  Seed: PRMCSLMQGSTLPRR
PRMYSLFQISTNPRR

SEQ ID NO: 113043 - protein, 15 aa, Artificial Sequence
  Description of Artificial Sequence: Synthetic peptide
  Seed: PRMCSLMQGSTLPRR
PRMYSLFQISTSPRR

SEQ ID NO: 113044 - protein, 15 aa, Artificial Sequence
  Description of Artificial Sequence: Synthetic peptide
  Seed: PRMCSLMQGSTLPRR
PRMYSLFQISTTPRR

SEQ ID NO: 113045 - protein, 15 aa, Artificial Sequence
  Description of Artificial Sequence: Synthetic peptide
  Seed: PRMCSLMQGSTLPRR
PRMYSLFQISTVPRR

SEQ ID NO: 113046 - protein, 15 aa, Artificial Sequence
  Description of Artificial Sequence: Synthetic peptide
  Seed: PRMCSLMQGSTLPRR
PRMYSLFQLSTAPRR

SEQ ID NO: 113047 - protein, 15 aa, Artificial Sequence
  Description of Artificial Sequence: Synthetic peptide
  Seed: PRMCSLMQGSTLPRR
PRMYSLFQMSTAPRR

SEQ ID NO: 113048 - protein, 15 aa, Artificial Sequence
  Description of Artificial Sequence: Synthetic peptide
  Seed: PRMCSLMQGSTLPRR
PRMYSLFQNSTAPRR

SEQ ID NO: 113049 - protein, 15 aa, Artificial Sequence
  Description of Artificial Sequence: Synthetic peptide
  Seed: PRMCSLMQGSTLPRR
PRMYSLFQNSTIPRR

SEQ ID NO: 113050 - protein, 15 aa, Artificial Sequence
  Description of Artificial Sequence: Synthetic peptide
  Seed: PRMCSLMQGSTLPRR
PRMYSLFQNSTLPRR

SEQ ID NO: 113051 - protein, 15 aa, Artificial Sequence
  Description of Artificial Sequence: Synthetic peptide
  Seed: PRMCSLMQGSTLPRR
PRMYSLFQNSTVPRR

SEQ ID NO: 113052 - protein, 15 aa, Artificial Sequence
  Description of Artificial Sequence: Synthetic peptide
  Seed: PRMCSLMQGSTLPRR
PRMYSLFQPSTAPRR

SEQ ID NO: 113053 - protein, 15 aa, Artificial Sequence
  Description of Artificial Sequence: Synthetic peptide
  Seed: PRMCSLMQGSTLPRR
PRMYSLFQPSTGPRR

SEQ ID NO: 113054 - protein, 15 aa, Artificial Sequence
  Description of Artificial Sequence: Synthetic peptide
  Seed: PRMCSLMQGSTLPRR
PRMYSLFQPSTIPRR

SEQ ID NO: 113055 - protein, 15 aa, Artificial Sequence
  Description of Artificial Sequence: Synthetic peptide
  Seed: PRMCSLMQGSTLPRR
PRMYSLFQPSTLPRR

SEQ ID NO: 113056 - protein, 15 aa, Artificial Sequence
  Description of Artificial Sequence: Synthetic peptide
  Seed: PRMCSLMQGSTLPRR
PRMYSLFQPSTMPRR

SEQ ID NO: 113057 - protein, 15 aa, Artificial Sequence
  Description of Artificial Sequence: Synthetic peptide
  Seed: PRMCSLMQGSTLPRR
PRMYSLFQPSTNPRR

SEQ ID NO: 113058 - protein, 15 aa, Artificial Sequence
  Description of Artificial Sequence: Synthetic peptide
  Seed: PRMCSLMQGSTLPRR
PRMYSLFQPSTSPRR

SEQ ID NO: 113059 - protein, 15 aa, Artificial Sequence
  Description of Artificial Sequence: Synthetic peptide
  Seed: PRMCSLMQGSTLPRR
PRMYSLFQPSTTPRR

SEQ ID NO: 113060 - protein, 15 aa, Artificial Sequence
  Description of Artificial Sequence: Synthetic peptide
  Seed: PRMCSLMQGSTLPRR
PRMYSLFQPSTVPRR

SEQ ID NO: 113061 - protein, 15 aa, Artificial Sequence
  Description of Artificial Sequence: Synthetic peptide
  Seed: PRMCSLMQGSTLPRR
PRMYSLFQSSTAPRR

SEQ ID NO: 113062 - protein, 15 aa, Artificial Sequence
  Description of Artificial Sequence: Synthetic peptide
  Seed: PRMCSLMQGSTLPRR
PRMYSLFQSSTIPRR

SEQ ID NO: 113063 - protein, 15 aa, Artificial Sequence
  Description of Artificial Sequence: Synthetic peptide
  Seed: PRMCSLMQGSTLPRR
PRMYSLFQSSTLPRR

SEQ ID NO: 113064 - protein, 15 aa, Artificial Sequence
  Description of Artificial Sequence: Synthetic peptide
  Seed: PRMCSLMQGSTLPRR
PRMYSLFQSSTMPRR

SEQ ID NO: 113065 - protein, 15 aa, Artificial Sequence
  Description of Artificial Sequence: Synthetic peptide
  Seed: PRMCSLMQGSTLPRR
PRMYSLFQSSTNPRR

SEQ ID NO: 113066 - protein, 15 aa, Artificial Sequence
  Description of Artificial Sequence: Synthetic peptide
  Seed: PRMCSLMQGSTLPRR
PRMYSLFQSSTSPRR

SEQ ID NO: 113067 - protein, 15 aa, Artificial Sequence
  Description of Artificial Sequence: Synthetic peptide
  Seed: PRMCSLMQGSTLPRR
PRMYSLFQSSTTPRR

SEQ ID NO: 113068 - protein, 15 aa, Artificial Sequence
  Description of Artificial Sequence: Synthetic peptide
  Seed: PRMCSLMQGSTLPRR
PRMYSLFQSSTVPRR

SEQ ID NO: 113069 - protein, 15 aa, Artificial Sequence
  Description of Artificial Sequence: Synthetic peptide
  Seed: PRMCSLMQGSTLPRR
PRMYSLFQTSTAPRR

SEQ ID NO: 113070 - protein, 15 aa, Artificial Sequence
  Description of Artificial Sequence: Synthetic peptide
  Seed: PRMCSLMQGSTLPRR
PRMYSLFQTSTIPRR

SEQ ID NO: 113071 - protein, 15 aa, Artificial Sequence
  Description of Artificial Sequence: Synthetic peptide
  Seed: PRMCSLMQGSTLPRR
PRMYSLFQTSTLPRR

SEQ ID NO: 113072 - protein, 15 aa, Artificial Sequence
  Description of Artificial Sequence: Synthetic peptide
  Seed: PRMCSLMQGSTLPRR
PRMYSLFQTSTMPRR

SEQ ID NO: 113073 - protein, 15 aa, Artificial Sequence
  Description of Artificial Sequence: Synthetic peptide
  Seed: PRMCSLMQGSTLPRR
PRMYSLFQTSTNPRR

SEQ ID NO: 113074 - protein, 15 aa, Artificial Sequence
  Description of Artificial Sequence: Synthetic peptide
  Seed: PRMCSLMQGSTLPRR
PRMYSLFQTSTSPRR

SEQ ID NO: 113075 - protein, 15 aa, Artificial Sequence
  Description of Artificial Sequence: Synthetic peptide
  Seed: PRMCSLMQGSTLPRR
PRMYSLFQTSTTPRR

SEQ ID NO: 113076 - protein, 15 aa, Artificial Sequence
  Description of Artificial Sequence: Synthetic peptide
  Seed: PRMCSLMQGSTLPRR
PRMYSLFQTSTVPRR

SEQ ID NO: 113077 - protein, 15 aa, Artificial Sequence
  Description of Artificial Sequence: Synthetic peptide
  Seed: PRMCSLMQGSTLPRR
PRMYSLFQVSTAPRR

SEQ ID NO: 113078 - protein, 15 aa, Artificial Sequence
  Description of Artificial Sequence: Synthetic peptide
  Seed: PRMCSLMQGSTLPRR
PRMYSLFQVSTIPRR

SEQ ID NO: 113079 - protein, 15 aa, Artificial Sequence
  Description of Artificial Sequence: Synthetic peptide
  Seed: PRMCSLMQGSTLPRR
PRMYSLFQVSTLPRR

SEQ ID NO: 113080 - protein, 15 aa, Artificial Sequence
  Description of Artificial Sequence: Synthetic peptide
  Seed: PRMCSLMQGSTLPRR
PRMYSLFQVSTMPRR

SEQ ID NO: 113081 - protein, 15 aa, Artificial Sequence
  Description of Artificial Sequence: Synthetic peptide
  Seed: PRMCSLMQGSTLPRR
PRMYSLFQVSTNPRR

SEQ ID NO: 113082 - protein, 15 aa, Artificial Sequence
  Description of Artificial Sequence: Synthetic peptide
  Seed: PRMCSLMQGSTLPRR
PRMYSLFQVSTSPRR

SEQ ID NO: 113083 - protein, 15 aa, Artificial Sequence
  Description of Artificial Sequence: Synthetic peptide
  Seed: PRMCSLMQGSTLPRR
PRMYSLFQVSTTPRR

SEQ ID NO: 113084 - protein, 15 aa, Artificial Sequence
  Description of Artificial Sequence: Synthetic peptide
  Seed: PRMCSLMQGSTLPRR
PRMYSLFQVSTVPRR

SEQ ID NO: 113085 - protein, 15 aa, Artificial Sequence
  Description of Artificial Sequence: Synthetic peptide
  Seed: PRMCSLMQGSTLPRR
PRMYSLGQASTAPRR

SEQ ID NO: 113086 - protein, 15 aa, Artificial Sequence
  Description of Artificial Sequence: Synthetic peptide
  Seed: PRMCSLMQGSTLPRR
PRMYSLGQASTFPRR

SEQ ID NO: 113087 - protein, 15 aa, Artificial Sequence
  Description of Artificial Sequence: Synthetic peptide
  Seed: PRMCSLMQGSTLPRR
PRMYSLGQASTIPRR

SEQ ID NO: 113088 - protein, 15 aa, Artificial Sequence
  Description of Artificial Sequence: Synthetic peptide
  Seed: PRMCSLMQGSTLPRR
PRMYSLGQASTLPRR

SEQ ID NO: 113089 - protein, 15 aa, Artificial Sequence
  Description of Artificial Sequence: Synthetic peptide
  Seed: PRMCSLMQGSTLPRR
PRMYSLGQASTMPRR

SEQ ID NO: 113090 - protein, 15 aa, Artificial Sequence
  Description of Artificial Sequence: Synthetic peptide
  Seed: PRMCSLMQGSTLPRR
PRMYSLGQASTSPRR

SEQ ID NO: 113091 - protein, 15 aa, Artificial Sequence
  Description of Artificial Sequence: Synthetic peptide
  Seed: PRMCSLMQGSTLPRR
PRMYSLGQASTTPRR

SEQ ID NO: 113092 - protein, 15 aa, Artificial Sequence
  Description of Artificial Sequence: Synthetic peptide
  Seed: PRMCSLMQGSTLPRR
PRMYSLGQASTVPRR

SEQ ID NO: 113093 - protein, 15 aa, Artificial Sequence
  Description of Artificial Sequence: Synthetic peptide
  Seed: PRMCSLMQGSTLPRR
PRMYSLGQGSTAPRR

SEQ ID NO: 113094 - protein, 15 aa, Artificial Sequence
  Description of Artificial Sequence: Synthetic peptide
  Seed: PRMCSLMQGSTLPRR
PRMYSLGQGSTIPRR

SEQ ID NO: 113095 - protein, 15 aa, Artificial Sequence
  Description of Artificial Sequence: Synthetic peptide
  Seed: PRMCSLMQGSTLPRR
PRMYSLGQGSTLPRR

SEQ ID NO: 113096 - protein, 15 aa, Artificial Sequence
  Description of Artificial Sequence: Synthetic peptide
  Seed: PRMCSLMQGSTLPRR
PRMYSLGQGSTMPRR

SEQ ID NO: 113097 - protein, 15 aa, Artificial Sequence
  Description of Artificial Sequence: Synthetic peptide
  Seed: PRMCSLMQGSTLPRR
PRMYSLGQGSTVPRR

SEQ ID NO: 113098 - protein, 15 aa, Artificial Sequence
  Description of Artificial Sequence: Synthetic peptide
  Seed: PRMCSLMQGSTLPRR
PRMYSLGQISTLPRR

SEQ ID NO: 113099 - protein, 15 aa, Artificial Sequence
  Description of Artificial Sequence: Synthetic peptide
  Seed: PRMCSLMQGSTLPRR
PRMYSLGQNSTIPRR

SEQ ID NO: 113100 - protein, 15 aa, Artificial Sequence
  Description of Artificial Sequence: Synthetic peptide
  Seed: PRMCSLMQGSTLPRR
PRMYSLGQNSTLPRR

SEQ ID NO: 113101 - protein, 15 aa, Artificial Sequence
  Description of Artificial Sequence: Synthetic peptide
  Seed: PRMCSLMQGSTLPRR
PRMYSLGQNSTVPRR

SEQ ID NO: 113102 - protein, 15 aa, Artificial Sequence
  Description of Artificial Sequence: Synthetic peptide
  Seed: PRMCSLMQGSTLPRR
PRMYSLGQPSTIPRR

SEQ ID NO: 113103 - protein, 15 aa, Artificial Sequence
  Description of Artificial Sequence: Synthetic peptide
  Seed: PRMCSLMQGSTLPRR
PRMYSLGQPSTLPRR

SEQ ID NO: 113104 - protein, 15 aa, Artificial Sequence
  Description of Artificial Sequence: Synthetic peptide
  Seed: PRMCSLMQGSTLPRR
PRMYSLGQPSTVPRR

SEQ ID NO: 113105 - protein, 15 aa, Artificial Sequence
  Description of Artificial Sequence: Synthetic peptide
  Seed: PRMCSLMQGSTLPRR
PRMYSLGQSSTAPRR

SEQ ID NO: 113106 - protein, 15 aa, Artificial Sequence
  Description of Artificial Sequence: Synthetic peptide
  Seed: PRMCSLMQGSTLPRR
PRMYSLGQSSTIPRR

SEQ ID NO: 113107 - protein, 15 aa, Artificial Sequence
  Description of Artificial Sequence: Synthetic peptide
  Seed: PRMCSLMQGSTLPRR
PRMYSLGQSSTLPRR

SEQ ID NO: 113108 - protein, 15 aa, Artificial Sequence
  Description of Artificial Sequence: Synthetic peptide
  Seed: PRMCSLMQGSTLPRR
PRMYSLGQSSTMPRR

SEQ ID NO: 113109 - protein, 15 aa, Artificial Sequence
  Description of Artificial Sequence: Synthetic peptide
  Seed: PRMCSLMQGSTLPRR
PRMYSLGQSSTVPRR

SEQ ID NO: 113110 - protein, 15 aa, Artificial Sequence
  Description of Artificial Sequence: Synthetic peptide
  Seed: PRMCSLMQGSTLPRR
PRMYSLGQTSTIPRR

SEQ ID NO: 113111 - protein, 15 aa, Artificial Sequence
  Description of Artificial Sequence: Synthetic peptide
  Seed: PRMCSLMQGSTLPRR
PRMYSLGQTSTLPRR

SEQ ID NO: 113112 - protein, 15 aa, Artificial Sequence
  Description of Artificial Sequence: Synthetic peptide
  Seed: PRMCSLMQGSTLPRR
PRMYSLGQTSTVPRR

SEQ ID NO: 113113 - protein, 15 aa, Artificial Sequence
  Description of Artificial Sequence: Synthetic peptide
  Seed: PRMCSLMQGSTLPRR
PRMYSLGQVSTIPRR

SEQ ID NO: 113114 - protein, 15 aa, Artificial Sequence
  Description of Artificial Sequence: Synthetic peptide
  Seed: PRMCSLMQGSTLPRR
PRMYSLGQVSTLPRR

SEQ ID NO: 113115 - protein, 15 aa, Artificial Sequence
  Description of Artificial Sequence: Synthetic peptide
  Seed: PRMCSLMQGSTLPRR
PRMYSLGQVSTVPRR

SEQ ID NO: 113116 - protein, 15 aa, Artificial Sequence
  Description of Artificial Sequence: Synthetic peptide
  Seed: PRMCSLMQGSTLPRR
PRMYSLHQASTAPRR

SEQ ID NO: 113117 - protein, 15 aa, Artificial Sequence
  Description of Artificial Sequence: Synthetic peptide
  Seed: PRMCSLMQGSTLPRR
PRMYSLHQASTIPRR

SEQ ID NO: 113118 - protein, 15 aa, Artificial Sequence
  Description of Artificial Sequence: Synthetic peptide
  Seed: PRMCSLMQGSTLPRR
PRMYSLHQASTLPRR

SEQ ID NO: 113119 - protein, 15 aa, Artificial Sequence
  Description of Artificial Sequence: Synthetic peptide
  Seed: PRMCSLMQGSTLPRR
PRMYSLHQASTMPRR

SEQ ID NO: 113120 - protein, 15 aa, Artificial Sequence
  Description of Artificial Sequence: Synthetic peptide
  Seed: PRMCSLMQGSTLPRR
PRMYSLHQASTVPRR

SEQ ID NO: 113121 - protein, 15 aa, Artificial Sequence
  Description of Artificial Sequence: Synthetic peptide
  Seed: PRMCSLMQGSTLPRR
PRMYSLHQGSTAPRR

SEQ ID NO: 113122 - protein, 15 aa, Artificial Sequence
  Description of Artificial Sequence: Synthetic peptide
  Seed: PRMCSLMQGSTLPRR
PRMYSLHQGSTIPRR

SEQ ID NO: 113123 - protein, 15 aa, Artificial Sequence
  Description of Artificial Sequence: Synthetic peptide
  Seed: PRMCSLMQGSTLPRR
PRMYSLHQGSTLPRR

SEQ ID NO: 113124 - protein, 15 aa, Artificial Sequence
  Description of Artificial Sequence: Synthetic peptide
  Seed: PRMCSLMQGSTLPRR
PRMYSLHQGSTMPRR

SEQ ID NO: 113125 - protein, 15 aa, Artificial Sequence
  Description of Artificial Sequence: Synthetic peptide
  Seed: PRMCSLMQGSTLPRR
PRMYSLHQGSTVPRR

SEQ ID NO: 113126 - protein, 15 aa, Artificial Sequence
  Description of Artificial Sequence: Synthetic peptide
  Seed: PRMCSLMQGSTLPRR
PRMYSLHQPSTIPRR

SEQ ID NO: 113127 - protein, 15 aa, Artificial Sequence
  Description of Artificial Sequence: Synthetic peptide
  Seed: PRMCSLMQGSTLPRR
PRMYSLHQPSTLPRR

SEQ ID NO: 113128 - protein, 15 aa, Artificial Sequence
  Description of Artificial Sequence: Synthetic peptide
  Seed: PRMCSLMQGSTLPRR
PRMYSLHQSSTAPRR

SEQ ID NO: 113129 - protein, 15 aa, Artificial Sequence
  Description of Artificial Sequence: Synthetic peptide
  Seed: PRMCSLMQGSTLPRR
PRMYSLHQSSTIPRR

SEQ ID NO: 113130 - protein, 15 aa, Artificial Sequence
  Description of Artificial Sequence: Synthetic peptide
  Seed: PRMCSLMQGSTLPRR
PRMYSLHQSSTLPRR

SEQ ID NO: 113131 - protein, 15 aa, Artificial Sequence
  Description of Artificial Sequence: Synthetic peptide
  Seed: PRMCSLMQGSTLPRR
PRMYSLHQSSTVPRR

SEQ ID NO: 113132 - protein, 15 aa, Artificial Sequence
  Description of Artificial Sequence: Synthetic peptide
  Seed: PRMCSLMQGSTLPRR
PRMYSLIQASTAPRR

SEQ ID NO: 113133 - protein, 15 aa, Artificial Sequence
  Description of Artificial Sequence: Synthetic peptide
  Seed: PRMCSLMQGSTLPRR
PRMYSLIQASTCPRR

SEQ ID NO: 113134 - protein, 15 aa, Artificial Sequence
  Description of Artificial Sequence: Synthetic peptide
  Seed: PRMCSLMQGSTLPRR
PRMYSLIQASTDPRR

SEQ ID NO: 113135 - protein, 15 aa, Artificial Sequence
  Description of Artificial Sequence: Synthetic peptide
  Seed: PRMCSLMQGSTLPRR
PRMYSLIQASTEPRR

SEQ ID NO: 113136 - protein, 15 aa, Artificial Sequence
  Description of Artificial Sequence: Synthetic peptide
  Seed: PRMCSLMQGSTLPRR
PRMYSLIQASTFPRR

SEQ ID NO: 113137 - protein, 15 aa, Artificial Sequence
  Description of Artificial Sequence: Synthetic peptide
  Seed: PRMCSLMQGSTLPRR
PRMYSLIQASTGPRR

SEQ ID NO: 113138 - protein, 15 aa, Artificial Sequence
  Description of Artificial Sequence: Synthetic peptide
  Seed: PRMCSLMQGSTLPRR
PRMYSLIQASTHPRR

SEQ ID NO: 113139 - protein, 15 aa, Artificial Sequence
  Description of Artificial Sequence: Synthetic peptide
  Seed: PRMCSLMQGSTLPRR
PRMYSLIQASTIPRR

SEQ ID NO: 113140 - protein, 15 aa, Artificial Sequence
  Description of Artificial Sequence: Synthetic peptide
  Seed: PRMCSLMQGSTLPRR
PRMYSLIQASTKPRR

SEQ ID NO: 113141 - protein, 15 aa, Artificial Sequence
  Description of Artificial Sequence: Synthetic peptide
  Seed: PRMCSLMQGSTLPRR
PRMYSLIQASTLPRR

SEQ ID NO: 113142 - protein, 15 aa, Artificial Sequence
  Description of Artificial Sequence: Synthetic peptide
  Seed: PRMCSLMQGSTLPRR
PRMYSLIQASTMPRR

SEQ ID NO: 113143 - protein, 15 aa, Artificial Sequence
  Description of Artificial Sequence: Synthetic peptide
  Seed: PRMCSLMQGSTLPRR
PRMYSLIQASTNPRR

SEQ ID NO: 113144 - protein, 15 aa, Artificial Sequence
  Description of Artificial Sequence: Synthetic peptide
  Seed: PRMCSLMQGSTLPRR
PRMYSLIQASTPPRR

SEQ ID NO: 113145 - protein, 15 aa, Artificial Sequence
  Description of Artificial Sequence: Synthetic peptide
  Seed: PRMCSLMQGSTLPRR
PRMYSLIQASTQPRR

SEQ ID NO: 113146 - protein, 15 aa, Artificial Sequence
  Description of Artificial Sequence: Synthetic peptide
  Seed: PRMCSLMQGSTLPRR
PRMYSLIQASTRPRR

SEQ ID NO: 113147 - protein, 15 aa, Artificial Sequence
  Description of Artificial Sequence: Synthetic peptide
  Seed: PRMCSLMQGSTLPRR
PRMYSLIQASTSPRR

SEQ ID NO: 113148 - protein, 15 aa, Artificial Sequence
  Description of Artificial Sequence: Synthetic peptide
  Seed: PRMCSLMQGSTLPRR
PRMYSLIQASTTPRR

SEQ ID NO: 113149 - protein, 15 aa, Artificial Sequence
  Description of Artificial Sequence: Synthetic peptide
  Seed: PRMCSLMQGSTLPRR
PRMYSLIQASTVPRR

SEQ ID NO: 113150 - protein, 15 aa, Artificial Sequence
  Description of Artificial Sequence: Synthetic peptide
  Seed: PRMCSLMQGSTLPRR
PRMYSLIQASTWPRR

SEQ ID NO: 113151 - protein, 15 aa, Artificial Sequence
  Description of Artificial Sequence: Synthetic peptide
  Seed: PRMCSLMQGSTLPRR
PRMYSLIQASTYPRR

SEQ ID NO: 113152 - protein, 15 aa, Artificial Sequence
  Description of Artificial Sequence: Synthetic peptide
  Seed: PRMCSLMQGSTLPRR
PRMYSLIQCSTAPRR

SEQ ID NO: 113153 - protein, 15 aa, Artificial Sequence
  Description of Artificial Sequence: Synthetic peptide
  Seed: PRMCSLMQGSTLPRR
PRMYSLIQCSTIPRR

SEQ ID NO: 113154 - protein, 15 aa, Artificial Sequence
  Description of Artificial Sequence: Synthetic peptide
  Seed: PRMCSLMQGSTLPRR
PRMYSLIQCSTLPRR

SEQ ID NO: 113155 - protein, 15 aa, Artificial Sequence
  Description of Artificial Sequence: Synthetic peptide
  Seed: PRMCSLMQGSTLPRR
PRMYSLIQCSTVPRR

SEQ ID NO: 113156 - protein, 15 aa, Artificial Sequence
  Description of Artificial Sequence: Synthetic peptide
  Seed: PRMCSLMQGSTLPRR
PRMYSLIQESTLPRR

SEQ ID NO: 113157 - protein, 15 aa, Artificial Sequence
  Description of Artificial Sequence: Synthetic peptide
  Seed: PRMCSLMQGSTLPRR
PRMYSLIQFSTLPRR

SEQ ID NO: 113158 - protein, 15 aa, Artificial Sequence
  Description of Artificial Sequence: Synthetic peptide
  Seed: PRMCSLMQGSTLPRR
PRMYSLIQGSTAPRR

SEQ ID NO: 113159 - protein, 15 aa, Artificial Sequence
  Description of Artificial Sequence: Synthetic peptide
  Seed: PRMCSLMQGSTLPRR
PRMYSLIQGSTCPRR

SEQ ID NO: 113160 - protein, 15 aa, Artificial Sequence
  Description of Artificial Sequence: Synthetic peptide
  Seed: PRMCSLMQGSTLPRR
PRMYSLIQGSTFPRR

SEQ ID NO: 113161 - protein, 15 aa, Artificial Sequence
  Description of Artificial Sequence: Synthetic peptide
  Seed: PRMCSLMQGSTLPRR
PRMYSLIQGSTGPRR

SEQ ID NO: 113162 - protein, 15 aa, Artificial Sequence
  Description of Artificial Sequence: Synthetic peptide
  Seed: PRMCSLMQGSTLPRR
PRMYSLIQGSTHPRR

SEQ ID NO: 113163 - protein, 15 aa, Artificial Sequence
  Description of Artificial Sequence: Synthetic peptide
  Seed: PRMCSLMQGSTLPRR
PRMYSLIQGSTIPRR

SEQ ID NO: 113164 - protein, 15 aa, Artificial Sequence
  Description of Artificial Sequence: Synthetic peptide
  Seed: PRMCSLMQGSTLPRR
PRMYSLIQGSTLPRR

SEQ ID NO: 113165 - protein, 15 aa, Artificial Sequence
  Description of Artificial Sequence: Synthetic peptide
  Seed: PRMCSLMQGSTLPRR
PRMYSLIQGSTMPRR

SEQ ID NO: 113166 - protein, 15 aa, Artificial Sequence
  Description of Artificial Sequence: Synthetic peptide
  Seed: PRMCSLMQGSTLPRR
PRMYSLIQGSTNPRR

SEQ ID NO: 113167 - protein, 15 aa, Artificial Sequence
  Description of Artificial Sequence: Synthetic peptide
  Seed: PRMCSLMQGSTLPRR
PRMYSLIQGSTPPRR

SEQ ID NO: 113168 - protein, 15 aa, Artificial Sequence
  Description of Artificial Sequence: Synthetic peptide
  Seed: PRMCSLMQGSTLPRR
PRMYSLIQGSTQPRR

SEQ ID NO: 113169 - protein, 15 aa, Artificial Sequence
  Description of Artificial Sequence: Synthetic peptide
  Seed: PRMCSLMQGSTLPRR
PRMYSLIQGSTSPRR

SEQ ID NO: 113170 - protein, 15 aa, Artificial Sequence
  Description of Artificial Sequence: Synthetic peptide
  Seed: PRMCSLMQGSTLPRR
PRMYSLIQGSTTPRR

SEQ ID NO: 113171 - protein, 15 aa, Artificial Sequence
  Description of Artificial Sequence: Synthetic peptide
  Seed: PRMCSLMQGSTLPRR
PRMYSLIQGSTVPRR

SEQ ID NO: 113172 - protein, 15 aa, Artificial Sequence
  Description of Artificial Sequence: Synthetic peptide
  Seed: PRMCSLMQGSTLPRR
PRMYSLIQGSTWPRR

SEQ ID NO: 113173 - protein, 15 aa, Artificial Sequence
  Description of Artificial Sequence: Synthetic peptide
  Seed: PRMCSLMQGSTLPRR
PRMYSLIQGSTYPRR

SEQ ID NO: 113174 - protein, 15 aa, Artificial Sequence
  Description of Artificial Sequence: Synthetic peptide
  Seed: PRMCSLMQGSTLPRR
PRMYSLIQHSTAPRR

SEQ ID NO: 113175 - protein, 15 aa, Artificial Sequence
  Description of Artificial Sequence: Synthetic peptide
  Seed: PRMCSLMQGSTLPRR
PRMYSLIQHSTIPRR

SEQ ID NO: 113176 - protein, 15 aa, Artificial Sequence
  Description of Artificial Sequence: Synthetic peptide
  Seed: PRMCSLMQGSTLPRR
PRMYSLIQHSTLPRR

SEQ ID NO: 113177 - protein, 15 aa, Artificial Sequence
  Description of Artificial Sequence: Synthetic peptide
  Seed: PRMCSLMQGSTLPRR
PRMYSLIQHSTVPRR

SEQ ID NO: 113178 - protein, 15 aa, Artificial Sequence
  Description of Artificial Sequence: Synthetic peptide
  Seed: PRMCSLMQGSTLPRR
PRMYSLIQISTAPRR

SEQ ID NO: 113179 - protein, 15 aa, Artificial Sequence
  Description of Artificial Sequence: Synthetic peptide
  Seed: PRMCSLMQGSTLPRR
PRMYSLIQISTCPRR

SEQ ID NO: 113180 - protein, 15 aa, Artificial Sequence
  Description of Artificial Sequence: Synthetic peptide
  Seed: PRMCSLMQGSTLPRR
PRMYSLIQISTDPRR

SEQ ID NO: 113181 - protein, 15 aa, Artificial Sequence
  Description of Artificial Sequence: Synthetic peptide
  Seed: PRMCSLMQGSTLPRR
PRMYSLIQISTGPRR

SEQ ID NO: 113182 - protein, 15 aa, Artificial Sequence
  Description of Artificial Sequence: Synthetic peptide
  Seed: PRMCSLMQGSTLPRR
PRMYSLIQISTHPRR

SEQ ID NO: 113183 - protein, 15 aa, Artificial Sequence
  Description of Artificial Sequence: Synthetic peptide
  Seed: PRMCSLMQGSTLPRR
PRMYSLIQISTIPRR

SEQ ID NO: 113184 - protein, 15 aa, Artificial Sequence
  Description of Artificial Sequence: Synthetic peptide
  Seed: PRMCSLMQGSTLPRR
PRMYSLIQISTLPRR

SEQ ID NO: 113185 - protein, 15 aa, Artificial Sequence
  Description of Artificial Sequence: Synthetic peptide
  Seed: PRMCSLMQGSTLPRR
PRMYSLIQISTMPRR

SEQ ID NO: 113186 - protein, 15 aa, Artificial Sequence
  Description of Artificial Sequence: Synthetic peptide
  Seed: PRMCSLMQGSTLPRR
PRMYSLIQISTNPRR

SEQ ID NO: 113187 - protein, 15 aa, Artificial Sequence
  Description of Artificial Sequence: Synthetic peptide
  Seed: PRMCSLMQGSTLPRR
PRMYSLIQISTPPRR

SEQ ID NO: 113188 - protein, 15 aa, Artificial Sequence
  Description of Artificial Sequence: Synthetic peptide
  Seed: PRMCSLMQGSTLPRR
PRMYSLIQISTQPRR

SEQ ID NO: 113189 - protein, 15 aa, Artificial Sequence
  Description of Artificial Sequence: Synthetic peptide
  Seed: PRMCSLMQGSTLPRR
PRMYSLIQISTSPRR

SEQ ID NO: 113190 - protein, 15 aa, Artificial Sequence
  Description of Artificial Sequence: Synthetic peptide
  Seed: PRMCSLMQGSTLPRR
PRMYSLIQISTTPRR

SEQ ID NO: 113191 - protein, 15 aa, Artificial Sequence
  Description of Artificial Sequence: Synthetic peptide
  Seed: PRMCSLMQGSTLPRR
PRMYSLIQISTVPRR

SEQ ID NO: 113192 - protein, 15 aa, Artificial Sequence
  Description of Artificial Sequence: Synthetic peptide
  Seed: PRMCSLMQGSTLPRR
PRMYSLIQLSTAPRR

SEQ ID NO: 113193 - protein, 15 aa, Artificial Sequence
  Description of Artificial Sequence: Synthetic peptide
  Seed: PRMCSLMQGSTLPRR
PRMYSLIQLSTGPRR

SEQ ID NO: 113194 - protein, 15 aa, Artificial Sequence
  Description of Artificial Sequence: Synthetic peptide
  Seed: PRMCSLMQGSTLPRR
PRMYSLIQLSTHPRR

SEQ ID NO: 113195 - protein, 15 aa, Artificial Sequence
  Description of Artificial Sequence: Synthetic peptide
  Seed: PRMCSLMQGSTLPRR
PRMYSLIQLSTIPRR

SEQ ID NO: 113196 - protein, 15 aa, Artificial Sequence
  Description of Artificial Sequence: Synthetic peptide
  Seed: PRMCSLMQGSTLPRR
PRMYSLIQLSTLPRR

SEQ ID NO: 113197 - protein, 15 aa, Artificial Sequence
  Description of Artificial Sequence: Synthetic peptide
  Seed: PRMCSLMQGSTLPRR
PRMYSLIQLSTMPRR

SEQ ID NO: 113198 - protein, 15 aa, Artificial Sequence
  Description of Artificial Sequence: Synthetic peptide
  Seed: PRMCSLMQGSTLPRR
PRMYSLIQLSTNPRR

SEQ ID NO: 113199 - protein, 15 aa, Artificial Sequence
  Description of Artificial Sequence: Synthetic peptide
  Seed: PRMCSLMQGSTLPRR
PRMYSLIQLSTQPRR

SEQ ID NO: 113200 - protein, 15 aa, Artificial Sequence
  Description of Artificial Sequence: Synthetic peptide
  Seed: PRMCSLMQGSTLPRR
PRMYSLIQLSTSPRR

SEQ ID NO: 113201 - protein, 15 aa, Artificial Sequence
  Description of Artificial Sequence: Synthetic peptide
  Seed: PRMCSLMQGSTLPRR
PRMYSLIQLSTTPRR

SEQ ID NO: 113202 - protein, 15 aa, Artificial Sequence
  Description of Artificial Sequence: Synthetic peptide
  Seed: PRMCSLMQGSTLPRR
PRMYSLIQLSTVPRR

SEQ ID NO: 113203 - protein, 15 aa, Artificial Sequence
  Description of Artificial Sequence: Synthetic peptide
  Seed: PRMCSLMQGSTLPRR
PRMYSLIQMSTAPRR

SEQ ID NO: 113204 - protein, 15 aa, Artificial Sequence
  Description of Artificial Sequence: Synthetic peptide
  Seed: PRMCSLMQGSTLPRR
PRMYSLIQMSTGPRR

SEQ ID NO: 113205 - protein, 15 aa, Artificial Sequence
  Description of Artificial Sequence: Synthetic peptide
  Seed: PRMCSLMQGSTLPRR
PRMYSLIQMSTHPRR

SEQ ID NO: 113206 - protein, 15 aa, Artificial Sequence
  Description of Artificial Sequence: Synthetic peptide
  Seed: PRMCSLMQGSTLPRR
PRMYSLIQMSTIPRR

SEQ ID NO: 113207 - protein, 15 aa, Artificial Sequence
  Description of Artificial Sequence: Synthetic peptide
  Seed: PRMCSLMQGSTLPRR
PRMYSLIQMSTLPRR

SEQ ID NO: 113208 - protein, 15 aa, Artificial Sequence
  Description of Artificial Sequence: Synthetic peptide
  Seed: PRMCSLMQGSTLPRR
PRMYSLIQMSTMPRR

SEQ ID NO: 113209 - protein, 15 aa, Artificial Sequence
  Description of Artificial Sequence: Synthetic peptide
  Seed: PRMCSLMQGSTLPRR
PRMYSLIQMSTNPRR

SEQ ID NO: 113210 - protein, 15 aa, Artificial Sequence
  Description of Artificial Sequence: Synthetic peptide
  Seed: PRMCSLMQGSTLPRR
PRMYSLIQMSTSPRR

SEQ ID NO: 113211 - protein, 15 aa, Artificial Sequence
  Description of Artificial Sequence: Synthetic peptide
  Seed: PRMCSLMQGSTLPRR
PRMYSLIQMSTTPRR

SEQ ID NO: 113212 - protein, 15 aa, Artificial Sequence
  Description of Artificial Sequence: Synthetic peptide
  Seed: PRMCSLMQGSTLPRR
PRMYSLIQMSTVPRR

SEQ ID NO: 113213 - protein, 15 aa, Artificial Sequence
  Description of Artificial Sequence: Synthetic peptide
  Seed: PRMCSLMQGSTLPRR
PRMYSLIQNSTAPRR

SEQ ID NO: 113214 - protein, 15 aa, Artificial Sequence
  Description of Artificial Sequence: Synthetic peptide
  Seed: PRMCSLMQGSTLPRR
PRMYSLIQNSTCPRR

SEQ ID NO: 113215 - protein, 15 aa, Artificial Sequence
  Description of Artificial Sequence: Synthetic peptide
  Seed: PRMCSLMQGSTLPRR
PRMYSLIQNSTFPRR

SEQ ID NO: 113216 - protein, 15 aa, Artificial Sequence
  Description of Artificial Sequence: Synthetic peptide
  Seed: PRMCSLMQGSTLPRR
PRMYSLIQNSTGPRR

SEQ ID NO: 113217 - protein, 15 aa, Artificial Sequence
  Description of Artificial Sequence: Synthetic peptide
  Seed: PRMCSLMQGSTLPRR
PRMYSLIQNSTHPRR

SEQ ID NO: 113218 - protein, 15 aa, Artificial Sequence
  Description of Artificial Sequence: Synthetic peptide
  Seed: PRMCSLMQGSTLPRR
PRMYSLIQNSTIPRR

SEQ ID NO: 113219 - protein, 15 aa, Artificial Sequence
  Description of Artificial Sequence: Synthetic peptide
  Seed: PRMCSLMQGSTLPRR
PRMYSLIQNSTLPRR

SEQ ID NO: 113220 - protein, 15 aa, Artificial Sequence
  Description of Artificial Sequence: Synthetic peptide
  Seed: PRMCSLMQGSTLPRR
PRMYSLIQNSTMPRR

SEQ ID NO: 113221 - protein, 15 aa, Artificial Sequence
  Description of Artificial Sequence: Synthetic peptide
  Seed: PRMCSLMQGSTLPRR
PRMYSLIQNSTNPRR

SEQ ID NO: 113222 - protein, 15 aa, Artificial Sequence
  Description of Artificial Sequence: Synthetic peptide
  Seed: PRMCSLMQGSTLPRR
PRMYSLIQNSTQPRR

SEQ ID NO: 113223 - protein, 15 aa, Artificial Sequence
  Description of Artificial Sequence: Synthetic peptide
  Seed: PRMCSLMQGSTLPRR
PRMYSLIQNSTSPRR

SEQ ID NO: 113224 - protein, 15 aa, Artificial Sequence
  Description of Artificial Sequence: Synthetic peptide
  Seed: PRMCSLMQGSTLPRR
PRMYSLIQNSTTPRR

SEQ ID NO: 113225 - protein, 15 aa, Artificial Sequence
  Description of Artificial Sequence: Synthetic peptide
  Seed: PRMCSLMQGSTLPRR
PRMYSLIQNSTVPRR

SEQ ID NO: 113226 - protein, 15 aa, Artificial Sequence
  Description of Artificial Sequence: Synthetic peptide
  Seed: PRMCSLMQGSTLPRR
PRMYSLIQPSTAPRR

SEQ ID NO: 113227 - protein, 15 aa, Artificial Sequence
  Description of Artificial Sequence: Synthetic peptide
  Seed: PRMCSLMQGSTLPRR
PRMYSLIQPSTCPRR

SEQ ID NO: 113228 - protein, 15 aa, Artificial Sequence
  Description of Artificial Sequence: Synthetic peptide
  Seed: PRMCSLMQGSTLPRR
PRMYSLIQPSTDPRR

SEQ ID NO: 113229 - protein, 15 aa, Artificial Sequence
  Description of Artificial Sequence: Synthetic peptide
  Seed: PRMCSLMQGSTLPRR
PRMYSLIQPSTEPRR

SEQ ID NO: 113230 - protein, 15 aa, Artificial Sequence
  Description of Artificial Sequence: Synthetic peptide
  Seed: PRMCSLMQGSTLPRR
PRMYSLIQPSTFPRR

SEQ ID NO: 113231 - protein, 15 aa, Artificial Sequence
  Description of Artificial Sequence: Synthetic peptide
  Seed: PRMCSLMQGSTLPRR
PRMYSLIQPSTGPRR

SEQ ID NO: 113232 - protein, 15 aa, Artificial Sequence
  Description of Artificial Sequence: Synthetic peptide
  Seed: PRMCSLMQGSTLPRR
PRMYSLIQPSTHPRR

SEQ ID NO: 113233 - protein, 15 aa, Artificial Sequence
  Description of Artificial Sequence: Synthetic peptide
  Seed: PRMCSLMQGSTLPRR
PRMYSLIQPSTIPRR

SEQ ID NO: 113234 - protein, 15 aa, Artificial Sequence
  Description of Artificial Sequence: Synthetic peptide
  Seed: PRMCSLMQGSTLPRR
PRMYSLIQPSTLPRR

SEQ ID NO: 113235 - protein, 15 aa, Artificial Sequence
  Description of Artificial Sequence: Synthetic peptide
  Seed: PRMCSLMQGSTLPRR
PRMYSLIQPSTMPRR

SEQ ID NO: 113236 - protein, 15 aa, Artificial Sequence
  Description of Artificial Sequence: Synthetic peptide
  Seed: PRMCSLMQGSTLPRR
PRMYSLIQPSTNPRR

SEQ ID NO: 113237 - protein, 15 aa, Artificial Sequence
  Description of Artificial Sequence: Synthetic peptide
  Seed: PRMCSLMQGSTLPRR
PRMYSLIQPSTPPRR

SEQ ID NO: 113238 - protein, 15 aa, Artificial Sequence
  Description of Artificial Sequence: Synthetic peptide
  Seed: PRMCSLMQGSTLPRR
PRMYSLIQPSTQPRR

SEQ ID NO: 113239 - protein, 15 aa, Artificial Sequence
  Description of Artificial Sequence: Synthetic peptide
  Seed: PRMCSLMQGSTLPRR
PRMYSLIQPSTSPRR

SEQ ID NO: 113240 - protein, 15 aa, Artificial Sequence
  Description of Artificial Sequence: Synthetic peptide
  Seed: PRMCSLMQGSTLPRR
PRMYSLIQPSTTPRR

SEQ ID NO: 113241 - protein, 15 aa, Artificial Sequence
  Description of Artificial Sequence: Synthetic peptide
  Seed: PRMCSLMQGSTLPRR
PRMYSLIQPSTVPRR

SEQ ID NO: 113242 - protein, 15 aa, Artificial Sequence
  Description of Artificial Sequence: Synthetic peptide
  Seed: PRMCSLMQGSTLPRR
PRMYSLIQPSTWPRR

SEQ ID NO: 113243 - protein, 15 aa, Artificial Sequence
  Description of Artificial Sequence: Synthetic peptide
  Seed: PRMCSLMQGSTLPRR
PRMYSLIQPSTYPRR

SEQ ID NO: 113244 - protein, 15 aa, Artificial Sequence
  Description of Artificial Sequence: Synthetic peptide
  Seed: PRMCSLMQGSTLPRR
PRMYSLIQQSTAPRR

SEQ ID NO: 113245 - protein, 15 aa, Artificial Sequence
  Description of Artificial Sequence: Synthetic peptide
  Seed: PRMCSLMQGSTLPRR
PRMYSLIQQSTIPRR

SEQ ID NO: 113246 - protein, 15 aa, Artificial Sequence
  Description of Artificial Sequence: Synthetic peptide
  Seed: PRMCSLMQGSTLPRR
PRMYSLIQQSTLPRR

SEQ ID NO: 113247 - protein, 15 aa, Artificial Sequence
  Description of Artificial Sequence: Synthetic peptide
  Seed: PRMCSLMQGSTLPRR
PRMYSLIQQSTVPRR

SEQ ID NO: 113248 - protein, 15 aa, Artificial Sequence
  Description of Artificial Sequence: Synthetic peptide
  Seed: PRMCSLMQGSTLPRR
PRMYSLIQSSTAPRR

SEQ ID NO: 113249 - protein, 15 aa, Artificial Sequence
  Description of Artificial Sequence: Synthetic peptide
  Seed: PRMCSLMQGSTLPRR
PRMYSLIQSSTCPRR

SEQ ID NO: 113250 - protein, 15 aa, Artificial Sequence
  Description of Artificial Sequence: Synthetic peptide
  Seed: PRMCSLMQGSTLPRR
PRMYSLIQSSTDPRR

SEQ ID NO: 113251 - protein, 15 aa, Artificial Sequence
  Description of Artificial Sequence: Synthetic peptide
  Seed: PRMCSLMQGSTLPRR
PRMYSLIQSSTEPRR

SEQ ID NO: 113252 - protein, 15 aa, Artificial Sequence
  Description of Artificial Sequence: Synthetic peptide
  Seed: PRMCSLMQGSTLPRR
PRMYSLIQSSTFPRR

SEQ ID NO: 113253 - protein, 15 aa, Artificial Sequence
  Description of Artificial Sequence: Synthetic peptide
  Seed: PRMCSLMQGSTLPRR
PRMYSLIQSSTGPRR

SEQ ID NO: 113254 - protein, 15 aa, Artificial Sequence
  Description of Artificial Sequence: Synthetic peptide
  Seed: PRMCSLMQGSTLPRR
PRMYSLIQSSTHPRR

SEQ ID NO: 113255 - protein, 15 aa, Artificial Sequence
  Description of Artificial Sequence: Synthetic peptide
  Seed: PRMCSLMQGSTLPRR
PRMYSLIQSSTIPRR

SEQ ID NO: 113256 - protein, 15 aa, Artificial Sequence
  Description of Artificial Sequence: Synthetic peptide
  Seed: PRMCSLMQGSTLPRR
PRMYSLIQSSTLPRR

SEQ ID NO: 113257 - protein, 15 aa, Artificial Sequence
  Description of Artificial Sequence: Synthetic peptide
  Seed: PRMCSLMQGSTLPRR
PRMYSLIQSSTMPRR

SEQ ID NO: 113258 - protein, 15 aa, Artificial Sequence
  Description of Artificial Sequence: Synthetic peptide
  Seed: PRMCSLMQGSTLPRR
PRMYSLIQSSTNPRR

SEQ ID NO: 113259 - protein, 15 aa, Artificial Sequence
  Description of Artificial Sequence: Synthetic peptide
  Seed: PRMCSLMQGSTLPRR
PRMYSLIQSSTPPRR

SEQ ID NO: 113260 - protein, 15 aa, Artificial Sequence
  Description of Artificial Sequence: Synthetic peptide
  Seed: PRMCSLMQGSTLPRR
PRMYSLIQSSTQPRR

SEQ ID NO: 113261 - protein, 15 aa, Artificial Sequence
  Description of Artificial Sequence: Synthetic peptide
  Seed: PRMCSLMQGSTLPRR
PRMYSLIQSSTRPRR

SEQ ID NO: 113262 - protein, 15 aa, Artificial Sequence
  Description of Artificial Sequence: Synthetic peptide
  Seed: PRMCSLMQGSTLPRR
PRMYSLIQSSTSPRR

SEQ ID NO: 113263 - protein, 15 aa, Artificial Sequence
  Description of Artificial Sequence: Synthetic peptide
  Seed: PRMCSLMQGSTLPRR
PRMYSLIQSSTTPRR

SEQ ID NO: 113264 - protein, 15 aa, Artificial Sequence
  Description of Artificial Sequence: Synthetic peptide
  Seed: PRMCSLMQGSTLPRR
PRMYSLIQSSTVPRR

SEQ ID NO: 113265 - protein, 15 aa, Artificial Sequence
  Description of Artificial Sequence: Synthetic peptide
  Seed: PRMCSLMQGSTLPRR
PRMYSLIQSSTWPRR

SEQ ID NO: 113266 - protein, 15 aa, Artificial Sequence
  Description of Artificial Sequence: Synthetic peptide
  Seed: PRMCSLMQGSTLPRR
PRMYSLIQSSTYPRR

SEQ ID NO: 113267 - protein, 15 aa, Artificial Sequence
  Description of Artificial Sequence: Synthetic peptide
  Seed: PRMCSLMQGSTLPRR
PRMYSLIQTSTAPRR

SEQ ID NO: 113268 - protein, 15 aa, Artificial Sequence
  Description of Artificial Sequence: Synthetic peptide
  Seed: PRMCSLMQGSTLPRR
PRMYSLIQTSTCPRR

SEQ ID NO: 113269 - protein, 15 aa, Artificial Sequence
  Description of Artificial Sequence: Synthetic peptide
  Seed: PRMCSLMQGSTLPRR
PRMYSLIQTSTFPRR

SEQ ID NO: 113270 - protein, 15 aa, Artificial Sequence
  Description of Artificial Sequence: Synthetic peptide
  Seed: PRMCSLMQGSTLPRR
PRMYSLIQTSTGPRR

SEQ ID NO: 113271 - protein, 15 aa, Artificial Sequence
  Description of Artificial Sequence: Synthetic peptide
  Seed: PRMCSLMQGSTLPRR
PRMYSLIQTSTHPRR

SEQ ID NO: 113272 - protein, 15 aa, Artificial Sequence
  Description of Artificial Sequence: Synthetic peptide
  Seed: PRMCSLMQGSTLPRR
PRMYSLIQTSTIPRR

SEQ ID NO: 113273 - protein, 15 aa, Artificial Sequence
  Description of Artificial Sequence: Synthetic peptide
  Seed: PRMCSLMQGSTLPRR
PRMYSLIQTSTLPRR

SEQ ID NO: 113274 - protein, 15 aa, Artificial Sequence
  Description of Artificial Sequence: Synthetic peptide
  Seed: PRMCSLMQGSTLPRR
PRMYSLIQTSTMPRR

SEQ ID NO: 113275 - protein, 15 aa, Artificial Sequence
  Description of Artificial Sequence: Synthetic peptide
  Seed: PRMCSLMQGSTLPRR
PRMYSLIQTSTNPRR

SEQ ID NO: 113276 - protein, 15 aa, Artificial Sequence
  Description of Artificial Sequence: Synthetic peptide
  Seed: PRMCSLMQGSTLPRR
PRMYSLIQTSTPPRR

SEQ ID NO: 113277 - protein, 15 aa, Artificial Sequence
  Description of Artificial Sequence: Synthetic peptide
  Seed: PRMCSLMQGSTLPRR
PRMYSLIQTSTQPRR

SEQ ID NO: 113278 - protein, 15 aa, Artificial Sequence
  Description of Artificial Sequence: Synthetic peptide
  Seed: PRMCSLMQGSTLPRR
PRMYSLIQTSTSPRR

SEQ ID NO: 113279 - protein, 15 aa, Artificial Sequence
  Description of Artificial Sequence: Synthetic peptide
  Seed: PRMCSLMQGSTLPRR
PRMYSLIQTSTTPRR

SEQ ID NO: 113280 - protein, 15 aa, Artificial Sequence
  Description of Artificial Sequence: Synthetic peptide
  Seed: PRMCSLMQGSTLPRR
PRMYSLIQTSTVPRR

SEQ ID NO: 113281 - protein, 15 aa, Artificial Sequence
  Description of Artificial Sequence: Synthetic peptide
  Seed: PRMCSLMQGSTLPRR
PRMYSLIQVSTAPRR

SEQ ID NO: 113282 - protein, 15 aa, Artificial Sequence
  Description of Artificial Sequence: Synthetic peptide
  Seed: PRMCSLMQGSTLPRR
PRMYSLIQVSTCPRR

SEQ ID NO: 113283 - protein, 15 aa, Artificial Sequence
  Description of Artificial Sequence: Synthetic peptide
  Seed: PRMCSLMQGSTLPRR
PRMYSLIQVSTDPRR

SEQ ID NO: 113284 - protein, 15 aa, Artificial Sequence
  Description of Artificial Sequence: Synthetic peptide
  Seed: PRMCSLMQGSTLPRR
PRMYSLIQVSTEPRR

SEQ ID NO: 113285 - protein, 15 aa, Artificial Sequence
  Description of Artificial Sequence: Synthetic peptide
  Seed: PRMCSLMQGSTLPRR
PRMYSLIQVSTFPRR

SEQ ID NO: 113286 - protein, 15 aa, Artificial Sequence
  Description of Artificial Sequence: Synthetic peptide
  Seed: PRMCSLMQGSTLPRR
PRMYSLIQVSTGPRR

SEQ ID NO: 113287 - protein, 15 aa, Artificial Sequence
  Description of Artificial Sequence: Synthetic peptide
  Seed: PRMCSLMQGSTLPRR
PRMYSLIQVSTHPRR

SEQ ID NO: 113288 - protein, 15 aa, Artificial Sequence
  Description of Artificial Sequence: Synthetic peptide
  Seed: PRMCSLMQGSTLPRR
PRMYSLIQVSTIPRR

SEQ ID NO: 113289 - protein, 15 aa, Artificial Sequence
  Description of Artificial Sequence: Synthetic peptide
  Seed: PRMCSLMQGSTLPRR
PRMYSLIQVSTLPRR

SEQ ID NO: 113290 - protein, 15 aa, Artificial Sequence
  Description of Artificial Sequence: Synthetic peptide
  Seed: PRMCSLMQGSTLPRR
PRMYSLIQVSTMPRR

SEQ ID NO: 113291 - protein, 15 aa, Artificial Sequence
  Description of Artificial Sequence: Synthetic peptide
  Seed: PRMCSLMQGSTLPRR
PRMYSLIQVSTNPRR

SEQ ID NO: 113292 - protein, 15 aa, Artificial Sequence
  Description of Artificial Sequence: Synthetic peptide
  Seed: PRMCSLMQGSTLPRR
PRMYSLIQVSTPPRR

SEQ ID NO: 113293 - protein, 15 aa, Artificial Sequence
  Description of Artificial Sequence: Synthetic peptide
  Seed: PRMCSLMQGSTLPRR
PRMYSLIQVSTQPRR

SEQ ID NO: 113294 - protein, 15 aa, Artificial Sequence
  Description of Artificial Sequence: Synthetic peptide
  Seed: PRMCSLMQGSTLPRR
PRMYSLIQVSTSPRR

SEQ ID NO: 113295 - protein, 15 aa, Artificial Sequence
  Description of Artificial Sequence: Synthetic peptide
  Seed: PRMCSLMQGSTLPRR
PRMYSLIQVSTTPRR

SEQ ID NO: 113296 - protein, 15 aa, Artificial Sequence
  Description of Artificial Sequence: Synthetic peptide
  Seed: PRMCSLMQGSTLPRR
PRMYSLIQVSTVPRR

SEQ ID NO: 113297 - protein, 15 aa, Artificial Sequence
  Description of Artificial Sequence: Synthetic peptide
  Seed: PRMCSLMQGSTLPRR
PRMYSLKQASTIPRR

SEQ ID NO: 113298 - protein, 15 aa, Artificial Sequence
  Description of Artificial Sequence: Synthetic peptide
  Seed: PRMCSLMQGSTLPRR
PRMYSLKQASTLPRR

SEQ ID NO: 113299 - protein, 15 aa, Artificial Sequence
  Description of Artificial Sequence: Synthetic peptide
  Seed: PRMCSLMQGSTLPRR
PRMYSLKQASTVPRR

SEQ ID NO: 113300 - protein, 15 aa, Artificial Sequence
  Description of Artificial Sequence: Synthetic peptide
  Seed: PRMCSLMQGSTLPRR
PRMYSLKQGSTLPRR

SEQ ID NO: 113301 - protein, 15 aa, Artificial Sequence
  Description of Artificial Sequence: Synthetic peptide
  Seed: PRMCSLMQGSTLPRR
PRMYSLKQSSTLPRR

SEQ ID NO: 113302 - protein, 15 aa, Artificial Sequence
  Description of Artificial Sequence: Synthetic peptide
  Seed: PRMCSLMQGSTLPRR
PRMYSLLQASTAPRR

SEQ ID NO: 113303 - protein, 15 aa, Artificial Sequence
  Description of Artificial Sequence: Synthetic peptide
  Seed: PRMCSLMQGSTLPRR
PRMYSLLQASTCPRR

SEQ ID NO: 113304 - protein, 15 aa, Artificial Sequence
  Description of Artificial Sequence: Synthetic peptide
  Seed: PRMCSLMQGSTLPRR
PRMYSLLQASTDPRR

SEQ ID NO: 113305 - protein, 15 aa, Artificial Sequence
  Description of Artificial Sequence: Synthetic peptide
  Seed: PRMCSLMQGSTLPRR
PRMYSLLQASTEPRR

SEQ ID NO: 113306 - protein, 15 aa, Artificial Sequence
  Description of Artificial Sequence: Synthetic peptide
  Seed: PRMCSLMQGSTLPRR
PRMYSLLQASTFPRR

SEQ ID NO: 113307 - protein, 15 aa, Artificial Sequence
  Description of Artificial Sequence: Synthetic peptide
  Seed: PRMCSLMQGSTLPRR
PRMYSLLQASTGPRR

SEQ ID NO: 113308 - protein, 15 aa, Artificial Sequence
  Description of Artificial Sequence: Synthetic peptide
  Seed: PRMCSLMQGSTLPRR
PRMYSLLQASTHPRR

SEQ ID NO: 113309 - protein, 15 aa, Artificial Sequence
  Description of Artificial Sequence: Synthetic peptide
  Seed: PRMCSLMQGSTLPRR
PRMYSLLQASTIPRR

SEQ ID NO: 113310 - protein, 15 aa, Artificial Sequence
  Description of Artificial Sequence: Synthetic peptide
  Seed: PRMCSLMQGSTLPRR
PRMYSLLQASTKPRR

SEQ ID NO: 113311 - protein, 15 aa, Artificial Sequence
  Description of Artificial Sequence: Synthetic peptide
  Seed: PRMCSLMQGSTLPRR
PRMYSLLQASTLPRR

SEQ ID NO: 113312 - protein, 15 aa, Artificial Sequence
  Description of Artificial Sequence: Synthetic peptide
  Seed: PRMCSLMQGSTLPRR
PRMYSLLQASTMPRR

SEQ ID NO: 113313 - protein, 15 aa, Artificial Sequence
  Description of Artificial Sequence: Synthetic peptide
  Seed: PRMCSLMQGSTLPRR
PRMYSLLQASTNPRR

SEQ ID NO: 113314 - protein, 15 aa, Artificial Sequence
  Description of Artificial Sequence: Synthetic peptide
  Seed: PRMCSLMQGSTLPRR
PRMYSLLQASTPPRR

SEQ ID NO: 113315 - protein, 15 aa, Artificial Sequence
  Description of Artificial Sequence: Synthetic peptide
  Seed: PRMCSLMQGSTLPRR
PRMYSLLQASTQPRR

SEQ ID NO: 113316 - protein, 15 aa, Artificial Sequence
  Description of Artificial Sequence: Synthetic peptide
  Seed: PRMCSLMQGSTLPRR
PRMYSLLQASTRPRR

SEQ ID NO: 113317 - protein, 15 aa, Artificial Sequence
  Description of Artificial Sequence: Synthetic peptide
  Seed: PRMCSLMQGSTLPRR
PRMYSLLQASTSPRR

SEQ ID NO: 113318 - protein, 15 aa, Artificial Sequence
  Description of Artificial Sequence: Synthetic peptide
  Seed: PRMCSLMQGSTLPRR
PRMYSLLQASTTPRR

SEQ ID NO: 113319 - protein, 15 aa, Artificial Sequence
  Description of Artificial Sequence: Synthetic peptide
  Seed: PRMCSLMQGSTLPRR
PRMYSLLQASTVPRR

SEQ ID NO: 113320 - protein, 15 aa, Artificial Sequence
  Description of Artificial Sequence: Synthetic peptide
  Seed: PRMCSLMQGSTLPRR
PRMYSLLQASTWPRR

SEQ ID NO: 113321 - protein, 15 aa, Artificial Sequence
  Description of Artificial Sequence: Synthetic peptide
  Seed: PRMCSLMQGSTLPRR
PRMYSLLQASTYPRR

SEQ ID NO: 113322 - protein, 15 aa, Artificial Sequence
  Description of Artificial Sequence: Synthetic peptide
  Seed: PRMCSLMQGSTLPRR
PRMYSLLQCSTAPRR

SEQ ID NO: 113323 - protein, 15 aa, Artificial Sequence
  Description of Artificial Sequence: Synthetic peptide
  Seed: PRMCSLMQGSTLPRR
PRMYSLLQCSTIPRR

SEQ ID NO: 113324 - protein, 15 aa, Artificial Sequence
  Description of Artificial Sequence: Synthetic peptide
  Seed: PRMCSLMQGSTLPRR
PRMYSLLQCSTLPRR

SEQ ID NO: 113325 - protein, 15 aa, Artificial Sequence
  Description of Artificial Sequence: Synthetic peptide
  Seed: PRMCSLMQGSTLPRR
PRMYSLLQCSTMPRR

SEQ ID NO: 113326 - protein, 15 aa, Artificial Sequence
  Description of Artificial Sequence: Synthetic peptide
  Seed: PRMCSLMQGSTLPRR
PRMYSLLQCSTSPRR

SEQ ID NO: 113327 - protein, 15 aa, Artificial Sequence
  Description of Artificial Sequence: Synthetic peptide
  Seed: PRMCSLMQGSTLPRR
PRMYSLLQCSTTPRR

SEQ ID NO: 113328 - protein, 15 aa, Artificial Sequence
  Description of Artificial Sequence: Synthetic peptide
  Seed: PRMCSLMQGSTLPRR
PRMYSLLQCSTVPRR

SEQ ID NO: 113329 - protein, 15 aa, Artificial Sequence
  Description of Artificial Sequence: Synthetic peptide
  Seed: PRMCSLMQGSTLPRR
PRMYSLLQDSTIPRR

SEQ ID NO: 113330 - protein, 15 aa, Artificial Sequence
  Description of Artificial Sequence: Synthetic peptide
  Seed: PRMCSLMQGSTLPRR
PRMYSLLQDSTLPRR

SEQ ID NO: 113331 - protein, 15 aa, Artificial Sequence
  Description of Artificial Sequence: Synthetic peptide
  Seed: PRMCSLMQGSTLPRR
PRMYSLLQDSTVPRR

SEQ ID NO: 113332 - protein, 15 aa, Artificial Sequence
  Description of Artificial Sequence: Synthetic peptide
  Seed: PRMCSLMQGSTLPRR
PRMYSLLQESTAPRR

SEQ ID NO: 113333 - protein, 15 aa, Artificial Sequence
  Description of Artificial Sequence: Synthetic peptide
  Seed: PRMCSLMQGSTLPRR
PRMYSLLQESTIPRR

SEQ ID NO: 113334 - protein, 15 aa, Artificial Sequence
  Description of Artificial Sequence: Synthetic peptide
  Seed: PRMCSLMQGSTLPRR
PRMYSLLQESTLPRR

SEQ ID NO: 113335 - protein, 15 aa, Artificial Sequence
  Description of Artificial Sequence: Synthetic peptide
  Seed: PRMCSLMQGSTLPRR
PRMYSLLQESTVPRR

SEQ ID NO: 113336 - protein, 15 aa, Artificial Sequence
  Description of Artificial Sequence: Synthetic peptide
  Seed: PRMCSLMQGSTLPRR
PRMYSLLQFSTAPRR

SEQ ID NO: 113337 - protein, 15 aa, Artificial Sequence
  Description of Artificial Sequence: Synthetic peptide
  Seed: PRMCSLMQGSTLPRR
PRMYSLLQFSTLPRR

SEQ ID NO: 113338 - protein, 15 aa, Artificial Sequence
  Description of Artificial Sequence: Synthetic peptide
  Seed: PRMCSLMQGSTLPRR
PRMYSLLQFSTVPRR

SEQ ID NO: 113339 - protein, 15 aa, Artificial Sequence
  Description of Artificial Sequence: Synthetic peptide
  Seed: PRMCSLMQGSTLPRR
PRMYSLLQGSTAPRR

SEQ ID NO: 113340 - protein, 15 aa, Artificial Sequence
  Description of Artificial Sequence: Synthetic peptide
  Seed: PRMCSLMQGSTLPRR
PRMYSLLQGSTCPRR

SEQ ID NO: 113341 - protein, 15 aa, Artificial Sequence
  Description of Artificial Sequence: Synthetic peptide
  Seed: PRMCSLMQGSTLPRR
PRMYSLLQGSTDPRR

SEQ ID NO: 113342 - protein, 15 aa, Artificial Sequence
  Description of Artificial Sequence: Synthetic peptide
  Seed: PRMCSLMQGSTLPRR
PRMYSLLQGSTEPRR

SEQ ID NO: 113343 - protein, 15 aa, Artificial Sequence
  Description of Artificial Sequence: Synthetic peptide
  Seed: PRMCSLMQGSTLPRR
PRMYSLLQGSTFPRR

SEQ ID NO: 113344 - protein, 15 aa, Artificial Sequence
  Description of Artificial Sequence: Synthetic peptide
  Seed: PRMCSLMQGSTLPRR
PRMYSLLQGSTGPRR

SEQ ID NO: 113345 - protein, 15 aa, Artificial Sequence
  Description of Artificial Sequence: Synthetic peptide
  Seed: PRMCSLMQGSTLPRR
PRMYSLLQGSTHPRR

SEQ ID NO: 113346 - protein, 15 aa, Artificial Sequence
  Description of Artificial Sequence: Synthetic peptide
  Seed: PRMCSLMQGSTLPRR
PRMYSLLQGSTIPRR

SEQ ID NO: 113347 - protein, 15 aa, Artificial Sequence
  Description of Artificial Sequence: Synthetic peptide
  Seed: PRMCSLMQGSTLPRR
PRMYSLLQGSTKPRR

SEQ ID NO: 113348 - protein, 15 aa, Artificial Sequence
  Description of Artificial Sequence: Synthetic peptide
  Seed: PRMCSLMQGSTLPRR
PRMYSLLQGSTLPRR

SEQ ID NO: 113349 - protein, 15 aa, Artificial Sequence
  Description of Artificial Sequence: Synthetic peptide
  Seed: PRMCSLMQGSTLPRR
PRMYSLLQGSTMPRR

SEQ ID NO: 113350 - protein, 15 aa, Artificial Sequence
  Description of Artificial Sequence: Synthetic peptide
  Seed: PRMCSLMQGSTLPRR
PRMYSLLQGSTNPRR

SEQ ID NO: 113351 - protein, 15 aa, Artificial Sequence
  Description of Artificial Sequence: Synthetic peptide
  Seed: PRMCSLMQGSTLPRR
PRMYSLLQGSTPPRR

SEQ ID NO: 113352 - protein, 15 aa, Artificial Sequence
  Description of Artificial Sequence: Synthetic peptide
  Seed: PRMCSLMQGSTLPRR
PRMYSLLQGSTQPRR

SEQ ID NO: 113353 - protein, 15 aa, Artificial Sequence
  Description of Artificial Sequence: Synthetic peptide
  Seed: PRMCSLMQGSTLPRR
PRMYSLLQGSTRPRR

SEQ ID NO: 113354 - protein, 15 aa, Artificial Sequence
  Description of Artificial Sequence: Synthetic peptide
  Seed: PRMCSLMQGSTLPRR
PRMYSLLQGSTSPRR

SEQ ID NO: 113355 - protein, 15 aa, Artificial Sequence
  Description of Artificial Sequence: Synthetic peptide
  Seed: PRMCSLMQGSTLPRR
PRMYSLLQGSTTPRR

SEQ ID NO: 113356 - protein, 15 aa, Artificial Sequence
  Description of Artificial Sequence: Synthetic peptide
  Seed: PRMCSLMQGSTLPRR
PRMYSLLQGSTVPRR

SEQ ID NO: 113357 - protein, 15 aa, Artificial Sequence
  Description of Artificial Sequence: Synthetic peptide
  Seed: PRMCSLMQGSTLPRR
PRMYSLLQGSTWPRR

SEQ ID NO: 113358 - protein, 15 aa, Artificial Sequence
  Description of Artificial Sequence: Synthetic peptide
  Seed: PRMCSLMQGSTLPRR
PRMYSLLQGSTYPRR

SEQ ID NO: 113359 - protein, 15 aa, Artificial Sequence
  Description of Artificial Sequence: Synthetic peptide
  Seed: PRMCSLMQGSTLPRR
PRMYSLLQHSTAPRR

SEQ ID NO: 113360 - protein, 15 aa, Artificial Sequence
  Description of Artificial Sequence: Synthetic peptide
  Seed: PRMCSLMQGSTLPRR
PRMYSLLQHSTIPRR

SEQ ID NO: 113361 - protein, 15 aa, Artificial Sequence
  Description of Artificial Sequence: Synthetic peptide
  Seed: PRMCSLMQGSTLPRR
PRMYSLLQHSTLPRR

SEQ ID NO: 113362 - protein, 15 aa, Artificial Sequence
  Description of Artificial Sequence: Synthetic peptide
  Seed: PRMCSLMQGSTLPRR
PRMYSLLQHSTMPRR

SEQ ID NO: 113363 - protein, 15 aa, Artificial Sequence
  Description of Artificial Sequence: Synthetic peptide
  Seed: PRMCSLMQGSTLPRR
PRMYSLLQHSTTPRR

SEQ ID NO: 113364 - protein, 15 aa, Artificial Sequence
  Description of Artificial Sequence: Synthetic peptide
  Seed: PRMCSLMQGSTLPRR
PRMYSLLQHSTVPRR

SEQ ID NO: 113365 - protein, 15 aa, Artificial Sequence
  Description of Artificial Sequence: Synthetic peptide
  Seed: PRMCSLMQGSTLPRR
PRMYSLLQISTAPRR

SEQ ID NO: 113366 - protein, 15 aa, Artificial Sequence
  Description of Artificial Sequence: Synthetic peptide
  Seed: PRMCSLMQGSTLPRR
PRMYSLLQISTCPRR

SEQ ID NO: 113367 - protein, 15 aa, Artificial Sequence
  Description of Artificial Sequence: Synthetic peptide
  Seed: PRMCSLMQGSTLPRR
PRMYSLLQISTDPRR

SEQ ID NO: 113368 - protein, 15 aa, Artificial Sequence
  Description of Artificial Sequence: Synthetic peptide
  Seed: PRMCSLMQGSTLPRR
PRMYSLLQISTEPRR

SEQ ID NO: 113369 - protein, 15 aa, Artificial Sequence
  Description of Artificial Sequence: Synthetic peptide
  Seed: PRMCSLMQGSTLPRR
PRMYSLLQISTFPRR

SEQ ID NO: 113370 - protein, 15 aa, Artificial Sequence
  Description of Artificial Sequence: Synthetic peptide
  Seed: PRMCSLMQGSTLPRR
PRMYSLLQISTGPRR

SEQ ID NO: 113371 - protein, 15 aa, Artificial Sequence
  Description of Artificial Sequence: Synthetic peptide
  Seed: PRMCSLMQGSTLPRR
PRMYSLLQISTHPRR

SEQ ID NO: 113372 - protein, 15 aa, Artificial Sequence
  Description of Artificial Sequence: Synthetic peptide
  Seed: PRMCSLMQGSTLPRR
PRMYSLLQISTIPRR

SEQ ID NO: 113373 - protein, 15 aa, Artificial Sequence
  Description of Artificial Sequence: Synthetic peptide
  Seed: PRMCSLMQGSTLPRR
PRMYSLLQISTLPRR

SEQ ID NO: 113374 - protein, 15 aa, Artificial Sequence
  Description of Artificial Sequence: Synthetic peptide
  Seed: PRMCSLMQGSTLPRR
PRMYSLLQISTMPRR

SEQ ID NO: 113375 - protein, 15 aa, Artificial Sequence
  Description of Artificial Sequence: Synthetic peptide
  Seed: PRMCSLMQGSTLPRR
PRMYSLLQISTNPRR

SEQ ID NO: 113376 - protein, 15 aa, Artificial Sequence
  Description of Artificial Sequence: Synthetic peptide
  Seed: PRMCSLMQGSTLPRR
PRMYSLLQISTPPRR

SEQ ID NO: 113377 - protein, 15 aa, Artificial Sequence
  Description of Artificial Sequence: Synthetic peptide
  Seed: PRMCSLMQGSTLPRR
PRMYSLLQISTQPRR

SEQ ID NO: 113378 - protein, 15 aa, Artificial Sequence
  Description of Artificial Sequence: Synthetic peptide
  Seed: PRMCSLMQGSTLPRR
PRMYSLLQISTSPRR

SEQ ID NO: 113379 - protein, 15 aa, Artificial Sequence
  Description of Artificial Sequence: Synthetic peptide
  Seed: PRMCSLMQGSTLPRR
PRMYSLLQISTTPRR

SEQ ID NO: 113380 - protein, 15 aa, Artificial Sequence
  Description of Artificial Sequence: Synthetic peptide
  Seed: PRMCSLMQGSTLPRR
PRMYSLLQISTVPRR

SEQ ID NO: 113381 - protein, 15 aa, Artificial Sequence
  Description of Artificial Sequence: Synthetic peptide
  Seed: PRMCSLMQGSTLPRR
PRMYSLLQLSTAPRR

SEQ ID NO: 113382 - protein, 15 aa, Artificial Sequence
  Description of Artificial Sequence: Synthetic peptide
  Seed: PRMCSLMQGSTLPRR
PRMYSLLQLSTGPRR

SEQ ID NO: 113383 - protein, 15 aa, Artificial Sequence
  Description of Artificial Sequence: Synthetic peptide
  Seed: PRMCSLMQGSTLPRR
PRMYSLLQLSTHPRR

SEQ ID NO: 113384 - protein, 15 aa, Artificial Sequence
  Description of Artificial Sequence: Synthetic peptide
  Seed: PRMCSLMQGSTLPRR
PRMYSLLQLSTIPRR

SEQ ID NO: 113385 - protein, 15 aa, Artificial Sequence
  Description of Artificial Sequence: Synthetic peptide
  Seed: PRMCSLMQGSTLPRR
PRMYSLLQLSTLPRR

SEQ ID NO: 113386 - protein, 15 aa, Artificial Sequence
  Description of Artificial Sequence: Synthetic peptide
  Seed: PRMCSLMQGSTLPRR
PRMYSLLQLSTMPRR

SEQ ID NO: 113387 - protein, 15 aa, Artificial Sequence
  Description of Artificial Sequence: Synthetic peptide
  Seed: PRMCSLMQGSTLPRR
PRMYSLLQLSTNPRR

SEQ ID NO: 113388 - protein, 15 aa, Artificial Sequence
  Description of Artificial Sequence: Synthetic peptide
  Seed: PRMCSLMQGSTLPRR
PRMYSLLQLSTQPRR

SEQ ID NO: 113389 - protein, 15 aa, Artificial Sequence
  Description of Artificial Sequence: Synthetic peptide
  Seed: PRMCSLMQGSTLPRR
PRMYSLLQLSTSPRR

SEQ ID NO: 113390 - protein, 15 aa, Artificial Sequence
  Description of Artificial Sequence: Synthetic peptide
  Seed: PRMCSLMQGSTLPRR
PRMYSLLQLSTTPRR

SEQ ID NO: 113391 - protein, 15 aa, Artificial Sequence
  Description of Artificial Sequence: Synthetic peptide
  Seed: PRMCSLMQGSTLPRR
PRMYSLLQLSTVPRR

SEQ ID NO: 113392 - protein, 15 aa, Artificial Sequence
  Description of Artificial Sequence: Synthetic peptide
  Seed: PRMCSLMQGSTLPRR
PRMYSLLQMSTAPRR

SEQ ID NO: 113393 - protein, 15 aa, Artificial Sequence
  Description of Artificial Sequence: Synthetic peptide
  Seed: PRMCSLMQGSTLPRR
PRMYSLLQMSTGPRR

SEQ ID NO: 113394 - protein, 15 aa, Artificial Sequence
  Description of Artificial Sequence: Synthetic peptide
  Seed: PRMCSLMQGSTLPRR
PRMYSLLQMSTHPRR

SEQ ID NO: 113395 - protein, 15 aa, Artificial Sequence
  Description of Artificial Sequence: Synthetic peptide
  Seed: PRMCSLMQGSTLPRR
PRMYSLLQMSTIPRR

SEQ ID NO: 113396 - protein, 15 aa, Artificial Sequence
  Description of Artificial Sequence: Synthetic peptide
  Seed: PRMCSLMQGSTLPRR
PRMYSLLQMSTLPRR

SEQ ID NO: 113397 - protein, 15 aa, Artificial Sequence
  Description of Artificial Sequence: Synthetic peptide
  Seed: PRMCSLMQGSTLPRR
PRMYSLLQMSTMPRR

SEQ ID NO: 113398 - protein, 15 aa, Artificial Sequence
  Description of Artificial Sequence: Synthetic peptide
  Seed: PRMCSLMQGSTLPRR
PRMYSLLQMSTNPRR

SEQ ID NO: 113399 - protein, 15 aa, Artificial Sequence
  Description of Artificial Sequence: Synthetic peptide
  Seed: PRMCSLMQGSTLPRR
PRMYSLLQMSTQPRR

SEQ ID NO: 113400 - protein, 15 aa, Artificial Sequence
  Description of Artificial Sequence: Synthetic peptide
  Seed: PRMCSLMQGSTLPRR
PRMYSLLQMSTSPRR

SEQ ID NO: 113401 - protein, 15 aa, Artificial Sequence
  Description of Artificial Sequence: Synthetic peptide
  Seed: PRMCSLMQGSTLPRR
PRMYSLLQMSTTPRR

SEQ ID NO: 113402 - protein, 15 aa, Artificial Sequence
  Description of Artificial Sequence: Synthetic peptide
  Seed: PRMCSLMQGSTLPRR
PRMYSLLQMSTVPRR

SEQ ID NO: 113403 - protein, 15 aa, Artificial Sequence
  Description of Artificial Sequence: Synthetic peptide
  Seed: PRMCSLMQGSTLPRR
PRMYSLLQNSTAPRR

SEQ ID NO: 113404 - protein, 15 aa, Artificial Sequence
  Description of Artificial Sequence: Synthetic peptide
  Seed: PRMCSLMQGSTLPRR
PRMYSLLQNSTCPRR

SEQ ID NO: 113405 - protein, 15 aa, Artificial Sequence
  Description of Artificial Sequence: Synthetic peptide
  Seed: PRMCSLMQGSTLPRR
PRMYSLLQNSTFPRR

SEQ ID NO: 113406 - protein, 15 aa, Artificial Sequence
  Description of Artificial Sequence: Synthetic peptide
  Seed: PRMCSLMQGSTLPRR
PRMYSLLQNSTGPRR

SEQ ID NO: 113407 - protein, 15 aa, Artificial Sequence
  Description of Artificial Sequence: Synthetic peptide
  Seed: PRMCSLMQGSTLPRR
PRMYSLLQNSTHPRR

SEQ ID NO: 113408 - protein, 15 aa, Artificial Sequence
  Description of Artificial Sequence: Synthetic peptide
  Seed: PRMCSLMQGSTLPRR
PRMYSLLQNSTIPRR

SEQ ID NO: 113409 - protein, 15 aa, Artificial Sequence
  Description of Artificial Sequence: Synthetic peptide
  Seed: PRMCSLMQGSTLPRR
PRMYSLLQNSTLPRR

SEQ ID NO: 113410 - protein, 15 aa, Artificial Sequence
  Description of Artificial Sequence: Synthetic peptide
  Seed: PRMCSLMQGSTLPRR
PRMYSLLQNSTMPRR

SEQ ID NO: 113411 - protein, 15 aa, Artificial Sequence
  Description of Artificial Sequence: Synthetic peptide
  Seed: PRMCSLMQGSTLPRR
PRMYSLLQNSTNPRR

SEQ ID NO: 113412 - protein, 15 aa, Artificial Sequence
  Description of Artificial Sequence: Synthetic peptide
  Seed: PRMCSLMQGSTLPRR
PRMYSLLQNSTPPRR

SEQ ID NO: 113413 - protein, 15 aa, Artificial Sequence
  Description of Artificial Sequence: Synthetic peptide
  Seed: PRMCSLMQGSTLPRR
PRMYSLLQNSTQPRR

SEQ ID NO: 113414 - protein, 15 aa, Artificial Sequence
  Description of Artificial Sequence: Synthetic peptide
  Seed: PRMCSLMQGSTLPRR
PRMYSLLQNSTSPRR

SEQ ID NO: 113415 - protein, 15 aa, Artificial Sequence
  Description of Artificial Sequence: Synthetic peptide
  Seed: PRMCSLMQGSTLPRR
PRMYSLLQNSTTPRR

SEQ ID NO: 113416 - protein, 15 aa, Artificial Sequence
  Description of Artificial Sequence: Synthetic peptide
  Seed: PRMCSLMQGSTLPRR
PRMYSLLQNSTVPRR

SEQ ID NO: 113417 - protein, 15 aa, Artificial Sequence
  Description of Artificial Sequence: Synthetic peptide
  Seed: PRMCSLMQGSTLPRR
PRMYSLLQNSTYPRR

SEQ ID NO: 113418 - protein, 15 aa, Artificial Sequence
  Description of Artificial Sequence: Synthetic peptide
  Seed: PRMCSLMQGSTLPRR
PRMYSLLQPSTAPRR

SEQ ID NO: 113419 - protein, 15 aa, Artificial Sequence
  Description of Artificial Sequence: Synthetic peptide
  Seed: PRMCSLMQGSTLPRR
PRMYSLLQPSTCPRR

SEQ ID NO: 113420 - protein, 15 aa, Artificial Sequence
  Description of Artificial Sequence: Synthetic peptide
  Seed: PRMCSLMQGSTLPRR
PRMYSLLQPSTDPRR

SEQ ID NO: 113421 - protein, 15 aa, Artificial Sequence
  Description of Artificial Sequence: Synthetic peptide
  Seed: PRMCSLMQGSTLPRR
PRMYSLLQPSTEPRR

SEQ ID NO: 113422 - protein, 15 aa, Artificial Sequence
  Description of Artificial Sequence: Synthetic peptide
  Seed: PRMCSLMQGSTLPRR
PRMYSLLQPSTFPRR

SEQ ID NO: 113423 - protein, 15 aa, Artificial Sequence
  Description of Artificial Sequence: Synthetic peptide
  Seed: PRMCSLMQGSTLPRR
PRMYSLLQPSTGPRR

SEQ ID NO: 113424 - protein, 15 aa, Artificial Sequence
  Description of Artificial Sequence: Synthetic peptide
  Seed: PRMCSLMQGSTLPRR
PRMYSLLQPSTHPRR

SEQ ID NO: 113425 - protein, 15 aa, Artificial Sequence
  Description of Artificial Sequence: Synthetic peptide
  Seed: PRMCSLMQGSTLPRR
PRMYSLLQPSTIPRR

SEQ ID NO: 113426 - protein, 15 aa, Artificial Sequence
  Description of Artificial Sequence: Synthetic peptide
  Seed: PRMCSLMQGSTLPRR
PRMYSLLQPSTKPRR

SEQ ID NO: 113427 - protein, 15 aa, Artificial Sequence
  Description of Artificial Sequence: Synthetic peptide
  Seed: PRMCSLMQGSTLPRR
PRMYSLLQPSTLPRR

SEQ ID NO: 113428 - protein, 15 aa, Artificial Sequence
  Description of Artificial Sequence: Synthetic peptide
  Seed: PRMCSLMQGSTLPRR
PRMYSLLQPSTMPRR

SEQ ID NO: 113429 - protein, 15 aa, Artificial Sequence
  Description of Artificial Sequence: Synthetic peptide
  Seed: PRMCSLMQGSTLPRR
PRMYSLLQPSTNPRR

SEQ ID NO: 113430 - protein, 15 aa, Artificial Sequence
  Description of Artificial Sequence: Synthetic peptide
  Seed: PRMCSLMQGSTLPRR
PRMYSLLQPSTPPRR

SEQ ID NO: 113431 - protein, 15 aa, Artificial Sequence
  Description of Artificial Sequence: Synthetic peptide
  Seed: PRMCSLMQGSTLPRR
PRMYSLLQPSTQPRR

SEQ ID NO: 113432 - protein, 15 aa, Artificial Sequence
  Description of Artificial Sequence: Synthetic peptide
  Seed: PRMCSLMQGSTLPRR
PRMYSLLQPSTRPRR

SEQ ID NO: 113433 - protein, 15 aa, Artificial Sequence
  Description of Artificial Sequence: Synthetic peptide
  Seed: PRMCSLMQGSTLPRR
PRMYSLLQPSTSPRR

SEQ ID NO: 113434 - protein, 15 aa, Artificial Sequence
  Description of Artificial Sequence: Synthetic peptide
  Seed: PRMCSLMQGSTLPRR
PRMYSLLQPSTTPRR

SEQ ID NO: 113435 - protein, 15 aa, Artificial Sequence
  Description of Artificial Sequence: Synthetic peptide
  Seed: PRMCSLMQGSTLPRR
PRMYSLLQPSTVPRR

SEQ ID NO: 113436 - protein, 15 aa, Artificial Sequence
  Description of Artificial Sequence: Synthetic peptide
  Seed: PRMCSLMQGSTLPRR
PRMYSLLQPSTWPRR

SEQ ID NO: 113437 - protein, 15 aa, Artificial Sequence
  Description of Artificial Sequence: Synthetic peptide
  Seed: PRMCSLMQGSTLPRR
PRMYSLLQPSTYPRR

SEQ ID NO: 113438 - protein, 15 aa, Artificial Sequence
  Description of Artificial Sequence: Synthetic peptide
  Seed: PRMCSLMQGSTLPRR
PRMYSLLQQSTAPRR

SEQ ID NO: 113439 - protein, 15 aa, Artificial Sequence
  Description of Artificial Sequence: Synthetic peptide
  Seed: PRMCSLMQGSTLPRR
PRMYSLLQQSTIPRR

SEQ ID NO: 113440 - protein, 15 aa, Artificial Sequence
  Description of Artificial Sequence: Synthetic peptide
  Seed: PRMCSLMQGSTLPRR
PRMYSLLQQSTLPRR

SEQ ID NO: 113441 - protein, 15 aa, Artificial Sequence
  Description of Artificial Sequence: Synthetic peptide
  Seed: PRMCSLMQGSTLPRR
PRMYSLLQQSTMPRR

SEQ ID NO: 113442 - protein, 15 aa, Artificial Sequence
  Description of Artificial Sequence: Synthetic peptide
  Seed: PRMCSLMQGSTLPRR
PRMYSLLQQSTSPRR

SEQ ID NO: 113443 - protein, 15 aa, Artificial Sequence
  Description of Artificial Sequence: Synthetic peptide
  Seed: PRMCSLMQGSTLPRR
PRMYSLLQQSTTPRR

SEQ ID NO: 113444 - protein, 15 aa, Artificial Sequence
  Description of Artificial Sequence: Synthetic peptide
  Seed: PRMCSLMQGSTLPRR
PRMYSLLQQSTVPRR

SEQ ID NO: 113445 - protein, 15 aa, Artificial Sequence
  Description of Artificial Sequence: Synthetic peptide
  Seed: PRMCSLMQGSTLPRR
PRMYSLLQSSTAPRR

SEQ ID NO: 113446 - protein, 15 aa, Artificial Sequence
  Description of Artificial Sequence: Synthetic peptide
  Seed: PRMCSLMQGSTLPRR
PRMYSLLQSSTCPRR

SEQ ID NO: 113447 - protein, 15 aa, Artificial Sequence
  Description of Artificial Sequence: Synthetic peptide
  Seed: PRMCSLMQGSTLPRR
PRMYSLLQSSTDPRR

SEQ ID NO: 113448 - protein, 15 aa, Artificial Sequence
  Description of Artificial Sequence: Synthetic peptide
  Seed: PRMCSLMQGSTLPRR
PRMYSLLQSSTEPRR

SEQ ID NO: 113449 - protein, 15 aa, Artificial Sequence
  Description of Artificial Sequence: Synthetic peptide
  Seed: PRMCSLMQGSTLPRR
PRMYSLLQSSTFPRR

SEQ ID NO: 113450 - protein, 15 aa, Artificial Sequence
  Description of Artificial Sequence: Synthetic peptide
  Seed: PRMCSLMQGSTLPRR
PRMYSLLQSSTGPRR

SEQ ID NO: 113451 - protein, 15 aa, Artificial Sequence
  Description of Artificial Sequence: Synthetic peptide
  Seed: PRMCSLMQGSTLPRR
PRMYSLLQSSTHPRR

SEQ ID NO: 113452 - protein, 15 aa, Artificial Sequence
  Description of Artificial Sequence: Synthetic peptide
  Seed: PRMCSLMQGSTLPRR
PRMYSLLQSSTIPRR

SEQ ID NO: 113453 - protein, 15 aa, Artificial Sequence
  Description of Artificial Sequence: Synthetic peptide
  Seed: PRMCSLMQGSTLPRR
PRMYSLLQSSTKPRR

SEQ ID NO: 113454 - protein, 15 aa, Artificial Sequence
  Description of Artificial Sequence: Synthetic peptide
  Seed: PRMCSLMQGSTLPRR
PRMYSLLQSSTLPRR

SEQ ID NO: 113455 - protein, 15 aa, Artificial Sequence
  Description of Artificial Sequence: Synthetic peptide
  Seed: PRMCSLMQGSTLPRR
PRMYSLLQSSTMPRR

SEQ ID NO: 113456 - protein, 15 aa, Artificial Sequence
  Description of Artificial Sequence: Synthetic peptide
  Seed: PRMCSLMQGSTLPRR
PRMYSLLQSSTNPRR

SEQ ID NO: 113457 - protein, 15 aa, Artificial Sequence
  Description of Artificial Sequence: Synthetic peptide
  Seed: PRMCSLMQGSTLPRR
PRMYSLLQSSTPPRR

SEQ ID NO: 113458 - protein, 15 aa, Artificial Sequence
  Description of Artificial Sequence: Synthetic peptide
  Seed: PRMCSLMQGSTLPRR
PRMYSLLQSSTQPRR

SEQ ID NO: 113459 - protein, 15 aa, Artificial Sequence
  Description of Artificial Sequence: Synthetic peptide
  Seed: PRMCSLMQGSTLPRR
PRMYSLLQSSTRPRR

SEQ ID NO: 113460 - protein, 15 aa, Artificial Sequence
  Description of Artificial Sequence: Synthetic peptide
  Seed: PRMCSLMQGSTLPRR
PRMYSLLQSSTSPRR

SEQ ID NO: 113461 - protein, 15 aa, Artificial Sequence
  Description of Artificial Sequence: Synthetic peptide
  Seed: PRMCSLMQGSTLPRR
PRMYSLLQSSTTPRR

SEQ ID NO: 113462 - protein, 15 aa, Artificial Sequence
  Description of Artificial Sequence: Synthetic peptide
  Seed: PRMCSLMQGSTLPRR
PRMYSLLQSSTVPRR

SEQ ID NO: 113463 - protein, 15 aa, Artificial Sequence
  Description of Artificial Sequence: Synthetic peptide
  Seed: PRMCSLMQGSTLPRR
PRMYSLLQSSTWPRR

SEQ ID NO: 113464 - protein, 15 aa, Artificial Sequence
  Description of Artificial Sequence: Synthetic peptide
  Seed: PRMCSLMQGSTLPRR
PRMYSLLQSSTYPRR

SEQ ID NO: 113465 - protein, 15 aa, Artificial Sequence
  Description of Artificial Sequence: Synthetic peptide
  Seed: PRMCSLMQGSTLPRR
PRMYSLLQTSTAPRR

SEQ ID NO: 113466 - protein, 15 aa, Artificial Sequence
  Description of Artificial Sequence: Synthetic peptide
  Seed: PRMCSLMQGSTLPRR
PRMYSLLQTSTCPRR

SEQ ID NO: 113467 - protein, 15 aa, Artificial Sequence
  Description of Artificial Sequence: Synthetic peptide
  Seed: PRMCSLMQGSTLPRR
PRMYSLLQTSTDPRR

SEQ ID NO: 113468 - protein, 15 aa, Artificial Sequence
  Description of Artificial Sequence: Synthetic peptide
  Seed: PRMCSLMQGSTLPRR
PRMYSLLQTSTEPRR

SEQ ID NO: 113469 - protein, 15 aa, Artificial Sequence
  Description of Artificial Sequence: Synthetic peptide
  Seed: PRMCSLMQGSTLPRR
PRMYSLLQTSTFPRR

SEQ ID NO: 113470 - protein, 15 aa, Artificial Sequence
  Description of Artificial Sequence: Synthetic peptide
  Seed: PRMCSLMQGSTLPRR
PRMYSLLQTSTGPRR

SEQ ID NO: 113471 - protein, 15 aa, Artificial Sequence
  Description of Artificial Sequence: Synthetic peptide
  Seed: PRMCSLMQGSTLPRR
PRMYSLLQTSTHPRR

SEQ ID NO: 113472 - protein, 15 aa, Artificial Sequence
  Description of Artificial Sequence: Synthetic peptide
  Seed: PRMCSLMQGSTLPRR
PRMYSLLQTSTIPRR

SEQ ID NO: 113473 - protein, 15 aa, Artificial Sequence
  Description of Artificial Sequence: Synthetic peptide
  Seed: PRMCSLMQGSTLPRR
PRMYSLLQTSTLPRR

SEQ ID NO: 113474 - protein, 15 aa, Artificial Sequence
  Description of Artificial Sequence: Synthetic peptide
  Seed: PRMCSLMQGSTLPRR
PRMYSLLQTSTMPRR

SEQ ID NO: 113475 - protein, 15 aa, Artificial Sequence
  Description of Artificial Sequence: Synthetic peptide
  Seed: PRMCSLMQGSTLPRR
PRMYSLLQTSTNPRR

SEQ ID NO: 113476 - protein, 15 aa, Artificial Sequence
  Description of Artificial Sequence: Synthetic peptide
  Seed: PRMCSLMQGSTLPRR
PRMYSLLQTSTPPRR

SEQ ID NO: 113477 - protein, 15 aa, Artificial Sequence
  Description of Artificial Sequence: Synthetic peptide
  Seed: PRMCSLMQGSTLPRR
PRMYSLLQTSTQPRR

SEQ ID NO: 113478 - protein, 15 aa, Artificial Sequence
  Description of Artificial Sequence: Synthetic peptide
  Seed: PRMCSLMQGSTLPRR
PRMYSLLQTSTSPRR

SEQ ID NO: 113479 - protein, 15 aa, Artificial Sequence
  Description of Artificial Sequence: Synthetic peptide
  Seed: PRMCSLMQGSTLPRR
PRMYSLLQTSTTPRR

SEQ ID NO: 113480 - protein, 15 aa, Artificial Sequence
  Description of Artificial Sequence: Synthetic peptide
  Seed: PRMCSLMQGSTLPRR
PRMYSLLQTSTVPRR

SEQ ID NO: 113481 - protein, 15 aa, Artificial Sequence
  Description of Artificial Sequence: Synthetic peptide
  Seed: PRMCSLMQGSTLPRR
PRMYSLLQTSTWPRR

SEQ ID NO: 113482 - protein, 15 aa, Artificial Sequence
  Description of Artificial Sequence: Synthetic peptide
  Seed: PRMCSLMQGSTLPRR
PRMYSLLQTSTYPRR

SEQ ID NO: 113483 - protein, 15 aa, Artificial Sequence
  Description of Artificial Sequence: Synthetic peptide
  Seed: PRMCSLMQGSTLPRR
PRMYSLLQVSTAPRR

SEQ ID NO: 113484 - protein, 15 aa, Artificial Sequence
  Description of Artificial Sequence: Synthetic peptide
  Seed: PRMCSLMQGSTLPRR
PRMYSLLQVSTCPRR

SEQ ID NO: 113485 - protein, 15 aa, Artificial Sequence
  Description of Artificial Sequence: Synthetic peptide
  Seed: PRMCSLMQGSTLPRR
PRMYSLLQVSTDPRR

SEQ ID NO: 113486 - protein, 15 aa, Artificial Sequence
  Description of Artificial Sequence: Synthetic peptide
  Seed: PRMCSLMQGSTLPRR
PRMYSLLQVSTEPRR

SEQ ID NO: 113487 - protein, 15 aa, Artificial Sequence
  Description of Artificial Sequence: Synthetic peptide
  Seed: PRMCSLMQGSTLPRR
PRMYSLLQVSTFPRR

SEQ ID NO: 113488 - protein, 15 aa, Artificial Sequence
  Description of Artificial Sequence: Synthetic peptide
  Seed: PRMCSLMQGSTLPRR
PRMYSLLQVSTGPRR

SEQ ID NO: 113489 - protein, 15 aa, Artificial Sequence
  Description of Artificial Sequence: Synthetic peptide
  Seed: PRMCSLMQGSTLPRR
PRMYSLLQVSTHPRR

SEQ ID NO: 113490 - protein, 15 aa, Artificial Sequence
  Description of Artificial Sequence: Synthetic peptide
  Seed: PRMCSLMQGSTLPRR
PRMYSLLQVSTIPRR

SEQ ID NO: 113491 - protein, 15 aa, Artificial Sequence
  Description of Artificial Sequence: Synthetic peptide
  Seed: PRMCSLMQGSTLPRR
PRMYSLLQVSTKPRR

SEQ ID NO: 113492 - protein, 15 aa, Artificial Sequence
  Description of Artificial Sequence: Synthetic peptide
  Seed: PRMCSLMQGSTLPRR
PRMYSLLQVSTLPRR

SEQ ID NO: 113493 - protein, 15 aa, Artificial Sequence
  Description of Artificial Sequence: Synthetic peptide
  Seed: PRMCSLMQGSTLPRR
PRMYSLLQVSTMPRR

SEQ ID NO: 113494 - protein, 15 aa, Artificial Sequence
  Description of Artificial Sequence: Synthetic peptide
  Seed: PRMCSLMQGSTLPRR
PRMYSLLQVSTNPRR

SEQ ID NO: 113495 - protein, 15 aa, Artificial Sequence
  Description of Artificial Sequence: Synthetic peptide
  Seed: PRMCSLMQGSTLPRR
PRMYSLLQVSTPPRR

SEQ ID NO: 113496 - protein, 15 aa, Artificial Sequence
  Description of Artificial Sequence: Synthetic peptide
  Seed: PRMCSLMQGSTLPRR
PRMYSLLQVSTQPRR

SEQ ID NO: 113497 - protein, 15 aa, Artificial Sequence
  Description of Artificial Sequence: Synthetic peptide
  Seed: PRMCSLMQGSTLPRR
PRMYSLLQVSTSPRR

SEQ ID NO: 113498 - protein, 15 aa, Artificial Sequence
  Description of Artificial Sequence: Synthetic peptide
  Seed: PRMCSLMQGSTLPRR
PRMYSLLQVSTTPRR

SEQ ID NO: 113499 - protein, 15 aa, Artificial Sequence
  Description of Artificial Sequence: Synthetic peptide
  Seed: PRMCSLMQGSTLPRR
PRMYSLLQVSTVPRR

SEQ ID NO: 113500 - protein, 15 aa, Artificial Sequence
  Description of Artificial Sequence: Synthetic peptide
  Seed: PRMCSLMQGSTLPRR
PRMYSLLQVSTWPRR

SEQ ID NO: 113501 - protein, 15 aa, Artificial Sequence
  Description of Artificial Sequence: Synthetic peptide
  Seed: PRMCSLMQGSTLPRR
PRMYSLLQVSTYPRR

SEQ ID NO: 113502 - protein, 15 aa, Artificial Sequence
  Description of Artificial Sequence: Synthetic peptide
  Seed: PRMCSLMQGSTLPRR
PRMYSLLQWSTIPRR

SEQ ID NO: 113503 - protein, 15 aa, Artificial Sequence
  Description of Artificial Sequence: Synthetic peptide
  Seed: PRMCSLMQGSTLPRR
PRMYSLLQWSTLPRR

SEQ ID NO: 113504 - protein, 15 aa, Artificial Sequence
  Description of Artificial Sequence: Synthetic peptide
  Seed: PRMCSLMQGSTLPRR
PRMYSLLQWSTVPRR

SEQ ID NO: 113505 - protein, 15 aa, Artificial Sequence
  Description of Artificial Sequence: Synthetic peptide
  Seed: PRMCSLMQGSTLPRR
PRMYSLMQASTAPRR

SEQ ID NO: 113506 - protein, 15 aa, Artificial Sequence
  Description of Artificial Sequence: Synthetic peptide
  Seed: PRMCSLMQGSTLPRR
PRMYSLMQASTCPRR

SEQ ID NO: 113507 - protein, 15 aa, Artificial Sequence
  Description of Artificial Sequence: Synthetic peptide
  Seed: PRMCSLMQGSTLPRR
PRMYSLMQASTDPRR

SEQ ID NO: 113508 - protein, 15 aa, Artificial Sequence
  Description of Artificial Sequence: Synthetic peptide
  Seed: PRMCSLMQGSTLPRR
PRMYSLMQASTEPRR

SEQ ID NO: 113509 - protein, 15 aa, Artificial Sequence
  Description of Artificial Sequence: Synthetic peptide
  Seed: PRMCSLMQGSTLPRR
PRMYSLMQASTFPRR

SEQ ID NO: 113510 - protein, 15 aa, Artificial Sequence
  Description of Artificial Sequence: Synthetic peptide
  Seed: PRMCSLMQGSTLPRR
PRMYSLMQASTGPRR

SEQ ID NO: 113511 - protein, 15 aa, Artificial Sequence
  Description of Artificial Sequence: Synthetic peptide
  Seed: PRMCSLMQGSTLPRR
PRMYSLMQASTHPRR

SEQ ID NO: 113512 - protein, 15 aa, Artificial Sequence
  Description of Artificial Sequence: Synthetic peptide
  Seed: PRMCSLMQGSTLPRR
PRMYSLMQASTIPRR

SEQ ID NO: 113513 - protein, 15 aa, Artificial Sequence
  Description of Artificial Sequence: Synthetic peptide
  Seed: PRMCSLMQGSTLPRR
PRMYSLMQASTKPRR

SEQ ID NO: 113514 - protein, 15 aa, Artificial Sequence
  Description of Artificial Sequence: Synthetic peptide
  Seed: PRMCSLMQGSTLPRR
PRMYSLMQASTLPRR

SEQ ID NO: 113515 - protein, 15 aa, Artificial Sequence
  Description of Artificial Sequence: Synthetic peptide
  Seed: PRMCSLMQGSTLPRR
PRMYSLMQASTMPRR

SEQ ID NO: 113516 - protein, 15 aa, Artificial Sequence
  Description of Artificial Sequence: Synthetic peptide
  Seed: PRMCSLMQGSTLPRR
PRMYSLMQASTNPRR

SEQ ID NO: 113517 - protein, 15 aa, Artificial Sequence
  Description of Artificial Sequence: Synthetic peptide
  Seed: PRMCSLMQGSTLPRR
PRMYSLMQASTPPRR

SEQ ID NO: 113518 - protein, 15 aa, Artificial Sequence
  Description of Artificial Sequence: Synthetic peptide
  Seed: PRMCSLMQGSTLPRR
PRMYSLMQASTQPRR

SEQ ID NO: 113519 - protein, 15 aa, Artificial Sequence
  Description of Artificial Sequence: Synthetic peptide
  Seed: PRMCSLMQGSTLPRR
PRMYSLMQASTRPRR

SEQ ID NO: 113520 - protein, 15 aa, Artificial Sequence
  Description of Artificial Sequence: Synthetic peptide
  Seed: PRMCSLMQGSTLPRR
PRMYSLMQASTSPRR

SEQ ID NO: 113521 - protein, 15 aa, Artificial Sequence
  Description of Artificial Sequence: Synthetic peptide
  Seed: PRMCSLMQGSTLPRR
PRMYSLMQASTTPRR

SEQ ID NO: 113522 - protein, 15 aa, Artificial Sequence
  Description of Artificial Sequence: Synthetic peptide
  Seed: PRMCSLMQGSTLPRR
PRMYSLMQASTVPRR

SEQ ID NO: 113523 - protein, 15 aa, Artificial Sequence
  Description of Artificial Sequence: Synthetic peptide
  Seed: PRMCSLMQGSTLPRR
PRMYSLMQASTWPRR

SEQ ID NO: 113524 - protein, 15 aa, Artificial Sequence
  Description of Artificial Sequence: Synthetic peptide
  Seed: PRMCSLMQGSTLPRR
PRMYSLMQASTYPRR

SEQ ID NO: 113525 - protein, 15 aa, Artificial Sequence
  Description of Artificial Sequence: Synthetic peptide
  Seed: PRMCSLMQGSTLPRR
PRMYSLMQCSTAPRR

SEQ ID NO: 113526 - protein, 15 aa, Artificial Sequence
  Description of Artificial Sequence: Synthetic peptide
  Seed: PRMCSLMQGSTLPRR
PRMYSLMQCSTIPRR

SEQ ID NO: 113527 - protein, 15 aa, Artificial Sequence
  Description of Artificial Sequence: Synthetic peptide
  Seed: PRMCSLMQGSTLPRR
PRMYSLMQCSTLPRR

SEQ ID NO: 113528 - protein, 15 aa, Artificial Sequence
  Description of Artificial Sequence: Synthetic peptide
  Seed: PRMCSLMQGSTLPRR
PRMYSLMQCSTMPRR

SEQ ID NO: 113529 - protein, 15 aa, Artificial Sequence
  Description of Artificial Sequence: Synthetic peptide
  Seed: PRMCSLMQGSTLPRR
PRMYSLMQCSTSPRR

SEQ ID NO: 113530 - protein, 15 aa, Artificial Sequence
  Description of Artificial Sequence: Synthetic peptide
  Seed: PRMCSLMQGSTLPRR
PRMYSLMQCSTVPRR

SEQ ID NO: 113531 - protein, 15 aa, Artificial Sequence
  Description of Artificial Sequence: Synthetic peptide
  Seed: PRMCSLMQGSTLPRR
PRMYSLMQDSTIPRR

SEQ ID NO: 113532 - protein, 15 aa, Artificial Sequence
  Description of Artificial Sequence: Synthetic peptide
  Seed: PRMCSLMQGSTLPRR
PRMYSLMQDSTLPRR

SEQ ID NO: 113533 - protein, 15 aa, Artificial Sequence
  Description of Artificial Sequence: Synthetic peptide
  Seed: PRMCSLMQGSTLPRR
PRMYSLMQDSTVPRR

SEQ ID NO: 113534 - protein, 15 aa, Artificial Sequence
  Description of Artificial Sequence: Synthetic peptide
  Seed: PRMCSLMQGSTLPRR
PRMYSLMQESTAPRR

SEQ ID NO: 113535 - protein, 15 aa, Artificial Sequence
  Description of Artificial Sequence: Synthetic peptide
  Seed: PRMCSLMQGSTLPRR
PRMYSLMQESTIPRR

SEQ ID NO: 113536 - protein, 15 aa, Artificial Sequence
  Description of Artificial Sequence: Synthetic peptide
  Seed: PRMCSLMQGSTLPRR
PRMYSLMQESTLPRR

SEQ ID NO: 113537 - protein, 15 aa, Artificial Sequence
  Description of Artificial Sequence: Synthetic peptide
  Seed: PRMCSLMQGSTLPRR
PRMYSLMQESTVPRR

SEQ ID NO: 113538 - protein, 15 aa, Artificial Sequence
  Description of Artificial Sequence: Synthetic peptide
  Seed: PRMCSLMQGSTLPRR
PRMYSLMQFSTAPRR

SEQ ID NO: 113539 - protein, 15 aa, Artificial Sequence
  Description of Artificial Sequence: Synthetic peptide
  Seed: PRMCSLMQGSTLPRR
PRMYSLMQFSTIPRR

SEQ ID NO: 113540 - protein, 15 aa, Artificial Sequence
  Description of Artificial Sequence: Synthetic peptide
  Seed: PRMCSLMQGSTLPRR
PRMYSLMQFSTLPRR

SEQ ID NO: 113541 - protein, 15 aa, Artificial Sequence
  Description of Artificial Sequence: Synthetic peptide
  Seed: PRMCSLMQGSTLPRR
PRMYSLMQFSTVPRR

SEQ ID NO: 113542 - protein, 15 aa, Artificial Sequence
  Description of Artificial Sequence: Synthetic peptide
  Seed: PRMCSLMQGSTLPRR
PRMYSLMQGSTAPRR

SEQ ID NO: 113543 - protein, 15 aa, Artificial Sequence
  Description of Artificial Sequence: Synthetic peptide
  Seed: PRMCSLMQGSTLPRR
PRMYSLMQGSTCPRR

SEQ ID NO: 113544 - protein, 15 aa, Artificial Sequence
  Description of Artificial Sequence: Synthetic peptide
  Seed: PRMCSLMQGSTLPRR
PRMYSLMQGSTEPRR

SEQ ID NO: 113545 - protein, 15 aa, Artificial Sequence
  Description of Artificial Sequence: Synthetic peptide
  Seed: PRMCSLMQGSTLPRR
PRMYSLMQGSTFPRR

SEQ ID NO: 113546 - protein, 15 aa, Artificial Sequence
  Description of Artificial Sequence: Synthetic peptide
  Seed: PRMCSLMQGSTLPRR
PRMYSLMQGSTGPRR

SEQ ID NO: 113547 - protein, 15 aa, Artificial Sequence
  Description of Artificial Sequence: Synthetic peptide
  Seed: PRMCSLMQGSTLPRR
PRMYSLMQGSTHPRR

SEQ ID NO: 113548 - protein, 15 aa, Artificial Sequence
  Description of Artificial Sequence: Synthetic peptide
  Seed: PRMCSLMQGSTLPRR
PRMYSLMQGSTIPRR

SEQ ID NO: 113549 - protein, 15 aa, Artificial Sequence
  Description of Artificial Sequence: Synthetic peptide
  Seed: PRMCSLMQGSTLPRR
PRMYSLMQGSTKPRR

SEQ ID NO: 113550 - protein, 15 aa, Artificial Sequence
  Description of Artificial Sequence: Synthetic peptide
  Seed: PRMCSLMQGSTLPRR
PRMYSLMQGSTLPRR

SEQ ID NO: 113551 - protein, 15 aa, Artificial Sequence
  Description of Artificial Sequence: Synthetic peptide
  Seed: PRMCSLMQGSTLPRR
PRMYSLMQGSTMPRR

SEQ ID NO: 113552 - protein, 15 aa, Artificial Sequence
  Description of Artificial Sequence: Synthetic peptide
  Seed: PRMCSLMQGSTLPRR
PRMYSLMQGSTNPRR

SEQ ID NO: 113553 - protein, 15 aa, Artificial Sequence
  Description of Artificial Sequence: Synthetic peptide
  Seed: PRMCSLMQGSTLPRR
PRMYSLMQGSTPPRR

SEQ ID NO: 113554 - protein, 15 aa, Artificial Sequence
  Description of Artificial Sequence: Synthetic peptide
  Seed: PRMCSLMQGSTLPRR
PRMYSLMQGSTQPRR

SEQ ID NO: 113555 - protein, 15 aa, Artificial Sequence
  Description of Artificial Sequence: Synthetic peptide
  Seed: PRMCSLMQGSTLPRR
PRMYSLMQGSTRPRR

SEQ ID NO: 113556 - protein, 15 aa, Artificial Sequence
  Description of Artificial Sequence: Synthetic peptide
  Seed: PRMCSLMQGSTLPRR
PRMYSLMQGSTSPRR

SEQ ID NO: 113557 - protein, 15 aa, Artificial Sequence
  Description of Artificial Sequence: Synthetic peptide
  Seed: PRMCSLMQGSTLPRR
PRMYSLMQGSTTPRR

SEQ ID NO: 113558 - protein, 15 aa, Artificial Sequence
  Description of Artificial Sequence: Synthetic peptide
  Seed: PRMCSLMQGSTLPRR
PRMYSLMQGSTVPRR

SEQ ID NO: 113559 - protein, 15 aa, Artificial Sequence
  Description of Artificial Sequence: Synthetic peptide
  Seed: PRMCSLMQGSTLPRR
PRMYSLMQGSTWPRR

SEQ ID NO: 113560 - protein, 15 aa, Artificial Sequence
  Description of Artificial Sequence: Synthetic peptide
  Seed: PRMCSLMQGSTLPRR
PRMYSLMQGSTYPRR

SEQ ID NO: 113561 - protein, 15 aa, Artificial Sequence
  Description of Artificial Sequence: Synthetic peptide
  Seed: PRMCSLMQGSTLPRR
PRMYSLMQHSTAPRR

SEQ ID NO: 113562 - protein, 15 aa, Artificial Sequence
  Description of Artificial Sequence: Synthetic peptide
  Seed: PRMCSLMQGSTLPRR
PRMYSLMQHSTIPRR

SEQ ID NO: 113563 - protein, 15 aa, Artificial Sequence
  Description of Artificial Sequence: Synthetic peptide
  Seed: PRMCSLMQGSTLPRR
PRMYSLMQHSTLPRR

SEQ ID NO: 113564 - protein, 15 aa, Artificial Sequence
  Description of Artificial Sequence: Synthetic peptide
  Seed: PRMCSLMQGSTLPRR
PRMYSLMQHSTMPRR

SEQ ID NO: 113565 - protein, 15 aa, Artificial Sequence
  Description of Artificial Sequence: Synthetic peptide
  Seed: PRMCSLMQGSTLPRR
PRMYSLMQHSTTPRR

SEQ ID NO: 113566 - protein, 15 aa, Artificial Sequence
  Description of Artificial Sequence: Synthetic peptide
  Seed: PRMCSLMQGSTLPRR
PRMYSLMQHSTVPRR

SEQ ID NO: 113567 - protein, 15 aa, Artificial Sequence
  Description of Artificial Sequence: Synthetic peptide
  Seed: PRMCSLMQGSTLPRR
PRMYSLMQISTAPRR

SEQ ID NO: 113568 - protein, 15 aa, Artificial Sequence
  Description of Artificial Sequence: Synthetic peptide
  Seed: PRMCSLMQGSTLPRR
PRMYSLMQISTCPRR

SEQ ID NO: 113569 - protein, 15 aa, Artificial Sequence
  Description of Artificial Sequence: Synthetic peptide
  Seed: PRMCSLMQGSTLPRR
PRMYSLMQISTDPRR

SEQ ID NO: 113570 - protein, 15 aa, Artificial Sequence
  Description of Artificial Sequence: Synthetic peptide
  Seed: PRMCSLMQGSTLPRR
PRMYSLMQISTEPRR

SEQ ID NO: 113571 - protein, 15 aa, Artificial Sequence
  Description of Artificial Sequence: Synthetic peptide
  Seed: PRMCSLMQGSTLPRR
PRMYSLMQISTFPRR

SEQ ID NO: 113572 - protein, 15 aa, Artificial Sequence
  Description of Artificial Sequence: Synthetic peptide
  Seed: PRMCSLMQGSTLPRR
PRMYSLMQISTGPRR

SEQ ID NO: 113573 - protein, 15 aa, Artificial Sequence
  Description of Artificial Sequence: Synthetic peptide
  Seed: PRMCSLMQGSTLPRR
PRMYSLMQISTHPRR

SEQ ID NO: 113574 - protein, 15 aa, Artificial Sequence
  Description of Artificial Sequence: Synthetic peptide
  Seed: PRMCSLMQGSTLPRR
PRMYSLMQISTIPRR

SEQ ID NO: 113575 - protein, 15 aa, Artificial Sequence
  Description of Artificial Sequence: Synthetic peptide
  Seed: PRMCSLMQGSTLPRR
PRMYSLMQISTKPRR

SEQ ID NO: 113576 - protein, 15 aa, Artificial Sequence
  Description of Artificial Sequence: Synthetic peptide
  Seed: PRMCSLMQGSTLPRR
PRMYSLMQISTLPRR

SEQ ID NO: 113577 - protein, 15 aa, Artificial Sequence
  Description of Artificial Sequence: Synthetic peptide
  Seed: PRMCSLMQGSTLPRR
PRMYSLMQISTMPRR

SEQ ID NO: 113578 - protein, 15 aa, Artificial Sequence
  Description of Artificial Sequence: Synthetic peptide
  Seed: PRMCSLMQGSTLPRR
PRMYSLMQISTNPRR

SEQ ID NO: 113579 - protein, 15 aa, Artificial Sequence
  Description of Artificial Sequence: Synthetic peptide
  Seed: PRMCSLMQGSTLPRR
PRMYSLMQISTPPRR

SEQ ID NO: 113580 - protein, 15 aa, Artificial Sequence
  Description of Artificial Sequence: Synthetic peptide
  Seed: PRMCSLMQGSTLPRR
PRMYSLMQISTQPRR

SEQ ID NO: 113581 - protein, 15 aa, Artificial Sequence
  Description of Artificial Sequence: Synthetic peptide
  Seed: PRMCSLMQGSTLPRR
PRMYSLMQISTSPRR

SEQ ID NO: 113582 - protein, 15 aa, Artificial Sequence
  Description of Artificial Sequence: Synthetic peptide
  Seed: PRMCSLMQGSTLPRR
PRMYSLMQISTTPRR

SEQ ID NO: 113583 - protein, 15 aa, Artificial Sequence
  Description of Artificial Sequence: Synthetic peptide
  Seed: PRMCSLMQGSTLPRR
PRMYSLMQISTVPRR

SEQ ID NO: 113584 - protein, 15 aa, Artificial Sequence
  Description of Artificial Sequence: Synthetic peptide
  Seed: PRMCSLMQGSTLPRR
PRMYSLMQLSTAPRR

SEQ ID NO: 113585 - protein, 15 aa, Artificial Sequence
  Description of Artificial Sequence: Synthetic peptide
  Seed: PRMCSLMQGSTLPRR
PRMYSLMQLSTGPRR

SEQ ID NO: 113586 - protein, 15 aa, Artificial Sequence
  Description of Artificial Sequence: Synthetic peptide
  Seed: PRMCSLMQGSTLPRR
PRMYSLMQLSTHPRR

SEQ ID NO: 113587 - protein, 15 aa, Artificial Sequence
  Description of Artificial Sequence: Synthetic peptide
  Seed: PRMCSLMQGSTLPRR
PRMYSLMQLSTIPRR

SEQ ID NO: 113588 - protein, 15 aa, Artificial Sequence
  Description of Artificial Sequence: Synthetic peptide
  Seed: PRMCSLMQGSTLPRR
PRMYSLMQLSTLPRR

SEQ ID NO: 113589 - protein, 15 aa, Artificial Sequence
  Description of Artificial Sequence: Synthetic peptide
  Seed: PRMCSLMQGSTLPRR
PRMYSLMQLSTMPRR

SEQ ID NO: 113590 - protein, 15 aa, Artificial Sequence
  Description of Artificial Sequence: Synthetic peptide
  Seed: PRMCSLMQGSTLPRR
PRMYSLMQLSTNPRR

SEQ ID NO: 113591 - protein, 15 aa, Artificial Sequence
  Description of Artificial Sequence: Synthetic peptide
  Seed: PRMCSLMQGSTLPRR
PRMYSLMQLSTPPRR

SEQ ID NO: 113592 - protein, 15 aa, Artificial Sequence
  Description of Artificial Sequence: Synthetic peptide
  Seed: PRMCSLMQGSTLPRR
PRMYSLMQLSTQPRR

SEQ ID NO: 113593 - protein, 15 aa, Artificial Sequence
  Description of Artificial Sequence: Synthetic peptide
  Seed: PRMCSLMQGSTLPRR
PRMYSLMQLSTSPRR

SEQ ID NO: 113594 - protein, 15 aa, Artificial Sequence
  Description of Artificial Sequence: Synthetic peptide
  Seed: PRMCSLMQGSTLPRR
PRMYSLMQLSTTPRR

SEQ ID NO: 113595 - protein, 15 aa, Artificial Sequence
  Description of Artificial Sequence: Synthetic peptide
  Seed: PRMCSLMQGSTLPRR
PRMYSLMQLSTVPRR

SEQ ID NO: 113596 - protein, 15 aa, Artificial Sequence
  Description of Artificial Sequence: Synthetic peptide
  Seed: PRMCSLMQGSTLPRR
PRMYSLMQMSTAPRR

SEQ ID NO: 113597 - protein, 15 aa, Artificial Sequence
  Description of Artificial Sequence: Synthetic peptide
  Seed: PRMCSLMQGSTLPRR
PRMYSLMQMSTGPRR

SEQ ID NO: 113598 - protein, 15 aa, Artificial Sequence
  Description of Artificial Sequence: Synthetic peptide
  Seed: PRMCSLMQGSTLPRR
PRMYSLMQMSTHPRR

SEQ ID NO: 113599 - protein, 15 aa, Artificial Sequence
  Description of Artificial Sequence: Synthetic peptide
  Seed: PRMCSLMQGSTLPRR
PRMYSLMQMSTIPRR

SEQ ID NO: 113600 - protein, 15 aa, Artificial Sequence
  Description of Artificial Sequence: Synthetic peptide
  Seed: PRMCSLMQGSTLPRR
PRMYSLMQMSTLPRR

SEQ ID NO: 113601 - protein, 15 aa, Artificial Sequence
  Description of Artificial Sequence: Synthetic peptide
  Seed: PRMCSLMQGSTLPRR
PRMYSLMQMSTMPRR

SEQ ID NO: 113602 - protein, 15 aa, Artificial Sequence
  Description of Artificial Sequence: Synthetic peptide
  Seed: PRMCSLMQGSTLPRR
PRMYSLMQMSTNPRR

SEQ ID NO: 113603 - protein, 15 aa, Artificial Sequence
  Description of Artificial Sequence: Synthetic peptide
  Seed: PRMCSLMQGSTLPRR
PRMYSLMQMSTQPRR

SEQ ID NO: 113604 - protein, 15 aa, Artificial Sequence
  Description of Artificial Sequence: Synthetic peptide
  Seed: PRMCSLMQGSTLPRR
PRMYSLMQMSTSPRR

SEQ ID NO: 113605 - protein, 15 aa, Artificial Sequence
  Description of Artificial Sequence: Synthetic peptide
  Seed: PRMCSLMQGSTLPRR
PRMYSLMQMSTTPRR

SEQ ID NO: 113606 - protein, 15 aa, Artificial Sequence
  Description of Artificial Sequence: Synthetic peptide
  Seed: PRMCSLMQGSTLPRR
PRMYSLMQMSTVPRR

SEQ ID NO: 113607 - protein, 15 aa, Artificial Sequence
  Description of Artificial Sequence: Synthetic peptide
  Seed: PRMCSLMQGSTLPRR
PRMYSLMQNSTAPRR

SEQ ID NO: 113608 - protein, 15 aa, Artificial Sequence
  Description of Artificial Sequence: Synthetic peptide
  Seed: PRMCSLMQGSTLPRR
PRMYSLMQNSTCPRR

SEQ ID NO: 113609 - protein, 15 aa, Artificial Sequence
  Description of Artificial Sequence: Synthetic peptide
  Seed: PRMCSLMQGSTLPRR
PRMYSLMQNSTFPRR

SEQ ID NO: 113610 - protein, 15 aa, Artificial Sequence
  Description of Artificial Sequence: Synthetic peptide
  Seed: PRMCSLMQGSTLPRR
PRMYSLMQNSTGPRR

SEQ ID NO: 113611 - protein, 15 aa, Artificial Sequence
  Description of Artificial Sequence: Synthetic peptide
  Seed: PRMCSLMQGSTLPRR
PRMYSLMQNSTHPRR

SEQ ID NO: 113612 - protein, 15 aa, Artificial Sequence
  Description of Artificial Sequence: Synthetic peptide
  Seed: PRMCSLMQGSTLPRR
PRMYSLMQNSTIPRR

SEQ ID NO: 113613 - protein, 15 aa, Artificial Sequence
  Description of Artificial Sequence: Synthetic peptide
  Seed: PRMCSLMQGSTLPRR
PRMYSLMQNSTLPRR

SEQ ID NO: 113614 - protein, 15 aa, Artificial Sequence
  Description of Artificial Sequence: Synthetic peptide
  Seed: PRMCSLMQGSTLPRR
PRMYSLMQNSTMPRR

SEQ ID NO: 113615 - protein, 15 aa, Artificial Sequence
  Description of Artificial Sequence: Synthetic peptide
  Seed: PRMCSLMQGSTLPRR
PRMYSLMQNSTNPRR

SEQ ID NO: 113616 - protein, 15 aa, Artificial Sequence
  Description of Artificial Sequence: Synthetic peptide
  Seed: PRMCSLMQGSTLPRR
PRMYSLMQNSTPPRR

SEQ ID NO: 113617 - protein, 15 aa, Artificial Sequence
  Description of Artificial Sequence: Synthetic peptide
  Seed: PRMCSLMQGSTLPRR
PRMYSLMQNSTQPRR

SEQ ID NO: 113618 - protein, 15 aa, Artificial Sequence
  Description of Artificial Sequence: Synthetic peptide
  Seed: PRMCSLMQGSTLPRR
PRMYSLMQNSTSPRR

SEQ ID NO: 113619 - protein, 15 aa, Artificial Sequence
  Description of Artificial Sequence: Synthetic peptide
  Seed: PRMCSLMQGSTLPRR
PRMYSLMQNSTTPRR

SEQ ID NO: 113620 - protein, 15 aa, Artificial Sequence
  Description of Artificial Sequence: Synthetic peptide
  Seed: PRMCSLMQGSTLPRR
PRMYSLMQNSTVPRR

SEQ ID NO: 113621 - protein, 15 aa, Artificial Sequence
  Description of Artificial Sequence: Synthetic peptide
  Seed: PRMCSLMQGSTLPRR
PRMYSLMQNSTYPRR

SEQ ID NO: 113622 - protein, 15 aa, Artificial Sequence
  Description of Artificial Sequence: Synthetic peptide
  Seed: PRMCSLMQGSTLPRR
PRMYSLMQPSTAPRR

SEQ ID NO: 113623 - protein, 15 aa, Artificial Sequence
  Description of Artificial Sequence: Synthetic peptide
  Seed: PRMCSLMQGSTLPRR
PRMYSLMQPSTCPRR

SEQ ID NO: 113624 - protein, 15 aa, Artificial Sequence
  Description of Artificial Sequence: Synthetic peptide
  Seed: PRMCSLMQGSTLPRR
PRMYSLMQPSTDPRR

SEQ ID NO: 113625 - protein, 15 aa, Artificial Sequence
  Description of Artificial Sequence: Synthetic peptide
  Seed: PRMCSLMQGSTLPRR
PRMYSLMQPSTEPRR

SEQ ID NO: 113626 - protein, 15 aa, Artificial Sequence
  Description of Artificial Sequence: Synthetic peptide
  Seed: PRMCSLMQGSTLPRR
PRMYSLMQPSTFPRR

SEQ ID NO: 113627 - protein, 15 aa, Artificial Sequence
  Description of Artificial Sequence: Synthetic peptide
  Seed: PRMCSLMQGSTLPRR
PRMYSLMQPSTGPRR

SEQ ID NO: 113628 - protein, 15 aa, Artificial Sequence
  Description of Artificial Sequence: Synthetic peptide
  Seed: PRMCSLMQGSTLPRR
PRMYSLMQPSTHPRR

SEQ ID NO: 113629 - protein, 15 aa, Artificial Sequence
  Description of Artificial Sequence: Synthetic peptide
  Seed: PRMCSLMQGSTLPRR
PRMYSLMQPSTIPRR

SEQ ID NO: 113630 - protein, 15 aa, Artificial Sequence
  Description of Artificial Sequence: Synthetic peptide
  Seed: PRMCSLMQGSTLPRR
PRMYSLMQPSTKPRR

SEQ ID NO: 113631 - protein, 15 aa, Artificial Sequence
  Description of Artificial Sequence: Synthetic peptide
  Seed: PRMCSLMQGSTLPRR
PRMYSLMQPSTLPRR

SEQ ID NO: 113632 - protein, 15 aa, Artificial Sequence
  Description of Artificial Sequence: Synthetic peptide
  Seed: PRMCSLMQGSTLPRR
PRMYSLMQPSTMPRR

SEQ ID NO: 113633 - protein, 15 aa, Artificial Sequence
  Description of Artificial Sequence: Synthetic peptide
  Seed: PRMCSLMQGSTLPRR
PRMYSLMQPSTNPRR

SEQ ID NO: 113634 - protein, 15 aa, Artificial Sequence
  Description of Artificial Sequence: Synthetic peptide
  Seed: PRMCSLMQGSTLPRR
PRMYSLMQPSTPPRR

SEQ ID NO: 113635 - protein, 15 aa, Artificial Sequence
  Description of Artificial Sequence: Synthetic peptide
  Seed: PRMCSLMQGSTLPRR
PRMYSLMQPSTQPRR

SEQ ID NO: 113636 - protein, 15 aa, Artificial Sequence
  Description of Artificial Sequence: Synthetic peptide
  Seed: PRMCSLMQGSTLPRR
PRMYSLMQPSTRPRR

SEQ ID NO: 113637 - protein, 15 aa, Artificial Sequence
  Description of Artificial Sequence: Synthetic peptide
  Seed: PRMCSLMQGSTLPRR
PRMYSLMQPSTSPRR

SEQ ID NO: 113638 - protein, 15 aa, Artificial Sequence
  Description of Artificial Sequence: Synthetic peptide
  Seed: PRMCSLMQGSTLPRR
PRMYSLMQPSTTPRR

SEQ ID NO: 113639 - protein, 15 aa, Artificial Sequence
  Description of Artificial Sequence: Synthetic peptide
  Seed: PRMCSLMQGSTLPRR
PRMYSLMQPSTVPRR

SEQ ID NO: 113640 - protein, 15 aa, Artificial Sequence
  Description of Artificial Sequence: Synthetic peptide
  Seed: PRMCSLMQGSTLPRR
PRMYSLMQPSTWPRR

SEQ ID NO: 113641 - protein, 15 aa, Artificial Sequence
  Description of Artificial Sequence: Synthetic peptide
  Seed: PRMCSLMQGSTLPRR
PRMYSLMQPSTYPRR

SEQ ID NO: 113642 - protein, 15 aa, Artificial Sequence
  Description of Artificial Sequence: Synthetic peptide
  Seed: PRMCSLMQGSTLPRR
PRMYSLMQQSTAPRR

SEQ ID NO: 113643 - protein, 15 aa, Artificial Sequence
  Description of Artificial Sequence: Synthetic peptide
  Seed: PRMCSLMQGSTLPRR
PRMYSLMQQSTIPRR

SEQ ID NO: 113644 - protein, 15 aa, Artificial Sequence
  Description of Artificial Sequence: Synthetic peptide
  Seed: PRMCSLMQGSTLPRR
PRMYSLMQQSTLPRR

SEQ ID NO: 113645 - protein, 15 aa, Artificial Sequence
  Description of Artificial Sequence: Synthetic peptide
  Seed: PRMCSLMQGSTLPRR
PRMYSLMQQSTMPRR

SEQ ID NO: 113646 - protein, 15 aa, Artificial Sequence
  Description of Artificial Sequence: Synthetic peptide
  Seed: PRMCSLMQGSTLPRR
PRMYSLMQQSTSPRR

SEQ ID NO: 113647 - protein, 15 aa, Artificial Sequence
  Description of Artificial Sequence: Synthetic peptide
  Seed: PRMCSLMQGSTLPRR
PRMYSLMQQSTVPRR

SEQ ID NO: 113648 - protein, 15 aa, Artificial Sequence
  Description of Artificial Sequence: Synthetic peptide
  Seed: PRMCSLMQGSTLPRR
PRMYSLMQSSTAPRR

SEQ ID NO: 113649 - protein, 15 aa, Artificial Sequence
  Description of Artificial Sequence: Synthetic peptide
  Seed: PRMCSLMQGSTLPRR
PRMYSLMQSSTCPRR

SEQ ID NO: 113650 - protein, 15 aa, Artificial Sequence
  Description of Artificial Sequence: Synthetic peptide
  Seed: PRMCSLMQGSTLPRR
PRMYSLMQSSTDPRR

SEQ ID NO: 113651 - protein, 15 aa, Artificial Sequence
  Description of Artificial Sequence: Synthetic peptide
  Seed: PRMCSLMQGSTLPRR
PRMYSLMQSSTEPRR

SEQ ID NO: 113652 - protein, 15 aa, Artificial Sequence
  Description of Artificial Sequence: Synthetic peptide
  Seed: PRMCSLMQGSTLPRR
PRMYSLMQSSTFPRR

SEQ ID NO: 113653 - protein, 15 aa, Artificial Sequence
  Description of Artificial Sequence: Synthetic peptide
  Seed: PRMCSLMQGSTLPRR
PRMYSLMQSSTGPRR

SEQ ID NO: 113654 - protein, 15 aa, Artificial Sequence
  Description of Artificial Sequence: Synthetic peptide
  Seed: PRMCSLMQGSTLPRR
PRMYSLMQSSTHPRR

SEQ ID NO: 113655 - protein, 15 aa, Artificial Sequence
  Description of Artificial Sequence: Synthetic peptide
  Seed: PRMCSLMQGSTLPRR
PRMYSLMQSSTIPRR

SEQ ID NO: 113656 - protein, 15 aa, Artificial Sequence
  Description of Artificial Sequence: Synthetic peptide
  Seed: PRMCSLMQGSTLPRR
PRMYSLMQSSTKPRR

SEQ ID NO: 113657 - protein, 15 aa, Artificial Sequence
  Description of Artificial Sequence: Synthetic peptide
  Seed: PRMCSLMQGSTLPRR
PRMYSLMQSSTLPRR

SEQ ID NO: 113658 - protein, 15 aa, Artificial Sequence
  Description of Artificial Sequence: Synthetic peptide
  Seed: PRMCSLMQGSTLPRR
PRMYSLMQSSTMPRR

SEQ ID NO: 113659 - protein, 15 aa, Artificial Sequence
  Description of Artificial Sequence: Synthetic peptide
  Seed: PRMCSLMQGSTLPRR
PRMYSLMQSSTNPRR

SEQ ID NO: 113660 - protein, 15 aa, Artificial Sequence
  Description of Artificial Sequence: Synthetic peptide
  Seed: PRMCSLMQGSTLPRR
PRMYSLMQSSTPPRR

SEQ ID NO: 113661 - protein, 15 aa, Artificial Sequence
  Description of Artificial Sequence: Synthetic peptide
  Seed: PRMCSLMQGSTLPRR
PRMYSLMQSSTQPRR

SEQ ID NO: 113662 - protein, 15 aa, Artificial Sequence
  Description of Artificial Sequence: Synthetic peptide
  Seed: PRMCSLMQGSTLPRR
PRMYSLMQSSTRPRR

SEQ ID NO: 113663 - protein, 15 aa, Artificial Sequence
  Description of Artificial Sequence: Synthetic peptide
  Seed: PRMCSLMQGSTLPRR
PRMYSLMQSSTSPRR

SEQ ID NO: 113664 - protein, 15 aa, Artificial Sequence
  Description of Artificial Sequence: Synthetic peptide
  Seed: PRMCSLMQGSTLPRR
PRMYSLMQSSTTPRR

SEQ ID NO: 113665 - protein, 15 aa, Artificial Sequence
  Description of Artificial Sequence: Synthetic peptide
  Seed: PRMCSLMQGSTLPRR
PRMYSLMQSSTVPRR

SEQ ID NO: 113666 - protein, 15 aa, Artificial Sequence
  Description of Artificial Sequence: Synthetic peptide
  Seed: PRMCSLMQGSTLPRR
PRMYSLMQSSTWPRR

SEQ ID NO: 113667 - protein, 15 aa, Artificial Sequence
  Description of Artificial Sequence: Synthetic peptide
  Seed: PRMCSLMQGSTLPRR
PRMYSLMQSSTYPRR

SEQ ID NO: 113668 - protein, 15 aa, Artificial Sequence
  Description of Artificial Sequence: Synthetic peptide
  Seed: PRMCSLMQGSTLPRR
PRMYSLMQTSTAPRR

SEQ ID NO: 113669 - protein, 15 aa, Artificial Sequence
  Description of Artificial Sequence: Synthetic peptide
  Seed: PRMCSLMQGSTLPRR
PRMYSLMQTSTCPRR

SEQ ID NO: 113670 - protein, 15 aa, Artificial Sequence
  Description of Artificial Sequence: Synthetic peptide
  Seed: PRMCSLMQGSTLPRR
PRMYSLMQTSTDPRR

SEQ ID NO: 113671 - protein, 15 aa, Artificial Sequence
  Description of Artificial Sequence: Synthetic peptide
  Seed: PRMCSLMQGSTLPRR
PRMYSLMQTSTEPRR

SEQ ID NO: 113672 - protein, 15 aa, Artificial Sequence
  Description of Artificial Sequence: Synthetic peptide
  Seed: PRMCSLMQGSTLPRR
PRMYSLMQTSTFPRR

SEQ ID NO: 113673 - protein, 15 aa, Artificial Sequence
  Description of Artificial Sequence: Synthetic peptide
  Seed: PRMCSLMQGSTLPRR
PRMYSLMQTSTGPRR

SEQ ID NO: 113674 - protein, 15 aa, Artificial Sequence
  Description of Artificial Sequence: Synthetic peptide
  Seed: PRMCSLMQGSTLPRR
PRMYSLMQTSTHPRR

SEQ ID NO: 113675 - protein, 15 aa, Artificial Sequence
  Description of Artificial Sequence: Synthetic peptide
  Seed: PRMCSLMQGSTLPRR
PRMYSLMQTSTIPRR

SEQ ID NO: 113676 - protein, 15 aa, Artificial Sequence
  Description of Artificial Sequence: Synthetic peptide
  Seed: PRMCSLMQGSTLPRR
PRMYSLMQTSTLPRR

SEQ ID NO: 113677 - protein, 15 aa, Artificial Sequence
  Description of Artificial Sequence: Synthetic peptide
  Seed: PRMCSLMQGSTLPRR
PRMYSLMQTSTMPRR

SEQ ID NO: 113678 - protein, 15 aa, Artificial Sequence
  Description of Artificial Sequence: Synthetic peptide
  Seed: PRMCSLMQGSTLPRR
PRMYSLMQTSTNPRR

SEQ ID NO: 113679 - protein, 15 aa, Artificial Sequence
  Description of Artificial Sequence: Synthetic peptide
  Seed: PRMCSLMQGSTLPRR
PRMYSLMQTSTPPRR

SEQ ID NO: 113680 - protein, 15 aa, Artificial Sequence
  Description of Artificial Sequence: Synthetic peptide
  Seed: PRMCSLMQGSTLPRR
PRMYSLMQTSTQPRR

SEQ ID NO: 113681 - protein, 15 aa, Artificial Sequence
  Description of Artificial Sequence: Synthetic peptide
  Seed: PRMCSLMQGSTLPRR
PRMYSLMQTSTSPRR

SEQ ID NO: 113682 - protein, 15 aa, Artificial Sequence
  Description of Artificial Sequence: Synthetic peptide
  Seed: PRMCSLMQGSTLPRR
PRMYSLMQTSTTPRR

SEQ ID NO: 113683 - protein, 15 aa, Artificial Sequence
  Description of Artificial Sequence: Synthetic peptide
  Seed: PRMCSLMQGSTLPRR
PRMYSLMQTSTVPRR

SEQ ID NO: 113684 - protein, 15 aa, Artificial Sequence
  Description of Artificial Sequence: Synthetic peptide
  Seed: PRMCSLMQGSTLPRR
PRMYSLMQTSTWPRR

SEQ ID NO: 113685 - protein, 15 aa, Artificial Sequence
  Description of Artificial Sequence: Synthetic peptide
  Seed: PRMCSLMQGSTLPRR
PRMYSLMQTSTYPRR

SEQ ID NO: 113686 - protein, 15 aa, Artificial Sequence
  Description of Artificial Sequence: Synthetic peptide
  Seed: PRMCSLMQGSTLPRR
PRMYSLMQVSTAPRR

SEQ ID NO: 113687 - protein, 15 aa, Artificial Sequence
  Description of Artificial Sequence: Synthetic peptide
  Seed: PRMCSLMQGSTLPRR
PRMYSLMQVSTCPRR

SEQ ID NO: 113688 - protein, 15 aa, Artificial Sequence
  Description of Artificial Sequence: Synthetic peptide
  Seed: PRMCSLMQGSTLPRR
PRMYSLMQVSTDPRR

SEQ ID NO: 113689 - protein, 15 aa, Artificial Sequence
  Description of Artificial Sequence: Synthetic peptide
  Seed: PRMCSLMQGSTLPRR
PRMYSLMQVSTEPRR

SEQ ID NO: 113690 - protein, 15 aa, Artificial Sequence
  Description of Artificial Sequence: Synthetic peptide
  Seed: PRMCSLMQGSTLPRR
PRMYSLMQVSTFPRR

SEQ ID NO: 113691 - protein, 15 aa, Artificial Sequence
  Description of Artificial Sequence: Synthetic peptide
  Seed: PRMCSLMQGSTLPRR
PRMYSLMQVSTGPRR

SEQ ID NO: 113692 - protein, 15 aa, Artificial Sequence
  Description of Artificial Sequence: Synthetic peptide
  Seed: PRMCSLMQGSTLPRR
PRMYSLMQVSTHPRR

SEQ ID NO: 113693 - protein, 15 aa, Artificial Sequence
  Description of Artificial Sequence: Synthetic peptide
  Seed: PRMCSLMQGSTLPRR
PRMYSLMQVSTIPRR

SEQ ID NO: 113694 - protein, 15 aa, Artificial Sequence
  Description of Artificial Sequence: Synthetic peptide
  Seed: PRMCSLMQGSTLPRR
PRMYSLMQVSTKPRR

SEQ ID NO: 113695 - protein, 15 aa, Artificial Sequence
  Description of Artificial Sequence: Synthetic peptide
  Seed: PRMCSLMQGSTLPRR
PRMYSLMQVSTLPRR

SEQ ID NO: 113696 - protein, 15 aa, Artificial Sequence
  Description of Artificial Sequence: Synthetic peptide
  Seed: PRMCSLMQGSTLPRR
PRMYSLMQVSTMPRR

SEQ ID NO: 113697 - protein, 15 aa, Artificial Sequence
  Description of Artificial Sequence: Synthetic peptide
  Seed: PRMCSLMQGSTLPRR
PRMYSLMQVSTNPRR

SEQ ID NO: 113698 - protein, 15 aa, Artificial Sequence
  Description of Artificial Sequence: Synthetic peptide
  Seed: PRMCSLMQGSTLPRR
PRMYSLMQVSTPPRR

SEQ ID NO: 113699 - protein, 15 aa, Artificial Sequence
  Description of Artificial Sequence: Synthetic peptide
  Seed: PRMCSLMQGSTLPRR
PRMYSLMQVSTQPRR

SEQ ID NO: 113700 - protein, 15 aa, Artificial Sequence
  Description of Artificial Sequence: Synthetic peptide
  Seed: PRMCSLMQGSTLPRR
PRMYSLMQVSTRPRR

SEQ ID NO: 113701 - protein, 15 aa, Artificial Sequence
  Description of Artificial Sequence: Synthetic peptide
  Seed: PRMCSLMQGSTLPRR
PRMYSLMQVSTSPRR

SEQ ID NO: 113702 - protein, 15 aa, Artificial Sequence
  Description of Artificial Sequence: Synthetic peptide
  Seed: PRMCSLMQGSTLPRR
PRMYSLMQVSTTPRR

SEQ ID NO: 113703 - protein, 15 aa, Artificial Sequence
  Description of Artificial Sequence: Synthetic peptide
  Seed: PRMCSLMQGSTLPRR
PRMYSLMQVSTVPRR

SEQ ID NO: 113704 - protein, 15 aa, Artificial Sequence
  Description of Artificial Sequence: Synthetic peptide
  Seed: PRMCSLMQGSTLPRR
PRMYSLMQVSTWPRR

SEQ ID NO: 113705 - protein, 15 aa, Artificial Sequence
  Description of Artificial Sequence: Synthetic peptide
  Seed: PRMCSLMQGSTLPRR
PRMYSLMQVSTYPRR

SEQ ID NO: 113706 - protein, 15 aa, Artificial Sequence
  Description of Artificial Sequence: Synthetic peptide
  Seed: PRMCSLMQGSTLPRR
PRMYSLMQWSTIPRR

SEQ ID NO: 113707 - protein, 15 aa, Artificial Sequence
  Description of Artificial Sequence: Synthetic peptide
  Seed: PRMCSLMQGSTLPRR
PRMYSLMQWSTLPRR

SEQ ID NO: 113708 - protein, 15 aa, Artificial Sequence
  Description of Artificial Sequence: Synthetic peptide
  Seed: PRMCSLMQGSTLPRR
PRMYSLMQWSTVPRR

SEQ ID NO: 113709 - protein, 15 aa, Artificial Sequence
  Description of Artificial Sequence: Synthetic peptide
  Seed: PRMCSLMQGSTLPRR
PRMYSLNQASTAPRR

SEQ ID NO: 113710 - protein, 15 aa, Artificial Sequence
  Description of Artificial Sequence: Synthetic peptide
  Seed: PRMCSLMQGSTLPRR
PRMYSLNQASTIPRR

SEQ ID NO: 113711 - protein, 15 aa, Artificial Sequence
  Description of Artificial Sequence: Synthetic peptide
  Seed: PRMCSLMQGSTLPRR
PRMYSLNQASTLPRR

SEQ ID NO: 113712 - protein, 15 aa, Artificial Sequence
  Description of Artificial Sequence: Synthetic peptide
  Seed: PRMCSLMQGSTLPRR
PRMYSLNQASTMPRR

SEQ ID NO: 113713 - protein, 15 aa, Artificial Sequence
  Description of Artificial Sequence: Synthetic peptide
  Seed: PRMCSLMQGSTLPRR
PRMYSLNQASTSPRR

SEQ ID NO: 113714 - protein, 15 aa, Artificial Sequence
  Description of Artificial Sequence: Synthetic peptide
  Seed: PRMCSLMQGSTLPRR
PRMYSLNQASTTPRR

SEQ ID NO: 113715 - protein, 15 aa, Artificial Sequence
  Description of Artificial Sequence: Synthetic peptide
  Seed: PRMCSLMQGSTLPRR
PRMYSLNQASTVPRR

SEQ ID NO: 113716 - protein, 15 aa, Artificial Sequence
  Description of Artificial Sequence: Synthetic peptide
  Seed: PRMCSLMQGSTLPRR
PRMYSLNQGSTAPRR

SEQ ID NO: 113717 - protein, 15 aa, Artificial Sequence
  Description of Artificial Sequence: Synthetic peptide
  Seed: PRMCSLMQGSTLPRR
PRMYSLNQGSTIPRR

SEQ ID NO: 113718 - protein, 15 aa, Artificial Sequence
  Description of Artificial Sequence: Synthetic peptide
  Seed: PRMCSLMQGSTLPRR
PRMYSLNQGSTLPRR

SEQ ID NO: 113719 - protein, 15 aa, Artificial Sequence
  Description of Artificial Sequence: Synthetic peptide
  Seed: PRMCSLMQGSTLPRR
PRMYSLNQGSTMPRR

SEQ ID NO: 113720 - protein, 15 aa, Artificial Sequence
  Description of Artificial Sequence: Synthetic peptide
  Seed: PRMCSLMQGSTLPRR
PRMYSLNQGSTVPRR

SEQ ID NO: 113721 - protein, 15 aa, Artificial Sequence
  Description of Artificial Sequence: Synthetic peptide
  Seed: PRMCSLMQGSTLPRR
PRMYSLNQPSTIPRR

SEQ ID NO: 113722 - protein, 15 aa, Artificial Sequence
  Description of Artificial Sequence: Synthetic peptide
  Seed: PRMCSLMQGSTLPRR
PRMYSLNQPSTLPRR

SEQ ID NO: 113723 - protein, 15 aa, Artificial Sequence
  Description of Artificial Sequence: Synthetic peptide
  Seed: PRMCSLMQGSTLPRR
PRMYSLNQPSTVPRR

SEQ ID NO: 113724 - protein, 15 aa, Artificial Sequence
  Description of Artificial Sequence: Synthetic peptide
  Seed: PRMCSLMQGSTLPRR
PRMYSLNQSSTAPRR

SEQ ID NO: 113725 - protein, 15 aa, Artificial Sequence
  Description of Artificial Sequence: Synthetic peptide
  Seed: PRMCSLMQGSTLPRR
PRMYSLNQSSTIPRR

SEQ ID NO: 113726 - protein, 15 aa, Artificial Sequence
  Description of Artificial Sequence: Synthetic peptide
  Seed: PRMCSLMQGSTLPRR
PRMYSLNQSSTLPRR

SEQ ID NO: 113727 - protein, 15 aa, Artificial Sequence
  Description of Artificial Sequence: Synthetic peptide
  Seed: PRMCSLMQGSTLPRR
PRMYSLNQSSTVPRR

SEQ ID NO: 113728 - protein, 15 aa, Artificial Sequence
  Description of Artificial Sequence: Synthetic peptide
  Seed: PRMCSLMQGSTLPRR
PRMYSLQQASTAPRR

SEQ ID NO: 113729 - protein, 15 aa, Artificial Sequence
  Description of Artificial Sequence: Synthetic peptide
  Seed: PRMCSLMQGSTLPRR
PRMYSLQQASTCPRR

SEQ ID NO: 113730 - protein, 15 aa, Artificial Sequence
  Description of Artificial Sequence: Synthetic peptide
  Seed: PRMCSLMQGSTLPRR
PRMYSLQQASTFPRR

SEQ ID NO: 113731 - protein, 15 aa, Artificial Sequence
  Description of Artificial Sequence: Synthetic peptide
  Seed: PRMCSLMQGSTLPRR
PRMYSLQQASTGPRR

SEQ ID NO: 113732 - protein, 15 aa, Artificial Sequence
  Description of Artificial Sequence: Synthetic peptide
  Seed: PRMCSLMQGSTLPRR
PRMYSLQQASTIPRR

SEQ ID NO: 113733 - protein, 15 aa, Artificial Sequence
  Description of Artificial Sequence: Synthetic peptide
  Seed: PRMCSLMQGSTLPRR
PRMYSLQQASTLPRR

SEQ ID NO: 113734 - protein, 15 aa, Artificial Sequence
  Description of Artificial Sequence: Synthetic peptide
  Seed: PRMCSLMQGSTLPRR
PRMYSLQQASTMPRR

SEQ ID NO: 113735 - protein, 15 aa, Artificial Sequence
  Description of Artificial Sequence: Synthetic peptide
  Seed: PRMCSLMQGSTLPRR
PRMYSLQQASTNPRR

SEQ ID NO: 113736 - protein, 15 aa, Artificial Sequence
  Description of Artificial Sequence: Synthetic peptide
  Seed: PRMCSLMQGSTLPRR
PRMYSLQQASTSPRR

SEQ ID NO: 113737 - protein, 15 aa, Artificial Sequence
  Description of Artificial Sequence: Synthetic peptide
  Seed: PRMCSLMQGSTLPRR
PRMYSLQQASTTPRR

SEQ ID NO: 113738 - protein, 15 aa, Artificial Sequence
  Description of Artificial Sequence: Synthetic peptide
  Seed: PRMCSLMQGSTLPRR
PRMYSLQQASTVPRR

SEQ ID NO: 113739 - protein, 15 aa, Artificial Sequence
  Description of Artificial Sequence: Synthetic peptide
  Seed: PRMCSLMQGSTLPRR
PRMYSLQQASTWPRR

SEQ ID NO: 113740 - protein, 15 aa, Artificial Sequence
  Description of Artificial Sequence: Synthetic peptide
  Seed: PRMCSLMQGSTLPRR
PRMYSLQQGSTAPRR

SEQ ID NO: 113741 - protein, 15 aa, Artificial Sequence
  Description of Artificial Sequence: Synthetic peptide
  Seed: PRMCSLMQGSTLPRR
PRMYSLQQGSTCPRR

SEQ ID NO: 113742 - protein, 15 aa, Artificial Sequence
  Description of Artificial Sequence: Synthetic peptide
  Seed: PRMCSLMQGSTLPRR
PRMYSLQQGSTFPRR

SEQ ID NO: 113743 - protein, 15 aa, Artificial Sequence
  Description of Artificial Sequence: Synthetic peptide
  Seed: PRMCSLMQGSTLPRR
PRMYSLQQGSTGPRR

SEQ ID NO: 113744 - protein, 15 aa, Artificial Sequence
  Description of Artificial Sequence: Synthetic peptide
  Seed: PRMCSLMQGSTLPRR
PRMYSLQQGSTIPRR

SEQ ID NO: 113745 - protein, 15 aa, Artificial Sequence
  Description of Artificial Sequence: Synthetic peptide
  Seed: PRMCSLMQGSTLPRR
PRMYSLQQGSTLPRR

SEQ ID NO: 113746 - protein, 15 aa, Artificial Sequence
  Description of Artificial Sequence: Synthetic peptide
  Seed: PRMCSLMQGSTLPRR
PRMYSLQQGSTMPRR

SEQ ID NO: 113747 - protein, 15 aa, Artificial Sequence
  Description of Artificial Sequence: Synthetic peptide
  Seed: PRMCSLMQGSTLPRR
PRMYSLQQGSTSPRR

SEQ ID NO: 113748 - protein, 15 aa, Artificial Sequence
  Description of Artificial Sequence: Synthetic peptide
  Seed: PRMCSLMQGSTLPRR
PRMYSLQQGSTTPRR

SEQ ID NO: 113749 - protein, 15 aa, Artificial Sequence
  Description of Artificial Sequence: Synthetic peptide
  Seed: PRMCSLMQGSTLPRR
PRMYSLQQGSTVPRR

SEQ ID NO: 113750 - protein, 15 aa, Artificial Sequence
  Description of Artificial Sequence: Synthetic peptide
  Seed: PRMCSLMQGSTLPRR
PRMYSLQQISTAPRR

SEQ ID NO: 113751 - protein, 15 aa, Artificial Sequence
  Description of Artificial Sequence: Synthetic peptide
  Seed: PRMCSLMQGSTLPRR
PRMYSLQQISTIPRR

SEQ ID NO: 113752 - protein, 15 aa, Artificial Sequence
  Description of Artificial Sequence: Synthetic peptide
  Seed: PRMCSLMQGSTLPRR
PRMYSLQQISTLPRR

SEQ ID NO: 113753 - protein, 15 aa, Artificial Sequence
  Description of Artificial Sequence: Synthetic peptide
  Seed: PRMCSLMQGSTLPRR
PRMYSLQQISTNPRR

SEQ ID NO: 113754 - protein, 15 aa, Artificial Sequence
  Description of Artificial Sequence: Synthetic peptide
  Seed: PRMCSLMQGSTLPRR
PRMYSLQQISTSPRR

SEQ ID NO: 113755 - protein, 15 aa, Artificial Sequence
  Description of Artificial Sequence: Synthetic peptide
  Seed: PRMCSLMQGSTLPRR
PRMYSLQQISTTPRR

SEQ ID NO: 113756 - protein, 15 aa, Artificial Sequence
  Description of Artificial Sequence: Synthetic peptide
  Seed: PRMCSLMQGSTLPRR
PRMYSLQQISTVPRR

SEQ ID NO: 113757 - protein, 15 aa, Artificial Sequence
  Description of Artificial Sequence: Synthetic peptide
  Seed: PRMCSLMQGSTLPRR
PRMYSLQQNSTAPRR

SEQ ID NO: 113758 - protein, 15 aa, Artificial Sequence
  Description of Artificial Sequence: Synthetic peptide
  Seed: PRMCSLMQGSTLPRR
PRMYSLQQNSTIPRR

SEQ ID NO: 113759 - protein, 15 aa, Artificial Sequence
  Description of Artificial Sequence: Synthetic peptide
  Seed: PRMCSLMQGSTLPRR
PRMYSLQQNSTLPRR

SEQ ID NO: 113760 - protein, 15 aa, Artificial Sequence
  Description of Artificial Sequence: Synthetic peptide
  Seed: PRMCSLMQGSTLPRR
PRMYSLQQNSTMPRR

SEQ ID NO: 113761 - protein, 15 aa, Artificial Sequence
  Description of Artificial Sequence: Synthetic peptide
  Seed: PRMCSLMQGSTLPRR
PRMYSLQQNSTSPRR

SEQ ID NO: 113762 - protein, 15 aa, Artificial Sequence
  Description of Artificial Sequence: Synthetic peptide
  Seed: PRMCSLMQGSTLPRR
PRMYSLQQNSTTPRR

SEQ ID NO: 113763 - protein, 15 aa, Artificial Sequence
  Description of Artificial Sequence: Synthetic peptide
  Seed: PRMCSLMQGSTLPRR
PRMYSLQQNSTVPRR

SEQ ID NO: 113764 - protein, 15 aa, Artificial Sequence
  Description of Artificial Sequence: Synthetic peptide
  Seed: PRMCSLMQGSTLPRR
PRMYSLQQPSTAPRR

SEQ ID NO: 113765 - protein, 15 aa, Artificial Sequence
  Description of Artificial Sequence: Synthetic peptide
  Seed: PRMCSLMQGSTLPRR
PRMYSLQQPSTIPRR

SEQ ID NO: 113766 - protein, 15 aa, Artificial Sequence
  Description of Artificial Sequence: Synthetic peptide
  Seed: PRMCSLMQGSTLPRR
PRMYSLQQPSTLPRR

SEQ ID NO: 113767 - protein, 15 aa, Artificial Sequence
  Description of Artificial Sequence: Synthetic peptide
  Seed: PRMCSLMQGSTLPRR
PRMYSLQQPSTMPRR

SEQ ID NO: 113768 - protein, 15 aa, Artificial Sequence
  Description of Artificial Sequence: Synthetic peptide
  Seed: PRMCSLMQGSTLPRR
PRMYSLQQPSTSPRR

SEQ ID NO: 113769 - protein, 15 aa, Artificial Sequence
  Description of Artificial Sequence: Synthetic peptide
  Seed: PRMCSLMQGSTLPRR
PRMYSLQQPSTTPRR

SEQ ID NO: 113770 - protein, 15 aa, Artificial Sequence
  Description of Artificial Sequence: Synthetic peptide
  Seed: PRMCSLMQGSTLPRR
PRMYSLQQPSTVPRR

SEQ ID NO: 113771 - protein, 15 aa, Artificial Sequence
  Description of Artificial Sequence: Synthetic peptide
  Seed: PRMCSLMQGSTLPRR
PRMYSLQQSSTAPRR

SEQ ID NO: 113772 - protein, 15 aa, Artificial Sequence
  Description of Artificial Sequence: Synthetic peptide
  Seed: PRMCSLMQGSTLPRR
PRMYSLQQSSTCPRR

SEQ ID NO: 113773 - protein, 15 aa, Artificial Sequence
  Description of Artificial Sequence: Synthetic peptide
  Seed: PRMCSLMQGSTLPRR
PRMYSLQQSSTFPRR

SEQ ID NO: 113774 - protein, 15 aa, Artificial Sequence
  Description of Artificial Sequence: Synthetic peptide
  Seed: PRMCSLMQGSTLPRR
PRMYSLQQSSTGPRR

SEQ ID NO: 113775 - protein, 15 aa, Artificial Sequence
  Description of Artificial Sequence: Synthetic peptide
  Seed: PRMCSLMQGSTLPRR
PRMYSLQQSSTIPRR

SEQ ID NO: 113776 - protein, 15 aa, Artificial Sequence
  Description of Artificial Sequence: Synthetic peptide
  Seed: PRMCSLMQGSTLPRR
PRMYSLQQSSTLPRR

SEQ ID NO: 113777 - protein, 15 aa, Artificial Sequence
  Description of Artificial Sequence: Synthetic peptide
  Seed: PRMCSLMQGSTLPRR
PRMYSLQQSSTMPRR

SEQ ID NO: 113778 - protein, 15 aa, Artificial Sequence
  Description of Artificial Sequence: Synthetic peptide
  Seed: PRMCSLMQGSTLPRR
PRMYSLQQSSTNPRR

SEQ ID NO: 113779 - protein, 15 aa, Artificial Sequence
  Description of Artificial Sequence: Synthetic peptide
  Seed: PRMCSLMQGSTLPRR
PRMYSLQQSSTSPRR

SEQ ID NO: 113780 - protein, 15 aa, Artificial Sequence
  Description of Artificial Sequence: Synthetic peptide
  Seed: PRMCSLMQGSTLPRR
PRMYSLQQSSTTPRR

SEQ ID NO: 113781 - protein, 15 aa, Artificial Sequence
  Description of Artificial Sequence: Synthetic peptide
  Seed: PRMCSLMQGSTLPRR
PRMYSLQQSSTVPRR

SEQ ID NO: 113782 - protein, 15 aa, Artificial Sequence
  Description of Artificial Sequence: Synthetic peptide
  Seed: PRMCSLMQGSTLPRR
PRMYSLQQTSTAPRR

SEQ ID NO: 113783 - protein, 15 aa, Artificial Sequence
  Description of Artificial Sequence: Synthetic peptide
  Seed: PRMCSLMQGSTLPRR
PRMYSLQQTSTIPRR

SEQ ID NO: 113784 - protein, 15 aa, Artificial Sequence
  Description of Artificial Sequence: Synthetic peptide
  Seed: PRMCSLMQGSTLPRR
PRMYSLQQTSTLPRR

SEQ ID NO: 113785 - protein, 15 aa, Artificial Sequence
  Description of Artificial Sequence: Synthetic peptide
  Seed: PRMCSLMQGSTLPRR
PRMYSLQQTSTMPRR

SEQ ID NO: 113786 - protein, 15 aa, Artificial Sequence
  Description of Artificial Sequence: Synthetic peptide
  Seed: PRMCSLMQGSTLPRR
PRMYSLQQTSTSPRR

SEQ ID NO: 113787 - protein, 15 aa, Artificial Sequence
  Description of Artificial Sequence: Synthetic peptide
  Seed: PRMCSLMQGSTLPRR
PRMYSLQQTSTTPRR

SEQ ID NO: 113788 - protein, 15 aa, Artificial Sequence
  Description of Artificial Sequence: Synthetic peptide
  Seed: PRMCSLMQGSTLPRR
PRMYSLQQTSTVPRR

SEQ ID NO: 113789 - protein, 15 aa, Artificial Sequence
  Description of Artificial Sequence: Synthetic peptide
  Seed: PRMCSLMQGSTLPRR
PRMYSLQQVSTAPRR

SEQ ID NO: 113790 - protein, 15 aa, Artificial Sequence
  Description of Artificial Sequence: Synthetic peptide
  Seed: PRMCSLMQGSTLPRR
PRMYSLQQVSTIPRR

SEQ ID NO: 113791 - protein, 15 aa, Artificial Sequence
  Description of Artificial Sequence: Synthetic peptide
  Seed: PRMCSLMQGSTLPRR
PRMYSLQQVSTLPRR

SEQ ID NO: 113792 - protein, 15 aa, Artificial Sequence
  Description of Artificial Sequence: Synthetic peptide
  Seed: PRMCSLMQGSTLPRR
PRMYSLQQVSTMPRR

SEQ ID NO: 113793 - protein, 15 aa, Artificial Sequence
  Description of Artificial Sequence: Synthetic peptide
  Seed: PRMCSLMQGSTLPRR
PRMYSLQQVSTNPRR

SEQ ID NO: 113794 - protein, 15 aa, Artificial Sequence
  Description of Artificial Sequence: Synthetic peptide
  Seed: PRMCSLMQGSTLPRR
PRMYSLQQVSTSPRR

SEQ ID NO: 113795 - protein, 15 aa, Artificial Sequence
  Description of Artificial Sequence: Synthetic peptide
  Seed: PRMCSLMQGSTLPRR
PRMYSLQQVSTTPRR

SEQ ID NO: 113796 - protein, 15 aa, Artificial Sequence
  Description of Artificial Sequence: Synthetic peptide
  Seed: PRMCSLMQGSTLPRR
PRMYSLQQVSTVPRR

SEQ ID NO: 113797 - protein, 15 aa, Artificial Sequence
  Description of Artificial Sequence: Synthetic peptide
  Seed: PRMCSLMQGSTLPRR
PRMYSLRQASTLPRR

SEQ ID NO: 113798 - protein, 15 aa, Artificial Sequence
  Description of Artificial Sequence: Synthetic peptide
  Seed: PRMCSLMQGSTLPRR
PRMYSLSQASTAPRR

SEQ ID NO: 113799 - protein, 15 aa, Artificial Sequence
  Description of Artificial Sequence: Synthetic peptide
  Seed: PRMCSLMQGSTLPRR
PRMYSLSQASTCPRR

SEQ ID NO: 113800 - protein, 15 aa, Artificial Sequence
  Description of Artificial Sequence: Synthetic peptide
  Seed: PRMCSLMQGSTLPRR
PRMYSLSQASTFPRR

SEQ ID NO: 113801 - protein, 15 aa, Artificial Sequence
  Description of Artificial Sequence: Synthetic peptide
  Seed: PRMCSLMQGSTLPRR
PRMYSLSQASTGPRR

SEQ ID NO: 113802 - protein, 15 aa, Artificial Sequence
  Description of Artificial Sequence: Synthetic peptide
  Seed: PRMCSLMQGSTLPRR
PRMYSLSQASTIPRR

SEQ ID NO: 113803 - protein, 15 aa, Artificial Sequence
  Description of Artificial Sequence: Synthetic peptide
  Seed: PRMCSLMQGSTLPRR
PRMYSLSQASTLPRR

SEQ ID NO: 113804 - protein, 15 aa, Artificial Sequence
  Description of Artificial Sequence: Synthetic peptide
  Seed: PRMCSLMQGSTLPRR
PRMYSLSQASTMPRR

SEQ ID NO: 113805 - protein, 15 aa, Artificial Sequence
  Description of Artificial Sequence: Synthetic peptide
  Seed: PRMCSLMQGSTLPRR
PRMYSLSQASTNPRR

SEQ ID NO: 113806 - protein, 15 aa, Artificial Sequence
  Description of Artificial Sequence: Synthetic peptide
  Seed: PRMCSLMQGSTLPRR
PRMYSLSQASTSPRR

SEQ ID NO: 113807 - protein, 15 aa, Artificial Sequence
  Description of Artificial Sequence: Synthetic peptide
  Seed: PRMCSLMQGSTLPRR
PRMYSLSQASTTPRR

SEQ ID NO: 113808 - protein, 15 aa, Artificial Sequence
  Description of Artificial Sequence: Synthetic peptide
  Seed: PRMCSLMQGSTLPRR
PRMYSLSQASTVPRR

SEQ ID NO: 113809 - protein, 15 aa, Artificial Sequence
  Description of Artificial Sequence: Synthetic peptide
  Seed: PRMCSLMQGSTLPRR
PRMYSLSQGSTAPRR

SEQ ID NO: 113810 - protein, 15 aa, Artificial Sequence
  Description of Artificial Sequence: Synthetic peptide
  Seed: PRMCSLMQGSTLPRR
PRMYSLSQGSTIPRR

SEQ ID NO: 113811 - protein, 15 aa, Artificial Sequence
  Description of Artificial Sequence: Synthetic peptide
  Seed: PRMCSLMQGSTLPRR
PRMYSLSQGSTLPRR

SEQ ID NO: 113812 - protein, 15 aa, Artificial Sequence
  Description of Artificial Sequence: Synthetic peptide
  Seed: PRMCSLMQGSTLPRR
PRMYSLSQGSTMPRR

SEQ ID NO: 113813 - protein, 15 aa, Artificial Sequence
  Description of Artificial Sequence: Synthetic peptide
  Seed: PRMCSLMQGSTLPRR
PRMYSLSQGSTSPRR

SEQ ID NO: 113814 - protein, 15 aa, Artificial Sequence
  Description of Artificial Sequence: Synthetic peptide
  Seed: PRMCSLMQGSTLPRR
PRMYSLSQGSTTPRR

SEQ ID NO: 113815 - protein, 15 aa, Artificial Sequence
  Description of Artificial Sequence: Synthetic peptide
  Seed: PRMCSLMQGSTLPRR
PRMYSLSQGSTVPRR

SEQ ID NO: 113816 - protein, 15 aa, Artificial Sequence
  Description of Artificial Sequence: Synthetic peptide
  Seed: PRMCSLMQGSTLPRR
PRMYSLSQISTAPRR

SEQ ID NO: 113817 - protein, 15 aa, Artificial Sequence
  Description of Artificial Sequence: Synthetic peptide
  Seed: PRMCSLMQGSTLPRR
PRMYSLSQISTIPRR

SEQ ID NO: 113818 - protein, 15 aa, Artificial Sequence
  Description of Artificial Sequence: Synthetic peptide
  Seed: PRMCSLMQGSTLPRR
PRMYSLSQISTLPRR

SEQ ID NO: 113819 - protein, 15 aa, Artificial Sequence
  Description of Artificial Sequence: Synthetic peptide
  Seed: PRMCSLMQGSTLPRR
PRMYSLSQISTNPRR

SEQ ID NO: 113820 - protein, 15 aa, Artificial Sequence
  Description of Artificial Sequence: Synthetic peptide
  Seed: PRMCSLMQGSTLPRR
PRMYSLSQISTSPRR

SEQ ID NO: 113821 - protein, 15 aa, Artificial Sequence
  Description of Artificial Sequence: Synthetic peptide
  Seed: PRMCSLMQGSTLPRR
PRMYSLSQISTVPRR

SEQ ID NO: 113822 - protein, 15 aa, Artificial Sequence
  Description of Artificial Sequence: Synthetic peptide
  Seed: PRMCSLMQGSTLPRR
PRMYSLSQNSTAPRR

SEQ ID NO: 113823 - protein, 15 aa, Artificial Sequence
  Description of Artificial Sequence: Synthetic peptide
  Seed: PRMCSLMQGSTLPRR
PRMYSLSQNSTIPRR

SEQ ID NO: 113824 - protein, 15 aa, Artificial Sequence
  Description of Artificial Sequence: Synthetic peptide
  Seed: PRMCSLMQGSTLPRR
PRMYSLSQNSTLPRR

SEQ ID NO: 113825 - protein, 15 aa, Artificial Sequence
  Description of Artificial Sequence: Synthetic peptide
  Seed: PRMCSLMQGSTLPRR
PRMYSLSQNSTMPRR

SEQ ID NO: 113826 - protein, 15 aa, Artificial Sequence
  Description of Artificial Sequence: Synthetic peptide
  Seed: PRMCSLMQGSTLPRR
PRMYSLSQNSTVPRR

SEQ ID NO: 113827 - protein, 15 aa, Artificial Sequence
  Description of Artificial Sequence: Synthetic peptide
  Seed: PRMCSLMQGSTLPRR
PRMYSLSQPSTAPRR

SEQ ID NO: 113828 - protein, 15 aa, Artificial Sequence
  Description of Artificial Sequence: Synthetic peptide
  Seed: PRMCSLMQGSTLPRR
PRMYSLSQPSTIPRR

SEQ ID NO: 113829 - protein, 15 aa, Artificial Sequence
  Description of Artificial Sequence: Synthetic peptide
  Seed: PRMCSLMQGSTLPRR
PRMYSLSQPSTLPRR

SEQ ID NO: 113830 - protein, 15 aa, Artificial Sequence
  Description of Artificial Sequence: Synthetic peptide
  Seed: PRMCSLMQGSTLPRR
PRMYSLSQPSTMPRR

SEQ ID NO: 113831 - protein, 15 aa, Artificial Sequence
  Description of Artificial Sequence: Synthetic peptide
  Seed: PRMCSLMQGSTLPRR
PRMYSLSQPSTSPRR

SEQ ID NO: 113832 - protein, 15 aa, Artificial Sequence
  Description of Artificial Sequence: Synthetic peptide
  Seed: PRMCSLMQGSTLPRR
PRMYSLSQPSTTPRR

SEQ ID NO: 113833 - protein, 15 aa, Artificial Sequence
  Description of Artificial Sequence: Synthetic peptide
  Seed: PRMCSLMQGSTLPRR
PRMYSLSQPSTVPRR

SEQ ID NO: 113834 - protein, 15 aa, Artificial Sequence
  Description of Artificial Sequence: Synthetic peptide
  Seed: PRMCSLMQGSTLPRR
PRMYSLSQSSTAPRR

SEQ ID NO: 113835 - protein, 15 aa, Artificial Sequence
  Description of Artificial Sequence: Synthetic peptide
  Seed: PRMCSLMQGSTLPRR
PRMYSLSQSSTFPRR

SEQ ID NO: 113836 - protein, 15 aa, Artificial Sequence
  Description of Artificial Sequence: Synthetic peptide
  Seed: PRMCSLMQGSTLPRR
PRMYSLSQSSTIPRR

SEQ ID NO: 113837 - protein, 15 aa, Artificial Sequence
  Description of Artificial Sequence: Synthetic peptide
  Seed: PRMCSLMQGSTLPRR
PRMYSLSQSSTLPRR

SEQ ID NO: 113838 - protein, 15 aa, Artificial Sequence
  Description of Artificial Sequence: Synthetic peptide
  Seed: PRMCSLMQGSTLPRR
PRMYSLSQSSTMPRR

SEQ ID NO: 113839 - protein, 15 aa, Artificial Sequence
  Description of Artificial Sequence: Synthetic peptide
  Seed: PRMCSLMQGSTLPRR
PRMYSLSQSSTNPRR

SEQ ID NO: 113840 - protein, 15 aa, Artificial Sequence
  Description of Artificial Sequence: Synthetic peptide
  Seed: PRMCSLMQGSTLPRR
PRMYSLSQSSTSPRR

SEQ ID NO: 113841 - protein, 15 aa, Artificial Sequence
  Description of Artificial Sequence: Synthetic peptide
  Seed: PRMCSLMQGSTLPRR
PRMYSLSQSSTTPRR

SEQ ID NO: 113842 - protein, 15 aa, Artificial Sequence
  Description of Artificial Sequence: Synthetic peptide
  Seed: PRMCSLMQGSTLPRR
PRMYSLSQSSTVPRR

SEQ ID NO: 113843 - protein, 15 aa, Artificial Sequence
  Description of Artificial Sequence: Synthetic peptide
  Seed: PRMCSLMQGSTLPRR
PRMYSLSQTSTAPRR

SEQ ID NO: 113844 - protein, 15 aa, Artificial Sequence
  Description of Artificial Sequence: Synthetic peptide
  Seed: PRMCSLMQGSTLPRR
PRMYSLSQTSTIPRR

SEQ ID NO: 113845 - protein, 15 aa, Artificial Sequence
  Description of Artificial Sequence: Synthetic peptide
  Seed: PRMCSLMQGSTLPRR
PRMYSLSQTSTLPRR

SEQ ID NO: 113846 - protein, 15 aa, Artificial Sequence
  Description of Artificial Sequence: Synthetic peptide
  Seed: PRMCSLMQGSTLPRR
PRMYSLSQTSTMPRR

SEQ ID NO: 113847 - protein, 15 aa, Artificial Sequence
  Description of Artificial Sequence: Synthetic peptide
  Seed: PRMCSLMQGSTLPRR
PRMYSLSQTSTVPRR

SEQ ID NO: 113848 - protein, 15 aa, Artificial Sequence
  Description of Artificial Sequence: Synthetic peptide
  Seed: PRMCSLMQGSTLPRR
PRMYSLSQVSTAPRR

SEQ ID NO: 113849 - protein, 15 aa, Artificial Sequence
  Description of Artificial Sequence: Synthetic peptide
  Seed: PRMCSLMQGSTLPRR
PRMYSLSQVSTIPRR

SEQ ID NO: 113850 - protein, 15 aa, Artificial Sequence
  Description of Artificial Sequence: Synthetic peptide
  Seed: PRMCSLMQGSTLPRR
PRMYSLSQVSTLPRR

SEQ ID NO: 113851 - protein, 15 aa, Artificial Sequence
  Description of Artificial Sequence: Synthetic peptide
  Seed: PRMCSLMQGSTLPRR
PRMYSLSQVSTMPRR

SEQ ID NO: 113852 - protein, 15 aa, Artificial Sequence
  Description of Artificial Sequence: Synthetic peptide
  Seed: PRMCSLMQGSTLPRR
PRMYSLSQVSTNPRR

SEQ ID NO: 113853 - protein, 15 aa, Artificial Sequence
  Description of Artificial Sequence: Synthetic peptide
  Seed: PRMCSLMQGSTLPRR
PRMYSLSQVSTSPRR

SEQ ID NO: 113854 - protein, 15 aa, Artificial Sequence
  Description of Artificial Sequence: Synthetic peptide
  Seed: PRMCSLMQGSTLPRR
PRMYSLSQVSTVPRR

SEQ ID NO: 113855 - protein, 15 aa, Artificial Sequence
  Description of Artificial Sequence: Synthetic peptide
  Seed: PRMCSLMQGSTLPRR
PRMYSLTQASTAPRR

SEQ ID NO: 113856 - protein, 15 aa, Artificial Sequence
  Description of Artificial Sequence: Synthetic peptide
  Seed: PRMCSLMQGSTLPRR
PRMYSLTQASTFPRR

SEQ ID NO: 113857 - protein, 15 aa, Artificial Sequence
  Description of Artificial Sequence: Synthetic peptide
  Seed: PRMCSLMQGSTLPRR
PRMYSLTQASTGPRR

SEQ ID NO: 113858 - protein, 15 aa, Artificial Sequence
  Description of Artificial Sequence: Synthetic peptide
  Seed: PRMCSLMQGSTLPRR
PRMYSLTQASTIPRR

SEQ ID NO: 113859 - protein, 15 aa, Artificial Sequence
  Description of Artificial Sequence: Synthetic peptide
  Seed: PRMCSLMQGSTLPRR
PRMYSLTQASTLPRR

SEQ ID NO: 113860 - protein, 15 aa, Artificial Sequence
  Description of Artificial Sequence: Synthetic peptide
  Seed: PRMCSLMQGSTLPRR
PRMYSLTQASTMPRR

SEQ ID NO: 113861 - protein, 15 aa, Artificial Sequence
  Description of Artificial Sequence: Synthetic peptide
  Seed: PRMCSLMQGSTLPRR
PRMYSLTQASTNPRR

SEQ ID NO: 113862 - protein, 15 aa, Artificial Sequence
  Description of Artificial Sequence: Synthetic peptide
  Seed: PRMCSLMQGSTLPRR
PRMYSLTQASTSPRR

SEQ ID NO: 113863 - protein, 15 aa, Artificial Sequence
  Description of Artificial Sequence: Synthetic peptide
  Seed: PRMCSLMQGSTLPRR
PRMYSLTQASTTPRR

SEQ ID NO: 113864 - protein, 15 aa, Artificial Sequence
  Description of Artificial Sequence: Synthetic peptide
  Seed: PRMCSLMQGSTLPRR
PRMYSLTQASTVPRR

SEQ ID NO: 113865 - protein, 15 aa, Artificial Sequence
  Description of Artificial Sequence: Synthetic peptide
  Seed: PRMCSLMQGSTLPRR
PRMYSLTQGSTAPRR

SEQ ID NO: 113866 - protein, 15 aa, Artificial Sequence
  Description of Artificial Sequence: Synthetic peptide
  Seed: PRMCSLMQGSTLPRR
PRMYSLTQGSTFPRR

SEQ ID NO: 113867 - protein, 15 aa, Artificial Sequence
  Description of Artificial Sequence: Synthetic peptide
  Seed: PRMCSLMQGSTLPRR
PRMYSLTQGSTIPRR

SEQ ID NO: 113868 - protein, 15 aa, Artificial Sequence
  Description of Artificial Sequence: Synthetic peptide
  Seed: PRMCSLMQGSTLPRR
PRMYSLTQGSTLPRR

SEQ ID NO: 113869 - protein, 15 aa, Artificial Sequence
  Description of Artificial Sequence: Synthetic peptide
  Seed: PRMCSLMQGSTLPRR
PRMYSLTQGSTMPRR

SEQ ID NO: 113870 - protein, 15 aa, Artificial Sequence
  Description of Artificial Sequence: Synthetic peptide
  Seed: PRMCSLMQGSTLPRR
PRMYSLTQGSTSPRR

SEQ ID NO: 113871 - protein, 15 aa, Artificial Sequence
  Description of Artificial Sequence: Synthetic peptide
  Seed: PRMCSLMQGSTLPRR
PRMYSLTQGSTTPRR

SEQ ID NO: 113872 - protein, 15 aa, Artificial Sequence
  Description of Artificial Sequence: Synthetic peptide
  Seed: PRMCSLMQGSTLPRR
PRMYSLTQGSTVPRR

SEQ ID NO: 113873 - protein, 15 aa, Artificial Sequence
  Description of Artificial Sequence: Synthetic peptide
  Seed: PRMCSLMQGSTLPRR
PRMYSLTQISTAPRR

SEQ ID NO: 113874 - protein, 15 aa, Artificial Sequence
  Description of Artificial Sequence: Synthetic peptide
  Seed: PRMCSLMQGSTLPRR
PRMYSLTQISTIPRR

SEQ ID NO: 113875 - protein, 15 aa, Artificial Sequence
  Description of Artificial Sequence: Synthetic peptide
  Seed: PRMCSLMQGSTLPRR
PRMYSLTQISTLPRR

SEQ ID NO: 113876 - protein, 15 aa, Artificial Sequence
  Description of Artificial Sequence: Synthetic peptide
  Seed: PRMCSLMQGSTLPRR
PRMYSLTQNSTIPRR

SEQ ID NO: 113877 - protein, 15 aa, Artificial Sequence
  Description of Artificial Sequence: Synthetic peptide
  Seed: PRMCSLMQGSTLPRR
PRMYSLTQNSTLPRR

SEQ ID NO: 113878 - protein, 15 aa, Artificial Sequence
  Description of Artificial Sequence: Synthetic peptide
  Seed: PRMCSLMQGSTLPRR
PRMYSLTQNSTVPRR

SEQ ID NO: 113879 - protein, 15 aa, Artificial Sequence
  Description of Artificial Sequence: Synthetic peptide
  Seed: PRMCSLMQGSTLPRR
PRMYSLTQPSTAPRR

SEQ ID NO: 113880 - protein, 15 aa, Artificial Sequence
  Description of Artificial Sequence: Synthetic peptide
  Seed: PRMCSLMQGSTLPRR
PRMYSLTQPSTIPRR

SEQ ID NO: 113881 - protein, 15 aa, Artificial Sequence
  Description of Artificial Sequence: Synthetic peptide
  Seed: PRMCSLMQGSTLPRR
PRMYSLTQPSTLPRR

SEQ ID NO: 113882 - protein, 15 aa, Artificial Sequence
  Description of Artificial Sequence: Synthetic peptide
  Seed: PRMCSLMQGSTLPRR
PRMYSLTQPSTMPRR

SEQ ID NO: 113883 - protein, 15 aa, Artificial Sequence
  Description of Artificial Sequence: Synthetic peptide
  Seed: PRMCSLMQGSTLPRR
PRMYSLTQPSTSPRR

SEQ ID NO: 113884 - protein, 15 aa, Artificial Sequence
  Description of Artificial Sequence: Synthetic peptide
  Seed: PRMCSLMQGSTLPRR
PRMYSLTQPSTVPRR

SEQ ID NO: 113885 - protein, 15 aa, Artificial Sequence
  Description of Artificial Sequence: Synthetic peptide
  Seed: PRMCSLMQGSTLPRR
PRMYSLTQSSTAPRR

SEQ ID NO: 113886 - protein, 15 aa, Artificial Sequence
  Description of Artificial Sequence: Synthetic peptide
  Seed: PRMCSLMQGSTLPRR
PRMYSLTQSSTFPRR

SEQ ID NO: 113887 - protein, 15 aa, Artificial Sequence
  Description of Artificial Sequence: Synthetic peptide
  Seed: PRMCSLMQGSTLPRR
PRMYSLTQSSTIPRR

SEQ ID NO: 113888 - protein, 15 aa, Artificial Sequence
  Description of Artificial Sequence: Synthetic peptide
  Seed: PRMCSLMQGSTLPRR
PRMYSLTQSSTLPRR

SEQ ID NO: 113889 - protein, 15 aa, Artificial Sequence
  Description of Artificial Sequence: Synthetic peptide
  Seed: PRMCSLMQGSTLPRR
PRMYSLTQSSTMPRR

SEQ ID NO: 113890 - protein, 15 aa, Artificial Sequence
  Description of Artificial Sequence: Synthetic peptide
  Seed: PRMCSLMQGSTLPRR
PRMYSLTQSSTSPRR

SEQ ID NO: 113891 - protein, 15 aa, Artificial Sequence
  Description of Artificial Sequence: Synthetic peptide
  Seed: PRMCSLMQGSTLPRR
PRMYSLTQSSTTPRR

SEQ ID NO: 113892 - protein, 15 aa, Artificial Sequence
  Description of Artificial Sequence: Synthetic peptide
  Seed: PRMCSLMQGSTLPRR
PRMYSLTQSSTVPRR

SEQ ID NO: 113893 - protein, 15 aa, Artificial Sequence
  Description of Artificial Sequence: Synthetic peptide
  Seed: PRMCSLMQGSTLPRR
PRMYSLTQTSTAPRR

SEQ ID NO: 113894 - protein, 15 aa, Artificial Sequence
  Description of Artificial Sequence: Synthetic peptide
  Seed: PRMCSLMQGSTLPRR
PRMYSLTQTSTIPRR

SEQ ID NO: 113895 - protein, 15 aa, Artificial Sequence
  Description of Artificial Sequence: Synthetic peptide
  Seed: PRMCSLMQGSTLPRR
PRMYSLTQTSTLPRR

SEQ ID NO: 113896 - protein, 15 aa, Artificial Sequence
  Description of Artificial Sequence: Synthetic peptide
  Seed: PRMCSLMQGSTLPRR
PRMYSLTQTSTVPRR

SEQ ID NO: 113897 - protein, 15 aa, Artificial Sequence
  Description of Artificial Sequence: Synthetic peptide
  Seed: PRMCSLMQGSTLPRR
PRMYSLTQVSTAPRR

SEQ ID NO: 113898 - protein, 15 aa, Artificial Sequence
  Description of Artificial Sequence: Synthetic peptide
  Seed: PRMCSLMQGSTLPRR
PRMYSLTQVSTIPRR

SEQ ID NO: 113899 - protein, 15 aa, Artificial Sequence
  Description of Artificial Sequence: Synthetic peptide
  Seed: PRMCSLMQGSTLPRR
PRMYSLTQVSTLPRR

SEQ ID NO: 113900 - protein, 15 aa, Artificial Sequence
  Description of Artificial Sequence: Synthetic peptide
  Seed: PRMCSLMQGSTLPRR
PRMYSLTQVSTNPRR

SEQ ID NO: 113901 - protein, 15 aa, Artificial Sequence
  Description of Artificial Sequence: Synthetic peptide
  Seed: PRMCSLMQGSTLPRR
PRMYSLTQVSTSPRR

SEQ ID NO: 113902 - protein, 15 aa, Artificial Sequence
  Description of Artificial Sequence: Synthetic peptide
  Seed: PRMCSLMQGSTLPRR
PRMYSLTQVSTVPRR

SEQ ID NO: 113903 - protein, 15 aa, Artificial Sequence
  Description of Artificial Sequence: Synthetic peptide
  Seed: PRMCSLMQGSTLPRR
PRMYSLVQASTAPRR

SEQ ID NO: 113904 - protein, 15 aa, Artificial Sequence
  Description of Artificial Sequence: Synthetic peptide
  Seed: PRMCSLMQGSTLPRR
PRMYSLVQASTCPRR

SEQ ID NO: 113905 - protein, 15 aa, Artificial Sequence
  Description of Artificial Sequence: Synthetic peptide
  Seed: PRMCSLMQGSTLPRR
PRMYSLVQASTFPRR

SEQ ID NO: 113906 - protein, 15 aa, Artificial Sequence
  Description of Artificial Sequence: Synthetic peptide
  Seed: PRMCSLMQGSTLPRR
PRMYSLVQASTGPRR

SEQ ID NO: 113907 - protein, 15 aa, Artificial Sequence
  Description of Artificial Sequence: Synthetic peptide
  Seed: PRMCSLMQGSTLPRR
PRMYSLVQASTHPRR

SEQ ID NO: 113908 - protein, 15 aa, Artificial Sequence
  Description of Artificial Sequence: Synthetic peptide
  Seed: PRMCSLMQGSTLPRR
PRMYSLVQASTIPRR

SEQ ID NO: 113909 - protein, 15 aa, Artificial Sequence
  Description of Artificial Sequence: Synthetic peptide
  Seed: PRMCSLMQGSTLPRR
PRMYSLVQASTKPRR

SEQ ID NO: 113910 - protein, 15 aa, Artificial Sequence
  Description of Artificial Sequence: Synthetic peptide
  Seed: PRMCSLMQGSTLPRR
PRMYSLVQASTLPRR

SEQ ID NO: 113911 - protein, 15 aa, Artificial Sequence
  Description of Artificial Sequence: Synthetic peptide
  Seed: PRMCSLMQGSTLPRR
PRMYSLVQASTMPRR

SEQ ID NO: 113912 - protein, 15 aa, Artificial Sequence
  Description of Artificial Sequence: Synthetic peptide
  Seed: PRMCSLMQGSTLPRR
PRMYSLVQASTNPRR

SEQ ID NO: 113913 - protein, 15 aa, Artificial Sequence
  Description of Artificial Sequence: Synthetic peptide
  Seed: PRMCSLMQGSTLPRR
PRMYSLVQASTPPRR

SEQ ID NO: 113914 - protein, 15 aa, Artificial Sequence
  Description of Artificial Sequence: Synthetic peptide
  Seed: PRMCSLMQGSTLPRR
PRMYSLVQASTQPRR

SEQ ID NO: 113915 - protein, 15 aa, Artificial Sequence
  Description of Artificial Sequence: Synthetic peptide
  Seed: PRMCSLMQGSTLPRR
PRMYSLVQASTRPRR

SEQ ID NO: 113916 - protein, 15 aa, Artificial Sequence
  Description of Artificial Sequence: Synthetic peptide
  Seed: PRMCSLMQGSTLPRR
PRMYSLVQASTSPRR

SEQ ID NO: 113917 - protein, 15 aa, Artificial Sequence
  Description of Artificial Sequence: Synthetic peptide
  Seed: PRMCSLMQGSTLPRR
PRMYSLVQASTTPRR

SEQ ID NO: 113918 - protein, 15 aa, Artificial Sequence
  Description of Artificial Sequence: Synthetic peptide
  Seed: PRMCSLMQGSTLPRR
PRMYSLVQASTVPRR

SEQ ID NO: 113919 - protein, 15 aa, Artificial Sequence
  Description of Artificial Sequence: Synthetic peptide
  Seed: PRMCSLMQGSTLPRR
PRMYSLVQASTWPRR

SEQ ID NO: 113920 - protein, 15 aa, Artificial Sequence
  Description of Artificial Sequence: Synthetic peptide
  Seed: PRMCSLMQGSTLPRR
PRMYSLVQASTYPRR

SEQ ID NO: 113921 - protein, 15 aa, Artificial Sequence
  Description of Artificial Sequence: Synthetic peptide
  Seed: PRMCSLMQGSTLPRR
PRMYSLVQFSTLPRR

SEQ ID NO: 113922 - protein, 15 aa, Artificial Sequence
  Description of Artificial Sequence: Synthetic peptide
  Seed: PRMCSLMQGSTLPRR
PRMYSLVQGSTAPRR

SEQ ID NO: 113923 - protein, 15 aa, Artificial Sequence
  Description of Artificial Sequence: Synthetic peptide
  Seed: PRMCSLMQGSTLPRR
PRMYSLVQGSTCPRR

SEQ ID NO: 113924 - protein, 15 aa, Artificial Sequence
  Description of Artificial Sequence: Synthetic peptide
  Seed: PRMCSLMQGSTLPRR
PRMYSLVQGSTFPRR

SEQ ID NO: 113925 - protein, 15 aa, Artificial Sequence
  Description of Artificial Sequence: Synthetic peptide
  Seed: PRMCSLMQGSTLPRR
PRMYSLVQGSTGPRR

SEQ ID NO: 113926 - protein, 15 aa, Artificial Sequence
  Description of Artificial Sequence: Synthetic peptide
  Seed: PRMCSLMQGSTLPRR
PRMYSLVQGSTIPRR

SEQ ID NO: 113927 - protein, 15 aa, Artificial Sequence
  Description of Artificial Sequence: Synthetic peptide
  Seed: PRMCSLMQGSTLPRR
PRMYSLVQGSTLPRR

SEQ ID NO: 113928 - protein, 15 aa, Artificial Sequence
  Description of Artificial Sequence: Synthetic peptide
  Seed: PRMCSLMQGSTLPRR
PRMYSLVQGSTMPRR

SEQ ID NO: 113929 - protein, 15 aa, Artificial Sequence
  Description of Artificial Sequence: Synthetic peptide
  Seed: PRMCSLMQGSTLPRR
PRMYSLVQGSTNPRR

SEQ ID NO: 113930 - protein, 15 aa, Artificial Sequence
  Description of Artificial Sequence: Synthetic peptide
  Seed: PRMCSLMQGSTLPRR
PRMYSLVQGSTSPRR

SEQ ID NO: 113931 - protein, 15 aa, Artificial Sequence
  Description of Artificial Sequence: Synthetic peptide
  Seed: PRMCSLMQGSTLPRR
PRMYSLVQGSTTPRR

SEQ ID NO: 113932 - protein, 15 aa, Artificial Sequence
  Description of Artificial Sequence: Synthetic peptide
  Seed: PRMCSLMQGSTLPRR
PRMYSLVQGSTVPRR

SEQ ID NO: 113933 - protein, 15 aa, Artificial Sequence
  Description of Artificial Sequence: Synthetic peptide
  Seed: PRMCSLMQGSTLPRR
PRMYSLVQHSTLPRR

SEQ ID NO: 113934 - protein, 15 aa, Artificial Sequence
  Description of Artificial Sequence: Synthetic peptide
  Seed: PRMCSLMQGSTLPRR
PRMYSLVQISTAPRR

SEQ ID NO: 113935 - protein, 15 aa, Artificial Sequence
  Description of Artificial Sequence: Synthetic peptide
  Seed: PRMCSLMQGSTLPRR
PRMYSLVQISTGPRR

SEQ ID NO: 113936 - protein, 15 aa, Artificial Sequence
  Description of Artificial Sequence: Synthetic peptide
  Seed: PRMCSLMQGSTLPRR
PRMYSLVQISTHPRR

SEQ ID NO: 113937 - protein, 15 aa, Artificial Sequence
  Description of Artificial Sequence: Synthetic peptide
  Seed: PRMCSLMQGSTLPRR
PRMYSLVQISTIPRR

SEQ ID NO: 113938 - protein, 15 aa, Artificial Sequence
  Description of Artificial Sequence: Synthetic peptide
  Seed: PRMCSLMQGSTLPRR
PRMYSLVQISTLPRR

SEQ ID NO: 113939 - protein, 15 aa, Artificial Sequence
  Description of Artificial Sequence: Synthetic peptide
  Seed: PRMCSLMQGSTLPRR
PRMYSLVQISTMPRR

SEQ ID NO: 113940 - protein, 15 aa, Artificial Sequence
  Description of Artificial Sequence: Synthetic peptide
  Seed: PRMCSLMQGSTLPRR
PRMYSLVQISTNPRR

SEQ ID NO: 113941 - protein, 15 aa, Artificial Sequence
  Description of Artificial Sequence: Synthetic peptide
  Seed: PRMCSLMQGSTLPRR
PRMYSLVQISTQPRR

SEQ ID NO: 113942 - protein, 15 aa, Artificial Sequence
  Description of Artificial Sequence: Synthetic peptide
  Seed: PRMCSLMQGSTLPRR
PRMYSLVQISTSPRR

SEQ ID NO: 113943 - protein, 15 aa, Artificial Sequence
  Description of Artificial Sequence: Synthetic peptide
  Seed: PRMCSLMQGSTLPRR
PRMYSLVQISTTPRR

SEQ ID NO: 113944 - protein, 15 aa, Artificial Sequence
  Description of Artificial Sequence: Synthetic peptide
  Seed: PRMCSLMQGSTLPRR
PRMYSLVQISTVPRR

SEQ ID NO: 113945 - protein, 15 aa, Artificial Sequence
  Description of Artificial Sequence: Synthetic peptide
  Seed: PRMCSLMQGSTLPRR
PRMYSLVQLSTAPRR

SEQ ID NO: 113946 - protein, 15 aa, Artificial Sequence
  Description of Artificial Sequence: Synthetic peptide
  Seed: PRMCSLMQGSTLPRR
PRMYSLVQLSTIPRR

SEQ ID NO: 113947 - protein, 15 aa, Artificial Sequence
  Description of Artificial Sequence: Synthetic peptide
  Seed: PRMCSLMQGSTLPRR
PRMYSLVQLSTLPRR

SEQ ID NO: 113948 - protein, 15 aa, Artificial Sequence
  Description of Artificial Sequence: Synthetic peptide
  Seed: PRMCSLMQGSTLPRR
PRMYSLVQLSTMPRR

SEQ ID NO: 113949 - protein, 15 aa, Artificial Sequence
  Description of Artificial Sequence: Synthetic peptide
  Seed: PRMCSLMQGSTLPRR
PRMYSLVQLSTNPRR

SEQ ID NO: 113950 - protein, 15 aa, Artificial Sequence
  Description of Artificial Sequence: Synthetic peptide
  Seed: PRMCSLMQGSTLPRR
PRMYSLVQLSTSPRR

SEQ ID NO: 113951 - protein, 15 aa, Artificial Sequence
  Description of Artificial Sequence: Synthetic peptide
  Seed: PRMCSLMQGSTLPRR
PRMYSLVQLSTTPRR

SEQ ID NO: 113952 - protein, 15 aa, Artificial Sequence
  Description of Artificial Sequence: Synthetic peptide
  Seed: PRMCSLMQGSTLPRR
PRMYSLVQLSTVPRR

SEQ ID NO: 113953 - protein, 15 aa, Artificial Sequence
  Description of Artificial Sequence: Synthetic peptide
  Seed: PRMCSLMQGSTLPRR
PRMYSLVQMSTAPRR

SEQ ID NO: 113954 - protein, 15 aa, Artificial Sequence
  Description of Artificial Sequence: Synthetic peptide
  Seed: PRMCSLMQGSTLPRR
PRMYSLVQMSTIPRR

SEQ ID NO: 113955 - protein, 15 aa, Artificial Sequence
  Description of Artificial Sequence: Synthetic peptide
  Seed: PRMCSLMQGSTLPRR
PRMYSLVQMSTLPRR

SEQ ID NO: 113956 - protein, 15 aa, Artificial Sequence
  Description of Artificial Sequence: Synthetic peptide
  Seed: PRMCSLMQGSTLPRR
PRMYSLVQMSTMPRR

SEQ ID NO: 113957 - protein, 15 aa, Artificial Sequence
  Description of Artificial Sequence: Synthetic peptide
  Seed: PRMCSLMQGSTLPRR
PRMYSLVQMSTNPRR

SEQ ID NO: 113958 - protein, 15 aa, Artificial Sequence
  Description of Artificial Sequence: Synthetic peptide
  Seed: PRMCSLMQGSTLPRR
PRMYSLVQMSTSPRR

SEQ ID NO: 113959 - protein, 15 aa, Artificial Sequence
  Description of Artificial Sequence: Synthetic peptide
  Seed: PRMCSLMQGSTLPRR
PRMYSLVQMSTTPRR

SEQ ID NO: 113960 - protein, 15 aa, Artificial Sequence
  Description of Artificial Sequence: Synthetic peptide
  Seed: PRMCSLMQGSTLPRR
PRMYSLVQMSTVPRR

SEQ ID NO: 113961 - protein, 15 aa, Artificial Sequence
  Description of Artificial Sequence: Synthetic peptide
  Seed: PRMCSLMQGSTLPRR
PRMYSLVQNSTAPRR

SEQ ID NO: 113962 - protein, 15 aa, Artificial Sequence
  Description of Artificial Sequence: Synthetic peptide
  Seed: PRMCSLMQGSTLPRR
PRMYSLVQNSTIPRR

SEQ ID NO: 113963 - protein, 15 aa, Artificial Sequence
  Description of Artificial Sequence: Synthetic peptide
  Seed: PRMCSLMQGSTLPRR
PRMYSLVQNSTLPRR

SEQ ID NO: 113964 - protein, 15 aa, Artificial Sequence
  Description of Artificial Sequence: Synthetic peptide
  Seed: PRMCSLMQGSTLPRR
PRMYSLVQNSTMPRR

SEQ ID NO: 113965 - protein, 15 aa, Artificial Sequence
  Description of Artificial Sequence: Synthetic peptide
  Seed: PRMCSLMQGSTLPRR
PRMYSLVQNSTNPRR

SEQ ID NO: 113966 - protein, 15 aa, Artificial Sequence
  Description of Artificial Sequence: Synthetic peptide
  Seed: PRMCSLMQGSTLPRR
PRMYSLVQNSTSPRR

SEQ ID NO: 113967 - protein, 15 aa, Artificial Sequence
  Description of Artificial Sequence: Synthetic peptide
  Seed: PRMCSLMQGSTLPRR
PRMYSLVQNSTTPRR

SEQ ID NO: 113968 - protein, 15 aa, Artificial Sequence
  Description of Artificial Sequence: Synthetic peptide
  Seed: PRMCSLMQGSTLPRR
PRMYSLVQNSTVPRR

SEQ ID NO: 113969 - protein, 15 aa, Artificial Sequence
  Description of Artificial Sequence: Synthetic peptide
  Seed: PRMCSLMQGSTLPRR
PRMYSLVQPSTAPRR

SEQ ID NO: 113970 - protein, 15 aa, Artificial Sequence
  Description of Artificial Sequence: Synthetic peptide
  Seed: PRMCSLMQGSTLPRR
PRMYSLVQPSTFPRR

SEQ ID NO: 113971 - protein, 15 aa, Artificial Sequence
  Description of Artificial Sequence: Synthetic peptide
  Seed: PRMCSLMQGSTLPRR
PRMYSLVQPSTGPRR

SEQ ID NO: 113972 - protein, 15 aa, Artificial Sequence
  Description of Artificial Sequence: Synthetic peptide
  Seed: PRMCSLMQGSTLPRR
PRMYSLVQPSTHPRR

SEQ ID NO: 113973 - protein, 15 aa, Artificial Sequence
  Description of Artificial Sequence: Synthetic peptide
  Seed: PRMCSLMQGSTLPRR
PRMYSLVQPSTIPRR

SEQ ID NO: 113974 - protein, 15 aa, Artificial Sequence
  Description of Artificial Sequence: Synthetic peptide
  Seed: PRMCSLMQGSTLPRR
PRMYSLVQPSTLPRR

SEQ ID NO: 113975 - protein, 15 aa, Artificial Sequence
  Description of Artificial Sequence: Synthetic peptide
  Seed: PRMCSLMQGSTLPRR
PRMYSLVQPSTMPRR

SEQ ID NO: 113976 - protein, 15 aa, Artificial Sequence
  Description of Artificial Sequence: Synthetic peptide
  Seed: PRMCSLMQGSTLPRR
PRMYSLVQPSTNPRR

SEQ ID NO: 113977 - protein, 15 aa, Artificial Sequence
  Description of Artificial Sequence: Synthetic peptide
  Seed: PRMCSLMQGSTLPRR
PRMYSLVQPSTPPRR

SEQ ID NO: 113978 - protein, 15 aa, Artificial Sequence
  Description of Artificial Sequence: Synthetic peptide
  Seed: PRMCSLMQGSTLPRR
PRMYSLVQPSTQPRR

SEQ ID NO: 113979 - protein, 15 aa, Artificial Sequence
  Description of Artificial Sequence: Synthetic peptide
  Seed: PRMCSLMQGSTLPRR
PRMYSLVQPSTSPRR

SEQ ID NO: 113980 - protein, 15 aa, Artificial Sequence
  Description of Artificial Sequence: Synthetic peptide
  Seed: PRMCSLMQGSTLPRR
PRMYSLVQPSTTPRR

SEQ ID NO: 113981 - protein, 15 aa, Artificial Sequence
  Description of Artificial Sequence: Synthetic peptide
  Seed: PRMCSLMQGSTLPRR
PRMYSLVQPSTVPRR

SEQ ID NO: 113982 - protein, 15 aa, Artificial Sequence
  Description of Artificial Sequence: Synthetic peptide
  Seed: PRMCSLMQGSTLPRR
PRMYSLVQSSTAPRR

SEQ ID NO: 113983 - protein, 15 aa, Artificial Sequence
  Description of Artificial Sequence: Synthetic peptide
  Seed: PRMCSLMQGSTLPRR
PRMYSLVQSSTCPRR

SEQ ID NO: 113984 - protein, 15 aa, Artificial Sequence
  Description of Artificial Sequence: Synthetic peptide
  Seed: PRMCSLMQGSTLPRR
PRMYSLVQSSTFPRR

SEQ ID NO: 113985 - protein, 15 aa, Artificial Sequence
  Description of Artificial Sequence: Synthetic peptide
  Seed: PRMCSLMQGSTLPRR
PRMYSLVQSSTGPRR

SEQ ID NO: 113986 - protein, 15 aa, Artificial Sequence
  Description of Artificial Sequence: Synthetic peptide
  Seed: PRMCSLMQGSTLPRR
PRMYSLVQSSTHPRR

SEQ ID NO: 113987 - protein, 15 aa, Artificial Sequence
  Description of Artificial Sequence: Synthetic peptide
  Seed: PRMCSLMQGSTLPRR
PRMYSLVQSSTIPRR

SEQ ID NO: 113988 - protein, 15 aa, Artificial Sequence
  Description of Artificial Sequence: Synthetic peptide
  Seed: PRMCSLMQGSTLPRR
PRMYSLVQSSTLPRR

SEQ ID NO: 113989 - protein, 15 aa, Artificial Sequence
  Description of Artificial Sequence: Synthetic peptide
  Seed: PRMCSLMQGSTLPRR
PRMYSLVQSSTMPRR

SEQ ID NO: 113990 - protein, 15 aa, Artificial Sequence
  Description of Artificial Sequence: Synthetic peptide
  Seed: PRMCSLMQGSTLPRR
PRMYSLVQSSTNPRR

SEQ ID NO: 113991 - protein, 15 aa, Artificial Sequence
  Description of Artificial Sequence: Synthetic peptide
  Seed: PRMCSLMQGSTLPRR
PRMYSLVQSSTQPRR

SEQ ID NO: 113992 - protein, 15 aa, Artificial Sequence
  Description of Artificial Sequence: Synthetic peptide
  Seed: PRMCSLMQGSTLPRR
PRMYSLVQSSTSPRR

SEQ ID NO: 113993 - protein, 15 aa, Artificial Sequence
  Description of Artificial Sequence: Synthetic peptide
  Seed: PRMCSLMQGSTLPRR
PRMYSLVQSSTTPRR

SEQ ID NO: 113994 - protein, 15 aa, Artificial Sequence
  Description of Artificial Sequence: Synthetic peptide
  Seed: PRMCSLMQGSTLPRR
PRMYSLVQSSTVPRR

SEQ ID NO: 113995 - protein, 15 aa, Artificial Sequence
  Description of Artificial Sequence: Synthetic peptide
  Seed: PRMCSLMQGSTLPRR
PRMYSLVQTSTAPRR

SEQ ID NO: 113996 - protein, 15 aa, Artificial Sequence
  Description of Artificial Sequence: Synthetic peptide
  Seed: PRMCSLMQGSTLPRR
PRMYSLVQTSTGPRR

SEQ ID NO: 113997 - protein, 15 aa, Artificial Sequence
  Description of Artificial Sequence: Synthetic peptide
  Seed: PRMCSLMQGSTLPRR
PRMYSLVQTSTHPRR

SEQ ID NO: 113998 - protein, 15 aa, Artificial Sequence
  Description of Artificial Sequence: Synthetic peptide
  Seed: PRMCSLMQGSTLPRR
PRMYSLVQTSTIPRR

SEQ ID NO: 113999 - protein, 15 aa, Artificial Sequence
  Description of Artificial Sequence: Synthetic peptide
  Seed: PRMCSLMQGSTLPRR
PRMYSLVQTSTLPRR

SEQ ID NO: 114000 - protein, 15 aa, Artificial Sequence
  Description of Artificial Sequence: Synthetic peptide
  Seed: PRMCSLMQGSTLPRR
PRMYSLVQTSTMPRR

SEQ ID NO: 114001 - protein, 15 aa, Artificial Sequence
  Description of Artificial Sequence: Synthetic peptide
  Seed: PRMCSLMQGSTLPRR
PRMYSLVQTSTNPRR

SEQ ID NO: 114002 - protein, 15 aa, Artificial Sequence
  Description of Artificial Sequence: Synthetic peptide
  Seed: PRMCSLMQGSTLPRR
PRMYSLVQTSTSPRR

SEQ ID NO: 114003 - protein, 15 aa, Artificial Sequence
  Description of Artificial Sequence: Synthetic peptide
  Seed: PRMCSLMQGSTLPRR
PRMYSLVQTSTTPRR

SEQ ID NO: 114004 - protein, 15 aa, Artificial Sequence
  Description of Artificial Sequence: Synthetic peptide
  Seed: PRMCSLMQGSTLPRR
PRMYSLVQTSTVPRR

SEQ ID NO: 114005 - protein, 15 aa, Artificial Sequence
  Description of Artificial Sequence: Synthetic peptide
  Seed: PRMCSLMQGSTLPRR
PRMYSLVQVSTAPRR

SEQ ID NO: 114006 - protein, 15 aa, Artificial Sequence
  Description of Artificial Sequence: Synthetic peptide
  Seed: PRMCSLMQGSTLPRR
PRMYSLVQVSTGPRR

SEQ ID NO: 114007 - protein, 15 aa, Artificial Sequence
  Description of Artificial Sequence: Synthetic peptide
  Seed: PRMCSLMQGSTLPRR
PRMYSLVQVSTHPRR

SEQ ID NO: 114008 - protein, 15 aa, Artificial Sequence
  Description of Artificial Sequence: Synthetic peptide
  Seed: PRMCSLMQGSTLPRR
PRMYSLVQVSTIPRR

SEQ ID NO: 114009 - protein, 15 aa, Artificial Sequence
  Description of Artificial Sequence: Synthetic peptide
  Seed: PRMCSLMQGSTLPRR
PRMYSLVQVSTLPRR

SEQ ID NO: 114010 - protein, 15 aa, Artificial Sequence
  Description of Artificial Sequence: Synthetic peptide
  Seed: PRMCSLMQGSTLPRR
PRMYSLVQVSTMPRR

SEQ ID NO: 114011 - protein, 15 aa, Artificial Sequence
  Description of Artificial Sequence: Synthetic peptide
  Seed: PRMCSLMQGSTLPRR
PRMYSLVQVSTNPRR

SEQ ID NO: 114012 - protein, 15 aa, Artificial Sequence
  Description of Artificial Sequence: Synthetic peptide
  Seed: PRMCSLMQGSTLPRR
PRMYSLVQVSTQPRR

SEQ ID NO: 114013 - protein, 15 aa, Artificial Sequence
  Description of Artificial Sequence: Synthetic peptide
  Seed: PRMCSLMQGSTLPRR
PRMYSLVQVSTSPRR

SEQ ID NO: 114014 - protein, 15 aa, Artificial Sequence
  Description of Artificial Sequence: Synthetic peptide
  Seed: PRMCSLMQGSTLPRR
PRMYSLVQVSTTPRR

SEQ ID NO: 114015 - protein, 15 aa, Artificial Sequence
  Description of Artificial Sequence: Synthetic peptide
  Seed: PRMCSLMQGSTLPRR
PRMYSLVQVSTVPRR

SEQ ID NO: 114016 - protein, 15 aa, Artificial Sequence
  Description of Artificial Sequence: Synthetic peptide
  Seed: PRMCSLMQGSTLPRR
PRMYSLWQASTAPRR

SEQ ID NO: 114017 - protein, 15 aa, Artificial Sequence
  Description of Artificial Sequence: Synthetic peptide
  Seed: PRMCSLMQGSTLPRR
PRMYSLWQASTIPRR

SEQ ID NO: 114018 - protein, 15 aa, Artificial Sequence
  Description of Artificial Sequence: Synthetic peptide
  Seed: PRMCSLMQGSTLPRR
PRMYSLWQASTLPRR

SEQ ID NO: 114019 - protein, 15 aa, Artificial Sequence
  Description of Artificial Sequence: Synthetic peptide
  Seed: PRMCSLMQGSTLPRR
PRMYSLWQASTMPRR

SEQ ID NO: 114020 - protein, 15 aa, Artificial Sequence
  Description of Artificial Sequence: Synthetic peptide
  Seed: PRMCSLMQGSTLPRR
PRMYSLWQASTVPRR

SEQ ID NO: 114021 - protein, 15 aa, Artificial Sequence
  Description of Artificial Sequence: Synthetic peptide
  Seed: PRMCSLMQGSTLPRR
PRMYSLWQGSTLPRR

SEQ ID NO: 114022 - protein, 15 aa, Artificial Sequence
  Description of Artificial Sequence: Synthetic peptide
  Seed: PRMCSLMQGSTLPRR
PRMYSLWQGSTVPRR

SEQ ID NO: 114023 - protein, 15 aa, Artificial Sequence
  Description of Artificial Sequence: Synthetic peptide
  Seed: PRMCSLMQGSTLPRR
PRMYSLWQSSTIPRR

SEQ ID NO: 114024 - protein, 15 aa, Artificial Sequence
  Description of Artificial Sequence: Synthetic peptide
  Seed: PRMCSLMQGSTLPRR
PRMYSLWQSSTLPRR

SEQ ID NO: 114025 - protein, 15 aa, Artificial Sequence
  Description of Artificial Sequence: Synthetic peptide
  Seed: PRMCSLMQGSTLPRR
PRMYSLWQSSTVPRR

SEQ ID NO: 114026 - protein, 15 aa, Artificial Sequence
  Description of Artificial Sequence: Synthetic peptide
  Seed: PRMCSLMQGSTLPRR
PRMYSLYQASTAPRR

SEQ ID NO: 114027 - protein, 15 aa, Artificial Sequence
  Description of Artificial Sequence: Synthetic peptide
  Seed: PRMCSLMQGSTLPRR
PRMYSLYQASTLPRR

SEQ ID NO: 114028 - protein, 15 aa, Artificial Sequence
  Description of Artificial Sequence: Synthetic peptide
  Seed: PRMCSLMQGSTLPRR
PRMYSLYQASTVPRR

SEQ ID NO: 114029 - protein, 15 aa, Artificial Sequence
  Description of Artificial Sequence: Synthetic peptide
  Seed: PRMCSLMQGSTLPRR
PRMCSFMQISKLPAR

SEQ ID NO: 114030 - protein, 15 aa, Artificial Sequence
  Description of Artificial Sequence: Synthetic peptide
  Seed: PRMCSLMQGSTLPRR
PRMCSFMQISKLPGR

SEQ ID NO: 114031 - protein, 15 aa, Artificial Sequence
  Description of Artificial Sequence: Synthetic peptide
  Seed: PRMCSLMQGSTLPRR
PRMCSFMQISKLPRR

SEQ ID NO: 114032 - protein, 15 aa, Artificial Sequence
  Description of Artificial Sequence: Synthetic peptide
  Seed: PRMCSLMQGSTLPRR
PRMCSFMQISKLPSR

SEQ ID NO: 114033 - protein, 15 aa, Artificial Sequence
  Description of Artificial Sequence: Synthetic peptide
  Seed: PRMCSLMQGSTLPRR
PRMCSFMQISRLPAR

SEQ ID NO: 114034 - protein, 15 aa, Artificial Sequence
  Description of Artificial Sequence: Synthetic peptide
  Seed: PRMCSLMQGSTLPRR
PRMCSFMQISRLPGR

SEQ ID NO: 114035 - protein, 15 aa, Artificial Sequence
  Description of Artificial Sequence: Synthetic peptide
  Seed: PRMCSLMQGSTLPRR
PRMCSFMQISRLPHR

SEQ ID NO: 114036 - protein, 15 aa, Artificial Sequence
  Description of Artificial Sequence: Synthetic peptide
  Seed: PRMCSLMQGSTLPRR
PRMCSFMQISRLPKR

SEQ ID NO: 114037 - protein, 15 aa, Artificial Sequence
  Description of Artificial Sequence: Synthetic peptide
  Seed: PRMCSLMQGSTLPRR
PRMCSFMQISRLPQR

SEQ ID NO: 114038 - protein, 15 aa, Artificial Sequence
  Description of Artificial Sequence: Synthetic peptide
  Seed: PRMCSLMQGSTLPRR
PRMCSFMQISRLPRR

SEQ ID NO: 114039 - protein, 15 aa, Artificial Sequence
  Description of Artificial Sequence: Synthetic peptide
  Seed: PRMCSLMQGSTLPRR
PRMCSFMQISRLPSR

SEQ ID NO: 114040 - protein, 15 aa, Artificial Sequence
  Description of Artificial Sequence: Synthetic peptide
  Seed: PRMCSLMQGSTLPRR
PRMCSFMQISRLPTR

SEQ ID NO: 114041 - protein, 15 aa, Artificial Sequence
  Description of Artificial Sequence: Synthetic peptide
  Seed: PRMCSLMQGSTLPRR
PRMCSFMQLSKLPAR

SEQ ID NO: 114042 - protein, 15 aa, Artificial Sequence
  Description of Artificial Sequence: Synthetic peptide
  Seed: PRMCSLMQGSTLPRR
PRMCSFMQLSKLPGR

SEQ ID NO: 114043 - protein, 15 aa, Artificial Sequence
  Description of Artificial Sequence: Synthetic peptide
  Seed: PRMCSLMQGSTLPRR
PRMCSFMQLSKLPSR

SEQ ID NO: 114044 - protein, 15 aa, Artificial Sequence
  Description of Artificial Sequence: Synthetic peptide
  Seed: PRMCSLMQGSTLPRR
PRMCSFMQLSRLPAR

SEQ ID NO: 114045 - protein, 15 aa, Artificial Sequence
  Description of Artificial Sequence: Synthetic peptide
  Seed: PRMCSLMQGSTLPRR
PRMCSFMQLSRLPGR

SEQ ID NO: 114046 - protein, 15 aa, Artificial Sequence
  Description of Artificial Sequence: Synthetic peptide
  Seed: PRMCSLMQGSTLPRR
PRMCSFMQLSRLPHR

SEQ ID NO: 114047 - protein, 15 aa, Artificial Sequence
  Description of Artificial Sequence: Synthetic peptide
  Seed: PRMCSLMQGSTLPRR
PRMCSFMQLSRLPQR

SEQ ID NO: 114048 - protein, 15 aa, Artificial Sequence
  Description of Artificial Sequence: Synthetic peptide
  Seed: PRMCSLMQGSTLPRR
PRMCSFMQLSRLPRR

SEQ ID NO: 114049 - protein, 15 aa, Artificial Sequence
  Description of Artificial Sequence: Synthetic peptide
  Seed: PRMCSLMQGSTLPRR
PRMCSFMQLSRLPSR

SEQ ID NO: 114050 - protein, 15 aa, Artificial Sequence
  Description of Artificial Sequence: Synthetic peptide
  Seed: PRMCSLMQGSTLPRR
PRMCSFMQLSRLPTR

SEQ ID NO: 114051 - protein, 15 aa, Artificial Sequence
  Description of Artificial Sequence: Synthetic peptide
  Seed: PRMCSLMQGSTLPRR
PRMCSFMQMSKLPAR

SEQ ID NO: 114052 - protein, 15 aa, Artificial Sequence
  Description of Artificial Sequence: Synthetic peptide
  Seed: PRMCSLMQGSTLPRR
PRMCSFMQMSKLPGR

SEQ ID NO: 114053 - protein, 15 aa, Artificial Sequence
  Description of Artificial Sequence: Synthetic peptide
  Seed: PRMCSLMQGSTLPRR
PRMCSFMQMSKLPQR

SEQ ID NO: 114054 - protein, 15 aa, Artificial Sequence
  Description of Artificial Sequence: Synthetic peptide
  Seed: PRMCSLMQGSTLPRR
PRMCSFMQMSKLPRR

SEQ ID NO: 114055 - protein, 15 aa, Artificial Sequence
  Description of Artificial Sequence: Synthetic peptide
  Seed: PRMCSLMQGSTLPRR
PRMCSFMQMSKLPSR

SEQ ID NO: 114056 - protein, 15 aa, Artificial Sequence
  Description of Artificial Sequence: Synthetic peptide
  Seed: PRMCSLMQGSTLPRR
PRMCSFMQMSKLPTR

SEQ ID NO: 114057 - protein, 15 aa, Artificial Sequence
  Description of Artificial Sequence: Synthetic peptide
  Seed: PRMCSLMQGSTLPRR
PRMCSFMQMSRLPAR

SEQ ID NO: 114058 - protein, 15 aa, Artificial Sequence
  Description of Artificial Sequence: Synthetic peptide
  Seed: PRMCSLMQGSTLPRR
PRMCSFMQMSRLPGR

SEQ ID NO: 114059 - protein, 15 aa, Artificial Sequence
  Description of Artificial Sequence: Synthetic peptide
  Seed: PRMCSLMQGSTLPRR
PRMCSFMQMSRLPHR

SEQ ID NO: 114060 - protein, 15 aa, Artificial Sequence
  Description of Artificial Sequence: Synthetic peptide
  Seed: PRMCSLMQGSTLPRR
PRMCSFMQMSRLPKR

SEQ ID NO: 114061 - protein, 15 aa, Artificial Sequence
  Description of Artificial Sequence: Synthetic peptide
  Seed: PRMCSLMQGSTLPRR
PRMCSFMQMSRLPMR

SEQ ID NO: 114062 - protein, 15 aa, Artificial Sequence
  Description of Artificial Sequence: Synthetic peptide
  Seed: PRMCSLMQGSTLPRR
PRMCSFMQMSRLPQR

SEQ ID NO: 114063 - protein, 15 aa, Artificial Sequence
  Description of Artificial Sequence: Synthetic peptide
  Seed: PRMCSLMQGSTLPRR
PRMCSFMQMSRLPRR

SEQ ID NO: 114064 - protein, 15 aa, Artificial Sequence
  Description of Artificial Sequence: Synthetic peptide
  Seed: PRMCSLMQGSTLPRR
PRMCSFMQMSRLPSR

SEQ ID NO: 114065 - protein, 15 aa, Artificial Sequence
  Description of Artificial Sequence: Synthetic peptide
  Seed: PRMCSLMQGSTLPRR
PRMCSFMQMSRLPTR

SEQ ID NO: 114066 - protein, 15 aa, Artificial Sequence
  Description of Artificial Sequence: Synthetic peptide
  Seed: PRMCSLMQGSTLPRR
PRMCSFMQMSRLPVR

SEQ ID NO: 114067 - protein, 15 aa, Artificial Sequence
  Description of Artificial Sequence: Synthetic peptide
  Seed: PRMCSLMQGSTLPRR
PRMCSFMQMSRLPYR

SEQ ID NO: 114068 - protein, 15 aa, Artificial Sequence
  Description of Artificial Sequence: Synthetic peptide
  Seed: PRMCSLMQGSTLPRR
PRMCSFMQRSRLPFR

SEQ ID NO: 114069 - protein, 15 aa, Artificial Sequence
  Description of Artificial Sequence: Synthetic peptide
  Seed: PRMCSLMQGSTLPRR
PRMCSFMQVSKLPSR

SEQ ID NO: 114070 - protein, 15 aa, Artificial Sequence
  Description of Artificial Sequence: Synthetic peptide
  Seed: PRMCSLMQGSTLPRR
PRMCSFMQVSRLPAR

SEQ ID NO: 114071 - protein, 15 aa, Artificial Sequence
  Description of Artificial Sequence: Synthetic peptide
  Seed: PRMCSLMQGSTLPRR
PRMCSFMQVSRLPGR

SEQ ID NO: 114072 - protein, 15 aa, Artificial Sequence
  Description of Artificial Sequence: Synthetic peptide
  Seed: PRMCSLMQGSTLPRR
PRMCSFMQVSRLPQR

SEQ ID NO: 114073 - protein, 15 aa, Artificial Sequence
  Description of Artificial Sequence: Synthetic peptide
  Seed: PRMCSLMQGSTLPRR
PRMCSFMQVSRLPRR

SEQ ID NO: 114074 - protein, 15 aa, Artificial Sequence
  Description of Artificial Sequence: Synthetic peptide
  Seed: PRMCSLMQGSTLPRR
PRMCSFMQVSRLPSR

SEQ ID NO: 114075 - protein, 15 aa, Artificial Sequence
  Description of Artificial Sequence: Synthetic peptide
  Seed: PRMCSLMQGSTLPRR
PRMCSIMQASKLPAR

SEQ ID NO: 114076 - protein, 15 aa, Artificial Sequence
  Description of Artificial Sequence: Synthetic peptide
  Seed: PRMCSLMQGSTLPRR
PRMCSIMQASKLPSR

SEQ ID NO: 114077 - protein, 15 aa, Artificial Sequence
  Description of Artificial Sequence: Synthetic peptide
  Seed: PRMCSLMQGSTLPRR
PRMCSIMQASRLPAR

SEQ ID NO: 114078 - protein, 15 aa, Artificial Sequence
  Description of Artificial Sequence: Synthetic peptide
  Seed: PRMCSLMQGSTLPRR
PRMCSIMQASRLPFR

SEQ ID NO: 114079 - protein, 15 aa, Artificial Sequence
  Description of Artificial Sequence: Synthetic peptide
  Seed: PRMCSLMQGSTLPRR
PRMCSIMQASRLPGR

SEQ ID NO: 114080 - protein, 15 aa, Artificial Sequence
  Description of Artificial Sequence: Synthetic peptide
  Seed: PRMCSLMQGSTLPRR
PRMCSIMQASRLPHR

SEQ ID NO: 114081 - protein, 15 aa, Artificial Sequence
  Description of Artificial Sequence: Synthetic peptide
  Seed: PRMCSLMQGSTLPRR
PRMCSIMQASRLPLR

SEQ ID NO: 114082 - protein, 15 aa, Artificial Sequence
  Description of Artificial Sequence: Synthetic peptide
  Seed: PRMCSLMQGSTLPRR
PRMCSIMQASRLPQR

SEQ ID NO: 114083 - protein, 15 aa, Artificial Sequence
  Description of Artificial Sequence: Synthetic peptide
  Seed: PRMCSLMQGSTLPRR
PRMCSIMQASRLPRR

SEQ ID NO: 114084 - protein, 15 aa, Artificial Sequence
  Description of Artificial Sequence: Synthetic peptide
  Seed: PRMCSLMQGSTLPRR
PRMCSIMQASRLPSR

SEQ ID NO: 114085 - protein, 15 aa, Artificial Sequence
  Description of Artificial Sequence: Synthetic peptide
  Seed: PRMCSLMQGSTLPRR
PRMCSIMQASRLPYR

SEQ ID NO: 114086 - protein, 15 aa, Artificial Sequence
  Description of Artificial Sequence: Synthetic peptide
  Seed: PRMCSLMQGSTLPRR
PRMCSIMQFSKLPAR

SEQ ID NO: 114087 - protein, 15 aa, Artificial Sequence
  Description of Artificial Sequence: Synthetic peptide
  Seed: PRMCSLMQGSTLPRR
PRMCSIMQFSKLPFR

SEQ ID NO: 114088 - protein, 15 aa, Artificial Sequence
  Description of Artificial Sequence: Synthetic peptide
  Seed: PRMCSLMQGSTLPRR
PRMCSIMQFSKLPLR

SEQ ID NO: 114089 - protein, 15 aa, Artificial Sequence
  Description of Artificial Sequence: Synthetic peptide
  Seed: PRMCSLMQGSTLPRR
PRMCSIMQFSKLPMR

SEQ ID NO: 114090 - protein, 15 aa, Artificial Sequence
  Description of Artificial Sequence: Synthetic peptide
  Seed: PRMCSLMQGSTLPRR
PRMCSIMQFSKLPSR

SEQ ID NO: 114091 - protein, 15 aa, Artificial Sequence
  Description of Artificial Sequence: Synthetic peptide
  Seed: PRMCSLMQGSTLPRR
PRMCSIMQFSKLPYR

SEQ ID NO: 114092 - protein, 15 aa, Artificial Sequence
  Description of Artificial Sequence: Synthetic peptide
  Seed: PRMCSLMQGSTLPRR
PRMCSIMQFSRLPAR

SEQ ID NO: 114093 - protein, 15 aa, Artificial Sequence
  Description of Artificial Sequence: Synthetic peptide
  Seed: PRMCSLMQGSTLPRR
PRMCSIMQFSRLPFR

SEQ ID NO: 114094 - protein, 15 aa, Artificial Sequence
  Description of Artificial Sequence: Synthetic peptide
  Seed: PRMCSLMQGSTLPRR
PRMCSIMQFSRLPHR

SEQ ID NO: 114095 - protein, 15 aa, Artificial Sequence
  Description of Artificial Sequence: Synthetic peptide
  Seed: PRMCSLMQGSTLPRR
PRMCSIMQFSRLPIR

SEQ ID NO: 114096 - protein, 15 aa, Artificial Sequence
  Description of Artificial Sequence: Synthetic peptide
  Seed: PRMCSLMQGSTLPRR
PRMCSIMQFSRLPKR

SEQ ID NO: 114097 - protein, 15 aa, Artificial Sequence
  Description of Artificial Sequence: Synthetic peptide
  Seed: PRMCSLMQGSTLPRR
PRMCSIMQFSRLPLR

SEQ ID NO: 114098 - protein, 15 aa, Artificial Sequence
  Description of Artificial Sequence: Synthetic peptide
  Seed: PRMCSLMQGSTLPRR
PRMCSIMQFSRLPMR

SEQ ID NO: 114099 - protein, 15 aa, Artificial Sequence
  Description of Artificial Sequence: Synthetic peptide
  Seed: PRMCSLMQGSTLPRR
PRMCSIMQFSRLPRR

SEQ ID NO: 114100 - protein, 15 aa, Artificial Sequence
  Description of Artificial Sequence: Synthetic peptide
  Seed: PRMCSLMQGSTLPRR
PRMCSIMQFSRLPSR

SEQ ID NO: 114101 - protein, 15 aa, Artificial Sequence
  Description of Artificial Sequence: Synthetic peptide
  Seed: PRMCSLMQGSTLPRR
PRMCSIMQFSRLPVR

SEQ ID NO: 114102 - protein, 15 aa, Artificial Sequence
  Description of Artificial Sequence: Synthetic peptide
  Seed: PRMCSLMQGSTLPRR
PRMCSIMQFSRLPYR

SEQ ID NO: 114103 - protein, 15 aa, Artificial Sequence
  Description of Artificial Sequence: Synthetic peptide
  Seed: PRMCSLMQGSTLPRR
PRMCSIMQFSTLPAR

SEQ ID NO: 114104 - protein, 15 aa, Artificial Sequence
  Description of Artificial Sequence: Synthetic peptide
  Seed: PRMCSLMQGSTLPRR
PRMCSIMQHSALPRR

SEQ ID NO: 114105 - protein, 15 aa, Artificial Sequence
  Description of Artificial Sequence: Synthetic peptide
  Seed: PRMCSLMQGSTLPRR
PRMCSIMQHSRLPFR

SEQ ID NO: 114106 - protein, 15 aa, Artificial Sequence
  Description of Artificial Sequence: Synthetic peptide
  Seed: PRMCSLMQGSTLPRR
PRMCSIMQHSRLPLR

SEQ ID NO: 114107 - protein, 15 aa, Artificial Sequence
  Description of Artificial Sequence: Synthetic peptide
  Seed: PRMCSLMQGSTLPRR
PRMCSIMQHSRLPRR

SEQ ID NO: 114108 - protein, 15 aa, Artificial Sequence
  Description of Artificial Sequence: Synthetic peptide
  Seed: PRMCSLMQGSTLPRR
PRMCSIMQHSRLPYR

SEQ ID NO: 114109 - protein, 15 aa, Artificial Sequence
  Description of Artificial Sequence: Synthetic peptide
  Seed: PRMCSLMQGSTLPRR
PRMCSIMQISKLPAR

SEQ ID NO: 114110 - protein, 15 aa, Artificial Sequence
  Description of Artificial Sequence: Synthetic peptide
  Seed: PRMCSLMQGSTLPRR
PRMCSIMQISKLPFR

SEQ ID NO: 114111 - protein, 15 aa, Artificial Sequence
  Description of Artificial Sequence: Synthetic peptide
  Seed: PRMCSLMQGSTLPRR
PRMCSIMQISKLPGR

SEQ ID NO: 114112 - protein, 15 aa, Artificial Sequence
  Description of Artificial Sequence: Synthetic peptide
  Seed: PRMCSLMQGSTLPRR
PRMCSIMQISKLPHR

SEQ ID NO: 114113 - protein, 15 aa, Artificial Sequence
  Description of Artificial Sequence: Synthetic peptide
  Seed: PRMCSLMQGSTLPRR
PRMCSIMQISKLPIR

SEQ ID NO: 114114 - protein, 15 aa, Artificial Sequence
  Description of Artificial Sequence: Synthetic peptide
  Seed: PRMCSLMQGSTLPRR
PRMCSIMQISKLPKR

SEQ ID NO: 114115 - protein, 15 aa, Artificial Sequence
  Description of Artificial Sequence: Synthetic peptide
  Seed: PRMCSLMQGSTLPRR
PRMCSIMQISKLPLR

SEQ ID NO: 114116 - protein, 15 aa, Artificial Sequence
  Description of Artificial Sequence: Synthetic peptide
  Seed: PRMCSLMQGSTLPRR
PRMCSIMQISKLPMR

SEQ ID NO: 114117 - protein, 15 aa, Artificial Sequence
  Description of Artificial Sequence: Synthetic peptide
  Seed: PRMCSLMQGSTLPRR
PRMCSIMQISKLPQR

SEQ ID NO: 114118 - protein, 15 aa, Artificial Sequence
  Description of Artificial Sequence: Synthetic peptide
  Seed: PRMCSLMQGSTLPRR
PRMCSIMQISKLPRR

SEQ ID NO: 114119 - protein, 15 aa, Artificial Sequence
  Description of Artificial Sequence: Synthetic peptide
  Seed: PRMCSLMQGSTLPRR
PRMCSIMQISKLPSR

SEQ ID NO: 114120 - protein, 15 aa, Artificial Sequence
  Description of Artificial Sequence: Synthetic peptide
  Seed: PRMCSLMQGSTLPRR
PRMCSIMQISKLPTR

SEQ ID NO: 114121 - protein, 15 aa, Artificial Sequence
  Description of Artificial Sequence: Synthetic peptide
  Seed: PRMCSLMQGSTLPRR
PRMCSIMQISKLPVR

SEQ ID NO: 114122 - protein, 15 aa, Artificial Sequence
  Description of Artificial Sequence: Synthetic peptide
  Seed: PRMCSLMQGSTLPRR
PRMCSIMQISKLPYR

SEQ ID NO: 114123 - protein, 15 aa, Artificial Sequence
  Description of Artificial Sequence: Synthetic peptide
  Seed: PRMCSLMQGSTLPRR
PRMCSIMQISNLPAR

SEQ ID NO: 114124 - protein, 15 aa, Artificial Sequence
  Description of Artificial Sequence: Synthetic peptide
  Seed: PRMCSLMQGSTLPRR
PRMCSIMQISNLPGR

SEQ ID NO: 114125 - protein, 15 aa, Artificial Sequence
  Description of Artificial Sequence: Synthetic peptide
  Seed: PRMCSLMQGSTLPRR
PRMCSIMQISNLPSR

SEQ ID NO: 114126 - protein, 15 aa, Artificial Sequence
  Description of Artificial Sequence: Synthetic peptide
  Seed: PRMCSLMQGSTLPRR
PRMCSIMQISRLPAR

SEQ ID NO: 114127 - protein, 15 aa, Artificial Sequence
  Description of Artificial Sequence: Synthetic peptide
  Seed: PRMCSLMQGSTLPRR
PRMCSIMQISRLPFR

SEQ ID NO: 114128 - protein, 15 aa, Artificial Sequence
  Description of Artificial Sequence: Synthetic peptide
  Seed: PRMCSLMQGSTLPRR
PRMCSIMQISRLPGR

SEQ ID NO: 114129 - protein, 15 aa, Artificial Sequence
  Description of Artificial Sequence: Synthetic peptide
  Seed: PRMCSLMQGSTLPRR
PRMCSIMQISRLPHR

SEQ ID NO: 114130 - protein, 15 aa, Artificial Sequence
  Description of Artificial Sequence: Synthetic peptide
  Seed: PRMCSLMQGSTLPRR
PRMCSIMQISRLPIR

SEQ ID NO: 114131 - protein, 15 aa, Artificial Sequence
  Description of Artificial Sequence: Synthetic peptide
  Seed: PRMCSLMQGSTLPRR
PRMCSIMQISRLPKR

SEQ ID NO: 114132 - protein, 15 aa, Artificial Sequence
  Description of Artificial Sequence: Synthetic peptide
  Seed: PRMCSLMQGSTLPRR
PRMCSIMQISRLPLR

SEQ ID NO: 114133 - protein, 15 aa, Artificial Sequence
  Description of Artificial Sequence: Synthetic peptide
  Seed: PRMCSLMQGSTLPRR
PRMCSIMQISRLPMR

SEQ ID NO: 114134 - protein, 15 aa, Artificial Sequence
  Description of Artificial Sequence: Synthetic peptide
  Seed: PRMCSLMQGSTLPRR
PRMCSIMQISRLPNR

SEQ ID NO: 114135 - protein, 15 aa, Artificial Sequence
  Description of Artificial Sequence: Synthetic peptide
  Seed: PRMCSLMQGSTLPRR
PRMCSIMQISRLPQR

SEQ ID NO: 114136 - protein, 15 aa, Artificial Sequence
  Description of Artificial Sequence: Synthetic peptide
  Seed: PRMCSLMQGSTLPRR
PRMCSIMQISRLPRR

SEQ ID NO: 114137 - protein, 15 aa, Artificial Sequence
  Description of Artificial Sequence: Synthetic peptide
  Seed: PRMCSLMQGSTLPRR
PRMCSIMQISRLPSR

SEQ ID NO: 114138 - protein, 15 aa, Artificial Sequence
  Description of Artificial Sequence: Synthetic peptide
  Seed: PRMCSLMQGSTLPRR
PRMCSIMQISRLPTR

SEQ ID NO: 114139 - protein, 15 aa, Artificial Sequence
  Description of Artificial Sequence: Synthetic peptide
  Seed: PRMCSLMQGSTLPRR
PRMCSIMQISRLPVR

SEQ ID NO: 114140 - protein, 15 aa, Artificial Sequence
  Description of Artificial Sequence: Synthetic peptide
  Seed: PRMCSLMQGSTLPRR
PRMCSIMQISRLPYR

SEQ ID NO: 114141 - protein, 15 aa, Artificial Sequence
  Description of Artificial Sequence: Synthetic peptide
  Seed: PRMCSLMQGSTLPRR
PRMCSIMQISSLPAR

SEQ ID NO: 114142 - protein, 15 aa, Artificial Sequence
  Description of Artificial Sequence: Synthetic peptide
  Seed: PRMCSLMQGSTLPRR
PRMCSIMQISSLPSR

SEQ ID NO: 114143 - protein, 15 aa, Artificial Sequence
  Description of Artificial Sequence: Synthetic peptide
  Seed: PRMCSLMQGSTLPRR
PRMCSIMQISTLPAR

SEQ ID NO: 114144 - protein, 15 aa, Artificial Sequence
  Description of Artificial Sequence: Synthetic peptide
  Seed: PRMCSLMQGSTLPRR
PRMCSIMQISTLPGR

SEQ ID NO: 114145 - protein, 15 aa, Artificial Sequence
  Description of Artificial Sequence: Synthetic peptide
  Seed: PRMCSLMQGSTLPRR
PRMCSIMQISTLPSR

SEQ ID NO: 114146 - protein, 15 aa, Artificial Sequence
  Description of Artificial Sequence: Synthetic peptide
  Seed: PRMCSLMQGSTLPRR
PRMCSIMQKSRLPFR

SEQ ID NO: 114147 - protein, 15 aa, Artificial Sequence
  Description of Artificial Sequence: Synthetic peptide
  Seed: PRMCSLMQGSTLPRR
PRMCSIMQKSRLPLR

SEQ ID NO: 114148 - protein, 15 aa, Artificial Sequence
  Description of Artificial Sequence: Synthetic peptide
  Seed: PRMCSLMQGSTLPRR
PRMCSIMQLSKLPAR

SEQ ID NO: 114149 - protein, 15 aa, Artificial Sequence
  Description of Artificial Sequence: Synthetic peptide
  Seed: PRMCSLMQGSTLPRR
PRMCSIMQLSKLPGR

SEQ ID NO: 114150 - protein, 15 aa, Artificial Sequence
  Description of Artificial Sequence: Synthetic peptide
  Seed: PRMCSLMQGSTLPRR
PRMCSIMQLSKLPHR

SEQ ID NO: 114151 - protein, 15 aa, Artificial Sequence
  Description of Artificial Sequence: Synthetic peptide
  Seed: PRMCSLMQGSTLPRR
PRMCSIMQLSKLPIR

SEQ ID NO: 114152 - protein, 15 aa, Artificial Sequence
  Description of Artificial Sequence: Synthetic peptide
  Seed: PRMCSLMQGSTLPRR
PRMCSIMQLSKLPKR

SEQ ID NO: 114153 - protein, 15 aa, Artificial Sequence
  Description of Artificial Sequence: Synthetic peptide
  Seed: PRMCSLMQGSTLPRR
PRMCSIMQLSKLPLR

SEQ ID NO: 114154 - protein, 15 aa, Artificial Sequence
  Description of Artificial Sequence: Synthetic peptide
  Seed: PRMCSLMQGSTLPRR
PRMCSIMQLSKLPMR

SEQ ID NO: 114155 - protein, 15 aa, Artificial Sequence
  Description of Artificial Sequence: Synthetic peptide
  Seed: PRMCSLMQGSTLPRR
PRMCSIMQLSKLPNR

SEQ ID NO: 114156 - protein, 15 aa, Artificial Sequence
  Description of Artificial Sequence: Synthetic peptide
  Seed: PRMCSLMQGSTLPRR
PRMCSIMQLSKLPQR

SEQ ID NO: 114157 - protein, 15 aa, Artificial Sequence
  Description of Artificial Sequence: Synthetic peptide
  Seed: PRMCSLMQGSTLPRR
PRMCSIMQLSKLPRR

SEQ ID NO: 114158 - protein, 15 aa, Artificial Sequence
  Description of Artificial Sequence: Synthetic peptide
  Seed: PRMCSLMQGSTLPRR
PRMCSIMQLSKLPSR

SEQ ID NO: 114159 - protein, 15 aa, Artificial Sequence
  Description of Artificial Sequence: Synthetic peptide
  Seed: PRMCSLMQGSTLPRR
PRMCSIMQLSKLPTR

SEQ ID NO: 114160 - protein, 15 aa, Artificial Sequence
  Description of Artificial Sequence: Synthetic peptide
  Seed: PRMCSLMQGSTLPRR
PRMCSIMQLSKLPVR

SEQ ID NO: 114161 - protein, 15 aa, Artificial Sequence
  Description of Artificial Sequence: Synthetic peptide
  Seed: PRMCSLMQGSTLPRR
PRMCSIMQLSNLPAR

SEQ ID NO: 114162 - protein, 15 aa, Artificial Sequence
  Description of Artificial Sequence: Synthetic peptide
  Seed: PRMCSLMQGSTLPRR
PRMCSIMQLSNLPGR

SEQ ID NO: 114163 - protein, 15 aa, Artificial Sequence
  Description of Artificial Sequence: Synthetic peptide
  Seed: PRMCSLMQGSTLPRR
PRMCSIMQLSNLPSR

SEQ ID NO: 114164 - protein, 15 aa, Artificial Sequence
  Description of Artificial Sequence: Synthetic peptide
  Seed: PRMCSLMQGSTLPRR
PRMCSIMQLSRLPAR

SEQ ID NO: 114165 - protein, 15 aa, Artificial Sequence
  Description of Artificial Sequence: Synthetic peptide
  Seed: PRMCSLMQGSTLPRR
PRMCSIMQLSRLPFR

SEQ ID NO: 114166 - protein, 15 aa, Artificial Sequence
  Description of Artificial Sequence: Synthetic peptide
  Seed: PRMCSLMQGSTLPRR
PRMCSIMQLSRLPGR

SEQ ID NO: 114167 - protein, 15 aa, Artificial Sequence
  Description of Artificial Sequence: Synthetic peptide
  Seed: PRMCSLMQGSTLPRR
PRMCSIMQLSRLPHR

SEQ ID NO: 114168 - protein, 15 aa, Artificial Sequence
  Description of Artificial Sequence: Synthetic peptide
  Seed: PRMCSLMQGSTLPRR
PRMCSIMQLSRLPIR

SEQ ID NO: 114169 - protein, 15 aa, Artificial Sequence
  Description of Artificial Sequence: Synthetic peptide
  Seed: PRMCSLMQGSTLPRR
PRMCSIMQLSRLPKR

SEQ ID NO: 114170 - protein, 15 aa, Artificial Sequence
  Description of Artificial Sequence: Synthetic peptide
  Seed: PRMCSLMQGSTLPRR
PRMCSIMQLSRLPLR

SEQ ID NO: 114171 - protein, 15 aa, Artificial Sequence
  Description of Artificial Sequence: Synthetic peptide
  Seed: PRMCSLMQGSTLPRR
PRMCSIMQLSRLPMR

SEQ ID NO: 114172 - protein, 15 aa, Artificial Sequence
  Description of Artificial Sequence: Synthetic peptide
  Seed: PRMCSLMQGSTLPRR
PRMCSIMQLSRLPNR

SEQ ID NO: 114173 - protein, 15 aa, Artificial Sequence
  Description of Artificial Sequence: Synthetic peptide
  Seed: PRMCSLMQGSTLPRR
PRMCSIMQLSRLPPR

SEQ ID NO: 114174 - protein, 15 aa, Artificial Sequence
  Description of Artificial Sequence: Synthetic peptide
  Seed: PRMCSLMQGSTLPRR
PRMCSIMQLSRLPQR

SEQ ID NO: 114175 - protein, 15 aa, Artificial Sequence
  Description of Artificial Sequence: Synthetic peptide
  Seed: PRMCSLMQGSTLPRR
PRMCSIMQLSRLPRR

SEQ ID NO: 114176 - protein, 15 aa, Artificial Sequence
  Description of Artificial Sequence: Synthetic peptide
  Seed: PRMCSLMQGSTLPRR
PRMCSIMQLSRLPSR

SEQ ID NO: 114177 - protein, 15 aa, Artificial Sequence
  Description of Artificial Sequence: Synthetic peptide
  Seed: PRMCSLMQGSTLPRR
PRMCSIMQLSRLPTR

SEQ ID NO: 114178 - protein, 15 aa, Artificial Sequence
  Description of Artificial Sequence: Synthetic peptide
  Seed: PRMCSLMQGSTLPRR
PRMCSIMQLSRLPVR

SEQ ID NO: 114179 - protein, 15 aa, Artificial Sequence
  Description of Artificial Sequence: Synthetic peptide
  Seed: PRMCSLMQGSTLPRR
PRMCSIMQLSRLPYR

SEQ ID NO: 114180 - protein, 15 aa, Artificial Sequence
  Description of Artificial Sequence: Synthetic peptide
  Seed: PRMCSLMQGSTLPRR
PRMCSIMQLSSLPAR

SEQ ID NO: 114181 - protein, 15 aa, Artificial Sequence
  Description of Artificial Sequence: Synthetic peptide
  Seed: PRMCSLMQGSTLPRR
PRMCSIMQLSSLPSR

SEQ ID NO: 114182 - protein, 15 aa, Artificial Sequence
  Description of Artificial Sequence: Synthetic peptide
  Seed: PRMCSLMQGSTLPRR
PRMCSIMQLSTLPAR

SEQ ID NO: 114183 - protein, 15 aa, Artificial Sequence
  Description of Artificial Sequence: Synthetic peptide
  Seed: PRMCSLMQGSTLPRR
PRMCSIMQLSTLPGR

SEQ ID NO: 114184 - protein, 15 aa, Artificial Sequence
  Description of Artificial Sequence: Synthetic peptide
  Seed: PRMCSLMQGSTLPRR
PRMCSIMQLSTLPSR

SEQ ID NO: 114185 - protein, 15 aa, Artificial Sequence
  Description of Artificial Sequence: Synthetic peptide
  Seed: PRMCSLMQGSTLPRR
PRMCSIMQMSKLPAR

SEQ ID NO: 114186 - protein, 15 aa, Artificial Sequence
  Description of Artificial Sequence: Synthetic peptide
  Seed: PRMCSLMQGSTLPRR
PRMCSIMQMSKLPFR

SEQ ID NO: 114187 - protein, 15 aa, Artificial Sequence
  Description of Artificial Sequence: Synthetic peptide
  Seed: PRMCSLMQGSTLPRR
PRMCSIMQMSKLPGR

SEQ ID NO: 114188 - protein, 15 aa, Artificial Sequence
  Description of Artificial Sequence: Synthetic peptide
  Seed: PRMCSLMQGSTLPRR
PRMCSIMQMSKLPHR

SEQ ID NO: 114189 - protein, 15 aa, Artificial Sequence
  Description of Artificial Sequence: Synthetic peptide
  Seed: PRMCSLMQGSTLPRR
PRMCSIMQMSKLPIR

SEQ ID NO: 114190 - protein, 15 aa, Artificial Sequence
  Description of Artificial Sequence: Synthetic peptide
  Seed: PRMCSLMQGSTLPRR
PRMCSIMQMSKLPKR

SEQ ID NO: 114191 - protein, 15 aa, Artificial Sequence
  Description of Artificial Sequence: Synthetic peptide
  Seed: PRMCSLMQGSTLPRR
PRMCSIMQMSKLPLR

SEQ ID NO: 114192 - protein, 15 aa, Artificial Sequence
  Description of Artificial Sequence: Synthetic peptide
  Seed: PRMCSLMQGSTLPRR
PRMCSIMQMSKLPMR

SEQ ID NO: 114193 - protein, 15 aa, Artificial Sequence
  Description of Artificial Sequence: Synthetic peptide
  Seed: PRMCSLMQGSTLPRR
PRMCSIMQMSKLPNR

SEQ ID NO: 114194 - protein, 15 aa, Artificial Sequence
  Description of Artificial Sequence: Synthetic peptide
  Seed: PRMCSLMQGSTLPRR
PRMCSIMQMSKLPQR

SEQ ID NO: 114195 - protein, 15 aa, Artificial Sequence
  Description of Artificial Sequence: Synthetic peptide
  Seed: PRMCSLMQGSTLPRR
PRMCSIMQMSKLPRR

SEQ ID NO: 114196 - protein, 15 aa, Artificial Sequence
  Description of Artificial Sequence: Synthetic peptide
  Seed: PRMCSLMQGSTLPRR
PRMCSIMQMSKLPSR

SEQ ID NO: 114197 - protein, 15 aa, Artificial Sequence
  Description of Artificial Sequence: Synthetic peptide
  Seed: PRMCSLMQGSTLPRR
PRMCSIMQMSKLPTR

SEQ ID NO: 114198 - protein, 15 aa, Artificial Sequence
  Description of Artificial Sequence: Synthetic peptide
  Seed: PRMCSLMQGSTLPRR
PRMCSIMQMSKLPVR

SEQ ID NO: 114199 - protein, 15 aa, Artificial Sequence
  Description of Artificial Sequence: Synthetic peptide
  Seed: PRMCSLMQGSTLPRR
PRMCSIMQMSKLPYR

SEQ ID NO: 114200 - protein, 15 aa, Artificial Sequence
  Description of Artificial Sequence: Synthetic peptide
  Seed: PRMCSLMQGSTLPRR
PRMCSIMQMSNLPAR

SEQ ID NO: 114201 - protein, 15 aa, Artificial Sequence
  Description of Artificial Sequence: Synthetic peptide
  Seed: PRMCSLMQGSTLPRR
PRMCSIMQMSNLPGR

SEQ ID NO: 114202 - protein, 15 aa, Artificial Sequence
  Description of Artificial Sequence: Synthetic peptide
  Seed: PRMCSLMQGSTLPRR
PRMCSIMQMSNLPQR

SEQ ID NO: 114203 - protein, 15 aa, Artificial Sequence
  Description of Artificial Sequence: Synthetic peptide
  Seed: PRMCSLMQGSTLPRR
PRMCSIMQMSNLPSR

SEQ ID NO: 114204 - protein, 15 aa, Artificial Sequence
  Description of Artificial Sequence: Synthetic peptide
  Seed: PRMCSLMQGSTLPRR
PRMCSIMQMSNLPTR

SEQ ID NO: 114205 - protein, 15 aa, Artificial Sequence
  Description of Artificial Sequence: Synthetic peptide
  Seed: PRMCSLMQGSTLPRR
PRMCSIMQMSRLPAR

SEQ ID NO: 114206 - protein, 15 aa, Artificial Sequence
  Description of Artificial Sequence: Synthetic peptide
  Seed: PRMCSLMQGSTLPRR
PRMCSIMQMSRLPFR

SEQ ID NO: 114207 - protein, 15 aa, Artificial Sequence
  Description of Artificial Sequence: Synthetic peptide
  Seed: PRMCSLMQGSTLPRR
PRMCSIMQMSRLPGR

SEQ ID NO: 114208 - protein, 15 aa, Artificial Sequence
  Description of Artificial Sequence: Synthetic peptide
  Seed: PRMCSLMQGSTLPRR
PRMCSIMQMSRLPHR

SEQ ID NO: 114209 - protein, 15 aa, Artificial Sequence
  Description of Artificial Sequence: Synthetic peptide
  Seed: PRMCSLMQGSTLPRR
PRMCSIMQMSRLPIR

SEQ ID NO: 114210 - protein, 15 aa, Artificial Sequence
  Description of Artificial Sequence: Synthetic peptide
  Seed: PRMCSLMQGSTLPRR
PRMCSIMQMSRLPKR

SEQ ID NO: 114211 - protein, 15 aa, Artificial Sequence
  Description of Artificial Sequence: Synthetic peptide
  Seed: PRMCSLMQGSTLPRR
PRMCSIMQMSRLPLR

SEQ ID NO: 114212 - protein, 15 aa, Artificial Sequence
  Description of Artificial Sequence: Synthetic peptide
  Seed: PRMCSLMQGSTLPRR
PRMCSIMQMSRLPMR

SEQ ID NO: 114213 - protein, 15 aa, Artificial Sequence
  Description of Artificial Sequence: Synthetic peptide
  Seed: PRMCSLMQGSTLPRR
PRMCSIMQMSRLPNR

SEQ ID NO: 114214 - protein, 15 aa, Artificial Sequence
  Description of Artificial Sequence: Synthetic peptide
  Seed: PRMCSLMQGSTLPRR
PRMCSIMQMSRLPPR

SEQ ID NO: 114215 - protein, 15 aa, Artificial Sequence
  Description of Artificial Sequence: Synthetic peptide
  Seed: PRMCSLMQGSTLPRR
PRMCSIMQMSRLPQR

SEQ ID NO: 114216 - protein, 15 aa, Artificial Sequence
  Description of Artificial Sequence: Synthetic peptide
  Seed: PRMCSLMQGSTLPRR
PRMCSIMQMSRLPRR

SEQ ID NO: 114217 - protein, 15 aa, Artificial Sequence
  Description of Artificial Sequence: Synthetic peptide
  Seed: PRMCSLMQGSTLPRR
PRMCSIMQMSRLPSR

SEQ ID NO: 114218 - protein, 15 aa, Artificial Sequence
  Description of Artificial Sequence: Synthetic peptide
  Seed: PRMCSLMQGSTLPRR
PRMCSIMQMSRLPTR

SEQ ID NO: 114219 - protein, 15 aa, Artificial Sequence
  Description of Artificial Sequence: Synthetic peptide
  Seed: PRMCSLMQGSTLPRR
PRMCSIMQMSRLPVR

SEQ ID NO: 114220 - protein, 15 aa, Artificial Sequence
  Description of Artificial Sequence: Synthetic peptide
  Seed: PRMCSLMQGSTLPRR
PRMCSIMQMSRLPYR

SEQ ID NO: 114221 - protein, 15 aa, Artificial Sequence
  Description of Artificial Sequence: Synthetic peptide
  Seed: PRMCSLMQGSTLPRR
PRMCSIMQMSSLPAR

SEQ ID NO: 114222 - protein, 15 aa, Artificial Sequence
  Description of Artificial Sequence: Synthetic peptide
  Seed: PRMCSLMQGSTLPRR
PRMCSIMQMSSLPGR

SEQ ID NO: 114223 - protein, 15 aa, Artificial Sequence
  Description of Artificial Sequence: Synthetic peptide
  Seed: PRMCSLMQGSTLPRR
PRMCSIMQMSSLPSR

SEQ ID NO: 114224 - protein, 15 aa, Artificial Sequence
  Description of Artificial Sequence: Synthetic peptide
  Seed: PRMCSLMQGSTLPRR
PRMCSIMQMSTLPAR

SEQ ID NO: 114225 - protein, 15 aa, Artificial Sequence
  Description of Artificial Sequence: Synthetic peptide
  Seed: PRMCSLMQGSTLPRR
PRMCSIMQMSTLPGR

SEQ ID NO: 114226 - protein, 15 aa, Artificial Sequence
  Description of Artificial Sequence: Synthetic peptide
  Seed: PRMCSLMQGSTLPRR
PRMCSIMQMSTLPHR

SEQ ID NO: 114227 - protein, 15 aa, Artificial Sequence
  Description of Artificial Sequence: Synthetic peptide
  Seed: PRMCSLMQGSTLPRR
PRMCSIMQMSTLPQR

SEQ ID NO: 114228 - protein, 15 aa, Artificial Sequence
  Description of Artificial Sequence: Synthetic peptide
  Seed: PRMCSLMQGSTLPRR
PRMCSIMQMSTLPSR

SEQ ID NO: 114229 - protein, 15 aa, Artificial Sequence
  Description of Artificial Sequence: Synthetic peptide
  Seed: PRMCSLMQGSTLPRR
PRMCSIMQMSTLPTR

SEQ ID NO: 114230 - protein, 15 aa, Artificial Sequence
  Description of Artificial Sequence: Synthetic peptide
  Seed: PRMCSLMQGSTLPRR
PRMCSIMQMSVLPAR

SEQ ID NO: 114231 - protein, 15 aa, Artificial Sequence
  Description of Artificial Sequence: Synthetic peptide
  Seed: PRMCSLMQGSTLPRR
PRMCSIMQMSVLPSR

SEQ ID NO: 114232 - protein, 15 aa, Artificial Sequence
  Description of Artificial Sequence: Synthetic peptide
  Seed: PRMCSLMQGSTLPRR
PRMCSIMQRSALPYR

SEQ ID NO: 114233 - protein, 15 aa, Artificial Sequence
  Description of Artificial Sequence: Synthetic peptide
  Seed: PRMCSLMQGSTLPRR
PRMCSIMQRSKLPFR

SEQ ID NO: 114234 - protein, 15 aa, Artificial Sequence
  Description of Artificial Sequence: Synthetic peptide
  Seed: PRMCSLMQGSTLPRR
PRMCSIMQRSKLPYR

SEQ ID NO: 114235 - protein, 15 aa, Artificial Sequence
  Description of Artificial Sequence: Synthetic peptide
  Seed: PRMCSLMQGSTLPRR
PRMCSIMQRSRLPAR

SEQ ID NO: 114236 - protein, 15 aa, Artificial Sequence
  Description of Artificial Sequence: Synthetic peptide
  Seed: PRMCSLMQGSTLPRR
PRMCSIMQRSRLPFR

SEQ ID NO: 114237 - protein, 15 aa, Artificial Sequence
  Description of Artificial Sequence: Synthetic peptide
  Seed: PRMCSLMQGSTLPRR
PRMCSIMQRSRLPIR

SEQ ID NO: 114238 - protein, 15 aa, Artificial Sequence
  Description of Artificial Sequence: Synthetic peptide
  Seed: PRMCSLMQGSTLPRR
PRMCSIMQRSRLPLR

SEQ ID NO: 114239 - protein, 15 aa, Artificial Sequence
  Description of Artificial Sequence: Synthetic peptide
  Seed: PRMCSLMQGSTLPRR
PRMCSIMQRSRLPMR

SEQ ID NO: 114240 - protein, 15 aa, Artificial Sequence
  Description of Artificial Sequence: Synthetic peptide
  Seed: PRMCSLMQGSTLPRR
PRMCSIMQRSRLPRR

SEQ ID NO: 114241 - protein, 15 aa, Artificial Sequence
  Description of Artificial Sequence: Synthetic peptide
  Seed: PRMCSLMQGSTLPRR
PRMCSIMQRSRLPSR

SEQ ID NO: 114242 - protein, 15 aa, Artificial Sequence
  Description of Artificial Sequence: Synthetic peptide
  Seed: PRMCSLMQGSTLPRR
PRMCSIMQRSRLPVR

SEQ ID NO: 114243 - protein, 15 aa, Artificial Sequence
  Description of Artificial Sequence: Synthetic peptide
  Seed: PRMCSLMQGSTLPRR
PRMCSIMQRSRLPYR

SEQ ID NO: 114244 - protein, 15 aa, Artificial Sequence
  Description of Artificial Sequence: Synthetic peptide
  Seed: PRMCSLMQGSTLPRR
PRMCSIMQSSRLPFR

SEQ ID NO: 114245 - protein, 15 aa, Artificial Sequence
  Description of Artificial Sequence: Synthetic peptide
  Seed: PRMCSLMQGSTLPRR
PRMCSIMQSSRLPYR

SEQ ID NO: 114246 - protein, 15 aa, Artificial Sequence
  Description of Artificial Sequence: Synthetic peptide
  Seed: PRMCSLMQGSTLPRR
PRMCSIMQTSRLPYR

SEQ ID NO: 114247 - protein, 15 aa, Artificial Sequence
  Description of Artificial Sequence: Synthetic peptide
  Seed: PRMCSLMQGSTLPRR
PRMCSIMQVSKLPAR

SEQ ID NO: 114248 - protein, 15 aa, Artificial Sequence
  Description of Artificial Sequence: Synthetic peptide
  Seed: PRMCSLMQGSTLPRR
PRMCSIMQVSKLPFR

SEQ ID NO: 114249 - protein, 15 aa, Artificial Sequence
  Description of Artificial Sequence: Synthetic peptide
  Seed: PRMCSLMQGSTLPRR
PRMCSIMQVSKLPGR

SEQ ID NO: 114250 - protein, 15 aa, Artificial Sequence
  Description of Artificial Sequence: Synthetic peptide
  Seed: PRMCSLMQGSTLPRR
PRMCSIMQVSKLPHR

SEQ ID NO: 114251 - protein, 15 aa, Artificial Sequence
  Description of Artificial Sequence: Synthetic peptide
  Seed: PRMCSLMQGSTLPRR
PRMCSIMQVSKLPQR

SEQ ID NO: 114252 - protein, 15 aa, Artificial Sequence
  Description of Artificial Sequence: Synthetic peptide
  Seed: PRMCSLMQGSTLPRR
PRMCSIMQVSKLPSR

SEQ ID NO: 114253 - protein, 15 aa, Artificial Sequence
  Description of Artificial Sequence: Synthetic peptide
  Seed: PRMCSLMQGSTLPRR
PRMCSIMQVSKLPTR

SEQ ID NO: 114254 - protein, 15 aa, Artificial Sequence
  Description of Artificial Sequence: Synthetic peptide
  Seed: PRMCSLMQGSTLPRR
PRMCSIMQVSKLPYR

SEQ ID NO: 114255 - protein, 15 aa, Artificial Sequence
  Description of Artificial Sequence: Synthetic peptide
  Seed: PRMCSLMQGSTLPRR
PRMCSIMQVSNLPAR

SEQ ID NO: 114256 - protein, 15 aa, Artificial Sequence
  Description of Artificial Sequence: Synthetic peptide
  Seed: PRMCSLMQGSTLPRR
PRMCSIMQVSNLPSR

SEQ ID NO: 114257 - protein, 15 aa, Artificial Sequence
  Description of Artificial Sequence: Synthetic peptide
  Seed: PRMCSLMQGSTLPRR
PRMCSIMQVSRLPAR

SEQ ID NO: 114258 - protein, 15 aa, Artificial Sequence
  Description of Artificial Sequence: Synthetic peptide
  Seed: PRMCSLMQGSTLPRR
PRMCSIMQVSRLPFR

SEQ ID NO: 114259 - protein, 15 aa, Artificial Sequence
  Description of Artificial Sequence: Synthetic peptide
  Seed: PRMCSLMQGSTLPRR
PRMCSIMQVSRLPGR

SEQ ID NO: 114260 - protein, 15 aa, Artificial Sequence
  Description of Artificial Sequence: Synthetic peptide
  Seed: PRMCSLMQGSTLPRR
PRMCSIMQVSRLPHR

SEQ ID NO: 114261 - protein, 15 aa, Artificial Sequence
  Description of Artificial Sequence: Synthetic peptide
  Seed: PRMCSLMQGSTLPRR
PRMCSIMQVSRLPKR

SEQ ID NO: 114262 - protein, 15 aa, Artificial Sequence
  Description of Artificial Sequence: Synthetic peptide
  Seed: PRMCSLMQGSTLPRR
PRMCSIMQVSRLPLR

SEQ ID NO: 114263 - protein, 15 aa, Artificial Sequence
  Description of Artificial Sequence: Synthetic peptide
  Seed: PRMCSLMQGSTLPRR
PRMCSIMQVSRLPMR

SEQ ID NO: 114264 - protein, 15 aa, Artificial Sequence
  Description of Artificial Sequence: Synthetic peptide
  Seed: PRMCSLMQGSTLPRR
PRMCSIMQVSRLPQR

SEQ ID NO: 114265 - protein, 15 aa, Artificial Sequence
  Description of Artificial Sequence: Synthetic peptide
  Seed: PRMCSLMQGSTLPRR
PRMCSIMQVSRLPRR

SEQ ID NO: 114266 - protein, 15 aa, Artificial Sequence
  Description of Artificial Sequence: Synthetic peptide
  Seed: PRMCSLMQGSTLPRR
PRMCSIMQVSRLPSR

SEQ ID NO: 114267 - protein, 15 aa, Artificial Sequence
  Description of Artificial Sequence: Synthetic peptide
  Seed: PRMCSLMQGSTLPRR
PRMCSIMQVSRLPTR

SEQ ID NO: 114268 - protein, 15 aa, Artificial Sequence
  Description of Artificial Sequence: Synthetic peptide
  Seed: PRMCSLMQGSTLPRR
PRMCSIMQVSRLPVR

SEQ ID NO: 114269 - protein, 15 aa, Artificial Sequence
  Description of Artificial Sequence: Synthetic peptide
  Seed: PRMCSLMQGSTLPRR
PRMCSIMQVSRLPYR

SEQ ID NO: 114270 - protein, 15 aa, Artificial Sequence
  Description of Artificial Sequence: Synthetic peptide
  Seed: PRMCSLMQGSTLPRR
PRMCSIMQVSTLPAR

SEQ ID NO: 114271 - protein, 15 aa, Artificial Sequence
  Description of Artificial Sequence: Synthetic peptide
  Seed: PRMCSLMQGSTLPRR
PRMCSIMQVSTLPSR

SEQ ID NO: 114272 - protein, 15 aa, Artificial Sequence
  Description of Artificial Sequence: Synthetic peptide
  Seed: PRMCSLMQGSTLPRR
PRMCSIMQWSKLPFR

SEQ ID NO: 114273 - protein, 15 aa, Artificial Sequence
  Description of Artificial Sequence: Synthetic peptide
  Seed: PRMCSLMQGSTLPRR
PRMCSIMQWSKLPLR

SEQ ID NO: 114274 - protein, 15 aa, Artificial Sequence
  Description of Artificial Sequence: Synthetic peptide
  Seed: PRMCSLMQGSTLPRR
PRMCSIMQWSKLPVR

SEQ ID NO: 114275 - protein, 15 aa, Artificial Sequence
  Description of Artificial Sequence: Synthetic peptide
  Seed: PRMCSLMQGSTLPRR
PRMCSIMQWSKLPYR

SEQ ID NO: 114276 - protein, 15 aa, Artificial Sequence
  Description of Artificial Sequence: Synthetic peptide
  Seed: PRMCSLMQGSTLPRR
PRMCSIMQWSRLPFR

SEQ ID NO: 114277 - protein, 15 aa, Artificial Sequence
  Description of Artificial Sequence: Synthetic peptide
  Seed: PRMCSLMQGSTLPRR
PRMCSIMQWSRLPIR

SEQ ID NO: 114278 - protein, 15 aa, Artificial Sequence
  Description of Artificial Sequence: Synthetic peptide
  Seed: PRMCSLMQGSTLPRR
PRMCSIMQWSRLPLR

SEQ ID NO: 114279 - protein, 15 aa, Artificial Sequence
  Description of Artificial Sequence: Synthetic peptide
  Seed: PRMCSLMQGSTLPRR
PRMCSIMQWSRLPMR

SEQ ID NO: 114280 - protein, 15 aa, Artificial Sequence
  Description of Artificial Sequence: Synthetic peptide
  Seed: PRMCSLMQGSTLPRR
PRMCSIMQWSRLPRR

SEQ ID NO: 114281 - protein, 15 aa, Artificial Sequence
  Description of Artificial Sequence: Synthetic peptide
  Seed: PRMCSLMQGSTLPRR
PRMCSIMQWSRLPVR

SEQ ID NO: 114282 - protein, 15 aa, Artificial Sequence
  Description of Artificial Sequence: Synthetic peptide
  Seed: PRMCSLMQGSTLPRR
PRMCSIMQWSRLPYR

SEQ ID NO: 114283 - protein, 15 aa, Artificial Sequence
  Description of Artificial Sequence: Synthetic peptide
  Seed: PRMCSLMQGSTLPRR
PRMCSLMQASRLPAR

SEQ ID NO: 114284 - protein, 15 aa, Artificial Sequence
  Description of Artificial Sequence: Synthetic peptide
  Seed: PRMCSLMQGSTLPRR
PRMCSLMQASRLPSR

SEQ ID NO: 114285 - protein, 15 aa, Artificial Sequence
  Description of Artificial Sequence: Synthetic peptide
  Seed: PRMCSLMQGSTLPRR
PRMCSLMQFSKLPFR

SEQ ID NO: 114286 - protein, 15 aa, Artificial Sequence
  Description of Artificial Sequence: Synthetic peptide
  Seed: PRMCSLMQGSTLPRR
PRMCSLMQFSKLPYR

SEQ ID NO: 114287 - protein, 15 aa, Artificial Sequence
  Description of Artificial Sequence: Synthetic peptide
  Seed: PRMCSLMQGSTLPRR
PRMCSLMQFSRLPFR

SEQ ID NO: 114288 - protein, 15 aa, Artificial Sequence
  Description of Artificial Sequence: Synthetic peptide
  Seed: PRMCSLMQGSTLPRR
PRMCSLMQFSRLPMR

SEQ ID NO: 114289 - protein, 15 aa, Artificial Sequence
  Description of Artificial Sequence: Synthetic peptide
  Seed: PRMCSLMQGSTLPRR
PRMCSLMQFSRLPRR

SEQ ID NO: 114290 - protein, 15 aa, Artificial Sequence
  Description of Artificial Sequence: Synthetic peptide
  Seed: PRMCSLMQGSTLPRR
PRMCSLMQFSRLPYR

SEQ ID NO: 114291 - protein, 15 aa, Artificial Sequence
  Description of Artificial Sequence: Synthetic peptide
  Seed: PRMCSLMQGSTLPRR
PRMCSLMQHSRLPYR

SEQ ID NO: 114292 - protein, 15 aa, Artificial Sequence
  Description of Artificial Sequence: Synthetic peptide
  Seed: PRMCSLMQGSTLPRR
PRMCSLMQISKLPAR

SEQ ID NO: 114293 - protein, 15 aa, Artificial Sequence
  Description of Artificial Sequence: Synthetic peptide
  Seed: PRMCSLMQGSTLPRR
PRMCSLMQISKLPGR

SEQ ID NO: 114294 - protein, 15 aa, Artificial Sequence
  Description of Artificial Sequence: Synthetic peptide
  Seed: PRMCSLMQGSTLPRR
PRMCSLMQISKLPHR

SEQ ID NO: 114295 - protein, 15 aa, Artificial Sequence
  Description of Artificial Sequence: Synthetic peptide
  Seed: PRMCSLMQGSTLPRR
PRMCSLMQISKLPQR

SEQ ID NO: 114296 - protein, 15 aa, Artificial Sequence
  Description of Artificial Sequence: Synthetic peptide
  Seed: PRMCSLMQGSTLPRR
PRMCSLMQISKLPSR

SEQ ID NO: 114297 - protein, 15 aa, Artificial Sequence
  Description of Artificial Sequence: Synthetic peptide
  Seed: PRMCSLMQGSTLPRR
PRMCSLMQISKLPTR

SEQ ID NO: 114298 - protein, 15 aa, Artificial Sequence
  Description of Artificial Sequence: Synthetic peptide
  Seed: PRMCSLMQGSTLPRR
PRMCSLMQISKLPYR

SEQ ID NO: 114299 - protein, 15 aa, Artificial Sequence
  Description of Artificial Sequence: Synthetic peptide
  Seed: PRMCSLMQGSTLPRR
PRMCSLMQISRLPAR

SEQ ID NO: 114300 - protein, 15 aa, Artificial Sequence
  Description of Artificial Sequence: Synthetic peptide
  Seed: PRMCSLMQGSTLPRR
PRMCSLMQISRLPFR

SEQ ID NO: 114301 - protein, 15 aa, Artificial Sequence
  Description of Artificial Sequence: Synthetic peptide
  Seed: PRMCSLMQGSTLPRR
PRMCSLMQISRLPGR

SEQ ID NO: 114302 - protein, 15 aa, Artificial Sequence
  Description of Artificial Sequence: Synthetic peptide
  Seed: PRMCSLMQGSTLPRR
PRMCSLMQISRLPHR

SEQ ID NO: 114303 - protein, 15 aa, Artificial Sequence
  Description of Artificial Sequence: Synthetic peptide
  Seed: PRMCSLMQGSTLPRR
PRMCSLMQISRLPKR

SEQ ID NO: 114304 - protein, 15 aa, Artificial Sequence
  Description of Artificial Sequence: Synthetic peptide
  Seed: PRMCSLMQGSTLPRR
PRMCSLMQISRLPLR

SEQ ID NO: 114305 - protein, 15 aa, Artificial Sequence
  Description of Artificial Sequence: Synthetic peptide
  Seed: PRMCSLMQGSTLPRR
PRMCSLMQISRLPMR

SEQ ID NO: 114306 - protein, 15 aa, Artificial Sequence
  Description of Artificial Sequence: Synthetic peptide
  Seed: PRMCSLMQGSTLPRR
PRMCSLMQISRLPQR

SEQ ID NO: 114307 - protein, 15 aa, Artificial Sequence
  Description of Artificial Sequence: Synthetic peptide
  Seed: PRMCSLMQGSTLPRR
PRMCSLMQISRLPRR

SEQ ID NO: 114308 - protein, 15 aa, Artificial Sequence
  Description of Artificial Sequence: Synthetic peptide
  Seed: PRMCSLMQGSTLPRR
PRMCSLMQISRLPSR

SEQ ID NO: 114309 - protein, 15 aa, Artificial Sequence
  Description of Artificial Sequence: Synthetic peptide
  Seed: PRMCSLMQGSTLPRR
PRMCSLMQISRLPVR

SEQ ID NO: 114310 - protein, 15 aa, Artificial Sequence
  Description of Artificial Sequence: Synthetic peptide
  Seed: PRMCSLMQGSTLPRR
PRMCSLMQISRLPYR

SEQ ID NO: 114311 - protein, 15 aa, Artificial Sequence
  Description of Artificial Sequence: Synthetic peptide
  Seed: PRMCSLMQGSTLPRR
PRMCSLMQISTLPAR

SEQ ID NO: 114312 - protein, 15 aa, Artificial Sequence
  Description of Artificial Sequence: Synthetic peptide
  Seed: PRMCSLMQGSTLPRR
PRMCSLMQISTLPSR

SEQ ID NO: 114313 - protein, 15 aa, Artificial Sequence
  Description of Artificial Sequence: Synthetic peptide
  Seed: PRMCSLMQGSTLPRR
PRMCSLMQLSKLPAR

SEQ ID NO: 114314 - protein, 15 aa, Artificial Sequence
  Description of Artificial Sequence: Synthetic peptide
  Seed: PRMCSLMQGSTLPRR
PRMCSLMQLSKLPGR

SEQ ID NO: 114315 - protein, 15 aa, Artificial Sequence
  Description of Artificial Sequence: Synthetic peptide
  Seed: PRMCSLMQGSTLPRR
PRMCSLMQLSKLPHR

SEQ ID NO: 114316 - protein, 15 aa, Artificial Sequence
  Description of Artificial Sequence: Synthetic peptide
  Seed: PRMCSLMQGSTLPRR
PRMCSLMQLSKLPQR

SEQ ID NO: 114317 - protein, 15 aa, Artificial Sequence
  Description of Artificial Sequence: Synthetic peptide
  Seed: PRMCSLMQGSTLPRR
PRMCSLMQLSKLPRR

SEQ ID NO: 114318 - protein, 15 aa, Artificial Sequence
  Description of Artificial Sequence: Synthetic peptide
  Seed: PRMCSLMQGSTLPRR
PRMCSLMQLSKLPSR

SEQ ID NO: 114319 - protein, 15 aa, Artificial Sequence
  Description of Artificial Sequence: Synthetic peptide
  Seed: PRMCSLMQGSTLPRR
PRMCSLMQLSKLPTR

SEQ ID NO: 114320 - protein, 15 aa, Artificial Sequence
  Description of Artificial Sequence: Synthetic peptide
  Seed: PRMCSLMQGSTLPRR
PRMCSLMQLSRLPAR

SEQ ID NO: 114321 - protein, 15 aa, Artificial Sequence
  Description of Artificial Sequence: Synthetic peptide
  Seed: PRMCSLMQGSTLPRR
PRMCSLMQLSRLPGR

SEQ ID NO: 114322 - protein, 15 aa, Artificial Sequence
  Description of Artificial Sequence: Synthetic peptide
  Seed: PRMCSLMQGSTLPRR
PRMCSLMQLSRLPHR

SEQ ID NO: 114323 - protein, 15 aa, Artificial Sequence
  Description of Artificial Sequence: Synthetic peptide
  Seed: PRMCSLMQGSTLPRR
PRMCSLMQLSRLPIR

SEQ ID NO: 114324 - protein, 15 aa, Artificial Sequence
  Description of Artificial Sequence: Synthetic peptide
  Seed: PRMCSLMQGSTLPRR
PRMCSLMQLSRLPKR

SEQ ID NO: 114325 - protein, 15 aa, Artificial Sequence
  Description of Artificial Sequence: Synthetic peptide
  Seed: PRMCSLMQGSTLPRR
PRMCSLMQLSRLPLR

SEQ ID NO: 114326 - protein, 15 aa, Artificial Sequence
  Description of Artificial Sequence: Synthetic peptide
  Seed: PRMCSLMQGSTLPRR
PRMCSLMQLSRLPMR

SEQ ID NO: 114327 - protein, 15 aa, Artificial Sequence
  Description of Artificial Sequence: Synthetic peptide
  Seed: PRMCSLMQGSTLPRR
PRMCSLMQLSRLPNR

SEQ ID NO: 114328 - protein, 15 aa, Artificial Sequence
  Description of Artificial Sequence: Synthetic peptide
  Seed: PRMCSLMQGSTLPRR
PRMCSLMQLSRLPQR

SEQ ID NO: 114329 - protein, 15 aa, Artificial Sequence
  Description of Artificial Sequence: Synthetic peptide
  Seed: PRMCSLMQGSTLPRR
PRMCSLMQLSRLPRR

SEQ ID NO: 114330 - protein, 15 aa, Artificial Sequence
  Description of Artificial Sequence: Synthetic peptide
  Seed: PRMCSLMQGSTLPRR
PRMCSLMQLSRLPSR

SEQ ID NO: 114331 - protein, 15 aa, Artificial Sequence
  Description of Artificial Sequence: Synthetic peptide
  Seed: PRMCSLMQGSTLPRR
PRMCSLMQLSRLPTR

SEQ ID NO: 114332 - protein, 15 aa, Artificial Sequence
  Description of Artificial Sequence: Synthetic peptide
  Seed: PRMCSLMQGSTLPRR
PRMCSLMQLSRLPVR

SEQ ID NO: 114333 - protein, 15 aa, Artificial Sequence
  Description of Artificial Sequence: Synthetic peptide
  Seed: PRMCSLMQGSTLPRR
PRMCSLMQLSRLPYR

SEQ ID NO: 114334 - protein, 15 aa, Artificial Sequence
  Description of Artificial Sequence: Synthetic peptide
  Seed: PRMCSLMQGSTLPRR
PRMCSLMQMSKLPAR

SEQ ID NO: 114335 - protein, 15 aa, Artificial Sequence
  Description of Artificial Sequence: Synthetic peptide
  Seed: PRMCSLMQGSTLPRR
PRMCSLMQMSKLPGR

SEQ ID NO: 114336 - protein, 15 aa, Artificial Sequence
  Description of Artificial Sequence: Synthetic peptide
  Seed: PRMCSLMQGSTLPRR
PRMCSLMQMSKLPHR

SEQ ID NO: 114337 - protein, 15 aa, Artificial Sequence
  Description of Artificial Sequence: Synthetic peptide
  Seed: PRMCSLMQGSTLPRR
PRMCSLMQMSKLPKR

SEQ ID NO: 114338 - protein, 15 aa, Artificial Sequence
  Description of Artificial Sequence: Synthetic peptide
  Seed: PRMCSLMQGSTLPRR
PRMCSLMQMSKLPQR

SEQ ID NO: 114339 - protein, 15 aa, Artificial Sequence
  Description of Artificial Sequence: Synthetic peptide
  Seed: PRMCSLMQGSTLPRR
PRMCSLMQMSKLPRR

SEQ ID NO: 114340 - protein, 15 aa, Artificial Sequence
  Description of Artificial Sequence: Synthetic peptide
  Seed: PRMCSLMQGSTLPRR
PRMCSLMQMSKLPSR

SEQ ID NO: 114341 - protein, 15 aa, Artificial Sequence
  Description of Artificial Sequence: Synthetic peptide
  Seed: PRMCSLMQGSTLPRR
PRMCSLMQMSKLPTR

SEQ ID NO: 114342 - protein, 15 aa, Artificial Sequence
  Description of Artificial Sequence: Synthetic peptide
  Seed: PRMCSLMQGSTLPRR
PRMCSLMQMSKLPVR

SEQ ID NO: 114343 - protein, 15 aa, Artificial Sequence
  Description of Artificial Sequence: Synthetic peptide
  Seed: PRMCSLMQGSTLPRR
PRMCSLMQMSNLPAR

SEQ ID NO: 114344 - protein, 15 aa, Artificial Sequence
  Description of Artificial Sequence: Synthetic peptide
  Seed: PRMCSLMQGSTLPRR
PRMCSLMQMSNLPSR

SEQ ID NO: 114345 - protein, 15 aa, Artificial Sequence
  Description of Artificial Sequence: Synthetic peptide
  Seed: PRMCSLMQGSTLPRR
PRMCSLMQMSRLPAR

SEQ ID NO: 114346 - protein, 15 aa, Artificial Sequence
  Description of Artificial Sequence: Synthetic peptide
  Seed: PRMCSLMQGSTLPRR
PRMCSLMQMSRLPGR

SEQ ID NO: 114347 - protein, 15 aa, Artificial Sequence
  Description of Artificial Sequence: Synthetic peptide
  Seed: PRMCSLMQGSTLPRR
PRMCSLMQMSRLPHR

SEQ ID NO: 114348 - protein, 15 aa, Artificial Sequence
  Description of Artificial Sequence: Synthetic peptide
  Seed: PRMCSLMQGSTLPRR
PRMCSLMQMSRLPIR

SEQ ID NO: 114349 - protein, 15 aa, Artificial Sequence
  Description of Artificial Sequence: Synthetic peptide
  Seed: PRMCSLMQGSTLPRR
PRMCSLMQMSRLPKR

SEQ ID NO: 114350 - protein, 15 aa, Artificial Sequence
  Description of Artificial Sequence: Synthetic peptide
  Seed: PRMCSLMQGSTLPRR
PRMCSLMQMSRLPLR

SEQ ID NO: 114351 - protein, 15 aa, Artificial Sequence
  Description of Artificial Sequence: Synthetic peptide
  Seed: PRMCSLMQGSTLPRR
PRMCSLMQMSRLPMR

SEQ ID NO: 114352 - protein, 15 aa, Artificial Sequence
  Description of Artificial Sequence: Synthetic peptide
  Seed: PRMCSLMQGSTLPRR
PRMCSLMQMSRLPNR

SEQ ID NO: 114353 - protein, 15 aa, Artificial Sequence
  Description of Artificial Sequence: Synthetic peptide
  Seed: PRMCSLMQGSTLPRR
PRMCSLMQMSRLPQR

SEQ ID NO: 114354 - protein, 15 aa, Artificial Sequence
  Description of Artificial Sequence: Synthetic peptide
  Seed: PRMCSLMQGSTLPRR
PRMCSLMQMSRLPRR

SEQ ID NO: 114355 - protein, 15 aa, Artificial Sequence
  Description of Artificial Sequence: Synthetic peptide
  Seed: PRMCSLMQGSTLPRR
PRMCSLMQMSRLPTR

SEQ ID NO: 114356 - protein, 15 aa, Artificial Sequence
  Description of Artificial Sequence: Synthetic peptide
  Seed: PRMCSLMQGSTLPRR
PRMCSLMQMSRLPVR

SEQ ID NO: 114357 - protein, 15 aa, Artificial Sequence
  Description of Artificial Sequence: Synthetic peptide
  Seed: PRMCSLMQGSTLPRR
PRMCSLMQMSRLPYR

SEQ ID NO: 114358 - protein, 15 aa, Artificial Sequence
  Description of Artificial Sequence: Synthetic peptide
  Seed: PRMCSLMQGSTLPRR
PRMCSLMQMSSLPSR

SEQ ID NO: 114359 - protein, 15 aa, Artificial Sequence
  Description of Artificial Sequence: Synthetic peptide
  Seed: PRMCSLMQGSTLPRR
PRMCSLMQMSTLPAR

SEQ ID NO: 114360 - protein, 15 aa, Artificial Sequence
  Description of Artificial Sequence: Synthetic peptide
  Seed: PRMCSLMQGSTLPRR
PRMCSLMQMSTLPSR

SEQ ID NO: 114361 - protein, 15 aa, Artificial Sequence
  Description of Artificial Sequence: Synthetic peptide
  Seed: PRMCSLMQGSTLPRR
PRMCSLMQRSRLPFR

SEQ ID NO: 114362 - protein, 15 aa, Artificial Sequence
  Description of Artificial Sequence: Synthetic peptide
  Seed: PRMCSLMQGSTLPRR
PRMCSLMQRSRLPLR

SEQ ID NO: 114363 - protein, 15 aa, Artificial Sequence
  Description of Artificial Sequence: Synthetic peptide
  Seed: PRMCSLMQGSTLPRR
PRMCSLMQRSRLPRR

SEQ ID NO: 114364 - protein, 15 aa, Artificial Sequence
  Description of Artificial Sequence: Synthetic peptide
  Seed: PRMCSLMQGSTLPRR
PRMCSLMQRSRLPYR

SEQ ID NO: 114365 - protein, 15 aa, Artificial Sequence
  Description of Artificial Sequence: Synthetic peptide
  Seed: PRMCSLMQGSTLPRR
PRMCSLMQVSKLPAR

SEQ ID NO: 114366 - protein, 15 aa, Artificial Sequence
  Description of Artificial Sequence: Synthetic peptide
  Seed: PRMCSLMQGSTLPRR
PRMCSLMQVSKLPSR

SEQ ID NO: 114367 - protein, 15 aa, Artificial Sequence
  Description of Artificial Sequence: Synthetic peptide
  Seed: PRMCSLMQGSTLPRR
PRMCSLMQVSRLPAR

SEQ ID NO: 114368 - protein, 15 aa, Artificial Sequence
  Description of Artificial Sequence: Synthetic peptide
  Seed: PRMCSLMQGSTLPRR
PRMCSLMQVSRLPGR

SEQ ID NO: 114369 - protein, 15 aa, Artificial Sequence
  Description of Artificial Sequence: Synthetic peptide
  Seed: PRMCSLMQGSTLPRR
PRMCSLMQVSRLPHR

SEQ ID NO: 114370 - protein, 15 aa, Artificial Sequence
  Description of Artificial Sequence: Synthetic peptide
  Seed: PRMCSLMQGSTLPRR
PRMCSLMQVSRLPQR

SEQ ID NO: 114371 - protein, 15 aa, Artificial Sequence
  Description of Artificial Sequence: Synthetic peptide
  Seed: PRMCSLMQGSTLPRR
PRMCSLMQVSRLPRR

SEQ ID NO: 114372 - protein, 15 aa, Artificial Sequence
  Description of Artificial Sequence: Synthetic peptide
  Seed: PRMCSLMQGSTLPRR
PRMCSLMQVSRLPSR

SEQ ID NO: 114373 - protein, 15 aa, Artificial Sequence
  Description of Artificial Sequence: Synthetic peptide
  Seed: PRMCSLMQGSTLPRR
PRMCSLMQVSRLPTR

SEQ ID NO: 114374 - protein, 15 aa, Artificial Sequence
  Description of Artificial Sequence: Synthetic peptide
  Seed: PRMCSLMQGSTLPRR
PRMCSLMQVSRLPYR

SEQ ID NO: 114375 - protein, 15 aa, Artificial Sequence
  Description of Artificial Sequence: Synthetic peptide
  Seed: PRMCSLMQGSTLPRR
PRMCSLMQWSRLPFR

SEQ ID NO: 114376 - protein, 15 aa, Artificial Sequence
  Description of Artificial Sequence: Synthetic peptide
  Seed: PRMCSLMQGSTLPRR
PRMCSLMQWSRLPYR

SEQ ID NO: 114377 - protein, 15 aa, Artificial Sequence
  Description of Artificial Sequence: Synthetic peptide
  Seed: PRMCSLMQGSTLPRR
PRMCSMMQFSRLPYR

SEQ ID NO: 114378 - protein, 15 aa, Artificial Sequence
  Description of Artificial Sequence: Synthetic peptide
  Seed: PRMCSLMQGSTLPRR
PRMCSMMQISKLPAR

SEQ ID NO: 114379 - protein, 15 aa, Artificial Sequence
  Description of Artificial Sequence: Synthetic peptide
  Seed: PRMCSLMQGSTLPRR
PRMCSMMQISKLPSR

SEQ ID NO: 114380 - protein, 15 aa, Artificial Sequence
  Description of Artificial Sequence: Synthetic peptide
  Seed: PRMCSLMQGSTLPRR
PRMCSMMQISRLPAR

SEQ ID NO: 114381 - protein, 15 aa, Artificial Sequence
  Description of Artificial Sequence: Synthetic peptide
  Seed: PRMCSLMQGSTLPRR
PRMCSMMQISRLPFR

SEQ ID NO: 114382 - protein, 15 aa, Artificial Sequence
  Description of Artificial Sequence: Synthetic peptide
  Seed: PRMCSLMQGSTLPRR
PRMCSMMQISRLPGR

SEQ ID NO: 114383 - protein, 15 aa, Artificial Sequence
  Description of Artificial Sequence: Synthetic peptide
  Seed: PRMCSLMQGSTLPRR
PRMCSMMQISRLPQR

SEQ ID NO: 114384 - protein, 15 aa, Artificial Sequence
  Description of Artificial Sequence: Synthetic peptide
  Seed: PRMCSLMQGSTLPRR
PRMCSMMQISRLPSR

SEQ ID NO: 114385 - protein, 15 aa, Artificial Sequence
  Description of Artificial Sequence: Synthetic peptide
  Seed: PRMCSLMQGSTLPRR
PRMCSMMQISRLPYR

SEQ ID NO: 114386 - protein, 15 aa, Artificial Sequence
  Description of Artificial Sequence: Synthetic peptide
  Seed: PRMCSLMQGSTLPRR
PRMCSMMQLSKLPAR

SEQ ID NO: 114387 - protein, 15 aa, Artificial Sequence
  Description of Artificial Sequence: Synthetic peptide
  Seed: PRMCSLMQGSTLPRR
PRMCSMMQLSKLPSR

SEQ ID NO: 114388 - protein, 15 aa, Artificial Sequence
  Description of Artificial Sequence: Synthetic peptide
  Seed: PRMCSLMQGSTLPRR
PRMCSMMQLSRLPAR

SEQ ID NO: 114389 - protein, 15 aa, Artificial Sequence
  Description of Artificial Sequence: Synthetic peptide
  Seed: PRMCSLMQGSTLPRR
PRMCSMMQLSRLPGR

SEQ ID NO: 114390 - protein, 15 aa, Artificial Sequence
  Description of Artificial Sequence: Synthetic peptide
  Seed: PRMCSLMQGSTLPRR
PRMCSMMQLSRLPHR

SEQ ID NO: 114391 - protein, 15 aa, Artificial Sequence
  Description of Artificial Sequence: Synthetic peptide
  Seed: PRMCSLMQGSTLPRR
PRMCSMMQLSRLPKR

SEQ ID NO: 114392 - protein, 15 aa, Artificial Sequence
  Description of Artificial Sequence: Synthetic peptide
  Seed: PRMCSLMQGSTLPRR
PRMCSMMQLSRLPQR

SEQ ID NO: 114393 - protein, 15 aa, Artificial Sequence
  Description of Artificial Sequence: Synthetic peptide
  Seed: PRMCSLMQGSTLPRR
PRMCSMMQLSRLPRR

SEQ ID NO: 114394 - protein, 15 aa, Artificial Sequence
  Description of Artificial Sequence: Synthetic peptide
  Seed: PRMCSLMQGSTLPRR
PRMCSMMQLSRLPSR

SEQ ID NO: 114395 - protein, 15 aa, Artificial Sequence
  Description of Artificial Sequence: Synthetic peptide
  Seed: PRMCSLMQGSTLPRR
PRMCSMMQLSRLPTR

SEQ ID NO: 114396 - protein, 15 aa, Artificial Sequence
  Description of Artificial Sequence: Synthetic peptide
  Seed: PRMCSLMQGSTLPRR
PRMCSMMQMSKLPAR

SEQ ID NO: 114397 - protein, 15 aa, Artificial Sequence
  Description of Artificial Sequence: Synthetic peptide
  Seed: PRMCSLMQGSTLPRR
PRMCSMMQMSKLPQR

SEQ ID NO: 114398 - protein, 15 aa, Artificial Sequence
  Description of Artificial Sequence: Synthetic peptide
  Seed: PRMCSLMQGSTLPRR
PRMCSMMQMSKLPSR

SEQ ID NO: 114399 - protein, 15 aa, Artificial Sequence
  Description of Artificial Sequence: Synthetic peptide
  Seed: PRMCSLMQGSTLPRR
PRMCSMMQMSRLPAR

SEQ ID NO: 114400 - protein, 15 aa, Artificial Sequence
  Description of Artificial Sequence: Synthetic peptide
  Seed: PRMCSLMQGSTLPRR
PRMCSMMQMSRLPGR

SEQ ID NO: 114401 - protein, 15 aa, Artificial Sequence
  Description of Artificial Sequence: Synthetic peptide
  Seed: PRMCSLMQGSTLPRR
PRMCSMMQMSRLPHR

SEQ ID NO: 114402 - protein, 15 aa, Artificial Sequence
  Description of Artificial Sequence: Synthetic peptide
  Seed: PRMCSLMQGSTLPRR
PRMCSMMQMSRLPKR

SEQ ID NO: 114403 - protein, 15 aa, Artificial Sequence
  Description of Artificial Sequence: Synthetic peptide
  Seed: PRMCSLMQGSTLPRR
PRMCSMMQMSRLPQR

SEQ ID NO: 114404 - protein, 15 aa, Artificial Sequence
  Description of Artificial Sequence: Synthetic peptide
  Seed: PRMCSLMQGSTLPRR
PRMCSMMQMSRLPRR

SEQ ID NO: 114405 - protein, 15 aa, Artificial Sequence
  Description of Artificial Sequence: Synthetic peptide
  Seed: PRMCSLMQGSTLPRR
PRMCSMMQMSRLPSR

SEQ ID NO: 114406 - protein, 15 aa, Artificial Sequence
  Description of Artificial Sequence: Synthetic peptide
  Seed: PRMCSLMQGSTLPRR
PRMCSMMQMSRLPTR

SEQ ID NO: 114407 - protein, 15 aa, Artificial Sequence
  Description of Artificial Sequence: Synthetic peptide
  Seed: PRMCSLMQGSTLPRR
PRMCSMMQMSRLPVR

SEQ ID NO: 114408 - protein, 15 aa, Artificial Sequence
  Description of Artificial Sequence: Synthetic peptide
  Seed: PRMCSLMQGSTLPRR
PRMCSMMQMSRLPYR

SEQ ID NO: 114409 - protein, 15 aa, Artificial Sequence
  Description of Artificial Sequence: Synthetic peptide
  Seed: PRMCSLMQGSTLPRR
PRMCSMMQRSRLPFR

SEQ ID NO: 114410 - protein, 15 aa, Artificial Sequence
  Description of Artificial Sequence: Synthetic peptide
  Seed: PRMCSLMQGSTLPRR
PRMCSMMQVSRLPAR

SEQ ID NO: 114411 - protein, 15 aa, Artificial Sequence
  Description of Artificial Sequence: Synthetic peptide
  Seed: PRMCSLMQGSTLPRR
PRMCSMMQVSRLPSR

SEQ ID NO: 114412 - protein, 15 aa, Artificial Sequence
  Description of Artificial Sequence: Synthetic peptide
  Seed: PRMCSLMQGSTLPRR
PRMCSMMQVSRLPYR

SEQ ID NO: 114413 - protein, 15 aa, Artificial Sequence
  Description of Artificial Sequence: Synthetic peptide
  Seed: PRMCSLMQGSTLPRR
PRMCSVMQISKLPAR

SEQ ID NO: 114414 - protein, 15 aa, Artificial Sequence
  Description of Artificial Sequence: Synthetic peptide
  Seed: PRMCSLMQGSTLPRR
PRMCSVMQISKLPSR

SEQ ID NO: 114415 - protein, 15 aa, Artificial Sequence
  Description of Artificial Sequence: Synthetic peptide
  Seed: PRMCSLMQGSTLPRR
PRMCSVMQISRLPAR

SEQ ID NO: 114416 - protein, 15 aa, Artificial Sequence
  Description of Artificial Sequence: Synthetic peptide
  Seed: PRMCSLMQGSTLPRR
PRMCSVMQISRLPGR

SEQ ID NO: 114417 - protein, 15 aa, Artificial Sequence
  Description of Artificial Sequence: Synthetic peptide
  Seed: PRMCSLMQGSTLPRR
PRMCSVMQISRLPQR

SEQ ID NO: 114418 - protein, 15 aa, Artificial Sequence
  Description of Artificial Sequence: Synthetic peptide
  Seed: PRMCSLMQGSTLPRR
PRMCSVMQISRLPSR

SEQ ID NO: 114419 - protein, 15 aa, Artificial Sequence
  Description of Artificial Sequence: Synthetic peptide
  Seed: PRMCSLMQGSTLPRR
PRMCSVMQISRLPYR

SEQ ID NO: 114420 - protein, 15 aa, Artificial Sequence
  Description of Artificial Sequence: Synthetic peptide
  Seed: PRMCSLMQGSTLPRR
PRMCSVMQLSKLPAR

SEQ ID NO: 114421 - protein, 15 aa, Artificial Sequence
  Description of Artificial Sequence: Synthetic peptide
  Seed: PRMCSLMQGSTLPRR
PRMCSVMQLSKLPGR

SEQ ID NO: 114422 - protein, 15 aa, Artificial Sequence
  Description of Artificial Sequence: Synthetic peptide
  Seed: PRMCSLMQGSTLPRR
PRMCSVMQLSKLPSR

SEQ ID NO: 114423 - protein, 15 aa, Artificial Sequence
  Description of Artificial Sequence: Synthetic peptide
  Seed: PRMCSLMQGSTLPRR
PRMCSVMQLSRLPAR

SEQ ID NO: 114424 - protein, 15 aa, Artificial Sequence
  Description of Artificial Sequence: Synthetic peptide
  Seed: PRMCSLMQGSTLPRR
PRMCSVMQLSRLPGR

SEQ ID NO: 114425 - protein, 15 aa, Artificial Sequence
  Description of Artificial Sequence: Synthetic peptide
  Seed: PRMCSLMQGSTLPRR
PRMCSVMQLSRLPHR

SEQ ID NO: 114426 - protein, 15 aa, Artificial Sequence
  Description of Artificial Sequence: Synthetic peptide
  Seed: PRMCSLMQGSTLPRR
PRMCSVMQLSRLPKR

SEQ ID NO: 114427 - protein, 15 aa, Artificial Sequence
  Description of Artificial Sequence: Synthetic peptide
  Seed: PRMCSLMQGSTLPRR
PRMCSVMQLSRLPQR

SEQ ID NO: 114428 - protein, 15 aa, Artificial Sequence
  Description of Artificial Sequence: Synthetic peptide
  Seed: PRMCSLMQGSTLPRR
PRMCSVMQLSRLPRR

SEQ ID NO: 114429 - protein, 15 aa, Artificial Sequence
  Description of Artificial Sequence: Synthetic peptide
  Seed: PRMCSLMQGSTLPRR
PRMCSVMQLSRLPSR

SEQ ID NO: 114430 - protein, 15 aa, Artificial Sequence
  Description of Artificial Sequence: Synthetic peptide
  Seed: PRMCSLMQGSTLPRR
PRMCSVMQLSRLPTR

SEQ ID NO: 114431 - protein, 15 aa, Artificial Sequence
  Description of Artificial Sequence: Synthetic peptide
  Seed: PRMCSLMQGSTLPRR
PRMCSVMQMSKLPAR

SEQ ID NO: 114432 - protein, 15 aa, Artificial Sequence
  Description of Artificial Sequence: Synthetic peptide
  Seed: PRMCSLMQGSTLPRR
PRMCSVMQMSKLPQR

SEQ ID NO: 114433 - protein, 15 aa, Artificial Sequence
  Description of Artificial Sequence: Synthetic peptide
  Seed: PRMCSLMQGSTLPRR
PRMCSVMQMSKLPSR

SEQ ID NO: 114434 - protein, 15 aa, Artificial Sequence
  Description of Artificial Sequence: Synthetic peptide
  Seed: PRMCSLMQGSTLPRR
PRMCSVMQMSKLPTR

SEQ ID NO: 114435 - protein, 15 aa, Artificial Sequence
  Description of Artificial Sequence: Synthetic peptide
  Seed: PRMCSLMQGSTLPRR
PRMCSVMQMSNLPAR

SEQ ID NO: 114436 - protein, 15 aa, Artificial Sequence
  Description of Artificial Sequence: Synthetic peptide
  Seed: PRMCSLMQGSTLPRR
PRMCSVMQMSRLPAR

SEQ ID NO: 114437 - protein, 15 aa, Artificial Sequence
  Description of Artificial Sequence: Synthetic peptide
  Seed: PRMCSLMQGSTLPRR
PRMCSVMQMSRLPGR

SEQ ID NO: 114438 - protein, 15 aa, Artificial Sequence
  Description of Artificial Sequence: Synthetic peptide
  Seed: PRMCSLMQGSTLPRR
PRMCSVMQMSRLPHR

SEQ ID NO: 114439 - protein, 15 aa, Artificial Sequence
  Description of Artificial Sequence: Synthetic peptide
  Seed: PRMCSLMQGSTLPRR
PRMCSVMQMSRLPKR

SEQ ID NO: 114440 - protein, 15 aa, Artificial Sequence
  Description of Artificial Sequence: Synthetic peptide
  Seed: PRMCSLMQGSTLPRR
PRMCSVMQMSRLPMR

SEQ ID NO: 114441 - protein, 15 aa, Artificial Sequence
  Description of Artificial Sequence: Synthetic peptide
  Seed: PRMCSLMQGSTLPRR
PRMCSVMQMSRLPQR

SEQ ID NO: 114442 - protein, 15 aa, Artificial Sequence
  Description of Artificial Sequence: Synthetic peptide
  Seed: PRMCSLMQGSTLPRR
PRMCSVMQMSRLPRR

SEQ ID NO: 114443 - protein, 15 aa, Artificial Sequence
  Description of Artificial Sequence: Synthetic peptide
  Seed: PRMCSLMQGSTLPRR
PRMCSVMQMSRLPSR

SEQ ID NO: 114444 - protein, 15 aa, Artificial Sequence
  Description of Artificial Sequence: Synthetic peptide
  Seed: PRMCSLMQGSTLPRR
PRMCSVMQMSRLPTR

SEQ ID NO: 114445 - protein, 15 aa, Artificial Sequence
  Description of Artificial Sequence: Synthetic peptide
  Seed: PRMCSLMQGSTLPRR
PRMCSVMQMSRLPVR

SEQ ID NO: 114446 - protein, 15 aa, Artificial Sequence
  Description of Artificial Sequence: Synthetic peptide
  Seed: PRMCSLMQGSTLPRR
PRMCSVMQMSTLPAR

SEQ ID NO: 114447 - protein, 15 aa, Artificial Sequence
  Description of Artificial Sequence: Synthetic peptide
  Seed: PRMCSLMQGSTLPRR
PRMCSVMQMSTLPSR

SEQ ID NO: 114448 - protein, 15 aa, Artificial Sequence
  Description of Artificial Sequence: Synthetic peptide
  Seed: PRMCSLMQGSTLPRR
PRMCSVMQVSRLPAR

SEQ ID NO: 114449 - protein, 15 aa, Artificial Sequence
  Description of Artificial Sequence: Synthetic peptide
  Seed: PRMCSLMQGSTLPRR
PRMCSVMQVSRLPSR

SEQ ID NO: 114450 - protein, 15 aa, Artificial Sequence
  Description of Artificial Sequence: Synthetic peptide
  Seed: PRMCSLMQGSTLPRR
PRMCSYMQLSRLPSR

SEQ ID NO: 114451 - protein, 16 aa, Artificial Sequence
  Description of Artificial Sequence: Synthetic peptide
  Seed: PRMCSLMQGSTLPRRS
PRMFSLAQASTAPRRS

SEQ ID NO: 114452 - protein, 16 aa, Artificial Sequence
  Description of Artificial Sequence: Synthetic peptide
  Seed: PRMCSLMQGSTLPRRS
PRMFSLAQASTCPRRS

SEQ ID NO: 114453 - protein, 16 aa, Artificial Sequence
  Description of Artificial Sequence: Synthetic peptide
  Seed: PRMCSLMQGSTLPRRS
PRMFSLAQASTFPRRS

SEQ ID NO: 114454 - protein, 16 aa, Artificial Sequence
  Description of Artificial Sequence: Synthetic peptide
  Seed: PRMCSLMQGSTLPRRS
PRMFSLAQASTGPRRS

SEQ ID NO: 114455 - protein, 16 aa, Artificial Sequence
  Description of Artificial Sequence: Synthetic peptide
  Seed: PRMCSLMQGSTLPRRS
PRMFSLAQASTHPRRS

SEQ ID NO: 114456 - protein, 16 aa, Artificial Sequence
  Description of Artificial Sequence: Synthetic peptide
  Seed: PRMCSLMQGSTLPRRS
PRMFSLAQASTIPRRS

SEQ ID NO: 114457 - protein, 16 aa, Artificial Sequence
  Description of Artificial Sequence: Synthetic peptide
  Seed: PRMCSLMQGSTLPRRS
PRMFSLAQASTLPRRS

SEQ ID NO: 114458 - protein, 16 aa, Artificial Sequence
  Description of Artificial Sequence: Synthetic peptide
  Seed: PRMCSLMQGSTLPRRS
PRMFSLAQASTMPRRS

SEQ ID NO: 114459 - protein, 16 aa, Artificial Sequence
  Description of Artificial Sequence: Synthetic peptide
  Seed: PRMCSLMQGSTLPRRS
PRMFSLAQASTNPRRS

SEQ ID NO: 114460 - protein, 16 aa, Artificial Sequence
  Description of Artificial Sequence: Synthetic peptide
  Seed: PRMCSLMQGSTLPRRS
PRMFSLAQASTQPRRS

SEQ ID NO: 114461 - protein, 16 aa, Artificial Sequence
  Description of Artificial Sequence: Synthetic peptide
  Seed: PRMCSLMQGSTLPRRS
PRMFSLAQASTSPRRS

SEQ ID NO: 114462 - protein, 16 aa, Artificial Sequence
  Description of Artificial Sequence: Synthetic peptide
  Seed: PRMCSLMQGSTLPRRS
PRMFSLAQASTTPRRS

SEQ ID NO: 114463 - protein, 16 aa, Artificial Sequence
  Description of Artificial Sequence: Synthetic peptide
  Seed: PRMCSLMQGSTLPRRS
PRMFSLAQASTVPRRS

SEQ ID NO: 114464 - protein, 16 aa, Artificial Sequence
  Description of Artificial Sequence: Synthetic peptide
  Seed: PRMCSLMQGSTLPRRS
PRMFSLAQGSTAPRRS

SEQ ID NO: 114465 - protein, 16 aa, Artificial Sequence
  Description of Artificial Sequence: Synthetic peptide
  Seed: PRMCSLMQGSTLPRRS
PRMFSLAQGSTGPRRS

SEQ ID NO: 114466 - protein, 16 aa, Artificial Sequence
  Description of Artificial Sequence: Synthetic peptide
  Seed: PRMCSLMQGSTLPRRS
PRMFSLAQGSTIPRRS

SEQ ID NO: 114467 - protein, 16 aa, Artificial Sequence
  Description of Artificial Sequence: Synthetic peptide
  Seed: PRMCSLMQGSTLPRRS
PRMFSLAQGSTLPRRS

SEQ ID NO: 114468 - protein, 16 aa, Artificial Sequence
  Description of Artificial Sequence: Synthetic peptide
  Seed: PRMCSLMQGSTLPRRS
PRMFSLAQGSTMPRRS

SEQ ID NO: 114469 - protein, 16 aa, Artificial Sequence
  Description of Artificial Sequence: Synthetic peptide
  Seed: PRMCSLMQGSTLPRRS
PRMFSLAQGSTNPRRS

SEQ ID NO: 114470 - protein, 16 aa, Artificial Sequence
  Description of Artificial Sequence: Synthetic peptide
  Seed: PRMCSLMQGSTLPRRS
PRMFSLAQGSTSPRRS

SEQ ID NO: 114471 - protein, 16 aa, Artificial Sequence
  Description of Artificial Sequence: Synthetic peptide
  Seed: PRMCSLMQGSTLPRRS
PRMFSLAQGSTTPRRS

SEQ ID NO: 114472 - protein, 16 aa, Artificial Sequence
  Description of Artificial Sequence: Synthetic peptide
  Seed: PRMCSLMQGSTLPRRS
PRMFSLAQGSTVPRRS

SEQ ID NO: 114473 - protein, 16 aa, Artificial Sequence
  Description of Artificial Sequence: Synthetic peptide
  Seed: PRMCSLMQGSTLPRRS
PRMFSLAQISTAPRRS

SEQ ID NO: 114474 - protein, 16 aa, Artificial Sequence
  Description of Artificial Sequence: Synthetic peptide
  Seed: PRMCSLMQGSTLPRRS
PRMFSLAQISTIPRRS

SEQ ID NO: 114475 - protein, 16 aa, Artificial Sequence
  Description of Artificial Sequence: Synthetic peptide
  Seed: PRMCSLMQGSTLPRRS
PRMFSLAQISTLPRRS

SEQ ID NO: 114476 - protein, 16 aa, Artificial Sequence
  Description of Artificial Sequence: Synthetic peptide
  Seed: PRMCSLMQGSTLPRRS
PRMFSLAQISTMPRRS

SEQ ID NO: 114477 - protein, 16 aa, Artificial Sequence
  Description of Artificial Sequence: Synthetic peptide
  Seed: PRMCSLMQGSTLPRRS
PRMFSLAQISTNPRRS

SEQ ID NO: 114478 - protein, 16 aa, Artificial Sequence
  Description of Artificial Sequence: Synthetic peptide
  Seed: PRMCSLMQGSTLPRRS
PRMFSLAQISTSPRRS

SEQ ID NO: 114479 - protein, 16 aa, Artificial Sequence
  Description of Artificial Sequence: Synthetic peptide
  Seed: PRMCSLMQGSTLPRRS
PRMFSLAQISTTPRRS

SEQ ID NO: 114480 - protein, 16 aa, Artificial Sequence
  Description of Artificial Sequence: Synthetic peptide
  Seed: PRMCSLMQGSTLPRRS
PRMFSLAQISTVPRRS

SEQ ID NO: 114481 - protein, 16 aa, Artificial Sequence
  Description of Artificial Sequence: Synthetic peptide
  Seed: PRMCSLMQGSTLPRRS
PRMFSLAQLSTAPRRS

SEQ ID NO: 114482 - protein, 16 aa, Artificial Sequence
  Description of Artificial Sequence: Synthetic peptide
  Seed: PRMCSLMQGSTLPRRS
PRMFSLAQMSTAPRRS

SEQ ID NO: 114483 - protein, 16 aa, Artificial Sequence
  Description of Artificial Sequence: Synthetic peptide
  Seed: PRMCSLMQGSTLPRRS
PRMFSLAQNSTAPRRS

SEQ ID NO: 114484 - protein, 16 aa, Artificial Sequence
  Description of Artificial Sequence: Synthetic peptide
  Seed: PRMCSLMQGSTLPRRS
PRMFSLAQNSTIPRRS

SEQ ID NO: 114485 - protein, 16 aa, Artificial Sequence
  Description of Artificial Sequence: Synthetic peptide
  Seed: PRMCSLMQGSTLPRRS
PRMFSLAQNSTLPRRS

SEQ ID NO: 114486 - protein, 16 aa, Artificial Sequence
  Description of Artificial Sequence: Synthetic peptide
  Seed: PRMCSLMQGSTLPRRS
PRMFSLAQNSTMPRRS

SEQ ID NO: 114487 - protein, 16 aa, Artificial Sequence
  Description of Artificial Sequence: Synthetic peptide
  Seed: PRMCSLMQGSTLPRRS
PRMFSLAQNSTNPRRS

SEQ ID NO: 114488 - protein, 16 aa, Artificial Sequence
  Description of Artificial Sequence: Synthetic peptide
  Seed: PRMCSLMQGSTLPRRS
PRMFSLAQNSTSPRRS

SEQ ID NO: 114489 - protein, 16 aa, Artificial Sequence
  Description of Artificial Sequence: Synthetic peptide
  Seed: PRMCSLMQGSTLPRRS
PRMFSLAQNSTVPRRS

SEQ ID NO: 114490 - protein, 16 aa, Artificial Sequence
  Description of Artificial Sequence: Synthetic peptide
  Seed: PRMCSLMQGSTLPRRS
PRMFSLAQPSTAPRRS

SEQ ID NO: 114491 - protein, 16 aa, Artificial Sequence
  Description of Artificial Sequence: Synthetic peptide
  Seed: PRMCSLMQGSTLPRRS
PRMFSLAQPSTIPRRS

SEQ ID NO: 114492 - protein, 16 aa, Artificial Sequence
  Description of Artificial Sequence: Synthetic peptide
  Seed: PRMCSLMQGSTLPRRS
PRMFSLAQPSTLPRRS

SEQ ID NO: 114493 - protein, 16 aa, Artificial Sequence
  Description of Artificial Sequence: Synthetic peptide
  Seed: PRMCSLMQGSTLPRRS
PRMFSLAQPSTMPRRS

SEQ ID NO: 114494 - protein, 16 aa, Artificial Sequence
  Description of Artificial Sequence: Synthetic peptide
  Seed: PRMCSLMQGSTLPRRS
PRMFSLAQPSTNPRRS

SEQ ID NO: 114495 - protein, 16 aa, Artificial Sequence
  Description of Artificial Sequence: Synthetic peptide
  Seed: PRMCSLMQGSTLPRRS
PRMFSLAQPSTQPRRS

SEQ ID NO: 114496 - protein, 16 aa, Artificial Sequence
  Description of Artificial Sequence: Synthetic peptide
  Seed: PRMCSLMQGSTLPRRS
PRMFSLAQPSTSPRRS

SEQ ID NO: 114497 - protein, 16 aa, Artificial Sequence
  Description of Artificial Sequence: Synthetic peptide
  Seed: PRMCSLMQGSTLPRRS
PRMFSLAQPSTTPRRS

SEQ ID NO: 114498 - protein, 16 aa, Artificial Sequence
  Description of Artificial Sequence: Synthetic peptide
  Seed: PRMCSLMQGSTLPRRS
PRMFSLAQPSTVPRRS

SEQ ID NO: 114499 - protein, 16 aa, Artificial Sequence
  Description of Artificial Sequence: Synthetic peptide
  Seed: PRMCSLMQGSTLPRRS
PRMFSLAQSSTAPRRS

SEQ ID NO: 114500 - protein, 16 aa, Artificial Sequence
  Description of Artificial Sequence: Synthetic peptide
  Seed: PRMCSLMQGSTLPRRS
PRMFSLAQSSTIPRRS

SEQ ID NO: 114501 - protein, 16 aa, Artificial Sequence
  Description of Artificial Sequence: Synthetic peptide
  Seed: PRMCSLMQGSTLPRRS
PRMFSLAQSSTLPRRS

SEQ ID NO: 114502 - protein, 16 aa, Artificial Sequence
  Description of Artificial Sequence: Synthetic peptide
  Seed: PRMCSLMQGSTLPRRS
PRMFSLAQSSTMPRRS

SEQ ID NO: 114503 - protein, 16 aa, Artificial Sequence
  Description of Artificial Sequence: Synthetic peptide
  Seed: PRMCSLMQGSTLPRRS
PRMFSLAQSSTNPRRS

SEQ ID NO: 114504 - protein, 16 aa, Artificial Sequence
  Description of Artificial Sequence: Synthetic peptide
  Seed: PRMCSLMQGSTLPRRS
PRMFSLAQSSTSPRRS

SEQ ID NO: 114505 - protein, 16 aa, Artificial Sequence
  Description of Artificial Sequence: Synthetic peptide
  Seed: PRMCSLMQGSTLPRRS
PRMFSLAQSSTTPRRS

SEQ ID NO: 114506 - protein, 16 aa, Artificial Sequence
  Description of Artificial Sequence: Synthetic peptide
  Seed: PRMCSLMQGSTLPRRS
PRMFSLAQSSTVPRRS

SEQ ID NO: 114507 - protein, 16 aa, Artificial Sequence
  Description of Artificial Sequence: Synthetic peptide
  Seed: PRMCSLMQGSTLPRRS
PRMFSLAQTSTAPRRS

SEQ ID NO: 114508 - protein, 16 aa, Artificial Sequence
  Description of Artificial Sequence: Synthetic peptide
  Seed: PRMCSLMQGSTLPRRS
PRMFSLAQTSTIPRRS

SEQ ID NO: 114509 - protein, 16 aa, Artificial Sequence
  Description of Artificial Sequence: Synthetic peptide
  Seed: PRMCSLMQGSTLPRRS
PRMFSLAQTSTLPRRS

SEQ ID NO: 114510 - protein, 16 aa, Artificial Sequence
  Description of Artificial Sequence: Synthetic peptide
  Seed: PRMCSLMQGSTLPRRS
PRMFSLAQTSTMPRRS

SEQ ID NO: 114511 - protein, 16 aa, Artificial Sequence
  Description of Artificial Sequence: Synthetic peptide
  Seed: PRMCSLMQGSTLPRRS
PRMFSLAQTSTNPRRS

SEQ ID NO: 114512 - protein, 16 aa, Artificial Sequence
  Description of Artificial Sequence: Synthetic peptide
  Seed: PRMCSLMQGSTLPRRS
PRMFSLAQTSTSPRRS

SEQ ID NO: 114513 - protein, 16 aa, Artificial Sequence
  Description of Artificial Sequence: Synthetic peptide
  Seed: PRMCSLMQGSTLPRRS
PRMFSLAQTSTTPRRS

SEQ ID NO: 114514 - protein, 16 aa, Artificial Sequence
  Description of Artificial Sequence: Synthetic peptide
  Seed: PRMCSLMQGSTLPRRS
PRMFSLAQTSTVPRRS

SEQ ID NO: 114515 - protein, 16 aa, Artificial Sequence
  Description of Artificial Sequence: Synthetic peptide
  Seed: PRMCSLMQGSTLPRRS
PRMFSLAQVSTAPRRS

SEQ ID NO: 114516 - protein, 16 aa, Artificial Sequence
  Description of Artificial Sequence: Synthetic peptide
  Seed: PRMCSLMQGSTLPRRS
PRMFSLAQVSTGPRRS

SEQ ID NO: 114517 - protein, 16 aa, Artificial Sequence
  Description of Artificial Sequence: Synthetic peptide
  Seed: PRMCSLMQGSTLPRRS
PRMFSLAQVSTHPRRS

SEQ ID NO: 114518 - protein, 16 aa, Artificial Sequence
  Description of Artificial Sequence: Synthetic peptide
  Seed: PRMCSLMQGSTLPRRS
PRMFSLAQVSTIPRRS

SEQ ID NO: 114519 - protein, 16 aa, Artificial Sequence
  Description of Artificial Sequence: Synthetic peptide
  Seed: PRMCSLMQGSTLPRRS
PRMFSLAQVSTLPRRS

SEQ ID NO: 114520 - protein, 16 aa, Artificial Sequence
  Description of Artificial Sequence: Synthetic peptide
  Seed: PRMCSLMQGSTLPRRS
PRMFSLAQVSTMPRRS

SEQ ID NO: 114521 - protein, 16 aa, Artificial Sequence
  Description of Artificial Sequence: Synthetic peptide
  Seed: PRMCSLMQGSTLPRRS
PRMFSLAQVSTNPRRS

SEQ ID NO: 114522 - protein, 16 aa, Artificial Sequence
  Description of Artificial Sequence: Synthetic peptide
  Seed: PRMCSLMQGSTLPRRS
PRMFSLAQVSTSPRRS

SEQ ID NO: 114523 - protein, 16 aa, Artificial Sequence
  Description of Artificial Sequence: Synthetic peptide
  Seed: PRMCSLMQGSTLPRRS
PRMFSLAQVSTTPRRS

SEQ ID NO: 114524 - protein, 16 aa, Artificial Sequence
  Description of Artificial Sequence: Synthetic peptide
  Seed: PRMCSLMQGSTLPRRS
PRMFSLAQVSTVPRRS

SEQ ID NO: 114525 - protein, 16 aa, Artificial Sequence
  Description of Artificial Sequence: Synthetic peptide
  Seed: PRMCSLMQGSTLPRRS
PRMFSLCQASTIPRRS

SEQ ID NO: 114526 - protein, 16 aa, Artificial Sequence
  Description of Artificial Sequence: Synthetic peptide
  Seed: PRMCSLMQGSTLPRRS
PRMFSLCQASTLPRRS

SEQ ID NO: 114527 - protein, 16 aa, Artificial Sequence
  Description of Artificial Sequence: Synthetic peptide
  Seed: PRMCSLMQGSTLPRRS
PRMFSLCQASTVPRRS

SEQ ID NO: 114528 - protein, 16 aa, Artificial Sequence
  Description of Artificial Sequence: Synthetic peptide
  Seed: PRMCSLMQGSTLPRRS
PRMFSLEQASTAPRRS

SEQ ID NO: 114529 - protein, 16 aa, Artificial Sequence
  Description of Artificial Sequence: Synthetic peptide
  Seed: PRMCSLMQGSTLPRRS
PRMFSLEQASTIPRRS

SEQ ID NO: 114530 - protein, 16 aa, Artificial Sequence
  Description of Artificial Sequence: Synthetic peptide
  Seed: PRMCSLMQGSTLPRRS
PRMFSLEQASTLPRRS

SEQ ID NO: 114531 - protein, 16 aa, Artificial Sequence
  Description of Artificial Sequence: Synthetic peptide
  Seed: PRMCSLMQGSTLPRRS
PRMFSLEQASTVPRRS

SEQ ID NO: 114532 - protein, 16 aa, Artificial Sequence
  Description of Artificial Sequence: Synthetic peptide
  Seed: PRMCSLMQGSTLPRRS
PRMFSLEQGSTAPRRS

SEQ ID NO: 114533 - protein, 16 aa, Artificial Sequence
  Description of Artificial Sequence: Synthetic peptide
  Seed: PRMCSLMQGSTLPRRS
PRMFSLEQGSTIPRRS

SEQ ID NO: 114534 - protein, 16 aa, Artificial Sequence
  Description of Artificial Sequence: Synthetic peptide
  Seed: PRMCSLMQGSTLPRRS
PRMFSLEQGSTLPRRS

SEQ ID NO: 114535 - protein, 16 aa, Artificial Sequence
  Description of Artificial Sequence: Synthetic peptide
  Seed: PRMCSLMQGSTLPRRS
PRMFSLEQGSTVPRRS

SEQ ID NO: 114536 - protein, 16 aa, Artificial Sequence
  Description of Artificial Sequence: Synthetic peptide
  Seed: PRMCSLMQGSTLPRRS
PRMFSLEQSSTAPRRS

SEQ ID NO: 114537 - protein, 16 aa, Artificial Sequence
  Description of Artificial Sequence: Synthetic peptide
  Seed: PRMCSLMQGSTLPRRS
PRMFSLEQSSTIPRRS

SEQ ID NO: 114538 - protein, 16 aa, Artificial Sequence
  Description of Artificial Sequence: Synthetic peptide
  Seed: PRMCSLMQGSTLPRRS
PRMFSLEQSSTLPRRS

SEQ ID NO: 114539 - protein, 16 aa, Artificial Sequence
  Description of Artificial Sequence: Synthetic peptide
  Seed: PRMCSLMQGSTLPRRS
PRMFSLEQSSTVPRRS

SEQ ID NO: 114540 - protein, 16 aa, Artificial Sequence
  Description of Artificial Sequence: Synthetic peptide
  Seed: PRMCSLMQGSTLPRRS
PRMFSLFQASTAPRRS

SEQ ID NO: 114541 - protein, 16 aa, Artificial Sequence
  Description of Artificial Sequence: Synthetic peptide
  Seed: PRMCSLMQGSTLPRRS
PRMFSLFQASTIPRRS

SEQ ID NO: 114542 - protein, 16 aa, Artificial Sequence
  Description of Artificial Sequence: Synthetic peptide
  Seed: PRMCSLMQGSTLPRRS
PRMFSLFQASTLPRRS

SEQ ID NO: 114543 - protein, 16 aa, Artificial Sequence
  Description of Artificial Sequence: Synthetic peptide
  Seed: PRMCSLMQGSTLPRRS
PRMFSLFQASTMPRRS

SEQ ID NO: 114544 - protein, 16 aa, Artificial Sequence
  Description of Artificial Sequence: Synthetic peptide
  Seed: PRMCSLMQGSTLPRRS
PRMFSLFQASTNPRRS

SEQ ID NO: 114545 - protein, 16 aa, Artificial Sequence
  Description of Artificial Sequence: Synthetic peptide
  Seed: PRMCSLMQGSTLPRRS
PRMFSLFQASTSPRRS

SEQ ID NO: 114546 - protein, 16 aa, Artificial Sequence
  Description of Artificial Sequence: Synthetic peptide
  Seed: PRMCSLMQGSTLPRRS
PRMFSLFQASTTPRRS

SEQ ID NO: 114547 - protein, 16 aa, Artificial Sequence
  Description of Artificial Sequence: Synthetic peptide
  Seed: PRMCSLMQGSTLPRRS
PRMFSLFQASTVPRRS

SEQ ID NO: 114548 - protein, 16 aa, Artificial Sequence
  Description of Artificial Sequence: Synthetic peptide
  Seed: PRMCSLMQGSTLPRRS
PRMFSLFQGSTAPRRS

SEQ ID NO: 114549 - protein, 16 aa, Artificial Sequence
  Description of Artificial Sequence: Synthetic peptide
  Seed: PRMCSLMQGSTLPRRS
PRMFSLFQGSTIPRRS

SEQ ID NO: 114550 - protein, 16 aa, Artificial Sequence
  Description of Artificial Sequence: Synthetic peptide
  Seed: PRMCSLMQGSTLPRRS
PRMFSLFQGSTLPRRS

SEQ ID NO: 114551 - protein, 16 aa, Artificial Sequence
  Description of Artificial Sequence: Synthetic peptide
  Seed: PRMCSLMQGSTLPRRS
PRMFSLFQGSTVPRRS

SEQ ID NO: 114552 - protein, 16 aa, Artificial Sequence
  Description of Artificial Sequence: Synthetic peptide
  Seed: PRMCSLMQGSTLPRRS
PRMFSLFQISTAPRRS

SEQ ID NO: 114553 - protein, 16 aa, Artificial Sequence
  Description of Artificial Sequence: Synthetic peptide
  Seed: PRMCSLMQGSTLPRRS
PRMFSLFQMSTAPRRS

SEQ ID NO: 114554 - protein, 16 aa, Artificial Sequence
  Description of Artificial Sequence: Synthetic peptide
  Seed: PRMCSLMQGSTLPRRS
PRMFSLFQPSTAPRRS

SEQ ID NO: 114555 - protein, 16 aa, Artificial Sequence
  Description of Artificial Sequence: Synthetic peptide
  Seed: PRMCSLMQGSTLPRRS
PRMFSLFQPSTIPRRS

SEQ ID NO: 114556 - protein, 16 aa, Artificial Sequence
  Description of Artificial Sequence: Synthetic peptide
  Seed: PRMCSLMQGSTLPRRS
PRMFSLFQPSTLPRRS

SEQ ID NO: 114557 - protein, 16 aa, Artificial Sequence
  Description of Artificial Sequence: Synthetic peptide
  Seed: PRMCSLMQGSTLPRRS
PRMFSLFQPSTNPRRS

SEQ ID NO: 114558 - protein, 16 aa, Artificial Sequence
  Description of Artificial Sequence: Synthetic peptide
  Seed: PRMCSLMQGSTLPRRS
PRMFSLFQPSTSPRRS

SEQ ID NO: 114559 - protein, 16 aa, Artificial Sequence
  Description of Artificial Sequence: Synthetic peptide
  Seed: PRMCSLMQGSTLPRRS
PRMFSLFQPSTVPRRS

SEQ ID NO: 114560 - protein, 16 aa, Artificial Sequence
  Description of Artificial Sequence: Synthetic peptide
  Seed: PRMCSLMQGSTLPRRS
PRMFSLFQSSTAPRRS

SEQ ID NO: 114561 - protein, 16 aa, Artificial Sequence
  Description of Artificial Sequence: Synthetic peptide
  Seed: PRMCSLMQGSTLPRRS
PRMFSLFQSSTIPRRS

SEQ ID NO: 114562 - protein, 16 aa, Artificial Sequence
  Description of Artificial Sequence: Synthetic peptide
  Seed: PRMCSLMQGSTLPRRS
PRMFSLFQSSTLPRRS

SEQ ID NO: 114563 - protein, 16 aa, Artificial Sequence
  Description of Artificial Sequence: Synthetic peptide
  Seed: PRMCSLMQGSTLPRRS
PRMFSLFQSSTSPRRS

SEQ ID NO: 114564 - protein, 16 aa, Artificial Sequence
  Description of Artificial Sequence: Synthetic peptide
  Seed: PRMCSLMQGSTLPRRS
PRMFSLFQSSTVPRRS

SEQ ID NO: 114565 - protein, 16 aa, Artificial Sequence
  Description of Artificial Sequence: Synthetic peptide
  Seed: PRMCSLMQGSTLPRRS
PRMFSLFQTSTAPRRS

SEQ ID NO: 114566 - protein, 16 aa, Artificial Sequence
  Description of Artificial Sequence: Synthetic peptide
  Seed: PRMCSLMQGSTLPRRS
PRMFSLFQTSTSPRRS

SEQ ID NO: 114567 - protein, 16 aa, Artificial Sequence
  Description of Artificial Sequence: Synthetic peptide
  Seed: PRMCSLMQGSTLPRRS
PRMFSLFQVSTAPRRS

SEQ ID NO: 114568 - protein, 16 aa, Artificial Sequence
  Description of Artificial Sequence: Synthetic peptide
  Seed: PRMCSLMQGSTLPRRS
PRMFSLFQVSTNPRRS

SEQ ID NO: 114569 - protein, 16 aa, Artificial Sequence
  Description of Artificial Sequence: Synthetic peptide
  Seed: PRMCSLMQGSTLPRRS
PRMFSLFQVSTSPRRS

SEQ ID NO: 114570 - protein, 16 aa, Artificial Sequence
  Description of Artificial Sequence: Synthetic peptide
  Seed: PRMCSLMQGSTLPRRS
PRMFSLGQASTAPRRS

SEQ ID NO: 114571 - protein, 16 aa, Artificial Sequence
  Description of Artificial Sequence: Synthetic peptide
  Seed: PRMCSLMQGSTLPRRS
PRMFSLGQASTIPRRS

SEQ ID NO: 114572 - protein, 16 aa, Artificial Sequence
  Description of Artificial Sequence: Synthetic peptide
  Seed: PRMCSLMQGSTLPRRS
PRMFSLGQASTLPRRS

SEQ ID NO: 114573 - protein, 16 aa, Artificial Sequence
  Description of Artificial Sequence: Synthetic peptide
  Seed: PRMCSLMQGSTLPRRS
PRMFSLGQASTMPRRS

SEQ ID NO: 114574 - protein, 16 aa, Artificial Sequence
  Description of Artificial Sequence: Synthetic peptide
  Seed: PRMCSLMQGSTLPRRS
PRMFSLGQASTVPRRS

SEQ ID NO: 114575 - protein, 16 aa, Artificial Sequence
  Description of Artificial Sequence: Synthetic peptide
  Seed: PRMCSLMQGSTLPRRS
PRMFSLGQGSTIPRRS

SEQ ID NO: 114576 - protein, 16 aa, Artificial Sequence
  Description of Artificial Sequence: Synthetic peptide
  Seed: PRMCSLMQGSTLPRRS
PRMFSLGQGSTLPRRS

SEQ ID NO: 114577 - protein, 16 aa, Artificial Sequence
  Description of Artificial Sequence: Synthetic peptide
  Seed: PRMCSLMQGSTLPRRS
PRMFSLGQGSTVPRRS

SEQ ID NO: 114578 - protein, 16 aa, Artificial Sequence
  Description of Artificial Sequence: Synthetic peptide
  Seed: PRMCSLMQGSTLPRRS
PRMFSLGQSSTIPRRS

SEQ ID NO: 114579 - protein, 16 aa, Artificial Sequence
  Description of Artificial Sequence: Synthetic peptide
  Seed: PRMCSLMQGSTLPRRS
PRMFSLGQSSTLPRRS

SEQ ID NO: 114580 - protein, 16 aa, Artificial Sequence
  Description of Artificial Sequence: Synthetic peptide
  Seed: PRMCSLMQGSTLPRRS
PRMFSLGQSSTVPRRS

SEQ ID NO: 114581 - protein, 16 aa, Artificial Sequence
  Description of Artificial Sequence: Synthetic peptide
  Seed: PRMCSLMQGSTLPRRS
PRMFSLHQASTIPRRS

SEQ ID NO: 114582 - protein, 16 aa, Artificial Sequence
  Description of Artificial Sequence: Synthetic peptide
  Seed: PRMCSLMQGSTLPRRS
PRMFSLHQASTLPRRS

SEQ ID NO: 114583 - protein, 16 aa, Artificial Sequence
  Description of Artificial Sequence: Synthetic peptide
  Seed: PRMCSLMQGSTLPRRS
PRMFSLHQASTVPRRS

SEQ ID NO: 114584 - protein, 16 aa, Artificial Sequence
  Description of Artificial Sequence: Synthetic peptide
  Seed: PRMCSLMQGSTLPRRS
PRMFSLIQASTAPRRS

SEQ ID NO: 114585 - protein, 16 aa, Artificial Sequence
  Description of Artificial Sequence: Synthetic peptide
  Seed: PRMCSLMQGSTLPRRS
PRMFSLIQASTCPRRS

SEQ ID NO: 114586 - protein, 16 aa, Artificial Sequence
  Description of Artificial Sequence: Synthetic peptide
  Seed: PRMCSLMQGSTLPRRS
PRMFSLIQASTDPRRS

SEQ ID NO: 114587 - protein, 16 aa, Artificial Sequence
  Description of Artificial Sequence: Synthetic peptide
  Seed: PRMCSLMQGSTLPRRS
PRMFSLIQASTEPRRS

SEQ ID NO: 114588 - protein, 16 aa, Artificial Sequence
  Description of Artificial Sequence: Synthetic peptide
  Seed: PRMCSLMQGSTLPRRS
PRMFSLIQASTFPRRS

SEQ ID NO: 114589 - protein, 16 aa, Artificial Sequence
  Description of Artificial Sequence: Synthetic peptide
  Seed: PRMCSLMQGSTLPRRS
PRMFSLIQASTGPRRS

SEQ ID NO: 114590 - protein, 16 aa, Artificial Sequence
  Description of Artificial Sequence: Synthetic peptide
  Seed: PRMCSLMQGSTLPRRS
PRMFSLIQASTHPRRS

SEQ ID NO: 114591 - protein, 16 aa, Artificial Sequence
  Description of Artificial Sequence: Synthetic peptide
  Seed: PRMCSLMQGSTLPRRS
PRMFSLIQASTIPRRS

SEQ ID NO: 114592 - protein, 16 aa, Artificial Sequence
  Description of Artificial Sequence: Synthetic peptide
  Seed: PRMCSLMQGSTLPRRS
PRMFSLIQASTLPRRS

SEQ ID NO: 114593 - protein, 16 aa, Artificial Sequence
  Description of Artificial Sequence: Synthetic peptide
  Seed: PRMCSLMQGSTLPRRS
PRMFSLIQASTMPRRS

SEQ ID NO: 114594 - protein, 16 aa, Artificial Sequence
  Description of Artificial Sequence: Synthetic peptide
  Seed: PRMCSLMQGSTLPRRS
PRMFSLIQASTNPRRS

SEQ ID NO: 114595 - protein, 16 aa, Artificial Sequence
  Description of Artificial Sequence: Synthetic peptide
  Seed: PRMCSLMQGSTLPRRS
PRMFSLIQASTPPRRS

SEQ ID NO: 114596 - protein, 16 aa, Artificial Sequence
  Description of Artificial Sequence: Synthetic peptide
  Seed: PRMCSLMQGSTLPRRS
PRMFSLIQASTQPRRS

SEQ ID NO: 114597 - protein, 16 aa, Artificial Sequence
  Description of Artificial Sequence: Synthetic peptide
  Seed: PRMCSLMQGSTLPRRS
PRMFSLIQASTSPRRS

SEQ ID NO: 114598 - protein, 16 aa, Artificial Sequence
  Description of Artificial Sequence: Synthetic peptide
  Seed: PRMCSLMQGSTLPRRS
PRMFSLIQASTTPRRS

SEQ ID NO: 114599 - protein, 16 aa, Artificial Sequence
  Description of Artificial Sequence: Synthetic peptide
  Seed: PRMCSLMQGSTLPRRS
PRMFSLIQASTVPRRS

SEQ ID NO: 114600 - protein, 16 aa, Artificial Sequence
  Description of Artificial Sequence: Synthetic peptide
  Seed: PRMCSLMQGSTLPRRS
PRMFSLIQGSTAPRRS

SEQ ID NO: 114601 - protein, 16 aa, Artificial Sequence
  Description of Artificial Sequence: Synthetic peptide
  Seed: PRMCSLMQGSTLPRRS
PRMFSLIQGSTCPRRS

SEQ ID NO: 114602 - protein, 16 aa, Artificial Sequence
  Description of Artificial Sequence: Synthetic peptide
  Seed: PRMCSLMQGSTLPRRS
PRMFSLIQGSTFPRRS

SEQ ID NO: 114603 - protein, 16 aa, Artificial Sequence
  Description of Artificial Sequence: Synthetic peptide
  Seed: PRMCSLMQGSTLPRRS
PRMFSLIQGSTGPRRS

SEQ ID NO: 114604 - protein, 16 aa, Artificial Sequence
  Description of Artificial Sequence: Synthetic peptide
  Seed: PRMCSLMQGSTLPRRS
PRMFSLIQGSTIPRRS

SEQ ID NO: 114605 - protein, 16 aa, Artificial Sequence
  Description of Artificial Sequence: Synthetic peptide
  Seed: PRMCSLMQGSTLPRRS
PRMFSLIQGSTLPRRS

SEQ ID NO: 114606 - protein, 16 aa, Artificial Sequence
  Description of Artificial Sequence: Synthetic peptide
  Seed: PRMCSLMQGSTLPRRS
PRMFSLIQGSTMPRRS

SEQ ID NO: 114607 - protein, 16 aa, Artificial Sequence
  Description of Artificial Sequence: Synthetic peptide
  Seed: PRMCSLMQGSTLPRRS
PRMFSLIQGSTNPRRS

SEQ ID NO: 114608 - protein, 16 aa, Artificial Sequence
  Description of Artificial Sequence: Synthetic peptide
  Seed: PRMCSLMQGSTLPRRS
PRMFSLIQGSTSPRRS

SEQ ID NO: 114609 - protein, 16 aa, Artificial Sequence
  Description of Artificial Sequence: Synthetic peptide
  Seed: PRMCSLMQGSTLPRRS
PRMFSLIQGSTTPRRS

SEQ ID NO: 114610 - protein, 16 aa, Artificial Sequence
  Description of Artificial Sequence: Synthetic peptide
  Seed: PRMCSLMQGSTLPRRS
PRMFSLIQGSTVPRRS

SEQ ID NO: 114611 - protein, 16 aa, Artificial Sequence
  Description of Artificial Sequence: Synthetic peptide
  Seed: PRMCSLMQGSTLPRRS
PRMFSLIQISTAPRRS

SEQ ID NO: 114612 - protein, 16 aa, Artificial Sequence
  Description of Artificial Sequence: Synthetic peptide
  Seed: PRMCSLMQGSTLPRRS
PRMFSLIQISTGPRRS

SEQ ID NO: 114613 - protein, 16 aa, Artificial Sequence
  Description of Artificial Sequence: Synthetic peptide
  Seed: PRMCSLMQGSTLPRRS
PRMFSLIQISTHPRRS

SEQ ID NO: 114614 - protein, 16 aa, Artificial Sequence
  Description of Artificial Sequence: Synthetic peptide
  Seed: PRMCSLMQGSTLPRRS
PRMFSLIQISTIPRRS

SEQ ID NO: 114615 - protein, 16 aa, Artificial Sequence
  Description of Artificial Sequence: Synthetic peptide
  Seed: PRMCSLMQGSTLPRRS
PRMFSLIQISTLPRRS

SEQ ID NO: 114616 - protein, 16 aa, Artificial Sequence
  Description of Artificial Sequence: Synthetic peptide
  Seed: PRMCSLMQGSTLPRRS
PRMFSLIQISTMPRRS

SEQ ID NO: 114617 - protein, 16 aa, Artificial Sequence
  Description of Artificial Sequence: Synthetic peptide
  Seed: PRMCSLMQGSTLPRRS
PRMFSLIQISTNPRRS

SEQ ID NO: 114618 - protein, 16 aa, Artificial Sequence
  Description of Artificial Sequence: Synthetic peptide
  Seed: PRMCSLMQGSTLPRRS
PRMFSLIQISTSPRRS

SEQ ID NO: 114619 - protein, 16 aa, Artificial Sequence
  Description of Artificial Sequence: Synthetic peptide
  Seed: PRMCSLMQGSTLPRRS
PRMFSLIQISTTPRRS

SEQ ID NO: 114620 - protein, 16 aa, Artificial Sequence
  Description of Artificial Sequence: Synthetic peptide
  Seed: PRMCSLMQGSTLPRRS
PRMFSLIQISTVPRRS

SEQ ID NO: 114621 - protein, 16 aa, Artificial Sequence
  Description of Artificial Sequence: Synthetic peptide
  Seed: PRMCSLMQGSTLPRRS
PRMFSLIQLSTAPRRS

SEQ ID NO: 114622 - protein, 16 aa, Artificial Sequence
  Description of Artificial Sequence: Synthetic peptide
  Seed: PRMCSLMQGSTLPRRS
PRMFSLIQLSTNPRRS

SEQ ID NO: 114623 - protein, 16 aa, Artificial Sequence
  Description of Artificial Sequence: Synthetic peptide
  Seed: PRMCSLMQGSTLPRRS
PRMFSLIQLSTSPRRS

SEQ ID NO: 114624 - protein, 16 aa, Artificial Sequence
  Description of Artificial Sequence: Synthetic peptide
  Seed: PRMCSLMQGSTLPRRS
PRMFSLIQLSTVPRRS

SEQ ID NO: 114625 - protein, 16 aa, Artificial Sequence
  Description of Artificial Sequence: Synthetic peptide
  Seed: PRMCSLMQGSTLPRRS
PRMFSLIQMSTAPRRS

SEQ ID NO: 114626 - protein, 16 aa, Artificial Sequence
  Description of Artificial Sequence: Synthetic peptide
  Seed: PRMCSLMQGSTLPRRS
PRMFSLIQMSTNPRRS

SEQ ID NO: 114627 - protein, 16 aa, Artificial Sequence
  Description of Artificial Sequence: Synthetic peptide
  Seed: PRMCSLMQGSTLPRRS
PRMFSLIQMSTSPRRS

SEQ ID NO: 114628 - protein, 16 aa, Artificial Sequence
  Description of Artificial Sequence: Synthetic peptide
  Seed: PRMCSLMQGSTLPRRS
PRMFSLIQMSTVPRRS

SEQ ID NO: 114629 - protein, 16 aa, Artificial Sequence
  Description of Artificial Sequence: Synthetic peptide
  Seed: PRMCSLMQGSTLPRRS
PRMFSLIQNSTAPRRS

SEQ ID NO: 114630 - protein, 16 aa, Artificial Sequence
  Description of Artificial Sequence: Synthetic peptide
  Seed: PRMCSLMQGSTLPRRS
PRMFSLIQNSTIPRRS

SEQ ID NO: 114631 - protein, 16 aa, Artificial Sequence
  Description of Artificial Sequence: Synthetic peptide
  Seed: PRMCSLMQGSTLPRRS
PRMFSLIQNSTLPRRS

SEQ ID NO: 114632 - protein, 16 aa, Artificial Sequence
  Description of Artificial Sequence: Synthetic peptide
  Seed: PRMCSLMQGSTLPRRS
PRMFSLIQNSTMPRRS

SEQ ID NO: 114633 - protein, 16 aa, Artificial Sequence
  Description of Artificial Sequence: Synthetic peptide
  Seed: PRMCSLMQGSTLPRRS
PRMFSLIQNSTNPRRS

SEQ ID NO: 114634 - protein, 16 aa, Artificial Sequence
  Description of Artificial Sequence: Synthetic peptide
  Seed: PRMCSLMQGSTLPRRS
PRMFSLIQNSTSPRRS

SEQ ID NO: 114635 - protein, 16 aa, Artificial Sequence
  Description of Artificial Sequence: Synthetic peptide
  Seed: PRMCSLMQGSTLPRRS
PRMFSLIQNSTTPRRS

SEQ ID NO: 114636 - protein, 16 aa, Artificial Sequence
  Description of Artificial Sequence: Synthetic peptide
  Seed: PRMCSLMQGSTLPRRS
PRMFSLIQNSTVPRRS

SEQ ID NO: 114637 - protein, 16 aa, Artificial Sequence
  Description of Artificial Sequence: Synthetic peptide
  Seed: PRMCSLMQGSTLPRRS
PRMFSLIQPSTAPRRS

SEQ ID NO: 114638 - protein, 16 aa, Artificial Sequence
  Description of Artificial Sequence: Synthetic peptide
  Seed: PRMCSLMQGSTLPRRS
PRMFSLIQPSTGPRRS

SEQ ID NO: 114639 - protein, 16 aa, Artificial Sequence
  Description of Artificial Sequence: Synthetic peptide
  Seed: PRMCSLMQGSTLPRRS
PRMFSLIQPSTHPRRS

SEQ ID NO: 114640 - protein, 16 aa, Artificial Sequence
  Description of Artificial Sequence: Synthetic peptide
  Seed: PRMCSLMQGSTLPRRS
PRMFSLIQPSTIPRRS

SEQ ID NO: 114641 - protein, 16 aa, Artificial Sequence
  Description of Artificial Sequence: Synthetic peptide
  Seed: PRMCSLMQGSTLPRRS
PRMFSLIQPSTLPRRS

SEQ ID NO: 114642 - protein, 16 aa, Artificial Sequence
  Description of Artificial Sequence: Synthetic peptide
  Seed: PRMCSLMQGSTLPRRS
PRMFSLIQPSTMPRRS

SEQ ID NO: 114643 - protein, 16 aa, Artificial Sequence
  Description of Artificial Sequence: Synthetic peptide
  Seed: PRMCSLMQGSTLPRRS
PRMFSLIQPSTNPRRS

SEQ ID NO: 114644 - protein, 16 aa, Artificial Sequence
  Description of Artificial Sequence: Synthetic peptide
  Seed: PRMCSLMQGSTLPRRS
PRMFSLIQPSTPPRRS

SEQ ID NO: 114645 - protein, 16 aa, Artificial Sequence
  Description of Artificial Sequence: Synthetic peptide
  Seed: PRMCSLMQGSTLPRRS
PRMFSLIQPSTQPRRS

SEQ ID NO: 114646 - protein, 16 aa, Artificial Sequence
  Description of Artificial Sequence: Synthetic peptide
  Seed: PRMCSLMQGSTLPRRS
PRMFSLIQPSTSPRRS

SEQ ID NO: 114647 - protein, 16 aa, Artificial Sequence
  Description of Artificial Sequence: Synthetic peptide
  Seed: PRMCSLMQGSTLPRRS
PRMFSLIQPSTTPRRS

SEQ ID NO: 114648 - protein, 16 aa, Artificial Sequence
  Description of Artificial Sequence: Synthetic peptide
  Seed: PRMCSLMQGSTLPRRS
PRMFSLIQPSTVPRRS

SEQ ID NO: 114649 - protein, 16 aa, Artificial Sequence
  Description of Artificial Sequence: Synthetic peptide
  Seed: PRMCSLMQGSTLPRRS
PRMFSLIQSSTAPRRS

SEQ ID NO: 114650 - protein, 16 aa, Artificial Sequence
  Description of Artificial Sequence: Synthetic peptide
  Seed: PRMCSLMQGSTLPRRS
PRMFSLIQSSTCPRRS

SEQ ID NO: 114651 - protein, 16 aa, Artificial Sequence
  Description of Artificial Sequence: Synthetic peptide
  Seed: PRMCSLMQGSTLPRRS
PRMFSLIQSSTGPRRS

SEQ ID NO: 114652 - protein, 16 aa, Artificial Sequence
  Description of Artificial Sequence: Synthetic peptide
  Seed: PRMCSLMQGSTLPRRS
PRMFSLIQSSTHPRRS

SEQ ID NO: 114653 - protein, 16 aa, Artificial Sequence
  Description of Artificial Sequence: Synthetic peptide
  Seed: PRMCSLMQGSTLPRRS
PRMFSLIQSSTIPRRS

SEQ ID NO: 114654 - protein, 16 aa, Artificial Sequence
  Description of Artificial Sequence: Synthetic peptide
  Seed: PRMCSLMQGSTLPRRS
PRMFSLIQSSTLPRRS

SEQ ID NO: 114655 - protein, 16 aa, Artificial Sequence
  Description of Artificial Sequence: Synthetic peptide
  Seed: PRMCSLMQGSTLPRRS
PRMFSLIQSSTMPRRS

SEQ ID NO: 114656 - protein, 16 aa, Artificial Sequence
  Description of Artificial Sequence: Synthetic peptide
  Seed: PRMCSLMQGSTLPRRS
PRMFSLIQSSTNPRRS

SEQ ID NO: 114657 - protein, 16 aa, Artificial Sequence
  Description of Artificial Sequence: Synthetic peptide
  Seed: PRMCSLMQGSTLPRRS
PRMFSLIQSSTQPRRS

SEQ ID NO: 114658 - protein, 16 aa, Artificial Sequence
  Description of Artificial Sequence: Synthetic peptide
  Seed: PRMCSLMQGSTLPRRS
PRMFSLIQSSTSPRRS

SEQ ID NO: 114659 - protein, 16 aa, Artificial Sequence
  Description of Artificial Sequence: Synthetic peptide
  Seed: PRMCSLMQGSTLPRRS
PRMFSLIQSSTTPRRS

SEQ ID NO: 114660 - protein, 16 aa, Artificial Sequence
  Description of Artificial Sequence: Synthetic peptide
  Seed: PRMCSLMQGSTLPRRS
PRMFSLIQSSTVPRRS

SEQ ID NO: 114661 - protein, 16 aa, Artificial Sequence
  Description of Artificial Sequence: Synthetic peptide
  Seed: PRMCSLMQGSTLPRRS
PRMFSLIQTSTAPRRS

SEQ ID NO: 114662 - protein, 16 aa, Artificial Sequence
  Description of Artificial Sequence: Synthetic peptide
  Seed: PRMCSLMQGSTLPRRS
PRMFSLIQTSTGPRRS

SEQ ID NO: 114663 - protein, 16 aa, Artificial Sequence
  Description of Artificial Sequence: Synthetic peptide
  Seed: PRMCSLMQGSTLPRRS
PRMFSLIQTSTHPRRS

SEQ ID NO: 114664 - protein, 16 aa, Artificial Sequence
  Description of Artificial Sequence: Synthetic peptide
  Seed: PRMCSLMQGSTLPRRS
PRMFSLIQTSTIPRRS

SEQ ID NO: 114665 - protein, 16 aa, Artificial Sequence
  Description of Artificial Sequence: Synthetic peptide
  Seed: PRMCSLMQGSTLPRRS
PRMFSLIQTSTLPRRS

SEQ ID NO: 114666 - protein, 16 aa, Artificial Sequence
  Description of Artificial Sequence: Synthetic peptide
  Seed: PRMCSLMQGSTLPRRS
PRMFSLIQTSTMPRRS

SEQ ID NO: 114667 - protein, 16 aa, Artificial Sequence
  Description of Artificial Sequence: Synthetic peptide
  Seed: PRMCSLMQGSTLPRRS
PRMFSLIQTSTNPRRS

SEQ ID NO: 114668 - protein, 16 aa, Artificial Sequence
  Description of Artificial Sequence: Synthetic peptide
  Seed: PRMCSLMQGSTLPRRS
PRMFSLIQTSTQPRRS

SEQ ID NO: 114669 - protein, 16 aa, Artificial Sequence
  Description of Artificial Sequence: Synthetic peptide
  Seed: PRMCSLMQGSTLPRRS
PRMFSLIQTSTSPRRS

SEQ ID NO: 114670 - protein, 16 aa, Artificial Sequence
  Description of Artificial Sequence: Synthetic peptide
  Seed: PRMCSLMQGSTLPRRS
PRMFSLIQTSTTPRRS

SEQ ID NO: 114671 - protein, 16 aa, Artificial Sequence
  Description of Artificial Sequence: Synthetic peptide
  Seed: PRMCSLMQGSTLPRRS
PRMFSLIQTSTVPRRS

SEQ ID NO: 114672 - protein, 16 aa, Artificial Sequence
  Description of Artificial Sequence: Synthetic peptide
  Seed: PRMCSLMQGSTLPRRS
PRMFSLIQVSTAPRRS

SEQ ID NO: 114673 - protein, 16 aa, Artificial Sequence
  Description of Artificial Sequence: Synthetic peptide
  Seed: PRMCSLMQGSTLPRRS
PRMFSLIQVSTGPRRS

SEQ ID NO: 114674 - protein, 16 aa, Artificial Sequence
  Description of Artificial Sequence: Synthetic peptide
  Seed: PRMCSLMQGSTLPRRS
PRMFSLIQVSTHPRRS

SEQ ID NO: 114675 - protein, 16 aa, Artificial Sequence
  Description of Artificial Sequence: Synthetic peptide
  Seed: PRMCSLMQGSTLPRRS
PRMFSLIQVSTIPRRS

SEQ ID NO: 114676 - protein, 16 aa, Artificial Sequence
  Description of Artificial Sequence: Synthetic peptide
  Seed: PRMCSLMQGSTLPRRS
PRMFSLIQVSTLPRRS

SEQ ID NO: 114677 - protein, 16 aa, Artificial Sequence
  Description of Artificial Sequence: Synthetic peptide
  Seed: PRMCSLMQGSTLPRRS
PRMFSLIQVSTMPRRS

SEQ ID NO: 114678 - protein, 16 aa, Artificial Sequence
  Description of Artificial Sequence: Synthetic peptide
  Seed: PRMCSLMQGSTLPRRS
PRMFSLIQVSTNPRRS

SEQ ID NO: 114679 - protein, 16 aa, Artificial Sequence
  Description of Artificial Sequence: Synthetic peptide
  Seed: PRMCSLMQGSTLPRRS
PRMFSLIQVSTQPRRS

SEQ ID NO: 114680 - protein, 16 aa, Artificial Sequence
  Description of Artificial Sequence: Synthetic peptide
  Seed: PRMCSLMQGSTLPRRS
PRMFSLIQVSTSPRRS

SEQ ID NO: 114681 - protein, 16 aa, Artificial Sequence
  Description of Artificial Sequence: Synthetic peptide
  Seed: PRMCSLMQGSTLPRRS
PRMFSLIQVSTTPRRS

SEQ ID NO: 114682 - protein, 16 aa, Artificial Sequence
  Description of Artificial Sequence: Synthetic peptide
  Seed: PRMCSLMQGSTLPRRS
PRMFSLIQVSTVPRRS

SEQ ID NO: 114683 - protein, 16 aa, Artificial Sequence
  Description of Artificial Sequence: Synthetic peptide
  Seed: PRMCSLMQGSTLPRRS
PRMFSLLQASTAPRRS

SEQ ID NO: 114684 - protein, 16 aa, Artificial Sequence
  Description of Artificial Sequence: Synthetic peptide
  Seed: PRMCSLMQGSTLPRRS
PRMFSLLQASTCPRRS

SEQ ID NO: 114685 - protein, 16 aa, Artificial Sequence
  Description of Artificial Sequence: Synthetic peptide
  Seed: PRMCSLMQGSTLPRRS
PRMFSLLQASTDPRRS

SEQ ID NO: 114686 - protein, 16 aa, Artificial Sequence
  Description of Artificial Sequence: Synthetic peptide
  Seed: PRMCSLMQGSTLPRRS
PRMFSLLQASTEPRRS

SEQ ID NO: 114687 - protein, 16 aa, Artificial Sequence
  Description of Artificial Sequence: Synthetic peptide
  Seed: PRMCSLMQGSTLPRRS
PRMFSLLQASTFPRRS

SEQ ID NO: 114688 - protein, 16 aa, Artificial Sequence
  Description of Artificial Sequence: Synthetic peptide
  Seed: PRMCSLMQGSTLPRRS
PRMFSLLQASTGPRRS

SEQ ID NO: 114689 - protein, 16 aa, Artificial Sequence
  Description of Artificial Sequence: Synthetic peptide
  Seed: PRMCSLMQGSTLPRRS
PRMFSLLQASTHPRRS

SEQ ID NO: 114690 - protein, 16 aa, Artificial Sequence
  Description of Artificial Sequence: Synthetic peptide
  Seed: PRMCSLMQGSTLPRRS
PRMFSLLQASTIPRRS

SEQ ID NO: 114691 - protein, 16 aa, Artificial Sequence
  Description of Artificial Sequence: Synthetic peptide
  Seed: PRMCSLMQGSTLPRRS
PRMFSLLQASTLPRRS

SEQ ID NO: 114692 - protein, 16 aa, Artificial Sequence
  Description of Artificial Sequence: Synthetic peptide
  Seed: PRMCSLMQGSTLPRRS
PRMFSLLQASTMPRRS

SEQ ID NO: 114693 - protein, 16 aa, Artificial Sequence
  Description of Artificial Sequence: Synthetic peptide
  Seed: PRMCSLMQGSTLPRRS
PRMFSLLQASTNPRRS

SEQ ID NO: 114694 - protein, 16 aa, Artificial Sequence
  Description of Artificial Sequence: Synthetic peptide
  Seed: PRMCSLMQGSTLPRRS
PRMFSLLQASTPPRRS

SEQ ID NO: 114695 - protein, 16 aa, Artificial Sequence
  Description of Artificial Sequence: Synthetic peptide
  Seed: PRMCSLMQGSTLPRRS
PRMFSLLQASTQPRRS

SEQ ID NO: 114696 - protein, 16 aa, Artificial Sequence
  Description of Artificial Sequence: Synthetic peptide
  Seed: PRMCSLMQGSTLPRRS
PRMFSLLQASTSPRRS

SEQ ID NO: 114697 - protein, 16 aa, Artificial Sequence
  Description of Artificial Sequence: Synthetic peptide
  Seed: PRMCSLMQGSTLPRRS
PRMFSLLQASTTPRRS

SEQ ID NO: 114698 - protein, 16 aa, Artificial Sequence
  Description of Artificial Sequence: Synthetic peptide
  Seed: PRMCSLMQGSTLPRRS
PRMFSLLQASTVPRRS

SEQ ID NO: 114699 - protein, 16 aa, Artificial Sequence
  Description of Artificial Sequence: Synthetic peptide
  Seed: PRMCSLMQGSTLPRRS
PRMFSLLQASTWPRRS

SEQ ID NO: 114700 - protein, 16 aa, Artificial Sequence
  Description of Artificial Sequence: Synthetic peptide
  Seed: PRMCSLMQGSTLPRRS
PRMFSLLQASTYPRRS

SEQ ID NO: 114701 - protein, 16 aa, Artificial Sequence
  Description of Artificial Sequence: Synthetic peptide
  Seed: PRMCSLMQGSTLPRRS
PRMFSLLQCSTVPRRS

SEQ ID NO: 114702 - protein, 16 aa, Artificial Sequence
  Description of Artificial Sequence: Synthetic peptide
  Seed: PRMCSLMQGSTLPRRS
PRMFSLLQGSTAPRRS

SEQ ID NO: 114703 - protein, 16 aa, Artificial Sequence
  Description of Artificial Sequence: Synthetic peptide
  Seed: PRMCSLMQGSTLPRRS
PRMFSLLQGSTCPRRS

SEQ ID NO: 114704 - protein, 16 aa, Artificial Sequence
  Description of Artificial Sequence: Synthetic peptide
  Seed: PRMCSLMQGSTLPRRS
PRMFSLLQGSTFPRRS

SEQ ID NO: 114705 - protein, 16 aa, Artificial Sequence
  Description of Artificial Sequence: Synthetic peptide
  Seed: PRMCSLMQGSTLPRRS
PRMFSLLQGSTGPRRS

SEQ ID NO: 114706 - protein, 16 aa, Artificial Sequence
  Description of Artificial Sequence: Synthetic peptide
  Seed: PRMCSLMQGSTLPRRS
PRMFSLLQGSTHPRRS

SEQ ID NO: 114707 - protein, 16 aa, Artificial Sequence
  Description of Artificial Sequence: Synthetic peptide
  Seed: PRMCSLMQGSTLPRRS
PRMFSLLQGSTIPRRS

SEQ ID NO: 114708 - protein, 16 aa, Artificial Sequence
  Description of Artificial Sequence: Synthetic peptide
  Seed: PRMCSLMQGSTLPRRS
PRMFSLLQGSTLPRRS

SEQ ID NO: 114709 - protein, 16 aa, Artificial Sequence
  Description of Artificial Sequence: Synthetic peptide
  Seed: PRMCSLMQGSTLPRRS
PRMFSLLQGSTMPRRS

SEQ ID NO: 114710 - protein, 16 aa, Artificial Sequence
  Description of Artificial Sequence: Synthetic peptide
  Seed: PRMCSLMQGSTLPRRS
PRMFSLLQGSTNPRRS

SEQ ID NO: 114711 - protein, 16 aa, Artificial Sequence
  Description of Artificial Sequence: Synthetic peptide
  Seed: PRMCSLMQGSTLPRRS
PRMFSLLQGSTPPRRS

SEQ ID NO: 114712 - protein, 16 aa, Artificial Sequence
  Description of Artificial Sequence: Synthetic peptide
  Seed: PRMCSLMQGSTLPRRS
PRMFSLLQGSTQPRRS

SEQ ID NO: 114713 - protein, 16 aa, Artificial Sequence
  Description of Artificial Sequence: Synthetic peptide
  Seed: PRMCSLMQGSTLPRRS
PRMFSLLQGSTSPRRS

SEQ ID NO: 114714 - protein, 16 aa, Artificial Sequence
  Description of Artificial Sequence: Synthetic peptide
  Seed: PRMCSLMQGSTLPRRS
PRMFSLLQGSTTPRRS

SEQ ID NO: 114715 - protein, 16 aa, Artificial Sequence
  Description of Artificial Sequence: Synthetic peptide
  Seed: PRMCSLMQGSTLPRRS
PRMFSLLQGSTVPRRS

SEQ ID NO: 114716 - protein, 16 aa, Artificial Sequence
  Description of Artificial Sequence: Synthetic peptide
  Seed: PRMCSLMQGSTLPRRS
PRMFSLLQGSTYPRRS

SEQ ID NO: 114717 - protein, 16 aa, Artificial Sequence
  Description of Artificial Sequence: Synthetic peptide
  Seed: PRMCSLMQGSTLPRRS
PRMFSLLQHSTLPRRS

SEQ ID NO: 114718 - protein, 16 aa, Artificial Sequence
  Description of Artificial Sequence: Synthetic peptide
  Seed: PRMCSLMQGSTLPRRS
PRMFSLLQHSTVPRRS

SEQ ID NO: 114719 - protein, 16 aa, Artificial Sequence
  Description of Artificial Sequence: Synthetic peptide
  Seed: PRMCSLMQGSTLPRRS
PRMFSLLQISTAPRRS

SEQ ID NO: 114720 - protein, 16 aa, Artificial Sequence
  Description of Artificial Sequence: Synthetic peptide
  Seed: PRMCSLMQGSTLPRRS
PRMFSLLQISTGPRRS

SEQ ID NO: 114721 - protein, 16 aa, Artificial Sequence
  Description of Artificial Sequence: Synthetic peptide
  Seed: PRMCSLMQGSTLPRRS
PRMFSLLQISTHPRRS

SEQ ID NO: 114722 - protein, 16 aa, Artificial Sequence
  Description of Artificial Sequence: Synthetic peptide
  Seed: PRMCSLMQGSTLPRRS
PRMFSLLQISTIPRRS

SEQ ID NO: 114723 - protein, 16 aa, Artificial Sequence
  Description of Artificial Sequence: Synthetic peptide
  Seed: PRMCSLMQGSTLPRRS
PRMFSLLQISTLPRRS

SEQ ID NO: 114724 - protein, 16 aa, Artificial Sequence
  Description of Artificial Sequence: Synthetic peptide
  Seed: PRMCSLMQGSTLPRRS
PRMFSLLQISTMPRRS

SEQ ID NO: 114725 - protein, 16 aa, Artificial Sequence
  Description of Artificial Sequence: Synthetic peptide
  Seed: PRMCSLMQGSTLPRRS
PRMFSLLQISTNPRRS

SEQ ID NO: 114726 - protein, 16 aa, Artificial Sequence
  Description of Artificial Sequence: Synthetic peptide
  Seed: PRMCSLMQGSTLPRRS
PRMFSLLQISTPPRRS

SEQ ID NO: 114727 - protein, 16 aa, Artificial Sequence
  Description of Artificial Sequence: Synthetic peptide
  Seed: PRMCSLMQGSTLPRRS
PRMFSLLQISTQPRRS

SEQ ID NO: 114728 - protein, 16 aa, Artificial Sequence
  Description of Artificial Sequence: Synthetic peptide
  Seed: PRMCSLMQGSTLPRRS
PRMFSLLQISTSPRRS

SEQ ID NO: 114729 - protein, 16 aa, Artificial Sequence
  Description of Artificial Sequence: Synthetic peptide
  Seed: PRMCSLMQGSTLPRRS
PRMFSLLQISTTPRRS

SEQ ID NO: 114730 - protein, 16 aa, Artificial Sequence
  Description of Artificial Sequence: Synthetic peptide
  Seed: PRMCSLMQGSTLPRRS
PRMFSLLQISTVPRRS

SEQ ID NO: 114731 - protein, 16 aa, Artificial Sequence
  Description of Artificial Sequence: Synthetic peptide
  Seed: PRMCSLMQGSTLPRRS
PRMFSLLQLSTAPRRS

SEQ ID NO: 114732 - protein, 16 aa, Artificial Sequence
  Description of Artificial Sequence: Synthetic peptide
  Seed: PRMCSLMQGSTLPRRS
PRMFSLLQLSTIPRRS

SEQ ID NO: 114733 - protein, 16 aa, Artificial Sequence
  Description of Artificial Sequence: Synthetic peptide
  Seed: PRMCSLMQGSTLPRRS
PRMFSLLQLSTLPRRS

SEQ ID NO: 114734 - protein, 16 aa, Artificial Sequence
  Description of Artificial Sequence: Synthetic peptide
  Seed: PRMCSLMQGSTLPRRS
PRMFSLLQLSTMPRRS

SEQ ID NO: 114735 - protein, 16 aa, Artificial Sequence
  Description of Artificial Sequence: Synthetic peptide
  Seed: PRMCSLMQGSTLPRRS
PRMFSLLQLSTNPRRS

SEQ ID NO: 114736 - protein, 16 aa, Artificial Sequence
  Description of Artificial Sequence: Synthetic peptide
  Seed: PRMCSLMQGSTLPRRS
PRMFSLLQLSTSPRRS

SEQ ID NO: 114737 - protein, 16 aa, Artificial Sequence
  Description of Artificial Sequence: Synthetic peptide
  Seed: PRMCSLMQGSTLPRRS
PRMFSLLQLSTTPRRS

SEQ ID NO: 114738 - protein, 16 aa, Artificial Sequence
  Description of Artificial Sequence: Synthetic peptide
  Seed: PRMCSLMQGSTLPRRS
PRMFSLLQLSTVPRRS

SEQ ID NO: 114739 - protein, 16 aa, Artificial Sequence
  Description of Artificial Sequence: Synthetic peptide
  Seed: PRMCSLMQGSTLPRRS
PRMFSLLQMSTAPRRS

SEQ ID NO: 114740 - protein, 16 aa, Artificial Sequence
  Description of Artificial Sequence: Synthetic peptide
  Seed: PRMCSLMQGSTLPRRS
PRMFSLLQMSTIPRRS

SEQ ID NO: 114741 - protein, 16 aa, Artificial Sequence
  Description of Artificial Sequence: Synthetic peptide
  Seed: PRMCSLMQGSTLPRRS
PRMFSLLQMSTLPRRS

SEQ ID NO: 114742 - protein, 16 aa, Artificial Sequence
  Description of Artificial Sequence: Synthetic peptide
  Seed: PRMCSLMQGSTLPRRS
PRMFSLLQMSTMPRRS

SEQ ID NO: 114743 - protein, 16 aa, Artificial Sequence
  Description of Artificial Sequence: Synthetic peptide
  Seed: PRMCSLMQGSTLPRRS
PRMFSLLQMSTNPRRS

SEQ ID NO: 114744 - protein, 16 aa, Artificial Sequence
  Description of Artificial Sequence: Synthetic peptide
  Seed: PRMCSLMQGSTLPRRS
PRMFSLLQMSTSPRRS

SEQ ID NO: 114745 - protein, 16 aa, Artificial Sequence
  Description of Artificial Sequence: Synthetic peptide
  Seed: PRMCSLMQGSTLPRRS
PRMFSLLQMSTTPRRS

SEQ ID NO: 114746 - protein, 16 aa, Artificial Sequence
  Description of Artificial Sequence: Synthetic peptide
  Seed: PRMCSLMQGSTLPRRS
PRMFSLLQMSTVPRRS

SEQ ID NO: 114747 - protein, 16 aa, Artificial Sequence
  Description of Artificial Sequence: Synthetic peptide
  Seed: PRMCSLMQGSTLPRRS
PRMFSLLQNSTAPRRS

SEQ ID NO: 114748 - protein, 16 aa, Artificial Sequence
  Description of Artificial Sequence: Synthetic peptide
  Seed: PRMCSLMQGSTLPRRS
PRMFSLLQNSTGPRRS

SEQ ID NO: 114749 - protein, 16 aa, Artificial Sequence
  Description of Artificial Sequence: Synthetic peptide
  Seed: PRMCSLMQGSTLPRRS
PRMFSLLQNSTIPRRS

SEQ ID NO: 114750 - protein, 16 aa, Artificial Sequence
  Description of Artificial Sequence: Synthetic peptide
  Seed: PRMCSLMQGSTLPRRS
PRMFSLLQNSTLPRRS

SEQ ID NO: 114751 - protein, 16 aa, Artificial Sequence
  Description of Artificial Sequence: Synthetic peptide
  Seed: PRMCSLMQGSTLPRRS
PRMFSLLQNSTMPRRS

SEQ ID NO: 114752 - protein, 16 aa, Artificial Sequence
  Description of Artificial Sequence: Synthetic peptide
  Seed: PRMCSLMQGSTLPRRS
PRMFSLLQNSTNPRRS

SEQ ID NO: 114753 - protein, 16 aa, Artificial Sequence
  Description of Artificial Sequence: Synthetic peptide
  Seed: PRMCSLMQGSTLPRRS
PRMFSLLQNSTSPRRS

SEQ ID NO: 114754 - protein, 16 aa, Artificial Sequence
  Description of Artificial Sequence: Synthetic peptide
  Seed: PRMCSLMQGSTLPRRS
PRMFSLLQNSTTPRRS

SEQ ID NO: 114755 - protein, 16 aa, Artificial Sequence
  Description of Artificial Sequence: Synthetic peptide
  Seed: PRMCSLMQGSTLPRRS
PRMFSLLQNSTVPRRS

SEQ ID NO: 114756 - protein, 16 aa, Artificial Sequence
  Description of Artificial Sequence: Synthetic peptide
  Seed: PRMCSLMQGSTLPRRS
PRMFSLLQPSTAPRRS

SEQ ID NO: 114757 - protein, 16 aa, Artificial Sequence
  Description of Artificial Sequence: Synthetic peptide
  Seed: PRMCSLMQGSTLPRRS
PRMFSLLQPSTCPRRS

SEQ ID NO: 114758 - protein, 16 aa, Artificial Sequence
  Description of Artificial Sequence: Synthetic peptide
  Seed: PRMCSLMQGSTLPRRS
PRMFSLLQPSTDPRRS

SEQ ID NO: 114759 - protein, 16 aa, Artificial Sequence
  Description of Artificial Sequence: Synthetic peptide
  Seed: PRMCSLMQGSTLPRRS
PRMFSLLQPSTEPRRS

SEQ ID NO: 114760 - protein, 16 aa, Artificial Sequence
  Description of Artificial Sequence: Synthetic peptide
  Seed: PRMCSLMQGSTLPRRS
PRMFSLLQPSTFPRRS

SEQ ID NO: 114761 - protein, 16 aa, Artificial Sequence
  Description of Artificial Sequence: Synthetic peptide
  Seed: PRMCSLMQGSTLPRRS
PRMFSLLQPSTGPRRS

SEQ ID NO: 114762 - protein, 16 aa, Artificial Sequence
  Description of Artificial Sequence: Synthetic peptide
  Seed: PRMCSLMQGSTLPRRS
PRMFSLLQPSTHPRRS

SEQ ID NO: 114763 - protein, 16 aa, Artificial Sequence
  Description of Artificial Sequence: Synthetic peptide
  Seed: PRMCSLMQGSTLPRRS
PRMFSLLQPSTIPRRS

SEQ ID NO: 114764 - protein, 16 aa, Artificial Sequence
  Description of Artificial Sequence: Synthetic peptide
  Seed: PRMCSLMQGSTLPRRS
PRMFSLLQPSTLPRRS

SEQ ID NO: 114765 - protein, 16 aa, Artificial Sequence
  Description of Artificial Sequence: Synthetic peptide
  Seed: PRMCSLMQGSTLPRRS
PRMFSLLQPSTMPRRS

SEQ ID NO: 114766 - protein, 16 aa, Artificial Sequence
  Description of Artificial Sequence: Synthetic peptide
  Seed: PRMCSLMQGSTLPRRS
PRMFSLLQPSTNPRRS

SEQ ID NO: 114767 - protein, 16 aa, Artificial Sequence
  Description of Artificial Sequence: Synthetic peptide
  Seed: PRMCSLMQGSTLPRRS
PRMFSLLQPSTPPRRS

SEQ ID NO: 114768 - protein, 16 aa, Artificial Sequence
  Description of Artificial Sequence: Synthetic peptide
  Seed: PRMCSLMQGSTLPRRS
PRMFSLLQPSTQPRRS

SEQ ID NO: 114769 - protein, 16 aa, Artificial Sequence
  Description of Artificial Sequence: Synthetic peptide
  Seed: PRMCSLMQGSTLPRRS
PRMFSLLQPSTSPRRS

SEQ ID NO: 114770 - protein, 16 aa, Artificial Sequence
  Description of Artificial Sequence: Synthetic peptide
  Seed: PRMCSLMQGSTLPRRS
PRMFSLLQPSTTPRRS

SEQ ID NO: 114771 - protein, 16 aa, Artificial Sequence
  Description of Artificial Sequence: Synthetic peptide
  Seed: PRMCSLMQGSTLPRRS
PRMFSLLQPSTVPRRS

SEQ ID NO: 114772 - protein, 16 aa, Artificial Sequence
  Description of Artificial Sequence: Synthetic peptide
  Seed: PRMCSLMQGSTLPRRS
PRMFSLLQPSTWPRRS

SEQ ID NO: 114773 - protein, 16 aa, Artificial Sequence
  Description of Artificial Sequence: Synthetic peptide
  Seed: PRMCSLMQGSTLPRRS
PRMFSLLQSSTAPRRS

SEQ ID NO: 114774 - protein, 16 aa, Artificial Sequence
  Description of Artificial Sequence: Synthetic peptide
  Seed: PRMCSLMQGSTLPRRS
PRMFSLLQSSTCPRRS

SEQ ID NO: 114775 - protein, 16 aa, Artificial Sequence
  Description of Artificial Sequence: Synthetic peptide
  Seed: PRMCSLMQGSTLPRRS
PRMFSLLQSSTFPRRS

SEQ ID NO: 114776 - protein, 16 aa, Artificial Sequence
  Description of Artificial Sequence: Synthetic peptide
  Seed: PRMCSLMQGSTLPRRS
PRMFSLLQSSTGPRRS

SEQ ID NO: 114777 - protein, 16 aa, Artificial Sequence
  Description of Artificial Sequence: Synthetic peptide
  Seed: PRMCSLMQGSTLPRRS
PRMFSLLQSSTHPRRS

SEQ ID NO: 114778 - protein, 16 aa, Artificial Sequence
  Description of Artificial Sequence: Synthetic peptide
  Seed: PRMCSLMQGSTLPRRS
PRMFSLLQSSTIPRRS

SEQ ID NO: 114779 - protein, 16 aa, Artificial Sequence
  Description of Artificial Sequence: Synthetic peptide
  Seed: PRMCSLMQGSTLPRRS
PRMFSLLQSSTLPRRS

SEQ ID NO: 114780 - protein, 16 aa, Artificial Sequence
  Description of Artificial Sequence: Synthetic peptide
  Seed: PRMCSLMQGSTLPRRS
PRMFSLLQSSTMPRRS

SEQ ID NO: 114781 - protein, 16 aa, Artificial Sequence
  Description of Artificial Sequence: Synthetic peptide
  Seed: PRMCSLMQGSTLPRRS
PRMFSLLQSSTNPRRS

SEQ ID NO: 114782 - protein, 16 aa, Artificial Sequence
  Description of Artificial Sequence: Synthetic peptide
  Seed: PRMCSLMQGSTLPRRS
PRMFSLLQSSTPPRRS

SEQ ID NO: 114783 - protein, 16 aa, Artificial Sequence
  Description of Artificial Sequence: Synthetic peptide
  Seed: PRMCSLMQGSTLPRRS
PRMFSLLQSSTQPRRS

SEQ ID NO: 114784 - protein, 16 aa, Artificial Sequence
  Description of Artificial Sequence: Synthetic peptide
  Seed: PRMCSLMQGSTLPRRS
PRMFSLLQSSTSPRRS

SEQ ID NO: 114785 - protein, 16 aa, Artificial Sequence
  Description of Artificial Sequence: Synthetic peptide
  Seed: PRMCSLMQGSTLPRRS
PRMFSLLQSSTTPRRS

SEQ ID NO: 114786 - protein, 16 aa, Artificial Sequence
  Description of Artificial Sequence: Synthetic peptide
  Seed: PRMCSLMQGSTLPRRS
PRMFSLLQSSTVPRRS

SEQ ID NO: 114787 - protein, 16 aa, Artificial Sequence
  Description of Artificial Sequence: Synthetic peptide
  Seed: PRMCSLMQGSTLPRRS
PRMFSLLQTSTAPRRS

SEQ ID NO: 114788 - protein, 16 aa, Artificial Sequence
  Description of Artificial Sequence: Synthetic peptide
  Seed: PRMCSLMQGSTLPRRS
PRMFSLLQTSTGPRRS

SEQ ID NO: 114789 - protein, 16 aa, Artificial Sequence
  Description of Artificial Sequence: Synthetic peptide
  Seed: PRMCSLMQGSTLPRRS
PRMFSLLQTSTHPRRS

SEQ ID NO: 114790 - protein, 16 aa, Artificial Sequence
  Description of Artificial Sequence: Synthetic peptide
  Seed: PRMCSLMQGSTLPRRS
PRMFSLLQTSTIPRRS

SEQ ID NO: 114791 - protein, 16 aa, Artificial Sequence
  Description of Artificial Sequence: Synthetic peptide
  Seed: PRMCSLMQGSTLPRRS
PRMFSLLQTSTLPRRS

SEQ ID NO: 114792 - protein, 16 aa, Artificial Sequence
  Description of Artificial Sequence: Synthetic peptide
  Seed: PRMCSLMQGSTLPRRS
PRMFSLLQTSTMPRRS

SEQ ID NO: 114793 - protein, 16 aa, Artificial Sequence
  Description of Artificial Sequence: Synthetic peptide
  Seed: PRMCSLMQGSTLPRRS
PRMFSLLQTSTNPRRS

SEQ ID NO: 114794 - protein, 16 aa, Artificial Sequence
  Description of Artificial Sequence: Synthetic peptide
  Seed: PRMCSLMQGSTLPRRS
PRMFSLLQTSTPPRRS

SEQ ID NO: 114795 - protein, 16 aa, Artificial Sequence
  Description of Artificial Sequence: Synthetic peptide
  Seed: PRMCSLMQGSTLPRRS
PRMFSLLQTSTQPRRS

SEQ ID NO: 114796 - protein, 16 aa, Artificial Sequence
  Description of Artificial Sequence: Synthetic peptide
  Seed: PRMCSLMQGSTLPRRS
PRMFSLLQTSTSPRRS

SEQ ID NO: 114797 - protein, 16 aa, Artificial Sequence
  Description of Artificial Sequence: Synthetic peptide
  Seed: PRMCSLMQGSTLPRRS
PRMFSLLQTSTTPRRS

SEQ ID NO: 114798 - protein, 16 aa, Artificial Sequence
  Description of Artificial Sequence: Synthetic peptide
  Seed: PRMCSLMQGSTLPRRS
PRMFSLLQTSTVPRRS

SEQ ID NO: 114799 - protein, 16 aa, Artificial Sequence
  Description of Artificial Sequence: Synthetic peptide
  Seed: PRMCSLMQGSTLPRRS
PRMFSLLQVSTAPRRS

SEQ ID NO: 114800 - protein, 16 aa, Artificial Sequence
  Description of Artificial Sequence: Synthetic peptide
  Seed: PRMCSLMQGSTLPRRS
PRMFSLLQVSTDPRRS

SEQ ID NO: 114801 - protein, 16 aa, Artificial Sequence
  Description of Artificial Sequence: Synthetic peptide
  Seed: PRMCSLMQGSTLPRRS
PRMFSLLQVSTGPRRS

SEQ ID NO: 114802 - protein, 16 aa, Artificial Sequence
  Description of Artificial Sequence: Synthetic peptide
  Seed: PRMCSLMQGSTLPRRS
PRMFSLLQVSTHPRRS

SEQ ID NO: 114803 - protein, 16 aa, Artificial Sequence
  Description of Artificial Sequence: Synthetic peptide
  Seed: PRMCSLMQGSTLPRRS
PRMFSLLQVSTIPRRS

SEQ ID NO: 114804 - protein, 16 aa, Artificial Sequence
  Description of Artificial Sequence: Synthetic peptide
  Seed: PRMCSLMQGSTLPRRS
PRMFSLLQVSTLPRRS

SEQ ID NO: 114805 - protein, 16 aa, Artificial Sequence
  Description of Artificial Sequence: Synthetic peptide
  Seed: PRMCSLMQGSTLPRRS
PRMFSLLQVSTMPRRS

SEQ ID NO: 114806 - protein, 16 aa, Artificial Sequence
  Description of Artificial Sequence: Synthetic peptide
  Seed: PRMCSLMQGSTLPRRS
PRMFSLLQVSTNPRRS

SEQ ID NO: 114807 - protein, 16 aa, Artificial Sequence
  Description of Artificial Sequence: Synthetic peptide
  Seed: PRMCSLMQGSTLPRRS
PRMFSLLQVSTPPRRS

SEQ ID NO: 114808 - protein, 16 aa, Artificial Sequence
  Description of Artificial Sequence: Synthetic peptide
  Seed: PRMCSLMQGSTLPRRS
PRMFSLLQVSTQPRRS

SEQ ID NO: 114809 - protein, 16 aa, Artificial Sequence
  Description of Artificial Sequence: Synthetic peptide
  Seed: PRMCSLMQGSTLPRRS
PRMFSLLQVSTSPRRS

SEQ ID NO: 114810 - protein, 16 aa, Artificial Sequence
  Description of Artificial Sequence: Synthetic peptide
  Seed: PRMCSLMQGSTLPRRS
PRMFSLLQVSTTPRRS

SEQ ID NO: 114811 - protein, 16 aa, Artificial Sequence
  Description of Artificial Sequence: Synthetic peptide
  Seed: PRMCSLMQGSTLPRRS
PRMFSLLQVSTVPRRS

SEQ ID NO: 114812 - protein, 16 aa, Artificial Sequence
  Description of Artificial Sequence: Synthetic peptide
  Seed: PRMCSLMQGSTLPRRS
PRMFSLMQASTAPRRS

SEQ ID NO: 114813 - protein, 16 aa, Artificial Sequence
  Description of Artificial Sequence: Synthetic peptide
  Seed: PRMCSLMQGSTLPRRS
PRMFSLMQASTCPRRS

SEQ ID NO: 114814 - protein, 16 aa, Artificial Sequence
  Description of Artificial Sequence: Synthetic peptide
  Seed: PRMCSLMQGSTLPRRS
PRMFSLMQASTDPRRS

SEQ ID NO: 114815 - protein, 16 aa, Artificial Sequence
  Description of Artificial Sequence: Synthetic peptide
  Seed: PRMCSLMQGSTLPRRS
PRMFSLMQASTEPRRS

SEQ ID NO: 114816 - protein, 16 aa, Artificial Sequence
  Description of Artificial Sequence: Synthetic peptide
  Seed: PRMCSLMQGSTLPRRS
PRMFSLMQASTFPRRS

SEQ ID NO: 114817 - protein, 16 aa, Artificial Sequence
  Description of Artificial Sequence: Synthetic peptide
  Seed: PRMCSLMQGSTLPRRS
PRMFSLMQASTGPRRS

SEQ ID NO: 114818 - protein, 16 aa, Artificial Sequence
  Description of Artificial Sequence: Synthetic peptide
  Seed: PRMCSLMQGSTLPRRS
PRMFSLMQASTHPRRS

SEQ ID NO: 114819 - protein, 16 aa, Artificial Sequence
  Description of Artificial Sequence: Synthetic peptide
  Seed: PRMCSLMQGSTLPRRS
PRMFSLMQASTIPRRS

SEQ ID NO: 114820 - protein, 16 aa, Artificial Sequence
  Description of Artificial Sequence: Synthetic peptide
  Seed: PRMCSLMQGSTLPRRS
PRMFSLMQASTKPRRS

SEQ ID NO: 114821 - protein, 16 aa, Artificial Sequence
  Description of Artificial Sequence: Synthetic peptide
  Seed: PRMCSLMQGSTLPRRS
PRMFSLMQASTLPRRS

SEQ ID NO: 114822 - protein, 16 aa, Artificial Sequence
  Description of Artificial Sequence: Synthetic peptide
  Seed: PRMCSLMQGSTLPRRS
PRMFSLMQASTMPRRS

SEQ ID NO: 114823 - protein, 16 aa, Artificial Sequence
  Description of Artificial Sequence: Synthetic peptide
  Seed: PRMCSLMQGSTLPRRS
PRMFSLMQASTNPRRS

SEQ ID NO: 114824 - protein, 16 aa, Artificial Sequence
  Description of Artificial Sequence: Synthetic peptide
  Seed: PRMCSLMQGSTLPRRS
PRMFSLMQASTPPRRS

SEQ ID NO: 114825 - protein, 16 aa, Artificial Sequence
  Description of Artificial Sequence: Synthetic peptide
  Seed: PRMCSLMQGSTLPRRS
PRMFSLMQASTQPRRS

SEQ ID NO: 114826 - protein, 16 aa, Artificial Sequence
  Description of Artificial Sequence: Synthetic peptide
  Seed: PRMCSLMQGSTLPRRS
PRMFSLMQASTRPRRS

SEQ ID NO: 114827 - protein, 16 aa, Artificial Sequence
  Description of Artificial Sequence: Synthetic peptide
  Seed: PRMCSLMQGSTLPRRS
PRMFSLMQASTSPRRS

SEQ ID NO: 114828 - protein, 16 aa, Artificial Sequence
  Description of Artificial Sequence: Synthetic peptide
  Seed: PRMCSLMQGSTLPRRS
PRMFSLMQASTTPRRS

SEQ ID NO: 114829 - protein, 16 aa, Artificial Sequence
  Description of Artificial Sequence: Synthetic peptide
  Seed: PRMCSLMQGSTLPRRS
PRMFSLMQASTVPRRS

SEQ ID NO: 114830 - protein, 16 aa, Artificial Sequence
  Description of Artificial Sequence: Synthetic peptide
  Seed: PRMCSLMQGSTLPRRS
PRMFSLMQASTWPRRS

SEQ ID NO: 114831 - protein, 16 aa, Artificial Sequence
  Description of Artificial Sequence: Synthetic peptide
  Seed: PRMCSLMQGSTLPRRS
PRMFSLMQASTYPRRS

SEQ ID NO: 114832 - protein, 16 aa, Artificial Sequence
  Description of Artificial Sequence: Synthetic peptide
  Seed: PRMCSLMQGSTLPRRS
PRMFSLMQCSTLPRRS

SEQ ID NO: 114833 - protein, 16 aa, Artificial Sequence
  Description of Artificial Sequence: Synthetic peptide
  Seed: PRMCSLMQGSTLPRRS
PRMFSLMQCSTVPRRS

SEQ ID NO: 114834 - protein, 16 aa, Artificial Sequence
  Description of Artificial Sequence: Synthetic peptide
  Seed: PRMCSLMQGSTLPRRS
PRMFSLMQGSTAPRRS

SEQ ID NO: 114835 - protein, 16 aa, Artificial Sequence
  Description of Artificial Sequence: Synthetic peptide
  Seed: PRMCSLMQGSTLPRRS
PRMFSLMQGSTCPRRS

SEQ ID NO: 114836 - protein, 16 aa, Artificial Sequence
  Description of Artificial Sequence: Synthetic peptide
  Seed: PRMCSLMQGSTLPRRS
PRMFSLMQGSTFPRRS

SEQ ID NO: 114837 - protein, 16 aa, Artificial Sequence
  Description of Artificial Sequence: Synthetic peptide
  Seed: PRMCSLMQGSTLPRRS
PRMFSLMQGSTGPRRS

SEQ ID NO: 114838 - protein, 16 aa, Artificial Sequence
  Description of Artificial Sequence: Synthetic peptide
  Seed: PRMCSLMQGSTLPRRS
PRMFSLMQGSTHPRRS

SEQ ID NO: 114839 - protein, 16 aa, Artificial Sequence
  Description of Artificial Sequence: Synthetic peptide
  Seed: PRMCSLMQGSTLPRRS
PRMFSLMQGSTIPRRS

SEQ ID NO: 114840 - protein, 16 aa, Artificial Sequence
  Description of Artificial Sequence: Synthetic peptide
  Seed: PRMCSLMQGSTLPRRS
PRMFSLMQGSTLPRRS

SEQ ID NO: 114841 - protein, 16 aa, Artificial Sequence
  Description of Artificial Sequence: Synthetic peptide
  Seed: PRMCSLMQGSTLPRRS
PRMFSLMQGSTMPRRS

SEQ ID NO: 114842 - protein, 16 aa, Artificial Sequence
  Description of Artificial Sequence: Synthetic peptide
  Seed: PRMCSLMQGSTLPRRS
PRMFSLMQGSTNPRRS

SEQ ID NO: 114843 - protein, 16 aa, Artificial Sequence
  Description of Artificial Sequence: Synthetic peptide
  Seed: PRMCSLMQGSTLPRRS
PRMFSLMQGSTPPRRS

SEQ ID NO: 114844 - protein, 16 aa, Artificial Sequence
  Description of Artificial Sequence: Synthetic peptide
  Seed: PRMCSLMQGSTLPRRS
PRMFSLMQGSTQPRRS

SEQ ID NO: 114845 - protein, 16 aa, Artificial Sequence
  Description of Artificial Sequence: Synthetic peptide
  Seed: PRMCSLMQGSTLPRRS
PRMFSLMQGSTSPRRS

SEQ ID NO: 114846 - protein, 16 aa, Artificial Sequence
  Description of Artificial Sequence: Synthetic peptide
  Seed: PRMCSLMQGSTLPRRS
PRMFSLMQGSTTPRRS

SEQ ID NO: 114847 - protein, 16 aa, Artificial Sequence
  Description of Artificial Sequence: Synthetic peptide
  Seed: PRMCSLMQGSTLPRRS
PRMFSLMQGSTVPRRS

SEQ ID NO: 114848 - protein, 16 aa, Artificial Sequence
  Description of Artificial Sequence: Synthetic peptide
  Seed: PRMCSLMQGSTLPRRS
PRMFSLMQGSTYPRRS

SEQ ID NO: 114849 - protein, 16 aa, Artificial Sequence
  Description of Artificial Sequence: Synthetic peptide
  Seed: PRMCSLMQGSTLPRRS
PRMFSLMQHSTAPRRS

SEQ ID NO: 114850 - protein, 16 aa, Artificial Sequence
  Description of Artificial Sequence: Synthetic peptide
  Seed: PRMCSLMQGSTLPRRS
PRMFSLMQHSTIPRRS

SEQ ID NO: 114851 - protein, 16 aa, Artificial Sequence
  Description of Artificial Sequence: Synthetic peptide
  Seed: PRMCSLMQGSTLPRRS
PRMFSLMQHSTLPRRS

SEQ ID NO: 114852 - protein, 16 aa, Artificial Sequence
  Description of Artificial Sequence: Synthetic peptide
  Seed: PRMCSLMQGSTLPRRS
PRMFSLMQHSTVPRRS

SEQ ID NO: 114853 - protein, 16 aa, Artificial Sequence
  Description of Artificial Sequence: Synthetic peptide
  Seed: PRMCSLMQGSTLPRRS
PRMFSLMQISTAPRRS

SEQ ID NO: 114854 - protein, 16 aa, Artificial Sequence
  Description of Artificial Sequence: Synthetic peptide
  Seed: PRMCSLMQGSTLPRRS
PRMFSLMQISTGPRRS

SEQ ID NO: 114855 - protein, 16 aa, Artificial Sequence
  Description of Artificial Sequence: Synthetic peptide
  Seed: PRMCSLMQGSTLPRRS
PRMFSLMQISTHPRRS

SEQ ID NO: 114856 - protein, 16 aa, Artificial Sequence
  Description of Artificial Sequence: Synthetic peptide
  Seed: PRMCSLMQGSTLPRRS
PRMFSLMQISTIPRRS

SEQ ID NO: 114857 - protein, 16 aa, Artificial Sequence
  Description of Artificial Sequence: Synthetic peptide
  Seed: PRMCSLMQGSTLPRRS
PRMFSLMQISTLPRRS

SEQ ID NO: 114858 - protein, 16 aa, Artificial Sequence
  Description of Artificial Sequence: Synthetic peptide
  Seed: PRMCSLMQGSTLPRRS
PRMFSLMQISTMPRRS

SEQ ID NO: 114859 - protein, 16 aa, Artificial Sequence
  Description of Artificial Sequence: Synthetic peptide
  Seed: PRMCSLMQGSTLPRRS
PRMFSLMQISTNPRRS

SEQ ID NO: 114860 - protein, 16 aa, Artificial Sequence
  Description of Artificial Sequence: Synthetic peptide
  Seed: PRMCSLMQGSTLPRRS
PRMFSLMQISTPPRRS

SEQ ID NO: 114861 - protein, 16 aa, Artificial Sequence
  Description of Artificial Sequence: Synthetic peptide
  Seed: PRMCSLMQGSTLPRRS
PRMFSLMQISTQPRRS

SEQ ID NO: 114862 - protein, 16 aa, Artificial Sequence
  Description of Artificial Sequence: Synthetic peptide
  Seed: PRMCSLMQGSTLPRRS
PRMFSLMQISTSPRRS

SEQ ID NO: 114863 - protein, 16 aa, Artificial Sequence
  Description of Artificial Sequence: Synthetic peptide
  Seed: PRMCSLMQGSTLPRRS
PRMFSLMQISTTPRRS

SEQ ID NO: 114864 - protein, 16 aa, Artificial Sequence
  Description of Artificial Sequence: Synthetic peptide
  Seed: PRMCSLMQGSTLPRRS
PRMFSLMQISTVPRRS

SEQ ID NO: 114865 - protein, 16 aa, Artificial Sequence
  Description of Artificial Sequence: Synthetic peptide
  Seed: PRMCSLMQGSTLPRRS
PRMFSLMQLSTAPRRS

SEQ ID NO: 114866 - protein, 16 aa, Artificial Sequence
  Description of Artificial Sequence: Synthetic peptide
  Seed: PRMCSLMQGSTLPRRS
PRMFSLMQLSTIPRRS

SEQ ID NO: 114867 - protein, 16 aa, Artificial Sequence
  Description of Artificial Sequence: Synthetic peptide
  Seed: PRMCSLMQGSTLPRRS
PRMFSLMQLSTLPRRS

SEQ ID NO: 114868 - protein, 16 aa, Artificial Sequence
  Description of Artificial Sequence: Synthetic peptide
  Seed: PRMCSLMQGSTLPRRS
PRMFSLMQLSTMPRRS

SEQ ID NO: 114869 - protein, 16 aa, Artificial Sequence
  Description of Artificial Sequence: Synthetic peptide
  Seed: PRMCSLMQGSTLPRRS
PRMFSLMQLSTNPRRS

SEQ ID NO: 114870 - protein, 16 aa, Artificial Sequence
  Description of Artificial Sequence: Synthetic peptide
  Seed: PRMCSLMQGSTLPRRS
PRMFSLMQLSTSPRRS

SEQ ID NO: 114871 - protein, 16 aa, Artificial Sequence
  Description of Artificial Sequence: Synthetic peptide
  Seed: PRMCSLMQGSTLPRRS
PRMFSLMQLSTTPRRS

SEQ ID NO: 114872 - protein, 16 aa, Artificial Sequence
  Description of Artificial Sequence: Synthetic peptide
  Seed: PRMCSLMQGSTLPRRS
PRMFSLMQLSTVPRRS

SEQ ID NO: 114873 - protein, 16 aa, Artificial Sequence
  Description of Artificial Sequence: Synthetic peptide
  Seed: PRMCSLMQGSTLPRRS
PRMFSLMQMSTAPRRS

SEQ ID NO: 114874 - protein, 16 aa, Artificial Sequence
  Description of Artificial Sequence: Synthetic peptide
  Seed: PRMCSLMQGSTLPRRS
PRMFSLMQMSTIPRRS

SEQ ID NO: 114875 - protein, 16 aa, Artificial Sequence
  Description of Artificial Sequence: Synthetic peptide
  Seed: PRMCSLMQGSTLPRRS
PRMFSLMQMSTLPRRS

SEQ ID NO: 114876 - protein, 16 aa, Artificial Sequence
  Description of Artificial Sequence: Synthetic peptide
  Seed: PRMCSLMQGSTLPRRS
PRMFSLMQMSTMPRRS

SEQ ID NO: 114877 - protein, 16 aa, Artificial Sequence
  Description of Artificial Sequence: Synthetic peptide
  Seed: PRMCSLMQGSTLPRRS
PRMFSLMQMSTNPRRS

SEQ ID NO: 114878 - protein, 16 aa, Artificial Sequence
  Description of Artificial Sequence: Synthetic peptide
  Seed: PRMCSLMQGSTLPRRS
PRMFSLMQMSTSPRRS

SEQ ID NO: 114879 - protein, 16 aa, Artificial Sequence
  Description of Artificial Sequence: Synthetic peptide
  Seed: PRMCSLMQGSTLPRRS
PRMFSLMQMSTTPRRS

SEQ ID NO: 114880 - protein, 16 aa, Artificial Sequence
  Description of Artificial Sequence: Synthetic peptide
  Seed: PRMCSLMQGSTLPRRS
PRMFSLMQMSTVPRRS

SEQ ID NO: 114881 - protein, 16 aa, Artificial Sequence
  Description of Artificial Sequence: Synthetic peptide
  Seed: PRMCSLMQGSTLPRRS
PRMFSLMQNSTAPRRS

SEQ ID NO: 114882 - protein, 16 aa, Artificial Sequence
  Description of Artificial Sequence: Synthetic peptide
  Seed: PRMCSLMQGSTLPRRS
PRMFSLMQNSTFPRRS

SEQ ID NO: 114883 - protein, 16 aa, Artificial Sequence
  Description of Artificial Sequence: Synthetic peptide
  Seed: PRMCSLMQGSTLPRRS
PRMFSLMQNSTGPRRS

SEQ ID NO: 114884 - protein, 16 aa, Artificial Sequence
  Description of Artificial Sequence: Synthetic peptide
  Seed: PRMCSLMQGSTLPRRS
PRMFSLMQNSTHPRRS

SEQ ID NO: 114885 - protein, 16 aa, Artificial Sequence
  Description of Artificial Sequence: Synthetic peptide
  Seed: PRMCSLMQGSTLPRRS
PRMFSLMQNSTIPRRS

SEQ ID NO: 114886 - protein, 16 aa, Artificial Sequence
  Description of Artificial Sequence: Synthetic peptide
  Seed: PRMCSLMQGSTLPRRS
PRMFSLMQNSTLPRRS

SEQ ID NO: 114887 - protein, 16 aa, Artificial Sequence
  Description of Artificial Sequence: Synthetic peptide
  Seed: PRMCSLMQGSTLPRRS
PRMFSLMQNSTMPRRS

SEQ ID NO: 114888 - protein, 16 aa, Artificial Sequence
  Description of Artificial Sequence: Synthetic peptide
  Seed: PRMCSLMQGSTLPRRS
PRMFSLMQNSTNPRRS

SEQ ID NO: 114889 - protein, 16 aa, Artificial Sequence
  Description of Artificial Sequence: Synthetic peptide
  Seed: PRMCSLMQGSTLPRRS
PRMFSLMQNSTSPRRS

SEQ ID NO: 114890 - protein, 16 aa, Artificial Sequence
  Description of Artificial Sequence: Synthetic peptide
  Seed: PRMCSLMQGSTLPRRS
PRMFSLMQNSTTPRRS

SEQ ID NO: 114891 - protein, 16 aa, Artificial Sequence
  Description of Artificial Sequence: Synthetic peptide
  Seed: PRMCSLMQGSTLPRRS
PRMFSLMQNSTVPRRS

SEQ ID NO: 114892 - protein, 16 aa, Artificial Sequence
  Description of Artificial Sequence: Synthetic peptide
  Seed: PRMCSLMQGSTLPRRS
PRMFSLMQPSTAPRRS

SEQ ID NO: 114893 - protein, 16 aa, Artificial Sequence
  Description of Artificial Sequence: Synthetic peptide
  Seed: PRMCSLMQGSTLPRRS
PRMFSLMQPSTCPRRS

SEQ ID NO: 114894 - protein, 16 aa, Artificial Sequence
  Description of Artificial Sequence: Synthetic peptide
  Seed: PRMCSLMQGSTLPRRS
PRMFSLMQPSTDPRRS

SEQ ID NO: 114895 - protein, 16 aa, Artificial Sequence
  Description of Artificial Sequence: Synthetic peptide
  Seed: PRMCSLMQGSTLPRRS
PRMFSLMQPSTEPRRS

SEQ ID NO: 114896 - protein, 16 aa, Artificial Sequence
  Description of Artificial Sequence: Synthetic peptide
  Seed: PRMCSLMQGSTLPRRS
PRMFSLMQPSTFPRRS

SEQ ID NO: 114897 - protein, 16 aa, Artificial Sequence
  Description of Artificial Sequence: Synthetic peptide
  Seed: PRMCSLMQGSTLPRRS
PRMFSLMQPSTGPRRS

SEQ ID NO: 114898 - protein, 16 aa, Artificial Sequence
  Description of Artificial Sequence: Synthetic peptide
  Seed: PRMCSLMQGSTLPRRS
PRMFSLMQPSTHPRRS

SEQ ID NO: 114899 - protein, 16 aa, Artificial Sequence
  Description of Artificial Sequence: Synthetic peptide
  Seed: PRMCSLMQGSTLPRRS
PRMFSLMQPSTIPRRS

SEQ ID NO: 114900 - protein, 16 aa, Artificial Sequence
  Description of Artificial Sequence: Synthetic peptide
  Seed: PRMCSLMQGSTLPRRS
PRMFSLMQPSTLPRRS

SEQ ID NO: 114901 - protein, 16 aa, Artificial Sequence
  Description of Artificial Sequence: Synthetic peptide
  Seed: PRMCSLMQGSTLPRRS
PRMFSLMQPSTMPRRS

SEQ ID NO: 114902 - protein, 16 aa, Artificial Sequence
  Description of Artificial Sequence: Synthetic peptide
  Seed: PRMCSLMQGSTLPRRS
PRMFSLMQPSTNPRRS

SEQ ID NO: 114903 - protein, 16 aa, Artificial Sequence
  Description of Artificial Sequence: Synthetic peptide
  Seed: PRMCSLMQGSTLPRRS
PRMFSLMQPSTPPRRS

SEQ ID NO: 114904 - protein, 16 aa, Artificial Sequence
  Description of Artificial Sequence: Synthetic peptide
  Seed: PRMCSLMQGSTLPRRS
PRMFSLMQPSTQPRRS

SEQ ID NO: 114905 - protein, 16 aa, Artificial Sequence
  Description of Artificial Sequence: Synthetic peptide
  Seed: PRMCSLMQGSTLPRRS
PRMFSLMQPSTSPRRS

SEQ ID NO: 114906 - protein, 16 aa, Artificial Sequence
  Description of Artificial Sequence: Synthetic peptide
  Seed: PRMCSLMQGSTLPRRS
PRMFSLMQPSTTPRRS

SEQ ID NO: 114907 - protein, 16 aa, Artificial Sequence
  Description of Artificial Sequence: Synthetic peptide
  Seed: PRMCSLMQGSTLPRRS
PRMFSLMQPSTVPRRS

SEQ ID NO: 114908 - protein, 16 aa, Artificial Sequence
  Description of Artificial Sequence: Synthetic peptide
  Seed: PRMCSLMQGSTLPRRS
PRMFSLMQPSTWPRRS

SEQ ID NO: 114909 - protein, 16 aa, Artificial Sequence
  Description of Artificial Sequence: Synthetic peptide
  Seed: PRMCSLMQGSTLPRRS
PRMFSLMQQSTLPRRS

SEQ ID NO: 114910 - protein, 16 aa, Artificial Sequence
  Description of Artificial Sequence: Synthetic peptide
  Seed: PRMCSLMQGSTLPRRS
PRMFSLMQQSTVPRRS

SEQ ID NO: 114911 - protein, 16 aa, Artificial Sequence
  Description of Artificial Sequence: Synthetic peptide
  Seed: PRMCSLMQGSTLPRRS
PRMFSLMQSSTAPRRS

SEQ ID NO: 114912 - protein, 16 aa, Artificial Sequence
  Description of Artificial Sequence: Synthetic peptide
  Seed: PRMCSLMQGSTLPRRS
PRMFSLMQSSTCPRRS

SEQ ID NO: 114913 - protein, 16 aa, Artificial Sequence
  Description of Artificial Sequence: Synthetic peptide
  Seed: PRMCSLMQGSTLPRRS
PRMFSLMQSSTFPRRS

SEQ ID NO: 114914 - protein, 16 aa, Artificial Sequence
  Description of Artificial Sequence: Synthetic peptide
  Seed: PRMCSLMQGSTLPRRS
PRMFSLMQSSTGPRRS

SEQ ID NO: 114915 - protein, 16 aa, Artificial Sequence
  Description of Artificial Sequence: Synthetic peptide
  Seed: PRMCSLMQGSTLPRRS
PRMFSLMQSSTHPRRS

SEQ ID NO: 114916 - protein, 16 aa, Artificial Sequence
  Description of Artificial Sequence: Synthetic peptide
  Seed: PRMCSLMQGSTLPRRS
PRMFSLMQSSTIPRRS

SEQ ID NO: 114917 - protein, 16 aa, Artificial Sequence
  Description of Artificial Sequence: Synthetic peptide
  Seed: PRMCSLMQGSTLPRRS
PRMFSLMQSSTLPRRS

SEQ ID NO: 114918 - protein, 16 aa, Artificial Sequence
  Description of Artificial Sequence: Synthetic peptide
  Seed: PRMCSLMQGSTLPRRS
PRMFSLMQSSTMPRRS

SEQ ID NO: 114919 - protein, 16 aa, Artificial Sequence
  Description of Artificial Sequence: Synthetic peptide
  Seed: PRMCSLMQGSTLPRRS
PRMFSLMQSSTNPRRS

SEQ ID NO: 114920 - protein, 16 aa, Artificial Sequence
  Description of Artificial Sequence: Synthetic peptide
  Seed: PRMCSLMQGSTLPRRS
PRMFSLMQSSTPPRRS

SEQ ID NO: 114921 - protein, 16 aa, Artificial Sequence
  Description of Artificial Sequence: Synthetic peptide
  Seed: PRMCSLMQGSTLPRRS
PRMFSLMQSSTQPRRS

SEQ ID NO: 114922 - protein, 16 aa, Artificial Sequence
  Description of Artificial Sequence: Synthetic peptide
  Seed: PRMCSLMQGSTLPRRS
PRMFSLMQSSTSPRRS

SEQ ID NO: 114923 - protein, 16 aa, Artificial Sequence
  Description of Artificial Sequence: Synthetic peptide
  Seed: PRMCSLMQGSTLPRRS
PRMFSLMQSSTTPRRS

SEQ ID NO: 114924 - protein, 16 aa, Artificial Sequence
  Description of Artificial Sequence: Synthetic peptide
  Seed: PRMCSLMQGSTLPRRS
PRMFSLMQSSTVPRRS

SEQ ID NO: 114925 - protein, 16 aa, Artificial Sequence
  Description of Artificial Sequence: Synthetic peptide
  Seed: PRMCSLMQGSTLPRRS
PRMFSLMQTSTAPRRS

SEQ ID NO: 114926 - protein, 16 aa, Artificial Sequence
  Description of Artificial Sequence: Synthetic peptide
  Seed: PRMCSLMQGSTLPRRS
PRMFSLMQTSTGPRRS

SEQ ID NO: 114927 - protein, 16 aa, Artificial Sequence
  Description of Artificial Sequence: Synthetic peptide
  Seed: PRMCSLMQGSTLPRRS
PRMFSLMQTSTHPRRS

SEQ ID NO: 114928 - protein, 16 aa, Artificial Sequence
  Description of Artificial Sequence: Synthetic peptide
  Seed: PRMCSLMQGSTLPRRS
PRMFSLMQTSTIPRRS

SEQ ID NO: 114929 - protein, 16 aa, Artificial Sequence
  Description of Artificial Sequence: Synthetic peptide
  Seed: PRMCSLMQGSTLPRRS
PRMFSLMQTSTLPRRS

SEQ ID NO: 114930 - protein, 16 aa, Artificial Sequence
  Description of Artificial Sequence: Synthetic peptide
  Seed: PRMCSLMQGSTLPRRS
PRMFSLMQTSTMPRRS

SEQ ID NO: 114931 - protein, 16 aa, Artificial Sequence
  Description of Artificial Sequence: Synthetic peptide
  Seed: PRMCSLMQGSTLPRRS
PRMFSLMQTSTNPRRS

SEQ ID NO: 114932 - protein, 16 aa, Artificial Sequence
  Description of Artificial Sequence: Synthetic peptide
  Seed: PRMCSLMQGSTLPRRS
PRMFSLMQTSTPPRRS

SEQ ID NO: 114933 - protein, 16 aa, Artificial Sequence
  Description of Artificial Sequence: Synthetic peptide
  Seed: PRMCSLMQGSTLPRRS
PRMFSLMQTSTQPRRS

SEQ ID NO: 114934 - protein, 16 aa, Artificial Sequence
  Description of Artificial Sequence: Synthetic peptide
  Seed: PRMCSLMQGSTLPRRS
PRMFSLMQTSTSPRRS

SEQ ID NO: 114935 - protein, 16 aa, Artificial Sequence
  Description of Artificial Sequence: Synthetic peptide
  Seed: PRMCSLMQGSTLPRRS
PRMFSLMQTSTTPRRS

SEQ ID NO: 114936 - protein, 16 aa, Artificial Sequence
  Description of Artificial Sequence: Synthetic peptide
  Seed: PRMCSLMQGSTLPRRS
PRMFSLMQTSTVPRRS

SEQ ID NO: 114937 - protein, 16 aa, Artificial Sequence
  Description of Artificial Sequence: Synthetic peptide
  Seed: PRMCSLMQGSTLPRRS
PRMFSLMQVSTAPRRS

SEQ ID NO: 114938 - protein, 16 aa, Artificial Sequence
  Description of Artificial Sequence: Synthetic peptide
  Seed: PRMCSLMQGSTLPRRS
PRMFSLMQVSTCPRRS

SEQ ID NO: 114939 - protein, 16 aa, Artificial Sequence
  Description of Artificial Sequence: Synthetic peptide
  Seed: PRMCSLMQGSTLPRRS
PRMFSLMQVSTDPRRS

SEQ ID NO: 114940 - protein, 16 aa, Artificial Sequence
  Description of Artificial Sequence: Synthetic peptide
  Seed: PRMCSLMQGSTLPRRS
PRMFSLMQVSTEPRRS

SEQ ID NO: 114941 - protein, 16 aa, Artificial Sequence
  Description of Artificial Sequence: Synthetic peptide
  Seed: PRMCSLMQGSTLPRRS
PRMFSLMQVSTGPRRS

SEQ ID NO: 114942 - protein, 16 aa, Artificial Sequence
  Description of Artificial Sequence: Synthetic peptide
  Seed: PRMCSLMQGSTLPRRS
PRMFSLMQVSTHPRRS

SEQ ID NO: 114943 - protein, 16 aa, Artificial Sequence
  Description of Artificial Sequence: Synthetic peptide
  Seed: PRMCSLMQGSTLPRRS
PRMFSLMQVSTIPRRS

SEQ ID NO: 114944 - protein, 16 aa, Artificial Sequence
  Description of Artificial Sequence: Synthetic peptide
  Seed: PRMCSLMQGSTLPRRS
PRMFSLMQVSTLPRRS

SEQ ID NO: 114945 - protein, 16 aa, Artificial Sequence
  Description of Artificial Sequence: Synthetic peptide
  Seed: PRMCSLMQGSTLPRRS
PRMFSLMQVSTMPRRS

SEQ ID NO: 114946 - protein, 16 aa, Artificial Sequence
  Description of Artificial Sequence: Synthetic peptide
  Seed: PRMCSLMQGSTLPRRS
PRMFSLMQVSTNPRRS

SEQ ID NO: 114947 - protein, 16 aa, Artificial Sequence
  Description of Artificial Sequence: Synthetic peptide
  Seed: PRMCSLMQGSTLPRRS
PRMFSLMQVSTPPRRS

SEQ ID NO: 114948 - protein, 16 aa, Artificial Sequence
  Description of Artificial Sequence: Synthetic peptide
  Seed: PRMCSLMQGSTLPRRS
PRMFSLMQVSTQPRRS

SEQ ID NO: 114949 - protein, 16 aa, Artificial Sequence
  Description of Artificial Sequence: Synthetic peptide
  Seed: PRMCSLMQGSTLPRRS
PRMFSLMQVSTSPRRS

SEQ ID NO: 114950 - protein, 16 aa, Artificial Sequence
  Description of Artificial Sequence: Synthetic peptide
  Seed: PRMCSLMQGSTLPRRS
PRMFSLMQVSTTPRRS

SEQ ID NO: 114951 - protein, 16 aa, Artificial Sequence
  Description of Artificial Sequence: Synthetic peptide
  Seed: PRMCSLMQGSTLPRRS
PRMFSLMQVSTVPRRS

SEQ ID NO: 114952 - protein, 16 aa, Artificial Sequence
  Description of Artificial Sequence: Synthetic peptide
  Seed: PRMCSLMQGSTLPRRS
PRMFSLNQASTAPRRS

SEQ ID NO: 114953 - protein, 16 aa, Artificial Sequence
  Description of Artificial Sequence: Synthetic peptide
  Seed: PRMCSLMQGSTLPRRS
PRMFSLNQASTIPRRS

SEQ ID NO: 114954 - protein, 16 aa, Artificial Sequence
  Description of Artificial Sequence: Synthetic peptide
  Seed: PRMCSLMQGSTLPRRS
PRMFSLNQASTLPRRS

SEQ ID NO: 114955 - protein, 16 aa, Artificial Sequence
  Description of Artificial Sequence: Synthetic peptide
  Seed: PRMCSLMQGSTLPRRS
PRMFSLNQASTVPRRS

SEQ ID NO: 114956 - protein, 16 aa, Artificial Sequence
  Description of Artificial Sequence: Synthetic peptide
  Seed: PRMCSLMQGSTLPRRS
PRMFSLNQGSTLPRRS

SEQ ID NO: 114957 - protein, 16 aa, Artificial Sequence
  Description of Artificial Sequence: Synthetic peptide
  Seed: PRMCSLMQGSTLPRRS
PRMFSLNQGSTVPRRS

SEQ ID NO: 114958 - protein, 16 aa, Artificial Sequence
  Description of Artificial Sequence: Synthetic peptide
  Seed: PRMCSLMQGSTLPRRS
PRMFSLQQASTAPRRS

SEQ ID NO: 114959 - protein, 16 aa, Artificial Sequence
  Description of Artificial Sequence: Synthetic peptide
  Seed: PRMCSLMQGSTLPRRS
PRMFSLQQASTGPRRS

SEQ ID NO: 114960 - protein, 16 aa, Artificial Sequence
  Description of Artificial Sequence: Synthetic peptide
  Seed: PRMCSLMQGSTLPRRS
PRMFSLQQASTIPRRS

SEQ ID NO: 114961 - protein, 16 aa, Artificial Sequence
  Description of Artificial Sequence: Synthetic peptide
  Seed: PRMCSLMQGSTLPRRS
PRMFSLQQASTLPRRS

SEQ ID NO: 114962 - protein, 16 aa, Artificial Sequence
  Description of Artificial Sequence: Synthetic peptide
  Seed: PRMCSLMQGSTLPRRS
PRMFSLQQASTMPRRS

SEQ ID NO: 114963 - protein, 16 aa, Artificial Sequence
  Description of Artificial Sequence: Synthetic peptide
  Seed: PRMCSLMQGSTLPRRS
PRMFSLQQASTNPRRS

SEQ ID NO: 114964 - protein, 16 aa, Artificial Sequence
  Description of Artificial Sequence: Synthetic peptide
  Seed: PRMCSLMQGSTLPRRS
PRMFSLQQASTSPRRS

SEQ ID NO: 114965 - protein, 16 aa, Artificial Sequence
  Description of Artificial Sequence: Synthetic peptide
  Seed: PRMCSLMQGSTLPRRS
PRMFSLQQASTTPRRS

SEQ ID NO: 114966 - protein, 16 aa, Artificial Sequence
  Description of Artificial Sequence: Synthetic peptide
  Seed: PRMCSLMQGSTLPRRS
PRMFSLQQASTVPRRS

SEQ ID NO: 114967 - protein, 16 aa, Artificial Sequence
  Description of Artificial Sequence: Synthetic peptide
  Seed: PRMCSLMQGSTLPRRS
PRMFSLQQGSTAPRRS

SEQ ID NO: 114968 - protein, 16 aa, Artificial Sequence
  Description of Artificial Sequence: Synthetic peptide
  Seed: PRMCSLMQGSTLPRRS
PRMFSLQQGSTIPRRS

SEQ ID NO: 114969 - protein, 16 aa, Artificial Sequence
  Description of Artificial Sequence: Synthetic peptide
  Seed: PRMCSLMQGSTLPRRS
PRMFSLQQGSTLPRRS

SEQ ID NO: 114970 - protein, 16 aa, Artificial Sequence
  Description of Artificial Sequence: Synthetic peptide
  Seed: PRMCSLMQGSTLPRRS
PRMFSLQQGSTMPRRS

SEQ ID NO: 114971 - protein, 16 aa, Artificial Sequence
  Description of Artificial Sequence: Synthetic peptide
  Seed: PRMCSLMQGSTLPRRS
PRMFSLQQGSTSPRRS

SEQ ID NO: 114972 - protein, 16 aa, Artificial Sequence
  Description of Artificial Sequence: Synthetic peptide
  Seed: PRMCSLMQGSTLPRRS
PRMFSLQQGSTTPRRS

SEQ ID NO: 114973 - protein, 16 aa, Artificial Sequence
  Description of Artificial Sequence: Synthetic peptide
  Seed: PRMCSLMQGSTLPRRS
PRMFSLQQGSTVPRRS

SEQ ID NO: 114974 - protein, 16 aa, Artificial Sequence
  Description of Artificial Sequence: Synthetic peptide
  Seed: PRMCSLMQGSTLPRRS
PRMFSLQQISTAPRRS

SEQ ID NO: 114975 - protein, 16 aa, Artificial Sequence
  Description of Artificial Sequence: Synthetic peptide
  Seed: PRMCSLMQGSTLPRRS
PRMFSLQQISTNPRRS

SEQ ID NO: 114976 - protein, 16 aa, Artificial Sequence
  Description of Artificial Sequence: Synthetic peptide
  Seed: PRMCSLMQGSTLPRRS
PRMFSLQQISTSPRRS

SEQ ID NO: 114977 - protein, 16 aa, Artificial Sequence
  Description of Artificial Sequence: Synthetic peptide
  Seed: PRMCSLMQGSTLPRRS
PRMFSLQQNSTAPRRS

SEQ ID NO: 114978 - protein, 16 aa, Artificial Sequence
  Description of Artificial Sequence: Synthetic peptide
  Seed: PRMCSLMQGSTLPRRS
PRMFSLQQNSTIPRRS

SEQ ID NO: 114979 - protein, 16 aa, Artificial Sequence
  Description of Artificial Sequence: Synthetic peptide
  Seed: PRMCSLMQGSTLPRRS
PRMFSLQQNSTLPRRS

SEQ ID NO: 114980 - protein, 16 aa, Artificial Sequence
  Description of Artificial Sequence: Synthetic peptide
  Seed: PRMCSLMQGSTLPRRS
PRMFSLQQNSTVPRRS

SEQ ID NO: 114981 - protein, 16 aa, Artificial Sequence
  Description of Artificial Sequence: Synthetic peptide
  Seed: PRMCSLMQGSTLPRRS
PRMFSLQQPSTAPRRS

SEQ ID NO: 114982 - protein, 16 aa, Artificial Sequence
  Description of Artificial Sequence: Synthetic peptide
  Seed: PRMCSLMQGSTLPRRS
PRMFSLQQPSTIPRRS

SEQ ID NO: 114983 - protein, 16 aa, Artificial Sequence
  Description of Artificial Sequence: Synthetic peptide
  Seed: PRMCSLMQGSTLPRRS
PRMFSLQQPSTLPRRS

SEQ ID NO: 114984 - protein, 16 aa, Artificial Sequence
  Description of Artificial Sequence: Synthetic peptide
  Seed: PRMCSLMQGSTLPRRS
PRMFSLQQPSTSPRRS

SEQ ID NO: 114985 - protein, 16 aa, Artificial Sequence
  Description of Artificial Sequence: Synthetic peptide
  Seed: PRMCSLMQGSTLPRRS
PRMFSLQQPSTVPRRS

SEQ ID NO: 114986 - protein, 16 aa, Artificial Sequence
  Description of Artificial Sequence: Synthetic peptide
  Seed: PRMCSLMQGSTLPRRS
PRMFSLQQSSTAPRRS

SEQ ID NO: 114987 - protein, 16 aa, Artificial Sequence
  Description of Artificial Sequence: Synthetic peptide
  Seed: PRMCSLMQGSTLPRRS
PRMFSLQQSSTIPRRS

SEQ ID NO: 114988 - protein, 16 aa, Artificial Sequence
  Description of Artificial Sequence: Synthetic peptide
  Seed: PRMCSLMQGSTLPRRS
PRMFSLQQSSTLPRRS

SEQ ID NO: 114989 - protein, 16 aa, Artificial Sequence
  Description of Artificial Sequence: Synthetic peptide
  Seed: PRMCSLMQGSTLPRRS
PRMFSLQQSSTMPRRS

SEQ ID NO: 114990 - protein, 16 aa, Artificial Sequence
  Description of Artificial Sequence: Synthetic peptide
  Seed: PRMCSLMQGSTLPRRS
PRMFSLQQSSTNPRRS

SEQ ID NO: 114991 - protein, 16 aa, Artificial Sequence
  Description of Artificial Sequence: Synthetic peptide
  Seed: PRMCSLMQGSTLPRRS
PRMFSLQQSSTSPRRS

SEQ ID NO: 114992 - protein, 16 aa, Artificial Sequence
  Description of Artificial Sequence: Synthetic peptide
  Seed: PRMCSLMQGSTLPRRS
PRMFSLQQSSTTPRRS

SEQ ID NO: 114993 - protein, 16 aa, Artificial Sequence
  Description of Artificial Sequence: Synthetic peptide
  Seed: PRMCSLMQGSTLPRRS
PRMFSLQQSSTVPRRS

SEQ ID NO: 114994 - protein, 16 aa, Artificial Sequence
  Description of Artificial Sequence: Synthetic peptide
  Seed: PRMCSLMQGSTLPRRS
PRMFSLQQTSTAPRRS

SEQ ID NO: 114995 - protein, 16 aa, Artificial Sequence
  Description of Artificial Sequence: Synthetic peptide
  Seed: PRMCSLMQGSTLPRRS
PRMFSLQQTSTIPRRS

SEQ ID NO: 114996 - protein, 16 aa, Artificial Sequence
  Description of Artificial Sequence: Synthetic peptide
  Seed: PRMCSLMQGSTLPRRS
PRMFSLQQTSTLPRRS

SEQ ID NO: 114997 - protein, 16 aa, Artificial Sequence
  Description of Artificial Sequence: Synthetic peptide
  Seed: PRMCSLMQGSTLPRRS
PRMFSLQQTSTSPRRS

SEQ ID NO: 114998 - protein, 16 aa, Artificial Sequence
  Description of Artificial Sequence: Synthetic peptide
  Seed: PRMCSLMQGSTLPRRS
PRMFSLQQTSTVPRRS

SEQ ID NO: 114999 - protein, 16 aa, Artificial Sequence
  Description of Artificial Sequence: Synthetic peptide
  Seed: PRMCSLMQGSTLPRRS
PRMFSLQQVSTAPRRS

SEQ ID NO: 115000 - protein, 16 aa, Artificial Sequence
  Description of Artificial Sequence: Synthetic peptide
  Seed: PRMCSLMQGSTLPRRS
PRMFSLQQVSTLPRRS

SEQ ID NO: 115001 - protein, 16 aa, Artificial Sequence
  Description of Artificial Sequence: Synthetic peptide
  Seed: PRMCSLMQGSTLPRRS
PRMFSLQQVSTNPRRS

SEQ ID NO: 115002 - protein, 16 aa, Artificial Sequence
  Description of Artificial Sequence: Synthetic peptide
  Seed: PRMCSLMQGSTLPRRS
PRMFSLQQVSTSPRRS

SEQ ID NO: 115003 - protein, 16 aa, Artificial Sequence
  Description of Artificial Sequence: Synthetic peptide
  Seed: PRMCSLMQGSTLPRRS
PRMFSLQQVSTVPRRS

SEQ ID NO: 115004 - protein, 16 aa, Artificial Sequence
  Description of Artificial Sequence: Synthetic peptide
  Seed: PRMCSLMQGSTLPRRS
PRMFSLSQASTAPRRS

SEQ ID NO: 115005 - protein, 16 aa, Artificial Sequence
  Description of Artificial Sequence: Synthetic peptide
  Seed: PRMCSLMQGSTLPRRS
PRMFSLSQASTIPRRS

SEQ ID NO: 115006 - protein, 16 aa, Artificial Sequence
  Description of Artificial Sequence: Synthetic peptide
  Seed: PRMCSLMQGSTLPRRS
PRMFSLSQASTLPRRS

SEQ ID NO: 115007 - protein, 16 aa, Artificial Sequence
  Description of Artificial Sequence: Synthetic peptide
  Seed: PRMCSLMQGSTLPRRS
PRMFSLSQASTMPRRS

SEQ ID NO: 115008 - protein, 16 aa, Artificial Sequence
  Description of Artificial Sequence: Synthetic peptide
  Seed: PRMCSLMQGSTLPRRS
PRMFSLSQASTNPRRS

SEQ ID NO: 115009 - protein, 16 aa, Artificial Sequence
  Description of Artificial Sequence: Synthetic peptide
  Seed: PRMCSLMQGSTLPRRS
PRMFSLSQASTSPRRS

SEQ ID NO: 115010 - protein, 16 aa, Artificial Sequence
  Description of Artificial Sequence: Synthetic peptide
  Seed: PRMCSLMQGSTLPRRS
PRMFSLSQASTTPRRS

SEQ ID NO: 115011 - protein, 16 aa, Artificial Sequence
  Description of Artificial Sequence: Synthetic peptide
  Seed: PRMCSLMQGSTLPRRS
PRMFSLSQASTVPRRS

SEQ ID NO: 115012 - protein, 16 aa, Artificial Sequence
  Description of Artificial Sequence: Synthetic peptide
  Seed: PRMCSLMQGSTLPRRS
PRMFSLSQGSTAPRRS

SEQ ID NO: 115013 - protein, 16 aa, Artificial Sequence
  Description of Artificial Sequence: Synthetic peptide
  Seed: PRMCSLMQGSTLPRRS
PRMFSLSQGSTIPRRS

SEQ ID NO: 115014 - protein, 16 aa, Artificial Sequence
  Description of Artificial Sequence: Synthetic peptide
  Seed: PRMCSLMQGSTLPRRS
PRMFSLSQGSTLPRRS

SEQ ID NO: 115015 - protein, 16 aa, Artificial Sequence
  Description of Artificial Sequence: Synthetic peptide
  Seed: PRMCSLMQGSTLPRRS
PRMFSLSQGSTVPRRS

SEQ ID NO: 115016 - protein, 16 aa, Artificial Sequence
  Description of Artificial Sequence: Synthetic peptide
  Seed: PRMCSLMQGSTLPRRS
PRMFSLSQPSTAPRRS

SEQ ID NO: 115017 - protein, 16 aa, Artificial Sequence
  Description of Artificial Sequence: Synthetic peptide
  Seed: PRMCSLMQGSTLPRRS
PRMFSLSQPSTIPRRS

SEQ ID NO: 115018 - protein, 16 aa, Artificial Sequence
  Description of Artificial Sequence: Synthetic peptide
  Seed: PRMCSLMQGSTLPRRS
PRMFSLSQPSTLPRRS

SEQ ID NO: 115019 - protein, 16 aa, Artificial Sequence
  Description of Artificial Sequence: Synthetic peptide
  Seed: PRMCSLMQGSTLPRRS
PRMFSLSQPSTVPRRS

SEQ ID NO: 115020 - protein, 16 aa, Artificial Sequence
  Description of Artificial Sequence: Synthetic peptide
  Seed: PRMCSLMQGSTLPRRS
PRMFSLSQSSTAPRRS

SEQ ID NO: 115021 - protein, 16 aa, Artificial Sequence
  Description of Artificial Sequence: Synthetic peptide
  Seed: PRMCSLMQGSTLPRRS
PRMFSLSQSSTIPRRS

SEQ ID NO: 115022 - protein, 16 aa, Artificial Sequence
  Description of Artificial Sequence: Synthetic peptide
  Seed: PRMCSLMQGSTLPRRS
PRMFSLSQSSTLPRRS

SEQ ID NO: 115023 - protein, 16 aa, Artificial Sequence
  Description of Artificial Sequence: Synthetic peptide
  Seed: PRMCSLMQGSTLPRRS
PRMFSLSQSSTVPRRS

SEQ ID NO: 115024 - protein, 16 aa, Artificial Sequence
  Description of Artificial Sequence: Synthetic peptide
  Seed: PRMCSLMQGSTLPRRS
PRMFSLSQVSTAPRRS

SEQ ID NO: 115025 - protein, 16 aa, Artificial Sequence
  Description of Artificial Sequence: Synthetic peptide
  Seed: PRMCSLMQGSTLPRRS
PRMFSLTQASTAPRRS

SEQ ID NO: 115026 - protein, 16 aa, Artificial Sequence
  Description of Artificial Sequence: Synthetic peptide
  Seed: PRMCSLMQGSTLPRRS
PRMFSLTQASTIPRRS

SEQ ID NO: 115027 - protein, 16 aa, Artificial Sequence
  Description of Artificial Sequence: Synthetic peptide
  Seed: PRMCSLMQGSTLPRRS
PRMFSLTQASTLPRRS

SEQ ID NO: 115028 - protein, 16 aa, Artificial Sequence
  Description of Artificial Sequence: Synthetic peptide
  Seed: PRMCSLMQGSTLPRRS
PRMFSLTQASTSPRRS

SEQ ID NO: 115029 - protein, 16 aa, Artificial Sequence
  Description of Artificial Sequence: Synthetic peptide
  Seed: PRMCSLMQGSTLPRRS
PRMFSLTQASTVPRRS

SEQ ID NO: 115030 - protein, 16 aa, Artificial Sequence
  Description of Artificial Sequence: Synthetic peptide
  Seed: PRMCSLMQGSTLPRRS
PRMFSLTQGSTIPRRS

SEQ ID NO: 115031 - protein, 16 aa, Artificial Sequence
  Description of Artificial Sequence: Synthetic peptide
  Seed: PRMCSLMQGSTLPRRS
PRMFSLTQGSTLPRRS

SEQ ID NO: 115032 - protein, 16 aa, Artificial Sequence
  Description of Artificial Sequence: Synthetic peptide
  Seed: PRMCSLMQGSTLPRRS
PRMFSLTQGSTVPRRS

SEQ ID NO: 115033 - protein, 16 aa, Artificial Sequence
  Description of Artificial Sequence: Synthetic peptide
  Seed: PRMCSLMQGSTLPRRS
PRMFSLTQPSTAPRRS

SEQ ID NO: 115034 - protein, 16 aa, Artificial Sequence
  Description of Artificial Sequence: Synthetic peptide
  Seed: PRMCSLMQGSTLPRRS
PRMFSLVQASTAPRRS

SEQ ID NO: 115035 - protein, 16 aa, Artificial Sequence
  Description of Artificial Sequence: Synthetic peptide
  Seed: PRMCSLMQGSTLPRRS
PRMFSLVQASTGPRRS

SEQ ID NO: 115036 - protein, 16 aa, Artificial Sequence
  Description of Artificial Sequence: Synthetic peptide
  Seed: PRMCSLMQGSTLPRRS
PRMFSLVQASTHPRRS

SEQ ID NO: 115037 - protein, 16 aa, Artificial Sequence
  Description of Artificial Sequence: Synthetic peptide
  Seed: PRMCSLMQGSTLPRRS
PRMFSLVQASTIPRRS

SEQ ID NO: 115038 - protein, 16 aa, Artificial Sequence
  Description of Artificial Sequence: Synthetic peptide
  Seed: PRMCSLMQGSTLPRRS
PRMFSLVQASTLPRRS

SEQ ID NO: 115039 - protein, 16 aa, Artificial Sequence
  Description of Artificial Sequence: Synthetic peptide
  Seed: PRMCSLMQGSTLPRRS
PRMFSLVQASTMPRRS

SEQ ID NO: 115040 - protein, 16 aa, Artificial Sequence
  Description of Artificial Sequence: Synthetic peptide
  Seed: PRMCSLMQGSTLPRRS
PRMFSLVQASTNPRRS

SEQ ID NO: 115041 - protein, 16 aa, Artificial Sequence
  Description of Artificial Sequence: Synthetic peptide
  Seed: PRMCSLMQGSTLPRRS
PRMFSLVQASTQPRRS

SEQ ID NO: 115042 - protein, 16 aa, Artificial Sequence
  Description of Artificial Sequence: Synthetic peptide
  Seed: PRMCSLMQGSTLPRRS
PRMFSLVQASTSPRRS

SEQ ID NO: 115043 - protein, 16 aa, Artificial Sequence
  Description of Artificial Sequence: Synthetic peptide
  Seed: PRMCSLMQGSTLPRRS
PRMFSLVQASTTPRRS

SEQ ID NO: 115044 - protein, 16 aa, Artificial Sequence
  Description of Artificial Sequence: Synthetic peptide
  Seed: PRMCSLMQGSTLPRRS
PRMFSLVQASTVPRRS

SEQ ID NO: 115045 - protein, 16 aa, Artificial Sequence
  Description of Artificial Sequence: Synthetic peptide
  Seed: PRMCSLMQGSTLPRRS
PRMFSLVQGSTAPRRS

SEQ ID NO: 115046 - protein, 16 aa, Artificial Sequence
  Description of Artificial Sequence: Synthetic peptide
  Seed: PRMCSLMQGSTLPRRS
PRMFSLVQGSTGPRRS

SEQ ID NO: 115047 - protein, 16 aa, Artificial Sequence
  Description of Artificial Sequence: Synthetic peptide
  Seed: PRMCSLMQGSTLPRRS
PRMFSLVQGSTIPRRS

SEQ ID NO: 115048 - protein, 16 aa, Artificial Sequence
  Description of Artificial Sequence: Synthetic peptide
  Seed: PRMCSLMQGSTLPRRS
PRMFSLVQGSTLPRRS

SEQ ID NO: 115049 - protein, 16 aa, Artificial Sequence
  Description of Artificial Sequence: Synthetic peptide
  Seed: PRMCSLMQGSTLPRRS
PRMFSLVQGSTMPRRS

SEQ ID NO: 115050 - protein, 16 aa, Artificial Sequence
  Description of Artificial Sequence: Synthetic peptide
  Seed: PRMCSLMQGSTLPRRS
PRMFSLVQGSTNPRRS

SEQ ID NO: 115051 - protein, 16 aa, Artificial Sequence
  Description of Artificial Sequence: Synthetic peptide
  Seed: PRMCSLMQGSTLPRRS
PRMFSLVQGSTSPRRS

SEQ ID NO: 115052 - protein, 16 aa, Artificial Sequence
  Description of Artificial Sequence: Synthetic peptide
  Seed: PRMCSLMQGSTLPRRS
PRMFSLVQGSTTPRRS

SEQ ID NO: 115053 - protein, 16 aa, Artificial Sequence
  Description of Artificial Sequence: Synthetic peptide
  Seed: PRMCSLMQGSTLPRRS
PRMFSLVQGSTVPRRS

SEQ ID NO: 115054 - protein, 16 aa, Artificial Sequence
  Description of Artificial Sequence: Synthetic peptide
  Seed: PRMCSLMQGSTLPRRS
PRMFSLVQISTAPRRS

SEQ ID NO: 115055 - protein, 16 aa, Artificial Sequence
  Description of Artificial Sequence: Synthetic peptide
  Seed: PRMCSLMQGSTLPRRS
PRMFSLVQISTNPRRS

SEQ ID NO: 115056 - protein, 16 aa, Artificial Sequence
  Description of Artificial Sequence: Synthetic peptide
  Seed: PRMCSLMQGSTLPRRS
PRMFSLVQISTSPRRS

SEQ ID NO: 115057 - protein, 16 aa, Artificial Sequence
  Description of Artificial Sequence: Synthetic peptide
  Seed: PRMCSLMQGSTLPRRS
PRMFSLVQISTTPRRS

SEQ ID NO: 115058 - protein, 16 aa, Artificial Sequence
  Description of Artificial Sequence: Synthetic peptide
  Seed: PRMCSLMQGSTLPRRS
PRMFSLVQISTVPRRS

SEQ ID NO: 115059 - protein, 16 aa, Artificial Sequence
  Description of Artificial Sequence: Synthetic peptide
  Seed: PRMCSLMQGSTLPRRS
PRMFSLVQNSTAPRRS

SEQ ID NO: 115060 - protein, 16 aa, Artificial Sequence
  Description of Artificial Sequence: Synthetic peptide
  Seed: PRMCSLMQGSTLPRRS
PRMFSLVQNSTIPRRS

SEQ ID NO: 115061 - protein, 16 aa, Artificial Sequence
  Description of Artificial Sequence: Synthetic peptide
  Seed: PRMCSLMQGSTLPRRS
PRMFSLVQNSTLPRRS

SEQ ID NO: 115062 - protein, 16 aa, Artificial Sequence
  Description of Artificial Sequence: Synthetic peptide
  Seed: PRMCSLMQGSTLPRRS
PRMFSLVQNSTSPRRS

SEQ ID NO: 115063 - protein, 16 aa, Artificial Sequence
  Description of Artificial Sequence: Synthetic peptide
  Seed: PRMCSLMQGSTLPRRS
PRMFSLVQNSTVPRRS

SEQ ID NO: 115064 - protein, 16 aa, Artificial Sequence
  Description of Artificial Sequence: Synthetic peptide
  Seed: PRMCSLMQGSTLPRRS
PRMFSLVQPSTAPRRS

SEQ ID NO: 115065 - protein, 16 aa, Artificial Sequence
  Description of Artificial Sequence: Synthetic peptide
  Seed: PRMCSLMQGSTLPRRS
PRMFSLVQPSTGPRRS

SEQ ID NO: 115066 - protein, 16 aa, Artificial Sequence
  Description of Artificial Sequence: Synthetic peptide
  Seed: PRMCSLMQGSTLPRRS
PRMFSLVQPSTIPRRS

SEQ ID NO: 115067 - protein, 16 aa, Artificial Sequence
  Description of Artificial Sequence: Synthetic peptide
  Seed: PRMCSLMQGSTLPRRS
PRMFSLVQPSTLPRRS

SEQ ID NO: 115068 - protein, 16 aa, Artificial Sequence
  Description of Artificial Sequence: Synthetic peptide
  Seed: PRMCSLMQGSTLPRRS
PRMFSLVQPSTMPRRS

SEQ ID NO: 115069 - protein, 16 aa, Artificial Sequence
  Description of Artificial Sequence: Synthetic peptide
  Seed: PRMCSLMQGSTLPRRS
PRMFSLVQPSTNPRRS

SEQ ID NO: 115070 - protein, 16 aa, Artificial Sequence
  Description of Artificial Sequence: Synthetic peptide
  Seed: PRMCSLMQGSTLPRRS
PRMFSLVQPSTSPRRS

SEQ ID NO: 115071 - protein, 16 aa, Artificial Sequence
  Description of Artificial Sequence: Synthetic peptide
  Seed: PRMCSLMQGSTLPRRS
PRMFSLVQPSTTPRRS

SEQ ID NO: 115072 - protein, 16 aa, Artificial Sequence
  Description of Artificial Sequence: Synthetic peptide
  Seed: PRMCSLMQGSTLPRRS
PRMFSLVQPSTVPRRS

SEQ ID NO: 115073 - protein, 16 aa, Artificial Sequence
  Description of Artificial Sequence: Synthetic peptide
  Seed: PRMCSLMQGSTLPRRS
PRMFSLVQSSTAPRRS

SEQ ID NO: 115074 - protein, 16 aa, Artificial Sequence
  Description of Artificial Sequence: Synthetic peptide
  Seed: PRMCSLMQGSTLPRRS
PRMFSLVQSSTIPRRS

SEQ ID NO: 115075 - protein, 16 aa, Artificial Sequence
  Description of Artificial Sequence: Synthetic peptide
  Seed: PRMCSLMQGSTLPRRS
PRMFSLVQSSTLPRRS

SEQ ID NO: 115076 - protein, 16 aa, Artificial Sequence
  Description of Artificial Sequence: Synthetic peptide
  Seed: PRMCSLMQGSTLPRRS
PRMFSLVQSSTMPRRS

SEQ ID NO: 115077 - protein, 16 aa, Artificial Sequence
  Description of Artificial Sequence: Synthetic peptide
  Seed: PRMCSLMQGSTLPRRS
PRMFSLVQSSTNPRRS

SEQ ID NO: 115078 - protein, 16 aa, Artificial Sequence
  Description of Artificial Sequence: Synthetic peptide
  Seed: PRMCSLMQGSTLPRRS
PRMFSLVQSSTSPRRS

SEQ ID NO: 115079 - protein, 16 aa, Artificial Sequence
  Description of Artificial Sequence: Synthetic peptide
  Seed: PRMCSLMQGSTLPRRS
PRMFSLVQSSTTPRRS

SEQ ID NO: 115080 - protein, 16 aa, Artificial Sequence
  Description of Artificial Sequence: Synthetic peptide
  Seed: PRMCSLMQGSTLPRRS
PRMFSLVQSSTVPRRS

SEQ ID NO: 115081 - protein, 16 aa, Artificial Sequence
  Description of Artificial Sequence: Synthetic peptide
  Seed: PRMCSLMQGSTLPRRS
PRMFSLVQTSTAPRRS

SEQ ID NO: 115082 - protein, 16 aa, Artificial Sequence
  Description of Artificial Sequence: Synthetic peptide
  Seed: PRMCSLMQGSTLPRRS
PRMFSLVQTSTIPRRS

SEQ ID NO: 115083 - protein, 16 aa, Artificial Sequence
  Description of Artificial Sequence: Synthetic peptide
  Seed: PRMCSLMQGSTLPRRS
PRMFSLVQTSTLPRRS

SEQ ID NO: 115084 - protein, 16 aa, Artificial Sequence
  Description of Artificial Sequence: Synthetic peptide
  Seed: PRMCSLMQGSTLPRRS
PRMFSLVQTSTMPRRS

SEQ ID NO: 115085 - protein, 16 aa, Artificial Sequence
  Description of Artificial Sequence: Synthetic peptide
  Seed: PRMCSLMQGSTLPRRS
PRMFSLVQTSTNPRRS

SEQ ID NO: 115086 - protein, 16 aa, Artificial Sequence
  Description of Artificial Sequence: Synthetic peptide
  Seed: PRMCSLMQGSTLPRRS
PRMFSLVQTSTSPRRS

SEQ ID NO: 115087 - protein, 16 aa, Artificial Sequence
  Description of Artificial Sequence: Synthetic peptide
  Seed: PRMCSLMQGSTLPRRS
PRMFSLVQTSTTPRRS

SEQ ID NO: 115088 - protein, 16 aa, Artificial Sequence
  Description of Artificial Sequence: Synthetic peptide
  Seed: PRMCSLMQGSTLPRRS
PRMFSLVQTSTVPRRS

SEQ ID NO: 115089 - protein, 16 aa, Artificial Sequence
  Description of Artificial Sequence: Synthetic peptide
  Seed: PRMCSLMQGSTLPRRS
PRMFSLVQVSTAPRRS

SEQ ID NO: 115090 - protein, 16 aa, Artificial Sequence
  Description of Artificial Sequence: Synthetic peptide
  Seed: PRMCSLMQGSTLPRRS
PRMFSLVQVSTIPRRS

SEQ ID NO: 115091 - protein, 16 aa, Artificial Sequence
  Description of Artificial Sequence: Synthetic peptide
  Seed: PRMCSLMQGSTLPRRS
PRMFSLVQVSTLPRRS

SEQ ID NO: 115092 - protein, 16 aa, Artificial Sequence
  Description of Artificial Sequence: Synthetic peptide
  Seed: PRMCSLMQGSTLPRRS
PRMFSLVQVSTMPRRS

SEQ ID NO: 115093 - protein, 16 aa, Artificial Sequence
  Description of Artificial Sequence: Synthetic peptide
  Seed: PRMCSLMQGSTLPRRS
PRMFSLVQVSTNPRRS

SEQ ID NO: 115094 - protein, 16 aa, Artificial Sequence
  Description of Artificial Sequence: Synthetic peptide
  Seed: PRMCSLMQGSTLPRRS
PRMFSLVQVSTSPRRS

SEQ ID NO: 115095 - protein, 16 aa, Artificial Sequence
  Description of Artificial Sequence: Synthetic peptide
  Seed: PRMCSLMQGSTLPRRS
PRMFSLVQVSTTPRRS

SEQ ID NO: 115096 - protein, 16 aa, Artificial Sequence
  Description of Artificial Sequence: Synthetic peptide
  Seed: PRMCSLMQGSTLPRRS
PRMFSLVQVSTVPRRS

SEQ ID NO: 115097 - protein, 16 aa, Artificial Sequence
  Description of Artificial Sequence: Synthetic peptide
  Seed: PRMCSLMQGSTLPRRS
PRMISLAQASTAPRRS

SEQ ID NO: 115098 - protein, 16 aa, Artificial Sequence
  Description of Artificial Sequence: Synthetic peptide
  Seed: PRMCSLMQGSTLPRRS
PRMISLAQASTIPRRS

SEQ ID NO: 115099 - protein, 16 aa, Artificial Sequence
  Description of Artificial Sequence: Synthetic peptide
  Seed: PRMCSLMQGSTLPRRS
PRMISLAQASTLPRRS

SEQ ID NO: 115100 - protein, 16 aa, Artificial Sequence
  Description of Artificial Sequence: Synthetic peptide
  Seed: PRMCSLMQGSTLPRRS
PRMISLAQASTVPRRS

SEQ ID NO: 115101 - protein, 16 aa, Artificial Sequence
  Description of Artificial Sequence: Synthetic peptide
  Seed: PRMCSLMQGSTLPRRS
PRMISLAQGSTAPRRS

SEQ ID NO: 115102 - protein, 16 aa, Artificial Sequence
  Description of Artificial Sequence: Synthetic peptide
  Seed: PRMCSLMQGSTLPRRS
PRMISLAQGSTIPRRS

SEQ ID NO: 115103 - protein, 16 aa, Artificial Sequence
  Description of Artificial Sequence: Synthetic peptide
  Seed: PRMCSLMQGSTLPRRS
PRMISLAQGSTLPRRS

SEQ ID NO: 115104 - protein, 16 aa, Artificial Sequence
  Description of Artificial Sequence: Synthetic peptide
  Seed: PRMCSLMQGSTLPRRS
PRMISLAQGSTVPRRS

SEQ ID NO: 115105 - protein, 16 aa, Artificial Sequence
  Description of Artificial Sequence: Synthetic peptide
  Seed: PRMCSLMQGSTLPRRS
PRMISLAQSSTIPRRS

SEQ ID NO: 115106 - protein, 16 aa, Artificial Sequence
  Description of Artificial Sequence: Synthetic peptide
  Seed: PRMCSLMQGSTLPRRS
PRMISLAQSSTLPRRS

SEQ ID NO: 115107 - protein, 16 aa, Artificial Sequence
  Description of Artificial Sequence: Synthetic peptide
  Seed: PRMCSLMQGSTLPRRS
PRMISLAQSSTVPRRS

SEQ ID NO: 115108 - protein, 16 aa, Artificial Sequence
  Description of Artificial Sequence: Synthetic peptide
  Seed: PRMCSLMQGSTLPRRS
PRMISLIQASTAPRRS

SEQ ID NO: 115109 - protein, 16 aa, Artificial Sequence
  Description of Artificial Sequence: Synthetic peptide
  Seed: PRMCSLMQGSTLPRRS
PRMISLIQASTIPRRS

SEQ ID NO: 115110 - protein, 16 aa, Artificial Sequence
  Description of Artificial Sequence: Synthetic peptide
  Seed: PRMCSLMQGSTLPRRS
PRMISLIQASTLPRRS

SEQ ID NO: 115111 - protein, 16 aa, Artificial Sequence
  Description of Artificial Sequence: Synthetic peptide
  Seed: PRMCSLMQGSTLPRRS
PRMISLIQASTMPRRS

SEQ ID NO: 115112 - protein, 16 aa, Artificial Sequence
  Description of Artificial Sequence: Synthetic peptide
  Seed: PRMCSLMQGSTLPRRS
PRMISLIQASTTPRRS

SEQ ID NO: 115113 - protein, 16 aa, Artificial Sequence
  Description of Artificial Sequence: Synthetic peptide
  Seed: PRMCSLMQGSTLPRRS
PRMISLIQASTVPRRS

SEQ ID NO: 115114 - protein, 16 aa, Artificial Sequence
  Description of Artificial Sequence: Synthetic peptide
  Seed: PRMCSLMQGSTLPRRS
PRMISLIQGSTAPRRS

SEQ ID NO: 115115 - protein, 16 aa, Artificial Sequence
  Description of Artificial Sequence: Synthetic peptide
  Seed: PRMCSLMQGSTLPRRS
PRMISLIQGSTIPRRS

SEQ ID NO: 115116 - protein, 16 aa, Artificial Sequence
  Description of Artificial Sequence: Synthetic peptide
  Seed: PRMCSLMQGSTLPRRS
PRMISLIQGSTLPRRS

SEQ ID NO: 115117 - protein, 16 aa, Artificial Sequence
  Description of Artificial Sequence: Synthetic peptide
  Seed: PRMCSLMQGSTLPRRS
PRMISLIQGSTMPRRS

SEQ ID NO: 115118 - protein, 16 aa, Artificial Sequence
  Description of Artificial Sequence: Synthetic peptide
  Seed: PRMCSLMQGSTLPRRS
PRMISLIQGSTTPRRS

SEQ ID NO: 115119 - protein, 16 aa, Artificial Sequence
  Description of Artificial Sequence: Synthetic peptide
  Seed: PRMCSLMQGSTLPRRS
PRMISLIQGSTVPRRS

SEQ ID NO: 115120 - protein, 16 aa, Artificial Sequence
  Description of Artificial Sequence: Synthetic peptide
  Seed: PRMCSLMQGSTLPRRS
PRMISLIQPSTIPRRS

SEQ ID NO: 115121 - protein, 16 aa, Artificial Sequence
  Description of Artificial Sequence: Synthetic peptide
  Seed: PRMCSLMQGSTLPRRS
PRMISLIQPSTLPRRS

SEQ ID NO: 115122 - protein, 16 aa, Artificial Sequence
  Description of Artificial Sequence: Synthetic peptide
  Seed: PRMCSLMQGSTLPRRS
PRMISLIQPSTVPRRS

SEQ ID NO: 115123 - protein, 16 aa, Artificial Sequence
  Description of Artificial Sequence: Synthetic peptide
  Seed: PRMCSLMQGSTLPRRS
PRMISLIQSSTAPRRS

SEQ ID NO: 115124 - protein, 16 aa, Artificial Sequence
  Description of Artificial Sequence: Synthetic peptide
  Seed: PRMCSLMQGSTLPRRS
PRMISLIQSSTIPRRS

SEQ ID NO: 115125 - protein, 16 aa, Artificial Sequence
  Description of Artificial Sequence: Synthetic peptide
  Seed: PRMCSLMQGSTLPRRS
PRMISLIQSSTLPRRS

SEQ ID NO: 115126 - protein, 16 aa, Artificial Sequence
  Description of Artificial Sequence: Synthetic peptide
  Seed: PRMCSLMQGSTLPRRS
PRMISLIQSSTVPRRS

SEQ ID NO: 115127 - protein, 16 aa, Artificial Sequence
  Description of Artificial Sequence: Synthetic peptide
  Seed: PRMCSLMQGSTLPRRS
PRMISLLQASTAPRRS

SEQ ID NO: 115128 - protein, 16 aa, Artificial Sequence
  Description of Artificial Sequence: Synthetic peptide
  Seed: PRMCSLMQGSTLPRRS
PRMISLLQASTGPRRS

SEQ ID NO: 115129 - protein, 16 aa, Artificial Sequence
  Description of Artificial Sequence: Synthetic peptide
  Seed: PRMCSLMQGSTLPRRS
PRMISLLQASTIPRRS

SEQ ID NO: 115130 - protein, 16 aa, Artificial Sequence
  Description of Artificial Sequence: Synthetic peptide
  Seed: PRMCSLMQGSTLPRRS
PRMISLLQASTLPRRS

SEQ ID NO: 115131 - protein, 16 aa, Artificial Sequence
  Description of Artificial Sequence: Synthetic peptide
  Seed: PRMCSLMQGSTLPRRS
PRMISLLQASTMPRRS

SEQ ID NO: 115132 - protein, 16 aa, Artificial Sequence
  Description of Artificial Sequence: Synthetic peptide
  Seed: PRMCSLMQGSTLPRRS
PRMISLLQASTNPRRS

SEQ ID NO: 115133 - protein, 16 aa, Artificial Sequence
  Description of Artificial Sequence: Synthetic peptide
  Seed: PRMCSLMQGSTLPRRS
PRMISLLQASTSPRRS

SEQ ID NO: 115134 - protein, 16 aa, Artificial Sequence
  Description of Artificial Sequence: Synthetic peptide
  Seed: PRMCSLMQGSTLPRRS
PRMISLLQASTTPRRS

SEQ ID NO: 115135 - protein, 16 aa, Artificial Sequence
  Description of Artificial Sequence: Synthetic peptide
  Seed: PRMCSLMQGSTLPRRS
PRMISLLQASTVPRRS

SEQ ID NO: 115136 - protein, 16 aa, Artificial Sequence
  Description of Artificial Sequence: Synthetic peptide
  Seed: PRMCSLMQGSTLPRRS
PRMISLLQGSTAPRRS

SEQ ID NO: 115137 - protein, 16 aa, Artificial Sequence
  Description of Artificial Sequence: Synthetic peptide
  Seed: PRMCSLMQGSTLPRRS
PRMISLLQGSTGPRRS

SEQ ID NO: 115138 - protein, 16 aa, Artificial Sequence
  Description of Artificial Sequence: Synthetic peptide
  Seed: PRMCSLMQGSTLPRRS
PRMISLLQGSTIPRRS

SEQ ID NO: 115139 - protein, 16 aa, Artificial Sequence
  Description of Artificial Sequence: Synthetic peptide
  Seed: PRMCSLMQGSTLPRRS
PRMISLLQGSTLPRRS

SEQ ID NO: 115140 - protein, 16 aa, Artificial Sequence
  Description of Artificial Sequence: Synthetic peptide
  Seed: PRMCSLMQGSTLPRRS
PRMISLLQGSTMPRRS

SEQ ID NO: 115141 - protein, 16 aa, Artificial Sequence
  Description of Artificial Sequence: Synthetic peptide
  Seed: PRMCSLMQGSTLPRRS
PRMISLLQGSTSPRRS

SEQ ID NO: 115142 - protein, 16 aa, Artificial Sequence
  Description of Artificial Sequence: Synthetic peptide
  Seed: PRMCSLMQGSTLPRRS
PRMISLLQGSTTPRRS

SEQ ID NO: 115143 - protein, 16 aa, Artificial Sequence
  Description of Artificial Sequence: Synthetic peptide
  Seed: PRMCSLMQGSTLPRRS
PRMISLLQGSTVPRRS

SEQ ID NO: 115144 - protein, 16 aa, Artificial Sequence
  Description of Artificial Sequence: Synthetic peptide
  Seed: PRMCSLMQGSTLPRRS
PRMISLLQISTAPRRS

SEQ ID NO: 115145 - protein, 16 aa, Artificial Sequence
  Description of Artificial Sequence: Synthetic peptide
  Seed: PRMCSLMQGSTLPRRS
PRMISLLQNSTAPRRS

SEQ ID NO: 115146 - protein, 16 aa, Artificial Sequence
  Description of Artificial Sequence: Synthetic peptide
  Seed: PRMCSLMQGSTLPRRS
PRMISLLQNSTIPRRS

SEQ ID NO: 115147 - protein, 16 aa, Artificial Sequence
  Description of Artificial Sequence: Synthetic peptide
  Seed: PRMCSLMQGSTLPRRS
PRMISLLQNSTLPRRS

SEQ ID NO: 115148 - protein, 16 aa, Artificial Sequence
  Description of Artificial Sequence: Synthetic peptide
  Seed: PRMCSLMQGSTLPRRS
PRMISLLQNSTVPRRS

SEQ ID NO: 115149 - protein, 16 aa, Artificial Sequence
  Description of Artificial Sequence: Synthetic peptide
  Seed: PRMCSLMQGSTLPRRS
PRMISLLQPSTAPRRS

SEQ ID NO: 115150 - protein, 16 aa, Artificial Sequence
  Description of Artificial Sequence: Synthetic peptide
  Seed: PRMCSLMQGSTLPRRS
PRMISLLQPSTIPRRS

SEQ ID NO: 115151 - protein, 16 aa, Artificial Sequence
  Description of Artificial Sequence: Synthetic peptide
  Seed: PRMCSLMQGSTLPRRS
PRMISLLQPSTLPRRS

SEQ ID NO: 115152 - protein, 16 aa, Artificial Sequence
  Description of Artificial Sequence: Synthetic peptide
  Seed: PRMCSLMQGSTLPRRS
PRMISLLQPSTMPRRS

SEQ ID NO: 115153 - protein, 16 aa, Artificial Sequence
  Description of Artificial Sequence: Synthetic peptide
  Seed: PRMCSLMQGSTLPRRS
PRMISLLQPSTNPRRS

SEQ ID NO: 115154 - protein, 16 aa, Artificial Sequence
  Description of Artificial Sequence: Synthetic peptide
  Seed: PRMCSLMQGSTLPRRS
PRMISLLQPSTSPRRS

SEQ ID NO: 115155 - protein, 16 aa, Artificial Sequence
  Description of Artificial Sequence: Synthetic peptide
  Seed: PRMCSLMQGSTLPRRS
PRMISLLQPSTTPRRS

SEQ ID NO: 115156 - protein, 16 aa, Artificial Sequence
  Description of Artificial Sequence: Synthetic peptide
  Seed: PRMCSLMQGSTLPRRS
PRMISLLQPSTVPRRS

SEQ ID NO: 115157 - protein, 16 aa, Artificial Sequence
  Description of Artificial Sequence: Synthetic peptide
  Seed: PRMCSLMQGSTLPRRS
PRMISLLQSSTAPRRS

SEQ ID NO: 115158 - protein, 16 aa, Artificial Sequence
  Description of Artificial Sequence: Synthetic peptide
  Seed: PRMCSLMQGSTLPRRS
PRMISLLQSSTIPRRS

SEQ ID NO: 115159 - protein, 16 aa, Artificial Sequence
  Description of Artificial Sequence: Synthetic peptide
  Seed: PRMCSLMQGSTLPRRS
PRMISLLQSSTLPRRS

SEQ ID NO: 115160 - protein, 16 aa, Artificial Sequence
  Description of Artificial Sequence: Synthetic peptide
  Seed: PRMCSLMQGSTLPRRS
PRMISLLQSSTMPRRS

SEQ ID NO: 115161 - protein, 16 aa, Artificial Sequence
  Description of Artificial Sequence: Synthetic peptide
  Seed: PRMCSLMQGSTLPRRS
PRMISLLQSSTSPRRS

SEQ ID NO: 115162 - protein, 16 aa, Artificial Sequence
  Description of Artificial Sequence: Synthetic peptide
  Seed: PRMCSLMQGSTLPRRS
PRMISLLQSSTTPRRS

SEQ ID NO: 115163 - protein, 16 aa, Artificial Sequence
  Description of Artificial Sequence: Synthetic peptide
  Seed: PRMCSLMQGSTLPRRS
PRMISLLQSSTVPRRS

SEQ ID NO: 115164 - protein, 16 aa, Artificial Sequence
  Description of Artificial Sequence: Synthetic peptide
  Seed: PRMCSLMQGSTLPRRS
PRMISLLQTSTAPRRS

SEQ ID NO: 115165 - protein, 16 aa, Artificial Sequence
  Description of Artificial Sequence: Synthetic peptide
  Seed: PRMCSLMQGSTLPRRS
PRMISLLQTSTIPRRS

SEQ ID NO: 115166 - protein, 16 aa, Artificial Sequence
  Description of Artificial Sequence: Synthetic peptide
  Seed: PRMCSLMQGSTLPRRS
PRMISLLQTSTLPRRS

SEQ ID NO: 115167 - protein, 16 aa, Artificial Sequence
  Description of Artificial Sequence: Synthetic peptide
  Seed: PRMCSLMQGSTLPRRS
PRMISLLQTSTVPRRS

SEQ ID NO: 115168 - protein, 16 aa, Artificial Sequence
  Description of Artificial Sequence: Synthetic peptide
  Seed: PRMCSLMQGSTLPRRS
PRMISLLQVSTAPRRS

SEQ ID NO: 115169 - protein, 16 aa, Artificial Sequence
  Description of Artificial Sequence: Synthetic peptide
  Seed: PRMCSLMQGSTLPRRS
PRMISLLQVSTLPRRS

SEQ ID NO: 115170 - protein, 16 aa, Artificial Sequence
  Description of Artificial Sequence: Synthetic peptide
  Seed: PRMCSLMQGSTLPRRS
PRMISLLQVSTSPRRS

SEQ ID NO: 115171 - protein, 16 aa, Artificial Sequence
  Description of Artificial Sequence: Synthetic peptide
  Seed: PRMCSLMQGSTLPRRS
PRMISLLQVSTVPRRS

SEQ ID NO: 115172 - protein, 16 aa, Artificial Sequence
  Description of Artificial Sequence: Synthetic peptide
  Seed: PRMCSLMQGSTLPRRS
PRMISLMQASTAPRRS

SEQ ID NO: 115173 - protein, 16 aa, Artificial Sequence
  Description of Artificial Sequence: Synthetic peptide
  Seed: PRMCSLMQGSTLPRRS
PRMISLMQASTGPRRS

SEQ ID NO: 115174 - protein, 16 aa, Artificial Sequence
  Description of Artificial Sequence: Synthetic peptide
  Seed: PRMCSLMQGSTLPRRS
PRMISLMQASTIPRRS

SEQ ID NO: 115175 - protein, 16 aa, Artificial Sequence
  Description of Artificial Sequence: Synthetic peptide
  Seed: PRMCSLMQGSTLPRRS
PRMISLMQASTLPRRS

SEQ ID NO: 115176 - protein, 16 aa, Artificial Sequence
  Description of Artificial Sequence: Synthetic peptide
  Seed: PRMCSLMQGSTLPRRS
PRMISLMQASTMPRRS

SEQ ID NO: 115177 - protein, 16 aa, Artificial Sequence
  Description of Artificial Sequence: Synthetic peptide
  Seed: PRMCSLMQGSTLPRRS
PRMISLMQASTNPRRS

SEQ ID NO: 115178 - protein, 16 aa, Artificial Sequence
  Description of Artificial Sequence: Synthetic peptide
  Seed: PRMCSLMQGSTLPRRS
PRMISLMQASTSPRRS

SEQ ID NO: 115179 - protein, 16 aa, Artificial Sequence
  Description of Artificial Sequence: Synthetic peptide
  Seed: PRMCSLMQGSTLPRRS
PRMISLMQASTTPRRS

SEQ ID NO: 115180 - protein, 16 aa, Artificial Sequence
  Description of Artificial Sequence: Synthetic peptide
  Seed: PRMCSLMQGSTLPRRS
PRMISLMQASTVPRRS

SEQ ID NO: 115181 - protein, 16 aa, Artificial Sequence
  Description of Artificial Sequence: Synthetic peptide
  Seed: PRMCSLMQGSTLPRRS
PRMISLMQGSTAPRRS

SEQ ID NO: 115182 - protein, 16 aa, Artificial Sequence
  Description of Artificial Sequence: Synthetic peptide
  Seed: PRMCSLMQGSTLPRRS
PRMISLMQGSTGPRRS

SEQ ID NO: 115183 - protein, 16 aa, Artificial Sequence
  Description of Artificial Sequence: Synthetic peptide
  Seed: PRMCSLMQGSTLPRRS
PRMISLMQGSTIPRRS

SEQ ID NO: 115184 - protein, 16 aa, Artificial Sequence
  Description of Artificial Sequence: Synthetic peptide
  Seed: PRMCSLMQGSTLPRRS
PRMISLMQGSTLPRRS

SEQ ID NO: 115185 - protein, 16 aa, Artificial Sequence
  Description of Artificial Sequence: Synthetic peptide
  Seed: PRMCSLMQGSTLPRRS
PRMISLMQGSTMPRRS

SEQ ID NO: 115186 - protein, 16 aa, Artificial Sequence
  Description of Artificial Sequence: Synthetic peptide
  Seed: PRMCSLMQGSTLPRRS
PRMISLMQGSTSPRRS

SEQ ID NO: 115187 - protein, 16 aa, Artificial Sequence
  Description of Artificial Sequence: Synthetic peptide
  Seed: PRMCSLMQGSTLPRRS
PRMISLMQGSTTPRRS

SEQ ID NO: 115188 - protein, 16 aa, Artificial Sequence
  Description of Artificial Sequence: Synthetic peptide
  Seed: PRMCSLMQGSTLPRRS
PRMISLMQGSTVPRRS

SEQ ID NO: 115189 - protein, 16 aa, Artificial Sequence
  Description of Artificial Sequence: Synthetic peptide
  Seed: PRMCSLMQGSTLPRRS
PRMISLMQISTAPRRS

SEQ ID NO: 115190 - protein, 16 aa, Artificial Sequence
  Description of Artificial Sequence: Synthetic peptide
  Seed: PRMCSLMQGSTLPRRS
PRMISLMQISTSPRRS

SEQ ID NO: 115191 - protein, 16 aa, Artificial Sequence
  Description of Artificial Sequence: Synthetic peptide
  Seed: PRMCSLMQGSTLPRRS
PRMISLMQNSTAPRRS

SEQ ID NO: 115192 - protein, 16 aa, Artificial Sequence
  Description of Artificial Sequence: Synthetic peptide
  Seed: PRMCSLMQGSTLPRRS
PRMISLMQNSTIPRRS

SEQ ID NO: 115193 - protein, 16 aa, Artificial Sequence
  Description of Artificial Sequence: Synthetic peptide
  Seed: PRMCSLMQGSTLPRRS
PRMISLMQNSTLPRRS

SEQ ID NO: 115194 - protein, 16 aa, Artificial Sequence
  Description of Artificial Sequence: Synthetic peptide
  Seed: PRMCSLMQGSTLPRRS
PRMISLMQNSTVPRRS

SEQ ID NO: 115195 - protein, 16 aa, Artificial Sequence
  Description of Artificial Sequence: Synthetic peptide
  Seed: PRMCSLMQGSTLPRRS
PRMISLMQPSTAPRRS

SEQ ID NO: 115196 - protein, 16 aa, Artificial Sequence
  Description of Artificial Sequence: Synthetic peptide
  Seed: PRMCSLMQGSTLPRRS
PRMISLMQPSTIPRRS

SEQ ID NO: 115197 - protein, 16 aa, Artificial Sequence
  Description of Artificial Sequence: Synthetic peptide
  Seed: PRMCSLMQGSTLPRRS
PRMISLMQPSTLPRRS

SEQ ID NO: 115198 - protein, 16 aa, Artificial Sequence
  Description of Artificial Sequence: Synthetic peptide
  Seed: PRMCSLMQGSTLPRRS
PRMISLMQPSTMPRRS

SEQ ID NO: 115199 - protein, 16 aa, Artificial Sequence
  Description of Artificial Sequence: Synthetic peptide
  Seed: PRMCSLMQGSTLPRRS
PRMISLMQPSTSPRRS

SEQ ID NO: 115200 - protein, 16 aa, Artificial Sequence
  Description of Artificial Sequence: Synthetic peptide
  Seed: PRMCSLMQGSTLPRRS
PRMISLMQPSTTPRRS

SEQ ID NO: 115201 - protein, 16 aa, Artificial Sequence
  Description of Artificial Sequence: Synthetic peptide
  Seed: PRMCSLMQGSTLPRRS
PRMISLMQPSTVPRRS

SEQ ID NO: 115202 - protein, 16 aa, Artificial Sequence
  Description of Artificial Sequence: Synthetic peptide
  Seed: PRMCSLMQGSTLPRRS
PRMISLMQSSTAPRRS

SEQ ID NO: 115203 - protein, 16 aa, Artificial Sequence
  Description of Artificial Sequence: Synthetic peptide
  Seed: PRMCSLMQGSTLPRRS
PRMISLMQSSTIPRRS

SEQ ID NO: 115204 - protein, 16 aa, Artificial Sequence
  Description of Artificial Sequence: Synthetic peptide
  Seed: PRMCSLMQGSTLPRRS
PRMISLMQSSTLPRRS

SEQ ID NO: 115205 - protein, 16 aa, Artificial Sequence
  Description of Artificial Sequence: Synthetic peptide
  Seed: PRMCSLMQGSTLPRRS
PRMISLMQSSTMPRRS

SEQ ID NO: 115206 - protein, 16 aa, Artificial Sequence
  Description of Artificial Sequence: Synthetic peptide
  Seed: PRMCSLMQGSTLPRRS
PRMISLMQSSTSPRRS

SEQ ID NO: 115207 - protein, 16 aa, Artificial Sequence
  Description of Artificial Sequence: Synthetic peptide
  Seed: PRMCSLMQGSTLPRRS
PRMISLMQSSTTPRRS

SEQ ID NO: 115208 - protein, 16 aa, Artificial Sequence
  Description of Artificial Sequence: Synthetic peptide
  Seed: PRMCSLMQGSTLPRRS
PRMISLMQSSTVPRRS

SEQ ID NO: 115209 - protein, 16 aa, Artificial Sequence
  Description of Artificial Sequence: Synthetic peptide
  Seed: PRMCSLMQGSTLPRRS
PRMISLMQTSTAPRRS

SEQ ID NO: 115210 - protein, 16 aa, Artificial Sequence
  Description of Artificial Sequence: Synthetic peptide
  Seed: PRMCSLMQGSTLPRRS
PRMISLMQTSTIPRRS

SEQ ID NO: 115211 - protein, 16 aa, Artificial Sequence
  Description of Artificial Sequence: Synthetic peptide
  Seed: PRMCSLMQGSTLPRRS
PRMISLMQTSTLPRRS

SEQ ID NO: 115212 - protein, 16 aa, Artificial Sequence
  Description of Artificial Sequence: Synthetic peptide
  Seed: PRMCSLMQGSTLPRRS
PRMISLMQTSTVPRRS

SEQ ID NO: 115213 - protein, 16 aa, Artificial Sequence
  Description of Artificial Sequence: Synthetic peptide
  Seed: PRMCSLMQGSTLPRRS
PRMISLMQVSTAPRRS

SEQ ID NO: 115214 - protein, 16 aa, Artificial Sequence
  Description of Artificial Sequence: Synthetic peptide
  Seed: PRMCSLMQGSTLPRRS
PRMISLMQVSTLPRRS

SEQ ID NO: 115215 - protein, 16 aa, Artificial Sequence
  Description of Artificial Sequence: Synthetic peptide
  Seed: PRMCSLMQGSTLPRRS
PRMISLMQVSTSPRRS

SEQ ID NO: 115216 - protein, 16 aa, Artificial Sequence
  Description of Artificial Sequence: Synthetic peptide
  Seed: PRMCSLMQGSTLPRRS
PRMISLMQVSTVPRRS

SEQ ID NO: 115217 - protein, 16 aa, Artificial Sequence
  Description of Artificial Sequence: Synthetic peptide
  Seed: PRMCSLMQGSTLPRRS
PRMISLQQASTAPRRS

SEQ ID NO: 115218 - protein, 16 aa, Artificial Sequence
  Description of Artificial Sequence: Synthetic peptide
  Seed: PRMCSLMQGSTLPRRS
PRMISLQQASTIPRRS

SEQ ID NO: 115219 - protein, 16 aa, Artificial Sequence
  Description of Artificial Sequence: Synthetic peptide
  Seed: PRMCSLMQGSTLPRRS
PRMISLQQASTLPRRS

SEQ ID NO: 115220 - protein, 16 aa, Artificial Sequence
  Description of Artificial Sequence: Synthetic peptide
  Seed: PRMCSLMQGSTLPRRS
PRMISLQQASTVPRRS

SEQ ID NO: 115221 - protein, 16 aa, Artificial Sequence
  Description of Artificial Sequence: Synthetic peptide
  Seed: PRMCSLMQGSTLPRRS
PRMISLQQGSTIPRRS

SEQ ID NO: 115222 - protein, 16 aa, Artificial Sequence
  Description of Artificial Sequence: Synthetic peptide
  Seed: PRMCSLMQGSTLPRRS
PRMISLQQGSTLPRRS

SEQ ID NO: 115223 - protein, 16 aa, Artificial Sequence
  Description of Artificial Sequence: Synthetic peptide
  Seed: PRMCSLMQGSTLPRRS
PRMISLQQGSTVPRRS

SEQ ID NO: 115224 - protein, 16 aa, Artificial Sequence
  Description of Artificial Sequence: Synthetic peptide
  Seed: PRMCSLMQGSTLPRRS
PRMISLVQASTAPRRS

SEQ ID NO: 115225 - protein, 16 aa, Artificial Sequence
  Description of Artificial Sequence: Synthetic peptide
  Seed: PRMCSLMQGSTLPRRS
PRMISLVQASTIPRRS

SEQ ID NO: 115226 - protein, 16 aa, Artificial Sequence
  Description of Artificial Sequence: Synthetic peptide
  Seed: PRMCSLMQGSTLPRRS
PRMISLVQASTLPRRS

SEQ ID NO: 115227 - protein, 16 aa, Artificial Sequence
  Description of Artificial Sequence: Synthetic peptide
  Seed: PRMCSLMQGSTLPRRS
PRMISLVQASTVPRRS

SEQ ID NO: 115228 - protein, 16 aa, Artificial Sequence
  Description of Artificial Sequence: Synthetic peptide
  Seed: PRMCSLMQGSTLPRRS
PRMISLVQGSTAPRRS

SEQ ID NO: 115229 - protein, 16 aa, Artificial Sequence
  Description of Artificial Sequence: Synthetic peptide
  Seed: PRMCSLMQGSTLPRRS
PRMISLVQGSTIPRRS

SEQ ID NO: 115230 - protein, 16 aa, Artificial Sequence
  Description of Artificial Sequence: Synthetic peptide
  Seed: PRMCSLMQGSTLPRRS
PRMISLVQGSTLPRRS

SEQ ID NO: 115231 - protein, 16 aa, Artificial Sequence
  Description of Artificial Sequence: Synthetic peptide
  Seed: PRMCSLMQGSTLPRRS
PRMISLVQGSTVPRRS

SEQ ID NO: 115232 - protein, 16 aa, Artificial Sequence
  Description of Artificial Sequence: Synthetic peptide
  Seed: PRMCSLMQGSTLPRRS
PRMLSLAQASTAPRRS

SEQ ID NO: 115233 - protein, 16 aa, Artificial Sequence
  Description of Artificial Sequence: Synthetic peptide
  Seed: PRMCSLMQGSTLPRRS
PRMLSLAQASTIPRRS

SEQ ID NO: 115234 - protein, 16 aa, Artificial Sequence
  Description of Artificial Sequence: Synthetic peptide
  Seed: PRMCSLMQGSTLPRRS
PRMLSLAQASTLPRRS

SEQ ID NO: 115235 - protein, 16 aa, Artificial Sequence
  Description of Artificial Sequence: Synthetic peptide
  Seed: PRMCSLMQGSTLPRRS
PRMLSLAQASTVPRRS

SEQ ID NO: 115236 - protein, 16 aa, Artificial Sequence
  Description of Artificial Sequence: Synthetic peptide
  Seed: PRMCSLMQGSTLPRRS
PRMLSLAQGSTLPRRS

SEQ ID NO: 115237 - protein, 16 aa, Artificial Sequence
  Description of Artificial Sequence: Synthetic peptide
  Seed: PRMCSLMQGSTLPRRS
PRMLSLAQGSTVPRRS

SEQ ID NO: 115238 - protein, 16 aa, Artificial Sequence
  Description of Artificial Sequence: Synthetic peptide
  Seed: PRMCSLMQGSTLPRRS
PRMLSLIQASTAPRRS

SEQ ID NO: 115239 - protein, 16 aa, Artificial Sequence
  Description of Artificial Sequence: Synthetic peptide
  Seed: PRMCSLMQGSTLPRRS
PRMLSLIQASTIPRRS

SEQ ID NO: 115240 - protein, 16 aa, Artificial Sequence
  Description of Artificial Sequence: Synthetic peptide
  Seed: PRMCSLMQGSTLPRRS
PRMLSLIQASTLPRRS

SEQ ID NO: 115241 - protein, 16 aa, Artificial Sequence
  Description of Artificial Sequence: Synthetic peptide
  Seed: PRMCSLMQGSTLPRRS
PRMLSLIQASTSPRRS

SEQ ID NO: 115242 - protein, 16 aa, Artificial Sequence
  Description of Artificial Sequence: Synthetic peptide
  Seed: PRMCSLMQGSTLPRRS
PRMLSLIQASTVPRRS

SEQ ID NO: 115243 - protein, 16 aa, Artificial Sequence
  Description of Artificial Sequence: Synthetic peptide
  Seed: PRMCSLMQGSTLPRRS
PRMLSLIQGSTAPRRS

SEQ ID NO: 115244 - protein, 16 aa, Artificial Sequence
  Description of Artificial Sequence: Synthetic peptide
  Seed: PRMCSLMQGSTLPRRS
PRMLSLIQGSTIPRRS

SEQ ID NO: 115245 - protein, 16 aa, Artificial Sequence
  Description of Artificial Sequence: Synthetic peptide
  Seed: PRMCSLMQGSTLPRRS
PRMLSLIQGSTLPRRS

SEQ ID NO: 115246 - protein, 16 aa, Artificial Sequence
  Description of Artificial Sequence: Synthetic peptide
  Seed: PRMCSLMQGSTLPRRS
PRMLSLIQGSTVPRRS

SEQ ID NO: 115247 - protein, 16 aa, Artificial Sequence
  Description of Artificial Sequence: Synthetic peptide
  Seed: PRMCSLMQGSTLPRRS
PRMLSLIQSSTAPRRS

SEQ ID NO: 115248 - protein, 16 aa, Artificial Sequence
  Description of Artificial Sequence: Synthetic peptide
  Seed: PRMCSLMQGSTLPRRS
PRMLSLIQSSTIPRRS

SEQ ID NO: 115249 - protein, 16 aa, Artificial Sequence
  Description of Artificial Sequence: Synthetic peptide
  Seed: PRMCSLMQGSTLPRRS
PRMLSLIQSSTLPRRS

SEQ ID NO: 115250 - protein, 16 aa, Artificial Sequence
  Description of Artificial Sequence: Synthetic peptide
  Seed: PRMCSLMQGSTLPRRS
PRMLSLIQSSTVPRRS

SEQ ID NO: 115251 - protein, 16 aa, Artificial Sequence
  Description of Artificial Sequence: Synthetic peptide
  Seed: PRMCSLMQGSTLPRRS
PRMLSLLQASTAPRRS

SEQ ID NO: 115252 - protein, 16 aa, Artificial Sequence
  Description of Artificial Sequence: Synthetic peptide
  Seed: PRMCSLMQGSTLPRRS
PRMLSLLQASTIPRRS

SEQ ID NO: 115253 - protein, 16 aa, Artificial Sequence
  Description of Artificial Sequence: Synthetic peptide
  Seed: PRMCSLMQGSTLPRRS
PRMLSLLQASTLPRRS

SEQ ID NO: 115254 - protein, 16 aa, Artificial Sequence
  Description of Artificial Sequence: Synthetic peptide
  Seed: PRMCSLMQGSTLPRRS
PRMLSLLQASTMPRRS

SEQ ID NO: 115255 - protein, 16 aa, Artificial Sequence
  Description of Artificial Sequence: Synthetic peptide
  Seed: PRMCSLMQGSTLPRRS
PRMLSLLQASTNPRRS

SEQ ID NO: 115256 - protein, 16 aa, Artificial Sequence
  Description of Artificial Sequence: Synthetic peptide
  Seed: PRMCSLMQGSTLPRRS
PRMLSLLQASTSPRRS

SEQ ID NO: 115257 - protein, 16 aa, Artificial Sequence
  Description of Artificial Sequence: Synthetic peptide
  Seed: PRMCSLMQGSTLPRRS
PRMLSLLQASTTPRRS

SEQ ID NO: 115258 - protein, 16 aa, Artificial Sequence
  Description of Artificial Sequence: Synthetic peptide
  Seed: PRMCSLMQGSTLPRRS
PRMLSLLQASTVPRRS

SEQ ID NO: 115259 - protein, 16 aa, Artificial Sequence
  Description of Artificial Sequence: Synthetic peptide
  Seed: PRMCSLMQGSTLPRRS
PRMLSLLQGSTAPRRS

SEQ ID NO: 115260 - protein, 16 aa, Artificial Sequence
  Description of Artificial Sequence: Synthetic peptide
  Seed: PRMCSLMQGSTLPRRS
PRMLSLLQGSTIPRRS

SEQ ID NO: 115261 - protein, 16 aa, Artificial Sequence
  Description of Artificial Sequence: Synthetic peptide
  Seed: PRMCSLMQGSTLPRRS
PRMLSLLQGSTLPRRS

SEQ ID NO: 115262 - protein, 16 aa, Artificial Sequence
  Description of Artificial Sequence: Synthetic peptide
  Seed: PRMCSLMQGSTLPRRS
PRMLSLLQGSTMPRRS

SEQ ID NO: 115263 - protein, 16 aa, Artificial Sequence
  Description of Artificial Sequence: Synthetic peptide
  Seed: PRMCSLMQGSTLPRRS
PRMLSLLQGSTSPRRS

SEQ ID NO: 115264 - protein, 16 aa, Artificial Sequence
  Description of Artificial Sequence: Synthetic peptide
  Seed: PRMCSLMQGSTLPRRS
PRMLSLLQGSTTPRRS

SEQ ID NO: 115265 - protein, 16 aa, Artificial Sequence
  Description of Artificial Sequence: Synthetic peptide
  Seed: PRMCSLMQGSTLPRRS
PRMLSLLQGSTVPRRS

SEQ ID NO: 115266 - protein, 16 aa, Artificial Sequence
  Description of Artificial Sequence: Synthetic peptide
  Seed: PRMCSLMQGSTLPRRS
PRMLSLLQISTAPRRS

SEQ ID NO: 115267 - protein, 16 aa, Artificial Sequence
  Description of Artificial Sequence: Synthetic peptide
  Seed: PRMCSLMQGSTLPRRS
PRMLSLLQNSTAPRRS

SEQ ID NO: 115268 - protein, 16 aa, Artificial Sequence
  Description of Artificial Sequence: Synthetic peptide
  Seed: PRMCSLMQGSTLPRRS
PRMLSLLQNSTIPRRS

SEQ ID NO: 115269 - protein, 16 aa, Artificial Sequence
  Description of Artificial Sequence: Synthetic peptide
  Seed: PRMCSLMQGSTLPRRS
PRMLSLLQNSTLPRRS

SEQ ID NO: 115270 - protein, 16 aa, Artificial Sequence
  Description of Artificial Sequence: Synthetic peptide
  Seed: PRMCSLMQGSTLPRRS
PRMLSLLQNSTVPRRS

SEQ ID NO: 115271 - protein, 16 aa, Artificial Sequence
  Description of Artificial Sequence: Synthetic peptide
  Seed: PRMCSLMQGSTLPRRS
PRMLSLLQPSTAPRRS

SEQ ID NO: 115272 - protein, 16 aa, Artificial Sequence
  Description of Artificial Sequence: Synthetic peptide
  Seed: PRMCSLMQGSTLPRRS
PRMLSLLQPSTIPRRS

SEQ ID NO: 115273 - protein, 16 aa, Artificial Sequence
  Description of Artificial Sequence: Synthetic peptide
  Seed: PRMCSLMQGSTLPRRS
PRMLSLLQPSTLPRRS

SEQ ID NO: 115274 - protein, 16 aa, Artificial Sequence
  Description of Artificial Sequence: Synthetic peptide
  Seed: PRMCSLMQGSTLPRRS
PRMLSLLQPSTMPRRS

SEQ ID NO: 115275 - protein, 16 aa, Artificial Sequence
  Description of Artificial Sequence: Synthetic peptide
  Seed: PRMCSLMQGSTLPRRS
PRMLSLLQPSTNPRRS

SEQ ID NO: 115276 - protein, 16 aa, Artificial Sequence
  Description of Artificial Sequence: Synthetic peptide
  Seed: PRMCSLMQGSTLPRRS
PRMLSLLQPSTSPRRS

SEQ ID NO: 115277 - protein, 16 aa, Artificial Sequence
  Description of Artificial Sequence: Synthetic peptide
  Seed: PRMCSLMQGSTLPRRS
PRMLSLLQPSTVPRRS

SEQ ID NO: 115278 - protein, 16 aa, Artificial Sequence
  Description of Artificial Sequence: Synthetic peptide
  Seed: PRMCSLMQGSTLPRRS
PRMLSLLQSSTAPRRS

SEQ ID NO: 115279 - protein, 16 aa, Artificial Sequence
  Description of Artificial Sequence: Synthetic peptide
  Seed: PRMCSLMQGSTLPRRS
PRMLSLLQSSTIPRRS

SEQ ID NO: 115280 - protein, 16 aa, Artificial Sequence
  Description of Artificial Sequence: Synthetic peptide
  Seed: PRMCSLMQGSTLPRRS
PRMLSLLQSSTLPRRS

SEQ ID NO: 115281 - protein, 16 aa, Artificial Sequence
  Description of Artificial Sequence: Synthetic peptide
  Seed: PRMCSLMQGSTLPRRS
PRMLSLLQSSTMPRRS

SEQ ID NO: 115282 - protein, 16 aa, Artificial Sequence
  Description of Artificial Sequence: Synthetic peptide
  Seed: PRMCSLMQGSTLPRRS
PRMLSLLQSSTNPRRS

SEQ ID NO: 115283 - protein, 16 aa, Artificial Sequence
  Description of Artificial Sequence: Synthetic peptide
  Seed: PRMCSLMQGSTLPRRS
PRMLSLLQSSTSPRRS

SEQ ID NO: 115284 - protein, 16 aa, Artificial Sequence
  Description of Artificial Sequence: Synthetic peptide
  Seed: PRMCSLMQGSTLPRRS
PRMLSLLQSSTTPRRS

SEQ ID NO: 115285 - protein, 16 aa, Artificial Sequence
  Description of Artificial Sequence: Synthetic peptide
  Seed: PRMCSLMQGSTLPRRS
PRMLSLLQSSTVPRRS

SEQ ID NO: 115286 - protein, 16 aa, Artificial Sequence
  Description of Artificial Sequence: Synthetic peptide
  Seed: PRMCSLMQGSTLPRRS
PRMLSLLQTSTAPRRS

SEQ ID NO: 115287 - protein, 16 aa, Artificial Sequence
  Description of Artificial Sequence: Synthetic peptide
  Seed: PRMCSLMQGSTLPRRS
PRMLSLLQTSTIPRRS

SEQ ID NO: 115288 - protein, 16 aa, Artificial Sequence
  Description of Artificial Sequence: Synthetic peptide
  Seed: PRMCSLMQGSTLPRRS
PRMLSLLQTSTLPRRS

SEQ ID NO: 115289 - protein, 16 aa, Artificial Sequence
  Description of Artificial Sequence: Synthetic peptide
  Seed: PRMCSLMQGSTLPRRS
PRMLSLLQTSTSPRRS

SEQ ID NO: 115290 - protein, 16 aa, Artificial Sequence
  Description of Artificial Sequence: Synthetic peptide
  Seed: PRMCSLMQGSTLPRRS
PRMLSLLQTSTVPRRS

SEQ ID NO: 115291 - protein, 16 aa, Artificial Sequence
  Description of Artificial Sequence: Synthetic peptide
  Seed: PRMCSLMQGSTLPRRS
PRMLSLLQVSTAPRRS

SEQ ID NO: 115292 - protein, 16 aa, Artificial Sequence
  Description of Artificial Sequence: Synthetic peptide
  Seed: PRMCSLMQGSTLPRRS
PRMLSLLQVSTNPRRS

SEQ ID NO: 115293 - protein, 16 aa, Artificial Sequence
  Description of Artificial Sequence: Synthetic peptide
  Seed: PRMCSLMQGSTLPRRS
PRMLSLLQVSTSPRRS

SEQ ID NO: 115294 - protein, 16 aa, Artificial Sequence
  Description of Artificial Sequence: Synthetic peptide
  Seed: PRMCSLMQGSTLPRRS
PRMLSLMQASTAPRRS

SEQ ID NO: 115295 - protein, 16 aa, Artificial Sequence
  Description of Artificial Sequence: Synthetic peptide
  Seed: PRMCSLMQGSTLPRRS
PRMLSLMQASTIPRRS

SEQ ID NO: 115296 - protein, 16 aa, Artificial Sequence
  Description of Artificial Sequence: Synthetic peptide
  Seed: PRMCSLMQGSTLPRRS
PRMLSLMQASTLPRRS

SEQ ID NO: 115297 - protein, 16 aa, Artificial Sequence
  Description of Artificial Sequence: Synthetic peptide
  Seed: PRMCSLMQGSTLPRRS
PRMLSLMQASTMPRRS

SEQ ID NO: 115298 - protein, 16 aa, Artificial Sequence
  Description of Artificial Sequence: Synthetic peptide
  Seed: PRMCSLMQGSTLPRRS
PRMLSLMQASTNPRRS

SEQ ID NO: 115299 - protein, 16 aa, Artificial Sequence
  Description of Artificial Sequence: Synthetic peptide
  Seed: PRMCSLMQGSTLPRRS
PRMLSLMQASTSPRRS

SEQ ID NO: 115300 - protein, 16 aa, Artificial Sequence
  Description of Artificial Sequence: Synthetic peptide
  Seed: PRMCSLMQGSTLPRRS
PRMLSLMQASTTPRRS

SEQ ID NO: 115301 - protein, 16 aa, Artificial Sequence
  Description of Artificial Sequence: Synthetic peptide
  Seed: PRMCSLMQGSTLPRRS
PRMLSLMQASTVPRRS

SEQ ID NO: 115302 - protein, 16 aa, Artificial Sequence
  Description of Artificial Sequence: Synthetic peptide
  Seed: PRMCSLMQGSTLPRRS
PRMLSLMQGSTAPRRS

SEQ ID NO: 115303 - protein, 16 aa, Artificial Sequence
  Description of Artificial Sequence: Synthetic peptide
  Seed: PRMCSLMQGSTLPRRS
PRMLSLMQGSTIPRRS

SEQ ID NO: 115304 - protein, 16 aa, Artificial Sequence
  Description of Artificial Sequence: Synthetic peptide
  Seed: PRMCSLMQGSTLPRRS
PRMLSLMQGSTLPRRS

SEQ ID NO: 115305 - protein, 16 aa, Artificial Sequence
  Description of Artificial Sequence: Synthetic peptide
  Seed: PRMCSLMQGSTLPRRS
PRMLSLMQGSTMPRRS

SEQ ID NO: 115306 - protein, 16 aa, Artificial Sequence
  Description of Artificial Sequence: Synthetic peptide
  Seed: PRMCSLMQGSTLPRRS
PRMLSLMQGSTSPRRS

SEQ ID NO: 115307 - protein, 16 aa, Artificial Sequence
  Description of Artificial Sequence: Synthetic peptide
  Seed: PRMCSLMQGSTLPRRS
PRMLSLMQGSTTPRRS

SEQ ID NO: 115308 - protein, 16 aa, Artificial Sequence
  Description of Artificial Sequence: Synthetic peptide
  Seed: PRMCSLMQGSTLPRRS
PRMLSLMQGSTVPRRS

SEQ ID NO: 115309 - protein, 16 aa, Artificial Sequence
  Description of Artificial Sequence: Synthetic peptide
  Seed: PRMCSLMQGSTLPRRS
PRMLSLMQISTAPRRS

SEQ ID NO: 115310 - protein, 16 aa, Artificial Sequence
  Description of Artificial Sequence: Synthetic peptide
  Seed: PRMCSLMQGSTLPRRS
PRMLSLMQISTSPRRS

SEQ ID NO: 115311 - protein, 16 aa, Artificial Sequence
  Description of Artificial Sequence: Synthetic peptide
  Seed: PRMCSLMQGSTLPRRS
PRMLSLMQNSTIPRRS

SEQ ID NO: 115312 - protein, 16 aa, Artificial Sequence
  Description of Artificial Sequence: Synthetic peptide
  Seed: PRMCSLMQGSTLPRRS
PRMLSLMQNSTLPRRS

SEQ ID NO: 115313 - protein, 16 aa, Artificial Sequence
  Description of Artificial Sequence: Synthetic peptide
  Seed: PRMCSLMQGSTLPRRS
PRMLSLMQNSTVPRRS

SEQ ID NO: 115314 - protein, 16 aa, Artificial Sequence
  Description of Artificial Sequence: Synthetic peptide
  Seed: PRMCSLMQGSTLPRRS
PRMLSLMQPSTAPRRS

SEQ ID NO: 115315 - protein, 16 aa, Artificial Sequence
  Description of Artificial Sequence: Synthetic peptide
  Seed: PRMCSLMQGSTLPRRS
PRMLSLMQPSTIPRRS

SEQ ID NO: 115316 - protein, 16 aa, Artificial Sequence
  Description of Artificial Sequence: Synthetic peptide
  Seed: PRMCSLMQGSTLPRRS
PRMLSLMQPSTLPRRS

SEQ ID NO: 115317 - protein, 16 aa, Artificial Sequence
  Description of Artificial Sequence: Synthetic peptide
  Seed: PRMCSLMQGSTLPRRS
PRMLSLMQPSTMPRRS

SEQ ID NO: 115318 - protein, 16 aa, Artificial Sequence
  Description of Artificial Sequence: Synthetic peptide
  Seed: PRMCSLMQGSTLPRRS
PRMLSLMQPSTSPRRS

SEQ ID NO: 115319 - protein, 16 aa, Artificial Sequence
  Description of Artificial Sequence: Synthetic peptide
  Seed: PRMCSLMQGSTLPRRS
PRMLSLMQPSTVPRRS

SEQ ID NO: 115320 - protein, 16 aa, Artificial Sequence
  Description of Artificial Sequence: Synthetic peptide
  Seed: PRMCSLMQGSTLPRRS
PRMLSLMQSSTAPRRS

SEQ ID NO: 115321 - protein, 16 aa, Artificial Sequence
  Description of Artificial Sequence: Synthetic peptide
  Seed: PRMCSLMQGSTLPRRS
PRMLSLMQSSTIPRRS

SEQ ID NO: 115322 - protein, 16 aa, Artificial Sequence
  Description of Artificial Sequence: Synthetic peptide
  Seed: PRMCSLMQGSTLPRRS
PRMLSLMQSSTLPRRS

SEQ ID NO: 115323 - protein, 16 aa, Artificial Sequence
  Description of Artificial Sequence: Synthetic peptide
  Seed: PRMCSLMQGSTLPRRS
PRMLSLMQSSTMPRRS

SEQ ID NO: 115324 - protein, 16 aa, Artificial Sequence
  Description of Artificial Sequence: Synthetic peptide
  Seed: PRMCSLMQGSTLPRRS
PRMLSLMQSSTSPRRS

SEQ ID NO: 115325 - protein, 16 aa, Artificial Sequence
  Description of Artificial Sequence: Synthetic peptide
  Seed: PRMCSLMQGSTLPRRS
PRMLSLMQSSTTPRRS

SEQ ID NO: 115326 - protein, 16 aa, Artificial Sequence
  Description of Artificial Sequence: Synthetic peptide
  Seed: PRMCSLMQGSTLPRRS
PRMLSLMQSSTVPRRS

SEQ ID NO: 115327 - protein, 16 aa, Artificial Sequence
  Description of Artificial Sequence: Synthetic peptide
  Seed: PRMCSLMQGSTLPRRS
PRMLSLMQTSTAPRRS

SEQ ID NO: 115328 - protein, 16 aa, Artificial Sequence
  Description of Artificial Sequence: Synthetic peptide
  Seed: PRMCSLMQGSTLPRRS
PRMLSLMQTSTIPRRS

SEQ ID NO: 115329 - protein, 16 aa, Artificial Sequence
  Description of Artificial Sequence: Synthetic peptide
  Seed: PRMCSLMQGSTLPRRS
PRMLSLMQTSTLPRRS

SEQ ID NO: 115330 - protein, 16 aa, Artificial Sequence
  Description of Artificial Sequence: Synthetic peptide
  Seed: PRMCSLMQGSTLPRRS
PRMLSLMQTSTVPRRS

SEQ ID NO: 115331 - protein, 16 aa, Artificial Sequence
  Description of Artificial Sequence: Synthetic peptide
  Seed: PRMCSLMQGSTLPRRS
PRMLSLMQVSTAPRRS

SEQ ID NO: 115332 - protein, 16 aa, Artificial Sequence
  Description of Artificial Sequence: Synthetic peptide
  Seed: PRMCSLMQGSTLPRRS
PRMLSLMQVSTNPRRS

SEQ ID NO: 115333 - protein, 16 aa, Artificial Sequence
  Description of Artificial Sequence: Synthetic peptide
  Seed: PRMCSLMQGSTLPRRS
PRMLSLMQVSTSPRRS

SEQ ID NO: 115334 - protein, 16 aa, Artificial Sequence
  Description of Artificial Sequence: Synthetic peptide
  Seed: PRMCSLMQGSTLPRRS
PRMLSLQQASTIPRRS

SEQ ID NO: 115335 - protein, 16 aa, Artificial Sequence
  Description of Artificial Sequence: Synthetic peptide
  Seed: PRMCSLMQGSTLPRRS
PRMLSLQQASTLPRRS

SEQ ID NO: 115336 - protein, 16 aa, Artificial Sequence
  Description of Artificial Sequence: Synthetic peptide
  Seed: PRMCSLMQGSTLPRRS
PRMLSLQQASTVPRRS

SEQ ID NO: 115337 - protein, 16 aa, Artificial Sequence
  Description of Artificial Sequence: Synthetic peptide
  Seed: PRMCSLMQGSTLPRRS
PRMLSLQQGSTLPRRS

SEQ ID NO: 115338 - protein, 16 aa, Artificial Sequence
  Description of Artificial Sequence: Synthetic peptide
  Seed: PRMCSLMQGSTLPRRS
PRMMSLIQASTLPRRS

SEQ ID NO: 115339 - protein, 16 aa, Artificial Sequence
  Description of Artificial Sequence: Synthetic peptide
  Seed: PRMCSLMQGSTLPRRS
PRMMSLIQASTVPRRS

SEQ ID NO: 115340 - protein, 16 aa, Artificial Sequence
  Description of Artificial Sequence: Synthetic peptide
  Seed: PRMCSLMQGSTLPRRS
PRMMSLIQGSTLPRRS

SEQ ID NO: 115341 - protein, 16 aa, Artificial Sequence
  Description of Artificial Sequence: Synthetic peptide
  Seed: PRMCSLMQGSTLPRRS
PRMMSLLQASTAPRRS

SEQ ID NO: 115342 - protein, 16 aa, Artificial Sequence
  Description of Artificial Sequence: Synthetic peptide
  Seed: PRMCSLMQGSTLPRRS
PRMMSLLQASTIPRRS

SEQ ID NO: 115343 - protein, 16 aa, Artificial Sequence
  Description of Artificial Sequence: Synthetic peptide
  Seed: PRMCSLMQGSTLPRRS
PRMMSLLQASTLPRRS

SEQ ID NO: 115344 - protein, 16 aa, Artificial Sequence
  Description of Artificial Sequence: Synthetic peptide
  Seed: PRMCSLMQGSTLPRRS
PRMMSLLQASTMPRRS

SEQ ID NO: 115345 - protein, 16 aa, Artificial Sequence
  Description of Artificial Sequence: Synthetic peptide
  Seed: PRMCSLMQGSTLPRRS
PRMMSLLQASTSPRRS

SEQ ID NO: 115346 - protein, 16 aa, Artificial Sequence
  Description of Artificial Sequence: Synthetic peptide
  Seed: PRMCSLMQGSTLPRRS
PRMMSLLQASTTPRRS

SEQ ID NO: 115347 - protein, 16 aa, Artificial Sequence
  Description of Artificial Sequence: Synthetic peptide
  Seed: PRMCSLMQGSTLPRRS
PRMMSLLQASTVPRRS

SEQ ID NO: 115348 - protein, 16 aa, Artificial Sequence
  Description of Artificial Sequence: Synthetic peptide
  Seed: PRMCSLMQGSTLPRRS
PRMMSLLQGSTAPRRS

SEQ ID NO: 115349 - protein, 16 aa, Artificial Sequence
  Description of Artificial Sequence: Synthetic peptide
  Seed: PRMCSLMQGSTLPRRS
PRMMSLLQGSTIPRRS

SEQ ID NO: 115350 - protein, 16 aa, Artificial Sequence
  Description of Artificial Sequence: Synthetic peptide
  Seed: PRMCSLMQGSTLPRRS
PRMMSLLQGSTLPRRS

SEQ ID NO: 115351 - protein, 16 aa, Artificial Sequence
  Description of Artificial Sequence: Synthetic peptide
  Seed: PRMCSLMQGSTLPRRS
PRMMSLLQGSTMPRRS

SEQ ID NO: 115352 - protein, 16 aa, Artificial Sequence
  Description of Artificial Sequence: Synthetic peptide
  Seed: PRMCSLMQGSTLPRRS
PRMMSLLQGSTTPRRS

SEQ ID NO: 115353 - protein, 16 aa, Artificial Sequence
  Description of Artificial Sequence: Synthetic peptide
  Seed: PRMCSLMQGSTLPRRS
PRMMSLLQGSTVPRRS

SEQ ID NO: 115354 - protein, 16 aa, Artificial Sequence
  Description of Artificial Sequence: Synthetic peptide
  Seed: PRMCSLMQGSTLPRRS
PRMMSLLQPSTAPRRS

SEQ ID NO: 115355 - protein, 16 aa, Artificial Sequence
  Description of Artificial Sequence: Synthetic peptide
  Seed: PRMCSLMQGSTLPRRS
PRMMSLLQPSTIPRRS

SEQ ID NO: 115356 - protein, 16 aa, Artificial Sequence
  Description of Artificial Sequence: Synthetic peptide
  Seed: PRMCSLMQGSTLPRRS
PRMMSLLQPSTLPRRS

SEQ ID NO: 115357 - protein, 16 aa, Artificial Sequence
  Description of Artificial Sequence: Synthetic peptide
  Seed: PRMCSLMQGSTLPRRS
PRMMSLLQPSTVPRRS

SEQ ID NO: 115358 - protein, 16 aa, Artificial Sequence
  Description of Artificial Sequence: Synthetic peptide
  Seed: PRMCSLMQGSTLPRRS
PRMMSLLQSSTAPRRS

SEQ ID NO: 115359 - protein, 16 aa, Artificial Sequence
  Description of Artificial Sequence: Synthetic peptide
  Seed: PRMCSLMQGSTLPRRS
PRMMSLLQSSTIPRRS

SEQ ID NO: 115360 - protein, 16 aa, Artificial Sequence
  Description of Artificial Sequence: Synthetic peptide
  Seed: PRMCSLMQGSTLPRRS
PRMMSLLQSSTLPRRS

SEQ ID NO: 115361 - protein, 16 aa, Artificial Sequence
  Description of Artificial Sequence: Synthetic peptide
  Seed: PRMCSLMQGSTLPRRS
PRMMSLLQSSTVPRRS

SEQ ID NO: 115362 - protein, 16 aa, Artificial Sequence
  Description of Artificial Sequence: Synthetic peptide
  Seed: PRMCSLMQGSTLPRRS
PRMMSLLQVSTAPRRS

SEQ ID NO: 115363 - protein, 16 aa, Artificial Sequence
  Description of Artificial Sequence: Synthetic peptide
  Seed: PRMCSLMQGSTLPRRS
PRMMSLMQASTAPRRS

SEQ ID NO: 115364 - protein, 16 aa, Artificial Sequence
  Description of Artificial Sequence: Synthetic peptide
  Seed: PRMCSLMQGSTLPRRS
PRMMSLMQASTIPRRS

SEQ ID NO: 115365 - protein, 16 aa, Artificial Sequence
  Description of Artificial Sequence: Synthetic peptide
  Seed: PRMCSLMQGSTLPRRS
PRMMSLMQASTLPRRS

SEQ ID NO: 115366 - protein, 16 aa, Artificial Sequence
  Description of Artificial Sequence: Synthetic peptide
  Seed: PRMCSLMQGSTLPRRS
PRMMSLMQASTMPRRS

SEQ ID NO: 115367 - protein, 16 aa, Artificial Sequence
  Description of Artificial Sequence: Synthetic peptide
  Seed: PRMCSLMQGSTLPRRS
PRMMSLMQASTSPRRS

SEQ ID NO: 115368 - protein, 16 aa, Artificial Sequence
  Description of Artificial Sequence: Synthetic peptide
  Seed: PRMCSLMQGSTLPRRS
PRMMSLMQASTTPRRS

SEQ ID NO: 115369 - protein, 16 aa, Artificial Sequence
  Description of Artificial Sequence: Synthetic peptide
  Seed: PRMCSLMQGSTLPRRS
PRMMSLMQASTVPRRS

SEQ ID NO: 115370 - protein, 16 aa, Artificial Sequence
  Description of Artificial Sequence: Synthetic peptide
  Seed: PRMCSLMQGSTLPRRS
PRMMSLMQGSTAPRRS

SEQ ID NO: 115371 - protein, 16 aa, Artificial Sequence
  Description of Artificial Sequence: Synthetic peptide
  Seed: PRMCSLMQGSTLPRRS
PRMMSLMQGSTIPRRS

SEQ ID NO: 115372 - protein, 16 aa, Artificial Sequence
  Description of Artificial Sequence: Synthetic peptide
  Seed: PRMCSLMQGSTLPRRS
PRMMSLMQGSTLPRRS

SEQ ID NO: 115373 - protein, 16 aa, Artificial Sequence
  Description of Artificial Sequence: Synthetic peptide
  Seed: PRMCSLMQGSTLPRRS
PRMMSLMQGSTMPRRS

SEQ ID NO: 115374 - protein, 16 aa, Artificial Sequence
  Description of Artificial Sequence: Synthetic peptide
  Seed: PRMCSLMQGSTLPRRS
PRMMSLMQGSTTPRRS

SEQ ID NO: 115375 - protein, 16 aa, Artificial Sequence
  Description of Artificial Sequence: Synthetic peptide
  Seed: PRMCSLMQGSTLPRRS
PRMMSLMQGSTVPRRS

SEQ ID NO: 115376 - protein, 16 aa, Artificial Sequence
  Description of Artificial Sequence: Synthetic peptide
  Seed: PRMCSLMQGSTLPRRS
PRMMSLMQISTAPRRS

SEQ ID NO: 115377 - protein, 16 aa, Artificial Sequence
  Description of Artificial Sequence: Synthetic peptide
  Seed: PRMCSLMQGSTLPRRS
PRMMSLMQPSTAPRRS

SEQ ID NO: 115378 - protein, 16 aa, Artificial Sequence
  Description of Artificial Sequence: Synthetic peptide
  Seed: PRMCSLMQGSTLPRRS
PRMMSLMQPSTIPRRS

SEQ ID NO: 115379 - protein, 16 aa, Artificial Sequence
  Description of Artificial Sequence: Synthetic peptide
  Seed: PRMCSLMQGSTLPRRS
PRMMSLMQPSTLPRRS

SEQ ID NO: 115380 - protein, 16 aa, Artificial Sequence
  Description of Artificial Sequence: Synthetic peptide
  Seed: PRMCSLMQGSTLPRRS
PRMMSLMQPSTVPRRS

SEQ ID NO: 115381 - protein, 16 aa, Artificial Sequence
  Description of Artificial Sequence: Synthetic peptide
  Seed: PRMCSLMQGSTLPRRS
PRMMSLMQSSTAPRRS

SEQ ID NO: 115382 - protein, 16 aa, Artificial Sequence
  Description of Artificial Sequence: Synthetic peptide
  Seed: PRMCSLMQGSTLPRRS
PRMMSLMQSSTIPRRS

SEQ ID NO: 115383 - protein, 16 aa, Artificial Sequence
  Description of Artificial Sequence: Synthetic peptide
  Seed: PRMCSLMQGSTLPRRS
PRMMSLMQSSTLPRRS

SEQ ID NO: 115384 - protein, 16 aa, Artificial Sequence
  Description of Artificial Sequence: Synthetic peptide
  Seed: PRMCSLMQGSTLPRRS
PRMMSLMQSSTVPRRS

SEQ ID NO: 115385 - protein, 16 aa, Artificial Sequence
  Description of Artificial Sequence: Synthetic peptide
  Seed: PRMCSLMQGSTLPRRS
PRMMSLMQVSTAPRRS

SEQ ID NO: 115386 - protein, 16 aa, Artificial Sequence
  Description of Artificial Sequence: Synthetic peptide
  Seed: PRMCSLMQGSTLPRRS
PRMVSLIQASTLPRRS

SEQ ID NO: 115387 - protein, 16 aa, Artificial Sequence
  Description of Artificial Sequence: Synthetic peptide
  Seed: PRMCSLMQGSTLPRRS
PRMVSLLQASTAPRRS

SEQ ID NO: 115388 - protein, 16 aa, Artificial Sequence
  Description of Artificial Sequence: Synthetic peptide
  Seed: PRMCSLMQGSTLPRRS
PRMVSLLQASTIPRRS

SEQ ID NO: 115389 - protein, 16 aa, Artificial Sequence
  Description of Artificial Sequence: Synthetic peptide
  Seed: PRMCSLMQGSTLPRRS
PRMVSLLQASTLPRRS

SEQ ID NO: 115390 - protein, 16 aa, Artificial Sequence
  Description of Artificial Sequence: Synthetic peptide
  Seed: PRMCSLMQGSTLPRRS
PRMVSLLQASTMPRRS

SEQ ID NO: 115391 - protein, 16 aa, Artificial Sequence
  Description of Artificial Sequence: Synthetic peptide
  Seed: PRMCSLMQGSTLPRRS
PRMVSLLQASTTPRRS

SEQ ID NO: 115392 - protein, 16 aa, Artificial Sequence
  Description of Artificial Sequence: Synthetic peptide
  Seed: PRMCSLMQGSTLPRRS
PRMVSLLQASTVPRRS

SEQ ID NO: 115393 - protein, 16 aa, Artificial Sequence
  Description of Artificial Sequence: Synthetic peptide
  Seed: PRMCSLMQGSTLPRRS
PRMVSLLQGSTAPRRS

SEQ ID NO: 115394 - protein, 16 aa, Artificial Sequence
  Description of Artificial Sequence: Synthetic peptide
  Seed: PRMCSLMQGSTLPRRS
PRMVSLLQGSTIPRRS

SEQ ID NO: 115395 - protein, 16 aa, Artificial Sequence
  Description of Artificial Sequence: Synthetic peptide
  Seed: PRMCSLMQGSTLPRRS
PRMVSLLQGSTLPRRS

SEQ ID NO: 115396 - protein, 16 aa, Artificial Sequence
  Description of Artificial Sequence: Synthetic peptide
  Seed: PRMCSLMQGSTLPRRS
PRMVSLLQGSTMPRRS

SEQ ID NO: 115397 - protein, 16 aa, Artificial Sequence
  Description of Artificial Sequence: Synthetic peptide
  Seed: PRMCSLMQGSTLPRRS
PRMVSLLQGSTTPRRS

SEQ ID NO: 115398 - protein, 16 aa, Artificial Sequence
  Description of Artificial Sequence: Synthetic peptide
  Seed: PRMCSLMQGSTLPRRS
PRMVSLLQGSTVPRRS

SEQ ID NO: 115399 - protein, 16 aa, Artificial Sequence
  Description of Artificial Sequence: Synthetic peptide
  Seed: PRMCSLMQGSTLPRRS
PRMVSLLQPSTIPRRS

SEQ ID NO: 115400 - protein, 16 aa, Artificial Sequence
  Description of Artificial Sequence: Synthetic peptide
  Seed: PRMCSLMQGSTLPRRS
PRMVSLLQPSTLPRRS

SEQ ID NO: 115401 - protein, 16 aa, Artificial Sequence
  Description of Artificial Sequence: Synthetic peptide
  Seed: PRMCSLMQGSTLPRRS
PRMVSLLQPSTVPRRS

SEQ ID NO: 115402 - protein, 16 aa, Artificial Sequence
  Description of Artificial Sequence: Synthetic peptide
  Seed: PRMCSLMQGSTLPRRS
PRMVSLLQSSTAPRRS

SEQ ID NO: 115403 - protein, 16 aa, Artificial Sequence
  Description of Artificial Sequence: Synthetic peptide
  Seed: PRMCSLMQGSTLPRRS
PRMVSLLQSSTIPRRS

SEQ ID NO: 115404 - protein, 16 aa, Artificial Sequence
  Description of Artificial Sequence: Synthetic peptide
  Seed: PRMCSLMQGSTLPRRS
PRMVSLLQSSTLPRRS

SEQ ID NO: 115405 - protein, 16 aa, Artificial Sequence
  Description of Artificial Sequence: Synthetic peptide
  Seed: PRMCSLMQGSTLPRRS
PRMVSLLQSSTVPRRS

SEQ ID NO: 115406 - protein, 16 aa, Artificial Sequence
  Description of Artificial Sequence: Synthetic peptide
  Seed: PRMCSLMQGSTLPRRS
PRMVSLMQASTAPRRS

SEQ ID NO: 115407 - protein, 16 aa, Artificial Sequence
  Description of Artificial Sequence: Synthetic peptide
  Seed: PRMCSLMQGSTLPRRS
PRMVSLMQASTIPRRS

SEQ ID NO: 115408 - protein, 16 aa, Artificial Sequence
  Description of Artificial Sequence: Synthetic peptide
  Seed: PRMCSLMQGSTLPRRS
PRMVSLMQASTLPRRS

SEQ ID NO: 115409 - protein, 16 aa, Artificial Sequence
  Description of Artificial Sequence: Synthetic peptide
  Seed: PRMCSLMQGSTLPRRS
PRMVSLMQASTMPRRS

SEQ ID NO: 115410 - protein, 16 aa, Artificial Sequence
  Description of Artificial Sequence: Synthetic peptide
  Seed: PRMCSLMQGSTLPRRS
PRMVSLMQASTVPRRS

SEQ ID NO: 115411 - protein, 16 aa, Artificial Sequence
  Description of Artificial Sequence: Synthetic peptide
  Seed: PRMCSLMQGSTLPRRS
PRMVSLMQGSTAPRRS

SEQ ID NO: 115412 - protein, 16 aa, Artificial Sequence
  Description of Artificial Sequence: Synthetic peptide
  Seed: PRMCSLMQGSTLPRRS
PRMVSLMQGSTIPRRS

SEQ ID NO: 115413 - protein, 16 aa, Artificial Sequence
  Description of Artificial Sequence: Synthetic peptide
  Seed: PRMCSLMQGSTLPRRS
PRMVSLMQGSTLPRRS

SEQ ID NO: 115414 - protein, 16 aa, Artificial Sequence
  Description of Artificial Sequence: Synthetic peptide
  Seed: PRMCSLMQGSTLPRRS
PRMVSLMQGSTMPRRS

SEQ ID NO: 115415 - protein, 16 aa, Artificial Sequence
  Description of Artificial Sequence: Synthetic peptide
  Seed: PRMCSLMQGSTLPRRS
PRMVSLMQGSTVPRRS

SEQ ID NO: 115416 - protein, 16 aa, Artificial Sequence
  Description of Artificial Sequence: Synthetic peptide
  Seed: PRMCSLMQGSTLPRRS
PRMVSLMQPSTLPRRS

SEQ ID NO: 115417 - protein, 16 aa, Artificial Sequence
  Description of Artificial Sequence: Synthetic peptide
  Seed: PRMCSLMQGSTLPRRS
PRMVSLMQPSTVPRRS

SEQ ID NO: 115418 - protein, 16 aa, Artificial Sequence
  Description of Artificial Sequence: Synthetic peptide
  Seed: PRMCSLMQGSTLPRRS
PRMVSLMQSSTAPRRS

SEQ ID NO: 115419 - protein, 16 aa, Artificial Sequence
  Description of Artificial Sequence: Synthetic peptide
  Seed: PRMCSLMQGSTLPRRS
PRMVSLMQSSTIPRRS

SEQ ID NO: 115420 - protein, 16 aa, Artificial Sequence
  Description of Artificial Sequence: Synthetic peptide
  Seed: PRMCSLMQGSTLPRRS
PRMVSLMQSSTLPRRS

SEQ ID NO: 115421 - protein, 16 aa, Artificial Sequence
  Description of Artificial Sequence: Synthetic peptide
  Seed: PRMCSLMQGSTLPRRS
PRMVSLMQSSTVPRRS

SEQ ID NO: 115422 - protein, 16 aa, Artificial Sequence
  Description of Artificial Sequence: Synthetic peptide
  Seed: PRMCSLMQGSTLPRRS
PRMWSLAQASTAPRRS

SEQ ID NO: 115423 - protein, 16 aa, Artificial Sequence
  Description of Artificial Sequence: Synthetic peptide
  Seed: PRMCSLMQGSTLPRRS
PRMWSLAQASTIPRRS

SEQ ID NO: 115424 - protein, 16 aa, Artificial Sequence
  Description of Artificial Sequence: Synthetic peptide
  Seed: PRMCSLMQGSTLPRRS
PRMWSLAQASTLPRRS

SEQ ID NO: 115425 - protein, 16 aa, Artificial Sequence
  Description of Artificial Sequence: Synthetic peptide
  Seed: PRMCSLMQGSTLPRRS
PRMWSLAQASTMPRRS

SEQ ID NO: 115426 - protein, 16 aa, Artificial Sequence
  Description of Artificial Sequence: Synthetic peptide
  Seed: PRMCSLMQGSTLPRRS
PRMWSLAQASTSPRRS

SEQ ID NO: 115427 - protein, 16 aa, Artificial Sequence
  Description of Artificial Sequence: Synthetic peptide
  Seed: PRMCSLMQGSTLPRRS
PRMWSLAQASTTPRRS

SEQ ID NO: 115428 - protein, 16 aa, Artificial Sequence
  Description of Artificial Sequence: Synthetic peptide
  Seed: PRMCSLMQGSTLPRRS
PRMWSLAQASTVPRRS

SEQ ID NO: 115429 - protein, 16 aa, Artificial Sequence
  Description of Artificial Sequence: Synthetic peptide
  Seed: PRMCSLMQGSTLPRRS
PRMWSLAQGSTAPRRS

SEQ ID NO: 115430 - protein, 16 aa, Artificial Sequence
  Description of Artificial Sequence: Synthetic peptide
  Seed: PRMCSLMQGSTLPRRS
PRMWSLAQGSTIPRRS

SEQ ID NO: 115431 - protein, 16 aa, Artificial Sequence
  Description of Artificial Sequence: Synthetic peptide
  Seed: PRMCSLMQGSTLPRRS
PRMWSLAQGSTLPRRS

SEQ ID NO: 115432 - protein, 16 aa, Artificial Sequence
  Description of Artificial Sequence: Synthetic peptide
  Seed: PRMCSLMQGSTLPRRS
PRMWSLAQGSTVPRRS

SEQ ID NO: 115433 - protein, 16 aa, Artificial Sequence
  Description of Artificial Sequence: Synthetic peptide
  Seed: PRMCSLMQGSTLPRRS
PRMWSLAQPSTLPRRS

SEQ ID NO: 115434 - protein, 16 aa, Artificial Sequence
  Description of Artificial Sequence: Synthetic peptide
  Seed: PRMCSLMQGSTLPRRS
PRMWSLAQSSTAPRRS

SEQ ID NO: 115435 - protein, 16 aa, Artificial Sequence
  Description of Artificial Sequence: Synthetic peptide
  Seed: PRMCSLMQGSTLPRRS
PRMWSLAQSSTIPRRS

SEQ ID NO: 115436 - protein, 16 aa, Artificial Sequence
  Description of Artificial Sequence: Synthetic peptide
  Seed: PRMCSLMQGSTLPRRS
PRMWSLAQSSTLPRRS

SEQ ID NO: 115437 - protein, 16 aa, Artificial Sequence
  Description of Artificial Sequence: Synthetic peptide
  Seed: PRMCSLMQGSTLPRRS
PRMWSLAQSSTVPRRS

SEQ ID NO: 115438 - protein, 16 aa, Artificial Sequence
  Description of Artificial Sequence: Synthetic peptide
  Seed: PRMCSLMQGSTLPRRS
PRMWSLAQVSTAPRRS

SEQ ID NO: 115439 - protein, 16 aa, Artificial Sequence
  Description of Artificial Sequence: Synthetic peptide
  Seed: PRMCSLMQGSTLPRRS
PRMWSLFQASTAPRRS

SEQ ID NO: 115440 - protein, 16 aa, Artificial Sequence
  Description of Artificial Sequence: Synthetic peptide
  Seed: PRMCSLMQGSTLPRRS
PRMWSLIQASTAPRRS

SEQ ID NO: 115441 - protein, 16 aa, Artificial Sequence
  Description of Artificial Sequence: Synthetic peptide
  Seed: PRMCSLMQGSTLPRRS
PRMWSLIQASTIPRRS

SEQ ID NO: 115442 - protein, 16 aa, Artificial Sequence
  Description of Artificial Sequence: Synthetic peptide
  Seed: PRMCSLMQGSTLPRRS
PRMWSLIQASTLPRRS

SEQ ID NO: 115443 - protein, 16 aa, Artificial Sequence
  Description of Artificial Sequence: Synthetic peptide
  Seed: PRMCSLMQGSTLPRRS
PRMWSLIQASTMPRRS

SEQ ID NO: 115444 - protein, 16 aa, Artificial Sequence
  Description of Artificial Sequence: Synthetic peptide
  Seed: PRMCSLMQGSTLPRRS
PRMWSLIQASTNPRRS

SEQ ID NO: 115445 - protein, 16 aa, Artificial Sequence
  Description of Artificial Sequence: Synthetic peptide
  Seed: PRMCSLMQGSTLPRRS
PRMWSLIQASTSPRRS

SEQ ID NO: 115446 - protein, 16 aa, Artificial Sequence
  Description of Artificial Sequence: Synthetic peptide
  Seed: PRMCSLMQGSTLPRRS
PRMWSLIQASTTPRRS

SEQ ID NO: 115447 - protein, 16 aa, Artificial Sequence
  Description of Artificial Sequence: Synthetic peptide
  Seed: PRMCSLMQGSTLPRRS
PRMWSLIQASTVPRRS

SEQ ID NO: 115448 - protein, 16 aa, Artificial Sequence
  Description of Artificial Sequence: Synthetic peptide
  Seed: PRMCSLMQGSTLPRRS
PRMWSLIQGSTAPRRS

SEQ ID NO: 115449 - protein, 16 aa, Artificial Sequence
  Description of Artificial Sequence: Synthetic peptide
  Seed: PRMCSLMQGSTLPRRS
PRMWSLIQGSTIPRRS

SEQ ID NO: 115450 - protein, 16 aa, Artificial Sequence
  Description of Artificial Sequence: Synthetic peptide
  Seed: PRMCSLMQGSTLPRRS
PRMWSLIQGSTLPRRS

SEQ ID NO: 115451 - protein, 16 aa, Artificial Sequence
  Description of Artificial Sequence: Synthetic peptide
  Seed: PRMCSLMQGSTLPRRS
PRMWSLIQGSTMPRRS

SEQ ID NO: 115452 - protein, 16 aa, Artificial Sequence
  Description of Artificial Sequence: Synthetic peptide
  Seed: PRMCSLMQGSTLPRRS
PRMWSLIQGSTSPRRS

SEQ ID NO: 115453 - protein, 16 aa, Artificial Sequence
  Description of Artificial Sequence: Synthetic peptide
  Seed: PRMCSLMQGSTLPRRS
PRMWSLIQGSTTPRRS

SEQ ID NO: 115454 - protein, 16 aa, Artificial Sequence
  Description of Artificial Sequence: Synthetic peptide
  Seed: PRMCSLMQGSTLPRRS
PRMWSLIQGSTVPRRS

SEQ ID NO: 115455 - protein, 16 aa, Artificial Sequence
  Description of Artificial Sequence: Synthetic peptide
  Seed: PRMCSLMQGSTLPRRS
PRMWSLIQISTAPRRS

SEQ ID NO: 115456 - protein, 16 aa, Artificial Sequence
  Description of Artificial Sequence: Synthetic peptide
  Seed: PRMCSLMQGSTLPRRS
PRMWSLIQISTSPRRS

SEQ ID NO: 115457 - protein, 16 aa, Artificial Sequence
  Description of Artificial Sequence: Synthetic peptide
  Seed: PRMCSLMQGSTLPRRS
PRMWSLIQNSTLPRRS

SEQ ID NO: 115458 - protein, 16 aa, Artificial Sequence
  Description of Artificial Sequence: Synthetic peptide
  Seed: PRMCSLMQGSTLPRRS
PRMWSLIQNSTVPRRS

SEQ ID NO: 115459 - protein, 16 aa, Artificial Sequence
  Description of Artificial Sequence: Synthetic peptide
  Seed: PRMCSLMQGSTLPRRS
PRMWSLIQPSTAPRRS

SEQ ID NO: 115460 - protein, 16 aa, Artificial Sequence
  Description of Artificial Sequence: Synthetic peptide
  Seed: PRMCSLMQGSTLPRRS
PRMWSLIQPSTIPRRS

SEQ ID NO: 115461 - protein, 16 aa, Artificial Sequence
  Description of Artificial Sequence: Synthetic peptide
  Seed: PRMCSLMQGSTLPRRS
PRMWSLIQPSTLPRRS

SEQ ID NO: 115462 - protein, 16 aa, Artificial Sequence
  Description of Artificial Sequence: Synthetic peptide
  Seed: PRMCSLMQGSTLPRRS
PRMWSLIQPSTNPRRS

SEQ ID NO: 115463 - protein, 16 aa, Artificial Sequence
  Description of Artificial Sequence: Synthetic peptide
  Seed: PRMCSLMQGSTLPRRS
PRMWSLIQPSTSPRRS

SEQ ID NO: 115464 - protein, 16 aa, Artificial Sequence
  Description of Artificial Sequence: Synthetic peptide
  Seed: PRMCSLMQGSTLPRRS
PRMWSLIQPSTTPRRS

SEQ ID NO: 115465 - protein, 16 aa, Artificial Sequence
  Description of Artificial Sequence: Synthetic peptide
  Seed: PRMCSLMQGSTLPRRS
PRMWSLIQPSTVPRRS

SEQ ID NO: 115466 - protein, 16 aa, Artificial Sequence
  Description of Artificial Sequence: Synthetic peptide
  Seed: PRMCSLMQGSTLPRRS
PRMWSLIQSSTAPRRS

SEQ ID NO: 115467 - protein, 16 aa, Artificial Sequence
  Description of Artificial Sequence: Synthetic peptide
  Seed: PRMCSLMQGSTLPRRS
PRMWSLIQSSTIPRRS

SEQ ID NO: 115468 - protein, 16 aa, Artificial Sequence
  Description of Artificial Sequence: Synthetic peptide
  Seed: PRMCSLMQGSTLPRRS
PRMWSLIQSSTLPRRS

SEQ ID NO: 115469 - protein, 16 aa, Artificial Sequence
  Description of Artificial Sequence: Synthetic peptide
  Seed: PRMCSLMQGSTLPRRS
PRMWSLIQSSTMPRRS

SEQ ID NO: 115470 - protein, 16 aa, Artificial Sequence
  Description of Artificial Sequence: Synthetic peptide
  Seed: PRMCSLMQGSTLPRRS
PRMWSLIQSSTNPRRS

SEQ ID NO: 115471 - protein, 16 aa, Artificial Sequence
  Description of Artificial Sequence: Synthetic peptide
  Seed: PRMCSLMQGSTLPRRS
PRMWSLIQSSTSPRRS

SEQ ID NO: 115472 - protein, 16 aa, Artificial Sequence
  Description of Artificial Sequence: Synthetic peptide
  Seed: PRMCSLMQGSTLPRRS
PRMWSLIQSSTTPRRS

SEQ ID NO: 115473 - protein, 16 aa, Artificial Sequence
  Description of Artificial Sequence: Synthetic peptide
  Seed: PRMCSLMQGSTLPRRS
PRMWSLIQSSTVPRRS

SEQ ID NO: 115474 - protein, 16 aa, Artificial Sequence
  Description of Artificial Sequence: Synthetic peptide
  Seed: PRMCSLMQGSTLPRRS
PRMWSLIQTSTAPRRS

SEQ ID NO: 115475 - protein, 16 aa, Artificial Sequence
  Description of Artificial Sequence: Synthetic peptide
  Seed: PRMCSLMQGSTLPRRS
PRMWSLIQTSTLPRRS

SEQ ID NO: 115476 - protein, 16 aa, Artificial Sequence
  Description of Artificial Sequence: Synthetic peptide
  Seed: PRMCSLMQGSTLPRRS
PRMWSLIQTSTNPRRS

SEQ ID NO: 115477 - protein, 16 aa, Artificial Sequence
  Description of Artificial Sequence: Synthetic peptide
  Seed: PRMCSLMQGSTLPRRS
PRMWSLIQTSTSPRRS

SEQ ID NO: 115478 - protein, 16 aa, Artificial Sequence
  Description of Artificial Sequence: Synthetic peptide
  Seed: PRMCSLMQGSTLPRRS
PRMWSLIQTSTTPRRS

SEQ ID NO: 115479 - protein, 16 aa, Artificial Sequence
  Description of Artificial Sequence: Synthetic peptide
  Seed: PRMCSLMQGSTLPRRS
PRMWSLIQTSTVPRRS

SEQ ID NO: 115480 - protein, 16 aa, Artificial Sequence
  Description of Artificial Sequence: Synthetic peptide
  Seed: PRMCSLMQGSTLPRRS
PRMWSLIQVSTAPRRS

SEQ ID NO: 115481 - protein, 16 aa, Artificial Sequence
  Description of Artificial Sequence: Synthetic peptide
  Seed: PRMCSLMQGSTLPRRS
PRMWSLIQVSTNPRRS

SEQ ID NO: 115482 - protein, 16 aa, Artificial Sequence
  Description of Artificial Sequence: Synthetic peptide
  Seed: PRMCSLMQGSTLPRRS
PRMWSLIQVSTSPRRS

SEQ ID NO: 115483 - protein, 16 aa, Artificial Sequence
  Description of Artificial Sequence: Synthetic peptide
  Seed: PRMCSLMQGSTLPRRS
PRMWSLLQASTAPRRS

SEQ ID NO: 115484 - protein, 16 aa, Artificial Sequence
  Description of Artificial Sequence: Synthetic peptide
  Seed: PRMCSLMQGSTLPRRS
PRMWSLLQASTGPRRS

SEQ ID NO: 115485 - protein, 16 aa, Artificial Sequence
  Description of Artificial Sequence: Synthetic peptide
  Seed: PRMCSLMQGSTLPRRS
PRMWSLLQASTIPRRS

SEQ ID NO: 115486 - protein, 16 aa, Artificial Sequence
  Description of Artificial Sequence: Synthetic peptide
  Seed: PRMCSLMQGSTLPRRS
PRMWSLLQASTLPRRS

SEQ ID NO: 115487 - protein, 16 aa, Artificial Sequence
  Description of Artificial Sequence: Synthetic peptide
  Seed: PRMCSLMQGSTLPRRS
PRMWSLLQASTMPRRS

SEQ ID NO: 115488 - protein, 16 aa, Artificial Sequence
  Description of Artificial Sequence: Synthetic peptide
  Seed: PRMCSLMQGSTLPRRS
PRMWSLLQASTNPRRS

SEQ ID NO: 115489 - protein, 16 aa, Artificial Sequence
  Description of Artificial Sequence: Synthetic peptide
  Seed: PRMCSLMQGSTLPRRS
PRMWSLLQASTSPRRS

SEQ ID NO: 115490 - protein, 16 aa, Artificial Sequence
  Description of Artificial Sequence: Synthetic peptide
  Seed: PRMCSLMQGSTLPRRS
PRMWSLLQASTTPRRS

SEQ ID NO: 115491 - protein, 16 aa, Artificial Sequence
  Description of Artificial Sequence: Synthetic peptide
  Seed: PRMCSLMQGSTLPRRS
PRMWSLLQASTVPRRS

SEQ ID NO: 115492 - protein, 16 aa, Artificial Sequence
  Description of Artificial Sequence: Synthetic peptide
  Seed: PRMCSLMQGSTLPRRS
PRMWSLLQGSTAPRRS

SEQ ID NO: 115493 - protein, 16 aa, Artificial Sequence
  Description of Artificial Sequence: Synthetic peptide
  Seed: PRMCSLMQGSTLPRRS
PRMWSLLQGSTGPRRS

SEQ ID NO: 115494 - protein, 16 aa, Artificial Sequence
  Description of Artificial Sequence: Synthetic peptide
  Seed: PRMCSLMQGSTLPRRS
PRMWSLLQGSTIPRRS

SEQ ID NO: 115495 - protein, 16 aa, Artificial Sequence
  Description of Artificial Sequence: Synthetic peptide
  Seed: PRMCSLMQGSTLPRRS
PRMWSLLQGSTLPRRS

SEQ ID NO: 115496 - protein, 16 aa, Artificial Sequence
  Description of Artificial Sequence: Synthetic peptide
  Seed: PRMCSLMQGSTLPRRS
PRMWSLLQGSTMPRRS

SEQ ID NO: 115497 - protein, 16 aa, Artificial Sequence
  Description of Artificial Sequence: Synthetic peptide
  Seed: PRMCSLMQGSTLPRRS
PRMWSLLQGSTSPRRS

SEQ ID NO: 115498 - protein, 16 aa, Artificial Sequence
  Description of Artificial Sequence: Synthetic peptide
  Seed: PRMCSLMQGSTLPRRS
PRMWSLLQGSTTPRRS

SEQ ID NO: 115499 - protein, 16 aa, Artificial Sequence
  Description of Artificial Sequence: Synthetic peptide
  Seed: PRMCSLMQGSTLPRRS
PRMWSLLQGSTVPRRS

SEQ ID NO: 115500 - protein, 16 aa, Artificial Sequence
  Description of Artificial Sequence: Synthetic peptide
  Seed: PRMCSLMQGSTLPRRS
PRMWSLLQISTAPRRS

SEQ ID NO: 115501 - protein, 16 aa, Artificial Sequence
  Description of Artificial Sequence: Synthetic peptide
  Seed: PRMCSLMQGSTLPRRS
PRMWSLLQISTNPRRS

SEQ ID NO: 115502 - protein, 16 aa, Artificial Sequence
  Description of Artificial Sequence: Synthetic peptide
  Seed: PRMCSLMQGSTLPRRS
PRMWSLLQISTSPRRS

SEQ ID NO: 115503 - protein, 16 aa, Artificial Sequence
  Description of Artificial Sequence: Synthetic peptide
  Seed: PRMCSLMQGSTLPRRS
PRMWSLLQNSTAPRRS

SEQ ID NO: 115504 - protein, 16 aa, Artificial Sequence
  Description of Artificial Sequence: Synthetic peptide
  Seed: PRMCSLMQGSTLPRRS
PRMWSLLQNSTIPRRS

SEQ ID NO: 115505 - protein, 16 aa, Artificial Sequence
  Description of Artificial Sequence: Synthetic peptide
  Seed: PRMCSLMQGSTLPRRS
PRMWSLLQNSTLPRRS

SEQ ID NO: 115506 - protein, 16 aa, Artificial Sequence
  Description of Artificial Sequence: Synthetic peptide
  Seed: PRMCSLMQGSTLPRRS
PRMWSLLQNSTMPRRS

SEQ ID NO: 115507 - protein, 16 aa, Artificial Sequence
  Description of Artificial Sequence: Synthetic peptide
  Seed: PRMCSLMQGSTLPRRS
PRMWSLLQNSTSPRRS

SEQ ID NO: 115508 - protein, 16 aa, Artificial Sequence
  Description of Artificial Sequence: Synthetic peptide
  Seed: PRMCSLMQGSTLPRRS
PRMWSLLQNSTTPRRS

SEQ ID NO: 115509 - protein, 16 aa, Artificial Sequence
  Description of Artificial Sequence: Synthetic peptide
  Seed: PRMCSLMQGSTLPRRS
PRMWSLLQNSTVPRRS

SEQ ID NO: 115510 - protein, 16 aa, Artificial Sequence
  Description of Artificial Sequence: Synthetic peptide
  Seed: PRMCSLMQGSTLPRRS
PRMWSLLQPSTAPRRS

SEQ ID NO: 115511 - protein, 16 aa, Artificial Sequence
  Description of Artificial Sequence: Synthetic peptide
  Seed: PRMCSLMQGSTLPRRS
PRMWSLLQPSTIPRRS

SEQ ID NO: 115512 - protein, 16 aa, Artificial Sequence
  Description of Artificial Sequence: Synthetic peptide
  Seed: PRMCSLMQGSTLPRRS
PRMWSLLQPSTLPRRS

SEQ ID NO: 115513 - protein, 16 aa, Artificial Sequence
  Description of Artificial Sequence: Synthetic peptide
  Seed: PRMCSLMQGSTLPRRS
PRMWSLLQPSTMPRRS

SEQ ID NO: 115514 - protein, 16 aa, Artificial Sequence
  Description of Artificial Sequence: Synthetic peptide
  Seed: PRMCSLMQGSTLPRRS
PRMWSLLQPSTNPRRS

SEQ ID NO: 115515 - protein, 16 aa, Artificial Sequence
  Description of Artificial Sequence: Synthetic peptide
  Seed: PRMCSLMQGSTLPRRS
PRMWSLLQPSTSPRRS

SEQ ID NO: 115516 - protein, 16 aa, Artificial Sequence
  Description of Artificial Sequence: Synthetic peptide
  Seed: PRMCSLMQGSTLPRRS
PRMWSLLQPSTTPRRS

SEQ ID NO: 115517 - protein, 16 aa, Artificial Sequence
  Description of Artificial Sequence: Synthetic peptide
  Seed: PRMCSLMQGSTLPRRS
PRMWSLLQPSTVPRRS

SEQ ID NO: 115518 - protein, 16 aa, Artificial Sequence
  Description of Artificial Sequence: Synthetic peptide
  Seed: PRMCSLMQGSTLPRRS
PRMWSLLQSSTAPRRS

SEQ ID NO: 115519 - protein, 16 aa, Artificial Sequence
  Description of Artificial Sequence: Synthetic peptide
  Seed: PRMCSLMQGSTLPRRS
PRMWSLLQSSTGPRRS

SEQ ID NO: 115520 - protein, 16 aa, Artificial Sequence
  Description of Artificial Sequence: Synthetic peptide
  Seed: PRMCSLMQGSTLPRRS
PRMWSLLQSSTIPRRS

SEQ ID NO: 115521 - protein, 16 aa, Artificial Sequence
  Description of Artificial Sequence: Synthetic peptide
  Seed: PRMCSLMQGSTLPRRS
PRMWSLLQSSTLPRRS

SEQ ID NO: 115522 - protein, 16 aa, Artificial Sequence
  Description of Artificial Sequence: Synthetic peptide
  Seed: PRMCSLMQGSTLPRRS
PRMWSLLQSSTMPRRS

SEQ ID NO: 115523 - protein, 16 aa, Artificial Sequence
  Description of Artificial Sequence: Synthetic peptide
  Seed: PRMCSLMQGSTLPRRS
PRMWSLLQSSTNPRRS

SEQ ID NO: 115524 - protein, 16 aa, Artificial Sequence
  Description of Artificial Sequence: Synthetic peptide
  Seed: PRMCSLMQGSTLPRRS
PRMWSLLQSSTSPRRS

SEQ ID NO: 115525 - protein, 16 aa, Artificial Sequence
  Description of Artificial Sequence: Synthetic peptide
  Seed: PRMCSLMQGSTLPRRS
PRMWSLLQSSTTPRRS

SEQ ID NO: 115526 - protein, 16 aa, Artificial Sequence
  Description of Artificial Sequence: Synthetic peptide
  Seed: PRMCSLMQGSTLPRRS
PRMWSLLQSSTVPRRS

SEQ ID NO: 115527 - protein, 16 aa, Artificial Sequence
  Description of Artificial Sequence: Synthetic peptide
  Seed: PRMCSLMQGSTLPRRS
PRMWSLLQTSTAPRRS

SEQ ID NO: 115528 - protein, 16 aa, Artificial Sequence
  Description of Artificial Sequence: Synthetic peptide
  Seed: PRMCSLMQGSTLPRRS
PRMWSLLQTSTIPRRS

SEQ ID NO: 115529 - protein, 16 aa, Artificial Sequence
  Description of Artificial Sequence: Synthetic peptide
  Seed: PRMCSLMQGSTLPRRS
PRMWSLLQTSTLPRRS

SEQ ID NO: 115530 - protein, 16 aa, Artificial Sequence
  Description of Artificial Sequence: Synthetic peptide
  Seed: PRMCSLMQGSTLPRRS
PRMWSLLQTSTMPRRS

SEQ ID NO: 115531 - protein, 16 aa, Artificial Sequence
  Description of Artificial Sequence: Synthetic peptide
  Seed: PRMCSLMQGSTLPRRS
PRMWSLLQTSTNPRRS

SEQ ID NO: 115532 - protein, 16 aa, Artificial Sequence
  Description of Artificial Sequence: Synthetic peptide
  Seed: PRMCSLMQGSTLPRRS
PRMWSLLQTSTSPRRS

SEQ ID NO: 115533 - protein, 16 aa, Artificial Sequence
  Description of Artificial Sequence: Synthetic peptide
  Seed: PRMCSLMQGSTLPRRS
PRMWSLLQTSTTPRRS

SEQ ID NO: 115534 - protein, 16 aa, Artificial Sequence
  Description of Artificial Sequence: Synthetic peptide
  Seed: PRMCSLMQGSTLPRRS
PRMWSLLQTSTVPRRS

SEQ ID NO: 115535 - protein, 16 aa, Artificial Sequence
  Description of Artificial Sequence: Synthetic peptide
  Seed: PRMCSLMQGSTLPRRS
PRMWSLLQVSTAPRRS

SEQ ID NO: 115536 - protein, 16 aa, Artificial Sequence
  Description of Artificial Sequence: Synthetic peptide
  Seed: PRMCSLMQGSTLPRRS
PRMWSLLQVSTIPRRS

SEQ ID NO: 115537 - protein, 16 aa, Artificial Sequence
  Description of Artificial Sequence: Synthetic peptide
  Seed: PRMCSLMQGSTLPRRS
PRMWSLLQVSTLPRRS

SEQ ID NO: 115538 - protein, 16 aa, Artificial Sequence
  Description of Artificial Sequence: Synthetic peptide
  Seed: PRMCSLMQGSTLPRRS
PRMWSLLQVSTNPRRS

SEQ ID NO: 115539 - protein, 16 aa, Artificial Sequence
  Description of Artificial Sequence: Synthetic peptide
  Seed: PRMCSLMQGSTLPRRS
PRMWSLLQVSTSPRRS

SEQ ID NO: 115540 - protein, 16 aa, Artificial Sequence
  Description of Artificial Sequence: Synthetic peptide
  Seed: PRMCSLMQGSTLPRRS
PRMWSLLQVSTTPRRS

SEQ ID NO: 115541 - protein, 16 aa, Artificial Sequence
  Description of Artificial Sequence: Synthetic peptide
  Seed: PRMCSLMQGSTLPRRS
PRMWSLLQVSTVPRRS

SEQ ID NO: 115542 - protein, 16 aa, Artificial Sequence
  Description of Artificial Sequence: Synthetic peptide
  Seed: PRMCSLMQGSTLPRRS
PRMWSLMQASTAPRRS

SEQ ID NO: 115543 - protein, 16 aa, Artificial Sequence
  Description of Artificial Sequence: Synthetic peptide
  Seed: PRMCSLMQGSTLPRRS
PRMWSLMQASTGPRRS

SEQ ID NO: 115544 - protein, 16 aa, Artificial Sequence
  Description of Artificial Sequence: Synthetic peptide
  Seed: PRMCSLMQGSTLPRRS
PRMWSLMQASTIPRRS

SEQ ID NO: 115545 - protein, 16 aa, Artificial Sequence
  Description of Artificial Sequence: Synthetic peptide
  Seed: PRMCSLMQGSTLPRRS
PRMWSLMQASTLPRRS

SEQ ID NO: 115546 - protein, 16 aa, Artificial Sequence
  Description of Artificial Sequence: Synthetic peptide
  Seed: PRMCSLMQGSTLPRRS
PRMWSLMQASTMPRRS

SEQ ID NO: 115547 - protein, 16 aa, Artificial Sequence
  Description of Artificial Sequence: Synthetic peptide
  Seed: PRMCSLMQGSTLPRRS
PRMWSLMQASTNPRRS

SEQ ID NO: 115548 - protein, 16 aa, Artificial Sequence
  Description of Artificial Sequence: Synthetic peptide
  Seed: PRMCSLMQGSTLPRRS
PRMWSLMQASTSPRRS

SEQ ID NO: 115549 - protein, 16 aa, Artificial Sequence
  Description of Artificial Sequence: Synthetic peptide
  Seed: PRMCSLMQGSTLPRRS
PRMWSLMQASTTPRRS

SEQ ID NO: 115550 - protein, 16 aa, Artificial Sequence
  Description of Artificial Sequence: Synthetic peptide
  Seed: PRMCSLMQGSTLPRRS
PRMWSLMQASTVPRRS

SEQ ID NO: 115551 - protein, 16 aa, Artificial Sequence
  Description of Artificial Sequence: Synthetic peptide
  Seed: PRMCSLMQGSTLPRRS
PRMWSLMQGSTAPRRS

SEQ ID NO: 115552 - protein, 16 aa, Artificial Sequence
  Description of Artificial Sequence: Synthetic peptide
  Seed: PRMCSLMQGSTLPRRS
PRMWSLMQGSTGPRRS

SEQ ID NO: 115553 - protein, 16 aa, Artificial Sequence
  Description of Artificial Sequence: Synthetic peptide
  Seed: PRMCSLMQGSTLPRRS
PRMWSLMQGSTIPRRS

SEQ ID NO: 115554 - protein, 16 aa, Artificial Sequence
  Description of Artificial Sequence: Synthetic peptide
  Seed: PRMCSLMQGSTLPRRS
PRMWSLMQGSTLPRRS

SEQ ID NO: 115555 - protein, 16 aa, Artificial Sequence
  Description of Artificial Sequence: Synthetic peptide
  Seed: PRMCSLMQGSTLPRRS
PRMWSLMQGSTMPRRS

SEQ ID NO: 115556 - protein, 16 aa, Artificial Sequence
  Description of Artificial Sequence: Synthetic peptide
  Seed: PRMCSLMQGSTLPRRS
PRMWSLMQGSTSPRRS

SEQ ID NO: 115557 - protein, 16 aa, Artificial Sequence
  Description of Artificial Sequence: Synthetic peptide
  Seed: PRMCSLMQGSTLPRRS
PRMWSLMQGSTTPRRS

SEQ ID NO: 115558 - protein, 16 aa, Artificial Sequence
  Description of Artificial Sequence: Synthetic peptide
  Seed: PRMCSLMQGSTLPRRS
PRMWSLMQGSTVPRRS

SEQ ID NO: 115559 - protein, 16 aa, Artificial Sequence
  Description of Artificial Sequence: Synthetic peptide
  Seed: PRMCSLMQGSTLPRRS
PRMWSLMQISTAPRRS

SEQ ID NO: 115560 - protein, 16 aa, Artificial Sequence
  Description of Artificial Sequence: Synthetic peptide
  Seed: PRMCSLMQGSTLPRRS
PRMWSLMQISTNPRRS

SEQ ID NO: 115561 - protein, 16 aa, Artificial Sequence
  Description of Artificial Sequence: Synthetic peptide
  Seed: PRMCSLMQGSTLPRRS
PRMWSLMQISTSPRRS

SEQ ID NO: 115562 - protein, 16 aa, Artificial Sequence
  Description of Artificial Sequence: Synthetic peptide
  Seed: PRMCSLMQGSTLPRRS
PRMWSLMQISTTPRRS

SEQ ID NO: 115563 - protein, 16 aa, Artificial Sequence
  Description of Artificial Sequence: Synthetic peptide
  Seed: PRMCSLMQGSTLPRRS
PRMWSLMQNSTAPRRS

SEQ ID NO: 115564 - protein, 16 aa, Artificial Sequence
  Description of Artificial Sequence: Synthetic peptide
  Seed: PRMCSLMQGSTLPRRS
PRMWSLMQNSTIPRRS

SEQ ID NO: 115565 - protein, 16 aa, Artificial Sequence
  Description of Artificial Sequence: Synthetic peptide
  Seed: PRMCSLMQGSTLPRRS
PRMWSLMQNSTLPRRS

SEQ ID NO: 115566 - protein, 16 aa, Artificial Sequence
  Description of Artificial Sequence: Synthetic peptide
  Seed: PRMCSLMQGSTLPRRS
PRMWSLMQNSTMPRRS

SEQ ID NO: 115567 - protein, 16 aa, Artificial Sequence
  Description of Artificial Sequence: Synthetic peptide
  Seed: PRMCSLMQGSTLPRRS
PRMWSLMQNSTSPRRS

SEQ ID NO: 115568 - protein, 16 aa, Artificial Sequence
  Description of Artificial Sequence: Synthetic peptide
  Seed: PRMCSLMQGSTLPRRS
PRMWSLMQNSTTPRRS

SEQ ID NO: 115569 - protein, 16 aa, Artificial Sequence
  Description of Artificial Sequence: Synthetic peptide
  Seed: PRMCSLMQGSTLPRRS
PRMWSLMQNSTVPRRS

SEQ ID NO: 115570 - protein, 16 aa, Artificial Sequence
  Description of Artificial Sequence: Synthetic peptide
  Seed: PRMCSLMQGSTLPRRS
PRMWSLMQPSTAPRRS

SEQ ID NO: 115571 - protein, 16 aa, Artificial Sequence
  Description of Artificial Sequence: Synthetic peptide
  Seed: PRMCSLMQGSTLPRRS
PRMWSLMQPSTIPRRS

SEQ ID NO: 115572 - protein, 16 aa, Artificial Sequence
  Description of Artificial Sequence: Synthetic peptide
  Seed: PRMCSLMQGSTLPRRS
PRMWSLMQPSTLPRRS

SEQ ID NO: 115573 - protein, 16 aa, Artificial Sequence
  Description of Artificial Sequence: Synthetic peptide
  Seed: PRMCSLMQGSTLPRRS
PRMWSLMQPSTMPRRS

SEQ ID NO: 115574 - protein, 16 aa, Artificial Sequence
  Description of Artificial Sequence: Synthetic peptide
  Seed: PRMCSLMQGSTLPRRS
PRMWSLMQPSTNPRRS

SEQ ID NO: 115575 - protein, 16 aa, Artificial Sequence
  Description of Artificial Sequence: Synthetic peptide
  Seed: PRMCSLMQGSTLPRRS
PRMWSLMQPSTSPRRS

SEQ ID NO: 115576 - protein, 16 aa, Artificial Sequence
  Description of Artificial Sequence: Synthetic peptide
  Seed: PRMCSLMQGSTLPRRS
PRMWSLMQPSTTPRRS

SEQ ID NO: 115577 - protein, 16 aa, Artificial Sequence
  Description of Artificial Sequence: Synthetic peptide
  Seed: PRMCSLMQGSTLPRRS
PRMWSLMQPSTVPRRS

SEQ ID NO: 115578 - protein, 16 aa, Artificial Sequence
  Description of Artificial Sequence: Synthetic peptide
  Seed: PRMCSLMQGSTLPRRS
PRMWSLMQSSTAPRRS

SEQ ID NO: 115579 - protein, 16 aa, Artificial Sequence
  Description of Artificial Sequence: Synthetic peptide
  Seed: PRMCSLMQGSTLPRRS
PRMWSLMQSSTIPRRS

SEQ ID NO: 115580 - protein, 16 aa, Artificial Sequence
  Description of Artificial Sequence: Synthetic peptide
  Seed: PRMCSLMQGSTLPRRS
PRMWSLMQSSTLPRRS

SEQ ID NO: 115581 - protein, 16 aa, Artificial Sequence
  Description of Artificial Sequence: Synthetic peptide
  Seed: PRMCSLMQGSTLPRRS
PRMWSLMQSSTMPRRS

SEQ ID NO: 115582 - protein, 16 aa, Artificial Sequence
  Description of Artificial Sequence: Synthetic peptide
  Seed: PRMCSLMQGSTLPRRS
PRMWSLMQSSTNPRRS

SEQ ID NO: 115583 - protein, 16 aa, Artificial Sequence
  Description of Artificial Sequence: Synthetic peptide
  Seed: PRMCSLMQGSTLPRRS
PRMWSLMQSSTSPRRS

SEQ ID NO: 115584 - protein, 16 aa, Artificial Sequence
  Description of Artificial Sequence: Synthetic peptide
  Seed: PRMCSLMQGSTLPRRS
PRMWSLMQSSTTPRRS

SEQ ID NO: 115585 - protein, 16 aa, Artificial Sequence
  Description of Artificial Sequence: Synthetic peptide
  Seed: PRMCSLMQGSTLPRRS
PRMWSLMQSSTVPRRS

SEQ ID NO: 115586 - protein, 16 aa, Artificial Sequence
  Description of Artificial Sequence: Synthetic peptide
  Seed: PRMCSLMQGSTLPRRS
PRMWSLMQTSTAPRRS

SEQ ID NO: 115587 - protein, 16 aa, Artificial Sequence
  Description of Artificial Sequence: Synthetic peptide
  Seed: PRMCSLMQGSTLPRRS
PRMWSLMQTSTIPRRS

SEQ ID NO: 115588 - protein, 16 aa, Artificial Sequence
  Description of Artificial Sequence: Synthetic peptide
  Seed: PRMCSLMQGSTLPRRS
PRMWSLMQTSTLPRRS

SEQ ID NO: 115589 - protein, 16 aa, Artificial Sequence
  Description of Artificial Sequence: Synthetic peptide
  Seed: PRMCSLMQGSTLPRRS
PRMWSLMQTSTMPRRS

SEQ ID NO: 115590 - protein, 16 aa, Artificial Sequence
  Description of Artificial Sequence: Synthetic peptide
  Seed: PRMCSLMQGSTLPRRS
PRMWSLMQTSTNPRRS

SEQ ID NO: 115591 - protein, 16 aa, Artificial Sequence
  Description of Artificial Sequence: Synthetic peptide
  Seed: PRMCSLMQGSTLPRRS
PRMWSLMQTSTSPRRS

SEQ ID NO: 115592 - protein, 16 aa, Artificial Sequence
  Description of Artificial Sequence: Synthetic peptide
  Seed: PRMCSLMQGSTLPRRS
PRMWSLMQTSTTPRRS

SEQ ID NO: 115593 - protein, 16 aa, Artificial Sequence
  Description of Artificial Sequence: Synthetic peptide
  Seed: PRMCSLMQGSTLPRRS
PRMWSLMQTSTVPRRS

SEQ ID NO: 115594 - protein, 16 aa, Artificial Sequence
  Description of Artificial Sequence: Synthetic peptide
  Seed: PRMCSLMQGSTLPRRS
PRMWSLMQVSTAPRRS

SEQ ID NO: 115595 - protein, 16 aa, Artificial Sequence
  Description of Artificial Sequence: Synthetic peptide
  Seed: PRMCSLMQGSTLPRRS
PRMWSLMQVSTIPRRS

SEQ ID NO: 115596 - protein, 16 aa, Artificial Sequence
  Description of Artificial Sequence: Synthetic peptide
  Seed: PRMCSLMQGSTLPRRS
PRMWSLMQVSTLPRRS

SEQ ID NO: 115597 - protein, 16 aa, Artificial Sequence
  Description of Artificial Sequence: Synthetic peptide
  Seed: PRMCSLMQGSTLPRRS
PRMWSLMQVSTMPRRS

SEQ ID NO: 115598 - protein, 16 aa, Artificial Sequence
  Description of Artificial Sequence: Synthetic peptide
  Seed: PRMCSLMQGSTLPRRS
PRMWSLMQVSTNPRRS

SEQ ID NO: 115599 - protein, 16 aa, Artificial Sequence
  Description of Artificial Sequence: Synthetic peptide
  Seed: PRMCSLMQGSTLPRRS
PRMWSLMQVSTSPRRS

SEQ ID NO: 115600 - protein, 16 aa, Artificial Sequence
  Description of Artificial Sequence: Synthetic peptide
  Seed: PRMCSLMQGSTLPRRS
PRMWSLMQVSTTPRRS

SEQ ID NO: 115601 - protein, 16 aa, Artificial Sequence
  Description of Artificial Sequence: Synthetic peptide
  Seed: PRMCSLMQGSTLPRRS
PRMWSLMQVSTVPRRS

SEQ ID NO: 115602 - protein, 16 aa, Artificial Sequence
  Description of Artificial Sequence: Synthetic peptide
  Seed: PRMCSLMQGSTLPRRS
PRMWSLQQASTAPRRS

SEQ ID NO: 115603 - protein, 16 aa, Artificial Sequence
  Description of Artificial Sequence: Synthetic peptide
  Seed: PRMCSLMQGSTLPRRS
PRMWSLQQASTIPRRS

SEQ ID NO: 115604 - protein, 16 aa, Artificial Sequence
  Description of Artificial Sequence: Synthetic peptide
  Seed: PRMCSLMQGSTLPRRS
PRMWSLQQASTLPRRS

SEQ ID NO: 115605 - protein, 16 aa, Artificial Sequence
  Description of Artificial Sequence: Synthetic peptide
  Seed: PRMCSLMQGSTLPRRS
PRMWSLQQASTVPRRS

SEQ ID NO: 115606 - protein, 16 aa, Artificial Sequence
  Description of Artificial Sequence: Synthetic peptide
  Seed: PRMCSLMQGSTLPRRS
PRMWSLQQGSTAPRRS

SEQ ID NO: 115607 - protein, 16 aa, Artificial Sequence
  Description of Artificial Sequence: Synthetic peptide
  Seed: PRMCSLMQGSTLPRRS
PRMWSLQQGSTIPRRS

SEQ ID NO: 115608 - protein, 16 aa, Artificial Sequence
  Description of Artificial Sequence: Synthetic peptide
  Seed: PRMCSLMQGSTLPRRS
PRMWSLQQGSTLPRRS

SEQ ID NO: 115609 - protein, 16 aa, Artificial Sequence
  Description of Artificial Sequence: Synthetic peptide
  Seed: PRMCSLMQGSTLPRRS
PRMWSLQQGSTVPRRS

SEQ ID NO: 115610 - protein, 16 aa, Artificial Sequence
  Description of Artificial Sequence: Synthetic peptide
  Seed: PRMCSLMQGSTLPRRS
PRMWSLQQSSTAPRRS

SEQ ID NO: 115611 - protein, 16 aa, Artificial Sequence
  Description of Artificial Sequence: Synthetic peptide
  Seed: PRMCSLMQGSTLPRRS
PRMWSLQQSSTIPRRS

SEQ ID NO: 115612 - protein, 16 aa, Artificial Sequence
  Description of Artificial Sequence: Synthetic peptide
  Seed: PRMCSLMQGSTLPRRS
PRMWSLQQSSTLPRRS

SEQ ID NO: 115613 - protein, 16 aa, Artificial Sequence
  Description of Artificial Sequence: Synthetic peptide
  Seed: PRMCSLMQGSTLPRRS
PRMWSLQQSSTVPRRS

SEQ ID NO: 115614 - protein, 16 aa, Artificial Sequence
  Description of Artificial Sequence: Synthetic peptide
  Seed: PRMCSLMQGSTLPRRS
PRMWSLSQASTLPRRS

SEQ ID NO: 115615 - protein, 16 aa, Artificial Sequence
  Description of Artificial Sequence: Synthetic peptide
  Seed: PRMCSLMQGSTLPRRS
PRMWSLSQASTVPRRS

SEQ ID NO: 115616 - protein, 16 aa, Artificial Sequence
  Description of Artificial Sequence: Synthetic peptide
  Seed: PRMCSLMQGSTLPRRS
PRMWSLVQASTAPRRS

SEQ ID NO: 115617 - protein, 16 aa, Artificial Sequence
  Description of Artificial Sequence: Synthetic peptide
  Seed: PRMCSLMQGSTLPRRS
PRMWSLVQASTIPRRS

SEQ ID NO: 115618 - protein, 16 aa, Artificial Sequence
  Description of Artificial Sequence: Synthetic peptide
  Seed: PRMCSLMQGSTLPRRS
PRMWSLVQASTLPRRS

SEQ ID NO: 115619 - protein, 16 aa, Artificial Sequence
  Description of Artificial Sequence: Synthetic peptide
  Seed: PRMCSLMQGSTLPRRS
PRMWSLVQASTSPRRS

SEQ ID NO: 115620 - protein, 16 aa, Artificial Sequence
  Description of Artificial Sequence: Synthetic peptide
  Seed: PRMCSLMQGSTLPRRS
PRMWSLVQASTVPRRS

SEQ ID NO: 115621 - protein, 16 aa, Artificial Sequence
  Description of Artificial Sequence: Synthetic peptide
  Seed: PRMCSLMQGSTLPRRS
PRMWSLVQGSTAPRRS

SEQ ID NO: 115622 - protein, 16 aa, Artificial Sequence
  Description of Artificial Sequence: Synthetic peptide
  Seed: PRMCSLMQGSTLPRRS
PRMWSLVQGSTIPRRS

SEQ ID NO: 115623 - protein, 16 aa, Artificial Sequence
  Description of Artificial Sequence: Synthetic peptide
  Seed: PRMCSLMQGSTLPRRS
PRMWSLVQGSTLPRRS

SEQ ID NO: 115624 - protein, 16 aa, Artificial Sequence
  Description of Artificial Sequence: Synthetic peptide
  Seed: PRMCSLMQGSTLPRRS
PRMWSLVQGSTVPRRS

SEQ ID NO: 115625 - protein, 16 aa, Artificial Sequence
  Description of Artificial Sequence: Synthetic peptide
  Seed: PRMCSLMQGSTLPRRS
PRMWSLVQSSTAPRRS

SEQ ID NO: 115626 - protein, 16 aa, Artificial Sequence
  Description of Artificial Sequence: Synthetic peptide
  Seed: PRMCSLMQGSTLPRRS
PRMWSLVQSSTIPRRS

SEQ ID NO: 115627 - protein, 16 aa, Artificial Sequence
  Description of Artificial Sequence: Synthetic peptide
  Seed: PRMCSLMQGSTLPRRS
PRMWSLVQSSTLPRRS

SEQ ID NO: 115628 - protein, 16 aa, Artificial Sequence
  Description of Artificial Sequence: Synthetic peptide
  Seed: PRMCSLMQGSTLPRRS
PRMWSLVQSSTVPRRS

SEQ ID NO: 115629 - protein, 16 aa, Artificial Sequence
  Description of Artificial Sequence: Synthetic peptide
  Seed: PRMCSLMQGSTLPRRS
PRMYSLAQASTAPRRS

SEQ ID NO: 115630 - protein, 16 aa, Artificial Sequence
  Description of Artificial Sequence: Synthetic peptide
  Seed: PRMCSLMQGSTLPRRS
PRMYSLAQASTIPRRS

SEQ ID NO: 115631 - protein, 16 aa, Artificial Sequence
  Description of Artificial Sequence: Synthetic peptide
  Seed: PRMCSLMQGSTLPRRS
PRMYSLAQASTLPRRS

SEQ ID NO: 115632 - protein, 16 aa, Artificial Sequence
  Description of Artificial Sequence: Synthetic peptide
  Seed: PRMCSLMQGSTLPRRS
PRMYSLAQASTMPRRS

SEQ ID NO: 115633 - protein, 16 aa, Artificial Sequence
  Description of Artificial Sequence: Synthetic peptide
  Seed: PRMCSLMQGSTLPRRS
PRMYSLAQASTNPRRS

SEQ ID NO: 115634 - protein, 16 aa, Artificial Sequence
  Description of Artificial Sequence: Synthetic peptide
  Seed: PRMCSLMQGSTLPRRS
PRMYSLAQASTSPRRS

SEQ ID NO: 115635 - protein, 16 aa, Artificial Sequence
  Description of Artificial Sequence: Synthetic peptide
  Seed: PRMCSLMQGSTLPRRS
PRMYSLAQASTTPRRS

SEQ ID NO: 115636 - protein, 16 aa, Artificial Sequence
  Description of Artificial Sequence: Synthetic peptide
  Seed: PRMCSLMQGSTLPRRS
PRMYSLAQASTVPRRS

SEQ ID NO: 115637 - protein, 16 aa, Artificial Sequence
  Description of Artificial Sequence: Synthetic peptide
  Seed: PRMCSLMQGSTLPRRS
PRMYSLAQGSTAPRRS

SEQ ID NO: 115638 - protein, 16 aa, Artificial Sequence
  Description of Artificial Sequence: Synthetic peptide
  Seed: PRMCSLMQGSTLPRRS
PRMYSLAQGSTIPRRS

SEQ ID NO: 115639 - protein, 16 aa, Artificial Sequence
  Description of Artificial Sequence: Synthetic peptide
  Seed: PRMCSLMQGSTLPRRS
PRMYSLAQGSTLPRRS

SEQ ID NO: 115640 - protein, 16 aa, Artificial Sequence
  Description of Artificial Sequence: Synthetic peptide
  Seed: PRMCSLMQGSTLPRRS
PRMYSLAQGSTMPRRS

SEQ ID NO: 115641 - protein, 16 aa, Artificial Sequence
  Description of Artificial Sequence: Synthetic peptide
  Seed: PRMCSLMQGSTLPRRS
PRMYSLAQGSTTPRRS

SEQ ID NO: 115642 - protein, 16 aa, Artificial Sequence
  Description of Artificial Sequence: Synthetic peptide
  Seed: PRMCSLMQGSTLPRRS
PRMYSLAQGSTVPRRS

SEQ ID NO: 115643 - protein, 16 aa, Artificial Sequence
  Description of Artificial Sequence: Synthetic peptide
  Seed: PRMCSLMQGSTLPRRS
PRMYSLAQISTAPRRS

SEQ ID NO: 115644 - protein, 16 aa, Artificial Sequence
  Description of Artificial Sequence: Synthetic peptide
  Seed: PRMCSLMQGSTLPRRS
PRMYSLAQISTIPRRS

SEQ ID NO: 115645 - protein, 16 aa, Artificial Sequence
  Description of Artificial Sequence: Synthetic peptide
  Seed: PRMCSLMQGSTLPRRS
PRMYSLAQISTLPRRS

SEQ ID NO: 115646 - protein, 16 aa, Artificial Sequence
  Description of Artificial Sequence: Synthetic peptide
  Seed: PRMCSLMQGSTLPRRS
PRMYSLAQISTNPRRS

SEQ ID NO: 115647 - protein, 16 aa, Artificial Sequence
  Description of Artificial Sequence: Synthetic peptide
  Seed: PRMCSLMQGSTLPRRS
PRMYSLAQISTSPRRS

SEQ ID NO: 115648 - protein, 16 aa, Artificial Sequence
  Description of Artificial Sequence: Synthetic peptide
  Seed: PRMCSLMQGSTLPRRS
PRMYSLAQISTVPRRS

SEQ ID NO: 115649 - protein, 16 aa, Artificial Sequence
  Description of Artificial Sequence: Synthetic peptide
  Seed: PRMCSLMQGSTLPRRS
PRMYSLAQNSTAPRRS

SEQ ID NO: 115650 - protein, 16 aa, Artificial Sequence
  Description of Artificial Sequence: Synthetic peptide
  Seed: PRMCSLMQGSTLPRRS
PRMYSLAQNSTIPRRS

SEQ ID NO: 115651 - protein, 16 aa, Artificial Sequence
  Description of Artificial Sequence: Synthetic peptide
  Seed: PRMCSLMQGSTLPRRS
PRMYSLAQNSTLPRRS

SEQ ID NO: 115652 - protein, 16 aa, Artificial Sequence
  Description of Artificial Sequence: Synthetic peptide
  Seed: PRMCSLMQGSTLPRRS
PRMYSLAQNSTVPRRS

SEQ ID NO: 115653 - protein, 16 aa, Artificial Sequence
  Description of Artificial Sequence: Synthetic peptide
  Seed: PRMCSLMQGSTLPRRS
PRMYSLAQPSTAPRRS

SEQ ID NO: 115654 - protein, 16 aa, Artificial Sequence
  Description of Artificial Sequence: Synthetic peptide
  Seed: PRMCSLMQGSTLPRRS
PRMYSLAQPSTIPRRS

SEQ ID NO: 115655 - protein, 16 aa, Artificial Sequence
  Description of Artificial Sequence: Synthetic peptide
  Seed: PRMCSLMQGSTLPRRS
PRMYSLAQPSTLPRRS

SEQ ID NO: 115656 - protein, 16 aa, Artificial Sequence
  Description of Artificial Sequence: Synthetic peptide
  Seed: PRMCSLMQGSTLPRRS
PRMYSLAQPSTMPRRS

SEQ ID NO: 115657 - protein, 16 aa, Artificial Sequence
  Description of Artificial Sequence: Synthetic peptide
  Seed: PRMCSLMQGSTLPRRS
PRMYSLAQPSTNPRRS

SEQ ID NO: 115658 - protein, 16 aa, Artificial Sequence
  Description of Artificial Sequence: Synthetic peptide
  Seed: PRMCSLMQGSTLPRRS
PRMYSLAQPSTSPRRS

SEQ ID NO: 115659 - protein, 16 aa, Artificial Sequence
  Description of Artificial Sequence: Synthetic peptide
  Seed: PRMCSLMQGSTLPRRS
PRMYSLAQPSTVPRRS

SEQ ID NO: 115660 - protein, 16 aa, Artificial Sequence
  Description of Artificial Sequence: Synthetic peptide
  Seed: PRMCSLMQGSTLPRRS
PRMYSLAQSSTAPRRS

SEQ ID NO: 115661 - protein, 16 aa, Artificial Sequence
  Description of Artificial Sequence: Synthetic peptide
  Seed: PRMCSLMQGSTLPRRS
PRMYSLAQSSTIPRRS

SEQ ID NO: 115662 - protein, 16 aa, Artificial Sequence
  Description of Artificial Sequence: Synthetic peptide
  Seed: PRMCSLMQGSTLPRRS
PRMYSLAQSSTLPRRS

SEQ ID NO: 115663 - protein, 16 aa, Artificial Sequence
  Description of Artificial Sequence: Synthetic peptide
  Seed: PRMCSLMQGSTLPRRS
PRMYSLAQSSTMPRRS

SEQ ID NO: 115664 - protein, 16 aa, Artificial Sequence
  Description of Artificial Sequence: Synthetic peptide
  Seed: PRMCSLMQGSTLPRRS
PRMYSLAQSSTNPRRS

SEQ ID NO: 115665 - protein, 16 aa, Artificial Sequence
  Description of Artificial Sequence: Synthetic peptide
  Seed: PRMCSLMQGSTLPRRS
PRMYSLAQSSTSPRRS

SEQ ID NO: 115666 - protein, 16 aa, Artificial Sequence
  Description of Artificial Sequence: Synthetic peptide
  Seed: PRMCSLMQGSTLPRRS
PRMYSLAQSSTTPRRS

SEQ ID NO: 115667 - protein, 16 aa, Artificial Sequence
  Description of Artificial Sequence: Synthetic peptide
  Seed: PRMCSLMQGSTLPRRS
PRMYSLAQSSTVPRRS

SEQ ID NO: 115668 - protein, 16 aa, Artificial Sequence
  Description of Artificial Sequence: Synthetic peptide
  Seed: PRMCSLMQGSTLPRRS
PRMYSLAQTSTAPRRS

SEQ ID NO: 115669 - protein, 16 aa, Artificial Sequence
  Description of Artificial Sequence: Synthetic peptide
  Seed: PRMCSLMQGSTLPRRS
PRMYSLAQTSTIPRRS

SEQ ID NO: 115670 - protein, 16 aa, Artificial Sequence
  Description of Artificial Sequence: Synthetic peptide
  Seed: PRMCSLMQGSTLPRRS
PRMYSLAQTSTLPRRS

SEQ ID NO: 115671 - protein, 16 aa, Artificial Sequence
  Description of Artificial Sequence: Synthetic peptide
  Seed: PRMCSLMQGSTLPRRS
PRMYSLAQTSTMPRRS

SEQ ID NO: 115672 - protein, 16 aa, Artificial Sequence
  Description of Artificial Sequence: Synthetic peptide
  Seed: PRMCSLMQGSTLPRRS
PRMYSLAQTSTSPRRS

SEQ ID NO: 115673 - protein, 16 aa, Artificial Sequence
  Description of Artificial Sequence: Synthetic peptide
  Seed: PRMCSLMQGSTLPRRS
PRMYSLAQTSTVPRRS

SEQ ID NO: 115674 - protein, 16 aa, Artificial Sequence
  Description of Artificial Sequence: Synthetic peptide
  Seed: PRMCSLMQGSTLPRRS
PRMYSLAQVSTAPRRS

SEQ ID NO: 115675 - protein, 16 aa, Artificial Sequence
  Description of Artificial Sequence: Synthetic peptide
  Seed: PRMCSLMQGSTLPRRS
PRMYSLAQVSTIPRRS

SEQ ID NO: 115676 - protein, 16 aa, Artificial Sequence
  Description of Artificial Sequence: Synthetic peptide
  Seed: PRMCSLMQGSTLPRRS
PRMYSLAQVSTLPRRS

SEQ ID NO: 115677 - protein, 16 aa, Artificial Sequence
  Description of Artificial Sequence: Synthetic peptide
  Seed: PRMCSLMQGSTLPRRS
PRMYSLAQVSTMPRRS

SEQ ID NO: 115678 - protein, 16 aa, Artificial Sequence
  Description of Artificial Sequence: Synthetic peptide
  Seed: PRMCSLMQGSTLPRRS
PRMYSLAQVSTNPRRS

SEQ ID NO: 115679 - protein, 16 aa, Artificial Sequence
  Description of Artificial Sequence: Synthetic peptide
  Seed: PRMCSLMQGSTLPRRS
PRMYSLAQVSTSPRRS

SEQ ID NO: 115680 - protein, 16 aa, Artificial Sequence
  Description of Artificial Sequence: Synthetic peptide
  Seed: PRMCSLMQGSTLPRRS
PRMYSLAQVSTTPRRS

SEQ ID NO: 115681 - protein, 16 aa, Artificial Sequence
  Description of Artificial Sequence: Synthetic peptide
  Seed: PRMCSLMQGSTLPRRS
PRMYSLAQVSTVPRRS

SEQ ID NO: 115682 - protein, 16 aa, Artificial Sequence
  Description of Artificial Sequence: Synthetic peptide
  Seed: PRMCSLMQGSTLPRRS
PRMYSLEQASTAPRRS

SEQ ID NO: 115683 - protein, 16 aa, Artificial Sequence
  Description of Artificial Sequence: Synthetic peptide
  Seed: PRMCSLMQGSTLPRRS
PRMYSLEQASTIPRRS

SEQ ID NO: 115684 - protein, 16 aa, Artificial Sequence
  Description of Artificial Sequence: Synthetic peptide
  Seed: PRMCSLMQGSTLPRRS
PRMYSLEQASTLPRRS

SEQ ID NO: 115685 - protein, 16 aa, Artificial Sequence
  Description of Artificial Sequence: Synthetic peptide
  Seed: PRMCSLMQGSTLPRRS
PRMYSLEQASTVPRRS

SEQ ID NO: 115686 - protein, 16 aa, Artificial Sequence
  Description of Artificial Sequence: Synthetic peptide
  Seed: PRMCSLMQGSTLPRRS
PRMYSLFQASTAPRRS

SEQ ID NO: 115687 - protein, 16 aa, Artificial Sequence
  Description of Artificial Sequence: Synthetic peptide
  Seed: PRMCSLMQGSTLPRRS
PRMYSLFQASTIPRRS

SEQ ID NO: 115688 - protein, 16 aa, Artificial Sequence
  Description of Artificial Sequence: Synthetic peptide
  Seed: PRMCSLMQGSTLPRRS
PRMYSLFQASTLPRRS

SEQ ID NO: 115689 - protein, 16 aa, Artificial Sequence
  Description of Artificial Sequence: Synthetic peptide
  Seed: PRMCSLMQGSTLPRRS
PRMYSLFQASTSPRRS

SEQ ID NO: 115690 - protein, 16 aa, Artificial Sequence
  Description of Artificial Sequence: Synthetic peptide
  Seed: PRMCSLMQGSTLPRRS
PRMYSLFQASTVPRRS

SEQ ID NO: 115691 - protein, 16 aa, Artificial Sequence
  Description of Artificial Sequence: Synthetic peptide
  Seed: PRMCSLMQGSTLPRRS
PRMYSLFQGSTLPRRS

SEQ ID NO: 115692 - protein, 16 aa, Artificial Sequence
  Description of Artificial Sequence: Synthetic peptide
  Seed: PRMCSLMQGSTLPRRS
PRMYSLFQGSTVPRRS

SEQ ID NO: 115693 - protein, 16 aa, Artificial Sequence
  Description of Artificial Sequence: Synthetic peptide
  Seed: PRMCSLMQGSTLPRRS
PRMYSLFQPSTAPRRS

SEQ ID NO: 115694 - protein, 16 aa, Artificial Sequence
  Description of Artificial Sequence: Synthetic peptide
  Seed: PRMCSLMQGSTLPRRS
PRMYSLFQSSTAPRRS

SEQ ID NO: 115695 - protein, 16 aa, Artificial Sequence
  Description of Artificial Sequence: Synthetic peptide
  Seed: PRMCSLMQGSTLPRRS
PRMYSLFQSSTLPRRS

SEQ ID NO: 115696 - protein, 16 aa, Artificial Sequence
  Description of Artificial Sequence: Synthetic peptide
  Seed: PRMCSLMQGSTLPRRS
PRMYSLFQVSTAPRRS

SEQ ID NO: 115697 - protein, 16 aa, Artificial Sequence
  Description of Artificial Sequence: Synthetic peptide
  Seed: PRMCSLMQGSTLPRRS
PRMYSLGQASTIPRRS

SEQ ID NO: 115698 - protein, 16 aa, Artificial Sequence
  Description of Artificial Sequence: Synthetic peptide
  Seed: PRMCSLMQGSTLPRRS
PRMYSLGQASTLPRRS

SEQ ID NO: 115699 - protein, 16 aa, Artificial Sequence
  Description of Artificial Sequence: Synthetic peptide
  Seed: PRMCSLMQGSTLPRRS
PRMYSLGQASTVPRRS

SEQ ID NO: 115700 - protein, 16 aa, Artificial Sequence
  Description of Artificial Sequence: Synthetic peptide
  Seed: PRMCSLMQGSTLPRRS
PRMYSLIQASTAPRRS

SEQ ID NO: 115701 - protein, 16 aa, Artificial Sequence
  Description of Artificial Sequence: Synthetic peptide
  Seed: PRMCSLMQGSTLPRRS
PRMYSLIQASTGPRRS

SEQ ID NO: 115702 - protein, 16 aa, Artificial Sequence
  Description of Artificial Sequence: Synthetic peptide
  Seed: PRMCSLMQGSTLPRRS
PRMYSLIQASTHPRRS

SEQ ID NO: 115703 - protein, 16 aa, Artificial Sequence
  Description of Artificial Sequence: Synthetic peptide
  Seed: PRMCSLMQGSTLPRRS
PRMYSLIQASTIPRRS

SEQ ID NO: 115704 - protein, 16 aa, Artificial Sequence
  Description of Artificial Sequence: Synthetic peptide
  Seed: PRMCSLMQGSTLPRRS
PRMYSLIQASTLPRRS

SEQ ID NO: 115705 - protein, 16 aa, Artificial Sequence
  Description of Artificial Sequence: Synthetic peptide
  Seed: PRMCSLMQGSTLPRRS
PRMYSLIQASTMPRRS

SEQ ID NO: 115706 - protein, 16 aa, Artificial Sequence
  Description of Artificial Sequence: Synthetic peptide
  Seed: PRMCSLMQGSTLPRRS
PRMYSLIQASTNPRRS

SEQ ID NO: 115707 - protein, 16 aa, Artificial Sequence
  Description of Artificial Sequence: Synthetic peptide
  Seed: PRMCSLMQGSTLPRRS
PRMYSLIQASTQPRRS

SEQ ID NO: 115708 - protein, 16 aa, Artificial Sequence
  Description of Artificial Sequence: Synthetic peptide
  Seed: PRMCSLMQGSTLPRRS
PRMYSLIQASTSPRRS

SEQ ID NO: 115709 - protein, 16 aa, Artificial Sequence
  Description of Artificial Sequence: Synthetic peptide
  Seed: PRMCSLMQGSTLPRRS
PRMYSLIQASTTPRRS

SEQ ID NO: 115710 - protein, 16 aa, Artificial Sequence
  Description of Artificial Sequence: Synthetic peptide
  Seed: PRMCSLMQGSTLPRRS
PRMYSLIQASTVPRRS

SEQ ID NO: 115711 - protein, 16 aa, Artificial Sequence
  Description of Artificial Sequence: Synthetic peptide
  Seed: PRMCSLMQGSTLPRRS
PRMYSLIQGSTAPRRS

SEQ ID NO: 115712 - protein, 16 aa, Artificial Sequence
  Description of Artificial Sequence: Synthetic peptide
  Seed: PRMCSLMQGSTLPRRS
PRMYSLIQGSTGPRRS

SEQ ID NO: 115713 - protein, 16 aa, Artificial Sequence
  Description of Artificial Sequence: Synthetic peptide
  Seed: PRMCSLMQGSTLPRRS
PRMYSLIQGSTIPRRS

SEQ ID NO: 115714 - protein, 16 aa, Artificial Sequence
  Description of Artificial Sequence: Synthetic peptide
  Seed: PRMCSLMQGSTLPRRS
PRMYSLIQGSTLPRRS

SEQ ID NO: 115715 - protein, 16 aa, Artificial Sequence
  Description of Artificial Sequence: Synthetic peptide
  Seed: PRMCSLMQGSTLPRRS
PRMYSLIQGSTMPRRS

SEQ ID NO: 115716 - protein, 16 aa, Artificial Sequence
  Description of Artificial Sequence: Synthetic peptide
  Seed: PRMCSLMQGSTLPRRS
PRMYSLIQGSTNPRRS

SEQ ID NO: 115717 - protein, 16 aa, Artificial Sequence
  Description of Artificial Sequence: Synthetic peptide
  Seed: PRMCSLMQGSTLPRRS
PRMYSLIQGSTSPRRS

SEQ ID NO: 115718 - protein, 16 aa, Artificial Sequence
  Description of Artificial Sequence: Synthetic peptide
  Seed: PRMCSLMQGSTLPRRS
PRMYSLIQGSTTPRRS

SEQ ID NO: 115719 - protein, 16 aa, Artificial Sequence
  Description of Artificial Sequence: Synthetic peptide
  Seed: PRMCSLMQGSTLPRRS
PRMYSLIQGSTVPRRS

SEQ ID NO: 115720 - protein, 16 aa, Artificial Sequence
  Description of Artificial Sequence: Synthetic peptide
  Seed: PRMCSLMQGSTLPRRS
PRMYSLIQISTAPRRS

SEQ ID NO: 115721 - protein, 16 aa, Artificial Sequence
  Description of Artificial Sequence: Synthetic peptide
  Seed: PRMCSLMQGSTLPRRS
PRMYSLIQISTIPRRS

SEQ ID NO: 115722 - protein, 16 aa, Artificial Sequence
  Description of Artificial Sequence: Synthetic peptide
  Seed: PRMCSLMQGSTLPRRS
PRMYSLIQISTLPRRS

SEQ ID NO: 115723 - protein, 16 aa, Artificial Sequence
  Description of Artificial Sequence: Synthetic peptide
  Seed: PRMCSLMQGSTLPRRS
PRMYSLIQISTMPRRS

SEQ ID NO: 115724 - protein, 16 aa, Artificial Sequence
  Description of Artificial Sequence: Synthetic peptide
  Seed: PRMCSLMQGSTLPRRS
PRMYSLIQISTNPRRS

SEQ ID NO: 115725 - protein, 16 aa, Artificial Sequence
  Description of Artificial Sequence: Synthetic peptide
  Seed: PRMCSLMQGSTLPRRS
PRMYSLIQISTSPRRS

SEQ ID NO: 115726 - protein, 16 aa, Artificial Sequence
  Description of Artificial Sequence: Synthetic peptide
  Seed: PRMCSLMQGSTLPRRS
PRMYSLIQISTTPRRS

SEQ ID NO: 115727 - protein, 16 aa, Artificial Sequence
  Description of Artificial Sequence: Synthetic peptide
  Seed: PRMCSLMQGSTLPRRS
PRMYSLIQISTVPRRS

SEQ ID NO: 115728 - protein, 16 aa, Artificial Sequence
  Description of Artificial Sequence: Synthetic peptide
  Seed: PRMCSLMQGSTLPRRS
PRMYSLIQLSTAPRRS

SEQ ID NO: 115729 - protein, 16 aa, Artificial Sequence
  Description of Artificial Sequence: Synthetic peptide
  Seed: PRMCSLMQGSTLPRRS
PRMYSLIQMSTAPRRS

SEQ ID NO: 115730 - protein, 16 aa, Artificial Sequence
  Description of Artificial Sequence: Synthetic peptide
  Seed: PRMCSLMQGSTLPRRS
PRMYSLIQNSTAPRRS

SEQ ID NO: 115731 - protein, 16 aa, Artificial Sequence
  Description of Artificial Sequence: Synthetic peptide
  Seed: PRMCSLMQGSTLPRRS
PRMYSLIQNSTIPRRS

SEQ ID NO: 115732 - protein, 16 aa, Artificial Sequence
  Description of Artificial Sequence: Synthetic peptide
  Seed: PRMCSLMQGSTLPRRS
PRMYSLIQNSTLPRRS

SEQ ID NO: 115733 - protein, 16 aa, Artificial Sequence
  Description of Artificial Sequence: Synthetic peptide
  Seed: PRMCSLMQGSTLPRRS
PRMYSLIQNSTSPRRS

SEQ ID NO: 115734 - protein, 16 aa, Artificial Sequence
  Description of Artificial Sequence: Synthetic peptide
  Seed: PRMCSLMQGSTLPRRS
PRMYSLIQNSTTPRRS

SEQ ID NO: 115735 - protein, 16 aa, Artificial Sequence
  Description of Artificial Sequence: Synthetic peptide
  Seed: PRMCSLMQGSTLPRRS
PRMYSLIQNSTVPRRS

SEQ ID NO: 115736 - protein, 16 aa, Artificial Sequence
  Description of Artificial Sequence: Synthetic peptide
  Seed: PRMCSLMQGSTLPRRS
PRMYSLIQPSTAPRRS

SEQ ID NO: 115737 - protein, 16 aa, Artificial Sequence
  Description of Artificial Sequence: Synthetic peptide
  Seed: PRMCSLMQGSTLPRRS
PRMYSLIQPSTGPRRS

SEQ ID NO: 115738 - protein, 16 aa, Artificial Sequence
  Description of Artificial Sequence: Synthetic peptide
  Seed: PRMCSLMQGSTLPRRS
PRMYSLIQPSTIPRRS

SEQ ID NO: 115739 - protein, 16 aa, Artificial Sequence
  Description of Artificial Sequence: Synthetic peptide
  Seed: PRMCSLMQGSTLPRRS
PRMYSLIQPSTLPRRS

SEQ ID NO: 115740 - protein, 16 aa, Artificial Sequence
  Description of Artificial Sequence: Synthetic peptide
  Seed: PRMCSLMQGSTLPRRS
PRMYSLIQPSTMPRRS

SEQ ID NO: 115741 - protein, 16 aa, Artificial Sequence
  Description of Artificial Sequence: Synthetic peptide
  Seed: PRMCSLMQGSTLPRRS
PRMYSLIQPSTNPRRS

SEQ ID NO: 115742 - protein, 16 aa, Artificial Sequence
  Description of Artificial Sequence: Synthetic peptide
  Seed: PRMCSLMQGSTLPRRS
PRMYSLIQPSTSPRRS

SEQ ID NO: 115743 - protein, 16 aa, Artificial Sequence
  Description of Artificial Sequence: Synthetic peptide
  Seed: PRMCSLMQGSTLPRRS
PRMYSLIQPSTTPRRS

SEQ ID NO: 115744 - protein, 16 aa, Artificial Sequence
  Description of Artificial Sequence: Synthetic peptide
  Seed: PRMCSLMQGSTLPRRS
PRMYSLIQPSTVPRRS

SEQ ID NO: 115745 - protein, 16 aa, Artificial Sequence
  Description of Artificial Sequence: Synthetic peptide
  Seed: PRMCSLMQGSTLPRRS
PRMYSLIQSSTAPRRS

SEQ ID NO: 115746 - protein, 16 aa, Artificial Sequence
  Description of Artificial Sequence: Synthetic peptide
  Seed: PRMCSLMQGSTLPRRS
PRMYSLIQSSTGPRRS

SEQ ID NO: 115747 - protein, 16 aa, Artificial Sequence
  Description of Artificial Sequence: Synthetic peptide
  Seed: PRMCSLMQGSTLPRRS
PRMYSLIQSSTIPRRS

SEQ ID NO: 115748 - protein, 16 aa, Artificial Sequence
  Description of Artificial Sequence: Synthetic peptide
  Seed: PRMCSLMQGSTLPRRS
PRMYSLIQSSTLPRRS

SEQ ID NO: 115749 - protein, 16 aa, Artificial Sequence
  Description of Artificial Sequence: Synthetic peptide
  Seed: PRMCSLMQGSTLPRRS
PRMYSLIQSSTMPRRS

SEQ ID NO: 115750 - protein, 16 aa, Artificial Sequence
  Description of Artificial Sequence: Synthetic peptide
  Seed: PRMCSLMQGSTLPRRS
PRMYSLIQSSTNPRRS

SEQ ID NO: 115751 - protein, 16 aa, Artificial Sequence
  Description of Artificial Sequence: Synthetic peptide
  Seed: PRMCSLMQGSTLPRRS
PRMYSLIQSSTSPRRS

SEQ ID NO: 115752 - protein, 16 aa, Artificial Sequence
  Description of Artificial Sequence: Synthetic peptide
  Seed: PRMCSLMQGSTLPRRS
PRMYSLIQSSTTPRRS

SEQ ID NO: 115753 - protein, 16 aa, Artificial Sequence
  Description of Artificial Sequence: Synthetic peptide
  Seed: PRMCSLMQGSTLPRRS
PRMYSLIQSSTVPRRS

SEQ ID NO: 115754 - protein, 16 aa, Artificial Sequence
  Description of Artificial Sequence: Synthetic peptide
  Seed: PRMCSLMQGSTLPRRS
PRMYSLIQTSTAPRRS

SEQ ID NO: 115755 - protein, 16 aa, Artificial Sequence
  Description of Artificial Sequence: Synthetic peptide
  Seed: PRMCSLMQGSTLPRRS
PRMYSLIQTSTIPRRS

SEQ ID NO: 115756 - protein, 16 aa, Artificial Sequence
  Description of Artificial Sequence: Synthetic peptide
  Seed: PRMCSLMQGSTLPRRS
PRMYSLIQTSTLPRRS

SEQ ID NO: 115757 - protein, 16 aa, Artificial Sequence
  Description of Artificial Sequence: Synthetic peptide
  Seed: PRMCSLMQGSTLPRRS
PRMYSLIQTSTMPRRS

SEQ ID NO: 115758 - protein, 16 aa, Artificial Sequence
  Description of Artificial Sequence: Synthetic peptide
  Seed: PRMCSLMQGSTLPRRS
PRMYSLIQTSTNPRRS

SEQ ID NO: 115759 - protein, 16 aa, Artificial Sequence
  Description of Artificial Sequence: Synthetic peptide
  Seed: PRMCSLMQGSTLPRRS
PRMYSLIQTSTSPRRS

SEQ ID NO: 115760 - protein, 16 aa, Artificial Sequence
  Description of Artificial Sequence: Synthetic peptide
  Seed: PRMCSLMQGSTLPRRS
PRMYSLIQTSTTPRRS

SEQ ID NO: 115761 - protein, 16 aa, Artificial Sequence
  Description of Artificial Sequence: Synthetic peptide
  Seed: PRMCSLMQGSTLPRRS
PRMYSLIQTSTVPRRS

SEQ ID NO: 115762 - protein, 16 aa, Artificial Sequence
  Description of Artificial Sequence: Synthetic peptide
  Seed: PRMCSLMQGSTLPRRS
PRMYSLIQVSTAPRRS

SEQ ID NO: 115763 - protein, 16 aa, Artificial Sequence
  Description of Artificial Sequence: Synthetic peptide
  Seed: PRMCSLMQGSTLPRRS
PRMYSLIQVSTGPRRS

SEQ ID NO: 115764 - protein, 16 aa, Artificial Sequence
  Description of Artificial Sequence: Synthetic peptide
  Seed: PRMCSLMQGSTLPRRS
PRMYSLIQVSTHPRRS

SEQ ID NO: 115765 - protein, 16 aa, Artificial Sequence
  Description of Artificial Sequence: Synthetic peptide
  Seed: PRMCSLMQGSTLPRRS
PRMYSLIQVSTIPRRS

SEQ ID NO: 115766 - protein, 16 aa, Artificial Sequence
  Description of Artificial Sequence: Synthetic peptide
  Seed: PRMCSLMQGSTLPRRS
PRMYSLIQVSTLPRRS

SEQ ID NO: 115767 - protein, 16 aa, Artificial Sequence
  Description of Artificial Sequence: Synthetic peptide
  Seed: PRMCSLMQGSTLPRRS
PRMYSLIQVSTMPRRS

SEQ ID NO: 115768 - protein, 16 aa, Artificial Sequence
  Description of Artificial Sequence: Synthetic peptide
  Seed: PRMCSLMQGSTLPRRS
PRMYSLIQVSTNPRRS

SEQ ID NO: 115769 - protein, 16 aa, Artificial Sequence
  Description of Artificial Sequence: Synthetic peptide
  Seed: PRMCSLMQGSTLPRRS
PRMYSLIQVSTSPRRS

SEQ ID NO: 115770 - protein, 16 aa, Artificial Sequence
  Description of Artificial Sequence: Synthetic peptide
  Seed: PRMCSLMQGSTLPRRS
PRMYSLIQVSTTPRRS

SEQ ID NO: 115771 - protein, 16 aa, Artificial Sequence
  Description of Artificial Sequence: Synthetic peptide
  Seed: PRMCSLMQGSTLPRRS
PRMYSLIQVSTVPRRS

SEQ ID NO: 115772 - protein, 16 aa, Artificial Sequence
  Description of Artificial Sequence: Synthetic peptide
  Seed: PRMCSLMQGSTLPRRS
PRMYSLLQASTAPRRS

SEQ ID NO: 115773 - protein, 16 aa, Artificial Sequence
  Description of Artificial Sequence: Synthetic peptide
  Seed: PRMCSLMQGSTLPRRS
PRMYSLLQASTCPRRS

SEQ ID NO: 115774 - protein, 16 aa, Artificial Sequence
  Description of Artificial Sequence: Synthetic peptide
  Seed: PRMCSLMQGSTLPRRS
PRMYSLLQASTFPRRS

SEQ ID NO: 115775 - protein, 16 aa, Artificial Sequence
  Description of Artificial Sequence: Synthetic peptide
  Seed: PRMCSLMQGSTLPRRS
PRMYSLLQASTGPRRS

SEQ ID NO: 115776 - protein, 16 aa, Artificial Sequence
  Description of Artificial Sequence: Synthetic peptide
  Seed: PRMCSLMQGSTLPRRS
PRMYSLLQASTHPRRS

SEQ ID NO: 115777 - protein, 16 aa, Artificial Sequence
  Description of Artificial Sequence: Synthetic peptide
  Seed: PRMCSLMQGSTLPRRS
PRMYSLLQASTIPRRS

SEQ ID NO: 115778 - protein, 16 aa, Artificial Sequence
  Description of Artificial Sequence: Synthetic peptide
  Seed: PRMCSLMQGSTLPRRS
PRMYSLLQASTLPRRS

SEQ ID NO: 115779 - protein, 16 aa, Artificial Sequence
  Description of Artificial Sequence: Synthetic peptide
  Seed: PRMCSLMQGSTLPRRS
PRMYSLLQASTMPRRS

SEQ ID NO: 115780 - protein, 16 aa, Artificial Sequence
  Description of Artificial Sequence: Synthetic peptide
  Seed: PRMCSLMQGSTLPRRS
PRMYSLLQASTNPRRS

SEQ ID NO: 115781 - protein, 16 aa, Artificial Sequence
  Description of Artificial Sequence: Synthetic peptide
  Seed: PRMCSLMQGSTLPRRS
PRMYSLLQASTPPRRS

SEQ ID NO: 115782 - protein, 16 aa, Artificial Sequence
  Description of Artificial Sequence: Synthetic peptide
  Seed: PRMCSLMQGSTLPRRS
PRMYSLLQASTQPRRS

SEQ ID NO: 115783 - protein, 16 aa, Artificial Sequence
  Description of Artificial Sequence: Synthetic peptide
  Seed: PRMCSLMQGSTLPRRS
PRMYSLLQASTSPRRS

SEQ ID NO: 115784 - protein, 16 aa, Artificial Sequence
  Description of Artificial Sequence: Synthetic peptide
  Seed: PRMCSLMQGSTLPRRS
PRMYSLLQASTTPRRS

SEQ ID NO: 115785 - protein, 16 aa, Artificial Sequence
  Description of Artificial Sequence: Synthetic peptide
  Seed: PRMCSLMQGSTLPRRS
PRMYSLLQASTVPRRS

SEQ ID NO: 115786 - protein, 16 aa, Artificial Sequence
  Description of Artificial Sequence: Synthetic peptide
  Seed: PRMCSLMQGSTLPRRS
PRMYSLLQGSTAPRRS

SEQ ID NO: 115787 - protein, 16 aa, Artificial Sequence
  Description of Artificial Sequence: Synthetic peptide
  Seed: PRMCSLMQGSTLPRRS
PRMYSLLQGSTCPRRS

SEQ ID NO: 115788 - protein, 16 aa, Artificial Sequence
  Description of Artificial Sequence: Synthetic peptide
  Seed: PRMCSLMQGSTLPRRS
PRMYSLLQGSTFPRRS

SEQ ID NO: 115789 - protein, 16 aa, Artificial Sequence
  Description of Artificial Sequence: Synthetic peptide
  Seed: PRMCSLMQGSTLPRRS
PRMYSLLQGSTGPRRS

SEQ ID NO: 115790 - protein, 16 aa, Artificial Sequence
  Description of Artificial Sequence: Synthetic peptide
  Seed: PRMCSLMQGSTLPRRS
PRMYSLLQGSTIPRRS

SEQ ID NO: 115791 - protein, 16 aa, Artificial Sequence
  Description of Artificial Sequence: Synthetic peptide
  Seed: PRMCSLMQGSTLPRRS
PRMYSLLQGSTLPRRS

SEQ ID NO: 115792 - protein, 16 aa, Artificial Sequence
  Description of Artificial Sequence: Synthetic peptide
  Seed: PRMCSLMQGSTLPRRS
PRMYSLLQGSTMPRRS

SEQ ID NO: 115793 - protein, 16 aa, Artificial Sequence
  Description of Artificial Sequence: Synthetic peptide
  Seed: PRMCSLMQGSTLPRRS
PRMYSLLQGSTNPRRS

SEQ ID NO: 115794 - protein, 16 aa, Artificial Sequence
  Description of Artificial Sequence: Synthetic peptide
  Seed: PRMCSLMQGSTLPRRS
PRMYSLLQGSTPPRRS

SEQ ID NO: 115795 - protein, 16 aa, Artificial Sequence
  Description of Artificial Sequence: Synthetic peptide
  Seed: PRMCSLMQGSTLPRRS
PRMYSLLQGSTSPRRS

SEQ ID NO: 115796 - protein, 16 aa, Artificial Sequence
  Description of Artificial Sequence: Synthetic peptide
  Seed: PRMCSLMQGSTLPRRS
PRMYSLLQGSTTPRRS

SEQ ID NO: 115797 - protein, 16 aa, Artificial Sequence
  Description of Artificial Sequence: Synthetic peptide
  Seed: PRMCSLMQGSTLPRRS
PRMYSLLQGSTVPRRS

SEQ ID NO: 115798 - protein, 16 aa, Artificial Sequence
  Description of Artificial Sequence: Synthetic peptide
  Seed: PRMCSLMQGSTLPRRS
PRMYSLLQISTAPRRS

SEQ ID NO: 115799 - protein, 16 aa, Artificial Sequence
  Description of Artificial Sequence: Synthetic peptide
  Seed: PRMCSLMQGSTLPRRS
PRMYSLLQISTGPRRS

SEQ ID NO: 115800 - protein, 16 aa, Artificial Sequence
  Description of Artificial Sequence: Synthetic peptide
  Seed: PRMCSLMQGSTLPRRS
PRMYSLLQISTHPRRS

SEQ ID NO: 115801 - protein, 16 aa, Artificial Sequence
  Description of Artificial Sequence: Synthetic peptide
  Seed: PRMCSLMQGSTLPRRS
PRMYSLLQISTIPRRS

SEQ ID NO: 115802 - protein, 16 aa, Artificial Sequence
  Description of Artificial Sequence: Synthetic peptide
  Seed: PRMCSLMQGSTLPRRS
PRMYSLLQISTLPRRS

SEQ ID NO: 115803 - protein, 16 aa, Artificial Sequence
  Description of Artificial Sequence: Synthetic peptide
  Seed: PRMCSLMQGSTLPRRS
PRMYSLLQISTMPRRS

SEQ ID NO: 115804 - protein, 16 aa, Artificial Sequence
  Description of Artificial Sequence: Synthetic peptide
  Seed: PRMCSLMQGSTLPRRS
PRMYSLLQISTNPRRS

SEQ ID NO: 115805 - protein, 16 aa, Artificial Sequence
  Description of Artificial Sequence: Synthetic peptide
  Seed: PRMCSLMQGSTLPRRS
PRMYSLLQISTSPRRS

SEQ ID NO: 115806 - protein, 16 aa, Artificial Sequence
  Description of Artificial Sequence: Synthetic peptide
  Seed: PRMCSLMQGSTLPRRS
PRMYSLLQISTTPRRS

SEQ ID NO: 115807 - protein, 16 aa, Artificial Sequence
  Description of Artificial Sequence: Synthetic peptide
  Seed: PRMCSLMQGSTLPRRS
PRMYSLLQISTVPRRS

SEQ ID NO: 115808 - protein, 16 aa, Artificial Sequence
  Description of Artificial Sequence: Synthetic peptide
  Seed: PRMCSLMQGSTLPRRS
PRMYSLLQLSTAPRRS

SEQ ID NO: 115809 - protein, 16 aa, Artificial Sequence
  Description of Artificial Sequence: Synthetic peptide
  Seed: PRMCSLMQGSTLPRRS
PRMYSLLQLSTNPRRS

SEQ ID NO: 115810 - protein, 16 aa, Artificial Sequence
  Description of Artificial Sequence: Synthetic peptide
  Seed: PRMCSLMQGSTLPRRS
PRMYSLLQLSTSPRRS

SEQ ID NO: 115811 - protein, 16 aa, Artificial Sequence
  Description of Artificial Sequence: Synthetic peptide
  Seed: PRMCSLMQGSTLPRRS
PRMYSLLQMSTAPRRS

SEQ ID NO: 115812 - protein, 16 aa, Artificial Sequence
  Description of Artificial Sequence: Synthetic peptide
  Seed: PRMCSLMQGSTLPRRS
PRMYSLLQMSTSPRRS

SEQ ID NO: 115813 - protein, 16 aa, Artificial Sequence
  Description of Artificial Sequence: Synthetic peptide
  Seed: PRMCSLMQGSTLPRRS
PRMYSLLQNSTAPRRS

SEQ ID NO: 115814 - protein, 16 aa, Artificial Sequence
  Description of Artificial Sequence: Synthetic peptide
  Seed: PRMCSLMQGSTLPRRS
PRMYSLLQNSTIPRRS

SEQ ID NO: 115815 - protein, 16 aa, Artificial Sequence
  Description of Artificial Sequence: Synthetic peptide
  Seed: PRMCSLMQGSTLPRRS
PRMYSLLQNSTLPRRS

SEQ ID NO: 115816 - protein, 16 aa, Artificial Sequence
  Description of Artificial Sequence: Synthetic peptide
  Seed: PRMCSLMQGSTLPRRS
PRMYSLLQNSTMPRRS

SEQ ID NO: 115817 - protein, 16 aa, Artificial Sequence
  Description of Artificial Sequence: Synthetic peptide
  Seed: PRMCSLMQGSTLPRRS
PRMYSLLQNSTNPRRS

SEQ ID NO: 115818 - protein, 16 aa, Artificial Sequence
  Description of Artificial Sequence: Synthetic peptide
  Seed: PRMCSLMQGSTLPRRS
PRMYSLLQNSTSPRRS

SEQ ID NO: 115819 - protein, 16 aa, Artificial Sequence
  Description of Artificial Sequence: Synthetic peptide
  Seed: PRMCSLMQGSTLPRRS
PRMYSLLQNSTTPRRS

SEQ ID NO: 115820 - protein, 16 aa, Artificial Sequence
  Description of Artificial Sequence: Synthetic peptide
  Seed: PRMCSLMQGSTLPRRS
PRMYSLLQNSTVPRRS

SEQ ID NO: 115821 - protein, 16 aa, Artificial Sequence
  Description of Artificial Sequence: Synthetic peptide
  Seed: PRMCSLMQGSTLPRRS
PRMYSLLQPSTAPRRS

SEQ ID NO: 115822 - protein, 16 aa, Artificial Sequence
  Description of Artificial Sequence: Synthetic peptide
  Seed: PRMCSLMQGSTLPRRS
PRMYSLLQPSTFPRRS

SEQ ID NO: 115823 - protein, 16 aa, Artificial Sequence
  Description of Artificial Sequence: Synthetic peptide
  Seed: PRMCSLMQGSTLPRRS
PRMYSLLQPSTGPRRS

SEQ ID NO: 115824 - protein, 16 aa, Artificial Sequence
  Description of Artificial Sequence: Synthetic peptide
  Seed: PRMCSLMQGSTLPRRS
PRMYSLLQPSTHPRRS

SEQ ID NO: 115825 - protein, 16 aa, Artificial Sequence
  Description of Artificial Sequence: Synthetic peptide
  Seed: PRMCSLMQGSTLPRRS
PRMYSLLQPSTIPRRS

SEQ ID NO: 115826 - protein, 16 aa, Artificial Sequence
  Description of Artificial Sequence: Synthetic peptide
  Seed: PRMCSLMQGSTLPRRS
PRMYSLLQPSTLPRRS

SEQ ID NO: 115827 - protein, 16 aa, Artificial Sequence
  Description of Artificial Sequence: Synthetic peptide
  Seed: PRMCSLMQGSTLPRRS
PRMYSLLQPSTMPRRS

SEQ ID NO: 115828 - protein, 16 aa, Artificial Sequence
  Description of Artificial Sequence: Synthetic peptide
  Seed: PRMCSLMQGSTLPRRS
PRMYSLLQPSTNPRRS

SEQ ID NO: 115829 - protein, 16 aa, Artificial Sequence
  Description of Artificial Sequence: Synthetic peptide
  Seed: PRMCSLMQGSTLPRRS
PRMYSLLQPSTPPRRS

SEQ ID NO: 115830 - protein, 16 aa, Artificial Sequence
  Description of Artificial Sequence: Synthetic peptide
  Seed: PRMCSLMQGSTLPRRS
PRMYSLLQPSTQPRRS

SEQ ID NO: 115831 - protein, 16 aa, Artificial Sequence
  Description of Artificial Sequence: Synthetic peptide
  Seed: PRMCSLMQGSTLPRRS
PRMYSLLQPSTSPRRS

SEQ ID NO: 115832 - protein, 16 aa, Artificial Sequence
  Description of Artificial Sequence: Synthetic peptide
  Seed: PRMCSLMQGSTLPRRS
PRMYSLLQPSTTPRRS

SEQ ID NO: 115833 - protein, 16 aa, Artificial Sequence
  Description of Artificial Sequence: Synthetic peptide
  Seed: PRMCSLMQGSTLPRRS
PRMYSLLQPSTVPRRS

SEQ ID NO: 115834 - protein, 16 aa, Artificial Sequence
  Description of Artificial Sequence: Synthetic peptide
  Seed: PRMCSLMQGSTLPRRS
PRMYSLLQSSTAPRRS

SEQ ID NO: 115835 - protein, 16 aa, Artificial Sequence
  Description of Artificial Sequence: Synthetic peptide
  Seed: PRMCSLMQGSTLPRRS
PRMYSLLQSSTCPRRS

SEQ ID NO: 115836 - protein, 16 aa, Artificial Sequence
  Description of Artificial Sequence: Synthetic peptide
  Seed: PRMCSLMQGSTLPRRS
PRMYSLLQSSTFPRRS

SEQ ID NO: 115837 - protein, 16 aa, Artificial Sequence
  Description of Artificial Sequence: Synthetic peptide
  Seed: PRMCSLMQGSTLPRRS
PRMYSLLQSSTGPRRS

SEQ ID NO: 115838 - protein, 16 aa, Artificial Sequence
  Description of Artificial Sequence: Synthetic peptide
  Seed: PRMCSLMQGSTLPRRS
PRMYSLLQSSTHPRRS

SEQ ID NO: 115839 - protein, 16 aa, Artificial Sequence
  Description of Artificial Sequence: Synthetic peptide
  Seed: PRMCSLMQGSTLPRRS
PRMYSLLQSSTIPRRS

SEQ ID NO: 115840 - protein, 16 aa, Artificial Sequence
  Description of Artificial Sequence: Synthetic peptide
  Seed: PRMCSLMQGSTLPRRS
PRMYSLLQSSTLPRRS

SEQ ID NO: 115841 - protein, 16 aa, Artificial Sequence
  Description of Artificial Sequence: Synthetic peptide
  Seed: PRMCSLMQGSTLPRRS
PRMYSLLQSSTMPRRS

SEQ ID NO: 115842 - protein, 16 aa, Artificial Sequence
  Description of Artificial Sequence: Synthetic peptide
  Seed: PRMCSLMQGSTLPRRS
PRMYSLLQSSTNPRRS

SEQ ID NO: 115843 - protein, 16 aa, Artificial Sequence
  Description of Artificial Sequence: Synthetic peptide
  Seed: PRMCSLMQGSTLPRRS
PRMYSLLQSSTSPRRS

SEQ ID NO: 115844 - protein, 16 aa, Artificial Sequence
  Description of Artificial Sequence: Synthetic peptide
  Seed: PRMCSLMQGSTLPRRS
PRMYSLLQSSTTPRRS

SEQ ID NO: 115845 - protein, 16 aa, Artificial Sequence
  Description of Artificial Sequence: Synthetic peptide
  Seed: PRMCSLMQGSTLPRRS
PRMYSLLQSSTVPRRS

SEQ ID NO: 115846 - protein, 16 aa, Artificial Sequence
  Description of Artificial Sequence: Synthetic peptide
  Seed: PRMCSLMQGSTLPRRS
PRMYSLLQTSTAPRRS

SEQ ID NO: 115847 - protein, 16 aa, Artificial Sequence
  Description of Artificial Sequence: Synthetic peptide
  Seed: PRMCSLMQGSTLPRRS
PRMYSLLQTSTHPRRS

SEQ ID NO: 115848 - protein, 16 aa, Artificial Sequence
  Description of Artificial Sequence: Synthetic peptide
  Seed: PRMCSLMQGSTLPRRS
PRMYSLLQTSTIPRRS

SEQ ID NO: 115849 - protein, 16 aa, Artificial Sequence
  Description of Artificial Sequence: Synthetic peptide
  Seed: PRMCSLMQGSTLPRRS
PRMYSLLQTSTLPRRS

SEQ ID NO: 115850 - protein, 16 aa, Artificial Sequence
  Description of Artificial Sequence: Synthetic peptide
  Seed: PRMCSLMQGSTLPRRS
PRMYSLLQTSTMPRRS

SEQ ID NO: 115851 - protein, 16 aa, Artificial Sequence
  Description of Artificial Sequence: Synthetic peptide
  Seed: PRMCSLMQGSTLPRRS
PRMYSLLQTSTNPRRS

SEQ ID NO: 115852 - protein, 16 aa, Artificial Sequence
  Description of Artificial Sequence: Synthetic peptide
  Seed: PRMCSLMQGSTLPRRS
PRMYSLLQTSTSPRRS

SEQ ID NO: 115853 - protein, 16 aa, Artificial Sequence
  Description of Artificial Sequence: Synthetic peptide
  Seed: PRMCSLMQGSTLPRRS
PRMYSLLQTSTTPRRS

SEQ ID NO: 115854 - protein, 16 aa, Artificial Sequence
  Description of Artificial Sequence: Synthetic peptide
  Seed: PRMCSLMQGSTLPRRS
PRMYSLLQTSTVPRRS

SEQ ID NO: 115855 - protein, 16 aa, Artificial Sequence
  Description of Artificial Sequence: Synthetic peptide
  Seed: PRMCSLMQGSTLPRRS
PRMYSLLQVSTAPRRS

SEQ ID NO: 115856 - protein, 16 aa, Artificial Sequence
  Description of Artificial Sequence: Synthetic peptide
  Seed: PRMCSLMQGSTLPRRS
PRMYSLLQVSTGPRRS

SEQ ID NO: 115857 - protein, 16 aa, Artificial Sequence
  Description of Artificial Sequence: Synthetic peptide
  Seed: PRMCSLMQGSTLPRRS
PRMYSLLQVSTHPRRS

SEQ ID NO: 115858 - protein, 16 aa, Artificial Sequence
  Description of Artificial Sequence: Synthetic peptide
  Seed: PRMCSLMQGSTLPRRS
PRMYSLLQVSTIPRRS

SEQ ID NO: 115859 - protein, 16 aa, Artificial Sequence
  Description of Artificial Sequence: Synthetic peptide
  Seed: PRMCSLMQGSTLPRRS
PRMYSLLQVSTLPRRS

SEQ ID NO: 115860 - protein, 16 aa, Artificial Sequence
  Description of Artificial Sequence: Synthetic peptide
  Seed: PRMCSLMQGSTLPRRS
PRMYSLLQVSTMPRRS

SEQ ID NO: 115861 - protein, 16 aa, Artificial Sequence
  Description of Artificial Sequence: Synthetic peptide
  Seed: PRMCSLMQGSTLPRRS
PRMYSLLQVSTNPRRS

SEQ ID NO: 115862 - protein, 16 aa, Artificial Sequence
  Description of Artificial Sequence: Synthetic peptide
  Seed: PRMCSLMQGSTLPRRS
PRMYSLLQVSTPPRRS

SEQ ID NO: 115863 - protein, 16 aa, Artificial Sequence
  Description of Artificial Sequence: Synthetic peptide
  Seed: PRMCSLMQGSTLPRRS
PRMYSLLQVSTQPRRS

SEQ ID NO: 115864 - protein, 16 aa, Artificial Sequence
  Description of Artificial Sequence: Synthetic peptide
  Seed: PRMCSLMQGSTLPRRS
PRMYSLLQVSTSPRRS

SEQ ID NO: 115865 - protein, 16 aa, Artificial Sequence
  Description of Artificial Sequence: Synthetic peptide
  Seed: PRMCSLMQGSTLPRRS
PRMYSLLQVSTTPRRS

SEQ ID NO: 115866 - protein, 16 aa, Artificial Sequence
  Description of Artificial Sequence: Synthetic peptide
  Seed: PRMCSLMQGSTLPRRS
PRMYSLLQVSTVPRRS

SEQ ID NO: 115867 - protein, 16 aa, Artificial Sequence
  Description of Artificial Sequence: Synthetic peptide
  Seed: PRMCSLMQGSTLPRRS
PRMYSLMQASTAPRRS

SEQ ID NO: 115868 - protein, 16 aa, Artificial Sequence
  Description of Artificial Sequence: Synthetic peptide
  Seed: PRMCSLMQGSTLPRRS
PRMYSLMQASTCPRRS

SEQ ID NO: 115869 - protein, 16 aa, Artificial Sequence
  Description of Artificial Sequence: Synthetic peptide
  Seed: PRMCSLMQGSTLPRRS
PRMYSLMQASTFPRRS

SEQ ID NO: 115870 - protein, 16 aa, Artificial Sequence
  Description of Artificial Sequence: Synthetic peptide
  Seed: PRMCSLMQGSTLPRRS
PRMYSLMQASTGPRRS

SEQ ID NO: 115871 - protein, 16 aa, Artificial Sequence
  Description of Artificial Sequence: Synthetic peptide
  Seed: PRMCSLMQGSTLPRRS
PRMYSLMQASTHPRRS

SEQ ID NO: 115872 - protein, 16 aa, Artificial Sequence
  Description of Artificial Sequence: Synthetic peptide
  Seed: PRMCSLMQGSTLPRRS
PRMYSLMQASTIPRRS

SEQ ID NO: 115873 - protein, 16 aa, Artificial Sequence
  Description of Artificial Sequence: Synthetic peptide
  Seed: PRMCSLMQGSTLPRRS
PRMYSLMQASTLPRRS

SEQ ID NO: 115874 - protein, 16 aa, Artificial Sequence
  Description of Artificial Sequence: Synthetic peptide
  Seed: PRMCSLMQGSTLPRRS
PRMYSLMQASTMPRRS

SEQ ID NO: 115875 - protein, 16 aa, Artificial Sequence
  Description of Artificial Sequence: Synthetic peptide
  Seed: PRMCSLMQGSTLPRRS
PRMYSLMQASTNPRRS

SEQ ID NO: 115876 - protein, 16 aa, Artificial Sequence
  Description of Artificial Sequence: Synthetic peptide
  Seed: PRMCSLMQGSTLPRRS
PRMYSLMQASTPPRRS

SEQ ID NO: 115877 - protein, 16 aa, Artificial Sequence
  Description of Artificial Sequence: Synthetic peptide
  Seed: PRMCSLMQGSTLPRRS
PRMYSLMQASTQPRRS

SEQ ID NO: 115878 - protein, 16 aa, Artificial Sequence
  Description of Artificial Sequence: Synthetic peptide
  Seed: PRMCSLMQGSTLPRRS
PRMYSLMQASTSPRRS

SEQ ID NO: 115879 - protein, 16 aa, Artificial Sequence
  Description of Artificial Sequence: Synthetic peptide
  Seed: PRMCSLMQGSTLPRRS
PRMYSLMQASTTPRRS

SEQ ID NO: 115880 - protein, 16 aa, Artificial Sequence
  Description of Artificial Sequence: Synthetic peptide
  Seed: PRMCSLMQGSTLPRRS
PRMYSLMQASTVPRRS

SEQ ID NO: 115881 - protein, 16 aa, Artificial Sequence
  Description of Artificial Sequence: Synthetic peptide
  Seed: PRMCSLMQGSTLPRRS
PRMYSLMQGSTAPRRS

SEQ ID NO: 115882 - protein, 16 aa, Artificial Sequence
  Description of Artificial Sequence: Synthetic peptide
  Seed: PRMCSLMQGSTLPRRS
PRMYSLMQGSTCPRRS

SEQ ID NO: 115883 - protein, 16 aa, Artificial Sequence
  Description of Artificial Sequence: Synthetic peptide
  Seed: PRMCSLMQGSTLPRRS
PRMYSLMQGSTFPRRS

SEQ ID NO: 115884 - protein, 16 aa, Artificial Sequence
  Description of Artificial Sequence: Synthetic peptide
  Seed: PRMCSLMQGSTLPRRS
PRMYSLMQGSTGPRRS

SEQ ID NO: 115885 - protein, 16 aa, Artificial Sequence
  Description of Artificial Sequence: Synthetic peptide
  Seed: PRMCSLMQGSTLPRRS
PRMYSLMQGSTIPRRS

SEQ ID NO: 115886 - protein, 16 aa, Artificial Sequence
  Description of Artificial Sequence: Synthetic peptide
  Seed: PRMCSLMQGSTLPRRS
PRMYSLMQGSTLPRRS

SEQ ID NO: 115887 - protein, 16 aa, Artificial Sequence
  Description of Artificial Sequence: Synthetic peptide
  Seed: PRMCSLMQGSTLPRRS
PRMYSLMQGSTMPRRS

SEQ ID NO: 115888 - protein, 16 aa, Artificial Sequence
  Description of Artificial Sequence: Synthetic peptide
  Seed: PRMCSLMQGSTLPRRS
PRMYSLMQGSTNPRRS

SEQ ID NO: 115889 - protein, 16 aa, Artificial Sequence
  Description of Artificial Sequence: Synthetic peptide
  Seed: PRMCSLMQGSTLPRRS
PRMYSLMQGSTSPRRS

SEQ ID NO: 115890 - protein, 16 aa, Artificial Sequence
  Description of Artificial Sequence: Synthetic peptide
  Seed: PRMCSLMQGSTLPRRS
PRMYSLMQGSTTPRRS

SEQ ID NO: 115891 - protein, 16 aa, Artificial Sequence
  Description of Artificial Sequence: Synthetic peptide
  Seed: PRMCSLMQGSTLPRRS
PRMYSLMQGSTVPRRS

SEQ ID NO: 115892 - protein, 16 aa, Artificial Sequence
  Description of Artificial Sequence: Synthetic peptide
  Seed: PRMCSLMQGSTLPRRS
PRMYSLMQISTAPRRS

SEQ ID NO: 115893 - protein, 16 aa, Artificial Sequence
  Description of Artificial Sequence: Synthetic peptide
  Seed: PRMCSLMQGSTLPRRS
PRMYSLMQISTGPRRS

SEQ ID NO: 115894 - protein, 16 aa, Artificial Sequence
  Description of Artificial Sequence: Synthetic peptide
  Seed: PRMCSLMQGSTLPRRS
PRMYSLMQISTHPRRS

SEQ ID NO: 115895 - protein, 16 aa, Artificial Sequence
  Description of Artificial Sequence: Synthetic peptide
  Seed: PRMCSLMQGSTLPRRS
PRMYSLMQISTIPRRS

SEQ ID NO: 115896 - protein, 16 aa, Artificial Sequence
  Description of Artificial Sequence: Synthetic peptide
  Seed: PRMCSLMQGSTLPRRS
PRMYSLMQISTLPRRS

SEQ ID NO: 115897 - protein, 16 aa, Artificial Sequence
  Description of Artificial Sequence: Synthetic peptide
  Seed: PRMCSLMQGSTLPRRS
PRMYSLMQISTMPRRS

SEQ ID NO: 115898 - protein, 16 aa, Artificial Sequence
  Description of Artificial Sequence: Synthetic peptide
  Seed: PRMCSLMQGSTLPRRS
PRMYSLMQISTNPRRS

SEQ ID NO: 115899 - protein, 16 aa, Artificial Sequence
  Description of Artificial Sequence: Synthetic peptide
  Seed: PRMCSLMQGSTLPRRS
PRMYSLMQISTSPRRS

SEQ ID NO: 115900 - protein, 16 aa, Artificial Sequence
  Description of Artificial Sequence: Synthetic peptide
  Seed: PRMCSLMQGSTLPRRS
PRMYSLMQISTTPRRS

SEQ ID NO: 115901 - protein, 16 aa, Artificial Sequence
  Description of Artificial Sequence: Synthetic peptide
  Seed: PRMCSLMQGSTLPRRS
PRMYSLMQISTVPRRS

SEQ ID NO: 115902 - protein, 16 aa, Artificial Sequence
  Description of Artificial Sequence: Synthetic peptide
  Seed: PRMCSLMQGSTLPRRS
PRMYSLMQLSTAPRRS

SEQ ID NO: 115903 - protein, 16 aa, Artificial Sequence
  Description of Artificial Sequence: Synthetic peptide
  Seed: PRMCSLMQGSTLPRRS
PRMYSLMQLSTIPRRS

SEQ ID NO: 115904 - protein, 16 aa, Artificial Sequence
  Description of Artificial Sequence: Synthetic peptide
  Seed: PRMCSLMQGSTLPRRS
PRMYSLMQLSTLPRRS

SEQ ID NO: 115905 - protein, 16 aa, Artificial Sequence
  Description of Artificial Sequence: Synthetic peptide
  Seed: PRMCSLMQGSTLPRRS
PRMYSLMQLSTNPRRS

SEQ ID NO: 115906 - protein, 16 aa, Artificial Sequence
  Description of Artificial Sequence: Synthetic peptide
  Seed: PRMCSLMQGSTLPRRS
PRMYSLMQLSTSPRRS

SEQ ID NO: 115907 - protein, 16 aa, Artificial Sequence
  Description of Artificial Sequence: Synthetic peptide
  Seed: PRMCSLMQGSTLPRRS
PRMYSLMQLSTTPRRS

SEQ ID NO: 115908 - protein, 16 aa, Artificial Sequence
  Description of Artificial Sequence: Synthetic peptide
  Seed: PRMCSLMQGSTLPRRS
PRMYSLMQLSTVPRRS

SEQ ID NO: 115909 - protein, 16 aa, Artificial Sequence
  Description of Artificial Sequence: Synthetic peptide
  Seed: PRMCSLMQGSTLPRRS
PRMYSLMQMSTAPRRS

SEQ ID NO: 115910 - protein, 16 aa, Artificial Sequence
  Description of Artificial Sequence: Synthetic peptide
  Seed: PRMCSLMQGSTLPRRS
PRMYSLMQMSTLPRRS

SEQ ID NO: 115911 - protein, 16 aa, Artificial Sequence
  Description of Artificial Sequence: Synthetic peptide
  Seed: PRMCSLMQGSTLPRRS
PRMYSLMQMSTSPRRS

SEQ ID NO: 115912 - protein, 16 aa, Artificial Sequence
  Description of Artificial Sequence: Synthetic peptide
  Seed: PRMCSLMQGSTLPRRS
PRMYSLMQMSTVPRRS

SEQ ID NO: 115913 - protein, 16 aa, Artificial Sequence
  Description of Artificial Sequence: Synthetic peptide
  Seed: PRMCSLMQGSTLPRRS
PRMYSLMQNSTAPRRS

SEQ ID NO: 115914 - protein, 16 aa, Artificial Sequence
  Description of Artificial Sequence: Synthetic peptide
  Seed: PRMCSLMQGSTLPRRS
PRMYSLMQNSTIPRRS

SEQ ID NO: 115915 - protein, 16 aa, Artificial Sequence
  Description of Artificial Sequence: Synthetic peptide
  Seed: PRMCSLMQGSTLPRRS
PRMYSLMQNSTLPRRS

SEQ ID NO: 115916 - protein, 16 aa, Artificial Sequence
  Description of Artificial Sequence: Synthetic peptide
  Seed: PRMCSLMQGSTLPRRS
PRMYSLMQNSTMPRRS

SEQ ID NO: 115917 - protein, 16 aa, Artificial Sequence
  Description of Artificial Sequence: Synthetic peptide
  Seed: PRMCSLMQGSTLPRRS
PRMYSLMQNSTNPRRS

SEQ ID NO: 115918 - protein, 16 aa, Artificial Sequence
  Description of Artificial Sequence: Synthetic peptide
  Seed: PRMCSLMQGSTLPRRS
PRMYSLMQNSTSPRRS

SEQ ID NO: 115919 - protein, 16 aa, Artificial Sequence
  Description of Artificial Sequence: Synthetic peptide
  Seed: PRMCSLMQGSTLPRRS
PRMYSLMQNSTTPRRS

SEQ ID NO: 115920 - protein, 16 aa, Artificial Sequence
  Description of Artificial Sequence: Synthetic peptide
  Seed: PRMCSLMQGSTLPRRS
PRMYSLMQNSTVPRRS

SEQ ID NO: 115921 - protein, 16 aa, Artificial Sequence
  Description of Artificial Sequence: Synthetic peptide
  Seed: PRMCSLMQGSTLPRRS
PRMYSLMQPSTAPRRS

SEQ ID NO: 115922 - protein, 16 aa, Artificial Sequence
  Description of Artificial Sequence: Synthetic peptide
  Seed: PRMCSLMQGSTLPRRS
PRMYSLMQPSTGPRRS

SEQ ID NO: 115923 - protein, 16 aa, Artificial Sequence
  Description of Artificial Sequence: Synthetic peptide
  Seed: PRMCSLMQGSTLPRRS
PRMYSLMQPSTHPRRS

SEQ ID NO: 115924 - protein, 16 aa, Artificial Sequence
  Description of Artificial Sequence: Synthetic peptide
  Seed: PRMCSLMQGSTLPRRS
PRMYSLMQPSTIPRRS

SEQ ID NO: 115925 - protein, 16 aa, Artificial Sequence
  Description of Artificial Sequence: Synthetic peptide
  Seed: PRMCSLMQGSTLPRRS
PRMYSLMQPSTLPRRS

SEQ ID NO: 115926 - protein, 16 aa, Artificial Sequence
  Description of Artificial Sequence: Synthetic peptide
  Seed: PRMCSLMQGSTLPRRS
PRMYSLMQPSTMPRRS

SEQ ID NO: 115927 - protein, 16 aa, Artificial Sequence
  Description of Artificial Sequence: Synthetic peptide
  Seed: PRMCSLMQGSTLPRRS
PRMYSLMQPSTNPRRS

SEQ ID NO: 115928 - protein, 16 aa, Artificial Sequence
  Description of Artificial Sequence: Synthetic peptide
  Seed: PRMCSLMQGSTLPRRS
PRMYSLMQPSTPPRRS

SEQ ID NO: 115929 - protein, 16 aa, Artificial Sequence
  Description of Artificial Sequence: Synthetic peptide
  Seed: PRMCSLMQGSTLPRRS
PRMYSLMQPSTQPRRS

SEQ ID NO: 115930 - protein, 16 aa, Artificial Sequence
  Description of Artificial Sequence: Synthetic peptide
  Seed: PRMCSLMQGSTLPRRS
PRMYSLMQPSTSPRRS

SEQ ID NO: 115931 - protein, 16 aa, Artificial Sequence
  Description of Artificial Sequence: Synthetic peptide
  Seed: PRMCSLMQGSTLPRRS
PRMYSLMQPSTTPRRS

SEQ ID NO: 115932 - protein, 16 aa, Artificial Sequence
  Description of Artificial Sequence: Synthetic peptide
  Seed: PRMCSLMQGSTLPRRS
PRMYSLMQPSTVPRRS

SEQ ID NO: 115933 - protein, 16 aa, Artificial Sequence
  Description of Artificial Sequence: Synthetic peptide
  Seed: PRMCSLMQGSTLPRRS
PRMYSLMQSSTAPRRS

SEQ ID NO: 115934 - protein, 16 aa, Artificial Sequence
  Description of Artificial Sequence: Synthetic peptide
  Seed: PRMCSLMQGSTLPRRS
PRMYSLMQSSTCPRRS

SEQ ID NO: 115935 - protein, 16 aa, Artificial Sequence
  Description of Artificial Sequence: Synthetic peptide
  Seed: PRMCSLMQGSTLPRRS
PRMYSLMQSSTFPRRS

SEQ ID NO: 115936 - protein, 16 aa, Artificial Sequence
  Description of Artificial Sequence: Synthetic peptide
  Seed: PRMCSLMQGSTLPRRS
PRMYSLMQSSTGPRRS

SEQ ID NO: 115937 - protein, 16 aa, Artificial Sequence
  Description of Artificial Sequence: Synthetic peptide
  Seed: PRMCSLMQGSTLPRRS
PRMYSLMQSSTHPRRS

SEQ ID NO: 115938 - protein, 16 aa, Artificial Sequence
  Description of Artificial Sequence: Synthetic peptide
  Seed: PRMCSLMQGSTLPRRS
PRMYSLMQSSTIPRRS

SEQ ID NO: 115939 - protein, 16 aa, Artificial Sequence
  Description of Artificial Sequence: Synthetic peptide
  Seed: PRMCSLMQGSTLPRRS
PRMYSLMQSSTLPRRS

SEQ ID NO: 115940 - protein, 16 aa, Artificial Sequence
  Description of Artificial Sequence: Synthetic peptide
  Seed: PRMCSLMQGSTLPRRS
PRMYSLMQSSTMPRRS

SEQ ID NO: 115941 - protein, 16 aa, Artificial Sequence
  Description of Artificial Sequence: Synthetic peptide
  Seed: PRMCSLMQGSTLPRRS
PRMYSLMQSSTNPRRS

SEQ ID NO: 115942 - protein, 16 aa, Artificial Sequence
  Description of Artificial Sequence: Synthetic peptide
  Seed: PRMCSLMQGSTLPRRS
PRMYSLMQSSTQPRRS

SEQ ID NO: 115943 - protein, 16 aa, Artificial Sequence
  Description of Artificial Sequence: Synthetic peptide
  Seed: PRMCSLMQGSTLPRRS
PRMYSLMQSSTSPRRS

SEQ ID NO: 115944 - protein, 16 aa, Artificial Sequence
  Description of Artificial Sequence: Synthetic peptide
  Seed: PRMCSLMQGSTLPRRS
PRMYSLMQSSTTPRRS

SEQ ID NO: 115945 - protein, 16 aa, Artificial Sequence
  Description of Artificial Sequence: Synthetic peptide
  Seed: PRMCSLMQGSTLPRRS
PRMYSLMQSSTVPRRS

SEQ ID NO: 115946 - protein, 16 aa, Artificial Sequence
  Description of Artificial Sequence: Synthetic peptide
  Seed: PRMCSLMQGSTLPRRS
PRMYSLMQTSTAPRRS

SEQ ID NO: 115947 - protein, 16 aa, Artificial Sequence
  Description of Artificial Sequence: Synthetic peptide
  Seed: PRMCSLMQGSTLPRRS
PRMYSLMQTSTIPRRS

SEQ ID NO: 115948 - protein, 16 aa, Artificial Sequence
  Description of Artificial Sequence: Synthetic peptide
  Seed: PRMCSLMQGSTLPRRS
PRMYSLMQTSTLPRRS

SEQ ID NO: 115949 - protein, 16 aa, Artificial Sequence
  Description of Artificial Sequence: Synthetic peptide
  Seed: PRMCSLMQGSTLPRRS
PRMYSLMQTSTMPRRS

SEQ ID NO: 115950 - protein, 16 aa, Artificial Sequence
  Description of Artificial Sequence: Synthetic peptide
  Seed: PRMCSLMQGSTLPRRS
PRMYSLMQTSTNPRRS

SEQ ID NO: 115951 - protein, 16 aa, Artificial Sequence
  Description of Artificial Sequence: Synthetic peptide
  Seed: PRMCSLMQGSTLPRRS
PRMYSLMQTSTSPRRS

SEQ ID NO: 115952 - protein, 16 aa, Artificial Sequence
  Description of Artificial Sequence: Synthetic peptide
  Seed: PRMCSLMQGSTLPRRS
PRMYSLMQTSTTPRRS

SEQ ID NO: 115953 - protein, 16 aa, Artificial Sequence
  Description of Artificial Sequence: Synthetic peptide
  Seed: PRMCSLMQGSTLPRRS
PRMYSLMQTSTVPRRS

SEQ ID NO: 115954 - protein, 16 aa, Artificial Sequence
  Description of Artificial Sequence: Synthetic peptide
  Seed: PRMCSLMQGSTLPRRS
PRMYSLMQVSTAPRRS

SEQ ID NO: 115955 - protein, 16 aa, Artificial Sequence
  Description of Artificial Sequence: Synthetic peptide
  Seed: PRMCSLMQGSTLPRRS
PRMYSLMQVSTGPRRS

SEQ ID NO: 115956 - protein, 16 aa, Artificial Sequence
  Description of Artificial Sequence: Synthetic peptide
  Seed: PRMCSLMQGSTLPRRS
PRMYSLMQVSTHPRRS

SEQ ID NO: 115957 - protein, 16 aa, Artificial Sequence
  Description of Artificial Sequence: Synthetic peptide
  Seed: PRMCSLMQGSTLPRRS
PRMYSLMQVSTIPRRS

SEQ ID NO: 115958 - protein, 16 aa, Artificial Sequence
  Description of Artificial Sequence: Synthetic peptide
  Seed: PRMCSLMQGSTLPRRS
PRMYSLMQVSTLPRRS

SEQ ID NO: 115959 - protein, 16 aa, Artificial Sequence
  Description of Artificial Sequence: Synthetic peptide
  Seed: PRMCSLMQGSTLPRRS
PRMYSLMQVSTMPRRS

SEQ ID NO: 115960 - protein, 16 aa, Artificial Sequence
  Description of Artificial Sequence: Synthetic peptide
  Seed: PRMCSLMQGSTLPRRS
PRMYSLMQVSTNPRRS

SEQ ID NO: 115961 - protein, 16 aa, Artificial Sequence
  Description of Artificial Sequence: Synthetic peptide
  Seed: PRMCSLMQGSTLPRRS
PRMYSLMQVSTPPRRS

SEQ ID NO: 115962 - protein, 16 aa, Artificial Sequence
  Description of Artificial Sequence: Synthetic peptide
  Seed: PRMCSLMQGSTLPRRS
PRMYSLMQVSTQPRRS

SEQ ID NO: 115963 - protein, 16 aa, Artificial Sequence
  Description of Artificial Sequence: Synthetic peptide
  Seed: PRMCSLMQGSTLPRRS
PRMYSLMQVSTSPRRS

SEQ ID NO: 115964 - protein, 16 aa, Artificial Sequence
  Description of Artificial Sequence: Synthetic peptide
  Seed: PRMCSLMQGSTLPRRS
PRMYSLMQVSTTPRRS

SEQ ID NO: 115965 - protein, 16 aa, Artificial Sequence
  Description of Artificial Sequence: Synthetic peptide
  Seed: PRMCSLMQGSTLPRRS
PRMYSLMQVSTVPRRS

SEQ ID NO: 115966 - protein, 16 aa, Artificial Sequence
  Description of Artificial Sequence: Synthetic peptide
  Seed: PRMCSLMQGSTLPRRS
PRMYSLNQASTIPRRS

SEQ ID NO: 115967 - protein, 16 aa, Artificial Sequence
  Description of Artificial Sequence: Synthetic peptide
  Seed: PRMCSLMQGSTLPRRS
PRMYSLNQASTLPRRS

SEQ ID NO: 115968 - protein, 16 aa, Artificial Sequence
  Description of Artificial Sequence: Synthetic peptide
  Seed: PRMCSLMQGSTLPRRS
PRMYSLNQASTVPRRS

SEQ ID NO: 115969 - protein, 16 aa, Artificial Sequence
  Description of Artificial Sequence: Synthetic peptide
  Seed: PRMCSLMQGSTLPRRS
PRMYSLQQASTAPRRS

SEQ ID NO: 115970 - protein, 16 aa, Artificial Sequence
  Description of Artificial Sequence: Synthetic peptide
  Seed: PRMCSLMQGSTLPRRS
PRMYSLQQASTIPRRS

SEQ ID NO: 115971 - protein, 16 aa, Artificial Sequence
  Description of Artificial Sequence: Synthetic peptide
  Seed: PRMCSLMQGSTLPRRS
PRMYSLQQASTLPRRS

SEQ ID NO: 115972 - protein, 16 aa, Artificial Sequence
  Description of Artificial Sequence: Synthetic peptide
  Seed: PRMCSLMQGSTLPRRS
PRMYSLQQASTMPRRS

SEQ ID NO: 115973 - protein, 16 aa, Artificial Sequence
  Description of Artificial Sequence: Synthetic peptide
  Seed: PRMCSLMQGSTLPRRS
PRMYSLQQASTTPRRS

SEQ ID NO: 115974 - protein, 16 aa, Artificial Sequence
  Description of Artificial Sequence: Synthetic peptide
  Seed: PRMCSLMQGSTLPRRS
PRMYSLQQASTVPRRS

SEQ ID NO: 115975 - protein, 16 aa, Artificial Sequence
  Description of Artificial Sequence: Synthetic peptide
  Seed: PRMCSLMQGSTLPRRS
PRMYSLQQGSTAPRRS

SEQ ID NO: 115976 - protein, 16 aa, Artificial Sequence
  Description of Artificial Sequence: Synthetic peptide
  Seed: PRMCSLMQGSTLPRRS
PRMYSLQQGSTIPRRS

SEQ ID NO: 115977 - protein, 16 aa, Artificial Sequence
  Description of Artificial Sequence: Synthetic peptide
  Seed: PRMCSLMQGSTLPRRS
PRMYSLQQGSTLPRRS

SEQ ID NO: 115978 - protein, 16 aa, Artificial Sequence
  Description of Artificial Sequence: Synthetic peptide
  Seed: PRMCSLMQGSTLPRRS
PRMYSLQQGSTMPRRS

SEQ ID NO: 115979 - protein, 16 aa, Artificial Sequence
  Description of Artificial Sequence: Synthetic peptide
  Seed: PRMCSLMQGSTLPRRS
PRMYSLQQGSTVPRRS

SEQ ID NO: 115980 - protein, 16 aa, Artificial Sequence
  Description of Artificial Sequence: Synthetic peptide
  Seed: PRMCSLMQGSTLPRRS
PRMYSLQQNSTLPRRS

SEQ ID NO: 115981 - protein, 16 aa, Artificial Sequence
  Description of Artificial Sequence: Synthetic peptide
  Seed: PRMCSLMQGSTLPRRS
PRMYSLQQNSTVPRRS

SEQ ID NO: 115982 - protein, 16 aa, Artificial Sequence
  Description of Artificial Sequence: Synthetic peptide
  Seed: PRMCSLMQGSTLPRRS
PRMYSLQQPSTIPRRS

SEQ ID NO: 115983 - protein, 16 aa, Artificial Sequence
  Description of Artificial Sequence: Synthetic peptide
  Seed: PRMCSLMQGSTLPRRS
PRMYSLQQPSTLPRRS

SEQ ID NO: 115984 - protein, 16 aa, Artificial Sequence
  Description of Artificial Sequence: Synthetic peptide
  Seed: PRMCSLMQGSTLPRRS
PRMYSLQQPSTVPRRS

SEQ ID NO: 115985 - protein, 16 aa, Artificial Sequence
  Description of Artificial Sequence: Synthetic peptide
  Seed: PRMCSLMQGSTLPRRS
PRMYSLQQSSTAPRRS

SEQ ID NO: 115986 - protein, 16 aa, Artificial Sequence
  Description of Artificial Sequence: Synthetic peptide
  Seed: PRMCSLMQGSTLPRRS
PRMYSLQQSSTIPRRS

SEQ ID NO: 115987 - protein, 16 aa, Artificial Sequence
  Description of Artificial Sequence: Synthetic peptide
  Seed: PRMCSLMQGSTLPRRS
PRMYSLQQSSTLPRRS

SEQ ID NO: 115988 - protein, 16 aa, Artificial Sequence
  Description of Artificial Sequence: Synthetic peptide
  Seed: PRMCSLMQGSTLPRRS
PRMYSLQQSSTMPRRS

SEQ ID NO: 115989 - protein, 16 aa, Artificial Sequence
  Description of Artificial Sequence: Synthetic peptide
  Seed: PRMCSLMQGSTLPRRS
PRMYSLQQSSTVPRRS

SEQ ID NO: 115990 - protein, 16 aa, Artificial Sequence
  Description of Artificial Sequence: Synthetic peptide
  Seed: PRMCSLMQGSTLPRRS
PRMYSLQQTSTLPRRS

SEQ ID NO: 115991 - protein, 16 aa, Artificial Sequence
  Description of Artificial Sequence: Synthetic peptide
  Seed: PRMCSLMQGSTLPRRS
PRMYSLQQTSTVPRRS

SEQ ID NO: 115992 - protein, 16 aa, Artificial Sequence
  Description of Artificial Sequence: Synthetic peptide
  Seed: PRMCSLMQGSTLPRRS
PRMYSLQQVSTAPRRS

SEQ ID NO: 115993 - protein, 16 aa, Artificial Sequence
  Description of Artificial Sequence: Synthetic peptide
  Seed: PRMCSLMQGSTLPRRS
PRMYSLSQASTAPRRS

SEQ ID NO: 115994 - protein, 16 aa, Artificial Sequence
  Description of Artificial Sequence: Synthetic peptide
  Seed: PRMCSLMQGSTLPRRS
PRMYSLSQASTIPRRS

SEQ ID NO: 115995 - protein, 16 aa, Artificial Sequence
  Description of Artificial Sequence: Synthetic peptide
  Seed: PRMCSLMQGSTLPRRS
PRMYSLSQASTLPRRS

SEQ ID NO: 115996 - protein, 16 aa, Artificial Sequence
  Description of Artificial Sequence: Synthetic peptide
  Seed: PRMCSLMQGSTLPRRS
PRMYSLSQASTMPRRS

SEQ ID NO: 115997 - protein, 16 aa, Artificial Sequence
  Description of Artificial Sequence: Synthetic peptide
  Seed: PRMCSLMQGSTLPRRS
PRMYSLSQASTVPRRS

SEQ ID NO: 115998 - protein, 16 aa, Artificial Sequence
  Description of Artificial Sequence: Synthetic peptide
  Seed: PRMCSLMQGSTLPRRS
PRMYSLSQGSTIPRRS

SEQ ID NO: 115999 - protein, 16 aa, Artificial Sequence
  Description of Artificial Sequence: Synthetic peptide
  Seed: PRMCSLMQGSTLPRRS
PRMYSLSQGSTLPRRS

SEQ ID NO: 116000 - protein, 16 aa, Artificial Sequence
  Description of Artificial Sequence: Synthetic peptide
  Seed: PRMCSLMQGSTLPRRS
PRMYSLSQGSTVPRRS

SEQ ID NO: 116001 - protein, 16 aa, Artificial Sequence
  Description of Artificial Sequence: Synthetic peptide
  Seed: PRMCSLMQGSTLPRRS
PRMYSLSQSSTIPRRS

SEQ ID NO: 116002 - protein, 16 aa, Artificial Sequence
  Description of Artificial Sequence: Synthetic peptide
  Seed: PRMCSLMQGSTLPRRS
PRMYSLSQSSTLPRRS

SEQ ID NO: 116003 - protein, 16 aa, Artificial Sequence
  Description of Artificial Sequence: Synthetic peptide
  Seed: PRMCSLMQGSTLPRRS
PRMYSLSQSSTVPRRS

SEQ ID NO: 116004 - protein, 16 aa, Artificial Sequence
  Description of Artificial Sequence: Synthetic peptide
  Seed: PRMCSLMQGSTLPRRS
PRMYSLTQASTIPRRS

SEQ ID NO: 116005 - protein, 16 aa, Artificial Sequence
  Description of Artificial Sequence: Synthetic peptide
  Seed: PRMCSLMQGSTLPRRS
PRMYSLTQASTLPRRS

SEQ ID NO: 116006 - protein, 16 aa, Artificial Sequence
  Description of Artificial Sequence: Synthetic peptide
  Seed: PRMCSLMQGSTLPRRS
PRMYSLTQASTVPRRS

SEQ ID NO: 116007 - protein, 16 aa, Artificial Sequence
  Description of Artificial Sequence: Synthetic peptide
  Seed: PRMCSLMQGSTLPRRS
PRMYSLVQASTAPRRS

SEQ ID NO: 116008 - protein, 16 aa, Artificial Sequence
  Description of Artificial Sequence: Synthetic peptide
  Seed: PRMCSLMQGSTLPRRS
PRMYSLVQASTIPRRS

SEQ ID NO: 116009 - protein, 16 aa, Artificial Sequence
  Description of Artificial Sequence: Synthetic peptide
  Seed: PRMCSLMQGSTLPRRS
PRMYSLVQASTLPRRS

SEQ ID NO: 116010 - protein, 16 aa, Artificial Sequence
  Description of Artificial Sequence: Synthetic peptide
  Seed: PRMCSLMQGSTLPRRS
PRMYSLVQASTMPRRS

SEQ ID NO: 116011 - protein, 16 aa, Artificial Sequence
  Description of Artificial Sequence: Synthetic peptide
  Seed: PRMCSLMQGSTLPRRS
PRMYSLVQASTNPRRS

SEQ ID NO: 116012 - protein, 16 aa, Artificial Sequence
  Description of Artificial Sequence: Synthetic peptide
  Seed: PRMCSLMQGSTLPRRS
PRMYSLVQASTSPRRS

SEQ ID NO: 116013 - protein, 16 aa, Artificial Sequence
  Description of Artificial Sequence: Synthetic peptide
  Seed: PRMCSLMQGSTLPRRS
PRMYSLVQASTTPRRS

SEQ ID NO: 116014 - protein, 16 aa, Artificial Sequence
  Description of Artificial Sequence: Synthetic peptide
  Seed: PRMCSLMQGSTLPRRS
PRMYSLVQASTVPRRS

SEQ ID NO: 116015 - protein, 16 aa, Artificial Sequence
  Description of Artificial Sequence: Synthetic peptide
  Seed: PRMCSLMQGSTLPRRS
PRMYSLVQGSTAPRRS

SEQ ID NO: 116016 - protein, 16 aa, Artificial Sequence
  Description of Artificial Sequence: Synthetic peptide
  Seed: PRMCSLMQGSTLPRRS
PRMYSLVQGSTIPRRS

SEQ ID NO: 116017 - protein, 16 aa, Artificial Sequence
  Description of Artificial Sequence: Synthetic peptide
  Seed: PRMCSLMQGSTLPRRS
PRMYSLVQGSTLPRRS

SEQ ID NO: 116018 - protein, 16 aa, Artificial Sequence
  Description of Artificial Sequence: Synthetic peptide
  Seed: PRMCSLMQGSTLPRRS
PRMYSLVQGSTMPRRS

SEQ ID NO: 116019 - protein, 16 aa, Artificial Sequence
  Description of Artificial Sequence: Synthetic peptide
  Seed: PRMCSLMQGSTLPRRS
PRMYSLVQGSTTPRRS

SEQ ID NO: 116020 - protein, 16 aa, Artificial Sequence
  Description of Artificial Sequence: Synthetic peptide
  Seed: PRMCSLMQGSTLPRRS
PRMYSLVQGSTVPRRS

SEQ ID NO: 116021 - protein, 16 aa, Artificial Sequence
  Description of Artificial Sequence: Synthetic peptide
  Seed: PRMCSLMQGSTLPRRS
PRMYSLVQISTAPRRS

SEQ ID NO: 116022 - protein, 16 aa, Artificial Sequence
  Description of Artificial Sequence: Synthetic peptide
  Seed: PRMCSLMQGSTLPRRS
PRMYSLVQISTSPRRS

SEQ ID NO: 116023 - protein, 16 aa, Artificial Sequence
  Description of Artificial Sequence: Synthetic peptide
  Seed: PRMCSLMQGSTLPRRS
PRMYSLVQNSTLPRRS

SEQ ID NO: 116024 - protein, 16 aa, Artificial Sequence
  Description of Artificial Sequence: Synthetic peptide
  Seed: PRMCSLMQGSTLPRRS
PRMYSLVQNSTVPRRS

SEQ ID NO: 116025 - protein, 16 aa, Artificial Sequence
  Description of Artificial Sequence: Synthetic peptide
  Seed: PRMCSLMQGSTLPRRS
PRMYSLVQPSTAPRRS

SEQ ID NO: 116026 - protein, 16 aa, Artificial Sequence
  Description of Artificial Sequence: Synthetic peptide
  Seed: PRMCSLMQGSTLPRRS
PRMYSLVQPSTIPRRS

SEQ ID NO: 116027 - protein, 16 aa, Artificial Sequence
  Description of Artificial Sequence: Synthetic peptide
  Seed: PRMCSLMQGSTLPRRS
PRMYSLVQPSTLPRRS

SEQ ID NO: 116028 - protein, 16 aa, Artificial Sequence
  Description of Artificial Sequence: Synthetic peptide
  Seed: PRMCSLMQGSTLPRRS
PRMYSLVQPSTNPRRS

SEQ ID NO: 116029 - protein, 16 aa, Artificial Sequence
  Description of Artificial Sequence: Synthetic peptide
  Seed: PRMCSLMQGSTLPRRS
PRMYSLVQPSTSPRRS

SEQ ID NO: 116030 - protein, 16 aa, Artificial Sequence
  Description of Artificial Sequence: Synthetic peptide
  Seed: PRMCSLMQGSTLPRRS
PRMYSLVQPSTTPRRS

SEQ ID NO: 116031 - protein, 16 aa, Artificial Sequence
  Description of Artificial Sequence: Synthetic peptide
  Seed: PRMCSLMQGSTLPRRS
PRMYSLVQPSTVPRRS

SEQ ID NO: 116032 - protein, 16 aa, Artificial Sequence
  Description of Artificial Sequence: Synthetic peptide
  Seed: PRMCSLMQGSTLPRRS
PRMYSLVQSSTAPRRS

SEQ ID NO: 116033 - protein, 16 aa, Artificial Sequence
  Description of Artificial Sequence: Synthetic peptide
  Seed: PRMCSLMQGSTLPRRS
PRMYSLVQSSTIPRRS

SEQ ID NO: 116034 - protein, 16 aa, Artificial Sequence
  Description of Artificial Sequence: Synthetic peptide
  Seed: PRMCSLMQGSTLPRRS
PRMYSLVQSSTLPRRS

SEQ ID NO: 116035 - protein, 16 aa, Artificial Sequence
  Description of Artificial Sequence: Synthetic peptide
  Seed: PRMCSLMQGSTLPRRS
PRMYSLVQSSTMPRRS

SEQ ID NO: 116036 - protein, 16 aa, Artificial Sequence
  Description of Artificial Sequence: Synthetic peptide
  Seed: PRMCSLMQGSTLPRRS
PRMYSLVQSSTNPRRS

SEQ ID NO: 116037 - protein, 16 aa, Artificial Sequence
  Description of Artificial Sequence: Synthetic peptide
  Seed: PRMCSLMQGSTLPRRS
PRMYSLVQSSTSPRRS

SEQ ID NO: 116038 - protein, 16 aa, Artificial Sequence
  Description of Artificial Sequence: Synthetic peptide
  Seed: PRMCSLMQGSTLPRRS
PRMYSLVQSSTTPRRS

SEQ ID NO: 116039 - protein, 16 aa, Artificial Sequence
  Description of Artificial Sequence: Synthetic peptide
  Seed: PRMCSLMQGSTLPRRS
PRMYSLVQSSTVPRRS

SEQ ID NO: 116040 - protein, 16 aa, Artificial Sequence
  Description of Artificial Sequence: Synthetic peptide
  Seed: PRMCSLMQGSTLPRRS
PRMYSLVQTSTAPRRS

SEQ ID NO: 116041 - protein, 16 aa, Artificial Sequence
  Description of Artificial Sequence: Synthetic peptide
  Seed: PRMCSLMQGSTLPRRS
PRMYSLVQTSTIPRRS

SEQ ID NO: 116042 - protein, 16 aa, Artificial Sequence
  Description of Artificial Sequence: Synthetic peptide
  Seed: PRMCSLMQGSTLPRRS
PRMYSLVQTSTLPRRS

SEQ ID NO: 116043 - protein, 16 aa, Artificial Sequence
  Description of Artificial Sequence: Synthetic peptide
  Seed: PRMCSLMQGSTLPRRS
PRMYSLVQTSTSPRRS

SEQ ID NO: 116044 - protein, 16 aa, Artificial Sequence
  Description of Artificial Sequence: Synthetic peptide
  Seed: PRMCSLMQGSTLPRRS
PRMYSLVQTSTVPRRS

SEQ ID NO: 116045 - protein, 16 aa, Artificial Sequence
  Description of Artificial Sequence: Synthetic peptide
  Seed: PRMCSLMQGSTLPRRS
PRMYSLVQVSTAPRRS

SEQ ID NO: 116046 - protein, 16 aa, Artificial Sequence
  Description of Artificial Sequence: Synthetic peptide
  Seed: PRMCSLMQGSTLPRRS
PRMYSLVQVSTNPRRS

SEQ ID NO: 116047 - protein, 16 aa, Artificial Sequence
  Description of Artificial Sequence: Synthetic peptide
  Seed: PRMCSLMQGSTLPRRS
PRMYSLVQVSTSPRRS

SEQ ID NO: 116048 - protein, 16 aa, Artificial Sequence
  Description of Artificial Sequence: Synthetic peptide
  Seed: PRMCSLMQGSTLPRRS
PRMYSLVQVSTTPRRS

SEQ ID NO: 116049 - protein, 16 aa, Artificial Sequence
  Description of Artificial Sequence: Synthetic peptide
  Seed: PRMCSLMQGSTLPRRS
PRMYSLVQVSTVPRRS

SEQ ID NO: 116050 - protein, 17 aa, Artificial Sequence
  Description of Artificial Sequence: Synthetic peptide
  Seed: PRMCSLMQGSTLPRRSG
PRMFSLAQASTAPRRSG

SEQ ID NO: 116051 - protein, 17 aa, Artificial Sequence
  Description of Artificial Sequence: Synthetic peptide
  Seed: PRMCSLMQGSTLPRRSG
PRMFSLAQASTCPRRSG

SEQ ID NO: 116052 - protein, 17 aa, Artificial Sequence
  Description of Artificial Sequence: Synthetic peptide
  Seed: PRMCSLMQGSTLPRRSG
PRMFSLAQASTFPRRSG

SEQ ID NO: 116053 - protein, 17 aa, Artificial Sequence
  Description of Artificial Sequence: Synthetic peptide
  Seed: PRMCSLMQGSTLPRRSG
PRMFSLAQASTGPRRSG

SEQ ID NO: 116054 - protein, 17 aa, Artificial Sequence
  Description of Artificial Sequence: Synthetic peptide
  Seed: PRMCSLMQGSTLPRRSG
PRMFSLAQASTHPRRSG

SEQ ID NO: 116055 - protein, 17 aa, Artificial Sequence
  Description of Artificial Sequence: Synthetic peptide
  Seed: PRMCSLMQGSTLPRRSG
PRMFSLAQASTIPRRSG

SEQ ID NO: 116056 - protein, 17 aa, Artificial Sequence
  Description of Artificial Sequence: Synthetic peptide
  Seed: PRMCSLMQGSTLPRRSG
PRMFSLAQASTLPRRSG

SEQ ID NO: 116057 - protein, 17 aa, Artificial Sequence
  Description of Artificial Sequence: Synthetic peptide
  Seed: PRMCSLMQGSTLPRRSG
PRMFSLAQASTMPRRSG

SEQ ID NO: 116058 - protein, 17 aa, Artificial Sequence
  Description of Artificial Sequence: Synthetic peptide
  Seed: PRMCSLMQGSTLPRRSG
PRMFSLAQASTNPRRSG

SEQ ID NO: 116059 - protein, 17 aa, Artificial Sequence
  Description of Artificial Sequence: Synthetic peptide
  Seed: PRMCSLMQGSTLPRRSG
PRMFSLAQASTPPRRSG

SEQ ID NO: 116060 - protein, 17 aa, Artificial Sequence
  Description of Artificial Sequence: Synthetic peptide
  Seed: PRMCSLMQGSTLPRRSG
PRMFSLAQASTQPRRSG

SEQ ID NO: 116061 - protein, 17 aa, Artificial Sequence
  Description of Artificial Sequence: Synthetic peptide
  Seed: PRMCSLMQGSTLPRRSG
PRMFSLAQASTSPRRSG

SEQ ID NO: 116062 - protein, 17 aa, Artificial Sequence
  Description of Artificial Sequence: Synthetic peptide
  Seed: PRMCSLMQGSTLPRRSG
PRMFSLAQASTTPRRSG

SEQ ID NO: 116063 - protein, 17 aa, Artificial Sequence
  Description of Artificial Sequence: Synthetic peptide
  Seed: PRMCSLMQGSTLPRRSG
PRMFSLAQASTVPRRSG

SEQ ID NO: 116064 - protein, 17 aa, Artificial Sequence
  Description of Artificial Sequence: Synthetic peptide
  Seed: PRMCSLMQGSTLPRRSG
PRMFSLAQASTYPRRSG

SEQ ID NO: 116065 - protein, 17 aa, Artificial Sequence
  Description of Artificial Sequence: Synthetic peptide
  Seed: PRMCSLMQGSTLPRRSG
PRMFSLAQGSTAPRRSG

SEQ ID NO: 116066 - protein, 17 aa, Artificial Sequence
  Description of Artificial Sequence: Synthetic peptide
  Seed: PRMCSLMQGSTLPRRSG
PRMFSLAQGSTGPRRSG

SEQ ID NO: 116067 - protein, 17 aa, Artificial Sequence
  Description of Artificial Sequence: Synthetic peptide
  Seed: PRMCSLMQGSTLPRRSG
PRMFSLAQGSTIPRRSG

SEQ ID NO: 116068 - protein, 17 aa, Artificial Sequence
  Description of Artificial Sequence: Synthetic peptide
  Seed: PRMCSLMQGSTLPRRSG
PRMFSLAQGSTLPRRSG

SEQ ID NO: 116069 - protein, 17 aa, Artificial Sequence
  Description of Artificial Sequence: Synthetic peptide
  Seed: PRMCSLMQGSTLPRRSG
PRMFSLAQGSTMPRRSG

SEQ ID NO: 116070 - protein, 17 aa, Artificial Sequence
  Description of Artificial Sequence: Synthetic peptide
  Seed: PRMCSLMQGSTLPRRSG
PRMFSLAQGSTNPRRSG

SEQ ID NO: 116071 - protein, 17 aa, Artificial Sequence
  Description of Artificial Sequence: Synthetic peptide
  Seed: PRMCSLMQGSTLPRRSG
PRMFSLAQGSTSPRRSG

SEQ ID NO: 116072 - protein, 17 aa, Artificial Sequence
  Description of Artificial Sequence: Synthetic peptide
  Seed: PRMCSLMQGSTLPRRSG
PRMFSLAQGSTTPRRSG

SEQ ID NO: 116073 - protein, 17 aa, Artificial Sequence
  Description of Artificial Sequence: Synthetic peptide
  Seed: PRMCSLMQGSTLPRRSG
PRMFSLAQGSTVPRRSG

SEQ ID NO: 116074 - protein, 17 aa, Artificial Sequence
  Description of Artificial Sequence: Synthetic peptide
  Seed: PRMCSLMQGSTLPRRSG
PRMFSLAQISTAPRRSG

SEQ ID NO: 116075 - protein, 17 aa, Artificial Sequence
  Description of Artificial Sequence: Synthetic peptide
  Seed: PRMCSLMQGSTLPRRSG
PRMFSLAQISTGPRRSG

SEQ ID NO: 116076 - protein, 17 aa, Artificial Sequence
  Description of Artificial Sequence: Synthetic peptide
  Seed: PRMCSLMQGSTLPRRSG
PRMFSLAQISTHPRRSG

SEQ ID NO: 116077 - protein, 17 aa, Artificial Sequence
  Description of Artificial Sequence: Synthetic peptide
  Seed: PRMCSLMQGSTLPRRSG
PRMFSLAQISTIPRRSG

SEQ ID NO: 116078 - protein, 17 aa, Artificial Sequence
  Description of Artificial Sequence: Synthetic peptide
  Seed: PRMCSLMQGSTLPRRSG
PRMFSLAQISTLPRRSG

SEQ ID NO: 116079 - protein, 17 aa, Artificial Sequence
  Description of Artificial Sequence: Synthetic peptide
  Seed: PRMCSLMQGSTLPRRSG
PRMFSLAQISTMPRRSG

SEQ ID NO: 116080 - protein, 17 aa, Artificial Sequence
  Description of Artificial Sequence: Synthetic peptide
  Seed: PRMCSLMQGSTLPRRSG
PRMFSLAQISTNPRRSG

SEQ ID NO: 116081 - protein, 17 aa, Artificial Sequence
  Description of Artificial Sequence: Synthetic peptide
  Seed: PRMCSLMQGSTLPRRSG
PRMFSLAQISTQPRRSG

SEQ ID NO: 116082 - protein, 17 aa, Artificial Sequence
  Description of Artificial Sequence: Synthetic peptide
  Seed: PRMCSLMQGSTLPRRSG
PRMFSLAQISTSPRRSG

SEQ ID NO: 116083 - protein, 17 aa, Artificial Sequence
  Description of Artificial Sequence: Synthetic peptide
  Seed: PRMCSLMQGSTLPRRSG
PRMFSLAQISTTPRRSG

SEQ ID NO: 116084 - protein, 17 aa, Artificial Sequence
  Description of Artificial Sequence: Synthetic peptide
  Seed: PRMCSLMQGSTLPRRSG
PRMFSLAQISTVPRRSG

SEQ ID NO: 116085 - protein, 17 aa, Artificial Sequence
  Description of Artificial Sequence: Synthetic peptide
  Seed: PRMCSLMQGSTLPRRSG
PRMFSLAQLSTAPRRSG

SEQ ID NO: 116086 - protein, 17 aa, Artificial Sequence
  Description of Artificial Sequence: Synthetic peptide
  Seed: PRMCSLMQGSTLPRRSG
PRMFSLAQLSTNPRRSG

SEQ ID NO: 116087 - protein, 17 aa, Artificial Sequence
  Description of Artificial Sequence: Synthetic peptide
  Seed: PRMCSLMQGSTLPRRSG
PRMFSLAQLSTSPRRSG

SEQ ID NO: 116088 - protein, 17 aa, Artificial Sequence
  Description of Artificial Sequence: Synthetic peptide
  Seed: PRMCSLMQGSTLPRRSG
PRMFSLAQLSTVPRRSG

SEQ ID NO: 116089 - protein, 17 aa, Artificial Sequence
  Description of Artificial Sequence: Synthetic peptide
  Seed: PRMCSLMQGSTLPRRSG
PRMFSLAQMSTAPRRSG

SEQ ID NO: 116090 - protein, 17 aa, Artificial Sequence
  Description of Artificial Sequence: Synthetic peptide
  Seed: PRMCSLMQGSTLPRRSG
PRMFSLAQMSTNPRRSG

SEQ ID NO: 116091 - protein, 17 aa, Artificial Sequence
  Description of Artificial Sequence: Synthetic peptide
  Seed: PRMCSLMQGSTLPRRSG
PRMFSLAQMSTSPRRSG

SEQ ID NO: 116092 - protein, 17 aa, Artificial Sequence
  Description of Artificial Sequence: Synthetic peptide
  Seed: PRMCSLMQGSTLPRRSG
PRMFSLAQNSTAPRRSG

SEQ ID NO: 116093 - protein, 17 aa, Artificial Sequence
  Description of Artificial Sequence: Synthetic peptide
  Seed: PRMCSLMQGSTLPRRSG
PRMFSLAQNSTIPRRSG

SEQ ID NO: 116094 - protein, 17 aa, Artificial Sequence
  Description of Artificial Sequence: Synthetic peptide
  Seed: PRMCSLMQGSTLPRRSG
PRMFSLAQNSTLPRRSG

SEQ ID NO: 116095 - protein, 17 aa, Artificial Sequence
  Description of Artificial Sequence: Synthetic peptide
  Seed: PRMCSLMQGSTLPRRSG
PRMFSLAQNSTMPRRSG

SEQ ID NO: 116096 - protein, 17 aa, Artificial Sequence
  Description of Artificial Sequence: Synthetic peptide
  Seed: PRMCSLMQGSTLPRRSG
PRMFSLAQNSTNPRRSG

SEQ ID NO: 116097 - protein, 17 aa, Artificial Sequence
  Description of Artificial Sequence: Synthetic peptide
  Seed: PRMCSLMQGSTLPRRSG
PRMFSLAQNSTSPRRSG

SEQ ID NO: 116098 - protein, 17 aa, Artificial Sequence
  Description of Artificial Sequence: Synthetic peptide
  Seed: PRMCSLMQGSTLPRRSG
PRMFSLAQNSTVPRRSG

SEQ ID NO: 116099 - protein, 17 aa, Artificial Sequence
  Description of Artificial Sequence: Synthetic peptide
  Seed: PRMCSLMQGSTLPRRSG
PRMFSLAQPSTAPRRSG

SEQ ID NO: 116100 - protein, 17 aa, Artificial Sequence
  Description of Artificial Sequence: Synthetic peptide
  Seed: PRMCSLMQGSTLPRRSG
PRMFSLAQPSTGPRRSG

SEQ ID NO: 116101 - protein, 17 aa, Artificial Sequence
  Description of Artificial Sequence: Synthetic peptide
  Seed: PRMCSLMQGSTLPRRSG
PRMFSLAQPSTHPRRSG

SEQ ID NO: 116102 - protein, 17 aa, Artificial Sequence
  Description of Artificial Sequence: Synthetic peptide
  Seed: PRMCSLMQGSTLPRRSG
PRMFSLAQPSTIPRRSG

SEQ ID NO: 116103 - protein, 17 aa, Artificial Sequence
  Description of Artificial Sequence: Synthetic peptide
  Seed: PRMCSLMQGSTLPRRSG
PRMFSLAQPSTLPRRSG

SEQ ID NO: 116104 - protein, 17 aa, Artificial Sequence
  Description of Artificial Sequence: Synthetic peptide
  Seed: PRMCSLMQGSTLPRRSG
PRMFSLAQPSTMPRRSG

SEQ ID NO: 116105 - protein, 17 aa, Artificial Sequence
  Description of Artificial Sequence: Synthetic peptide
  Seed: PRMCSLMQGSTLPRRSG
PRMFSLAQPSTNPRRSG

SEQ ID NO: 116106 - protein, 17 aa, Artificial Sequence
  Description of Artificial Sequence: Synthetic peptide
  Seed: PRMCSLMQGSTLPRRSG
PRMFSLAQPSTQPRRSG

SEQ ID NO: 116107 - protein, 17 aa, Artificial Sequence
  Description of Artificial Sequence: Synthetic peptide
  Seed: PRMCSLMQGSTLPRRSG
PRMFSLAQPSTSPRRSG

SEQ ID NO: 116108 - protein, 17 aa, Artificial Sequence
  Description of Artificial Sequence: Synthetic peptide
  Seed: PRMCSLMQGSTLPRRSG
PRMFSLAQPSTTPRRSG

SEQ ID NO: 116109 - protein, 17 aa, Artificial Sequence
  Description of Artificial Sequence: Synthetic peptide
  Seed: PRMCSLMQGSTLPRRSG
PRMFSLAQPSTVPRRSG

SEQ ID NO: 116110 - protein, 17 aa, Artificial Sequence
  Description of Artificial Sequence: Synthetic peptide
  Seed: PRMCSLMQGSTLPRRSG
PRMFSLAQSSTAPRRSG

SEQ ID NO: 116111 - protein, 17 aa, Artificial Sequence
  Description of Artificial Sequence: Synthetic peptide
  Seed: PRMCSLMQGSTLPRRSG
PRMFSLAQSSTGPRRSG

SEQ ID NO: 116112 - protein, 17 aa, Artificial Sequence
  Description of Artificial Sequence: Synthetic peptide
  Seed: PRMCSLMQGSTLPRRSG
PRMFSLAQSSTHPRRSG

SEQ ID NO: 116113 - protein, 17 aa, Artificial Sequence
  Description of Artificial Sequence: Synthetic peptide
  Seed: PRMCSLMQGSTLPRRSG
PRMFSLAQSSTIPRRSG

SEQ ID NO: 116114 - protein, 17 aa, Artificial Sequence
  Description of Artificial Sequence: Synthetic peptide
  Seed: PRMCSLMQGSTLPRRSG
PRMFSLAQSSTLPRRSG

SEQ ID NO: 116115 - protein, 17 aa, Artificial Sequence
  Description of Artificial Sequence: Synthetic peptide
  Seed: PRMCSLMQGSTLPRRSG
PRMFSLAQSSTMPRRSG

SEQ ID NO: 116116 - protein, 17 aa, Artificial Sequence
  Description of Artificial Sequence: Synthetic peptide
  Seed: PRMCSLMQGSTLPRRSG
PRMFSLAQSSTNPRRSG

SEQ ID NO: 116117 - protein, 17 aa, Artificial Sequence
  Description of Artificial Sequence: Synthetic peptide
  Seed: PRMCSLMQGSTLPRRSG
PRMFSLAQSSTQPRRSG

SEQ ID NO: 116118 - protein, 17 aa, Artificial Sequence
  Description of Artificial Sequence: Synthetic peptide
  Seed: PRMCSLMQGSTLPRRSG
PRMFSLAQSSTSPRRSG

SEQ ID NO: 116119 - protein, 17 aa, Artificial Sequence
  Description of Artificial Sequence: Synthetic peptide
  Seed: PRMCSLMQGSTLPRRSG
PRMFSLAQSSTTPRRSG

SEQ ID NO: 116120 - protein, 17 aa, Artificial Sequence
  Description of Artificial Sequence: Synthetic peptide
  Seed: PRMCSLMQGSTLPRRSG
PRMFSLAQSSTVPRRSG

SEQ ID NO: 116121 - protein, 17 aa, Artificial Sequence
  Description of Artificial Sequence: Synthetic peptide
  Seed: PRMCSLMQGSTLPRRSG
PRMFSLAQTSTAPRRSG

SEQ ID NO: 116122 - protein, 17 aa, Artificial Sequence
  Description of Artificial Sequence: Synthetic peptide
  Seed: PRMCSLMQGSTLPRRSG
PRMFSLAQTSTHPRRSG

SEQ ID NO: 116123 - protein, 17 aa, Artificial Sequence
  Description of Artificial Sequence: Synthetic peptide
  Seed: PRMCSLMQGSTLPRRSG
PRMFSLAQTSTIPRRSG

SEQ ID NO: 116124 - protein, 17 aa, Artificial Sequence
  Description of Artificial Sequence: Synthetic peptide
  Seed: PRMCSLMQGSTLPRRSG
PRMFSLAQTSTLPRRSG

SEQ ID NO: 116125 - protein, 17 aa, Artificial Sequence
  Description of Artificial Sequence: Synthetic peptide
  Seed: PRMCSLMQGSTLPRRSG
PRMFSLAQTSTMPRRSG

SEQ ID NO: 116126 - protein, 17 aa, Artificial Sequence
  Description of Artificial Sequence: Synthetic peptide
  Seed: PRMCSLMQGSTLPRRSG
PRMFSLAQTSTNPRRSG

SEQ ID NO: 116127 - protein, 17 aa, Artificial Sequence
  Description of Artificial Sequence: Synthetic peptide
  Seed: PRMCSLMQGSTLPRRSG
PRMFSLAQTSTSPRRSG

SEQ ID NO: 116128 - protein, 17 aa, Artificial Sequence
  Description of Artificial Sequence: Synthetic peptide
  Seed: PRMCSLMQGSTLPRRSG
PRMFSLAQTSTTPRRSG

SEQ ID NO: 116129 - protein, 17 aa, Artificial Sequence
  Description of Artificial Sequence: Synthetic peptide
  Seed: PRMCSLMQGSTLPRRSG
PRMFSLAQTSTVPRRSG

SEQ ID NO: 116130 - protein, 17 aa, Artificial Sequence
  Description of Artificial Sequence: Synthetic peptide
  Seed: PRMCSLMQGSTLPRRSG
PRMFSLAQVSTAPRRSG

SEQ ID NO: 116131 - protein, 17 aa, Artificial Sequence
  Description of Artificial Sequence: Synthetic peptide
  Seed: PRMCSLMQGSTLPRRSG
PRMFSLAQVSTGPRRSG

SEQ ID NO: 116132 - protein, 17 aa, Artificial Sequence
  Description of Artificial Sequence: Synthetic peptide
  Seed: PRMCSLMQGSTLPRRSG
PRMFSLAQVSTHPRRSG

SEQ ID NO: 116133 - protein, 17 aa, Artificial Sequence
  Description of Artificial Sequence: Synthetic peptide
  Seed: PRMCSLMQGSTLPRRSG
PRMFSLAQVSTIPRRSG

SEQ ID NO: 116134 - protein, 17 aa, Artificial Sequence
  Description of Artificial Sequence: Synthetic peptide
  Seed: PRMCSLMQGSTLPRRSG
PRMFSLAQVSTLPRRSG

SEQ ID NO: 116135 - protein, 17 aa, Artificial Sequence
  Description of Artificial Sequence: Synthetic peptide
  Seed: PRMCSLMQGSTLPRRSG
PRMFSLAQVSTMPRRSG

SEQ ID NO: 116136 - protein, 17 aa, Artificial Sequence
  Description of Artificial Sequence: Synthetic peptide
  Seed: PRMCSLMQGSTLPRRSG
PRMFSLAQVSTNPRRSG

SEQ ID NO: 116137 - protein, 17 aa, Artificial Sequence
  Description of Artificial Sequence: Synthetic peptide
  Seed: PRMCSLMQGSTLPRRSG
PRMFSLAQVSTQPRRSG

SEQ ID NO: 116138 - protein, 17 aa, Artificial Sequence
  Description of Artificial Sequence: Synthetic peptide
  Seed: PRMCSLMQGSTLPRRSG
PRMFSLAQVSTSPRRSG

SEQ ID NO: 116139 - protein, 17 aa, Artificial Sequence
  Description of Artificial Sequence: Synthetic peptide
  Seed: PRMCSLMQGSTLPRRSG
PRMFSLAQVSTTPRRSG

SEQ ID NO: 116140 - protein, 17 aa, Artificial Sequence
  Description of Artificial Sequence: Synthetic peptide
  Seed: PRMCSLMQGSTLPRRSG
PRMFSLAQVSTVPRRSG

SEQ ID NO: 116141 - protein, 17 aa, Artificial Sequence
  Description of Artificial Sequence: Synthetic peptide
  Seed: PRMCSLMQGSTLPRRSG
PRMFSLCQASTAPRRSG

SEQ ID NO: 116142 - protein, 17 aa, Artificial Sequence
  Description of Artificial Sequence: Synthetic peptide
  Seed: PRMCSLMQGSTLPRRSG
PRMFSLCQASTIPRRSG

SEQ ID NO: 116143 - protein, 17 aa, Artificial Sequence
  Description of Artificial Sequence: Synthetic peptide
  Seed: PRMCSLMQGSTLPRRSG
PRMFSLCQASTLPRRSG

SEQ ID NO: 116144 - protein, 17 aa, Artificial Sequence
  Description of Artificial Sequence: Synthetic peptide
  Seed: PRMCSLMQGSTLPRRSG
PRMFSLCQASTVPRRSG

SEQ ID NO: 116145 - protein, 17 aa, Artificial Sequence
  Description of Artificial Sequence: Synthetic peptide
  Seed: PRMCSLMQGSTLPRRSG
PRMFSLEQASTAPRRSG

SEQ ID NO: 116146 - protein, 17 aa, Artificial Sequence
  Description of Artificial Sequence: Synthetic peptide
  Seed: PRMCSLMQGSTLPRRSG
PRMFSLEQASTIPRRSG

SEQ ID NO: 116147 - protein, 17 aa, Artificial Sequence
  Description of Artificial Sequence: Synthetic peptide
  Seed: PRMCSLMQGSTLPRRSG
PRMFSLEQASTLPRRSG

SEQ ID NO: 116148 - protein, 17 aa, Artificial Sequence
  Description of Artificial Sequence: Synthetic peptide
  Seed: PRMCSLMQGSTLPRRSG
PRMFSLEQASTMPRRSG

SEQ ID NO: 116149 - protein, 17 aa, Artificial Sequence
  Description of Artificial Sequence: Synthetic peptide
  Seed: PRMCSLMQGSTLPRRSG
PRMFSLEQASTVPRRSG

SEQ ID NO: 116150 - protein, 17 aa, Artificial Sequence
  Description of Artificial Sequence: Synthetic peptide
  Seed: PRMCSLMQGSTLPRRSG
PRMFSLEQGSTAPRRSG

SEQ ID NO: 116151 - protein, 17 aa, Artificial Sequence
  Description of Artificial Sequence: Synthetic peptide
  Seed: PRMCSLMQGSTLPRRSG
PRMFSLEQGSTIPRRSG

SEQ ID NO: 116152 - protein, 17 aa, Artificial Sequence
  Description of Artificial Sequence: Synthetic peptide
  Seed: PRMCSLMQGSTLPRRSG
PRMFSLEQGSTLPRRSG

SEQ ID NO: 116153 - protein, 17 aa, Artificial Sequence
  Description of Artificial Sequence: Synthetic peptide
  Seed: PRMCSLMQGSTLPRRSG
PRMFSLEQGSTVPRRSG

SEQ ID NO: 116154 - protein, 17 aa, Artificial Sequence
  Description of Artificial Sequence: Synthetic peptide
  Seed: PRMCSLMQGSTLPRRSG
PRMFSLEQSSTAPRRSG

SEQ ID NO: 116155 - protein, 17 aa, Artificial Sequence
  Description of Artificial Sequence: Synthetic peptide
  Seed: PRMCSLMQGSTLPRRSG
PRMFSLEQSSTIPRRSG

SEQ ID NO: 116156 - protein, 17 aa, Artificial Sequence
  Description of Artificial Sequence: Synthetic peptide
  Seed: PRMCSLMQGSTLPRRSG
PRMFSLEQSSTLPRRSG

SEQ ID NO: 116157 - protein, 17 aa, Artificial Sequence
  Description of Artificial Sequence: Synthetic peptide
  Seed: PRMCSLMQGSTLPRRSG
PRMFSLEQSSTVPRRSG

SEQ ID NO: 116158 - protein, 17 aa, Artificial Sequence
  Description of Artificial Sequence: Synthetic peptide
  Seed: PRMCSLMQGSTLPRRSG
PRMFSLFQASTAPRRSG

SEQ ID NO: 116159 - protein, 17 aa, Artificial Sequence
  Description of Artificial Sequence: Synthetic peptide
  Seed: PRMCSLMQGSTLPRRSG
PRMFSLFQASTGPRRSG

SEQ ID NO: 116160 - protein, 17 aa, Artificial Sequence
  Description of Artificial Sequence: Synthetic peptide
  Seed: PRMCSLMQGSTLPRRSG
PRMFSLFQASTIPRRSG

SEQ ID NO: 116161 - protein, 17 aa, Artificial Sequence
  Description of Artificial Sequence: Synthetic peptide
  Seed: PRMCSLMQGSTLPRRSG
PRMFSLFQASTLPRRSG

SEQ ID NO: 116162 - protein, 17 aa, Artificial Sequence
  Description of Artificial Sequence: Synthetic peptide
  Seed: PRMCSLMQGSTLPRRSG
PRMFSLFQASTMPRRSG

SEQ ID NO: 116163 - protein, 17 aa, Artificial Sequence
  Description of Artificial Sequence: Synthetic peptide
  Seed: PRMCSLMQGSTLPRRSG
PRMFSLFQASTNPRRSG

SEQ ID NO: 116164 - protein, 17 aa, Artificial Sequence
  Description of Artificial Sequence: Synthetic peptide
  Seed: PRMCSLMQGSTLPRRSG
PRMFSLFQASTSPRRSG

SEQ ID NO: 116165 - protein, 17 aa, Artificial Sequence
  Description of Artificial Sequence: Synthetic peptide
  Seed: PRMCSLMQGSTLPRRSG
PRMFSLFQASTTPRRSG

SEQ ID NO: 116166 - protein, 17 aa, Artificial Sequence
  Description of Artificial Sequence: Synthetic peptide
  Seed: PRMCSLMQGSTLPRRSG
PRMFSLFQASTVPRRSG

SEQ ID NO: 116167 - protein, 17 aa, Artificial Sequence
  Description of Artificial Sequence: Synthetic peptide
  Seed: PRMCSLMQGSTLPRRSG
PRMFSLFQGSTAPRRSG

SEQ ID NO: 116168 - protein, 17 aa, Artificial Sequence
  Description of Artificial Sequence: Synthetic peptide
  Seed: PRMCSLMQGSTLPRRSG
PRMFSLFQGSTIPRRSG

SEQ ID NO: 116169 - protein, 17 aa, Artificial Sequence
  Description of Artificial Sequence: Synthetic peptide
  Seed: PRMCSLMQGSTLPRRSG
PRMFSLFQGSTLPRRSG

SEQ ID NO: 116170 - protein, 17 aa, Artificial Sequence
  Description of Artificial Sequence: Synthetic peptide
  Seed: PRMCSLMQGSTLPRRSG
PRMFSLFQGSTVPRRSG

SEQ ID NO: 116171 - protein, 17 aa, Artificial Sequence
  Description of Artificial Sequence: Synthetic peptide
  Seed: PRMCSLMQGSTLPRRSG
PRMFSLFQISTAPRRSG

SEQ ID NO: 116172 - protein, 17 aa, Artificial Sequence
  Description of Artificial Sequence: Synthetic peptide
  Seed: PRMCSLMQGSTLPRRSG
PRMFSLFQISTSPRRSG

SEQ ID NO: 116173 - protein, 17 aa, Artificial Sequence
  Description of Artificial Sequence: Synthetic peptide
  Seed: PRMCSLMQGSTLPRRSG
PRMFSLFQLSTAPRRSG

SEQ ID NO: 116174 - protein, 17 aa, Artificial Sequence
  Description of Artificial Sequence: Synthetic peptide
  Seed: PRMCSLMQGSTLPRRSG
PRMFSLFQPSTAPRRSG

SEQ ID NO: 116175 - protein, 17 aa, Artificial Sequence
  Description of Artificial Sequence: Synthetic peptide
  Seed: PRMCSLMQGSTLPRRSG
PRMFSLFQPSTIPRRSG

SEQ ID NO: 116176 - protein, 17 aa, Artificial Sequence
  Description of Artificial Sequence: Synthetic peptide
  Seed: PRMCSLMQGSTLPRRSG
PRMFSLFQPSTLPRRSG

SEQ ID NO: 116177 - protein, 17 aa, Artificial Sequence
  Description of Artificial Sequence: Synthetic peptide
  Seed: PRMCSLMQGSTLPRRSG
PRMFSLFQPSTNPRRSG

SEQ ID NO: 116178 - protein, 17 aa, Artificial Sequence
  Description of Artificial Sequence: Synthetic peptide
  Seed: PRMCSLMQGSTLPRRSG
PRMFSLFQPSTSPRRSG

SEQ ID NO: 116179 - protein, 17 aa, Artificial Sequence
  Description of Artificial Sequence: Synthetic peptide
  Seed: PRMCSLMQGSTLPRRSG
PRMFSLFQPSTVPRRSG

SEQ ID NO: 116180 - protein, 17 aa, Artificial Sequence
  Description of Artificial Sequence: Synthetic peptide
  Seed: PRMCSLMQGSTLPRRSG
PRMFSLFQSSTAPRRSG

SEQ ID NO: 116181 - protein, 17 aa, Artificial Sequence
  Description of Artificial Sequence: Synthetic peptide
  Seed: PRMCSLMQGSTLPRRSG
PRMFSLFQSSTIPRRSG

SEQ ID NO: 116182 - protein, 17 aa, Artificial Sequence
  Description of Artificial Sequence: Synthetic peptide
  Seed: PRMCSLMQGSTLPRRSG
PRMFSLFQSSTLPRRSG

SEQ ID NO: 116183 - protein, 17 aa, Artificial Sequence
  Description of Artificial Sequence: Synthetic peptide
  Seed: PRMCSLMQGSTLPRRSG
PRMFSLFQSSTNPRRSG

SEQ ID NO: 116184 - protein, 17 aa, Artificial Sequence
  Description of Artificial Sequence: Synthetic peptide
  Seed: PRMCSLMQGSTLPRRSG
PRMFSLFQSSTSPRRSG

SEQ ID NO: 116185 - protein, 17 aa, Artificial Sequence
  Description of Artificial Sequence: Synthetic peptide
  Seed: PRMCSLMQGSTLPRRSG
PRMFSLFQSSTVPRRSG

SEQ ID NO: 116186 - protein, 17 aa, Artificial Sequence
  Description of Artificial Sequence: Synthetic peptide
  Seed: PRMCSLMQGSTLPRRSG
PRMFSLFQTSTAPRRSG

SEQ ID NO: 116187 - protein, 17 aa, Artificial Sequence
  Description of Artificial Sequence: Synthetic peptide
  Seed: PRMCSLMQGSTLPRRSG
PRMFSLFQTSTNPRRSG

SEQ ID NO: 116188 - protein, 17 aa, Artificial Sequence
  Description of Artificial Sequence: Synthetic peptide
  Seed: PRMCSLMQGSTLPRRSG
PRMFSLFQTSTSPRRSG

SEQ ID NO: 116189 - protein, 17 aa, Artificial Sequence
  Description of Artificial Sequence: Synthetic peptide
  Seed: PRMCSLMQGSTLPRRSG
PRMFSLFQVSTAPRRSG

SEQ ID NO: 116190 - protein, 17 aa, Artificial Sequence
  Description of Artificial Sequence: Synthetic peptide
  Seed: PRMCSLMQGSTLPRRSG
PRMFSLFQVSTNPRRSG

SEQ ID NO: 116191 - protein, 17 aa, Artificial Sequence
  Description of Artificial Sequence: Synthetic peptide
  Seed: PRMCSLMQGSTLPRRSG
PRMFSLFQVSTSPRRSG

SEQ ID NO: 116192 - protein, 17 aa, Artificial Sequence
  Description of Artificial Sequence: Synthetic peptide
  Seed: PRMCSLMQGSTLPRRSG
PRMFSLFQVSTVPRRSG

SEQ ID NO: 116193 - protein, 17 aa, Artificial Sequence
  Description of Artificial Sequence: Synthetic peptide
  Seed: PRMCSLMQGSTLPRRSG
PRMFSLGQASTAPRRSG

SEQ ID NO: 116194 - protein, 17 aa, Artificial Sequence
  Description of Artificial Sequence: Synthetic peptide
  Seed: PRMCSLMQGSTLPRRSG
PRMFSLGQASTIPRRSG

SEQ ID NO: 116195 - protein, 17 aa, Artificial Sequence
  Description of Artificial Sequence: Synthetic peptide
  Seed: PRMCSLMQGSTLPRRSG
PRMFSLGQASTLPRRSG

SEQ ID NO: 116196 - protein, 17 aa, Artificial Sequence
  Description of Artificial Sequence: Synthetic peptide
  Seed: PRMCSLMQGSTLPRRSG
PRMFSLGQASTMPRRSG

SEQ ID NO: 116197 - protein, 17 aa, Artificial Sequence
  Description of Artificial Sequence: Synthetic peptide
  Seed: PRMCSLMQGSTLPRRSG
PRMFSLGQASTVPRRSG

SEQ ID NO: 116198 - protein, 17 aa, Artificial Sequence
  Description of Artificial Sequence: Synthetic peptide
  Seed: PRMCSLMQGSTLPRRSG
PRMFSLGQGSTIPRRSG

SEQ ID NO: 116199 - protein, 17 aa, Artificial Sequence
  Description of Artificial Sequence: Synthetic peptide
  Seed: PRMCSLMQGSTLPRRSG
PRMFSLGQGSTLPRRSG

SEQ ID NO: 116200 - protein, 17 aa, Artificial Sequence
  Description of Artificial Sequence: Synthetic peptide
  Seed: PRMCSLMQGSTLPRRSG
PRMFSLGQGSTVPRRSG

SEQ ID NO: 116201 - protein, 17 aa, Artificial Sequence
  Description of Artificial Sequence: Synthetic peptide
  Seed: PRMCSLMQGSTLPRRSG
PRMFSLGQPSTLPRRSG

SEQ ID NO: 116202 - protein, 17 aa, Artificial Sequence
  Description of Artificial Sequence: Synthetic peptide
  Seed: PRMCSLMQGSTLPRRSG
PRMFSLGQSSTIPRRSG

SEQ ID NO: 116203 - protein, 17 aa, Artificial Sequence
  Description of Artificial Sequence: Synthetic peptide
  Seed: PRMCSLMQGSTLPRRSG
PRMFSLGQSSTLPRRSG

SEQ ID NO: 116204 - protein, 17 aa, Artificial Sequence
  Description of Artificial Sequence: Synthetic peptide
  Seed: PRMCSLMQGSTLPRRSG
PRMFSLGQSSTVPRRSG

SEQ ID NO: 116205 - protein, 17 aa, Artificial Sequence
  Description of Artificial Sequence: Synthetic peptide
  Seed: PRMCSLMQGSTLPRRSG
PRMFSLHQASTIPRRSG

SEQ ID NO: 116206 - protein, 17 aa, Artificial Sequence
  Description of Artificial Sequence: Synthetic peptide
  Seed: PRMCSLMQGSTLPRRSG
PRMFSLHQASTLPRRSG

SEQ ID NO: 116207 - protein, 17 aa, Artificial Sequence
  Description of Artificial Sequence: Synthetic peptide
  Seed: PRMCSLMQGSTLPRRSG
PRMFSLHQASTVPRRSG

SEQ ID NO: 116208 - protein, 17 aa, Artificial Sequence
  Description of Artificial Sequence: Synthetic peptide
  Seed: PRMCSLMQGSTLPRRSG
PRMFSLIQASTAPRRSG

SEQ ID NO: 116209 - protein, 17 aa, Artificial Sequence
  Description of Artificial Sequence: Synthetic peptide
  Seed: PRMCSLMQGSTLPRRSG
PRMFSLIQASTCPRRSG

SEQ ID NO: 116210 - protein, 17 aa, Artificial Sequence
  Description of Artificial Sequence: Synthetic peptide
  Seed: PRMCSLMQGSTLPRRSG
PRMFSLIQASTDPRRSG

SEQ ID NO: 116211 - protein, 17 aa, Artificial Sequence
  Description of Artificial Sequence: Synthetic peptide
  Seed: PRMCSLMQGSTLPRRSG
PRMFSLIQASTEPRRSG

SEQ ID NO: 116212 - protein, 17 aa, Artificial Sequence
  Description of Artificial Sequence: Synthetic peptide
  Seed: PRMCSLMQGSTLPRRSG
PRMFSLIQASTFPRRSG

SEQ ID NO: 116213 - protein, 17 aa, Artificial Sequence
  Description of Artificial Sequence: Synthetic peptide
  Seed: PRMCSLMQGSTLPRRSG
PRMFSLIQASTGPRRSG

SEQ ID NO: 116214 - protein, 17 aa, Artificial Sequence
  Description of Artificial Sequence: Synthetic peptide
  Seed: PRMCSLMQGSTLPRRSG
PRMFSLIQASTHPRRSG

SEQ ID NO: 116215 - protein, 17 aa, Artificial Sequence
  Description of Artificial Sequence: Synthetic peptide
  Seed: PRMCSLMQGSTLPRRSG
PRMFSLIQASTIPRRSG

SEQ ID NO: 116216 - protein, 17 aa, Artificial Sequence
  Description of Artificial Sequence: Synthetic peptide
  Seed: PRMCSLMQGSTLPRRSG
PRMFSLIQASTLPRRSG

SEQ ID NO: 116217 - protein, 17 aa, Artificial Sequence
  Description of Artificial Sequence: Synthetic peptide
  Seed: PRMCSLMQGSTLPRRSG
PRMFSLIQASTMPRRSG

SEQ ID NO: 116218 - protein, 17 aa, Artificial Sequence
  Description of Artificial Sequence: Synthetic peptide
  Seed: PRMCSLMQGSTLPRRSG
PRMFSLIQASTNPRRSG

SEQ ID NO: 116219 - protein, 17 aa, Artificial Sequence
  Description of Artificial Sequence: Synthetic peptide
  Seed: PRMCSLMQGSTLPRRSG
PRMFSLIQASTPPRRSG

SEQ ID NO: 116220 - protein, 17 aa, Artificial Sequence
  Description of Artificial Sequence: Synthetic peptide
  Seed: PRMCSLMQGSTLPRRSG
PRMFSLIQASTQPRRSG

SEQ ID NO: 116221 - protein, 17 aa, Artificial Sequence
  Description of Artificial Sequence: Synthetic peptide
  Seed: PRMCSLMQGSTLPRRSG
PRMFSLIQASTSPRRSG

SEQ ID NO: 116222 - protein, 17 aa, Artificial Sequence
  Description of Artificial Sequence: Synthetic peptide
  Seed: PRMCSLMQGSTLPRRSG
PRMFSLIQASTTPRRSG

SEQ ID NO: 116223 - protein, 17 aa, Artificial Sequence
  Description of Artificial Sequence: Synthetic peptide
  Seed: PRMCSLMQGSTLPRRSG
PRMFSLIQASTVPRRSG

SEQ ID NO: 116224 - protein, 17 aa, Artificial Sequence
  Description of Artificial Sequence: Synthetic peptide
  Seed: PRMCSLMQGSTLPRRSG
PRMFSLIQASTWPRRSG

SEQ ID NO: 116225 - protein, 17 aa, Artificial Sequence
  Description of Artificial Sequence: Synthetic peptide
  Seed: PRMCSLMQGSTLPRRSG
PRMFSLIQGSTAPRRSG

SEQ ID NO: 116226 - protein, 17 aa, Artificial Sequence
  Description of Artificial Sequence: Synthetic peptide
  Seed: PRMCSLMQGSTLPRRSG
PRMFSLIQGSTCPRRSG

SEQ ID NO: 116227 - protein, 17 aa, Artificial Sequence
  Description of Artificial Sequence: Synthetic peptide
  Seed: PRMCSLMQGSTLPRRSG
PRMFSLIQGSTFPRRSG

SEQ ID NO: 116228 - protein, 17 aa, Artificial Sequence
  Description of Artificial Sequence: Synthetic peptide
  Seed: PRMCSLMQGSTLPRRSG
PRMFSLIQGSTGPRRSG

SEQ ID NO: 116229 - protein, 17 aa, Artificial Sequence
  Description of Artificial Sequence: Synthetic peptide
  Seed: PRMCSLMQGSTLPRRSG
PRMFSLIQGSTIPRRSG

SEQ ID NO: 116230 - protein, 17 aa, Artificial Sequence
  Description of Artificial Sequence: Synthetic peptide
  Seed: PRMCSLMQGSTLPRRSG
PRMFSLIQGSTLPRRSG

SEQ ID NO: 116231 - protein, 17 aa, Artificial Sequence
  Description of Artificial Sequence: Synthetic peptide
  Seed: PRMCSLMQGSTLPRRSG
PRMFSLIQGSTMPRRSG

SEQ ID NO: 116232 - protein, 17 aa, Artificial Sequence
  Description of Artificial Sequence: Synthetic peptide
  Seed: PRMCSLMQGSTLPRRSG
PRMFSLIQGSTNPRRSG

SEQ ID NO: 116233 - protein, 17 aa, Artificial Sequence
  Description of Artificial Sequence: Synthetic peptide
  Seed: PRMCSLMQGSTLPRRSG
PRMFSLIQGSTQPRRSG

SEQ ID NO: 116234 - protein, 17 aa, Artificial Sequence
  Description of Artificial Sequence: Synthetic peptide
  Seed: PRMCSLMQGSTLPRRSG
PRMFSLIQGSTSPRRSG

SEQ ID NO: 116235 - protein, 17 aa, Artificial Sequence
  Description of Artificial Sequence: Synthetic peptide
  Seed: PRMCSLMQGSTLPRRSG
PRMFSLIQGSTTPRRSG

SEQ ID NO: 116236 - protein, 17 aa, Artificial Sequence
  Description of Artificial Sequence: Synthetic peptide
  Seed: PRMCSLMQGSTLPRRSG
PRMFSLIQGSTVPRRSG

SEQ ID NO: 116237 - protein, 17 aa, Artificial Sequence
  Description of Artificial Sequence: Synthetic peptide
  Seed: PRMCSLMQGSTLPRRSG
PRMFSLIQISTAPRRSG

SEQ ID NO: 116238 - protein, 17 aa, Artificial Sequence
  Description of Artificial Sequence: Synthetic peptide
  Seed: PRMCSLMQGSTLPRRSG
PRMFSLIQISTGPRRSG

SEQ ID NO: 116239 - protein, 17 aa, Artificial Sequence
  Description of Artificial Sequence: Synthetic peptide
  Seed: PRMCSLMQGSTLPRRSG
PRMFSLIQISTHPRRSG

SEQ ID NO: 116240 - protein, 17 aa, Artificial Sequence
  Description of Artificial Sequence: Synthetic peptide
  Seed: PRMCSLMQGSTLPRRSG
PRMFSLIQISTIPRRSG

SEQ ID NO: 116241 - protein, 17 aa, Artificial Sequence
  Description of Artificial Sequence: Synthetic peptide
  Seed: PRMCSLMQGSTLPRRSG
PRMFSLIQISTLPRRSG

SEQ ID NO: 116242 - protein, 17 aa, Artificial Sequence
  Description of Artificial Sequence: Synthetic peptide
  Seed: PRMCSLMQGSTLPRRSG
PRMFSLIQISTMPRRSG

SEQ ID NO: 116243 - protein, 17 aa, Artificial Sequence
  Description of Artificial Sequence: Synthetic peptide
  Seed: PRMCSLMQGSTLPRRSG
PRMFSLIQISTNPRRSG

SEQ ID NO: 116244 - protein, 17 aa, Artificial Sequence
  Description of Artificial Sequence: Synthetic peptide
  Seed: PRMCSLMQGSTLPRRSG
PRMFSLIQISTQPRRSG

SEQ ID NO: 116245 - protein, 17 aa, Artificial Sequence
  Description of Artificial Sequence: Synthetic peptide
  Seed: PRMCSLMQGSTLPRRSG
PRMFSLIQISTSPRRSG

SEQ ID NO: 116246 - protein, 17 aa, Artificial Sequence
  Description of Artificial Sequence: Synthetic peptide
  Seed: PRMCSLMQGSTLPRRSG
PRMFSLIQISTTPRRSG

SEQ ID NO: 116247 - protein, 17 aa, Artificial Sequence
  Description of Artificial Sequence: Synthetic peptide
  Seed: PRMCSLMQGSTLPRRSG
PRMFSLIQISTVPRRSG

SEQ ID NO: 116248 - protein, 17 aa, Artificial Sequence
  Description of Artificial Sequence: Synthetic peptide
  Seed: PRMCSLMQGSTLPRRSG
PRMFSLIQLSTAPRRSG

SEQ ID NO: 116249 - protein, 17 aa, Artificial Sequence
  Description of Artificial Sequence: Synthetic peptide
  Seed: PRMCSLMQGSTLPRRSG
PRMFSLIQLSTIPRRSG

SEQ ID NO: 116250 - protein, 17 aa, Artificial Sequence
  Description of Artificial Sequence: Synthetic peptide
  Seed: PRMCSLMQGSTLPRRSG
PRMFSLIQLSTLPRRSG

SEQ ID NO: 116251 - protein, 17 aa, Artificial Sequence
  Description of Artificial Sequence: Synthetic peptide
  Seed: PRMCSLMQGSTLPRRSG
PRMFSLIQLSTMPRRSG

SEQ ID NO: 116252 - protein, 17 aa, Artificial Sequence
  Description of Artificial Sequence: Synthetic peptide
  Seed: PRMCSLMQGSTLPRRSG
PRMFSLIQLSTNPRRSG

SEQ ID NO: 116253 - protein, 17 aa, Artificial Sequence
  Description of Artificial Sequence: Synthetic peptide
  Seed: PRMCSLMQGSTLPRRSG
PRMFSLIQLSTSPRRSG

SEQ ID NO: 116254 - protein, 17 aa, Artificial Sequence
  Description of Artificial Sequence: Synthetic peptide
  Seed: PRMCSLMQGSTLPRRSG
PRMFSLIQLSTTPRRSG

SEQ ID NO: 116255 - protein, 17 aa, Artificial Sequence
  Description of Artificial Sequence: Synthetic peptide
  Seed: PRMCSLMQGSTLPRRSG
PRMFSLIQLSTVPRRSG

SEQ ID NO: 116256 - protein, 17 aa, Artificial Sequence
  Description of Artificial Sequence: Synthetic peptide
  Seed: PRMCSLMQGSTLPRRSG
PRMFSLIQMSTAPRRSG

SEQ ID NO: 116257 - protein, 17 aa, Artificial Sequence
  Description of Artificial Sequence: Synthetic peptide
  Seed: PRMCSLMQGSTLPRRSG
PRMFSLIQMSTIPRRSG

SEQ ID NO: 116258 - protein, 17 aa, Artificial Sequence
  Description of Artificial Sequence: Synthetic peptide
  Seed: PRMCSLMQGSTLPRRSG
PRMFSLIQMSTMPRRSG

SEQ ID NO: 116259 - protein, 17 aa, Artificial Sequence
  Description of Artificial Sequence: Synthetic peptide
  Seed: PRMCSLMQGSTLPRRSG
PRMFSLIQMSTNPRRSG

SEQ ID NO: 116260 - protein, 17 aa, Artificial Sequence
  Description of Artificial Sequence: Synthetic peptide
  Seed: PRMCSLMQGSTLPRRSG
PRMFSLIQMSTSPRRSG

SEQ ID NO: 116261 - protein, 17 aa, Artificial Sequence
  Description of Artificial Sequence: Synthetic peptide
  Seed: PRMCSLMQGSTLPRRSG
PRMFSLIQMSTTPRRSG

SEQ ID NO: 116262 - protein, 17 aa, Artificial Sequence
  Description of Artificial Sequence: Synthetic peptide
  Seed: PRMCSLMQGSTLPRRSG
PRMFSLIQMSTVPRRSG

SEQ ID NO: 116263 - protein, 17 aa, Artificial Sequence
  Description of Artificial Sequence: Synthetic peptide
  Seed: PRMCSLMQGSTLPRRSG
PRMFSLIQNSTAPRRSG

SEQ ID NO: 116264 - protein, 17 aa, Artificial Sequence
  Description of Artificial Sequence: Synthetic peptide
  Seed: PRMCSLMQGSTLPRRSG
PRMFSLIQNSTGPRRSG

SEQ ID NO: 116265 - protein, 17 aa, Artificial Sequence
  Description of Artificial Sequence: Synthetic peptide
  Seed: PRMCSLMQGSTLPRRSG
PRMFSLIQNSTIPRRSG

SEQ ID NO: 116266 - protein, 17 aa, Artificial Sequence
  Description of Artificial Sequence: Synthetic peptide
  Seed: PRMCSLMQGSTLPRRSG
PRMFSLIQNSTLPRRSG

SEQ ID NO: 116267 - protein, 17 aa, Artificial Sequence
  Description of Artificial Sequence: Synthetic peptide
  Seed: PRMCSLMQGSTLPRRSG
PRMFSLIQNSTMPRRSG

SEQ ID NO: 116268 - protein, 17 aa, Artificial Sequence
  Description of Artificial Sequence: Synthetic peptide
  Seed: PRMCSLMQGSTLPRRSG
PRMFSLIQNSTNPRRSG

SEQ ID NO: 116269 - protein, 17 aa, Artificial Sequence
  Description of Artificial Sequence: Synthetic peptide
  Seed: PRMCSLMQGSTLPRRSG
PRMFSLIQNSTSPRRSG

SEQ ID NO: 116270 - protein, 17 aa, Artificial Sequence
  Description of Artificial Sequence: Synthetic peptide
  Seed: PRMCSLMQGSTLPRRSG
PRMFSLIQNSTTPRRSG

SEQ ID NO: 116271 - protein, 17 aa, Artificial Sequence
  Description of Artificial Sequence: Synthetic peptide
  Seed: PRMCSLMQGSTLPRRSG
PRMFSLIQNSTVPRRSG

SEQ ID NO: 116272 - protein, 17 aa, Artificial Sequence
  Description of Artificial Sequence: Synthetic peptide
  Seed: PRMCSLMQGSTLPRRSG
PRMFSLIQPSTAPRRSG

SEQ ID NO: 116273 - protein, 17 aa, Artificial Sequence
  Description of Artificial Sequence: Synthetic peptide
  Seed: PRMCSLMQGSTLPRRSG
PRMFSLIQPSTCPRRSG

SEQ ID NO: 116274 - protein, 17 aa, Artificial Sequence
  Description of Artificial Sequence: Synthetic peptide
  Seed: PRMCSLMQGSTLPRRSG
PRMFSLIQPSTGPRRSG

SEQ ID NO: 116275 - protein, 17 aa, Artificial Sequence
  Description of Artificial Sequence: Synthetic peptide
  Seed: PRMCSLMQGSTLPRRSG
PRMFSLIQPSTHPRRSG

SEQ ID NO: 116276 - protein, 17 aa, Artificial Sequence
  Description of Artificial Sequence: Synthetic peptide
  Seed: PRMCSLMQGSTLPRRSG
PRMFSLIQPSTIPRRSG

SEQ ID NO: 116277 - protein, 17 aa, Artificial Sequence
  Description of Artificial Sequence: Synthetic peptide
  Seed: PRMCSLMQGSTLPRRSG
PRMFSLIQPSTLPRRSG

SEQ ID NO: 116278 - protein, 17 aa, Artificial Sequence
  Description of Artificial Sequence: Synthetic peptide
  Seed: PRMCSLMQGSTLPRRSG
PRMFSLIQPSTMPRRSG

SEQ ID NO: 116279 - protein, 17 aa, Artificial Sequence
  Description of Artificial Sequence: Synthetic peptide
  Seed: PRMCSLMQGSTLPRRSG
PRMFSLIQPSTNPRRSG

SEQ ID NO: 116280 - protein, 17 aa, Artificial Sequence
  Description of Artificial Sequence: Synthetic peptide
  Seed: PRMCSLMQGSTLPRRSG
PRMFSLIQPSTPPRRSG

SEQ ID NO: 116281 - protein, 17 aa, Artificial Sequence
  Description of Artificial Sequence: Synthetic peptide
  Seed: PRMCSLMQGSTLPRRSG
PRMFSLIQPSTQPRRSG

SEQ ID NO: 116282 - protein, 17 aa, Artificial Sequence
  Description of Artificial Sequence: Synthetic peptide
  Seed: PRMCSLMQGSTLPRRSG
PRMFSLIQPSTSPRRSG

SEQ ID NO: 116283 - protein, 17 aa, Artificial Sequence
  Description of Artificial Sequence: Synthetic peptide
  Seed: PRMCSLMQGSTLPRRSG
PRMFSLIQPSTTPRRSG

SEQ ID NO: 116284 - protein, 17 aa, Artificial Sequence
  Description of Artificial Sequence: Synthetic peptide
  Seed: PRMCSLMQGSTLPRRSG
PRMFSLIQPSTVPRRSG

SEQ ID NO: 116285 - protein, 17 aa, Artificial Sequence
  Description of Artificial Sequence: Synthetic peptide
  Seed: PRMCSLMQGSTLPRRSG
PRMFSLIQSSTAPRRSG

SEQ ID NO: 116286 - protein, 17 aa, Artificial Sequence
  Description of Artificial Sequence: Synthetic peptide
  Seed: PRMCSLMQGSTLPRRSG
PRMFSLIQSSTCPRRSG

SEQ ID NO: 116287 - protein, 17 aa, Artificial Sequence
  Description of Artificial Sequence: Synthetic peptide
  Seed: PRMCSLMQGSTLPRRSG
PRMFSLIQSSTGPRRSG

SEQ ID NO: 116288 - protein, 17 aa, Artificial Sequence
  Description of Artificial Sequence: Synthetic peptide
  Seed: PRMCSLMQGSTLPRRSG
PRMFSLIQSSTHPRRSG

SEQ ID NO: 116289 - protein, 17 aa, Artificial Sequence
  Description of Artificial Sequence: Synthetic peptide
  Seed: PRMCSLMQGSTLPRRSG
PRMFSLIQSSTIPRRSG

SEQ ID NO: 116290 - protein, 17 aa, Artificial Sequence
  Description of Artificial Sequence: Synthetic peptide
  Seed: PRMCSLMQGSTLPRRSG
PRMFSLIQSSTLPRRSG

SEQ ID NO: 116291 - protein, 17 aa, Artificial Sequence
  Description of Artificial Sequence: Synthetic peptide
  Seed: PRMCSLMQGSTLPRRSG
PRMFSLIQSSTMPRRSG

SEQ ID NO: 116292 - protein, 17 aa, Artificial Sequence
  Description of Artificial Sequence: Synthetic peptide
  Seed: PRMCSLMQGSTLPRRSG
PRMFSLIQSSTNPRRSG

SEQ ID NO: 116293 - protein, 17 aa, Artificial Sequence
  Description of Artificial Sequence: Synthetic peptide
  Seed: PRMCSLMQGSTLPRRSG
PRMFSLIQSSTPPRRSG

SEQ ID NO: 116294 - protein, 17 aa, Artificial Sequence
  Description of Artificial Sequence: Synthetic peptide
  Seed: PRMCSLMQGSTLPRRSG
PRMFSLIQSSTQPRRSG

SEQ ID NO: 116295 - protein, 17 aa, Artificial Sequence
  Description of Artificial Sequence: Synthetic peptide
  Seed: PRMCSLMQGSTLPRRSG
PRMFSLIQSSTSPRRSG

SEQ ID NO: 116296 - protein, 17 aa, Artificial Sequence
  Description of Artificial Sequence: Synthetic peptide
  Seed: PRMCSLMQGSTLPRRSG
PRMFSLIQSSTTPRRSG

SEQ ID NO: 116297 - protein, 17 aa, Artificial Sequence
  Description of Artificial Sequence: Synthetic peptide
  Seed: PRMCSLMQGSTLPRRSG
PRMFSLIQSSTVPRRSG

SEQ ID NO: 116298 - protein, 17 aa, Artificial Sequence
  Description of Artificial Sequence: Synthetic peptide
  Seed: PRMCSLMQGSTLPRRSG
PRMFSLIQTSTAPRRSG

SEQ ID NO: 116299 - protein, 17 aa, Artificial Sequence
  Description of Artificial Sequence: Synthetic peptide
  Seed: PRMCSLMQGSTLPRRSG
PRMFSLIQTSTCPRRSG

SEQ ID NO: 116300 - protein, 17 aa, Artificial Sequence
  Description of Artificial Sequence: Synthetic peptide
  Seed: PRMCSLMQGSTLPRRSG
PRMFSLIQTSTGPRRSG

SEQ ID NO: 116301 - protein, 17 aa, Artificial Sequence
  Description of Artificial Sequence: Synthetic peptide
  Seed: PRMCSLMQGSTLPRRSG
PRMFSLIQTSTHPRRSG

SEQ ID NO: 116302 - protein, 17 aa, Artificial Sequence
  Description of Artificial Sequence: Synthetic peptide
  Seed: PRMCSLMQGSTLPRRSG
PRMFSLIQTSTIPRRSG

SEQ ID NO: 116303 - protein, 17 aa, Artificial Sequence
  Description of Artificial Sequence: Synthetic peptide
  Seed: PRMCSLMQGSTLPRRSG
PRMFSLIQTSTLPRRSG

SEQ ID NO: 116304 - protein, 17 aa, Artificial Sequence
  Description of Artificial Sequence: Synthetic peptide
  Seed: PRMCSLMQGSTLPRRSG
PRMFSLIQTSTMPRRSG

SEQ ID NO: 116305 - protein, 17 aa, Artificial Sequence
  Description of Artificial Sequence: Synthetic peptide
  Seed: PRMCSLMQGSTLPRRSG
PRMFSLIQTSTNPRRSG

SEQ ID NO: 116306 - protein, 17 aa, Artificial Sequence
  Description of Artificial Sequence: Synthetic peptide
  Seed: PRMCSLMQGSTLPRRSG
PRMFSLIQTSTPPRRSG

SEQ ID NO: 116307 - protein, 17 aa, Artificial Sequence
  Description of Artificial Sequence: Synthetic peptide
  Seed: PRMCSLMQGSTLPRRSG
PRMFSLIQTSTQPRRSG

SEQ ID NO: 116308 - protein, 17 aa, Artificial Sequence
  Description of Artificial Sequence: Synthetic peptide
  Seed: PRMCSLMQGSTLPRRSG
PRMFSLIQTSTSPRRSG

SEQ ID NO: 116309 - protein, 17 aa, Artificial Sequence
  Description of Artificial Sequence: Synthetic peptide
  Seed: PRMCSLMQGSTLPRRSG
PRMFSLIQTSTTPRRSG

SEQ ID NO: 116310 - protein, 17 aa, Artificial Sequence
  Description of Artificial Sequence: Synthetic peptide
  Seed: PRMCSLMQGSTLPRRSG
PRMFSLIQTSTVPRRSG

SEQ ID NO: 116311 - protein, 17 aa, Artificial Sequence
  Description of Artificial Sequence: Synthetic peptide
  Seed: PRMCSLMQGSTLPRRSG
PRMFSLIQVSTAPRRSG

SEQ ID NO: 116312 - protein, 17 aa, Artificial Sequence
  Description of Artificial Sequence: Synthetic peptide
  Seed: PRMCSLMQGSTLPRRSG
PRMFSLIQVSTCPRRSG

SEQ ID NO: 116313 - protein, 17 aa, Artificial Sequence
  Description of Artificial Sequence: Synthetic peptide
  Seed: PRMCSLMQGSTLPRRSG
PRMFSLIQVSTGPRRSG

SEQ ID NO: 116314 - protein, 17 aa, Artificial Sequence
  Description of Artificial Sequence: Synthetic peptide
  Seed: PRMCSLMQGSTLPRRSG
PRMFSLIQVSTHPRRSG

SEQ ID NO: 116315 - protein, 17 aa, Artificial Sequence
  Description of Artificial Sequence: Synthetic peptide
  Seed: PRMCSLMQGSTLPRRSG
PRMFSLIQVSTIPRRSG

SEQ ID NO: 116316 - protein, 17 aa, Artificial Sequence
  Description of Artificial Sequence: Synthetic peptide
  Seed: PRMCSLMQGSTLPRRSG
PRMFSLIQVSTLPRRSG

SEQ ID NO: 116317 - protein, 17 aa, Artificial Sequence
  Description of Artificial Sequence: Synthetic peptide
  Seed: PRMCSLMQGSTLPRRSG
PRMFSLIQVSTMPRRSG

SEQ ID NO: 116318 - protein, 17 aa, Artificial Sequence
  Description of Artificial Sequence: Synthetic peptide
  Seed: PRMCSLMQGSTLPRRSG
PRMFSLIQVSTNPRRSG

SEQ ID NO: 116319 - protein, 17 aa, Artificial Sequence
  Description of Artificial Sequence: Synthetic peptide
  Seed: PRMCSLMQGSTLPRRSG
PRMFSLIQVSTPPRRSG

SEQ ID NO: 116320 - protein, 17 aa, Artificial Sequence
  Description of Artificial Sequence: Synthetic peptide
  Seed: PRMCSLMQGSTLPRRSG
PRMFSLIQVSTQPRRSG

SEQ ID NO: 116321 - protein, 17 aa, Artificial Sequence
  Description of Artificial Sequence: Synthetic peptide
  Seed: PRMCSLMQGSTLPRRSG
PRMFSLIQVSTSPRRSG

SEQ ID NO: 116322 - protein, 17 aa, Artificial Sequence
  Description of Artificial Sequence: Synthetic peptide
  Seed: PRMCSLMQGSTLPRRSG
PRMFSLIQVSTTPRRSG

SEQ ID NO: 116323 - protein, 17 aa, Artificial Sequence
  Description of Artificial Sequence: Synthetic peptide
  Seed: PRMCSLMQGSTLPRRSG
PRMFSLIQVSTVPRRSG

SEQ ID NO: 116324 - protein, 17 aa, Artificial Sequence
  Description of Artificial Sequence: Synthetic peptide
  Seed: PRMCSLMQGSTLPRRSG
PRMFSLLQASTAPRRSG

SEQ ID NO: 116325 - protein, 17 aa, Artificial Sequence
  Description of Artificial Sequence: Synthetic peptide
  Seed: PRMCSLMQGSTLPRRSG
PRMFSLLQASTCPRRSG

SEQ ID NO: 116326 - protein, 17 aa, Artificial Sequence
  Description of Artificial Sequence: Synthetic peptide
  Seed: PRMCSLMQGSTLPRRSG
PRMFSLLQASTDPRRSG

SEQ ID NO: 116327 - protein, 17 aa, Artificial Sequence
  Description of Artificial Sequence: Synthetic peptide
  Seed: PRMCSLMQGSTLPRRSG
PRMFSLLQASTEPRRSG

SEQ ID NO: 116328 - protein, 17 aa, Artificial Sequence
  Description of Artificial Sequence: Synthetic peptide
  Seed: PRMCSLMQGSTLPRRSG
PRMFSLLQASTFPRRSG

SEQ ID NO: 116329 - protein, 17 aa, Artificial Sequence
  Description of Artificial Sequence: Synthetic peptide
  Seed: PRMCSLMQGSTLPRRSG
PRMFSLLQASTGPRRSG

SEQ ID NO: 116330 - protein, 17 aa, Artificial Sequence
  Description of Artificial Sequence: Synthetic peptide
  Seed: PRMCSLMQGSTLPRRSG
PRMFSLLQASTHPRRSG

SEQ ID NO: 116331 - protein, 17 aa, Artificial Sequence
  Description of Artificial Sequence: Synthetic peptide
  Seed: PRMCSLMQGSTLPRRSG
PRMFSLLQASTIPRRSG

SEQ ID NO: 116332 - protein, 17 aa, Artificial Sequence
  Description of Artificial Sequence: Synthetic peptide
  Seed: PRMCSLMQGSTLPRRSG
PRMFSLLQASTKPRRSG

SEQ ID NO: 116333 - protein, 17 aa, Artificial Sequence
  Description of Artificial Sequence: Synthetic peptide
  Seed: PRMCSLMQGSTLPRRSG
PRMFSLLQASTLPRRSG

SEQ ID NO: 116334 - protein, 17 aa, Artificial Sequence
  Description of Artificial Sequence: Synthetic peptide
  Seed: PRMCSLMQGSTLPRRSG
PRMFSLLQASTMPRRSG

SEQ ID NO: 116335 - protein, 17 aa, Artificial Sequence
  Description of Artificial Sequence: Synthetic peptide
  Seed: PRMCSLMQGSTLPRRSG
PRMFSLLQASTNPRRSG

SEQ ID NO: 116336 - protein, 17 aa, Artificial Sequence
  Description of Artificial Sequence: Synthetic peptide
  Seed: PRMCSLMQGSTLPRRSG
PRMFSLLQASTPPRRSG

SEQ ID NO: 116337 - protein, 17 aa, Artificial Sequence
  Description of Artificial Sequence: Synthetic peptide
  Seed: PRMCSLMQGSTLPRRSG
PRMFSLLQASTQPRRSG

SEQ ID NO: 116338 - protein, 17 aa, Artificial Sequence
  Description of Artificial Sequence: Synthetic peptide
  Seed: PRMCSLMQGSTLPRRSG
PRMFSLLQASTRPRRSG

SEQ ID NO: 116339 - protein, 17 aa, Artificial Sequence
  Description of Artificial Sequence: Synthetic peptide
  Seed: PRMCSLMQGSTLPRRSG
PRMFSLLQASTSPRRSG

SEQ ID NO: 116340 - protein, 17 aa, Artificial Sequence
  Description of Artificial Sequence: Synthetic peptide
  Seed: PRMCSLMQGSTLPRRSG
PRMFSLLQASTTPRRSG

SEQ ID NO: 116341 - protein, 17 aa, Artificial Sequence
  Description of Artificial Sequence: Synthetic peptide
  Seed: PRMCSLMQGSTLPRRSG
PRMFSLLQASTVPRRSG

SEQ ID NO: 116342 - protein, 17 aa, Artificial Sequence
  Description of Artificial Sequence: Synthetic peptide
  Seed: PRMCSLMQGSTLPRRSG
PRMFSLLQASTWPRRSG

SEQ ID NO: 116343 - protein, 17 aa, Artificial Sequence
  Description of Artificial Sequence: Synthetic peptide
  Seed: PRMCSLMQGSTLPRRSG
PRMFSLLQASTYPRRSG

SEQ ID NO: 116344 - protein, 17 aa, Artificial Sequence
  Description of Artificial Sequence: Synthetic peptide
  Seed: PRMCSLMQGSTLPRRSG
PRMFSLLQCSTAPRRSG

SEQ ID NO: 116345 - protein, 17 aa, Artificial Sequence
  Description of Artificial Sequence: Synthetic peptide
  Seed: PRMCSLMQGSTLPRRSG
PRMFSLLQCSTLPRRSG

SEQ ID NO: 116346 - protein, 17 aa, Artificial Sequence
  Description of Artificial Sequence: Synthetic peptide
  Seed: PRMCSLMQGSTLPRRSG
PRMFSLLQCSTVPRRSG

SEQ ID NO: 116347 - protein, 17 aa, Artificial Sequence
  Description of Artificial Sequence: Synthetic peptide
  Seed: PRMCSLMQGSTLPRRSG
PRMFSLLQGSTAPRRSG

SEQ ID NO: 116348 - protein, 17 aa, Artificial Sequence
  Description of Artificial Sequence: Synthetic peptide
  Seed: PRMCSLMQGSTLPRRSG
PRMFSLLQGSTCPRRSG

SEQ ID NO: 116349 - protein, 17 aa, Artificial Sequence
  Description of Artificial Sequence: Synthetic peptide
  Seed: PRMCSLMQGSTLPRRSG
PRMFSLLQGSTFPRRSG

SEQ ID NO: 116350 - protein, 17 aa, Artificial Sequence
  Description of Artificial Sequence: Synthetic peptide
  Seed: PRMCSLMQGSTLPRRSG
PRMFSLLQGSTGPRRSG

SEQ ID NO: 116351 - protein, 17 aa, Artificial Sequence
  Description of Artificial Sequence: Synthetic peptide
  Seed: PRMCSLMQGSTLPRRSG
PRMFSLLQGSTHPRRSG

SEQ ID NO: 116352 - protein, 17 aa, Artificial Sequence
  Description of Artificial Sequence: Synthetic peptide
  Seed: PRMCSLMQGSTLPRRSG
PRMFSLLQGSTIPRRSG

SEQ ID NO: 116353 - protein, 17 aa, Artificial Sequence
  Description of Artificial Sequence: Synthetic peptide
  Seed: PRMCSLMQGSTLPRRSG
PRMFSLLQGSTLPRRSG

SEQ ID NO: 116354 - protein, 17 aa, Artificial Sequence
  Description of Artificial Sequence: Synthetic peptide
  Seed: PRMCSLMQGSTLPRRSG
PRMFSLLQGSTMPRRSG

SEQ ID NO: 116355 - protein, 17 aa, Artificial Sequence
  Description of Artificial Sequence: Synthetic peptide
  Seed: PRMCSLMQGSTLPRRSG
PRMFSLLQGSTNPRRSG

SEQ ID NO: 116356 - protein, 17 aa, Artificial Sequence
  Description of Artificial Sequence: Synthetic peptide
  Seed: PRMCSLMQGSTLPRRSG
PRMFSLLQGSTPPRRSG

SEQ ID NO: 116357 - protein, 17 aa, Artificial Sequence
  Description of Artificial Sequence: Synthetic peptide
  Seed: PRMCSLMQGSTLPRRSG
PRMFSLLQGSTQPRRSG

SEQ ID NO: 116358 - protein, 17 aa, Artificial Sequence
  Description of Artificial Sequence: Synthetic peptide
  Seed: PRMCSLMQGSTLPRRSG
PRMFSLLQGSTSPRRSG

SEQ ID NO: 116359 - protein, 17 aa, Artificial Sequence
  Description of Artificial Sequence: Synthetic peptide
  Seed: PRMCSLMQGSTLPRRSG
PRMFSLLQGSTTPRRSG

SEQ ID NO: 116360 - protein, 17 aa, Artificial Sequence
  Description of Artificial Sequence: Synthetic peptide
  Seed: PRMCSLMQGSTLPRRSG
PRMFSLLQGSTVPRRSG

SEQ ID NO: 116361 - protein, 17 aa, Artificial Sequence
  Description of Artificial Sequence: Synthetic peptide
  Seed: PRMCSLMQGSTLPRRSG
PRMFSLLQGSTYPRRSG

SEQ ID NO: 116362 - protein, 17 aa, Artificial Sequence
  Description of Artificial Sequence: Synthetic peptide
  Seed: PRMCSLMQGSTLPRRSG
PRMFSLLQHSTIPRRSG

SEQ ID NO: 116363 - protein, 17 aa, Artificial Sequence
  Description of Artificial Sequence: Synthetic peptide
  Seed: PRMCSLMQGSTLPRRSG
PRMFSLLQHSTLPRRSG

SEQ ID NO: 116364 - protein, 17 aa, Artificial Sequence
  Description of Artificial Sequence: Synthetic peptide
  Seed: PRMCSLMQGSTLPRRSG
PRMFSLLQHSTVPRRSG

SEQ ID NO: 116365 - protein, 17 aa, Artificial Sequence
  Description of Artificial Sequence: Synthetic peptide
  Seed: PRMCSLMQGSTLPRRSG
PRMFSLLQISTAPRRSG

SEQ ID NO: 116366 - protein, 17 aa, Artificial Sequence
  Description of Artificial Sequence: Synthetic peptide
  Seed: PRMCSLMQGSTLPRRSG
PRMFSLLQISTDPRRSG

SEQ ID NO: 116367 - protein, 17 aa, Artificial Sequence
  Description of Artificial Sequence: Synthetic peptide
  Seed: PRMCSLMQGSTLPRRSG
PRMFSLLQISTGPRRSG

SEQ ID NO: 116368 - protein, 17 aa, Artificial Sequence
  Description of Artificial Sequence: Synthetic peptide
  Seed: PRMCSLMQGSTLPRRSG
PRMFSLLQISTHPRRSG

SEQ ID NO: 116369 - protein, 17 aa, Artificial Sequence
  Description of Artificial Sequence: Synthetic peptide
  Seed: PRMCSLMQGSTLPRRSG
PRMFSLLQISTIPRRSG

SEQ ID NO: 116370 - protein, 17 aa, Artificial Sequence
  Description of Artificial Sequence: Synthetic peptide
  Seed: PRMCSLMQGSTLPRRSG
PRMFSLLQISTLPRRSG

SEQ ID NO: 116371 - protein, 17 aa, Artificial Sequence
  Description of Artificial Sequence: Synthetic peptide
  Seed: PRMCSLMQGSTLPRRSG
PRMFSLLQISTMPRRSG

SEQ ID NO: 116372 - protein, 17 aa, Artificial Sequence
  Description of Artificial Sequence: Synthetic peptide
  Seed: PRMCSLMQGSTLPRRSG
PRMFSLLQISTNPRRSG

SEQ ID NO: 116373 - protein, 17 aa, Artificial Sequence
  Description of Artificial Sequence: Synthetic peptide
  Seed: PRMCSLMQGSTLPRRSG
PRMFSLLQISTPPRRSG

SEQ ID NO: 116374 - protein, 17 aa, Artificial Sequence
  Description of Artificial Sequence: Synthetic peptide
  Seed: PRMCSLMQGSTLPRRSG
PRMFSLLQISTQPRRSG

SEQ ID NO: 116375 - protein, 17 aa, Artificial Sequence
  Description of Artificial Sequence: Synthetic peptide
  Seed: PRMCSLMQGSTLPRRSG
PRMFSLLQISTSPRRSG

SEQ ID NO: 116376 - protein, 17 aa, Artificial Sequence
  Description of Artificial Sequence: Synthetic peptide
  Seed: PRMCSLMQGSTLPRRSG
PRMFSLLQISTTPRRSG

SEQ ID NO: 116377 - protein, 17 aa, Artificial Sequence
  Description of Artificial Sequence: Synthetic peptide
  Seed: PRMCSLMQGSTLPRRSG
PRMFSLLQISTVPRRSG

SEQ ID NO: 116378 - protein, 17 aa, Artificial Sequence
  Description of Artificial Sequence: Synthetic peptide
  Seed: PRMCSLMQGSTLPRRSG
PRMFSLLQLSTAPRRSG

SEQ ID NO: 116379 - protein, 17 aa, Artificial Sequence
  Description of Artificial Sequence: Synthetic peptide
  Seed: PRMCSLMQGSTLPRRSG
PRMFSLLQLSTGPRRSG

SEQ ID NO: 116380 - protein, 17 aa, Artificial Sequence
  Description of Artificial Sequence: Synthetic peptide
  Seed: PRMCSLMQGSTLPRRSG
PRMFSLLQLSTIPRRSG

SEQ ID NO: 116381 - protein, 17 aa, Artificial Sequence
  Description of Artificial Sequence: Synthetic peptide
  Seed: PRMCSLMQGSTLPRRSG
PRMFSLLQLSTLPRRSG

SEQ ID NO: 116382 - protein, 17 aa, Artificial Sequence
  Description of Artificial Sequence: Synthetic peptide
  Seed: PRMCSLMQGSTLPRRSG
PRMFSLLQLSTMPRRSG

SEQ ID NO: 116383 - protein, 17 aa, Artificial Sequence
  Description of Artificial Sequence: Synthetic peptide
  Seed: PRMCSLMQGSTLPRRSG
PRMFSLLQLSTNPRRSG

SEQ ID NO: 116384 - protein, 17 aa, Artificial Sequence
  Description of Artificial Sequence: Synthetic peptide
  Seed: PRMCSLMQGSTLPRRSG
PRMFSLLQLSTSPRRSG

SEQ ID NO: 116385 - protein, 17 aa, Artificial Sequence
  Description of Artificial Sequence: Synthetic peptide
  Seed: PRMCSLMQGSTLPRRSG
PRMFSLLQLSTTPRRSG

SEQ ID NO: 116386 - protein, 17 aa, Artificial Sequence
  Description of Artificial Sequence: Synthetic peptide
  Seed: PRMCSLMQGSTLPRRSG
PRMFSLLQLSTVPRRSG

SEQ ID NO: 116387 - protein, 17 aa, Artificial Sequence
  Description of Artificial Sequence: Synthetic peptide
  Seed: PRMCSLMQGSTLPRRSG
PRMFSLLQMSTAPRRSG

SEQ ID NO: 116388 - protein, 17 aa, Artificial Sequence
  Description of Artificial Sequence: Synthetic peptide
  Seed: PRMCSLMQGSTLPRRSG
PRMFSLLQMSTIPRRSG

SEQ ID NO: 116389 - protein, 17 aa, Artificial Sequence
  Description of Artificial Sequence: Synthetic peptide
  Seed: PRMCSLMQGSTLPRRSG
PRMFSLLQMSTLPRRSG

SEQ ID NO: 116390 - protein, 17 aa, Artificial Sequence
  Description of Artificial Sequence: Synthetic peptide
  Seed: PRMCSLMQGSTLPRRSG
PRMFSLLQMSTMPRRSG

SEQ ID NO: 116391 - protein, 17 aa, Artificial Sequence
  Description of Artificial Sequence: Synthetic peptide
  Seed: PRMCSLMQGSTLPRRSG
PRMFSLLQMSTNPRRSG

SEQ ID NO: 116392 - protein, 17 aa, Artificial Sequence
  Description of Artificial Sequence: Synthetic peptide
  Seed: PRMCSLMQGSTLPRRSG
PRMFSLLQMSTSPRRSG

SEQ ID NO: 116393 - protein, 17 aa, Artificial Sequence
  Description of Artificial Sequence: Synthetic peptide
  Seed: PRMCSLMQGSTLPRRSG
PRMFSLLQMSTTPRRSG

SEQ ID NO: 116394 - protein, 17 aa, Artificial Sequence
  Description of Artificial Sequence: Synthetic peptide
  Seed: PRMCSLMQGSTLPRRSG
PRMFSLLQMSTVPRRSG

SEQ ID NO: 116395 - protein, 17 aa, Artificial Sequence
  Description of Artificial Sequence: Synthetic peptide
  Seed: PRMCSLMQGSTLPRRSG
PRMFSLLQNSTAPRRSG

SEQ ID NO: 116396 - protein, 17 aa, Artificial Sequence
  Description of Artificial Sequence: Synthetic peptide
  Seed: PRMCSLMQGSTLPRRSG
PRMFSLLQNSTCPRRSG

SEQ ID NO: 116397 - protein, 17 aa, Artificial Sequence
  Description of Artificial Sequence: Synthetic peptide
  Seed: PRMCSLMQGSTLPRRSG
PRMFSLLQNSTFPRRSG

SEQ ID NO: 116398 - protein, 17 aa, Artificial Sequence
  Description of Artificial Sequence: Synthetic peptide
  Seed: PRMCSLMQGSTLPRRSG
PRMFSLLQNSTGPRRSG

SEQ ID NO: 116399 - protein, 17 aa, Artificial Sequence
  Description of Artificial Sequence: Synthetic peptide
  Seed: PRMCSLMQGSTLPRRSG
PRMFSLLQNSTHPRRSG

SEQ ID NO: 116400 - protein, 17 aa, Artificial Sequence
  Description of Artificial Sequence: Synthetic peptide
  Seed: PRMCSLMQGSTLPRRSG
PRMFSLLQNSTIPRRSG

SEQ ID NO: 116401 - protein, 17 aa, Artificial Sequence
  Description of Artificial Sequence: Synthetic peptide
  Seed: PRMCSLMQGSTLPRRSG
PRMFSLLQNSTLPRRSG

SEQ ID NO: 116402 - protein, 17 aa, Artificial Sequence
  Description of Artificial Sequence: Synthetic peptide
  Seed: PRMCSLMQGSTLPRRSG
PRMFSLLQNSTMPRRSG

SEQ ID NO: 116403 - protein, 17 aa, Artificial Sequence
  Description of Artificial Sequence: Synthetic peptide
  Seed: PRMCSLMQGSTLPRRSG
PRMFSLLQNSTNPRRSG

SEQ ID NO: 116404 - protein, 17 aa, Artificial Sequence
  Description of Artificial Sequence: Synthetic peptide
  Seed: PRMCSLMQGSTLPRRSG
PRMFSLLQNSTSPRRSG

SEQ ID NO: 116405 - protein, 17 aa, Artificial Sequence
  Description of Artificial Sequence: Synthetic peptide
  Seed: PRMCSLMQGSTLPRRSG
PRMFSLLQNSTTPRRSG

SEQ ID NO: 116406 - protein, 17 aa, Artificial Sequence
  Description of Artificial Sequence: Synthetic peptide
  Seed: PRMCSLMQGSTLPRRSG
PRMFSLLQNSTVPRRSG

SEQ ID NO: 116407 - protein, 17 aa, Artificial Sequence
  Description of Artificial Sequence: Synthetic peptide
  Seed: PRMCSLMQGSTLPRRSG
PRMFSLLQPSTAPRRSG

SEQ ID NO: 116408 - protein, 17 aa, Artificial Sequence
  Description of Artificial Sequence: Synthetic peptide
  Seed: PRMCSLMQGSTLPRRSG
PRMFSLLQPSTCPRRSG

SEQ ID NO: 116409 - protein, 17 aa, Artificial Sequence
  Description of Artificial Sequence: Synthetic peptide
  Seed: PRMCSLMQGSTLPRRSG
PRMFSLLQPSTDPRRSG

SEQ ID NO: 116410 - protein, 17 aa, Artificial Sequence
  Description of Artificial Sequence: Synthetic peptide
  Seed: PRMCSLMQGSTLPRRSG
PRMFSLLQPSTEPRRSG

SEQ ID NO: 116411 - protein, 17 aa, Artificial Sequence
  Description of Artificial Sequence: Synthetic peptide
  Seed: PRMCSLMQGSTLPRRSG
PRMFSLLQPSTFPRRSG

SEQ ID NO: 116412 - protein, 17 aa, Artificial Sequence
  Description of Artificial Sequence: Synthetic peptide
  Seed: PRMCSLMQGSTLPRRSG
PRMFSLLQPSTGPRRSG

SEQ ID NO: 116413 - protein, 17 aa, Artificial Sequence
  Description of Artificial Sequence: Synthetic peptide
  Seed: PRMCSLMQGSTLPRRSG
PRMFSLLQPSTHPRRSG

SEQ ID NO: 116414 - protein, 17 aa, Artificial Sequence
  Description of Artificial Sequence: Synthetic peptide
  Seed: PRMCSLMQGSTLPRRSG
PRMFSLLQPSTIPRRSG

SEQ ID NO: 116415 - protein, 17 aa, Artificial Sequence
  Description of Artificial Sequence: Synthetic peptide
  Seed: PRMCSLMQGSTLPRRSG
PRMFSLLQPSTLPRRSG

SEQ ID NO: 116416 - protein, 17 aa, Artificial Sequence
  Description of Artificial Sequence: Synthetic peptide
  Seed: PRMCSLMQGSTLPRRSG
PRMFSLLQPSTMPRRSG

SEQ ID NO: 116417 - protein, 17 aa, Artificial Sequence
  Description of Artificial Sequence: Synthetic peptide
  Seed: PRMCSLMQGSTLPRRSG
PRMFSLLQPSTNPRRSG

SEQ ID NO: 116418 - protein, 17 aa, Artificial Sequence
  Description of Artificial Sequence: Synthetic peptide
  Seed: PRMCSLMQGSTLPRRSG
PRMFSLLQPSTPPRRSG

SEQ ID NO: 116419 - protein, 17 aa, Artificial Sequence
  Description of Artificial Sequence: Synthetic peptide
  Seed: PRMCSLMQGSTLPRRSG
PRMFSLLQPSTQPRRSG

SEQ ID NO: 116420 - protein, 17 aa, Artificial Sequence
  Description of Artificial Sequence: Synthetic peptide
  Seed: PRMCSLMQGSTLPRRSG
PRMFSLLQPSTSPRRSG

SEQ ID NO: 116421 - protein, 17 aa, Artificial Sequence
  Description of Artificial Sequence: Synthetic peptide
  Seed: PRMCSLMQGSTLPRRSG
PRMFSLLQPSTTPRRSG

SEQ ID NO: 116422 - protein, 17 aa, Artificial Sequence
  Description of Artificial Sequence: Synthetic peptide
  Seed: PRMCSLMQGSTLPRRSG
PRMFSLLQPSTVPRRSG

SEQ ID NO: 116423 - protein, 17 aa, Artificial Sequence
  Description of Artificial Sequence: Synthetic peptide
  Seed: PRMCSLMQGSTLPRRSG
PRMFSLLQPSTWPRRSG

SEQ ID NO: 116424 - protein, 17 aa, Artificial Sequence
  Description of Artificial Sequence: Synthetic peptide
  Seed: PRMCSLMQGSTLPRRSG
PRMFSLLQQSTLPRRSG

SEQ ID NO: 116425 - protein, 17 aa, Artificial Sequence
  Description of Artificial Sequence: Synthetic peptide
  Seed: PRMCSLMQGSTLPRRSG
PRMFSLLQQSTVPRRSG

SEQ ID NO: 116426 - protein, 17 aa, Artificial Sequence
  Description of Artificial Sequence: Synthetic peptide
  Seed: PRMCSLMQGSTLPRRSG
PRMFSLLQSSTAPRRSG

SEQ ID NO: 116427 - protein, 17 aa, Artificial Sequence
  Description of Artificial Sequence: Synthetic peptide
  Seed: PRMCSLMQGSTLPRRSG
PRMFSLLQSSTCPRRSG

SEQ ID NO: 116428 - protein, 17 aa, Artificial Sequence
  Description of Artificial Sequence: Synthetic peptide
  Seed: PRMCSLMQGSTLPRRSG
PRMFSLLQSSTDPRRSG

SEQ ID NO: 116429 - protein, 17 aa, Artificial Sequence
  Description of Artificial Sequence: Synthetic peptide
  Seed: PRMCSLMQGSTLPRRSG
PRMFSLLQSSTEPRRSG

SEQ ID NO: 116430 - protein, 17 aa, Artificial Sequence
  Description of Artificial Sequence: Synthetic peptide
  Seed: PRMCSLMQGSTLPRRSG
PRMFSLLQSSTFPRRSG

SEQ ID NO: 116431 - protein, 17 aa, Artificial Sequence
  Description of Artificial Sequence: Synthetic peptide
  Seed: PRMCSLMQGSTLPRRSG
PRMFSLLQSSTGPRRSG

SEQ ID NO: 116432 - protein, 17 aa, Artificial Sequence
  Description of Artificial Sequence: Synthetic peptide
  Seed: PRMCSLMQGSTLPRRSG
PRMFSLLQSSTHPRRSG

SEQ ID NO: 116433 - protein, 17 aa, Artificial Sequence
  Description of Artificial Sequence: Synthetic peptide
  Seed: PRMCSLMQGSTLPRRSG
PRMFSLLQSSTIPRRSG

SEQ ID NO: 116434 - protein, 17 aa, Artificial Sequence
  Description of Artificial Sequence: Synthetic peptide
  Seed: PRMCSLMQGSTLPRRSG
PRMFSLLQSSTLPRRSG

SEQ ID NO: 116435 - protein, 17 aa, Artificial Sequence
  Description of Artificial Sequence: Synthetic peptide
  Seed: PRMCSLMQGSTLPRRSG
PRMFSLLQSSTMPRRSG

SEQ ID NO: 116436 - protein, 17 aa, Artificial Sequence
  Description of Artificial Sequence: Synthetic peptide
  Seed: PRMCSLMQGSTLPRRSG
PRMFSLLQSSTNPRRSG

SEQ ID NO: 116437 - protein, 17 aa, Artificial Sequence
  Description of Artificial Sequence: Synthetic peptide
  Seed: PRMCSLMQGSTLPRRSG
PRMFSLLQSSTPPRRSG

SEQ ID NO: 116438 - protein, 17 aa, Artificial Sequence
  Description of Artificial Sequence: Synthetic peptide
  Seed: PRMCSLMQGSTLPRRSG
PRMFSLLQSSTQPRRSG

SEQ ID NO: 116439 - protein, 17 aa, Artificial Sequence
  Description of Artificial Sequence: Synthetic peptide
  Seed: PRMCSLMQGSTLPRRSG
PRMFSLLQSSTSPRRSG

SEQ ID NO: 116440 - protein, 17 aa, Artificial Sequence
  Description of Artificial Sequence: Synthetic peptide
  Seed: PRMCSLMQGSTLPRRSG
PRMFSLLQSSTTPRRSG

SEQ ID NO: 116441 - protein, 17 aa, Artificial Sequence
  Description of Artificial Sequence: Synthetic peptide
  Seed: PRMCSLMQGSTLPRRSG
PRMFSLLQSSTVPRRSG

SEQ ID NO: 116442 - protein, 17 aa, Artificial Sequence
  Description of Artificial Sequence: Synthetic peptide
  Seed: PRMCSLMQGSTLPRRSG
PRMFSLLQSSTYPRRSG

SEQ ID NO: 116443 - protein, 17 aa, Artificial Sequence
  Description of Artificial Sequence: Synthetic peptide
  Seed: PRMCSLMQGSTLPRRSG
PRMFSLLQTSTAPRRSG

SEQ ID NO: 116444 - protein, 17 aa, Artificial Sequence
  Description of Artificial Sequence: Synthetic peptide
  Seed: PRMCSLMQGSTLPRRSG
PRMFSLLQTSTCPRRSG

SEQ ID NO: 116445 - protein, 17 aa, Artificial Sequence
  Description of Artificial Sequence: Synthetic peptide
  Seed: PRMCSLMQGSTLPRRSG
PRMFSLLQTSTDPRRSG

SEQ ID NO: 116446 - protein, 17 aa, Artificial Sequence
  Description of Artificial Sequence: Synthetic peptide
  Seed: PRMCSLMQGSTLPRRSG
PRMFSLLQTSTEPRRSG

SEQ ID NO: 116447 - protein, 17 aa, Artificial Sequence
  Description of Artificial Sequence: Synthetic peptide
  Seed: PRMCSLMQGSTLPRRSG
PRMFSLLQTSTFPRRSG

SEQ ID NO: 116448 - protein, 17 aa, Artificial Sequence
  Description of Artificial Sequence: Synthetic peptide
  Seed: PRMCSLMQGSTLPRRSG
PRMFSLLQTSTGPRRSG

SEQ ID NO: 116449 - protein, 17 aa, Artificial Sequence
  Description of Artificial Sequence: Synthetic peptide
  Seed: PRMCSLMQGSTLPRRSG
PRMFSLLQTSTHPRRSG

SEQ ID NO: 116450 - protein, 17 aa, Artificial Sequence
  Description of Artificial Sequence: Synthetic peptide
  Seed: PRMCSLMQGSTLPRRSG
PRMFSLLQTSTIPRRSG

SEQ ID NO: 116451 - protein, 17 aa, Artificial Sequence
  Description of Artificial Sequence: Synthetic peptide
  Seed: PRMCSLMQGSTLPRRSG
PRMFSLLQTSTLPRRSG

SEQ ID NO: 116452 - protein, 17 aa, Artificial Sequence
  Description of Artificial Sequence: Synthetic peptide
  Seed: PRMCSLMQGSTLPRRSG
PRMFSLLQTSTMPRRSG

SEQ ID NO: 116453 - protein, 17 aa, Artificial Sequence
  Description of Artificial Sequence: Synthetic peptide
  Seed: PRMCSLMQGSTLPRRSG
PRMFSLLQTSTNPRRSG

SEQ ID NO: 116454 - protein, 17 aa, Artificial Sequence
  Description of Artificial Sequence: Synthetic peptide
  Seed: PRMCSLMQGSTLPRRSG
PRMFSLLQTSTPPRRSG

SEQ ID NO: 116455 - protein, 17 aa, Artificial Sequence
  Description of Artificial Sequence: Synthetic peptide
  Seed: PRMCSLMQGSTLPRRSG
PRMFSLLQTSTQPRRSG

SEQ ID NO: 116456 - protein, 17 aa, Artificial Sequence
  Description of Artificial Sequence: Synthetic peptide
  Seed: PRMCSLMQGSTLPRRSG
PRMFSLLQTSTSPRRSG

SEQ ID NO: 116457 - protein, 17 aa, Artificial Sequence
  Description of Artificial Sequence: Synthetic peptide
  Seed: PRMCSLMQGSTLPRRSG
PRMFSLLQTSTTPRRSG

SEQ ID NO: 116458 - protein, 17 aa, Artificial Sequence
  Description of Artificial Sequence: Synthetic peptide
  Seed: PRMCSLMQGSTLPRRSG
PRMFSLLQTSTVPRRSG

SEQ ID NO: 116459 - protein, 17 aa, Artificial Sequence
  Description of Artificial Sequence: Synthetic peptide
  Seed: PRMCSLMQGSTLPRRSG
PRMFSLLQVSTAPRRSG

SEQ ID NO: 116460 - protein, 17 aa, Artificial Sequence
  Description of Artificial Sequence: Synthetic peptide
  Seed: PRMCSLMQGSTLPRRSG
PRMFSLLQVSTCPRRSG

SEQ ID NO: 116461 - protein, 17 aa, Artificial Sequence
  Description of Artificial Sequence: Synthetic peptide
  Seed: PRMCSLMQGSTLPRRSG
PRMFSLLQVSTDPRRSG

SEQ ID NO: 116462 - protein, 17 aa, Artificial Sequence
  Description of Artificial Sequence: Synthetic peptide
  Seed: PRMCSLMQGSTLPRRSG
PRMFSLLQVSTEPRRSG

SEQ ID NO: 116463 - protein, 17 aa, Artificial Sequence
  Description of Artificial Sequence: Synthetic peptide
  Seed: PRMCSLMQGSTLPRRSG
PRMFSLLQVSTGPRRSG

SEQ ID NO: 116464 - protein, 17 aa, Artificial Sequence
  Description of Artificial Sequence: Synthetic peptide
  Seed: PRMCSLMQGSTLPRRSG
PRMFSLLQVSTHPRRSG

SEQ ID NO: 116465 - protein, 17 aa, Artificial Sequence
  Description of Artificial Sequence: Synthetic peptide
  Seed: PRMCSLMQGSTLPRRSG
PRMFSLLQVSTIPRRSG

SEQ ID NO: 116466 - protein, 17 aa, Artificial Sequence
  Description of Artificial Sequence: Synthetic peptide
  Seed: PRMCSLMQGSTLPRRSG
PRMFSLLQVSTLPRRSG

SEQ ID NO: 116467 - protein, 17 aa, Artificial Sequence
  Description of Artificial Sequence: Synthetic peptide
  Seed: PRMCSLMQGSTLPRRSG
PRMFSLLQVSTMPRRSG

SEQ ID NO: 116468 - protein, 17 aa, Artificial Sequence
  Description of Artificial Sequence: Synthetic peptide
  Seed: PRMCSLMQGSTLPRRSG
PRMFSLLQVSTNPRRSG

SEQ ID NO: 116469 - protein, 17 aa, Artificial Sequence
  Description of Artificial Sequence: Synthetic peptide
  Seed: PRMCSLMQGSTLPRRSG
PRMFSLLQVSTPPRRSG

SEQ ID NO: 116470 - protein, 17 aa, Artificial Sequence
  Description of Artificial Sequence: Synthetic peptide
  Seed: PRMCSLMQGSTLPRRSG
PRMFSLLQVSTQPRRSG

SEQ ID NO: 116471 - protein, 17 aa, Artificial Sequence
  Description of Artificial Sequence: Synthetic peptide
  Seed: PRMCSLMQGSTLPRRSG
PRMFSLLQVSTSPRRSG

SEQ ID NO: 116472 - protein, 17 aa, Artificial Sequence
  Description of Artificial Sequence: Synthetic peptide
  Seed: PRMCSLMQGSTLPRRSG
PRMFSLLQVSTTPRRSG

SEQ ID NO: 116473 - protein, 17 aa, Artificial Sequence
  Description of Artificial Sequence: Synthetic peptide
  Seed: PRMCSLMQGSTLPRRSG
PRMFSLLQVSTVPRRSG

SEQ ID NO: 116474 - protein, 17 aa, Artificial Sequence
  Description of Artificial Sequence: Synthetic peptide
  Seed: PRMCSLMQGSTLPRRSG
PRMFSLMQASTAPRRSG

SEQ ID NO: 116475 - protein, 17 aa, Artificial Sequence
  Description of Artificial Sequence: Synthetic peptide
  Seed: PRMCSLMQGSTLPRRSG
PRMFSLMQASTCPRRSG

SEQ ID NO: 116476 - protein, 17 aa, Artificial Sequence
  Description of Artificial Sequence: Synthetic peptide
  Seed: PRMCSLMQGSTLPRRSG
PRMFSLMQASTDPRRSG

SEQ ID NO: 116477 - protein, 17 aa, Artificial Sequence
  Description of Artificial Sequence: Synthetic peptide
  Seed: PRMCSLMQGSTLPRRSG
PRMFSLMQASTEPRRSG

SEQ ID NO: 116478 - protein, 17 aa, Artificial Sequence
  Description of Artificial Sequence: Synthetic peptide
  Seed: PRMCSLMQGSTLPRRSG
PRMFSLMQASTFPRRSG

SEQ ID NO: 116479 - protein, 17 aa, Artificial Sequence
  Description of Artificial Sequence: Synthetic peptide
  Seed: PRMCSLMQGSTLPRRSG
PRMFSLMQASTGPRRSG

SEQ ID NO: 116480 - protein, 17 aa, Artificial Sequence
  Description of Artificial Sequence: Synthetic peptide
  Seed: PRMCSLMQGSTLPRRSG
PRMFSLMQASTHPRRSG

SEQ ID NO: 116481 - protein, 17 aa, Artificial Sequence
  Description of Artificial Sequence: Synthetic peptide
  Seed: PRMCSLMQGSTLPRRSG
PRMFSLMQASTIPRRSG

SEQ ID NO: 116482 - protein, 17 aa, Artificial Sequence
  Description of Artificial Sequence: Synthetic peptide
  Seed: PRMCSLMQGSTLPRRSG
PRMFSLMQASTKPRRSG

SEQ ID NO: 116483 - protein, 17 aa, Artificial Sequence
  Description of Artificial Sequence: Synthetic peptide
  Seed: PRMCSLMQGSTLPRRSG
PRMFSLMQASTLPRRSG

SEQ ID NO: 116484 - protein, 17 aa, Artificial Sequence
  Description of Artificial Sequence: Synthetic peptide
  Seed: PRMCSLMQGSTLPRRSG
PRMFSLMQASTMPRRSG

SEQ ID NO: 116485 - protein, 17 aa, Artificial Sequence
  Description of Artificial Sequence: Synthetic peptide
  Seed: PRMCSLMQGSTLPRRSG
PRMFSLMQASTNPRRSG

SEQ ID NO: 116486 - protein, 17 aa, Artificial Sequence
  Description of Artificial Sequence: Synthetic peptide
  Seed: PRMCSLMQGSTLPRRSG
PRMFSLMQASTPPRRSG

SEQ ID NO: 116487 - protein, 17 aa, Artificial Sequence
  Description of Artificial Sequence: Synthetic peptide
  Seed: PRMCSLMQGSTLPRRSG
PRMFSLMQASTQPRRSG

SEQ ID NO: 116488 - protein, 17 aa, Artificial Sequence
  Description of Artificial Sequence: Synthetic peptide
  Seed: PRMCSLMQGSTLPRRSG
PRMFSLMQASTRPRRSG

SEQ ID NO: 116489 - protein, 17 aa, Artificial Sequence
  Description of Artificial Sequence: Synthetic peptide
  Seed: PRMCSLMQGSTLPRRSG
PRMFSLMQASTSPRRSG

SEQ ID NO: 116490 - protein, 17 aa, Artificial Sequence
  Description of Artificial Sequence: Synthetic peptide
  Seed: PRMCSLMQGSTLPRRSG
PRMFSLMQASTTPRRSG

SEQ ID NO: 116491 - protein, 17 aa, Artificial Sequence
  Description of Artificial Sequence: Synthetic peptide
  Seed: PRMCSLMQGSTLPRRSG
PRMFSLMQASTVPRRSG

SEQ ID NO: 116492 - protein, 17 aa, Artificial Sequence
  Description of Artificial Sequence: Synthetic peptide
  Seed: PRMCSLMQGSTLPRRSG
PRMFSLMQASTWPRRSG

SEQ ID NO: 116493 - protein, 17 aa, Artificial Sequence
  Description of Artificial Sequence: Synthetic peptide
  Seed: PRMCSLMQGSTLPRRSG
PRMFSLMQASTYPRRSG

SEQ ID NO: 116494 - protein, 17 aa, Artificial Sequence
  Description of Artificial Sequence: Synthetic peptide
  Seed: PRMCSLMQGSTLPRRSG
PRMFSLMQCSTAPRRSG

SEQ ID NO: 116495 - protein, 17 aa, Artificial Sequence
  Description of Artificial Sequence: Synthetic peptide
  Seed: PRMCSLMQGSTLPRRSG
PRMFSLMQCSTLPRRSG

SEQ ID NO: 116496 - protein, 17 aa, Artificial Sequence
  Description of Artificial Sequence: Synthetic peptide
  Seed: PRMCSLMQGSTLPRRSG
PRMFSLMQCSTVPRRSG

SEQ ID NO: 116497 - protein, 17 aa, Artificial Sequence
  Description of Artificial Sequence: Synthetic peptide
  Seed: PRMCSLMQGSTLPRRSG
PRMFSLMQFSTAPRRSG

SEQ ID NO: 116498 - protein, 17 aa, Artificial Sequence
  Description of Artificial Sequence: Synthetic peptide
  Seed: PRMCSLMQGSTLPRRSG
PRMFSLMQGSTAPRRSG

SEQ ID NO: 116499 - protein, 17 aa, Artificial Sequence
  Description of Artificial Sequence: Synthetic peptide
  Seed: PRMCSLMQGSTLPRRSG
PRMFSLMQGSTCPRRSG

SEQ ID NO: 116500 - protein, 17 aa, Artificial Sequence
  Description of Artificial Sequence: Synthetic peptide
  Seed: PRMCSLMQGSTLPRRSG
PRMFSLMQGSTFPRRSG

SEQ ID NO: 116501 - protein, 17 aa, Artificial Sequence
  Description of Artificial Sequence: Synthetic peptide
  Seed: PRMCSLMQGSTLPRRSG
PRMFSLMQGSTGPRRSG

SEQ ID NO: 116502 - protein, 17 aa, Artificial Sequence
  Description of Artificial Sequence: Synthetic peptide
  Seed: PRMCSLMQGSTLPRRSG
PRMFSLMQGSTHPRRSG

SEQ ID NO: 116503 - protein, 17 aa, Artificial Sequence
  Description of Artificial Sequence: Synthetic peptide
  Seed: PRMCSLMQGSTLPRRSG
PRMFSLMQGSTIPRRSG

SEQ ID NO: 116504 - protein, 17 aa, Artificial Sequence
  Description of Artificial Sequence: Synthetic peptide
  Seed: PRMCSLMQGSTLPRRSG
PRMFSLMQGSTLPRRSG

SEQ ID NO: 116505 - protein, 17 aa, Artificial Sequence
  Description of Artificial Sequence: Synthetic peptide
  Seed: PRMCSLMQGSTLPRRSG
PRMFSLMQGSTMPRRSG

SEQ ID NO: 116506 - protein, 17 aa, Artificial Sequence
  Description of Artificial Sequence: Synthetic peptide
  Seed: PRMCSLMQGSTLPRRSG
PRMFSLMQGSTNPRRSG

SEQ ID NO: 116507 - protein, 17 aa, Artificial Sequence
  Description of Artificial Sequence: Synthetic peptide
  Seed: PRMCSLMQGSTLPRRSG
PRMFSLMQGSTPPRRSG

SEQ ID NO: 116508 - protein, 17 aa, Artificial Sequence
  Description of Artificial Sequence: Synthetic peptide
  Seed: PRMCSLMQGSTLPRRSG
PRMFSLMQGSTQPRRSG

SEQ ID NO: 116509 - protein, 17 aa, Artificial Sequence
  Description of Artificial Sequence: Synthetic peptide
  Seed: PRMCSLMQGSTLPRRSG
PRMFSLMQGSTSPRRSG

SEQ ID NO: 116510 - protein, 17 aa, Artificial Sequence
  Description of Artificial Sequence: Synthetic peptide
  Seed: PRMCSLMQGSTLPRRSG
PRMFSLMQGSTTPRRSG

SEQ ID NO: 116511 - protein, 17 aa, Artificial Sequence
  Description of Artificial Sequence: Synthetic peptide
  Seed: PRMCSLMQGSTLPRRSG
PRMFSLMQGSTVPRRSG

SEQ ID NO: 116512 - protein, 17 aa, Artificial Sequence
  Description of Artificial Sequence: Synthetic peptide
  Seed: PRMCSLMQGSTLPRRSG
PRMFSLMQGSTYPRRSG

SEQ ID NO: 116513 - protein, 17 aa, Artificial Sequence
  Description of Artificial Sequence: Synthetic peptide
  Seed: PRMCSLMQGSTLPRRSG
PRMFSLMQHSTAPRRSG

SEQ ID NO: 116514 - protein, 17 aa, Artificial Sequence
  Description of Artificial Sequence: Synthetic peptide
  Seed: PRMCSLMQGSTLPRRSG
PRMFSLMQHSTIPRRSG

SEQ ID NO: 116515 - protein, 17 aa, Artificial Sequence
  Description of Artificial Sequence: Synthetic peptide
  Seed: PRMCSLMQGSTLPRRSG
PRMFSLMQHSTLPRRSG

SEQ ID NO: 116516 - protein, 17 aa, Artificial Sequence
  Description of Artificial Sequence: Synthetic peptide
  Seed: PRMCSLMQGSTLPRRSG
PRMFSLMQHSTVPRRSG

SEQ ID NO: 116517 - protein, 17 aa, Artificial Sequence
  Description of Artificial Sequence: Synthetic peptide
  Seed: PRMCSLMQGSTLPRRSG
PRMFSLMQISTAPRRSG

SEQ ID NO: 116518 - protein, 17 aa, Artificial Sequence
  Description of Artificial Sequence: Synthetic peptide
  Seed: PRMCSLMQGSTLPRRSG
PRMFSLMQISTCPRRSG

SEQ ID NO: 116519 - protein, 17 aa, Artificial Sequence
  Description of Artificial Sequence: Synthetic peptide
  Seed: PRMCSLMQGSTLPRRSG
PRMFSLMQISTDPRRSG

SEQ ID NO: 116520 - protein, 17 aa, Artificial Sequence
  Description of Artificial Sequence: Synthetic peptide
  Seed: PRMCSLMQGSTLPRRSG
PRMFSLMQISTEPRRSG

SEQ ID NO: 116521 - protein, 17 aa, Artificial Sequence
  Description of Artificial Sequence: Synthetic peptide
  Seed: PRMCSLMQGSTLPRRSG
PRMFSLMQISTGPRRSG

SEQ ID NO: 116522 - protein, 17 aa, Artificial Sequence
  Description of Artificial Sequence: Synthetic peptide
  Seed: PRMCSLMQGSTLPRRSG
PRMFSLMQISTHPRRSG

SEQ ID NO: 116523 - protein, 17 aa, Artificial Sequence
  Description of Artificial Sequence: Synthetic peptide
  Seed: PRMCSLMQGSTLPRRSG
PRMFSLMQISTIPRRSG

SEQ ID NO: 116524 - protein, 17 aa, Artificial Sequence
  Description of Artificial Sequence: Synthetic peptide
  Seed: PRMCSLMQGSTLPRRSG
PRMFSLMQISTLPRRSG

SEQ ID NO: 116525 - protein, 17 aa, Artificial Sequence
  Description of Artificial Sequence: Synthetic peptide
  Seed: PRMCSLMQGSTLPRRSG
PRMFSLMQISTMPRRSG

SEQ ID NO: 116526 - protein, 17 aa, Artificial Sequence
  Description of Artificial Sequence: Synthetic peptide
  Seed: PRMCSLMQGSTLPRRSG
PRMFSLMQISTNPRRSG

SEQ ID NO: 116527 - protein, 17 aa, Artificial Sequence
  Description of Artificial Sequence: Synthetic peptide
  Seed: PRMCSLMQGSTLPRRSG
PRMFSLMQISTPPRRSG

SEQ ID NO: 116528 - protein, 17 aa, Artificial Sequence
  Description of Artificial Sequence: Synthetic peptide
  Seed: PRMCSLMQGSTLPRRSG
PRMFSLMQISTQPRRSG

SEQ ID NO: 116529 - protein, 17 aa, Artificial Sequence
  Description of Artificial Sequence: Synthetic peptide
  Seed: PRMCSLMQGSTLPRRSG
PRMFSLMQISTSPRRSG

SEQ ID NO: 116530 - protein, 17 aa, Artificial Sequence
  Description of Artificial Sequence: Synthetic peptide
  Seed: PRMCSLMQGSTLPRRSG
PRMFSLMQISTTPRRSG

SEQ ID NO: 116531 - protein, 17 aa, Artificial Sequence
  Description of Artificial Sequence: Synthetic peptide
  Seed: PRMCSLMQGSTLPRRSG
PRMFSLMQISTVPRRSG

SEQ ID NO: 116532 - protein, 17 aa, Artificial Sequence
  Description of Artificial Sequence: Synthetic peptide
  Seed: PRMCSLMQGSTLPRRSG
PRMFSLMQLSTAPRRSG

SEQ ID NO: 116533 - protein, 17 aa, Artificial Sequence
  Description of Artificial Sequence: Synthetic peptide
  Seed: PRMCSLMQGSTLPRRSG
PRMFSLMQLSTGPRRSG

SEQ ID NO: 116534 - protein, 17 aa, Artificial Sequence
  Description of Artificial Sequence: Synthetic peptide
  Seed: PRMCSLMQGSTLPRRSG
PRMFSLMQLSTHPRRSG

SEQ ID NO: 116535 - protein, 17 aa, Artificial Sequence
  Description of Artificial Sequence: Synthetic peptide
  Seed: PRMCSLMQGSTLPRRSG
PRMFSLMQLSTIPRRSG

SEQ ID NO: 116536 - protein, 17 aa, Artificial Sequence
  Description of Artificial Sequence: Synthetic peptide
  Seed: PRMCSLMQGSTLPRRSG
PRMFSLMQLSTLPRRSG

SEQ ID NO: 116537 - protein, 17 aa, Artificial Sequence
  Description of Artificial Sequence: Synthetic peptide
  Seed: PRMCSLMQGSTLPRRSG
PRMFSLMQLSTMPRRSG

SEQ ID NO: 116538 - protein, 17 aa, Artificial Sequence
  Description of Artificial Sequence: Synthetic peptide
  Seed: PRMCSLMQGSTLPRRSG
PRMFSLMQLSTNPRRSG

SEQ ID NO: 116539 - protein, 17 aa, Artificial Sequence
  Description of Artificial Sequence: Synthetic peptide
  Seed: PRMCSLMQGSTLPRRSG
PRMFSLMQLSTSPRRSG

SEQ ID NO: 116540 - protein, 17 aa, Artificial Sequence
  Description of Artificial Sequence: Synthetic peptide
  Seed: PRMCSLMQGSTLPRRSG
PRMFSLMQLSTTPRRSG

SEQ ID NO: 116541 - protein, 17 aa, Artificial Sequence
  Description of Artificial Sequence: Synthetic peptide
  Seed: PRMCSLMQGSTLPRRSG
PRMFSLMQLSTVPRRSG

SEQ ID NO: 116542 - protein, 17 aa, Artificial Sequence
  Description of Artificial Sequence: Synthetic peptide
  Seed: PRMCSLMQGSTLPRRSG
PRMFSLMQMSTAPRRSG

SEQ ID NO: 116543 - protein, 17 aa, Artificial Sequence
  Description of Artificial Sequence: Synthetic peptide
  Seed: PRMCSLMQGSTLPRRSG
PRMFSLMQMSTGPRRSG

SEQ ID NO: 116544 - protein, 17 aa, Artificial Sequence
  Description of Artificial Sequence: Synthetic peptide
  Seed: PRMCSLMQGSTLPRRSG
PRMFSLMQMSTHPRRSG

SEQ ID NO: 116545 - protein, 17 aa, Artificial Sequence
  Description of Artificial Sequence: Synthetic peptide
  Seed: PRMCSLMQGSTLPRRSG
PRMFSLMQMSTIPRRSG

SEQ ID NO: 116546 - protein, 17 aa, Artificial Sequence
  Description of Artificial Sequence: Synthetic peptide
  Seed: PRMCSLMQGSTLPRRSG
PRMFSLMQMSTLPRRSG

SEQ ID NO: 116547 - protein, 17 aa, Artificial Sequence
  Description of Artificial Sequence: Synthetic peptide
  Seed: PRMCSLMQGSTLPRRSG
PRMFSLMQMSTMPRRSG

SEQ ID NO: 116548 - protein, 17 aa, Artificial Sequence
  Description of Artificial Sequence: Synthetic peptide
  Seed: PRMCSLMQGSTLPRRSG
PRMFSLMQMSTNPRRSG

SEQ ID NO: 116549 - protein, 17 aa, Artificial Sequence
  Description of Artificial Sequence: Synthetic peptide
  Seed: PRMCSLMQGSTLPRRSG
PRMFSLMQMSTSPRRSG

SEQ ID NO: 116550 - protein, 17 aa, Artificial Sequence
  Description of Artificial Sequence: Synthetic peptide
  Seed: PRMCSLMQGSTLPRRSG
PRMFSLMQMSTTPRRSG

SEQ ID NO: 116551 - protein, 17 aa, Artificial Sequence
  Description of Artificial Sequence: Synthetic peptide
  Seed: PRMCSLMQGSTLPRRSG
PRMFSLMQMSTVPRRSG

SEQ ID NO: 116552 - protein, 17 aa, Artificial Sequence
  Description of Artificial Sequence: Synthetic peptide
  Seed: PRMCSLMQGSTLPRRSG
PRMFSLMQNSTAPRRSG

SEQ ID NO: 116553 - protein, 17 aa, Artificial Sequence
  Description of Artificial Sequence: Synthetic peptide
  Seed: PRMCSLMQGSTLPRRSG
PRMFSLMQNSTFPRRSG

SEQ ID NO: 116554 - protein, 17 aa, Artificial Sequence
  Description of Artificial Sequence: Synthetic peptide
  Seed: PRMCSLMQGSTLPRRSG
PRMFSLMQNSTGPRRSG

SEQ ID NO: 116555 - protein, 17 aa, Artificial Sequence
  Description of Artificial Sequence: Synthetic peptide
  Seed: PRMCSLMQGSTLPRRSG
PRMFSLMQNSTHPRRSG

SEQ ID NO: 116556 - protein, 17 aa, Artificial Sequence
  Description of Artificial Sequence: Synthetic peptide
  Seed: PRMCSLMQGSTLPRRSG
PRMFSLMQNSTIPRRSG

SEQ ID NO: 116557 - protein, 17 aa, Artificial Sequence
  Description of Artificial Sequence: Synthetic peptide
  Seed: PRMCSLMQGSTLPRRSG
PRMFSLMQNSTLPRRSG

SEQ ID NO: 116558 - protein, 17 aa, Artificial Sequence
  Description of Artificial Sequence: Synthetic peptide
  Seed: PRMCSLMQGSTLPRRSG
PRMFSLMQNSTMPRRSG

SEQ ID NO: 116559 - protein, 17 aa, Artificial Sequence
  Description of Artificial Sequence: Synthetic peptide
  Seed: PRMCSLMQGSTLPRRSG
PRMFSLMQNSTNPRRSG

SEQ ID NO: 116560 - protein, 17 aa, Artificial Sequence
  Description of Artificial Sequence: Synthetic peptide
  Seed: PRMCSLMQGSTLPRRSG
PRMFSLMQNSTQPRRSG

SEQ ID NO: 116561 - protein, 17 aa, Artificial Sequence
  Description of Artificial Sequence: Synthetic peptide
  Seed: PRMCSLMQGSTLPRRSG
PRMFSLMQNSTSPRRSG

SEQ ID NO: 116562 - protein, 17 aa, Artificial Sequence
  Description of Artificial Sequence: Synthetic peptide
  Seed: PRMCSLMQGSTLPRRSG
PRMFSLMQNSTTPRRSG

SEQ ID NO: 116563 - protein, 17 aa, Artificial Sequence
  Description of Artificial Sequence: Synthetic peptide
  Seed: PRMCSLMQGSTLPRRSG
PRMFSLMQNSTVPRRSG

SEQ ID NO: 116564 - protein, 17 aa, Artificial Sequence
  Description of Artificial Sequence: Synthetic peptide
  Seed: PRMCSLMQGSTLPRRSG
PRMFSLMQPSTAPRRSG

SEQ ID NO: 116565 - protein, 17 aa, Artificial Sequence
  Description of Artificial Sequence: Synthetic peptide
  Seed: PRMCSLMQGSTLPRRSG
PRMFSLMQPSTCPRRSG

SEQ ID NO: 116566 - protein, 17 aa, Artificial Sequence
  Description of Artificial Sequence: Synthetic peptide
  Seed: PRMCSLMQGSTLPRRSG
PRMFSLMQPSTDPRRSG

SEQ ID NO: 116567 - protein, 17 aa, Artificial Sequence
  Description of Artificial Sequence: Synthetic peptide
  Seed: PRMCSLMQGSTLPRRSG
PRMFSLMQPSTEPRRSG

SEQ ID NO: 116568 - protein, 17 aa, Artificial Sequence
  Description of Artificial Sequence: Synthetic peptide
  Seed: PRMCSLMQGSTLPRRSG
PRMFSLMQPSTFPRRSG

SEQ ID NO: 116569 - protein, 17 aa, Artificial Sequence
  Description of Artificial Sequence: Synthetic peptide
  Seed: PRMCSLMQGSTLPRRSG
PRMFSLMQPSTGPRRSG

SEQ ID NO: 116570 - protein, 17 aa, Artificial Sequence
  Description of Artificial Sequence: Synthetic peptide
  Seed: PRMCSLMQGSTLPRRSG
PRMFSLMQPSTHPRRSG

SEQ ID NO: 116571 - protein, 17 aa, Artificial Sequence
  Description of Artificial Sequence: Synthetic peptide
  Seed: PRMCSLMQGSTLPRRSG
PRMFSLMQPSTIPRRSG

SEQ ID NO: 116572 - protein, 17 aa, Artificial Sequence
  Description of Artificial Sequence: Synthetic peptide
  Seed: PRMCSLMQGSTLPRRSG
PRMFSLMQPSTLPRRSG

SEQ ID NO: 116573 - protein, 17 aa, Artificial Sequence
  Description of Artificial Sequence: Synthetic peptide
  Seed: PRMCSLMQGSTLPRRSG
PRMFSLMQPSTMPRRSG

SEQ ID NO: 116574 - protein, 17 aa, Artificial Sequence
  Description of Artificial Sequence: Synthetic peptide
  Seed: PRMCSLMQGSTLPRRSG
PRMFSLMQPSTNPRRSG

SEQ ID NO: 116575 - protein, 17 aa, Artificial Sequence
  Description of Artificial Sequence: Synthetic peptide
  Seed: PRMCSLMQGSTLPRRSG
PRMFSLMQPSTPPRRSG

SEQ ID NO: 116576 - protein, 17 aa, Artificial Sequence
  Description of Artificial Sequence: Synthetic peptide
  Seed: PRMCSLMQGSTLPRRSG
PRMFSLMQPSTQPRRSG

SEQ ID NO: 116577 - protein, 17 aa, Artificial Sequence
  Description of Artificial Sequence: Synthetic peptide
  Seed: PRMCSLMQGSTLPRRSG
PRMFSLMQPSTSPRRSG

SEQ ID NO: 116578 - protein, 17 aa, Artificial Sequence
  Description of Artificial Sequence: Synthetic peptide
  Seed: PRMCSLMQGSTLPRRSG
PRMFSLMQPSTTPRRSG

SEQ ID NO: 116579 - protein, 17 aa, Artificial Sequence
  Description of Artificial Sequence: Synthetic peptide
  Seed: PRMCSLMQGSTLPRRSG
PRMFSLMQPSTVPRRSG

SEQ ID NO: 116580 - protein, 17 aa, Artificial Sequence
  Description of Artificial Sequence: Synthetic peptide
  Seed: PRMCSLMQGSTLPRRSG
PRMFSLMQPSTWPRRSG

SEQ ID NO: 116581 - protein, 17 aa, Artificial Sequence
  Description of Artificial Sequence: Synthetic peptide
  Seed: PRMCSLMQGSTLPRRSG
PRMFSLMQQSTAPRRSG

SEQ ID NO: 116582 - protein, 17 aa, Artificial Sequence
  Description of Artificial Sequence: Synthetic peptide
  Seed: PRMCSLMQGSTLPRRSG
PRMFSLMQQSTLPRRSG

SEQ ID NO: 116583 - protein, 17 aa, Artificial Sequence
  Description of Artificial Sequence: Synthetic peptide
  Seed: PRMCSLMQGSTLPRRSG
PRMFSLMQQSTVPRRSG

SEQ ID NO: 116584 - protein, 17 aa, Artificial Sequence
  Description of Artificial Sequence: Synthetic peptide
  Seed: PRMCSLMQGSTLPRRSG
PRMFSLMQSSTAPRRSG

SEQ ID NO: 116585 - protein, 17 aa, Artificial Sequence
  Description of Artificial Sequence: Synthetic peptide
  Seed: PRMCSLMQGSTLPRRSG
PRMFSLMQSSTCPRRSG

SEQ ID NO: 116586 - protein, 17 aa, Artificial Sequence
  Description of Artificial Sequence: Synthetic peptide
  Seed: PRMCSLMQGSTLPRRSG
PRMFSLMQSSTDPRRSG

SEQ ID NO: 116587 - protein, 17 aa, Artificial Sequence
  Description of Artificial Sequence: Synthetic peptide
  Seed: PRMCSLMQGSTLPRRSG
PRMFSLMQSSTEPRRSG

SEQ ID NO: 116588 - protein, 17 aa, Artificial Sequence
  Description of Artificial Sequence: Synthetic peptide
  Seed: PRMCSLMQGSTLPRRSG
PRMFSLMQSSTFPRRSG

SEQ ID NO: 116589 - protein, 17 aa, Artificial Sequence
  Description of Artificial Sequence: Synthetic peptide
  Seed: PRMCSLMQGSTLPRRSG
PRMFSLMQSSTGPRRSG

SEQ ID NO: 116590 - protein, 17 aa, Artificial Sequence
  Description of Artificial Sequence: Synthetic peptide
  Seed: PRMCSLMQGSTLPRRSG
PRMFSLMQSSTHPRRSG

SEQ ID NO: 116591 - protein, 17 aa, Artificial Sequence
  Description of Artificial Sequence: Synthetic peptide
  Seed: PRMCSLMQGSTLPRRSG
PRMFSLMQSSTIPRRSG

SEQ ID NO: 116592 - protein, 17 aa, Artificial Sequence
  Description of Artificial Sequence: Synthetic peptide
  Seed: PRMCSLMQGSTLPRRSG
PRMFSLMQSSTLPRRSG

SEQ ID NO: 116593 - protein, 17 aa, Artificial Sequence
  Description of Artificial Sequence: Synthetic peptide
  Seed: PRMCSLMQGSTLPRRSG
PRMFSLMQSSTMPRRSG

SEQ ID NO: 116594 - protein, 17 aa, Artificial Sequence
  Description of Artificial Sequence: Synthetic peptide
  Seed: PRMCSLMQGSTLPRRSG
PRMFSLMQSSTNPRRSG

SEQ ID NO: 116595 - protein, 17 aa, Artificial Sequence
  Description of Artificial Sequence: Synthetic peptide
  Seed: PRMCSLMQGSTLPRRSG
PRMFSLMQSSTPPRRSG

SEQ ID NO: 116596 - protein, 17 aa, Artificial Sequence
  Description of Artificial Sequence: Synthetic peptide
  Seed: PRMCSLMQGSTLPRRSG
PRMFSLMQSSTQPRRSG

SEQ ID NO: 116597 - protein, 17 aa, Artificial Sequence
  Description of Artificial Sequence: Synthetic peptide
  Seed: PRMCSLMQGSTLPRRSG
PRMFSLMQSSTSPRRSG

SEQ ID NO: 116598 - protein, 17 aa, Artificial Sequence
  Description of Artificial Sequence: Synthetic peptide
  Seed: PRMCSLMQGSTLPRRSG
PRMFSLMQSSTTPRRSG

SEQ ID NO: 116599 - protein, 17 aa, Artificial Sequence
  Description of Artificial Sequence: Synthetic peptide
  Seed: PRMCSLMQGSTLPRRSG
PRMFSLMQSSTVPRRSG

SEQ ID NO: 116600 - protein, 17 aa, Artificial Sequence
  Description of Artificial Sequence: Synthetic peptide
  Seed: PRMCSLMQGSTLPRRSG
PRMFSLMQSSTWPRRSG

SEQ ID NO: 116601 - protein, 17 aa, Artificial Sequence
  Description of Artificial Sequence: Synthetic peptide
  Seed: PRMCSLMQGSTLPRRSG
PRMFSLMQSSTYPRRSG

SEQ ID NO: 116602 - protein, 17 aa, Artificial Sequence
  Description of Artificial Sequence: Synthetic peptide
  Seed: PRMCSLMQGSTLPRRSG
PRMFSLMQTSTAPRRSG

SEQ ID NO: 116603 - protein, 17 aa, Artificial Sequence
  Description of Artificial Sequence: Synthetic peptide
  Seed: PRMCSLMQGSTLPRRSG
PRMFSLMQTSTCPRRSG

SEQ ID NO: 116604 - protein, 17 aa, Artificial Sequence
  Description of Artificial Sequence: Synthetic peptide
  Seed: PRMCSLMQGSTLPRRSG
PRMFSLMQTSTDPRRSG

SEQ ID NO: 116605 - protein, 17 aa, Artificial Sequence
  Description of Artificial Sequence: Synthetic peptide
  Seed: PRMCSLMQGSTLPRRSG
PRMFSLMQTSTEPRRSG

SEQ ID NO: 116606 - protein, 17 aa, Artificial Sequence
  Description of Artificial Sequence: Synthetic peptide
  Seed: PRMCSLMQGSTLPRRSG
PRMFSLMQTSTFPRRSG

SEQ ID NO: 116607 - protein, 17 aa, Artificial Sequence
  Description of Artificial Sequence: Synthetic peptide
  Seed: PRMCSLMQGSTLPRRSG
PRMFSLMQTSTGPRRSG

SEQ ID NO: 116608 - protein, 17 aa, Artificial Sequence
  Description of Artificial Sequence: Synthetic peptide
  Seed: PRMCSLMQGSTLPRRSG
PRMFSLMQTSTHPRRSG

SEQ ID NO: 116609 - protein, 17 aa, Artificial Sequence
  Description of Artificial Sequence: Synthetic peptide
  Seed: PRMCSLMQGSTLPRRSG
PRMFSLMQTSTIPRRSG

SEQ ID NO: 116610 - protein, 17 aa, Artificial Sequence
  Description of Artificial Sequence: Synthetic peptide
  Seed: PRMCSLMQGSTLPRRSG
PRMFSLMQTSTLPRRSG

SEQ ID NO: 116611 - protein, 17 aa, Artificial Sequence
  Description of Artificial Sequence: Synthetic peptide
  Seed: PRMCSLMQGSTLPRRSG
PRMFSLMQTSTMPRRSG

SEQ ID NO: 116612 - protein, 17 aa, Artificial Sequence
  Description of Artificial Sequence: Synthetic peptide
  Seed: PRMCSLMQGSTLPRRSG
PRMFSLMQTSTNPRRSG

SEQ ID NO: 116613 - protein, 17 aa, Artificial Sequence
  Description of Artificial Sequence: Synthetic peptide
  Seed: PRMCSLMQGSTLPRRSG
PRMFSLMQTSTPPRRSG

SEQ ID NO: 116614 - protein, 17 aa, Artificial Sequence
  Description of Artificial Sequence: Synthetic peptide
  Seed: PRMCSLMQGSTLPRRSG
PRMFSLMQTSTQPRRSG

SEQ ID NO: 116615 - protein, 17 aa, Artificial Sequence
  Description of Artificial Sequence: Synthetic peptide
  Seed: PRMCSLMQGSTLPRRSG
PRMFSLMQTSTSPRRSG

SEQ ID NO: 116616 - protein, 17 aa, Artificial Sequence
  Description of Artificial Sequence: Synthetic peptide
  Seed: PRMCSLMQGSTLPRRSG
PRMFSLMQTSTTPRRSG

SEQ ID NO: 116617 - protein, 17 aa, Artificial Sequence
  Description of Artificial Sequence: Synthetic peptide
  Seed: PRMCSLMQGSTLPRRSG
PRMFSLMQTSTVPRRSG

SEQ ID NO: 116618 - protein, 17 aa, Artificial Sequence
  Description of Artificial Sequence: Synthetic peptide
  Seed: PRMCSLMQGSTLPRRSG
PRMFSLMQVSTAPRRSG

SEQ ID NO: 116619 - protein, 17 aa, Artificial Sequence
  Description of Artificial Sequence: Synthetic peptide
  Seed: PRMCSLMQGSTLPRRSG
PRMFSLMQVSTCPRRSG

SEQ ID NO: 116620 - protein, 17 aa, Artificial Sequence
  Description of Artificial Sequence: Synthetic peptide
  Seed: PRMCSLMQGSTLPRRSG
PRMFSLMQVSTDPRRSG

SEQ ID NO: 116621 - protein, 17 aa, Artificial Sequence
  Description of Artificial Sequence: Synthetic peptide
  Seed: PRMCSLMQGSTLPRRSG
PRMFSLMQVSTEPRRSG

SEQ ID NO: 116622 - protein, 17 aa, Artificial Sequence
  Description of Artificial Sequence: Synthetic peptide
  Seed: PRMCSLMQGSTLPRRSG
PRMFSLMQVSTGPRRSG

SEQ ID NO: 116623 - protein, 17 aa, Artificial Sequence
  Description of Artificial Sequence: Synthetic peptide
  Seed: PRMCSLMQGSTLPRRSG
PRMFSLMQVSTHPRRSG

SEQ ID NO: 116624 - protein, 17 aa, Artificial Sequence
  Description of Artificial Sequence: Synthetic peptide
  Seed: PRMCSLMQGSTLPRRSG
PRMFSLMQVSTIPRRSG

SEQ ID NO: 116625 - protein, 17 aa, Artificial Sequence
  Description of Artificial Sequence: Synthetic peptide
  Seed: PRMCSLMQGSTLPRRSG
PRMFSLMQVSTLPRRSG

SEQ ID NO: 116626 - protein, 17 aa, Artificial Sequence
  Description of Artificial Sequence: Synthetic peptide
  Seed: PRMCSLMQGSTLPRRSG
PRMFSLMQVSTMPRRSG

SEQ ID NO: 116627 - protein, 17 aa, Artificial Sequence
  Description of Artificial Sequence: Synthetic peptide
  Seed: PRMCSLMQGSTLPRRSG
PRMFSLMQVSTNPRRSG

SEQ ID NO: 116628 - protein, 17 aa, Artificial Sequence
  Description of Artificial Sequence: Synthetic peptide
  Seed: PRMCSLMQGSTLPRRSG
PRMFSLMQVSTPPRRSG

SEQ ID NO: 116629 - protein, 17 aa, Artificial Sequence
  Description of Artificial Sequence: Synthetic peptide
  Seed: PRMCSLMQGSTLPRRSG
PRMFSLMQVSTQPRRSG

SEQ ID NO: 116630 - protein, 17 aa, Artificial Sequence
  Description of Artificial Sequence: Synthetic peptide
  Seed: PRMCSLMQGSTLPRRSG
PRMFSLMQVSTSPRRSG

SEQ ID NO: 116631 - protein, 17 aa, Artificial Sequence
  Description of Artificial Sequence: Synthetic peptide
  Seed: PRMCSLMQGSTLPRRSG
PRMFSLMQVSTTPRRSG

SEQ ID NO: 116632 - protein, 17 aa, Artificial Sequence
  Description of Artificial Sequence: Synthetic peptide
  Seed: PRMCSLMQGSTLPRRSG
PRMFSLMQVSTVPRRSG

SEQ ID NO: 116633 - protein, 17 aa, Artificial Sequence
  Description of Artificial Sequence: Synthetic peptide
  Seed: PRMCSLMQGSTLPRRSG
PRMFSLNQASTAPRRSG

SEQ ID NO: 116634 - protein, 17 aa, Artificial Sequence
  Description of Artificial Sequence: Synthetic peptide
  Seed: PRMCSLMQGSTLPRRSG
PRMFSLNQASTIPRRSG

SEQ ID NO: 116635 - protein, 17 aa, Artificial Sequence
  Description of Artificial Sequence: Synthetic peptide
  Seed: PRMCSLMQGSTLPRRSG
PRMFSLNQASTLPRRSG

SEQ ID NO: 116636 - protein, 17 aa, Artificial Sequence
  Description of Artificial Sequence: Synthetic peptide
  Seed: PRMCSLMQGSTLPRRSG
PRMFSLNQASTVPRRSG

SEQ ID NO: 116637 - protein, 17 aa, Artificial Sequence
  Description of Artificial Sequence: Synthetic peptide
  Seed: PRMCSLMQGSTLPRRSG
PRMFSLNQGSTLPRRSG

SEQ ID NO: 116638 - protein, 17 aa, Artificial Sequence
  Description of Artificial Sequence: Synthetic peptide
  Seed: PRMCSLMQGSTLPRRSG
PRMFSLQQASTAPRRSG

SEQ ID NO: 116639 - protein, 17 aa, Artificial Sequence
  Description of Artificial Sequence: Synthetic peptide
  Seed: PRMCSLMQGSTLPRRSG
PRMFSLQQASTFPRRSG

SEQ ID NO: 116640 - protein, 17 aa, Artificial Sequence
  Description of Artificial Sequence: Synthetic peptide
  Seed: PRMCSLMQGSTLPRRSG
PRMFSLQQASTGPRRSG

SEQ ID NO: 116641 - protein, 17 aa, Artificial Sequence
  Description of Artificial Sequence: Synthetic peptide
  Seed: PRMCSLMQGSTLPRRSG
PRMFSLQQASTIPRRSG

SEQ ID NO: 116642 - protein, 17 aa, Artificial Sequence
  Description of Artificial Sequence: Synthetic peptide
  Seed: PRMCSLMQGSTLPRRSG
PRMFSLQQASTLPRRSG

SEQ ID NO: 116643 - protein, 17 aa, Artificial Sequence
  Description of Artificial Sequence: Synthetic peptide
  Seed: PRMCSLMQGSTLPRRSG
PRMFSLQQASTMPRRSG

SEQ ID NO: 116644 - protein, 17 aa, Artificial Sequence
  Description of Artificial Sequence: Synthetic peptide
  Seed: PRMCSLMQGSTLPRRSG
PRMFSLQQASTNPRRSG

SEQ ID NO: 116645 - protein, 17 aa, Artificial Sequence
  Description of Artificial Sequence: Synthetic peptide
  Seed: PRMCSLMQGSTLPRRSG
PRMFSLQQASTSPRRSG

SEQ ID NO: 116646 - protein, 17 aa, Artificial Sequence
  Description of Artificial Sequence: Synthetic peptide
  Seed: PRMCSLMQGSTLPRRSG
PRMFSLQQASTTPRRSG

SEQ ID NO: 116647 - protein, 17 aa, Artificial Sequence
  Description of Artificial Sequence: Synthetic peptide
  Seed: PRMCSLMQGSTLPRRSG
PRMFSLQQASTVPRRSG

SEQ ID NO: 116648 - protein, 17 aa, Artificial Sequence
  Description of Artificial Sequence: Synthetic peptide
  Seed: PRMCSLMQGSTLPRRSG
PRMFSLQQGSTAPRRSG

SEQ ID NO: 116649 - protein, 17 aa, Artificial Sequence
  Description of Artificial Sequence: Synthetic peptide
  Seed: PRMCSLMQGSTLPRRSG
PRMFSLQQGSTIPRRSG

SEQ ID NO: 116650 - protein, 17 aa, Artificial Sequence
  Description of Artificial Sequence: Synthetic peptide
  Seed: PRMCSLMQGSTLPRRSG
PRMFSLQQGSTLPRRSG

SEQ ID NO: 116651 - protein, 17 aa, Artificial Sequence
  Description of Artificial Sequence: Synthetic peptide
  Seed: PRMCSLMQGSTLPRRSG
PRMFSLQQGSTMPRRSG

SEQ ID NO: 116652 - protein, 17 aa, Artificial Sequence
  Description of Artificial Sequence: Synthetic peptide
  Seed: PRMCSLMQGSTLPRRSG
PRMFSLQQGSTSPRRSG

SEQ ID NO: 116653 - protein, 17 aa, Artificial Sequence
  Description of Artificial Sequence: Synthetic peptide
  Seed: PRMCSLMQGSTLPRRSG
PRMFSLQQGSTTPRRSG

SEQ ID NO: 116654 - protein, 17 aa, Artificial Sequence
  Description of Artificial Sequence: Synthetic peptide
  Seed: PRMCSLMQGSTLPRRSG
PRMFSLQQGSTVPRRSG

SEQ ID NO: 116655 - protein, 17 aa, Artificial Sequence
  Description of Artificial Sequence: Synthetic peptide
  Seed: PRMCSLMQGSTLPRRSG
PRMFSLQQISTAPRRSG

SEQ ID NO: 116656 - protein, 17 aa, Artificial Sequence
  Description of Artificial Sequence: Synthetic peptide
  Seed: PRMCSLMQGSTLPRRSG
PRMFSLQQISTNPRRSG

SEQ ID NO: 116657 - protein, 17 aa, Artificial Sequence
  Description of Artificial Sequence: Synthetic peptide
  Seed: PRMCSLMQGSTLPRRSG
PRMFSLQQISTSPRRSG

SEQ ID NO: 116658 - protein, 17 aa, Artificial Sequence
  Description of Artificial Sequence: Synthetic peptide
  Seed: PRMCSLMQGSTLPRRSG
PRMFSLQQNSTAPRRSG

SEQ ID NO: 116659 - protein, 17 aa, Artificial Sequence
  Description of Artificial Sequence: Synthetic peptide
  Seed: PRMCSLMQGSTLPRRSG
PRMFSLQQNSTIPRRSG

SEQ ID NO: 116660 - protein, 17 aa, Artificial Sequence
  Description of Artificial Sequence: Synthetic peptide
  Seed: PRMCSLMQGSTLPRRSG
PRMFSLQQNSTLPRRSG

SEQ ID NO: 116661 - protein, 17 aa, Artificial Sequence
  Description of Artificial Sequence: Synthetic peptide
  Seed: PRMCSLMQGSTLPRRSG
PRMFSLQQNSTVPRRSG

SEQ ID NO: 116662 - protein, 17 aa, Artificial Sequence
  Description of Artificial Sequence: Synthetic peptide
  Seed: PRMCSLMQGSTLPRRSG
PRMFSLQQPSTAPRRSG

SEQ ID NO: 116663 - protein, 17 aa, Artificial Sequence
  Description of Artificial Sequence: Synthetic peptide
  Seed: PRMCSLMQGSTLPRRSG
PRMFSLQQPSTIPRRSG

SEQ ID NO: 116664 - protein, 17 aa, Artificial Sequence
  Description of Artificial Sequence: Synthetic peptide
  Seed: PRMCSLMQGSTLPRRSG
PRMFSLQQPSTLPRRSG

SEQ ID NO: 116665 - protein, 17 aa, Artificial Sequence
  Description of Artificial Sequence: Synthetic peptide
  Seed: PRMCSLMQGSTLPRRSG
PRMFSLQQPSTMPRRSG

SEQ ID NO: 116666 - protein, 17 aa, Artificial Sequence
  Description of Artificial Sequence: Synthetic peptide
  Seed: PRMCSLMQGSTLPRRSG
PRMFSLQQPSTNPRRSG

SEQ ID NO: 116667 - protein, 17 aa, Artificial Sequence
  Description of Artificial Sequence: Synthetic peptide
  Seed: PRMCSLMQGSTLPRRSG
PRMFSLQQPSTSPRRSG

SEQ ID NO: 116668 - protein, 17 aa, Artificial Sequence
  Description of Artificial Sequence: Synthetic peptide
  Seed: PRMCSLMQGSTLPRRSG
PRMFSLQQPSTVPRRSG

SEQ ID NO: 116669 - protein, 17 aa, Artificial Sequence
  Description of Artificial Sequence: Synthetic peptide
  Seed: PRMCSLMQGSTLPRRSG
PRMFSLQQSSTAPRRSG

SEQ ID NO: 116670 - protein, 17 aa, Artificial Sequence
  Description of Artificial Sequence: Synthetic peptide
  Seed: PRMCSLMQGSTLPRRSG
PRMFSLQQSSTIPRRSG

SEQ ID NO: 116671 - protein, 17 aa, Artificial Sequence
  Description of Artificial Sequence: Synthetic peptide
  Seed: PRMCSLMQGSTLPRRSG
PRMFSLQQSSTLPRRSG

SEQ ID NO: 116672 - protein, 17 aa, Artificial Sequence
  Description of Artificial Sequence: Synthetic peptide
  Seed: PRMCSLMQGSTLPRRSG
PRMFSLQQSSTMPRRSG

SEQ ID NO: 116673 - protein, 17 aa, Artificial Sequence
  Description of Artificial Sequence: Synthetic peptide
  Seed: PRMCSLMQGSTLPRRSG
PRMFSLQQSSTNPRRSG

SEQ ID NO: 116674 - protein, 17 aa, Artificial Sequence
  Description of Artificial Sequence: Synthetic peptide
  Seed: PRMCSLMQGSTLPRRSG
PRMFSLQQSSTSPRRSG

SEQ ID NO: 116675 - protein, 17 aa, Artificial Sequence
  Description of Artificial Sequence: Synthetic peptide
  Seed: PRMCSLMQGSTLPRRSG
PRMFSLQQSSTTPRRSG

SEQ ID NO: 116676 - protein, 17 aa, Artificial Sequence
  Description of Artificial Sequence: Synthetic peptide
  Seed: PRMCSLMQGSTLPRRSG
PRMFSLQQSSTVPRRSG

SEQ ID NO: 116677 - protein, 17 aa, Artificial Sequence
  Description of Artificial Sequence: Synthetic peptide
  Seed: PRMCSLMQGSTLPRRSG
PRMFSLQQTSTAPRRSG

SEQ ID NO: 116678 - protein, 17 aa, Artificial Sequence
  Description of Artificial Sequence: Synthetic peptide
  Seed: PRMCSLMQGSTLPRRSG
PRMFSLQQTSTIPRRSG

SEQ ID NO: 116679 - protein, 17 aa, Artificial Sequence
  Description of Artificial Sequence: Synthetic peptide
  Seed: PRMCSLMQGSTLPRRSG
PRMFSLQQTSTLPRRSG

SEQ ID NO: 116680 - protein, 17 aa, Artificial Sequence
  Description of Artificial Sequence: Synthetic peptide
  Seed: PRMCSLMQGSTLPRRSG
PRMFSLQQTSTNPRRSG

SEQ ID NO: 116681 - protein, 17 aa, Artificial Sequence
  Description of Artificial Sequence: Synthetic peptide
  Seed: PRMCSLMQGSTLPRRSG
PRMFSLQQTSTSPRRSG

SEQ ID NO: 116682 - protein, 17 aa, Artificial Sequence
  Description of Artificial Sequence: Synthetic peptide
  Seed: PRMCSLMQGSTLPRRSG
PRMFSLQQTSTVPRRSG

SEQ ID NO: 116683 - protein, 17 aa, Artificial Sequence
  Description of Artificial Sequence: Synthetic peptide
  Seed: PRMCSLMQGSTLPRRSG
PRMFSLQQVSTAPRRSG

SEQ ID NO: 116684 - protein, 17 aa, Artificial Sequence
  Description of Artificial Sequence: Synthetic peptide
  Seed: PRMCSLMQGSTLPRRSG
PRMFSLQQVSTIPRRSG

SEQ ID NO: 116685 - protein, 17 aa, Artificial Sequence
  Description of Artificial Sequence: Synthetic peptide
  Seed: PRMCSLMQGSTLPRRSG
PRMFSLQQVSTLPRRSG

SEQ ID NO: 116686 - protein, 17 aa, Artificial Sequence
  Description of Artificial Sequence: Synthetic peptide
  Seed: PRMCSLMQGSTLPRRSG
PRMFSLQQVSTNPRRSG

SEQ ID NO: 116687 - protein, 17 aa, Artificial Sequence
  Description of Artificial Sequence: Synthetic peptide
  Seed: PRMCSLMQGSTLPRRSG
PRMFSLQQVSTSPRRSG

SEQ ID NO: 116688 - protein, 17 aa, Artificial Sequence
  Description of Artificial Sequence: Synthetic peptide
  Seed: PRMCSLMQGSTLPRRSG
PRMFSLQQVSTTPRRSG

SEQ ID NO: 116689 - protein, 17 aa, Artificial Sequence
  Description of Artificial Sequence: Synthetic peptide
  Seed: PRMCSLMQGSTLPRRSG
PRMFSLQQVSTVPRRSG

SEQ ID NO: 116690 - protein, 17 aa, Artificial Sequence
  Description of Artificial Sequence: Synthetic peptide
  Seed: PRMCSLMQGSTLPRRSG
PRMFSLSQASTAPRRSG

SEQ ID NO: 116691 - protein, 17 aa, Artificial Sequence
  Description of Artificial Sequence: Synthetic peptide
  Seed: PRMCSLMQGSTLPRRSG
PRMFSLSQASTIPRRSG

SEQ ID NO: 116692 - protein, 17 aa, Artificial Sequence
  Description of Artificial Sequence: Synthetic peptide
  Seed: PRMCSLMQGSTLPRRSG
PRMFSLSQASTLPRRSG

SEQ ID NO: 116693 - protein, 17 aa, Artificial Sequence
  Description of Artificial Sequence: Synthetic peptide
  Seed: PRMCSLMQGSTLPRRSG
PRMFSLSQASTMPRRSG

SEQ ID NO: 116694 - protein, 17 aa, Artificial Sequence
  Description of Artificial Sequence: Synthetic peptide
  Seed: PRMCSLMQGSTLPRRSG
PRMFSLSQASTNPRRSG

SEQ ID NO: 116695 - protein, 17 aa, Artificial Sequence
  Description of Artificial Sequence: Synthetic peptide
  Seed: PRMCSLMQGSTLPRRSG
PRMFSLSQASTSPRRSG

SEQ ID NO: 116696 - protein, 17 aa, Artificial Sequence
  Description of Artificial Sequence: Synthetic peptide
  Seed: PRMCSLMQGSTLPRRSG
PRMFSLSQASTTPRRSG

SEQ ID NO: 116697 - protein, 17 aa, Artificial Sequence
  Description of Artificial Sequence: Synthetic peptide
  Seed: PRMCSLMQGSTLPRRSG
PRMFSLSQASTVPRRSG

SEQ ID NO: 116698 - protein, 17 aa, Artificial Sequence
  Description of Artificial Sequence: Synthetic peptide
  Seed: PRMCSLMQGSTLPRRSG
PRMFSLSQGSTAPRRSG

SEQ ID NO: 116699 - protein, 17 aa, Artificial Sequence
  Description of Artificial Sequence: Synthetic peptide
  Seed: PRMCSLMQGSTLPRRSG
PRMFSLSQGSTIPRRSG

SEQ ID NO: 116700 - protein, 17 aa, Artificial Sequence
  Description of Artificial Sequence: Synthetic peptide
  Seed: PRMCSLMQGSTLPRRSG
PRMFSLSQGSTLPRRSG

SEQ ID NO: 116701 - protein, 17 aa, Artificial Sequence
  Description of Artificial Sequence: Synthetic peptide
  Seed: PRMCSLMQGSTLPRRSG
PRMFSLSQGSTMPRRSG

SEQ ID NO: 116702 - protein, 17 aa, Artificial Sequence
  Description of Artificial Sequence: Synthetic peptide
  Seed: PRMCSLMQGSTLPRRSG
PRMFSLSQGSTVPRRSG

SEQ ID NO: 116703 - protein, 17 aa, Artificial Sequence
  Description of Artificial Sequence: Synthetic peptide
  Seed: PRMCSLMQGSTLPRRSG
PRMFSLSQISTAPRRSG

SEQ ID NO: 116704 - protein, 17 aa, Artificial Sequence
  Description of Artificial Sequence: Synthetic peptide
  Seed: PRMCSLMQGSTLPRRSG
PRMFSLSQPSTAPRRSG

SEQ ID NO: 116705 - protein, 17 aa, Artificial Sequence
  Description of Artificial Sequence: Synthetic peptide
  Seed: PRMCSLMQGSTLPRRSG
PRMFSLSQPSTIPRRSG

SEQ ID NO: 116706 - protein, 17 aa, Artificial Sequence
  Description of Artificial Sequence: Synthetic peptide
  Seed: PRMCSLMQGSTLPRRSG
PRMFSLSQPSTLPRRSG

SEQ ID NO: 116707 - protein, 17 aa, Artificial Sequence
  Description of Artificial Sequence: Synthetic peptide
  Seed: PRMCSLMQGSTLPRRSG
PRMFSLSQPSTVPRRSG

SEQ ID NO: 116708 - protein, 17 aa, Artificial Sequence
  Description of Artificial Sequence: Synthetic peptide
  Seed: PRMCSLMQGSTLPRRSG
PRMFSLSQSSTAPRRSG

SEQ ID NO: 116709 - protein, 17 aa, Artificial Sequence
  Description of Artificial Sequence: Synthetic peptide
  Seed: PRMCSLMQGSTLPRRSG
PRMFSLSQSSTIPRRSG

SEQ ID NO: 116710 - protein, 17 aa, Artificial Sequence
  Description of Artificial Sequence: Synthetic peptide
  Seed: PRMCSLMQGSTLPRRSG
PRMFSLSQSSTLPRRSG

SEQ ID NO: 116711 - protein, 17 aa, Artificial Sequence
  Description of Artificial Sequence: Synthetic peptide
  Seed: PRMCSLMQGSTLPRRSG
PRMFSLSQSSTMPRRSG

SEQ ID NO: 116712 - protein, 17 aa, Artificial Sequence
  Description of Artificial Sequence: Synthetic peptide
  Seed: PRMCSLMQGSTLPRRSG
PRMFSLSQSSTVPRRSG

SEQ ID NO: 116713 - protein, 17 aa, Artificial Sequence
  Description of Artificial Sequence: Synthetic peptide
  Seed: PRMCSLMQGSTLPRRSG
PRMFSLSQTSTAPRRSG

SEQ ID NO: 116714 - protein, 17 aa, Artificial Sequence
  Description of Artificial Sequence: Synthetic peptide
  Seed: PRMCSLMQGSTLPRRSG
PRMFSLSQVSTAPRRSG

SEQ ID NO: 116715 - protein, 17 aa, Artificial Sequence
  Description of Artificial Sequence: Synthetic peptide
  Seed: PRMCSLMQGSTLPRRSG
PRMFSLSQVSTNPRRSG

SEQ ID NO: 116716 - protein, 17 aa, Artificial Sequence
  Description of Artificial Sequence: Synthetic peptide
  Seed: PRMCSLMQGSTLPRRSG
PRMFSLSQVSTSPRRSG

SEQ ID NO: 116717 - protein, 17 aa, Artificial Sequence
  Description of Artificial Sequence: Synthetic peptide
  Seed: PRMCSLMQGSTLPRRSG
PRMFSLTQASTAPRRSG

SEQ ID NO: 116718 - protein, 17 aa, Artificial Sequence
  Description of Artificial Sequence: Synthetic peptide
  Seed: PRMCSLMQGSTLPRRSG
PRMFSLTQASTIPRRSG

SEQ ID NO: 116719 - protein, 17 aa, Artificial Sequence
  Description of Artificial Sequence: Synthetic peptide
  Seed: PRMCSLMQGSTLPRRSG
PRMFSLTQASTLPRRSG

SEQ ID NO: 116720 - protein, 17 aa, Artificial Sequence
  Description of Artificial Sequence: Synthetic peptide
  Seed: PRMCSLMQGSTLPRRSG
PRMFSLTQASTMPRRSG

SEQ ID NO: 116721 - protein, 17 aa, Artificial Sequence
  Description of Artificial Sequence: Synthetic peptide
  Seed: PRMCSLMQGSTLPRRSG
PRMFSLTQASTNPRRSG

SEQ ID NO: 116722 - protein, 17 aa, Artificial Sequence
  Description of Artificial Sequence: Synthetic peptide
  Seed: PRMCSLMQGSTLPRRSG
PRMFSLTQASTSPRRSG

SEQ ID NO: 116723 - protein, 17 aa, Artificial Sequence
  Description of Artificial Sequence: Synthetic peptide
  Seed: PRMCSLMQGSTLPRRSG
PRMFSLTQASTVPRRSG

SEQ ID NO: 116724 - protein, 17 aa, Artificial Sequence
  Description of Artificial Sequence: Synthetic peptide
  Seed: PRMCSLMQGSTLPRRSG
PRMFSLTQGSTIPRRSG

SEQ ID NO: 116725 - protein, 17 aa, Artificial Sequence
  Description of Artificial Sequence: Synthetic peptide
  Seed: PRMCSLMQGSTLPRRSG
PRMFSLTQGSTLPRRSG

SEQ ID NO: 116726 - protein, 17 aa, Artificial Sequence
  Description of Artificial Sequence: Synthetic peptide
  Seed: PRMCSLMQGSTLPRRSG
PRMFSLTQGSTVPRRSG

SEQ ID NO: 116727 - protein, 17 aa, Artificial Sequence
  Description of Artificial Sequence: Synthetic peptide
  Seed: PRMCSLMQGSTLPRRSG
PRMFSLTQPSTAPRRSG

SEQ ID NO: 116728 - protein, 17 aa, Artificial Sequence
  Description of Artificial Sequence: Synthetic peptide
  Seed: PRMCSLMQGSTLPRRSG
PRMFSLTQPSTSPRRSG

SEQ ID NO: 116729 - protein, 17 aa, Artificial Sequence
  Description of Artificial Sequence: Synthetic peptide
  Seed: PRMCSLMQGSTLPRRSG
PRMFSLTQSSTAPRRSG

SEQ ID NO: 116730 - protein, 17 aa, Artificial Sequence
  Description of Artificial Sequence: Synthetic peptide
  Seed: PRMCSLMQGSTLPRRSG
PRMFSLTQSSTIPRRSG

SEQ ID NO: 116731 - protein, 17 aa, Artificial Sequence
  Description of Artificial Sequence: Synthetic peptide
  Seed: PRMCSLMQGSTLPRRSG
PRMFSLTQSSTLPRRSG

SEQ ID NO: 116732 - protein, 17 aa, Artificial Sequence
  Description of Artificial Sequence: Synthetic peptide
  Seed: PRMCSLMQGSTLPRRSG
PRMFSLTQSSTVPRRSG

SEQ ID NO: 116733 - protein, 17 aa, Artificial Sequence
  Description of Artificial Sequence: Synthetic peptide
  Seed: PRMCSLMQGSTLPRRSG
PRMFSLTQVSTAPRRSG

SEQ ID NO: 116734 - protein, 17 aa, Artificial Sequence
  Description of Artificial Sequence: Synthetic peptide
  Seed: PRMCSLMQGSTLPRRSG
PRMFSLVQASTAPRRSG

SEQ ID NO: 116735 - protein, 17 aa, Artificial Sequence
  Description of Artificial Sequence: Synthetic peptide
  Seed: PRMCSLMQGSTLPRRSG
PRMFSLVQASTCPRRSG

SEQ ID NO: 116736 - protein, 17 aa, Artificial Sequence
  Description of Artificial Sequence: Synthetic peptide
  Seed: PRMCSLMQGSTLPRRSG
PRMFSLVQASTGPRRSG

SEQ ID NO: 116737 - protein, 17 aa, Artificial Sequence
  Description of Artificial Sequence: Synthetic peptide
  Seed: PRMCSLMQGSTLPRRSG
PRMFSLVQASTHPRRSG

SEQ ID NO: 116738 - protein, 17 aa, Artificial Sequence
  Description of Artificial Sequence: Synthetic peptide
  Seed: PRMCSLMQGSTLPRRSG
PRMFSLVQASTIPRRSG

SEQ ID NO: 116739 - protein, 17 aa, Artificial Sequence
  Description of Artificial Sequence: Synthetic peptide
  Seed: PRMCSLMQGSTLPRRSG
PRMFSLVQASTLPRRSG

SEQ ID NO: 116740 - protein, 17 aa, Artificial Sequence
  Description of Artificial Sequence: Synthetic peptide
  Seed: PRMCSLMQGSTLPRRSG
PRMFSLVQASTMPRRSG

SEQ ID NO: 116741 - protein, 17 aa, Artificial Sequence
  Description of Artificial Sequence: Synthetic peptide
  Seed: PRMCSLMQGSTLPRRSG
PRMFSLVQASTNPRRSG

SEQ ID NO: 116742 - protein, 17 aa, Artificial Sequence
  Description of Artificial Sequence: Synthetic peptide
  Seed: PRMCSLMQGSTLPRRSG
PRMFSLVQASTPPRRSG

SEQ ID NO: 116743 - protein, 17 aa, Artificial Sequence
  Description of Artificial Sequence: Synthetic peptide
  Seed: PRMCSLMQGSTLPRRSG
PRMFSLVQASTQPRRSG

SEQ ID NO: 116744 - protein, 17 aa, Artificial Sequence
  Description of Artificial Sequence: Synthetic peptide
  Seed: PRMCSLMQGSTLPRRSG
PRMFSLVQASTSPRRSG

SEQ ID NO: 116745 - protein, 17 aa, Artificial Sequence
  Description of Artificial Sequence: Synthetic peptide
  Seed: PRMCSLMQGSTLPRRSG
PRMFSLVQASTTPRRSG

SEQ ID NO: 116746 - protein, 17 aa, Artificial Sequence
  Description of Artificial Sequence: Synthetic peptide
  Seed: PRMCSLMQGSTLPRRSG
PRMFSLVQASTVPRRSG

SEQ ID NO: 116747 - protein, 17 aa, Artificial Sequence
  Description of Artificial Sequence: Synthetic peptide
  Seed: PRMCSLMQGSTLPRRSG
PRMFSLVQGSTAPRRSG

SEQ ID NO: 116748 - protein, 17 aa, Artificial Sequence
  Description of Artificial Sequence: Synthetic peptide
  Seed: PRMCSLMQGSTLPRRSG
PRMFSLVQGSTGPRRSG

SEQ ID NO: 116749 - protein, 17 aa, Artificial Sequence
  Description of Artificial Sequence: Synthetic peptide
  Seed: PRMCSLMQGSTLPRRSG
PRMFSLVQGSTIPRRSG

SEQ ID NO: 116750 - protein, 17 aa, Artificial Sequence
  Description of Artificial Sequence: Synthetic peptide
  Seed: PRMCSLMQGSTLPRRSG
PRMFSLVQGSTLPRRSG

SEQ ID NO: 116751 - protein, 17 aa, Artificial Sequence
  Description of Artificial Sequence: Synthetic peptide
  Seed: PRMCSLMQGSTLPRRSG
PRMFSLVQGSTMPRRSG

SEQ ID NO: 116752 - protein, 17 aa, Artificial Sequence
  Description of Artificial Sequence: Synthetic peptide
  Seed: PRMCSLMQGSTLPRRSG
PRMFSLVQGSTNPRRSG

SEQ ID NO: 116753 - protein, 17 aa, Artificial Sequence
  Description of Artificial Sequence: Synthetic peptide
  Seed: PRMCSLMQGSTLPRRSG
PRMFSLVQGSTSPRRSG

SEQ ID NO: 116754 - protein, 17 aa, Artificial Sequence
  Description of Artificial Sequence: Synthetic peptide
  Seed: PRMCSLMQGSTLPRRSG
PRMFSLVQGSTTPRRSG

SEQ ID NO: 116755 - protein, 17 aa, Artificial Sequence
  Description of Artificial Sequence: Synthetic peptide
  Seed: PRMCSLMQGSTLPRRSG
PRMFSLVQGSTVPRRSG

SEQ ID NO: 116756 - protein, 17 aa, Artificial Sequence
  Description of Artificial Sequence: Synthetic peptide
  Seed: PRMCSLMQGSTLPRRSG
PRMFSLVQISTAPRRSG

SEQ ID NO: 116757 - protein, 17 aa, Artificial Sequence
  Description of Artificial Sequence: Synthetic peptide
  Seed: PRMCSLMQGSTLPRRSG
PRMFSLVQISTIPRRSG

SEQ ID NO: 116758 - protein, 17 aa, Artificial Sequence
  Description of Artificial Sequence: Synthetic peptide
  Seed: PRMCSLMQGSTLPRRSG
PRMFSLVQISTLPRRSG

SEQ ID NO: 116759 - protein, 17 aa, Artificial Sequence
  Description of Artificial Sequence: Synthetic peptide
  Seed: PRMCSLMQGSTLPRRSG
PRMFSLVQISTMPRRSG

SEQ ID NO: 116760 - protein, 17 aa, Artificial Sequence
  Description of Artificial Sequence: Synthetic peptide
  Seed: PRMCSLMQGSTLPRRSG
PRMFSLVQISTNPRRSG

SEQ ID NO: 116761 - protein, 17 aa, Artificial Sequence
  Description of Artificial Sequence: Synthetic peptide
  Seed: PRMCSLMQGSTLPRRSG
PRMFSLVQISTSPRRSG

SEQ ID NO: 116762 - protein, 17 aa, Artificial Sequence
  Description of Artificial Sequence: Synthetic peptide
  Seed: PRMCSLMQGSTLPRRSG
PRMFSLVQISTTPRRSG

SEQ ID NO: 116763 - protein, 17 aa, Artificial Sequence
  Description of Artificial Sequence: Synthetic peptide
  Seed: PRMCSLMQGSTLPRRSG
PRMFSLVQISTVPRRSG

SEQ ID NO: 116764 - protein, 17 aa, Artificial Sequence
  Description of Artificial Sequence: Synthetic peptide
  Seed: PRMCSLMQGSTLPRRSG
PRMFSLVQLSTAPRRSG

SEQ ID NO: 116765 - protein, 17 aa, Artificial Sequence
  Description of Artificial Sequence: Synthetic peptide
  Seed: PRMCSLMQGSTLPRRSG
PRMFSLVQMSTAPRRSG

SEQ ID NO: 116766 - protein, 17 aa, Artificial Sequence
  Description of Artificial Sequence: Synthetic peptide
  Seed: PRMCSLMQGSTLPRRSG
PRMFSLVQNSTAPRRSG

SEQ ID NO: 116767 - protein, 17 aa, Artificial Sequence
  Description of Artificial Sequence: Synthetic peptide
  Seed: PRMCSLMQGSTLPRRSG
PRMFSLVQNSTIPRRSG

SEQ ID NO: 116768 - protein, 17 aa, Artificial Sequence
  Description of Artificial Sequence: Synthetic peptide
  Seed: PRMCSLMQGSTLPRRSG
PRMFSLVQNSTLPRRSG

SEQ ID NO: 116769 - protein, 17 aa, Artificial Sequence
  Description of Artificial Sequence: Synthetic peptide
  Seed: PRMCSLMQGSTLPRRSG
PRMFSLVQNSTNPRRSG

SEQ ID NO: 116770 - protein, 17 aa, Artificial Sequence
  Description of Artificial Sequence: Synthetic peptide
  Seed: PRMCSLMQGSTLPRRSG
PRMFSLVQNSTSPRRSG

SEQ ID NO: 116771 - protein, 17 aa, Artificial Sequence
  Description of Artificial Sequence: Synthetic peptide
  Seed: PRMCSLMQGSTLPRRSG
PRMFSLVQNSTTPRRSG

SEQ ID NO: 116772 - protein, 17 aa, Artificial Sequence
  Description of Artificial Sequence: Synthetic peptide
  Seed: PRMCSLMQGSTLPRRSG
PRMFSLVQNSTVPRRSG

SEQ ID NO: 116773 - protein, 17 aa, Artificial Sequence
  Description of Artificial Sequence: Synthetic peptide
  Seed: PRMCSLMQGSTLPRRSG
PRMFSLVQPSTAPRRSG

SEQ ID NO: 116774 - protein, 17 aa, Artificial Sequence
  Description of Artificial Sequence: Synthetic peptide
  Seed: PRMCSLMQGSTLPRRSG
PRMFSLVQPSTGPRRSG

SEQ ID NO: 116775 - protein, 17 aa, Artificial Sequence
  Description of Artificial Sequence: Synthetic peptide
  Seed: PRMCSLMQGSTLPRRSG
PRMFSLVQPSTHPRRSG

SEQ ID NO: 116776 - protein, 17 aa, Artificial Sequence
  Description of Artificial Sequence: Synthetic peptide
  Seed: PRMCSLMQGSTLPRRSG
PRMFSLVQPSTIPRRSG

SEQ ID NO: 116777 - protein, 17 aa, Artificial Sequence
  Description of Artificial Sequence: Synthetic peptide
  Seed: PRMCSLMQGSTLPRRSG
PRMFSLVQPSTLPRRSG

SEQ ID NO: 116778 - protein, 17 aa, Artificial Sequence
  Description of Artificial Sequence: Synthetic peptide
  Seed: PRMCSLMQGSTLPRRSG
PRMFSLVQPSTMPRRSG

SEQ ID NO: 116779 - protein, 17 aa, Artificial Sequence
  Description of Artificial Sequence: Synthetic peptide
  Seed: PRMCSLMQGSTLPRRSG
PRMFSLVQPSTNPRRSG

SEQ ID NO: 116780 - protein, 17 aa, Artificial Sequence
  Description of Artificial Sequence: Synthetic peptide
  Seed: PRMCSLMQGSTLPRRSG
PRMFSLVQPSTQPRRSG

SEQ ID NO: 116781 - protein, 17 aa, Artificial Sequence
  Description of Artificial Sequence: Synthetic peptide
  Seed: PRMCSLMQGSTLPRRSG
PRMFSLVQPSTSPRRSG

SEQ ID NO: 116782 - protein, 17 aa, Artificial Sequence
  Description of Artificial Sequence: Synthetic peptide
  Seed: PRMCSLMQGSTLPRRSG
PRMFSLVQPSTTPRRSG

SEQ ID NO: 116783 - protein, 17 aa, Artificial Sequence
  Description of Artificial Sequence: Synthetic peptide
  Seed: PRMCSLMQGSTLPRRSG
PRMFSLVQPSTVPRRSG

SEQ ID NO: 116784 - protein, 17 aa, Artificial Sequence
  Description of Artificial Sequence: Synthetic peptide
  Seed: PRMCSLMQGSTLPRRSG
PRMFSLVQSSTAPRRSG

SEQ ID NO: 116785 - protein, 17 aa, Artificial Sequence
  Description of Artificial Sequence: Synthetic peptide
  Seed: PRMCSLMQGSTLPRRSG
PRMFSLVQSSTGPRRSG

SEQ ID NO: 116786 - protein, 17 aa, Artificial Sequence
  Description of Artificial Sequence: Synthetic peptide
  Seed: PRMCSLMQGSTLPRRSG
PRMFSLVQSSTHPRRSG

SEQ ID NO: 116787 - protein, 17 aa, Artificial Sequence
  Description of Artificial Sequence: Synthetic peptide
  Seed: PRMCSLMQGSTLPRRSG
PRMFSLVQSSTIPRRSG

SEQ ID NO: 116788 - protein, 17 aa, Artificial Sequence
  Description of Artificial Sequence: Synthetic peptide
  Seed: PRMCSLMQGSTLPRRSG
PRMFSLVQSSTLPRRSG

SEQ ID NO: 116789 - protein, 17 aa, Artificial Sequence
  Description of Artificial Sequence: Synthetic peptide
  Seed: PRMCSLMQGSTLPRRSG
PRMFSLVQSSTMPRRSG

SEQ ID NO: 116790 - protein, 17 aa, Artificial Sequence
  Description of Artificial Sequence: Synthetic peptide
  Seed: PRMCSLMQGSTLPRRSG
PRMFSLVQSSTNPRRSG

SEQ ID NO: 116791 - protein, 17 aa, Artificial Sequence
  Description of Artificial Sequence: Synthetic peptide
  Seed: PRMCSLMQGSTLPRRSG
PRMFSLVQSSTSPRRSG

SEQ ID NO: 116792 - protein, 17 aa, Artificial Sequence
  Description of Artificial Sequence: Synthetic peptide
  Seed: PRMCSLMQGSTLPRRSG
PRMFSLVQSSTTPRRSG

SEQ ID NO: 116793 - protein, 17 aa, Artificial Sequence
  Description of Artificial Sequence: Synthetic peptide
  Seed: PRMCSLMQGSTLPRRSG
PRMFSLVQSSTVPRRSG

SEQ ID NO: 116794 - protein, 17 aa, Artificial Sequence
  Description of Artificial Sequence: Synthetic peptide
  Seed: PRMCSLMQGSTLPRRSG
PRMFSLVQTSTAPRRSG

SEQ ID NO: 116795 - protein, 17 aa, Artificial Sequence
  Description of Artificial Sequence: Synthetic peptide
  Seed: PRMCSLMQGSTLPRRSG
PRMFSLVQTSTGPRRSG

SEQ ID NO: 116796 - protein, 17 aa, Artificial Sequence
  Description of Artificial Sequence: Synthetic peptide
  Seed: PRMCSLMQGSTLPRRSG
PRMFSLVQTSTIPRRSG

SEQ ID NO: 116797 - protein, 17 aa, Artificial Sequence
  Description of Artificial Sequence: Synthetic peptide
  Seed: PRMCSLMQGSTLPRRSG
PRMFSLVQTSTLPRRSG

SEQ ID NO: 116798 - protein, 17 aa, Artificial Sequence
  Description of Artificial Sequence: Synthetic peptide
  Seed: PRMCSLMQGSTLPRRSG
PRMFSLVQTSTMPRRSG

SEQ ID NO: 116799 - protein, 17 aa, Artificial Sequence
  Description of Artificial Sequence: Synthetic peptide
  Seed: PRMCSLMQGSTLPRRSG
PRMFSLVQTSTNPRRSG

SEQ ID NO: 116800 - protein, 17 aa, Artificial Sequence
  Description of Artificial Sequence: Synthetic peptide
  Seed: PRMCSLMQGSTLPRRSG
PRMFSLVQTSTSPRRSG

SEQ ID NO: 116801 - protein, 17 aa, Artificial Sequence
  Description of Artificial Sequence: Synthetic peptide
  Seed: PRMCSLMQGSTLPRRSG
PRMFSLVQTSTTPRRSG

SEQ ID NO: 116802 - protein, 17 aa, Artificial Sequence
  Description of Artificial Sequence: Synthetic peptide
  Seed: PRMCSLMQGSTLPRRSG
PRMFSLVQTSTVPRRSG

SEQ ID NO: 116803 - protein, 17 aa, Artificial Sequence
  Description of Artificial Sequence: Synthetic peptide
  Seed: PRMCSLMQGSTLPRRSG
PRMFSLVQVSTAPRRSG

SEQ ID NO: 116804 - protein, 17 aa, Artificial Sequence
  Description of Artificial Sequence: Synthetic peptide
  Seed: PRMCSLMQGSTLPRRSG
PRMFSLVQVSTGPRRSG

SEQ ID NO: 116805 - protein, 17 aa, Artificial Sequence
  Description of Artificial Sequence: Synthetic peptide
  Seed: PRMCSLMQGSTLPRRSG
PRMFSLVQVSTHPRRSG

SEQ ID NO: 116806 - protein, 17 aa, Artificial Sequence
  Description of Artificial Sequence: Synthetic peptide
  Seed: PRMCSLMQGSTLPRRSG
PRMFSLVQVSTIPRRSG

SEQ ID NO: 116807 - protein, 17 aa, Artificial Sequence
  Description of Artificial Sequence: Synthetic peptide
  Seed: PRMCSLMQGSTLPRRSG
PRMFSLVQVSTLPRRSG

SEQ ID NO: 116808 - protein, 17 aa, Artificial Sequence
  Description of Artificial Sequence: Synthetic peptide
  Seed: PRMCSLMQGSTLPRRSG
PRMFSLVQVSTMPRRSG

SEQ ID NO: 116809 - protein, 17 aa, Artificial Sequence
  Description of Artificial Sequence: Synthetic peptide
  Seed: PRMCSLMQGSTLPRRSG
PRMFSLVQVSTNPRRSG

SEQ ID NO: 116810 - protein, 17 aa, Artificial Sequence
  Description of Artificial Sequence: Synthetic peptide
  Seed: PRMCSLMQGSTLPRRSG
PRMFSLVQVSTSPRRSG

SEQ ID NO: 116811 - protein, 17 aa, Artificial Sequence
  Description of Artificial Sequence: Synthetic peptide
  Seed: PRMCSLMQGSTLPRRSG
PRMFSLVQVSTTPRRSG

SEQ ID NO: 116812 - protein, 17 aa, Artificial Sequence
  Description of Artificial Sequence: Synthetic peptide
  Seed: PRMCSLMQGSTLPRRSG
PRMFSLVQVSTVPRRSG

SEQ ID NO: 116813 - protein, 17 aa, Artificial Sequence
  Description of Artificial Sequence: Synthetic peptide
  Seed: PRMCSLMQGSTLPRRSG
PRMISLAQASTAPRRSG

SEQ ID NO: 116814 - protein, 17 aa, Artificial Sequence
  Description of Artificial Sequence: Synthetic peptide
  Seed: PRMCSLMQGSTLPRRSG
PRMISLAQASTIPRRSG

SEQ ID NO: 116815 - protein, 17 aa, Artificial Sequence
  Description of Artificial Sequence: Synthetic peptide
  Seed: PRMCSLMQGSTLPRRSG
PRMISLAQASTLPRRSG

SEQ ID NO: 116816 - protein, 17 aa, Artificial Sequence
  Description of Artificial Sequence: Synthetic peptide
  Seed: PRMCSLMQGSTLPRRSG
PRMISLAQASTMPRRSG

SEQ ID NO: 116817 - protein, 17 aa, Artificial Sequence
  Description of Artificial Sequence: Synthetic peptide
  Seed: PRMCSLMQGSTLPRRSG
PRMISLAQASTVPRRSG

SEQ ID NO: 116818 - protein, 17 aa, Artificial Sequence
  Description of Artificial Sequence: Synthetic peptide
  Seed: PRMCSLMQGSTLPRRSG
PRMISLAQGSTAPRRSG

SEQ ID NO: 116819 - protein, 17 aa, Artificial Sequence
  Description of Artificial Sequence: Synthetic peptide
  Seed: PRMCSLMQGSTLPRRSG
PRMISLAQGSTIPRRSG

SEQ ID NO: 116820 - protein, 17 aa, Artificial Sequence
  Description of Artificial Sequence: Synthetic peptide
  Seed: PRMCSLMQGSTLPRRSG
PRMISLAQGSTLPRRSG

SEQ ID NO: 116821 - protein, 17 aa, Artificial Sequence
  Description of Artificial Sequence: Synthetic peptide
  Seed: PRMCSLMQGSTLPRRSG
PRMISLAQGSTVPRRSG

SEQ ID NO: 116822 - protein, 17 aa, Artificial Sequence
  Description of Artificial Sequence: Synthetic peptide
  Seed: PRMCSLMQGSTLPRRSG
PRMISLAQSSTAPRRSG

SEQ ID NO: 116823 - protein, 17 aa, Artificial Sequence
  Description of Artificial Sequence: Synthetic peptide
  Seed: PRMCSLMQGSTLPRRSG
PRMISLAQSSTIPRRSG

SEQ ID NO: 116824 - protein, 17 aa, Artificial Sequence
  Description of Artificial Sequence: Synthetic peptide
  Seed: PRMCSLMQGSTLPRRSG
PRMISLAQSSTLPRRSG

SEQ ID NO: 116825 - protein, 17 aa, Artificial Sequence
  Description of Artificial Sequence: Synthetic peptide
  Seed: PRMCSLMQGSTLPRRSG
PRMISLAQSSTVPRRSG

SEQ ID NO: 116826 - protein, 17 aa, Artificial Sequence
  Description of Artificial Sequence: Synthetic peptide
  Seed: PRMCSLMQGSTLPRRSG
PRMISLFQASTAPRRSG

SEQ ID NO: 116827 - protein, 17 aa, Artificial Sequence
  Description of Artificial Sequence: Synthetic peptide
  Seed: PRMCSLMQGSTLPRRSG
PRMISLIQASTAPRRSG

SEQ ID NO: 116828 - protein, 17 aa, Artificial Sequence
  Description of Artificial Sequence: Synthetic peptide
  Seed: PRMCSLMQGSTLPRRSG
PRMISLIQASTIPRRSG

SEQ ID NO: 116829 - protein, 17 aa, Artificial Sequence
  Description of Artificial Sequence: Synthetic peptide
  Seed: PRMCSLMQGSTLPRRSG
PRMISLIQASTLPRRSG

SEQ ID NO: 116830 - protein, 17 aa, Artificial Sequence
  Description of Artificial Sequence: Synthetic peptide
  Seed: PRMCSLMQGSTLPRRSG
PRMISLIQASTMPRRSG

SEQ ID NO: 116831 - protein, 17 aa, Artificial Sequence
  Description of Artificial Sequence: Synthetic peptide
  Seed: PRMCSLMQGSTLPRRSG
PRMISLIQASTNPRRSG

SEQ ID NO: 116832 - protein, 17 aa, Artificial Sequence
  Description of Artificial Sequence: Synthetic peptide
  Seed: PRMCSLMQGSTLPRRSG
PRMISLIQASTSPRRSG

SEQ ID NO: 116833 - protein, 17 aa, Artificial Sequence
  Description of Artificial Sequence: Synthetic peptide
  Seed: PRMCSLMQGSTLPRRSG
PRMISLIQASTTPRRSG

SEQ ID NO: 116834 - protein, 17 aa, Artificial Sequence
  Description of Artificial Sequence: Synthetic peptide
  Seed: PRMCSLMQGSTLPRRSG
PRMISLIQASTVPRRSG

SEQ ID NO: 116835 - protein, 17 aa, Artificial Sequence
  Description of Artificial Sequence: Synthetic peptide
  Seed: PRMCSLMQGSTLPRRSG
PRMISLIQGSTAPRRSG

SEQ ID NO: 116836 - protein, 17 aa, Artificial Sequence
  Description of Artificial Sequence: Synthetic peptide
  Seed: PRMCSLMQGSTLPRRSG
PRMISLIQGSTIPRRSG

SEQ ID NO: 116837 - protein, 17 aa, Artificial Sequence
  Description of Artificial Sequence: Synthetic peptide
  Seed: PRMCSLMQGSTLPRRSG
PRMISLIQGSTLPRRSG

SEQ ID NO: 116838 - protein, 17 aa, Artificial Sequence
  Description of Artificial Sequence: Synthetic peptide
  Seed: PRMCSLMQGSTLPRRSG
PRMISLIQGSTMPRRSG

SEQ ID NO: 116839 - protein, 17 aa, Artificial Sequence
  Description of Artificial Sequence: Synthetic peptide
  Seed: PRMCSLMQGSTLPRRSG
PRMISLIQGSTTPRRSG

SEQ ID NO: 116840 - protein, 17 aa, Artificial Sequence
  Description of Artificial Sequence: Synthetic peptide
  Seed: PRMCSLMQGSTLPRRSG
PRMISLIQGSTVPRRSG

SEQ ID NO: 116841 - protein, 17 aa, Artificial Sequence
  Description of Artificial Sequence: Synthetic peptide
  Seed: PRMCSLMQGSTLPRRSG
PRMISLIQPSTAPRRSG

SEQ ID NO: 116842 - protein, 17 aa, Artificial Sequence
  Description of Artificial Sequence: Synthetic peptide
  Seed: PRMCSLMQGSTLPRRSG
PRMISLIQPSTIPRRSG

SEQ ID NO: 116843 - protein, 17 aa, Artificial Sequence
  Description of Artificial Sequence: Synthetic peptide
  Seed: PRMCSLMQGSTLPRRSG
PRMISLIQPSTLPRRSG

SEQ ID NO: 116844 - protein, 17 aa, Artificial Sequence
  Description of Artificial Sequence: Synthetic peptide
  Seed: PRMCSLMQGSTLPRRSG
PRMISLIQPSTSPRRSG

SEQ ID NO: 116845 - protein, 17 aa, Artificial Sequence
  Description of Artificial Sequence: Synthetic peptide
  Seed: PRMCSLMQGSTLPRRSG
PRMISLIQPSTVPRRSG

SEQ ID NO: 116846 - protein, 17 aa, Artificial Sequence
  Description of Artificial Sequence: Synthetic peptide
  Seed: PRMCSLMQGSTLPRRSG
PRMISLIQSSTAPRRSG

SEQ ID NO: 116847 - protein, 17 aa, Artificial Sequence
  Description of Artificial Sequence: Synthetic peptide
  Seed: PRMCSLMQGSTLPRRSG
PRMISLIQSSTIPRRSG

SEQ ID NO: 116848 - protein, 17 aa, Artificial Sequence
  Description of Artificial Sequence: Synthetic peptide
  Seed: PRMCSLMQGSTLPRRSG
PRMISLIQSSTLPRRSG

SEQ ID NO: 116849 - protein, 17 aa, Artificial Sequence
  Description of Artificial Sequence: Synthetic peptide
  Seed: PRMCSLMQGSTLPRRSG
PRMISLIQSSTVPRRSG

SEQ ID NO: 116850 - protein, 17 aa, Artificial Sequence
  Description of Artificial Sequence: Synthetic peptide
  Seed: PRMCSLMQGSTLPRRSG
PRMISLIQTSTAPRRSG

SEQ ID NO: 116851 - protein, 17 aa, Artificial Sequence
  Description of Artificial Sequence: Synthetic peptide
  Seed: PRMCSLMQGSTLPRRSG
PRMISLIQVSTAPRRSG

SEQ ID NO: 116852 - protein, 17 aa, Artificial Sequence
  Description of Artificial Sequence: Synthetic peptide
  Seed: PRMCSLMQGSTLPRRSG
PRMISLLQASTAPRRSG

SEQ ID NO: 116853 - protein, 17 aa, Artificial Sequence
  Description of Artificial Sequence: Synthetic peptide
  Seed: PRMCSLMQGSTLPRRSG
PRMISLLQASTGPRRSG

SEQ ID NO: 116854 - protein, 17 aa, Artificial Sequence
  Description of Artificial Sequence: Synthetic peptide
  Seed: PRMCSLMQGSTLPRRSG
PRMISLLQASTIPRRSG

SEQ ID NO: 116855 - protein, 17 aa, Artificial Sequence
  Description of Artificial Sequence: Synthetic peptide
  Seed: PRMCSLMQGSTLPRRSG
PRMISLLQASTLPRRSG

SEQ ID NO: 116856 - protein, 17 aa, Artificial Sequence
  Description of Artificial Sequence: Synthetic peptide
  Seed: PRMCSLMQGSTLPRRSG
PRMISLLQASTMPRRSG

SEQ ID NO: 116857 - protein, 17 aa, Artificial Sequence
  Description of Artificial Sequence: Synthetic peptide
  Seed: PRMCSLMQGSTLPRRSG
PRMISLLQASTNPRRSG

SEQ ID NO: 116858 - protein, 17 aa, Artificial Sequence
  Description of Artificial Sequence: Synthetic peptide
  Seed: PRMCSLMQGSTLPRRSG
PRMISLLQASTSPRRSG

SEQ ID NO: 116859 - protein, 17 aa, Artificial Sequence
  Description of Artificial Sequence: Synthetic peptide
  Seed: PRMCSLMQGSTLPRRSG
PRMISLLQASTTPRRSG

SEQ ID NO: 116860 - protein, 17 aa, Artificial Sequence
  Description of Artificial Sequence: Synthetic peptide
  Seed: PRMCSLMQGSTLPRRSG
PRMISLLQASTVPRRSG

SEQ ID NO: 116861 - protein, 17 aa, Artificial Sequence
  Description of Artificial Sequence: Synthetic peptide
  Seed: PRMCSLMQGSTLPRRSG
PRMISLLQGSTAPRRSG

SEQ ID NO: 116862 - protein, 17 aa, Artificial Sequence
  Description of Artificial Sequence: Synthetic peptide
  Seed: PRMCSLMQGSTLPRRSG
PRMISLLQGSTGPRRSG

SEQ ID NO: 116863 - protein, 17 aa, Artificial Sequence
  Description of Artificial Sequence: Synthetic peptide
  Seed: PRMCSLMQGSTLPRRSG
PRMISLLQGSTIPRRSG

SEQ ID NO: 116864 - protein, 17 aa, Artificial Sequence
  Description of Artificial Sequence: Synthetic peptide
  Seed: PRMCSLMQGSTLPRRSG
PRMISLLQGSTLPRRSG

SEQ ID NO: 116865 - protein, 17 aa, Artificial Sequence
  Description of Artificial Sequence: Synthetic peptide
  Seed: PRMCSLMQGSTLPRRSG
PRMISLLQGSTMPRRSG

SEQ ID NO: 116866 - protein, 17 aa, Artificial Sequence
  Description of Artificial Sequence: Synthetic peptide
  Seed: PRMCSLMQGSTLPRRSG
PRMISLLQGSTSPRRSG

SEQ ID NO: 116867 - protein, 17 aa, Artificial Sequence
  Description of Artificial Sequence: Synthetic peptide
  Seed: PRMCSLMQGSTLPRRSG
PRMISLLQGSTTPRRSG

SEQ ID NO: 116868 - protein, 17 aa, Artificial Sequence
  Description of Artificial Sequence: Synthetic peptide
  Seed: PRMCSLMQGSTLPRRSG
PRMISLLQGSTVPRRSG

SEQ ID NO: 116869 - protein, 17 aa, Artificial Sequence
  Description of Artificial Sequence: Synthetic peptide
  Seed: PRMCSLMQGSTLPRRSG
PRMISLLQISTAPRRSG

SEQ ID NO: 116870 - protein, 17 aa, Artificial Sequence
  Description of Artificial Sequence: Synthetic peptide
  Seed: PRMCSLMQGSTLPRRSG
PRMISLLQISTNPRRSG

SEQ ID NO: 116871 - protein, 17 aa, Artificial Sequence
  Description of Artificial Sequence: Synthetic peptide
  Seed: PRMCSLMQGSTLPRRSG
PRMISLLQISTSPRRSG

SEQ ID NO: 116872 - protein, 17 aa, Artificial Sequence
  Description of Artificial Sequence: Synthetic peptide
  Seed: PRMCSLMQGSTLPRRSG
PRMISLLQNSTAPRRSG

SEQ ID NO: 116873 - protein, 17 aa, Artificial Sequence
  Description of Artificial Sequence: Synthetic peptide
  Seed: PRMCSLMQGSTLPRRSG
PRMISLLQNSTIPRRSG

SEQ ID NO: 116874 - protein, 17 aa, Artificial Sequence
  Description of Artificial Sequence: Synthetic peptide
  Seed: PRMCSLMQGSTLPRRSG
PRMISLLQNSTLPRRSG

SEQ ID NO: 116875 - protein, 17 aa, Artificial Sequence
  Description of Artificial Sequence: Synthetic peptide
  Seed: PRMCSLMQGSTLPRRSG
PRMISLLQNSTVPRRSG

SEQ ID NO: 116876 - protein, 17 aa, Artificial Sequence
  Description of Artificial Sequence: Synthetic peptide
  Seed: PRMCSLMQGSTLPRRSG
PRMISLLQPSTAPRRSG

SEQ ID NO: 116877 - protein, 17 aa, Artificial Sequence
  Description of Artificial Sequence: Synthetic peptide
  Seed: PRMCSLMQGSTLPRRSG
PRMISLLQPSTIPRRSG

SEQ ID NO: 116878 - protein, 17 aa, Artificial Sequence
  Description of Artificial Sequence: Synthetic peptide
  Seed: PRMCSLMQGSTLPRRSG
PRMISLLQPSTLPRRSG

SEQ ID NO: 116879 - protein, 17 aa, Artificial Sequence
  Description of Artificial Sequence: Synthetic peptide
  Seed: PRMCSLMQGSTLPRRSG
PRMISLLQPSTMPRRSG

SEQ ID NO: 116880 - protein, 17 aa, Artificial Sequence
  Description of Artificial Sequence: Synthetic peptide
  Seed: PRMCSLMQGSTLPRRSG
PRMISLLQPSTNPRRSG

SEQ ID NO: 116881 - protein, 17 aa, Artificial Sequence
  Description of Artificial Sequence: Synthetic peptide
  Seed: PRMCSLMQGSTLPRRSG
PRMISLLQPSTSPRRSG

SEQ ID NO: 116882 - protein, 17 aa, Artificial Sequence
  Description of Artificial Sequence: Synthetic peptide
  Seed: PRMCSLMQGSTLPRRSG
PRMISLLQPSTTPRRSG

SEQ ID NO: 116883 - protein, 17 aa, Artificial Sequence
  Description of Artificial Sequence: Synthetic peptide
  Seed: PRMCSLMQGSTLPRRSG
PRMISLLQPSTVPRRSG

SEQ ID NO: 116884 - protein, 17 aa, Artificial Sequence
  Description of Artificial Sequence: Synthetic peptide
  Seed: PRMCSLMQGSTLPRRSG
PRMISLLQSSTAPRRSG

SEQ ID NO: 116885 - protein, 17 aa, Artificial Sequence
  Description of Artificial Sequence: Synthetic peptide
  Seed: PRMCSLMQGSTLPRRSG
PRMISLLQSSTIPRRSG

SEQ ID NO: 116886 - protein, 17 aa, Artificial Sequence
  Description of Artificial Sequence: Synthetic peptide
  Seed: PRMCSLMQGSTLPRRSG
PRMISLLQSSTLPRRSG

SEQ ID NO: 116887 - protein, 17 aa, Artificial Sequence
  Description of Artificial Sequence: Synthetic peptide
  Seed: PRMCSLMQGSTLPRRSG
PRMISLLQSSTMPRRSG

SEQ ID NO: 116888 - protein, 17 aa, Artificial Sequence
  Description of Artificial Sequence: Synthetic peptide
  Seed: PRMCSLMQGSTLPRRSG
PRMISLLQSSTNPRRSG

SEQ ID NO: 116889 - protein, 17 aa, Artificial Sequence
  Description of Artificial Sequence: Synthetic peptide
  Seed: PRMCSLMQGSTLPRRSG
PRMISLLQSSTSPRRSG

SEQ ID NO: 116890 - protein, 17 aa, Artificial Sequence
  Description of Artificial Sequence: Synthetic peptide
  Seed: PRMCSLMQGSTLPRRSG
PRMISLLQSSTTPRRSG

SEQ ID NO: 116891 - protein, 17 aa, Artificial Sequence
  Description of Artificial Sequence: Synthetic peptide
  Seed: PRMCSLMQGSTLPRRSG
PRMISLLQSSTVPRRSG

SEQ ID NO: 116892 - protein, 17 aa, Artificial Sequence
  Description of Artificial Sequence: Synthetic peptide
  Seed: PRMCSLMQGSTLPRRSG
PRMISLLQTSTAPRRSG

SEQ ID NO: 116893 - protein, 17 aa, Artificial Sequence
  Description of Artificial Sequence: Synthetic peptide
  Seed: PRMCSLMQGSTLPRRSG
PRMISLLQTSTIPRRSG

SEQ ID NO: 116894 - protein, 17 aa, Artificial Sequence
  Description of Artificial Sequence: Synthetic peptide
  Seed: PRMCSLMQGSTLPRRSG
PRMISLLQTSTLPRRSG

SEQ ID NO: 116895 - protein, 17 aa, Artificial Sequence
  Description of Artificial Sequence: Synthetic peptide
  Seed: PRMCSLMQGSTLPRRSG
PRMISLLQTSTNPRRSG

SEQ ID NO: 116896 - protein, 17 aa, Artificial Sequence
  Description of Artificial Sequence: Synthetic peptide
  Seed: PRMCSLMQGSTLPRRSG
PRMISLLQTSTSPRRSG

SEQ ID NO: 116897 - protein, 17 aa, Artificial Sequence
  Description of Artificial Sequence: Synthetic peptide
  Seed: PRMCSLMQGSTLPRRSG
PRMISLLQTSTTPRRSG

SEQ ID NO: 116898 - protein, 17 aa, Artificial Sequence
  Description of Artificial Sequence: Synthetic peptide
  Seed: PRMCSLMQGSTLPRRSG
PRMISLLQTSTVPRRSG

SEQ ID NO: 116899 - protein, 17 aa, Artificial Sequence
  Description of Artificial Sequence: Synthetic peptide
  Seed: PRMCSLMQGSTLPRRSG
PRMISLLQVSTAPRRSG

SEQ ID NO: 116900 - protein, 17 aa, Artificial Sequence
  Description of Artificial Sequence: Synthetic peptide
  Seed: PRMCSLMQGSTLPRRSG
PRMISLLQVSTIPRRSG

SEQ ID NO: 116901 - protein, 17 aa, Artificial Sequence
  Description of Artificial Sequence: Synthetic peptide
  Seed: PRMCSLMQGSTLPRRSG
PRMISLLQVSTLPRRSG

SEQ ID NO: 116902 - protein, 17 aa, Artificial Sequence
  Description of Artificial Sequence: Synthetic peptide
  Seed: PRMCSLMQGSTLPRRSG
PRMISLLQVSTNPRRSG

SEQ ID NO: 116903 - protein, 17 aa, Artificial Sequence
  Description of Artificial Sequence: Synthetic peptide
  Seed: PRMCSLMQGSTLPRRSG
PRMISLLQVSTSPRRSG

SEQ ID NO: 116904 - protein, 17 aa, Artificial Sequence
  Description of Artificial Sequence: Synthetic peptide
  Seed: PRMCSLMQGSTLPRRSG
PRMISLLQVSTTPRRSG

SEQ ID NO: 116905 - protein, 17 aa, Artificial Sequence
  Description of Artificial Sequence: Synthetic peptide
  Seed: PRMCSLMQGSTLPRRSG
PRMISLLQVSTVPRRSG

SEQ ID NO: 116906 - protein, 17 aa, Artificial Sequence
  Description of Artificial Sequence: Synthetic peptide
  Seed: PRMCSLMQGSTLPRRSG
PRMISLMQASTAPRRSG

SEQ ID NO: 116907 - protein, 17 aa, Artificial Sequence
  Description of Artificial Sequence: Synthetic peptide
  Seed: PRMCSLMQGSTLPRRSG
PRMISLMQASTCPRRSG

SEQ ID NO: 116908 - protein, 17 aa, Artificial Sequence
  Description of Artificial Sequence: Synthetic peptide
  Seed: PRMCSLMQGSTLPRRSG
PRMISLMQASTGPRRSG

SEQ ID NO: 116909 - protein, 17 aa, Artificial Sequence
  Description of Artificial Sequence: Synthetic peptide
  Seed: PRMCSLMQGSTLPRRSG
PRMISLMQASTIPRRSG

SEQ ID NO: 116910 - protein, 17 aa, Artificial Sequence
  Description of Artificial Sequence: Synthetic peptide
  Seed: PRMCSLMQGSTLPRRSG
PRMISLMQASTLPRRSG

SEQ ID NO: 116911 - protein, 17 aa, Artificial Sequence
  Description of Artificial Sequence: Synthetic peptide
  Seed: PRMCSLMQGSTLPRRSG
PRMISLMQASTMPRRSG

SEQ ID NO: 116912 - protein, 17 aa, Artificial Sequence
  Description of Artificial Sequence: Synthetic peptide
  Seed: PRMCSLMQGSTLPRRSG
PRMISLMQASTNPRRSG

SEQ ID NO: 116913 - protein, 17 aa, Artificial Sequence
  Description of Artificial Sequence: Synthetic peptide
  Seed: PRMCSLMQGSTLPRRSG
PRMISLMQASTSPRRSG

SEQ ID NO: 116914 - protein, 17 aa, Artificial Sequence
  Description of Artificial Sequence: Synthetic peptide
  Seed: PRMCSLMQGSTLPRRSG
PRMISLMQASTTPRRSG

SEQ ID NO: 116915 - protein, 17 aa, Artificial Sequence
  Description of Artificial Sequence: Synthetic peptide
  Seed: PRMCSLMQGSTLPRRSG
PRMISLMQASTVPRRSG

SEQ ID NO: 116916 - protein, 17 aa, Artificial Sequence
  Description of Artificial Sequence: Synthetic peptide
  Seed: PRMCSLMQGSTLPRRSG
PRMISLMQGSTAPRRSG

SEQ ID NO: 116917 - protein, 17 aa, Artificial Sequence
  Description of Artificial Sequence: Synthetic peptide
  Seed: PRMCSLMQGSTLPRRSG
PRMISLMQGSTGPRRSG

SEQ ID NO: 116918 - protein, 17 aa, Artificial Sequence
  Description of Artificial Sequence: Synthetic peptide
  Seed: PRMCSLMQGSTLPRRSG
PRMISLMQGSTIPRRSG

SEQ ID NO: 116919 - protein, 17 aa, Artificial Sequence
  Description of Artificial Sequence: Synthetic peptide
  Seed: PRMCSLMQGSTLPRRSG
PRMISLMQGSTLPRRSG

SEQ ID NO: 116920 - protein, 17 aa, Artificial Sequence
  Description of Artificial Sequence: Synthetic peptide
  Seed: PRMCSLMQGSTLPRRSG
PRMISLMQGSTMPRRSG

SEQ ID NO: 116921 - protein, 17 aa, Artificial Sequence
  Description of Artificial Sequence: Synthetic peptide
  Seed: PRMCSLMQGSTLPRRSG
PRMISLMQGSTSPRRSG

SEQ ID NO: 116922 - protein, 17 aa, Artificial Sequence
  Description of Artificial Sequence: Synthetic peptide
  Seed: PRMCSLMQGSTLPRRSG
PRMISLMQGSTTPRRSG

SEQ ID NO: 116923 - protein, 17 aa, Artificial Sequence
  Description of Artificial Sequence: Synthetic peptide
  Seed: PRMCSLMQGSTLPRRSG
PRMISLMQGSTVPRRSG

SEQ ID NO: 116924 - protein, 17 aa, Artificial Sequence
  Description of Artificial Sequence: Synthetic peptide
  Seed: PRMCSLMQGSTLPRRSG
PRMISLMQISTAPRRSG

SEQ ID NO: 116925 - protein, 17 aa, Artificial Sequence
  Description of Artificial Sequence: Synthetic peptide
  Seed: PRMCSLMQGSTLPRRSG
PRMISLMQISTNPRRSG

SEQ ID NO: 116926 - protein, 17 aa, Artificial Sequence
  Description of Artificial Sequence: Synthetic peptide
  Seed: PRMCSLMQGSTLPRRSG
PRMISLMQISTSPRRSG

SEQ ID NO: 116927 - protein, 17 aa, Artificial Sequence
  Description of Artificial Sequence: Synthetic peptide
  Seed: PRMCSLMQGSTLPRRSG
PRMISLMQISTTPRRSG

SEQ ID NO: 116928 - protein, 17 aa, Artificial Sequence
  Description of Artificial Sequence: Synthetic peptide
  Seed: PRMCSLMQGSTLPRRSG
PRMISLMQLSTAPRRSG

SEQ ID NO: 116929 - protein, 17 aa, Artificial Sequence
  Description of Artificial Sequence: Synthetic peptide
  Seed: PRMCSLMQGSTLPRRSG
PRMISLMQNSTAPRRSG

SEQ ID NO: 116930 - protein, 17 aa, Artificial Sequence
  Description of Artificial Sequence: Synthetic peptide
  Seed: PRMCSLMQGSTLPRRSG
PRMISLMQNSTIPRRSG

SEQ ID NO: 116931 - protein, 17 aa, Artificial Sequence
  Description of Artificial Sequence: Synthetic peptide
  Seed: PRMCSLMQGSTLPRRSG
PRMISLMQNSTLPRRSG

SEQ ID NO: 116932 - protein, 17 aa, Artificial Sequence
  Description of Artificial Sequence: Synthetic peptide
  Seed: PRMCSLMQGSTLPRRSG
PRMISLMQNSTVPRRSG

SEQ ID NO: 116933 - protein, 17 aa, Artificial Sequence
  Description of Artificial Sequence: Synthetic peptide
  Seed: PRMCSLMQGSTLPRRSG
PRMISLMQPSTAPRRSG

SEQ ID NO: 116934 - protein, 17 aa, Artificial Sequence
  Description of Artificial Sequence: Synthetic peptide
  Seed: PRMCSLMQGSTLPRRSG
PRMISLMQPSTIPRRSG

SEQ ID NO: 116935 - protein, 17 aa, Artificial Sequence
  Description of Artificial Sequence: Synthetic peptide
  Seed: PRMCSLMQGSTLPRRSG
PRMISLMQPSTLPRRSG

SEQ ID NO: 116936 - protein, 17 aa, Artificial Sequence
  Description of Artificial Sequence: Synthetic peptide
  Seed: PRMCSLMQGSTLPRRSG
PRMISLMQPSTMPRRSG

SEQ ID NO: 116937 - protein, 17 aa, Artificial Sequence
  Description of Artificial Sequence: Synthetic peptide
  Seed: PRMCSLMQGSTLPRRSG
PRMISLMQPSTNPRRSG

SEQ ID NO: 116938 - protein, 17 aa, Artificial Sequence
  Description of Artificial Sequence: Synthetic peptide
  Seed: PRMCSLMQGSTLPRRSG
PRMISLMQPSTSPRRSG

SEQ ID NO: 116939 - protein, 17 aa, Artificial Sequence
  Description of Artificial Sequence: Synthetic peptide
  Seed: PRMCSLMQGSTLPRRSG
PRMISLMQPSTTPRRSG

SEQ ID NO: 116940 - protein, 17 aa, Artificial Sequence
  Description of Artificial Sequence: Synthetic peptide
  Seed: PRMCSLMQGSTLPRRSG
PRMISLMQPSTVPRRSG

SEQ ID NO: 116941 - protein, 17 aa, Artificial Sequence
  Description of Artificial Sequence: Synthetic peptide
  Seed: PRMCSLMQGSTLPRRSG
PRMISLMQSSTAPRRSG

SEQ ID NO: 116942 - protein, 17 aa, Artificial Sequence
  Description of Artificial Sequence: Synthetic peptide
  Seed: PRMCSLMQGSTLPRRSG
PRMISLMQSSTIPRRSG

SEQ ID NO: 116943 - protein, 17 aa, Artificial Sequence
  Description of Artificial Sequence: Synthetic peptide
  Seed: PRMCSLMQGSTLPRRSG
PRMISLMQSSTLPRRSG

SEQ ID NO: 116944 - protein, 17 aa, Artificial Sequence
  Description of Artificial Sequence: Synthetic peptide
  Seed: PRMCSLMQGSTLPRRSG
PRMISLMQSSTMPRRSG

SEQ ID NO: 116945 - protein, 17 aa, Artificial Sequence
  Description of Artificial Sequence: Synthetic peptide
  Seed: PRMCSLMQGSTLPRRSG
PRMISLMQSSTNPRRSG

SEQ ID NO: 116946 - protein, 17 aa, Artificial Sequence
  Description of Artificial Sequence: Synthetic peptide
  Seed: PRMCSLMQGSTLPRRSG
PRMISLMQSSTSPRRSG

SEQ ID NO: 116947 - protein, 17 aa, Artificial Sequence
  Description of Artificial Sequence: Synthetic peptide
  Seed: PRMCSLMQGSTLPRRSG
PRMISLMQSSTTPRRSG

SEQ ID NO: 116948 - protein, 17 aa, Artificial Sequence
  Description of Artificial Sequence: Synthetic peptide
  Seed: PRMCSLMQGSTLPRRSG
PRMISLMQSSTVPRRSG

SEQ ID NO: 116949 - protein, 17 aa, Artificial Sequence
  Description of Artificial Sequence: Synthetic peptide
  Seed: PRMCSLMQGSTLPRRSG
PRMISLMQTSTAPRRSG

SEQ ID NO: 116950 - protein, 17 aa, Artificial Sequence
  Description of Artificial Sequence: Synthetic peptide
  Seed: PRMCSLMQGSTLPRRSG
PRMISLMQTSTIPRRSG

SEQ ID NO: 116951 - protein, 17 aa, Artificial Sequence
  Description of Artificial Sequence: Synthetic peptide
  Seed: PRMCSLMQGSTLPRRSG
PRMISLMQTSTLPRRSG

SEQ ID NO: 116952 - protein, 17 aa, Artificial Sequence
  Description of Artificial Sequence: Synthetic peptide
  Seed: PRMCSLMQGSTLPRRSG
PRMISLMQTSTNPRRSG

SEQ ID NO: 116953 - protein, 17 aa, Artificial Sequence
  Description of Artificial Sequence: Synthetic peptide
  Seed: PRMCSLMQGSTLPRRSG
PRMISLMQTSTSPRRSG

SEQ ID NO: 116954 - protein, 17 aa, Artificial Sequence
  Description of Artificial Sequence: Synthetic peptide
  Seed: PRMCSLMQGSTLPRRSG
PRMISLMQTSTTPRRSG

SEQ ID NO: 116955 - protein, 17 aa, Artificial Sequence
  Description of Artificial Sequence: Synthetic peptide
  Seed: PRMCSLMQGSTLPRRSG
PRMISLMQTSTVPRRSG

SEQ ID NO: 116956 - protein, 17 aa, Artificial Sequence
  Description of Artificial Sequence: Synthetic peptide
  Seed: PRMCSLMQGSTLPRRSG
PRMISLMQVSTAPRRSG

SEQ ID NO: 116957 - protein, 17 aa, Artificial Sequence
  Description of Artificial Sequence: Synthetic peptide
  Seed: PRMCSLMQGSTLPRRSG
PRMISLMQVSTIPRRSG

SEQ ID NO: 116958 - protein, 17 aa, Artificial Sequence
  Description of Artificial Sequence: Synthetic peptide
  Seed: PRMCSLMQGSTLPRRSG
PRMISLMQVSTLPRRSG

SEQ ID NO: 116959 - protein, 17 aa, Artificial Sequence
  Description of Artificial Sequence: Synthetic peptide
  Seed: PRMCSLMQGSTLPRRSG
PRMISLMQVSTNPRRSG

SEQ ID NO: 116960 - protein, 17 aa, Artificial Sequence
  Description of Artificial Sequence: Synthetic peptide
  Seed: PRMCSLMQGSTLPRRSG
PRMISLMQVSTSPRRSG

SEQ ID NO: 116961 - protein, 17 aa, Artificial Sequence
  Description of Artificial Sequence: Synthetic peptide
  Seed: PRMCSLMQGSTLPRRSG
PRMISLMQVSTTPRRSG

SEQ ID NO: 116962 - protein, 17 aa, Artificial Sequence
  Description of Artificial Sequence: Synthetic peptide
  Seed: PRMCSLMQGSTLPRRSG
PRMISLMQVSTVPRRSG

SEQ ID NO: 116963 - protein, 17 aa, Artificial Sequence
  Description of Artificial Sequence: Synthetic peptide
  Seed: PRMCSLMQGSTLPRRSG
PRMISLQQASTAPRRSG

SEQ ID NO: 116964 - protein, 17 aa, Artificial Sequence
  Description of Artificial Sequence: Synthetic peptide
  Seed: PRMCSLMQGSTLPRRSG
PRMISLQQASTIPRRSG

SEQ ID NO: 116965 - protein, 17 aa, Artificial Sequence
  Description of Artificial Sequence: Synthetic peptide
  Seed: PRMCSLMQGSTLPRRSG
PRMISLQQASTLPRRSG

SEQ ID NO: 116966 - protein, 17 aa, Artificial Sequence
  Description of Artificial Sequence: Synthetic peptide
  Seed: PRMCSLMQGSTLPRRSG
PRMISLQQASTVPRRSG

SEQ ID NO: 116967 - protein, 17 aa, Artificial Sequence
  Description of Artificial Sequence: Synthetic peptide
  Seed: PRMCSLMQGSTLPRRSG
PRMISLQQGSTAPRRSG

SEQ ID NO: 116968 - protein, 17 aa, Artificial Sequence
  Description of Artificial Sequence: Synthetic peptide
  Seed: PRMCSLMQGSTLPRRSG
PRMISLQQGSTIPRRSG

SEQ ID NO: 116969 - protein, 17 aa, Artificial Sequence
  Description of Artificial Sequence: Synthetic peptide
  Seed: PRMCSLMQGSTLPRRSG
PRMISLQQGSTLPRRSG

SEQ ID NO: 116970 - protein, 17 aa, Artificial Sequence
  Description of Artificial Sequence: Synthetic peptide
  Seed: PRMCSLMQGSTLPRRSG
PRMISLQQGSTVPRRSG

SEQ ID NO: 116971 - protein, 17 aa, Artificial Sequence
  Description of Artificial Sequence: Synthetic peptide
  Seed: PRMCSLMQGSTLPRRSG
PRMISLQQSSTLPRRSG

SEQ ID NO: 116972 - protein, 17 aa, Artificial Sequence
  Description of Artificial Sequence: Synthetic peptide
  Seed: PRMCSLMQGSTLPRRSG
PRMISLQQSSTVPRRSG

SEQ ID NO: 116973 - protein, 17 aa, Artificial Sequence
  Description of Artificial Sequence: Synthetic peptide
  Seed: PRMCSLMQGSTLPRRSG
PRMISLVQASTAPRRSG

SEQ ID NO: 116974 - protein, 17 aa, Artificial Sequence
  Description of Artificial Sequence: Synthetic peptide
  Seed: PRMCSLMQGSTLPRRSG
PRMISLVQASTIPRRSG

SEQ ID NO: 116975 - protein, 17 aa, Artificial Sequence
  Description of Artificial Sequence: Synthetic peptide
  Seed: PRMCSLMQGSTLPRRSG
PRMISLVQASTLPRRSG

SEQ ID NO: 116976 - protein, 17 aa, Artificial Sequence
  Description of Artificial Sequence: Synthetic peptide
  Seed: PRMCSLMQGSTLPRRSG
PRMISLVQASTVPRRSG

SEQ ID NO: 116977 - protein, 17 aa, Artificial Sequence
  Description of Artificial Sequence: Synthetic peptide
  Seed: PRMCSLMQGSTLPRRSG
PRMISLVQGSTAPRRSG

SEQ ID NO: 116978 - protein, 17 aa, Artificial Sequence
  Description of Artificial Sequence: Synthetic peptide
  Seed: PRMCSLMQGSTLPRRSG
PRMISLVQGSTIPRRSG

SEQ ID NO: 116979 - protein, 17 aa, Artificial Sequence
  Description of Artificial Sequence: Synthetic peptide
  Seed: PRMCSLMQGSTLPRRSG
PRMISLVQGSTLPRRSG

SEQ ID NO: 116980 - protein, 17 aa, Artificial Sequence
  Description of Artificial Sequence: Synthetic peptide
  Seed: PRMCSLMQGSTLPRRSG
PRMISLVQGSTVPRRSG

SEQ ID NO: 116981 - protein, 17 aa, Artificial Sequence
  Description of Artificial Sequence: Synthetic peptide
  Seed: PRMCSLMQGSTLPRRSG
PRMISLVQSSTLPRRSG

SEQ ID NO: 116982 - protein, 17 aa, Artificial Sequence
  Description of Artificial Sequence: Synthetic peptide
  Seed: PRMCSLMQGSTLPRRSG
PRMISLVQSSTVPRRSG

SEQ ID NO: 116983 - protein, 17 aa, Artificial Sequence
  Description of Artificial Sequence: Synthetic peptide
  Seed: PRMCSLMQGSTLPRRSG
PRMLSLAQASTAPRRSG

SEQ ID NO: 116984 - protein, 17 aa, Artificial Sequence
  Description of Artificial Sequence: Synthetic peptide
  Seed: PRMCSLMQGSTLPRRSG
PRMLSLAQASTIPRRSG

SEQ ID NO: 116985 - protein, 17 aa, Artificial Sequence
  Description of Artificial Sequence: Synthetic peptide
  Seed: PRMCSLMQGSTLPRRSG
PRMLSLAQASTLPRRSG

SEQ ID NO: 116986 - protein, 17 aa, Artificial Sequence
  Description of Artificial Sequence: Synthetic peptide
  Seed: PRMCSLMQGSTLPRRSG
PRMLSLAQASTVPRRSG

SEQ ID NO: 116987 - protein, 17 aa, Artificial Sequence
  Description of Artificial Sequence: Synthetic peptide
  Seed: PRMCSLMQGSTLPRRSG
PRMLSLAQGSTIPRRSG

SEQ ID NO: 116988 - protein, 17 aa, Artificial Sequence
  Description of Artificial Sequence: Synthetic peptide
  Seed: PRMCSLMQGSTLPRRSG
PRMLSLAQGSTLPRRSG

SEQ ID NO: 116989 - protein, 17 aa, Artificial Sequence
  Description of Artificial Sequence: Synthetic peptide
  Seed: PRMCSLMQGSTLPRRSG
PRMLSLAQGSTVPRRSG

SEQ ID NO: 116990 - protein, 17 aa, Artificial Sequence
  Description of Artificial Sequence: Synthetic peptide
  Seed: PRMCSLMQGSTLPRRSG
PRMLSLAQSSTLPRRSG

SEQ ID NO: 116991 - protein, 17 aa, Artificial Sequence
  Description of Artificial Sequence: Synthetic peptide
  Seed: PRMCSLMQGSTLPRRSG
PRMLSLIQASTAPRRSG

SEQ ID NO: 116992 - protein, 17 aa, Artificial Sequence
  Description of Artificial Sequence: Synthetic peptide
  Seed: PRMCSLMQGSTLPRRSG
PRMLSLIQASTIPRRSG

SEQ ID NO: 116993 - protein, 17 aa, Artificial Sequence
  Description of Artificial Sequence: Synthetic peptide
  Seed: PRMCSLMQGSTLPRRSG
PRMLSLIQASTLPRRSG

SEQ ID NO: 116994 - protein, 17 aa, Artificial Sequence
  Description of Artificial Sequence: Synthetic peptide
  Seed: PRMCSLMQGSTLPRRSG
PRMLSLIQASTMPRRSG

SEQ ID NO: 116995 - protein, 17 aa, Artificial Sequence
  Description of Artificial Sequence: Synthetic peptide
  Seed: PRMCSLMQGSTLPRRSG
PRMLSLIQASTNPRRSG

SEQ ID NO: 116996 - protein, 17 aa, Artificial Sequence
  Description of Artificial Sequence: Synthetic peptide
  Seed: PRMCSLMQGSTLPRRSG
PRMLSLIQASTSPRRSG

SEQ ID NO: 116997 - protein, 17 aa, Artificial Sequence
  Description of Artificial Sequence: Synthetic peptide
  Seed: PRMCSLMQGSTLPRRSG
PRMLSLIQASTVPRRSG

SEQ ID NO: 116998 - protein, 17 aa, Artificial Sequence
  Description of Artificial Sequence: Synthetic peptide
  Seed: PRMCSLMQGSTLPRRSG
PRMLSLIQGSTAPRRSG

SEQ ID NO: 116999 - protein, 17 aa, Artificial Sequence
  Description of Artificial Sequence: Synthetic peptide
  Seed: PRMCSLMQGSTLPRRSG
PRMLSLIQGSTIPRRSG

SEQ ID NO: 117000 - protein, 17 aa, Artificial Sequence
  Description of Artificial Sequence: Synthetic peptide
  Seed: PRMCSLMQGSTLPRRSG
PRMLSLIQGSTLPRRSG

SEQ ID NO: 117001 - protein, 17 aa, Artificial Sequence
  Description of Artificial Sequence: Synthetic peptide
  Seed: PRMCSLMQGSTLPRRSG
PRMLSLIQGSTVPRRSG

SEQ ID NO: 117002 - protein, 17 aa, Artificial Sequence
  Description of Artificial Sequence: Synthetic peptide
  Seed: PRMCSLMQGSTLPRRSG
PRMLSLIQPSTAPRRSG

SEQ ID NO: 117003 - protein, 17 aa, Artificial Sequence
  Description of Artificial Sequence: Synthetic peptide
  Seed: PRMCSLMQGSTLPRRSG
PRMLSLIQPSTSPRRSG

SEQ ID NO: 117004 - protein, 17 aa, Artificial Sequence
  Description of Artificial Sequence: Synthetic peptide
  Seed: PRMCSLMQGSTLPRRSG
PRMLSLIQPSTVPRRSG

SEQ ID NO: 117005 - protein, 17 aa, Artificial Sequence
  Description of Artificial Sequence: Synthetic peptide
  Seed: PRMCSLMQGSTLPRRSG
PRMLSLIQSSTAPRRSG

SEQ ID NO: 117006 - protein, 17 aa, Artificial Sequence
  Description of Artificial Sequence: Synthetic peptide
  Seed: PRMCSLMQGSTLPRRSG
PRMLSLIQSSTIPRRSG

SEQ ID NO: 117007 - protein, 17 aa, Artificial Sequence
  Description of Artificial Sequence: Synthetic peptide
  Seed: PRMCSLMQGSTLPRRSG
PRMLSLIQSSTLPRRSG

SEQ ID NO: 117008 - protein, 17 aa, Artificial Sequence
  Description of Artificial Sequence: Synthetic peptide
  Seed: PRMCSLMQGSTLPRRSG
PRMLSLIQSSTVPRRSG

SEQ ID NO: 117009 - protein, 17 aa, Artificial Sequence
  Description of Artificial Sequence: Synthetic peptide
  Seed: PRMCSLMQGSTLPRRSG
PRMLSLIQTSTAPRRSG

SEQ ID NO: 117010 - protein, 17 aa, Artificial Sequence
  Description of Artificial Sequence: Synthetic peptide
  Seed: PRMCSLMQGSTLPRRSG
PRMLSLIQVSTAPRRSG

SEQ ID NO: 117011 - protein, 17 aa, Artificial Sequence
  Description of Artificial Sequence: Synthetic peptide
  Seed: PRMCSLMQGSTLPRRSG
PRMLSLLQASTAPRRSG

SEQ ID NO: 117012 - protein, 17 aa, Artificial Sequence
  Description of Artificial Sequence: Synthetic peptide
  Seed: PRMCSLMQGSTLPRRSG
PRMLSLLQASTGPRRSG

SEQ ID NO: 117013 - protein, 17 aa, Artificial Sequence
  Description of Artificial Sequence: Synthetic peptide
  Seed: PRMCSLMQGSTLPRRSG
PRMLSLLQASTIPRRSG

SEQ ID NO: 117014 - protein, 17 aa, Artificial Sequence
  Description of Artificial Sequence: Synthetic peptide
  Seed: PRMCSLMQGSTLPRRSG
PRMLSLLQASTLPRRSG

SEQ ID NO: 117015 - protein, 17 aa, Artificial Sequence
  Description of Artificial Sequence: Synthetic peptide
  Seed: PRMCSLMQGSTLPRRSG
PRMLSLLQASTMPRRSG

SEQ ID NO: 117016 - protein, 17 aa, Artificial Sequence
  Description of Artificial Sequence: Synthetic peptide
  Seed: PRMCSLMQGSTLPRRSG
PRMLSLLQASTNPRRSG

SEQ ID NO: 117017 - protein, 17 aa, Artificial Sequence
  Description of Artificial Sequence: Synthetic peptide
  Seed: PRMCSLMQGSTLPRRSG
PRMLSLLQASTSPRRSG

SEQ ID NO: 117018 - protein, 17 aa, Artificial Sequence
  Description of Artificial Sequence: Synthetic peptide
  Seed: PRMCSLMQGSTLPRRSG
PRMLSLLQASTTPRRSG

SEQ ID NO: 117019 - protein, 17 aa, Artificial Sequence
  Description of Artificial Sequence: Synthetic peptide
  Seed: PRMCSLMQGSTLPRRSG
PRMLSLLQASTVPRRSG

SEQ ID NO: 117020 - protein, 17 aa, Artificial Sequence
  Description of Artificial Sequence: Synthetic peptide
  Seed: PRMCSLMQGSTLPRRSG
PRMLSLLQGSTAPRRSG

SEQ ID NO: 117021 - protein, 17 aa, Artificial Sequence
  Description of Artificial Sequence: Synthetic peptide
  Seed: PRMCSLMQGSTLPRRSG
PRMLSLLQGSTGPRRSG

SEQ ID NO: 117022 - protein, 17 aa, Artificial Sequence
  Description of Artificial Sequence: Synthetic peptide
  Seed: PRMCSLMQGSTLPRRSG
PRMLSLLQGSTIPRRSG

SEQ ID NO: 117023 - protein, 17 aa, Artificial Sequence
  Description of Artificial Sequence: Synthetic peptide
  Seed: PRMCSLMQGSTLPRRSG
PRMLSLLQGSTLPRRSG

SEQ ID NO: 117024 - protein, 17 aa, Artificial Sequence
  Description of Artificial Sequence: Synthetic peptide
  Seed: PRMCSLMQGSTLPRRSG
PRMLSLLQGSTMPRRSG

SEQ ID NO: 117025 - protein, 17 aa, Artificial Sequence
  Description of Artificial Sequence: Synthetic peptide
  Seed: PRMCSLMQGSTLPRRSG
PRMLSLLQGSTSPRRSG

SEQ ID NO: 117026 - protein, 17 aa, Artificial Sequence
  Description of Artificial Sequence: Synthetic peptide
  Seed: PRMCSLMQGSTLPRRSG
PRMLSLLQGSTTPRRSG

SEQ ID NO: 117027 - protein, 17 aa, Artificial Sequence
  Description of Artificial Sequence: Synthetic peptide
  Seed: PRMCSLMQGSTLPRRSG
PRMLSLLQGSTVPRRSG

SEQ ID NO: 117028 - protein, 17 aa, Artificial Sequence
  Description of Artificial Sequence: Synthetic peptide
  Seed: PRMCSLMQGSTLPRRSG
PRMLSLLQISTAPRRSG

SEQ ID NO: 117029 - protein, 17 aa, Artificial Sequence
  Description of Artificial Sequence: Synthetic peptide
  Seed: PRMCSLMQGSTLPRRSG
PRMLSLLQISTNPRRSG

SEQ ID NO: 117030 - protein, 17 aa, Artificial Sequence
  Description of Artificial Sequence: Synthetic peptide
  Seed: PRMCSLMQGSTLPRRSG
PRMLSLLQISTSPRRSG

SEQ ID NO: 117031 - protein, 17 aa, Artificial Sequence
  Description of Artificial Sequence: Synthetic peptide
  Seed: PRMCSLMQGSTLPRRSG
PRMLSLLQNSTAPRRSG

SEQ ID NO: 117032 - protein, 17 aa, Artificial Sequence
  Description of Artificial Sequence: Synthetic peptide
  Seed: PRMCSLMQGSTLPRRSG
PRMLSLLQNSTIPRRSG

SEQ ID NO: 117033 - protein, 17 aa, Artificial Sequence
  Description of Artificial Sequence: Synthetic peptide
  Seed: PRMCSLMQGSTLPRRSG
PRMLSLLQNSTLPRRSG

SEQ ID NO: 117034 - protein, 17 aa, Artificial Sequence
  Description of Artificial Sequence: Synthetic peptide
  Seed: PRMCSLMQGSTLPRRSG
PRMLSLLQNSTVPRRSG

SEQ ID NO: 117035 - protein, 17 aa, Artificial Sequence
  Description of Artificial Sequence: Synthetic peptide
  Seed: PRMCSLMQGSTLPRRSG
PRMLSLLQPSTAPRRSG

SEQ ID NO: 117036 - protein, 17 aa, Artificial Sequence
  Description of Artificial Sequence: Synthetic peptide
  Seed: PRMCSLMQGSTLPRRSG
PRMLSLLQPSTIPRRSG

SEQ ID NO: 117037 - protein, 17 aa, Artificial Sequence
  Description of Artificial Sequence: Synthetic peptide
  Seed: PRMCSLMQGSTLPRRSG
PRMLSLLQPSTLPRRSG

SEQ ID NO: 117038 - protein, 17 aa, Artificial Sequence
  Description of Artificial Sequence: Synthetic peptide
  Seed: PRMCSLMQGSTLPRRSG
PRMLSLLQPSTMPRRSG

SEQ ID NO: 117039 - protein, 17 aa, Artificial Sequence
  Description of Artificial Sequence: Synthetic peptide
  Seed: PRMCSLMQGSTLPRRSG
PRMLSLLQPSTNPRRSG

SEQ ID NO: 117040 - protein, 17 aa, Artificial Sequence
  Description of Artificial Sequence: Synthetic peptide
  Seed: PRMCSLMQGSTLPRRSG
PRMLSLLQPSTSPRRSG

SEQ ID NO: 117041 - protein, 17 aa, Artificial Sequence
  Description of Artificial Sequence: Synthetic peptide
  Seed: PRMCSLMQGSTLPRRSG
PRMLSLLQPSTTPRRSG

SEQ ID NO: 117042 - protein, 17 aa, Artificial Sequence
  Description of Artificial Sequence: Synthetic peptide
  Seed: PRMCSLMQGSTLPRRSG
PRMLSLLQPSTVPRRSG

SEQ ID NO: 117043 - protein, 17 aa, Artificial Sequence
  Description of Artificial Sequence: Synthetic peptide
  Seed: PRMCSLMQGSTLPRRSG
PRMLSLLQSSTAPRRSG

SEQ ID NO: 117044 - protein, 17 aa, Artificial Sequence
  Description of Artificial Sequence: Synthetic peptide
  Seed: PRMCSLMQGSTLPRRSG
PRMLSLLQSSTIPRRSG

SEQ ID NO: 117045 - protein, 17 aa, Artificial Sequence
  Description of Artificial Sequence: Synthetic peptide
  Seed: PRMCSLMQGSTLPRRSG
PRMLSLLQSSTLPRRSG

SEQ ID NO: 117046 - protein, 17 aa, Artificial Sequence
  Description of Artificial Sequence: Synthetic peptide
  Seed: PRMCSLMQGSTLPRRSG
PRMLSLLQSSTMPRRSG

SEQ ID NO: 117047 - protein, 17 aa, Artificial Sequence
  Description of Artificial Sequence: Synthetic peptide
  Seed: PRMCSLMQGSTLPRRSG
PRMLSLLQSSTNPRRSG

SEQ ID NO: 117048 - protein, 17 aa, Artificial Sequence
  Description of Artificial Sequence: Synthetic peptide
  Seed: PRMCSLMQGSTLPRRSG
PRMLSLLQSSTSPRRSG

SEQ ID NO: 117049 - protein, 17 aa, Artificial Sequence
  Description of Artificial Sequence: Synthetic peptide
  Seed: PRMCSLMQGSTLPRRSG
PRMLSLLQSSTTPRRSG

SEQ ID NO: 117050 - protein, 17 aa, Artificial Sequence
  Description of Artificial Sequence: Synthetic peptide
  Seed: PRMCSLMQGSTLPRRSG
PRMLSLLQSSTVPRRSG

SEQ ID NO: 117051 - protein, 17 aa, Artificial Sequence
  Description of Artificial Sequence: Synthetic peptide
  Seed: PRMCSLMQGSTLPRRSG
PRMLSLLQTSTAPRRSG

SEQ ID NO: 117052 - protein, 17 aa, Artificial Sequence
  Description of Artificial Sequence: Synthetic peptide
  Seed: PRMCSLMQGSTLPRRSG
PRMLSLLQTSTIPRRSG

SEQ ID NO: 117053 - protein, 17 aa, Artificial Sequence
  Description of Artificial Sequence: Synthetic peptide
  Seed: PRMCSLMQGSTLPRRSG
PRMLSLLQTSTLPRRSG

SEQ ID NO: 117054 - protein, 17 aa, Artificial Sequence
  Description of Artificial Sequence: Synthetic peptide
  Seed: PRMCSLMQGSTLPRRSG
PRMLSLLQTSTNPRRSG

SEQ ID NO: 117055 - protein, 17 aa, Artificial Sequence
  Description of Artificial Sequence: Synthetic peptide
  Seed: PRMCSLMQGSTLPRRSG
PRMLSLLQTSTSPRRSG

SEQ ID NO: 117056 - protein, 17 aa, Artificial Sequence
  Description of Artificial Sequence: Synthetic peptide
  Seed: PRMCSLMQGSTLPRRSG
PRMLSLLQTSTTPRRSG

SEQ ID NO: 117057 - protein, 17 aa, Artificial Sequence
  Description of Artificial Sequence: Synthetic peptide
  Seed: PRMCSLMQGSTLPRRSG
PRMLSLLQTSTVPRRSG

SEQ ID NO: 117058 - protein, 17 aa, Artificial Sequence
  Description of Artificial Sequence: Synthetic peptide
  Seed: PRMCSLMQGSTLPRRSG
PRMLSLLQVSTAPRRSG

SEQ ID NO: 117059 - protein, 17 aa, Artificial Sequence
  Description of Artificial Sequence: Synthetic peptide
  Seed: PRMCSLMQGSTLPRRSG
PRMLSLLQVSTNPRRSG

SEQ ID NO: 117060 - protein, 17 aa, Artificial Sequence
  Description of Artificial Sequence: Synthetic peptide
  Seed: PRMCSLMQGSTLPRRSG
PRMLSLLQVSTSPRRSG

SEQ ID NO: 117061 - protein, 17 aa, Artificial Sequence
  Description of Artificial Sequence: Synthetic peptide
  Seed: PRMCSLMQGSTLPRRSG
PRMLSLLQVSTTPRRSG

SEQ ID NO: 117062 - protein, 17 aa, Artificial Sequence
  Description of Artificial Sequence: Synthetic peptide
  Seed: PRMCSLMQGSTLPRRSG
PRMLSLMQASTAPRRSG

SEQ ID NO: 117063 - protein, 17 aa, Artificial Sequence
  Description of Artificial Sequence: Synthetic peptide
  Seed: PRMCSLMQGSTLPRRSG
PRMLSLMQASTGPRRSG

SEQ ID NO: 117064 - protein, 17 aa, Artificial Sequence
  Description of Artificial Sequence: Synthetic peptide
  Seed: PRMCSLMQGSTLPRRSG
PRMLSLMQASTIPRRSG

SEQ ID NO: 117065 - protein, 17 aa, Artificial Sequence
  Description of Artificial Sequence: Synthetic peptide
  Seed: PRMCSLMQGSTLPRRSG
PRMLSLMQASTLPRRSG

SEQ ID NO: 117066 - protein, 17 aa, Artificial Sequence
  Description of Artificial Sequence: Synthetic peptide
  Seed: PRMCSLMQGSTLPRRSG
PRMLSLMQASTMPRRSG

SEQ ID NO: 117067 - protein, 17 aa, Artificial Sequence
  Description of Artificial Sequence: Synthetic peptide
  Seed: PRMCSLMQGSTLPRRSG
PRMLSLMQASTNPRRSG

SEQ ID NO: 117068 - protein, 17 aa, Artificial Sequence
  Description of Artificial Sequence: Synthetic peptide
  Seed: PRMCSLMQGSTLPRRSG
PRMLSLMQASTSPRRSG

SEQ ID NO: 117069 - protein, 17 aa, Artificial Sequence
  Description of Artificial Sequence: Synthetic peptide
  Seed: PRMCSLMQGSTLPRRSG
PRMLSLMQASTTPRRSG

SEQ ID NO: 117070 - protein, 17 aa, Artificial Sequence
  Description of Artificial Sequence: Synthetic peptide
  Seed: PRMCSLMQGSTLPRRSG
PRMLSLMQASTVPRRSG

SEQ ID NO: 117071 - protein, 17 aa, Artificial Sequence
  Description of Artificial Sequence: Synthetic peptide
  Seed: PRMCSLMQGSTLPRRSG
PRMLSLMQGSTAPRRSG

SEQ ID NO: 117072 - protein, 17 aa, Artificial Sequence
  Description of Artificial Sequence: Synthetic peptide
  Seed: PRMCSLMQGSTLPRRSG
PRMLSLMQGSTIPRRSG

SEQ ID NO: 117073 - protein, 17 aa, Artificial Sequence
  Description of Artificial Sequence: Synthetic peptide
  Seed: PRMCSLMQGSTLPRRSG
PRMLSLMQGSTLPRRSG

SEQ ID NO: 117074 - protein, 17 aa, Artificial Sequence
  Description of Artificial Sequence: Synthetic peptide
  Seed: PRMCSLMQGSTLPRRSG
PRMLSLMQGSTMPRRSG

SEQ ID NO: 117075 - protein, 17 aa, Artificial Sequence
  Description of Artificial Sequence: Synthetic peptide
  Seed: PRMCSLMQGSTLPRRSG
PRMLSLMQGSTSPRRSG

SEQ ID NO: 117076 - protein, 17 aa, Artificial Sequence
  Description of Artificial Sequence: Synthetic peptide
  Seed: PRMCSLMQGSTLPRRSG
PRMLSLMQGSTTPRRSG

SEQ ID NO: 117077 - protein, 17 aa, Artificial Sequence
  Description of Artificial Sequence: Synthetic peptide
  Seed: PRMCSLMQGSTLPRRSG
PRMLSLMQGSTVPRRSG

SEQ ID NO: 117078 - protein, 17 aa, Artificial Sequence
  Description of Artificial Sequence: Synthetic peptide
  Seed: PRMCSLMQGSTLPRRSG
PRMLSLMQISTAPRRSG

SEQ ID NO: 117079 - protein, 17 aa, Artificial Sequence
  Description of Artificial Sequence: Synthetic peptide
  Seed: PRMCSLMQGSTLPRRSG
PRMLSLMQISTNPRRSG

SEQ ID NO: 117080 - protein, 17 aa, Artificial Sequence
  Description of Artificial Sequence: Synthetic peptide
  Seed: PRMCSLMQGSTLPRRSG
PRMLSLMQISTSPRRSG

SEQ ID NO: 117081 - protein, 17 aa, Artificial Sequence
  Description of Artificial Sequence: Synthetic peptide
  Seed: PRMCSLMQGSTLPRRSG
PRMLSLMQISTTPRRSG

SEQ ID NO: 117082 - protein, 17 aa, Artificial Sequence
  Description of Artificial Sequence: Synthetic peptide
  Seed: PRMCSLMQGSTLPRRSG
PRMLSLMQLSTAPRRSG

SEQ ID NO: 117083 - protein, 17 aa, Artificial Sequence
  Description of Artificial Sequence: Synthetic peptide
  Seed: PRMCSLMQGSTLPRRSG
PRMLSLMQNSTAPRRSG

SEQ ID NO: 117084 - protein, 17 aa, Artificial Sequence
  Description of Artificial Sequence: Synthetic peptide
  Seed: PRMCSLMQGSTLPRRSG
PRMLSLMQNSTIPRRSG

SEQ ID NO: 117085 - protein, 17 aa, Artificial Sequence
  Description of Artificial Sequence: Synthetic peptide
  Seed: PRMCSLMQGSTLPRRSG
PRMLSLMQNSTLPRRSG

SEQ ID NO: 117086 - protein, 17 aa, Artificial Sequence
  Description of Artificial Sequence: Synthetic peptide
  Seed: PRMCSLMQGSTLPRRSG
PRMLSLMQNSTVPRRSG

SEQ ID NO: 117087 - protein, 17 aa, Artificial Sequence
  Description of Artificial Sequence: Synthetic peptide
  Seed: PRMCSLMQGSTLPRRSG
PRMLSLMQPSTAPRRSG

SEQ ID NO: 117088 - protein, 17 aa, Artificial Sequence
  Description of Artificial Sequence: Synthetic peptide
  Seed: PRMCSLMQGSTLPRRSG
PRMLSLMQPSTIPRRSG

SEQ ID NO: 117089 - protein, 17 aa, Artificial Sequence
  Description of Artificial Sequence: Synthetic peptide
  Seed: PRMCSLMQGSTLPRRSG
PRMLSLMQPSTLPRRSG

SEQ ID NO: 117090 - protein, 17 aa, Artificial Sequence
  Description of Artificial Sequence: Synthetic peptide
  Seed: PRMCSLMQGSTLPRRSG
PRMLSLMQPSTMPRRSG

SEQ ID NO: 117091 - protein, 17 aa, Artificial Sequence
  Description of Artificial Sequence: Synthetic peptide
  Seed: PRMCSLMQGSTLPRRSG
PRMLSLMQPSTNPRRSG

SEQ ID NO: 117092 - protein, 17 aa, Artificial Sequence
  Description of Artificial Sequence: Synthetic peptide
  Seed: PRMCSLMQGSTLPRRSG
PRMLSLMQPSTSPRRSG

SEQ ID NO: 117093 - protein, 17 aa, Artificial Sequence
  Description of Artificial Sequence: Synthetic peptide
  Seed: PRMCSLMQGSTLPRRSG
PRMLSLMQPSTTPRRSG

SEQ ID NO: 117094 - protein, 17 aa, Artificial Sequence
  Description of Artificial Sequence: Synthetic peptide
  Seed: PRMCSLMQGSTLPRRSG
PRMLSLMQPSTVPRRSG

SEQ ID NO: 117095 - protein, 17 aa, Artificial Sequence
  Description of Artificial Sequence: Synthetic peptide
  Seed: PRMCSLMQGSTLPRRSG
PRMLSLMQSSTAPRRSG

SEQ ID NO: 117096 - protein, 17 aa, Artificial Sequence
  Description of Artificial Sequence: Synthetic peptide
  Seed: PRMCSLMQGSTLPRRSG
PRMLSLMQSSTIPRRSG

SEQ ID NO: 117097 - protein, 17 aa, Artificial Sequence
  Description of Artificial Sequence: Synthetic peptide
  Seed: PRMCSLMQGSTLPRRSG
PRMLSLMQSSTLPRRSG

SEQ ID NO: 117098 - protein, 17 aa, Artificial Sequence
  Description of Artificial Sequence: Synthetic peptide
  Seed: PRMCSLMQGSTLPRRSG
PRMLSLMQSSTMPRRSG

SEQ ID NO: 117099 - protein, 17 aa, Artificial Sequence
  Description of Artificial Sequence: Synthetic peptide
  Seed: PRMCSLMQGSTLPRRSG
PRMLSLMQSSTNPRRSG

SEQ ID NO: 117100 - protein, 17 aa, Artificial Sequence
  Description of Artificial Sequence: Synthetic peptide
  Seed: PRMCSLMQGSTLPRRSG
PRMLSLMQSSTSPRRSG

SEQ ID NO: 117101 - protein, 17 aa, Artificial Sequence
  Description of Artificial Sequence: Synthetic peptide
  Seed: PRMCSLMQGSTLPRRSG
PRMLSLMQSSTTPRRSG

SEQ ID NO: 117102 - protein, 17 aa, Artificial Sequence
  Description of Artificial Sequence: Synthetic peptide
  Seed: PRMCSLMQGSTLPRRSG
PRMLSLMQSSTVPRRSG

SEQ ID NO: 117103 - protein, 17 aa, Artificial Sequence
  Description of Artificial Sequence: Synthetic peptide
  Seed: PRMCSLMQGSTLPRRSG
PRMLSLMQTSTAPRRSG

SEQ ID NO: 117104 - protein, 17 aa, Artificial Sequence
  Description of Artificial Sequence: Synthetic peptide
  Seed: PRMCSLMQGSTLPRRSG
PRMLSLMQTSTIPRRSG

SEQ ID NO: 117105 - protein, 17 aa, Artificial Sequence
  Description of Artificial Sequence: Synthetic peptide
  Seed: PRMCSLMQGSTLPRRSG
PRMLSLMQTSTLPRRSG

SEQ ID NO: 117106 - protein, 17 aa, Artificial Sequence
  Description of Artificial Sequence: Synthetic peptide
  Seed: PRMCSLMQGSTLPRRSG
PRMLSLMQTSTNPRRSG

SEQ ID NO: 117107 - protein, 17 aa, Artificial Sequence
  Description of Artificial Sequence: Synthetic peptide
  Seed: PRMCSLMQGSTLPRRSG
PRMLSLMQTSTSPRRSG

SEQ ID NO: 117108 - protein, 17 aa, Artificial Sequence
  Description of Artificial Sequence: Synthetic peptide
  Seed: PRMCSLMQGSTLPRRSG
PRMLSLMQTSTTPRRSG

SEQ ID NO: 117109 - protein, 17 aa, Artificial Sequence
  Description of Artificial Sequence: Synthetic peptide
  Seed: PRMCSLMQGSTLPRRSG
PRMLSLMQTSTVPRRSG

SEQ ID NO: 117110 - protein, 17 aa, Artificial Sequence
  Description of Artificial Sequence: Synthetic peptide
  Seed: PRMCSLMQGSTLPRRSG
PRMLSLMQVSTAPRRSG

SEQ ID NO: 117111 - protein, 17 aa, Artificial Sequence
  Description of Artificial Sequence: Synthetic peptide
  Seed: PRMCSLMQGSTLPRRSG
PRMLSLMQVSTNPRRSG

SEQ ID NO: 117112 - protein, 17 aa, Artificial Sequence
  Description of Artificial Sequence: Synthetic peptide
  Seed: PRMCSLMQGSTLPRRSG
PRMLSLMQVSTSPRRSG

SEQ ID NO: 117113 - protein, 17 aa, Artificial Sequence
  Description of Artificial Sequence: Synthetic peptide
  Seed: PRMCSLMQGSTLPRRSG
PRMLSLMQVSTTPRRSG

SEQ ID NO: 117114 - protein, 17 aa, Artificial Sequence
  Description of Artificial Sequence: Synthetic peptide
  Seed: PRMCSLMQGSTLPRRSG
PRMLSLMQVSTVPRRSG

SEQ ID NO: 117115 - protein, 17 aa, Artificial Sequence
  Description of Artificial Sequence: Synthetic peptide
  Seed: PRMCSLMQGSTLPRRSG
PRMLSLQQASTAPRRSG

SEQ ID NO: 117116 - protein, 17 aa, Artificial Sequence
  Description of Artificial Sequence: Synthetic peptide
  Seed: PRMCSLMQGSTLPRRSG
PRMLSLQQASTIPRRSG

SEQ ID NO: 117117 - protein, 17 aa, Artificial Sequence
  Description of Artificial Sequence: Synthetic peptide
  Seed: PRMCSLMQGSTLPRRSG
PRMLSLQQASTLPRRSG

SEQ ID NO: 117118 - protein, 17 aa, Artificial Sequence
  Description of Artificial Sequence: Synthetic peptide
  Seed: PRMCSLMQGSTLPRRSG
PRMLSLQQASTVPRRSG

SEQ ID NO: 117119 - protein, 17 aa, Artificial Sequence
  Description of Artificial Sequence: Synthetic peptide
  Seed: PRMCSLMQGSTLPRRSG
PRMLSLQQGSTLPRRSG

SEQ ID NO: 117120 - protein, 17 aa, Artificial Sequence
  Description of Artificial Sequence: Synthetic peptide
  Seed: PRMCSLMQGSTLPRRSG
PRMLSLQQGSTVPRRSG

SEQ ID NO: 117121 - protein, 17 aa, Artificial Sequence
  Description of Artificial Sequence: Synthetic peptide
  Seed: PRMCSLMQGSTLPRRSG
PRMLSLVQASTIPRRSG

SEQ ID NO: 117122 - protein, 17 aa, Artificial Sequence
  Description of Artificial Sequence: Synthetic peptide
  Seed: PRMCSLMQGSTLPRRSG
PRMLSLVQASTLPRRSG

SEQ ID NO: 117123 - protein, 17 aa, Artificial Sequence
  Description of Artificial Sequence: Synthetic peptide
  Seed: PRMCSLMQGSTLPRRSG
PRMLSLVQASTVPRRSG

SEQ ID NO: 117124 - protein, 17 aa, Artificial Sequence
  Description of Artificial Sequence: Synthetic peptide
  Seed: PRMCSLMQGSTLPRRSG
PRMLSLVQGSTLPRRSG

SEQ ID NO: 117125 - protein, 17 aa, Artificial Sequence
  Description of Artificial Sequence: Synthetic peptide
  Seed: PRMCSLMQGSTLPRRSG
PRMLSLVQGSTVPRRSG

SEQ ID NO: 117126 - protein, 17 aa, Artificial Sequence
  Description of Artificial Sequence: Synthetic peptide
  Seed: PRMCSLMQGSTLPRRSG
PRMMSLAQASTLPRRSG

SEQ ID NO: 117127 - protein, 17 aa, Artificial Sequence
  Description of Artificial Sequence: Synthetic peptide
  Seed: PRMCSLMQGSTLPRRSG
PRMMSLIQASTAPRRSG

SEQ ID NO: 117128 - protein, 17 aa, Artificial Sequence
  Description of Artificial Sequence: Synthetic peptide
  Seed: PRMCSLMQGSTLPRRSG
PRMMSLIQASTIPRRSG

SEQ ID NO: 117129 - protein, 17 aa, Artificial Sequence
  Description of Artificial Sequence: Synthetic peptide
  Seed: PRMCSLMQGSTLPRRSG
PRMMSLIQASTLPRRSG

SEQ ID NO: 117130 - protein, 17 aa, Artificial Sequence
  Description of Artificial Sequence: Synthetic peptide
  Seed: PRMCSLMQGSTLPRRSG
PRMMSLIQASTSPRRSG

SEQ ID NO: 117131 - protein, 17 aa, Artificial Sequence
  Description of Artificial Sequence: Synthetic peptide
  Seed: PRMCSLMQGSTLPRRSG
PRMMSLIQASTVPRRSG

SEQ ID NO: 117132 - protein, 17 aa, Artificial Sequence
  Description of Artificial Sequence: Synthetic peptide
  Seed: PRMCSLMQGSTLPRRSG
PRMMSLIQGSTLPRRSG

SEQ ID NO: 117133 - protein, 17 aa, Artificial Sequence
  Description of Artificial Sequence: Synthetic peptide
  Seed: PRMCSLMQGSTLPRRSG
PRMMSLIQGSTVPRRSG

SEQ ID NO: 117134 - protein, 17 aa, Artificial Sequence
  Description of Artificial Sequence: Synthetic peptide
  Seed: PRMCSLMQGSTLPRRSG
PRMMSLLQASTAPRRSG

SEQ ID NO: 117135 - protein, 17 aa, Artificial Sequence
  Description of Artificial Sequence: Synthetic peptide
  Seed: PRMCSLMQGSTLPRRSG
PRMMSLLQASTIPRRSG

SEQ ID NO: 117136 - protein, 17 aa, Artificial Sequence
  Description of Artificial Sequence: Synthetic peptide
  Seed: PRMCSLMQGSTLPRRSG
PRMMSLLQASTLPRRSG

SEQ ID NO: 117137 - protein, 17 aa, Artificial Sequence
  Description of Artificial Sequence: Synthetic peptide
  Seed: PRMCSLMQGSTLPRRSG
PRMMSLLQASTMPRRSG

SEQ ID NO: 117138 - protein, 17 aa, Artificial Sequence
  Description of Artificial Sequence: Synthetic peptide
  Seed: PRMCSLMQGSTLPRRSG
PRMMSLLQASTNPRRSG

SEQ ID NO: 117139 - protein, 17 aa, Artificial Sequence
  Description of Artificial Sequence: Synthetic peptide
  Seed: PRMCSLMQGSTLPRRSG
PRMMSLLQASTSPRRSG

SEQ ID NO: 117140 - protein, 17 aa, Artificial Sequence
  Description of Artificial Sequence: Synthetic peptide
  Seed: PRMCSLMQGSTLPRRSG
PRMMSLLQASTTPRRSG

SEQ ID NO: 117141 - protein, 17 aa, Artificial Sequence
  Description of Artificial Sequence: Synthetic peptide
  Seed: PRMCSLMQGSTLPRRSG
PRMMSLLQASTVPRRSG

SEQ ID NO: 117142 - protein, 17 aa, Artificial Sequence
  Description of Artificial Sequence: Synthetic peptide
  Seed: PRMCSLMQGSTLPRRSG
PRMMSLLQGSTAPRRSG

SEQ ID NO: 117143 - protein, 17 aa, Artificial Sequence
  Description of Artificial Sequence: Synthetic peptide
  Seed: PRMCSLMQGSTLPRRSG
PRMMSLLQGSTIPRRSG

SEQ ID NO: 117144 - protein, 17 aa, Artificial Sequence
  Description of Artificial Sequence: Synthetic peptide
  Seed: PRMCSLMQGSTLPRRSG
PRMMSLLQGSTLPRRSG

SEQ ID NO: 117145 - protein, 17 aa, Artificial Sequence
  Description of Artificial Sequence: Synthetic peptide
  Seed: PRMCSLMQGSTLPRRSG
PRMMSLLQGSTMPRRSG

SEQ ID NO: 117146 - protein, 17 aa, Artificial Sequence
  Description of Artificial Sequence: Synthetic peptide
  Seed: PRMCSLMQGSTLPRRSG
PRMMSLLQGSTSPRRSG

SEQ ID NO: 117147 - protein, 17 aa, Artificial Sequence
  Description of Artificial Sequence: Synthetic peptide
  Seed: PRMCSLMQGSTLPRRSG
PRMMSLLQGSTTPRRSG

SEQ ID NO: 117148 - protein, 17 aa, Artificial Sequence
  Description of Artificial Sequence: Synthetic peptide
  Seed: PRMCSLMQGSTLPRRSG
PRMMSLLQGSTVPRRSG

SEQ ID NO: 117149 - protein, 17 aa, Artificial Sequence
  Description of Artificial Sequence: Synthetic peptide
  Seed: PRMCSLMQGSTLPRRSG
PRMMSLLQISTAPRRSG

SEQ ID NO: 117150 - protein, 17 aa, Artificial Sequence
  Description of Artificial Sequence: Synthetic peptide
  Seed: PRMCSLMQGSTLPRRSG
PRMMSLLQISTSPRRSG

SEQ ID NO: 117151 - protein, 17 aa, Artificial Sequence
  Description of Artificial Sequence: Synthetic peptide
  Seed: PRMCSLMQGSTLPRRSG
PRMMSLLQPSTAPRRSG

SEQ ID NO: 117152 - protein, 17 aa, Artificial Sequence
  Description of Artificial Sequence: Synthetic peptide
  Seed: PRMCSLMQGSTLPRRSG
PRMMSLLQPSTIPRRSG

SEQ ID NO: 117153 - protein, 17 aa, Artificial Sequence
  Description of Artificial Sequence: Synthetic peptide
  Seed: PRMCSLMQGSTLPRRSG
PRMMSLLQPSTLPRRSG

SEQ ID NO: 117154 - protein, 17 aa, Artificial Sequence
  Description of Artificial Sequence: Synthetic peptide
  Seed: PRMCSLMQGSTLPRRSG
PRMMSLLQPSTSPRRSG

SEQ ID NO: 117155 - protein, 17 aa, Artificial Sequence
  Description of Artificial Sequence: Synthetic peptide
  Seed: PRMCSLMQGSTLPRRSG
PRMMSLLQPSTVPRRSG

SEQ ID NO: 117156 - protein, 17 aa, Artificial Sequence
  Description of Artificial Sequence: Synthetic peptide
  Seed: PRMCSLMQGSTLPRRSG
PRMMSLLQSSTAPRRSG

SEQ ID NO: 117157 - protein, 17 aa, Artificial Sequence
  Description of Artificial Sequence: Synthetic peptide
  Seed: PRMCSLMQGSTLPRRSG
PRMMSLLQSSTIPRRSG

SEQ ID NO: 117158 - protein, 17 aa, Artificial Sequence
  Description of Artificial Sequence: Synthetic peptide
  Seed: PRMCSLMQGSTLPRRSG
PRMMSLLQSSTLPRRSG

SEQ ID NO: 117159 - protein, 17 aa, Artificial Sequence
  Description of Artificial Sequence: Synthetic peptide
  Seed: PRMCSLMQGSTLPRRSG
PRMMSLLQSSTMPRRSG

SEQ ID NO: 117160 - protein, 17 aa, Artificial Sequence
  Description of Artificial Sequence: Synthetic peptide
  Seed: PRMCSLMQGSTLPRRSG
PRMMSLLQSSTNPRRSG

SEQ ID NO: 117161 - protein, 17 aa, Artificial Sequence
  Description of Artificial Sequence: Synthetic peptide
  Seed: PRMCSLMQGSTLPRRSG
PRMMSLLQSSTSPRRSG

SEQ ID NO: 117162 - protein, 17 aa, Artificial Sequence
  Description of Artificial Sequence: Synthetic peptide
  Seed: PRMCSLMQGSTLPRRSG
PRMMSLLQSSTTPRRSG

SEQ ID NO: 117163 - protein, 17 aa, Artificial Sequence
  Description of Artificial Sequence: Synthetic peptide
  Seed: PRMCSLMQGSTLPRRSG
PRMMSLLQSSTVPRRSG

SEQ ID NO: 117164 - protein, 17 aa, Artificial Sequence
  Description of Artificial Sequence: Synthetic peptide
  Seed: PRMCSLMQGSTLPRRSG
PRMMSLLQTSTAPRRSG

SEQ ID NO: 117165 - protein, 17 aa, Artificial Sequence
  Description of Artificial Sequence: Synthetic peptide
  Seed: PRMCSLMQGSTLPRRSG
PRMMSLLQTSTSPRRSG

SEQ ID NO: 117166 - protein, 17 aa, Artificial Sequence
  Description of Artificial Sequence: Synthetic peptide
  Seed: PRMCSLMQGSTLPRRSG
PRMMSLLQTSTVPRRSG

SEQ ID NO: 117167 - protein, 17 aa, Artificial Sequence
  Description of Artificial Sequence: Synthetic peptide
  Seed: PRMCSLMQGSTLPRRSG
PRMMSLLQVSTAPRRSG

SEQ ID NO: 117168 - protein, 17 aa, Artificial Sequence
  Description of Artificial Sequence: Synthetic peptide
  Seed: PRMCSLMQGSTLPRRSG
PRMMSLLQVSTNPRRSG

SEQ ID NO: 117169 - protein, 17 aa, Artificial Sequence
  Description of Artificial Sequence: Synthetic peptide
  Seed: PRMCSLMQGSTLPRRSG
PRMMSLLQVSTSPRRSG

SEQ ID NO: 117170 - protein, 17 aa, Artificial Sequence
  Description of Artificial Sequence: Synthetic peptide
  Seed: PRMCSLMQGSTLPRRSG
PRMMSLMQASTAPRRSG

SEQ ID NO: 117171 - protein, 17 aa, Artificial Sequence
  Description of Artificial Sequence: Synthetic peptide
  Seed: PRMCSLMQGSTLPRRSG
PRMMSLMQASTIPRRSG

SEQ ID NO: 117172 - protein, 17 aa, Artificial Sequence
  Description of Artificial Sequence: Synthetic peptide
  Seed: PRMCSLMQGSTLPRRSG
PRMMSLMQASTLPRRSG

SEQ ID NO: 117173 - protein, 17 aa, Artificial Sequence
  Description of Artificial Sequence: Synthetic peptide
  Seed: PRMCSLMQGSTLPRRSG
PRMMSLMQASTMPRRSG

SEQ ID NO: 117174 - protein, 17 aa, Artificial Sequence
  Description of Artificial Sequence: Synthetic peptide
  Seed: PRMCSLMQGSTLPRRSG
PRMMSLMQASTNPRRSG

SEQ ID NO: 117175 - protein, 17 aa, Artificial Sequence
  Description of Artificial Sequence: Synthetic peptide
  Seed: PRMCSLMQGSTLPRRSG
PRMMSLMQASTSPRRSG

SEQ ID NO: 117176 - protein, 17 aa, Artificial Sequence
  Description of Artificial Sequence: Synthetic peptide
  Seed: PRMCSLMQGSTLPRRSG
PRMMSLMQASTTPRRSG

SEQ ID NO: 117177 - protein, 17 aa, Artificial Sequence
  Description of Artificial Sequence: Synthetic peptide
  Seed: PRMCSLMQGSTLPRRSG
PRMMSLMQASTVPRRSG

SEQ ID NO: 117178 - protein, 17 aa, Artificial Sequence
  Description of Artificial Sequence: Synthetic peptide
  Seed: PRMCSLMQGSTLPRRSG
PRMMSLMQGSTAPRRSG

SEQ ID NO: 117179 - protein, 17 aa, Artificial Sequence
  Description of Artificial Sequence: Synthetic peptide
  Seed: PRMCSLMQGSTLPRRSG
PRMMSLMQGSTIPRRSG

SEQ ID NO: 117180 - protein, 17 aa, Artificial Sequence
  Description of Artificial Sequence: Synthetic peptide
  Seed: PRMCSLMQGSTLPRRSG
PRMMSLMQGSTLPRRSG

SEQ ID NO: 117181 - protein, 17 aa, Artificial Sequence
  Description of Artificial Sequence: Synthetic peptide
  Seed: PRMCSLMQGSTLPRRSG
PRMMSLMQGSTMPRRSG

SEQ ID NO: 117182 - protein, 17 aa, Artificial Sequence
  Description of Artificial Sequence: Synthetic peptide
  Seed: PRMCSLMQGSTLPRRSG
PRMMSLMQGSTTPRRSG

SEQ ID NO: 117183 - protein, 17 aa, Artificial Sequence
  Description of Artificial Sequence: Synthetic peptide
  Seed: PRMCSLMQGSTLPRRSG
PRMMSLMQGSTVPRRSG

SEQ ID NO: 117184 - protein, 17 aa, Artificial Sequence
  Description of Artificial Sequence: Synthetic peptide
  Seed: PRMCSLMQGSTLPRRSG
PRMMSLMQISTAPRRSG

SEQ ID NO: 117185 - protein, 17 aa, Artificial Sequence
  Description of Artificial Sequence: Synthetic peptide
  Seed: PRMCSLMQGSTLPRRSG
PRMMSLMQISTSPRRSG

SEQ ID NO: 117186 - protein, 17 aa, Artificial Sequence
  Description of Artificial Sequence: Synthetic peptide
  Seed: PRMCSLMQGSTLPRRSG
PRMMSLMQPSTAPRRSG

SEQ ID NO: 117187 - protein, 17 aa, Artificial Sequence
  Description of Artificial Sequence: Synthetic peptide
  Seed: PRMCSLMQGSTLPRRSG
PRMMSLMQPSTIPRRSG

SEQ ID NO: 117188 - protein, 17 aa, Artificial Sequence
  Description of Artificial Sequence: Synthetic peptide
  Seed: PRMCSLMQGSTLPRRSG
PRMMSLMQPSTLPRRSG

SEQ ID NO: 117189 - protein, 17 aa, Artificial Sequence
  Description of Artificial Sequence: Synthetic peptide
  Seed: PRMCSLMQGSTLPRRSG
PRMMSLMQPSTSPRRSG

SEQ ID NO: 117190 - protein, 17 aa, Artificial Sequence
  Description of Artificial Sequence: Synthetic peptide
  Seed: PRMCSLMQGSTLPRRSG
PRMMSLMQPSTVPRRSG

SEQ ID NO: 117191 - protein, 17 aa, Artificial Sequence
  Description of Artificial Sequence: Synthetic peptide
  Seed: PRMCSLMQGSTLPRRSG
PRMMSLMQSSTAPRRSG

SEQ ID NO: 117192 - protein, 17 aa, Artificial Sequence
  Description of Artificial Sequence: Synthetic peptide
  Seed: PRMCSLMQGSTLPRRSG
PRMMSLMQSSTIPRRSG

SEQ ID NO: 117193 - protein, 17 aa, Artificial Sequence
  Description of Artificial Sequence: Synthetic peptide
  Seed: PRMCSLMQGSTLPRRSG
PRMMSLMQSSTLPRRSG

SEQ ID NO: 117194 - protein, 17 aa, Artificial Sequence
  Description of Artificial Sequence: Synthetic peptide
  Seed: PRMCSLMQGSTLPRRSG
PRMMSLMQSSTSPRRSG

SEQ ID NO: 117195 - protein, 17 aa, Artificial Sequence
  Description of Artificial Sequence: Synthetic peptide
  Seed: PRMCSLMQGSTLPRRSG
PRMMSLMQSSTVPRRSG

SEQ ID NO: 117196 - protein, 17 aa, Artificial Sequence
  Description of Artificial Sequence: Synthetic peptide
  Seed: PRMCSLMQGSTLPRRSG
PRMMSLMQTSTAPRRSG

SEQ ID NO: 117197 - protein, 17 aa, Artificial Sequence
  Description of Artificial Sequence: Synthetic peptide
  Seed: PRMCSLMQGSTLPRRSG
PRMMSLMQVSTAPRRSG

SEQ ID NO: 117198 - protein, 17 aa, Artificial Sequence
  Description of Artificial Sequence: Synthetic peptide
  Seed: PRMCSLMQGSTLPRRSG
PRMMSLMQVSTNPRRSG

SEQ ID NO: 117199 - protein, 17 aa, Artificial Sequence
  Description of Artificial Sequence: Synthetic peptide
  Seed: PRMCSLMQGSTLPRRSG
PRMMSLMQVSTSPRRSG

SEQ ID NO: 117200 - protein, 17 aa, Artificial Sequence
  Description of Artificial Sequence: Synthetic peptide
  Seed: PRMCSLMQGSTLPRRSG
PRMVSLIQASTIPRRSG

SEQ ID NO: 117201 - protein, 17 aa, Artificial Sequence
  Description of Artificial Sequence: Synthetic peptide
  Seed: PRMCSLMQGSTLPRRSG
PRMVSLIQASTLPRRSG

SEQ ID NO: 117202 - protein, 17 aa, Artificial Sequence
  Description of Artificial Sequence: Synthetic peptide
  Seed: PRMCSLMQGSTLPRRSG
PRMVSLIQASTVPRRSG

SEQ ID NO: 117203 - protein, 17 aa, Artificial Sequence
  Description of Artificial Sequence: Synthetic peptide
  Seed: PRMCSLMQGSTLPRRSG
PRMVSLIQGSTLPRRSG

SEQ ID NO: 117204 - protein, 17 aa, Artificial Sequence
  Description of Artificial Sequence: Synthetic peptide
  Seed: PRMCSLMQGSTLPRRSG
PRMVSLIQGSTVPRRSG

SEQ ID NO: 117205 - protein, 17 aa, Artificial Sequence
  Description of Artificial Sequence: Synthetic peptide
  Seed: PRMCSLMQGSTLPRRSG
PRMVSLLQASTAPRRSG

SEQ ID NO: 117206 - protein, 17 aa, Artificial Sequence
  Description of Artificial Sequence: Synthetic peptide
  Seed: PRMCSLMQGSTLPRRSG
PRMVSLLQASTIPRRSG

SEQ ID NO: 117207 - protein, 17 aa, Artificial Sequence
  Description of Artificial Sequence: Synthetic peptide
  Seed: PRMCSLMQGSTLPRRSG
PRMVSLLQASTLPRRSG

SEQ ID NO: 117208 - protein, 17 aa, Artificial Sequence
  Description of Artificial Sequence: Synthetic peptide
  Seed: PRMCSLMQGSTLPRRSG
PRMVSLLQASTMPRRSG

SEQ ID NO: 117209 - protein, 17 aa, Artificial Sequence
  Description of Artificial Sequence: Synthetic peptide
  Seed: PRMCSLMQGSTLPRRSG
PRMVSLLQASTTPRRSG

SEQ ID NO: 117210 - protein, 17 aa, Artificial Sequence
  Description of Artificial Sequence: Synthetic peptide
  Seed: PRMCSLMQGSTLPRRSG
PRMVSLLQASTVPRRSG

SEQ ID NO: 117211 - protein, 17 aa, Artificial Sequence
  Description of Artificial Sequence: Synthetic peptide
  Seed: PRMCSLMQGSTLPRRSG
PRMVSLLQGSTAPRRSG

SEQ ID NO: 117212 - protein, 17 aa, Artificial Sequence
  Description of Artificial Sequence: Synthetic peptide
  Seed: PRMCSLMQGSTLPRRSG
PRMVSLLQGSTIPRRSG

SEQ ID NO: 117213 - protein, 17 aa, Artificial Sequence
  Description of Artificial Sequence: Synthetic peptide
  Seed: PRMCSLMQGSTLPRRSG
PRMVSLLQGSTLPRRSG

SEQ ID NO: 117214 - protein, 17 aa, Artificial Sequence
  Description of Artificial Sequence: Synthetic peptide
  Seed: PRMCSLMQGSTLPRRSG
PRMVSLLQGSTMPRRSG

SEQ ID NO: 117215 - protein, 17 aa, Artificial Sequence
  Description of Artificial Sequence: Synthetic peptide
  Seed: PRMCSLMQGSTLPRRSG
PRMVSLLQGSTTPRRSG

SEQ ID NO: 117216 - protein, 17 aa, Artificial Sequence
  Description of Artificial Sequence: Synthetic peptide
  Seed: PRMCSLMQGSTLPRRSG
PRMVSLLQGSTVPRRSG

SEQ ID NO: 117217 - protein, 17 aa, Artificial Sequence
  Description of Artificial Sequence: Synthetic peptide
  Seed: PRMCSLMQGSTLPRRSG
PRMVSLLQPSTIPRRSG

SEQ ID NO: 117218 - protein, 17 aa, Artificial Sequence
  Description of Artificial Sequence: Synthetic peptide
  Seed: PRMCSLMQGSTLPRRSG
PRMVSLLQPSTLPRRSG

SEQ ID NO: 117219 - protein, 17 aa, Artificial Sequence
  Description of Artificial Sequence: Synthetic peptide
  Seed: PRMCSLMQGSTLPRRSG
PRMVSLLQPSTVPRRSG

SEQ ID NO: 117220 - protein, 17 aa, Artificial Sequence
  Description of Artificial Sequence: Synthetic peptide
  Seed: PRMCSLMQGSTLPRRSG
PRMVSLLQSSTAPRRSG

SEQ ID NO: 117221 - protein, 17 aa, Artificial Sequence
  Description of Artificial Sequence: Synthetic peptide
  Seed: PRMCSLMQGSTLPRRSG
PRMVSLLQSSTIPRRSG

SEQ ID NO: 117222 - protein, 17 aa, Artificial Sequence
  Description of Artificial Sequence: Synthetic peptide
  Seed: PRMCSLMQGSTLPRRSG
PRMVSLLQSSTLPRRSG

SEQ ID NO: 117223 - protein, 17 aa, Artificial Sequence
  Description of Artificial Sequence: Synthetic peptide
  Seed: PRMCSLMQGSTLPRRSG
PRMVSLLQSSTVPRRSG

SEQ ID NO: 117224 - protein, 17 aa, Artificial Sequence
  Description of Artificial Sequence: Synthetic peptide
  Seed: PRMCSLMQGSTLPRRSG
PRMVSLMQASTAPRRSG

SEQ ID NO: 117225 - protein, 17 aa, Artificial Sequence
  Description of Artificial Sequence: Synthetic peptide
  Seed: PRMCSLMQGSTLPRRSG
PRMVSLMQASTIPRRSG

SEQ ID NO: 117226 - protein, 17 aa, Artificial Sequence
  Description of Artificial Sequence: Synthetic peptide
  Seed: PRMCSLMQGSTLPRRSG
PRMVSLMQASTLPRRSG

SEQ ID NO: 117227 - protein, 17 aa, Artificial Sequence
  Description of Artificial Sequence: Synthetic peptide
  Seed: PRMCSLMQGSTLPRRSG
PRMVSLMQASTMPRRSG

SEQ ID NO: 117228 - protein, 17 aa, Artificial Sequence
  Description of Artificial Sequence: Synthetic peptide
  Seed: PRMCSLMQGSTLPRRSG
PRMVSLMQASTTPRRSG

SEQ ID NO: 117229 - protein, 17 aa, Artificial Sequence
  Description of Artificial Sequence: Synthetic peptide
  Seed: PRMCSLMQGSTLPRRSG
PRMVSLMQASTVPRRSG

SEQ ID NO: 117230 - protein, 17 aa, Artificial Sequence
  Description of Artificial Sequence: Synthetic peptide
  Seed: PRMCSLMQGSTLPRRSG
PRMVSLMQGSTAPRRSG

SEQ ID NO: 117231 - protein, 17 aa, Artificial Sequence
  Description of Artificial Sequence: Synthetic peptide
  Seed: PRMCSLMQGSTLPRRSG
PRMVSLMQGSTIPRRSG

SEQ ID NO: 117232 - protein, 17 aa, Artificial Sequence
  Description of Artificial Sequence: Synthetic peptide
  Seed: PRMCSLMQGSTLPRRSG
PRMVSLMQGSTLPRRSG

SEQ ID NO: 117233 - protein, 17 aa, Artificial Sequence
  Description of Artificial Sequence: Synthetic peptide
  Seed: PRMCSLMQGSTLPRRSG
PRMVSLMQGSTMPRRSG

SEQ ID NO: 117234 - protein, 17 aa, Artificial Sequence
  Description of Artificial Sequence: Synthetic peptide
  Seed: PRMCSLMQGSTLPRRSG
PRMVSLMQGSTTPRRSG

SEQ ID NO: 117235 - protein, 17 aa, Artificial Sequence
  Description of Artificial Sequence: Synthetic peptide
  Seed: PRMCSLMQGSTLPRRSG
PRMVSLMQGSTVPRRSG

SEQ ID NO: 117236 - protein, 17 aa, Artificial Sequence
  Description of Artificial Sequence: Synthetic peptide
  Seed: PRMCSLMQGSTLPRRSG
PRMVSLMQPSTIPRRSG

SEQ ID NO: 117237 - protein, 17 aa, Artificial Sequence
  Description of Artificial Sequence: Synthetic peptide
  Seed: PRMCSLMQGSTLPRRSG
PRMVSLMQPSTLPRRSG

SEQ ID NO: 117238 - protein, 17 aa, Artificial Sequence
  Description of Artificial Sequence: Synthetic peptide
  Seed: PRMCSLMQGSTLPRRSG
PRMVSLMQPSTVPRRSG

SEQ ID NO: 117239 - protein, 17 aa, Artificial Sequence
  Description of Artificial Sequence: Synthetic peptide
  Seed: PRMCSLMQGSTLPRRSG
PRMVSLMQSSTAPRRSG

SEQ ID NO: 117240 - protein, 17 aa, Artificial Sequence
  Description of Artificial Sequence: Synthetic peptide
  Seed: PRMCSLMQGSTLPRRSG
PRMVSLMQSSTIPRRSG

SEQ ID NO: 117241 - protein, 17 aa, Artificial Sequence
  Description of Artificial Sequence: Synthetic peptide
  Seed: PRMCSLMQGSTLPRRSG
PRMVSLMQSSTLPRRSG

SEQ ID NO: 117242 - protein, 17 aa, Artificial Sequence
  Description of Artificial Sequence: Synthetic peptide
  Seed: PRMCSLMQGSTLPRRSG
PRMVSLMQSSTVPRRSG

SEQ ID NO: 117243 - protein, 17 aa, Artificial Sequence
  Description of Artificial Sequence: Synthetic peptide
  Seed: PRMCSLMQGSTLPRRSG
PRMWSLAQASTAPRRSG

SEQ ID NO: 117244 - protein, 17 aa, Artificial Sequence
  Description of Artificial Sequence: Synthetic peptide
  Seed: PRMCSLMQGSTLPRRSG
PRMWSLAQASTIPRRSG

SEQ ID NO: 117245 - protein, 17 aa, Artificial Sequence
  Description of Artificial Sequence: Synthetic peptide
  Seed: PRMCSLMQGSTLPRRSG
PRMWSLAQASTLPRRSG

SEQ ID NO: 117246 - protein, 17 aa, Artificial Sequence
  Description of Artificial Sequence: Synthetic peptide
  Seed: PRMCSLMQGSTLPRRSG
PRMWSLAQASTMPRRSG

SEQ ID NO: 117247 - protein, 17 aa, Artificial Sequence
  Description of Artificial Sequence: Synthetic peptide
  Seed: PRMCSLMQGSTLPRRSG
PRMWSLAQASTNPRRSG

SEQ ID NO: 117248 - protein, 17 aa, Artificial Sequence
  Description of Artificial Sequence: Synthetic peptide
  Seed: PRMCSLMQGSTLPRRSG
PRMWSLAQASTSPRRSG

SEQ ID NO: 117249 - protein, 17 aa, Artificial Sequence
  Description of Artificial Sequence: Synthetic peptide
  Seed: PRMCSLMQGSTLPRRSG
PRMWSLAQASTTPRRSG

SEQ ID NO: 117250 - protein, 17 aa, Artificial Sequence
  Description of Artificial Sequence: Synthetic peptide
  Seed: PRMCSLMQGSTLPRRSG
PRMWSLAQASTVPRRSG

SEQ ID NO: 117251 - protein, 17 aa, Artificial Sequence
  Description of Artificial Sequence: Synthetic peptide
  Seed: PRMCSLMQGSTLPRRSG
PRMWSLAQGSTAPRRSG

SEQ ID NO: 117252 - protein, 17 aa, Artificial Sequence
  Description of Artificial Sequence: Synthetic peptide
  Seed: PRMCSLMQGSTLPRRSG
PRMWSLAQGSTIPRRSG

SEQ ID NO: 117253 - protein, 17 aa, Artificial Sequence
  Description of Artificial Sequence: Synthetic peptide
  Seed: PRMCSLMQGSTLPRRSG
PRMWSLAQGSTLPRRSG

SEQ ID NO: 117254 - protein, 17 aa, Artificial Sequence
  Description of Artificial Sequence: Synthetic peptide
  Seed: PRMCSLMQGSTLPRRSG
PRMWSLAQGSTVPRRSG

SEQ ID NO: 117255 - protein, 17 aa, Artificial Sequence
  Description of Artificial Sequence: Synthetic peptide
  Seed: PRMCSLMQGSTLPRRSG
PRMWSLAQISTAPRRSG

SEQ ID NO: 117256 - protein, 17 aa, Artificial Sequence
  Description of Artificial Sequence: Synthetic peptide
  Seed: PRMCSLMQGSTLPRRSG
PRMWSLAQPSTAPRRSG

SEQ ID NO: 117257 - protein, 17 aa, Artificial Sequence
  Description of Artificial Sequence: Synthetic peptide
  Seed: PRMCSLMQGSTLPRRSG
PRMWSLAQPSTIPRRSG

SEQ ID NO: 117258 - protein, 17 aa, Artificial Sequence
  Description of Artificial Sequence: Synthetic peptide
  Seed: PRMCSLMQGSTLPRRSG
PRMWSLAQPSTLPRRSG

SEQ ID NO: 117259 - protein, 17 aa, Artificial Sequence
  Description of Artificial Sequence: Synthetic peptide
  Seed: PRMCSLMQGSTLPRRSG
PRMWSLAQPSTVPRRSG

SEQ ID NO: 117260 - protein, 17 aa, Artificial Sequence
  Description of Artificial Sequence: Synthetic peptide
  Seed: PRMCSLMQGSTLPRRSG
PRMWSLAQSSTAPRRSG

SEQ ID NO: 117261 - protein, 17 aa, Artificial Sequence
  Description of Artificial Sequence: Synthetic peptide
  Seed: PRMCSLMQGSTLPRRSG
PRMWSLAQSSTIPRRSG

SEQ ID NO: 117262 - protein, 17 aa, Artificial Sequence
  Description of Artificial Sequence: Synthetic peptide
  Seed: PRMCSLMQGSTLPRRSG
PRMWSLAQSSTLPRRSG

SEQ ID NO: 117263 - protein, 17 aa, Artificial Sequence
  Description of Artificial Sequence: Synthetic peptide
  Seed: PRMCSLMQGSTLPRRSG
PRMWSLAQSSTSPRRSG

SEQ ID NO: 117264 - protein, 17 aa, Artificial Sequence
  Description of Artificial Sequence: Synthetic peptide
  Seed: PRMCSLMQGSTLPRRSG
PRMWSLAQSSTVPRRSG

SEQ ID NO: 117265 - protein, 17 aa, Artificial Sequence
  Description of Artificial Sequence: Synthetic peptide
  Seed: PRMCSLMQGSTLPRRSG
PRMWSLAQTSTAPRRSG

SEQ ID NO: 117266 - protein, 17 aa, Artificial Sequence
  Description of Artificial Sequence: Synthetic peptide
  Seed: PRMCSLMQGSTLPRRSG
PRMWSLAQVSTAPRRSG

SEQ ID NO: 117267 - protein, 17 aa, Artificial Sequence
  Description of Artificial Sequence: Synthetic peptide
  Seed: PRMCSLMQGSTLPRRSG
PRMWSLAQVSTSPRRSG

SEQ ID NO: 117268 - protein, 17 aa, Artificial Sequence
  Description of Artificial Sequence: Synthetic peptide
  Seed: PRMCSLMQGSTLPRRSG
PRMWSLFQASTAPRRSG

SEQ ID NO: 117269 - protein, 17 aa, Artificial Sequence
  Description of Artificial Sequence: Synthetic peptide
  Seed: PRMCSLMQGSTLPRRSG
PRMWSLIQASTAPRRSG

SEQ ID NO: 117270 - protein, 17 aa, Artificial Sequence
  Description of Artificial Sequence: Synthetic peptide
  Seed: PRMCSLMQGSTLPRRSG
PRMWSLIQASTGPRRSG

SEQ ID NO: 117271 - protein, 17 aa, Artificial Sequence
  Description of Artificial Sequence: Synthetic peptide
  Seed: PRMCSLMQGSTLPRRSG
PRMWSLIQASTHPRRSG

SEQ ID NO: 117272 - protein, 17 aa, Artificial Sequence
  Description of Artificial Sequence: Synthetic peptide
  Seed: PRMCSLMQGSTLPRRSG
PRMWSLIQASTIPRRSG

SEQ ID NO: 117273 - protein, 17 aa, Artificial Sequence
  Description of Artificial Sequence: Synthetic peptide
  Seed: PRMCSLMQGSTLPRRSG
PRMWSLIQASTLPRRSG

SEQ ID NO: 117274 - protein, 17 aa, Artificial Sequence
  Description of Artificial Sequence: Synthetic peptide
  Seed: PRMCSLMQGSTLPRRSG
PRMWSLIQASTMPRRSG

SEQ ID NO: 117275 - protein, 17 aa, Artificial Sequence
  Description of Artificial Sequence: Synthetic peptide
  Seed: PRMCSLMQGSTLPRRSG
PRMWSLIQASTNPRRSG

SEQ ID NO: 117276 - protein, 17 aa, Artificial Sequence
  Description of Artificial Sequence: Synthetic peptide
  Seed: PRMCSLMQGSTLPRRSG
PRMWSLIQASTSPRRSG

SEQ ID NO: 117277 - protein, 17 aa, Artificial Sequence
  Description of Artificial Sequence: Synthetic peptide
  Seed: PRMCSLMQGSTLPRRSG
PRMWSLIQASTTPRRSG

SEQ ID NO: 117278 - protein, 17 aa, Artificial Sequence
  Description of Artificial Sequence: Synthetic peptide
  Seed: PRMCSLMQGSTLPRRSG
PRMWSLIQASTVPRRSG

SEQ ID NO: 117279 - protein, 17 aa, Artificial Sequence
  Description of Artificial Sequence: Synthetic peptide
  Seed: PRMCSLMQGSTLPRRSG
PRMWSLIQGSTAPRRSG

SEQ ID NO: 117280 - protein, 17 aa, Artificial Sequence
  Description of Artificial Sequence: Synthetic peptide
  Seed: PRMCSLMQGSTLPRRSG
PRMWSLIQGSTIPRRSG

SEQ ID NO: 117281 - protein, 17 aa, Artificial Sequence
  Description of Artificial Sequence: Synthetic peptide
  Seed: PRMCSLMQGSTLPRRSG
PRMWSLIQGSTLPRRSG

SEQ ID NO: 117282 - protein, 17 aa, Artificial Sequence
  Description of Artificial Sequence: Synthetic peptide
  Seed: PRMCSLMQGSTLPRRSG
PRMWSLIQGSTMPRRSG

SEQ ID NO: 117283 - protein, 17 aa, Artificial Sequence
  Description of Artificial Sequence: Synthetic peptide
  Seed: PRMCSLMQGSTLPRRSG
PRMWSLIQGSTSPRRSG

SEQ ID NO: 117284 - protein, 17 aa, Artificial Sequence
  Description of Artificial Sequence: Synthetic peptide
  Seed: PRMCSLMQGSTLPRRSG
PRMWSLIQGSTTPRRSG

SEQ ID NO: 117285 - protein, 17 aa, Artificial Sequence
  Description of Artificial Sequence: Synthetic peptide
  Seed: PRMCSLMQGSTLPRRSG
PRMWSLIQGSTVPRRSG

SEQ ID NO: 117286 - protein, 17 aa, Artificial Sequence
  Description of Artificial Sequence: Synthetic peptide
  Seed: PRMCSLMQGSTLPRRSG
PRMWSLIQISTAPRRSG

SEQ ID NO: 117287 - protein, 17 aa, Artificial Sequence
  Description of Artificial Sequence: Synthetic peptide
  Seed: PRMCSLMQGSTLPRRSG
PRMWSLIQISTNPRRSG

SEQ ID NO: 117288 - protein, 17 aa, Artificial Sequence
  Description of Artificial Sequence: Synthetic peptide
  Seed: PRMCSLMQGSTLPRRSG
PRMWSLIQISTSPRRSG

SEQ ID NO: 117289 - protein, 17 aa, Artificial Sequence
  Description of Artificial Sequence: Synthetic peptide
  Seed: PRMCSLMQGSTLPRRSG
PRMWSLIQNSTAPRRSG

SEQ ID NO: 117290 - protein, 17 aa, Artificial Sequence
  Description of Artificial Sequence: Synthetic peptide
  Seed: PRMCSLMQGSTLPRRSG
PRMWSLIQNSTLPRRSG

SEQ ID NO: 117291 - protein, 17 aa, Artificial Sequence
  Description of Artificial Sequence: Synthetic peptide
  Seed: PRMCSLMQGSTLPRRSG
PRMWSLIQNSTVPRRSG

SEQ ID NO: 117292 - protein, 17 aa, Artificial Sequence
  Description of Artificial Sequence: Synthetic peptide
  Seed: PRMCSLMQGSTLPRRSG
PRMWSLIQPSTAPRRSG

SEQ ID NO: 117293 - protein, 17 aa, Artificial Sequence
  Description of Artificial Sequence: Synthetic peptide
  Seed: PRMCSLMQGSTLPRRSG
PRMWSLIQPSTIPRRSG

SEQ ID NO: 117294 - protein, 17 aa, Artificial Sequence
  Description of Artificial Sequence: Synthetic peptide
  Seed: PRMCSLMQGSTLPRRSG
PRMWSLIQPSTLPRRSG

SEQ ID NO: 117295 - protein, 17 aa, Artificial Sequence
  Description of Artificial Sequence: Synthetic peptide
  Seed: PRMCSLMQGSTLPRRSG
PRMWSLIQPSTNPRRSG

SEQ ID NO: 117296 - protein, 17 aa, Artificial Sequence
  Description of Artificial Sequence: Synthetic peptide
  Seed: PRMCSLMQGSTLPRRSG
PRMWSLIQPSTSPRRSG

SEQ ID NO: 117297 - protein, 17 aa, Artificial Sequence
  Description of Artificial Sequence: Synthetic peptide
  Seed: PRMCSLMQGSTLPRRSG
PRMWSLIQPSTTPRRSG

SEQ ID NO: 117298 - protein, 17 aa, Artificial Sequence
  Description of Artificial Sequence: Synthetic peptide
  Seed: PRMCSLMQGSTLPRRSG
PRMWSLIQPSTVPRRSG

SEQ ID NO: 117299 - protein, 17 aa, Artificial Sequence
  Description of Artificial Sequence: Synthetic peptide
  Seed: PRMCSLMQGSTLPRRSG
PRMWSLIQSSTAPRRSG

SEQ ID NO: 117300 - protein, 17 aa, Artificial Sequence
  Description of Artificial Sequence: Synthetic peptide
  Seed: PRMCSLMQGSTLPRRSG
PRMWSLIQSSTIPRRSG

SEQ ID NO: 117301 - protein, 17 aa, Artificial Sequence
  Description of Artificial Sequence: Synthetic peptide
  Seed: PRMCSLMQGSTLPRRSG
PRMWSLIQSSTLPRRSG

SEQ ID NO: 117302 - protein, 17 aa, Artificial Sequence
  Description of Artificial Sequence: Synthetic peptide
  Seed: PRMCSLMQGSTLPRRSG
PRMWSLIQSSTMPRRSG

SEQ ID NO: 117303 - protein, 17 aa, Artificial Sequence
  Description of Artificial Sequence: Synthetic peptide
  Seed: PRMCSLMQGSTLPRRSG
PRMWSLIQSSTNPRRSG

SEQ ID NO: 117304 - protein, 17 aa, Artificial Sequence
  Description of Artificial Sequence: Synthetic peptide
  Seed: PRMCSLMQGSTLPRRSG
PRMWSLIQSSTSPRRSG

SEQ ID NO: 117305 - protein, 17 aa, Artificial Sequence
  Description of Artificial Sequence: Synthetic peptide
  Seed: PRMCSLMQGSTLPRRSG
PRMWSLIQSSTTPRRSG

SEQ ID NO: 117306 - protein, 17 aa, Artificial Sequence
  Description of Artificial Sequence: Synthetic peptide
  Seed: PRMCSLMQGSTLPRRSG
PRMWSLIQSSTVPRRSG

SEQ ID NO: 117307 - protein, 17 aa, Artificial Sequence
  Description of Artificial Sequence: Synthetic peptide
  Seed: PRMCSLMQGSTLPRRSG
PRMWSLIQTSTAPRRSG

SEQ ID NO: 117308 - protein, 17 aa, Artificial Sequence
  Description of Artificial Sequence: Synthetic peptide
  Seed: PRMCSLMQGSTLPRRSG
PRMWSLIQTSTIPRRSG

SEQ ID NO: 117309 - protein, 17 aa, Artificial Sequence
  Description of Artificial Sequence: Synthetic peptide
  Seed: PRMCSLMQGSTLPRRSG
PRMWSLIQTSTLPRRSG

SEQ ID NO: 117310 - protein, 17 aa, Artificial Sequence
  Description of Artificial Sequence: Synthetic peptide
  Seed: PRMCSLMQGSTLPRRSG
PRMWSLIQTSTNPRRSG

SEQ ID NO: 117311 - protein, 17 aa, Artificial Sequence
  Description of Artificial Sequence: Synthetic peptide
  Seed: PRMCSLMQGSTLPRRSG
PRMWSLIQTSTSPRRSG

SEQ ID NO: 117312 - protein, 17 aa, Artificial Sequence
  Description of Artificial Sequence: Synthetic peptide
  Seed: PRMCSLMQGSTLPRRSG
PRMWSLIQTSTTPRRSG

SEQ ID NO: 117313 - protein, 17 aa, Artificial Sequence
  Description of Artificial Sequence: Synthetic peptide
  Seed: PRMCSLMQGSTLPRRSG
PRMWSLIQTSTVPRRSG

SEQ ID NO: 117314 - protein, 17 aa, Artificial Sequence
  Description of Artificial Sequence: Synthetic peptide
  Seed: PRMCSLMQGSTLPRRSG
PRMWSLIQVSTAPRRSG

SEQ ID NO: 117315 - protein, 17 aa, Artificial Sequence
  Description of Artificial Sequence: Synthetic peptide
  Seed: PRMCSLMQGSTLPRRSG
PRMWSLIQVSTNPRRSG

SEQ ID NO: 117316 - protein, 17 aa, Artificial Sequence
  Description of Artificial Sequence: Synthetic peptide
  Seed: PRMCSLMQGSTLPRRSG
PRMWSLIQVSTSPRRSG

SEQ ID NO: 117317 - protein, 17 aa, Artificial Sequence
  Description of Artificial Sequence: Synthetic peptide
  Seed: PRMCSLMQGSTLPRRSG
PRMWSLIQVSTTPRRSG

SEQ ID NO: 117318 - protein, 17 aa, Artificial Sequence
  Description of Artificial Sequence: Synthetic peptide
  Seed: PRMCSLMQGSTLPRRSG
PRMWSLLQASTAPRRSG

SEQ ID NO: 117319 - protein, 17 aa, Artificial Sequence
  Description of Artificial Sequence: Synthetic peptide
  Seed: PRMCSLMQGSTLPRRSG
PRMWSLLQASTGPRRSG

SEQ ID NO: 117320 - protein, 17 aa, Artificial Sequence
  Description of Artificial Sequence: Synthetic peptide
  Seed: PRMCSLMQGSTLPRRSG
PRMWSLLQASTHPRRSG

SEQ ID NO: 117321 - protein, 17 aa, Artificial Sequence
  Description of Artificial Sequence: Synthetic peptide
  Seed: PRMCSLMQGSTLPRRSG
PRMWSLLQASTIPRRSG

SEQ ID NO: 117322 - protein, 17 aa, Artificial Sequence
  Description of Artificial Sequence: Synthetic peptide
  Seed: PRMCSLMQGSTLPRRSG
PRMWSLLQASTLPRRSG

SEQ ID NO: 117323 - protein, 17 aa, Artificial Sequence
  Description of Artificial Sequence: Synthetic peptide
  Seed: PRMCSLMQGSTLPRRSG
PRMWSLLQASTMPRRSG

SEQ ID NO: 117324 - protein, 17 aa, Artificial Sequence
  Description of Artificial Sequence: Synthetic peptide
  Seed: PRMCSLMQGSTLPRRSG
PRMWSLLQASTNPRRSG

SEQ ID NO: 117325 - protein, 17 aa, Artificial Sequence
  Description of Artificial Sequence: Synthetic peptide
  Seed: PRMCSLMQGSTLPRRSG
PRMWSLLQASTSPRRSG

SEQ ID NO: 117326 - protein, 17 aa, Artificial Sequence
  Description of Artificial Sequence: Synthetic peptide
  Seed: PRMCSLMQGSTLPRRSG
PRMWSLLQASTTPRRSG

SEQ ID NO: 117327 - protein, 17 aa, Artificial Sequence
  Description of Artificial Sequence: Synthetic peptide
  Seed: PRMCSLMQGSTLPRRSG
PRMWSLLQASTVPRRSG

SEQ ID NO: 117328 - protein, 17 aa, Artificial Sequence
  Description of Artificial Sequence: Synthetic peptide
  Seed: PRMCSLMQGSTLPRRSG
PRMWSLLQGSTAPRRSG

SEQ ID NO: 117329 - protein, 17 aa, Artificial Sequence
  Description of Artificial Sequence: Synthetic peptide
  Seed: PRMCSLMQGSTLPRRSG
PRMWSLLQGSTGPRRSG

SEQ ID NO: 117330 - protein, 17 aa, Artificial Sequence
  Description of Artificial Sequence: Synthetic peptide
  Seed: PRMCSLMQGSTLPRRSG
PRMWSLLQGSTIPRRSG

SEQ ID NO: 117331 - protein, 17 aa, Artificial Sequence
  Description of Artificial Sequence: Synthetic peptide
  Seed: PRMCSLMQGSTLPRRSG
PRMWSLLQGSTLPRRSG

SEQ ID NO: 117332 - protein, 17 aa, Artificial Sequence
  Description of Artificial Sequence: Synthetic peptide
  Seed: PRMCSLMQGSTLPRRSG
PRMWSLLQGSTMPRRSG

SEQ ID NO: 117333 - protein, 17 aa, Artificial Sequence
  Description of Artificial Sequence: Synthetic peptide
  Seed: PRMCSLMQGSTLPRRSG
PRMWSLLQGSTNPRRSG

SEQ ID NO: 117334 - protein, 17 aa, Artificial Sequence
  Description of Artificial Sequence: Synthetic peptide
  Seed: PRMCSLMQGSTLPRRSG
PRMWSLLQGSTSPRRSG

SEQ ID NO: 117335 - protein, 17 aa, Artificial Sequence
  Description of Artificial Sequence: Synthetic peptide
  Seed: PRMCSLMQGSTLPRRSG
PRMWSLLQGSTTPRRSG

SEQ ID NO: 117336 - protein, 17 aa, Artificial Sequence
  Description of Artificial Sequence: Synthetic peptide
  Seed: PRMCSLMQGSTLPRRSG
PRMWSLLQGSTVPRRSG

SEQ ID NO: 117337 - protein, 17 aa, Artificial Sequence
  Description of Artificial Sequence: Synthetic peptide
  Seed: PRMCSLMQGSTLPRRSG
PRMWSLLQISTAPRRSG

SEQ ID NO: 117338 - protein, 17 aa, Artificial Sequence
  Description of Artificial Sequence: Synthetic peptide
  Seed: PRMCSLMQGSTLPRRSG
PRMWSLLQISTNPRRSG

SEQ ID NO: 117339 - protein, 17 aa, Artificial Sequence
  Description of Artificial Sequence: Synthetic peptide
  Seed: PRMCSLMQGSTLPRRSG
PRMWSLLQISTSPRRSG

SEQ ID NO: 117340 - protein, 17 aa, Artificial Sequence
  Description of Artificial Sequence: Synthetic peptide
  Seed: PRMCSLMQGSTLPRRSG
PRMWSLLQISTTPRRSG

SEQ ID NO: 117341 - protein, 17 aa, Artificial Sequence
  Description of Artificial Sequence: Synthetic peptide
  Seed: PRMCSLMQGSTLPRRSG
PRMWSLLQISTVPRRSG

SEQ ID NO: 117342 - protein, 17 aa, Artificial Sequence
  Description of Artificial Sequence: Synthetic peptide
  Seed: PRMCSLMQGSTLPRRSG
PRMWSLLQLSTAPRRSG

SEQ ID NO: 117343 - protein, 17 aa, Artificial Sequence
  Description of Artificial Sequence: Synthetic peptide
  Seed: PRMCSLMQGSTLPRRSG
PRMWSLLQNSTAPRRSG

SEQ ID NO: 117344 - protein, 17 aa, Artificial Sequence
  Description of Artificial Sequence: Synthetic peptide
  Seed: PRMCSLMQGSTLPRRSG
PRMWSLLQNSTIPRRSG

SEQ ID NO: 117345 - protein, 17 aa, Artificial Sequence
  Description of Artificial Sequence: Synthetic peptide
  Seed: PRMCSLMQGSTLPRRSG
PRMWSLLQNSTLPRRSG

SEQ ID NO: 117346 - protein, 17 aa, Artificial Sequence
  Description of Artificial Sequence: Synthetic peptide
  Seed: PRMCSLMQGSTLPRRSG
PRMWSLLQNSTMPRRSG

SEQ ID NO: 117347 - protein, 17 aa, Artificial Sequence
  Description of Artificial Sequence: Synthetic peptide
  Seed: PRMCSLMQGSTLPRRSG
PRMWSLLQNSTNPRRSG

SEQ ID NO: 117348 - protein, 17 aa, Artificial Sequence
  Description of Artificial Sequence: Synthetic peptide
  Seed: PRMCSLMQGSTLPRRSG
PRMWSLLQNSTSPRRSG

SEQ ID NO: 117349 - protein, 17 aa, Artificial Sequence
  Description of Artificial Sequence: Synthetic peptide
  Seed: PRMCSLMQGSTLPRRSG
PRMWSLLQNSTTPRRSG

SEQ ID NO: 117350 - protein, 17 aa, Artificial Sequence
  Description of Artificial Sequence: Synthetic peptide
  Seed: PRMCSLMQGSTLPRRSG
PRMWSLLQNSTVPRRSG

SEQ ID NO: 117351 - protein, 17 aa, Artificial Sequence
  Description of Artificial Sequence: Synthetic peptide
  Seed: PRMCSLMQGSTLPRRSG
PRMWSLLQPSTAPRRSG

SEQ ID NO: 117352 - protein, 17 aa, Artificial Sequence
  Description of Artificial Sequence: Synthetic peptide
  Seed: PRMCSLMQGSTLPRRSG
PRMWSLLQPSTIPRRSG

SEQ ID NO: 117353 - protein, 17 aa, Artificial Sequence
  Description of Artificial Sequence: Synthetic peptide
  Seed: PRMCSLMQGSTLPRRSG
PRMWSLLQPSTLPRRSG

SEQ ID NO: 117354 - protein, 17 aa, Artificial Sequence
  Description of Artificial Sequence: Synthetic peptide
  Seed: PRMCSLMQGSTLPRRSG
PRMWSLLQPSTMPRRSG

SEQ ID NO: 117355 - protein, 17 aa, Artificial Sequence
  Description of Artificial Sequence: Synthetic peptide
  Seed: PRMCSLMQGSTLPRRSG
PRMWSLLQPSTNPRRSG

SEQ ID NO: 117356 - protein, 17 aa, Artificial Sequence
  Description of Artificial Sequence: Synthetic peptide
  Seed: PRMCSLMQGSTLPRRSG
PRMWSLLQPSTSPRRSG

SEQ ID NO: 117357 - protein, 17 aa, Artificial Sequence
  Description of Artificial Sequence: Synthetic peptide
  Seed: PRMCSLMQGSTLPRRSG
PRMWSLLQPSTTPRRSG

SEQ ID NO: 117358 - protein, 17 aa, Artificial Sequence
  Description of Artificial Sequence: Synthetic peptide
  Seed: PRMCSLMQGSTLPRRSG
PRMWSLLQPSTVPRRSG

SEQ ID NO: 117359 - protein, 17 aa, Artificial Sequence
  Description of Artificial Sequence: Synthetic peptide
  Seed: PRMCSLMQGSTLPRRSG
PRMWSLLQSSTAPRRSG

SEQ ID NO: 117360 - protein, 17 aa, Artificial Sequence
  Description of Artificial Sequence: Synthetic peptide
  Seed: PRMCSLMQGSTLPRRSG
PRMWSLLQSSTGPRRSG

SEQ ID NO: 117361 - protein, 17 aa, Artificial Sequence
  Description of Artificial Sequence: Synthetic peptide
  Seed: PRMCSLMQGSTLPRRSG
PRMWSLLQSSTIPRRSG

SEQ ID NO: 117362 - protein, 17 aa, Artificial Sequence
  Description of Artificial Sequence: Synthetic peptide
  Seed: PRMCSLMQGSTLPRRSG
PRMWSLLQSSTLPRRSG

SEQ ID NO: 117363 - protein, 17 aa, Artificial Sequence
  Description of Artificial Sequence: Synthetic peptide
  Seed: PRMCSLMQGSTLPRRSG
PRMWSLLQSSTMPRRSG

SEQ ID NO: 117364 - protein, 17 aa, Artificial Sequence
  Description of Artificial Sequence: Synthetic peptide
  Seed: PRMCSLMQGSTLPRRSG
PRMWSLLQSSTNPRRSG

SEQ ID NO: 117365 - protein, 17 aa, Artificial Sequence
  Description of Artificial Sequence: Synthetic peptide
  Seed: PRMCSLMQGSTLPRRSG
PRMWSLLQSSTSPRRSG

SEQ ID NO: 117366 - protein, 17 aa, Artificial Sequence
  Description of Artificial Sequence: Synthetic peptide
  Seed: PRMCSLMQGSTLPRRSG
PRMWSLLQSSTTPRRSG

SEQ ID NO: 117367 - protein, 17 aa, Artificial Sequence
  Description of Artificial Sequence: Synthetic peptide
  Seed: PRMCSLMQGSTLPRRSG
PRMWSLLQSSTVPRRSG

SEQ ID NO: 117368 - protein, 17 aa, Artificial Sequence
  Description of Artificial Sequence: Synthetic peptide
  Seed: PRMCSLMQGSTLPRRSG
PRMWSLLQTSTAPRRSG

SEQ ID NO: 117369 - protein, 17 aa, Artificial Sequence
  Description of Artificial Sequence: Synthetic peptide
  Seed: PRMCSLMQGSTLPRRSG
PRMWSLLQTSTIPRRSG

SEQ ID NO: 117370 - protein, 17 aa, Artificial Sequence
  Description of Artificial Sequence: Synthetic peptide
  Seed: PRMCSLMQGSTLPRRSG
PRMWSLLQTSTLPRRSG

SEQ ID NO: 117371 - protein, 17 aa, Artificial Sequence
  Description of Artificial Sequence: Synthetic peptide
  Seed: PRMCSLMQGSTLPRRSG
PRMWSLLQTSTMPRRSG

SEQ ID NO: 117372 - protein, 17 aa, Artificial Sequence
  Description of Artificial Sequence: Synthetic peptide
  Seed: PRMCSLMQGSTLPRRSG
PRMWSLLQTSTNPRRSG

SEQ ID NO: 117373 - protein, 17 aa, Artificial Sequence
  Description of Artificial Sequence: Synthetic peptide
  Seed: PRMCSLMQGSTLPRRSG
PRMWSLLQTSTSPRRSG

SEQ ID NO: 117374 - protein, 17 aa, Artificial Sequence
  Description of Artificial Sequence: Synthetic peptide
  Seed: PRMCSLMQGSTLPRRSG
PRMWSLLQTSTTPRRSG

SEQ ID NO: 117375 - protein, 17 aa, Artificial Sequence
  Description of Artificial Sequence: Synthetic peptide
  Seed: PRMCSLMQGSTLPRRSG
PRMWSLLQTSTVPRRSG

SEQ ID NO: 117376 - protein, 17 aa, Artificial Sequence
  Description of Artificial Sequence: Synthetic peptide
  Seed: PRMCSLMQGSTLPRRSG
PRMWSLLQVSTAPRRSG

SEQ ID NO: 117377 - protein, 17 aa, Artificial Sequence
  Description of Artificial Sequence: Synthetic peptide
  Seed: PRMCSLMQGSTLPRRSG
PRMWSLLQVSTGPRRSG

SEQ ID NO: 117378 - protein, 17 aa, Artificial Sequence
  Description of Artificial Sequence: Synthetic peptide
  Seed: PRMCSLMQGSTLPRRSG
PRMWSLLQVSTHPRRSG

SEQ ID NO: 117379 - protein, 17 aa, Artificial Sequence
  Description of Artificial Sequence: Synthetic peptide
  Seed: PRMCSLMQGSTLPRRSG
PRMWSLLQVSTIPRRSG

SEQ ID NO: 117380 - protein, 17 aa, Artificial Sequence
  Description of Artificial Sequence: Synthetic peptide
  Seed: PRMCSLMQGSTLPRRSG
PRMWSLLQVSTLPRRSG

SEQ ID NO: 117381 - protein, 17 aa, Artificial Sequence
  Description of Artificial Sequence: Synthetic peptide
  Seed: PRMCSLMQGSTLPRRSG
PRMWSLLQVSTMPRRSG

SEQ ID NO: 117382 - protein, 17 aa, Artificial Sequence
  Description of Artificial Sequence: Synthetic peptide
  Seed: PRMCSLMQGSTLPRRSG
PRMWSLLQVSTNPRRSG

SEQ ID NO: 117383 - protein, 17 aa, Artificial Sequence
  Description of Artificial Sequence: Synthetic peptide
  Seed: PRMCSLMQGSTLPRRSG
PRMWSLLQVSTSPRRSG

SEQ ID NO: 117384 - protein, 17 aa, Artificial Sequence
  Description of Artificial Sequence: Synthetic peptide
  Seed: PRMCSLMQGSTLPRRSG
PRMWSLLQVSTTPRRSG

SEQ ID NO: 117385 - protein, 17 aa, Artificial Sequence
  Description of Artificial Sequence: Synthetic peptide
  Seed: PRMCSLMQGSTLPRRSG
PRMWSLLQVSTVPRRSG

SEQ ID NO: 117386 - protein, 17 aa, Artificial Sequence
  Description of Artificial Sequence: Synthetic peptide
  Seed: PRMCSLMQGSTLPRRSG
PRMWSLMQASTAPRRSG

SEQ ID NO: 117387 - protein, 17 aa, Artificial Sequence
  Description of Artificial Sequence: Synthetic peptide
  Seed: PRMCSLMQGSTLPRRSG
PRMWSLMQASTFPRRSG

SEQ ID NO: 117388 - protein, 17 aa, Artificial Sequence
  Description of Artificial Sequence: Synthetic peptide
  Seed: PRMCSLMQGSTLPRRSG
PRMWSLMQASTGPRRSG

SEQ ID NO: 117389 - protein, 17 aa, Artificial Sequence
  Description of Artificial Sequence: Synthetic peptide
  Seed: PRMCSLMQGSTLPRRSG
PRMWSLMQASTHPRRSG

SEQ ID NO: 117390 - protein, 17 aa, Artificial Sequence
  Description of Artificial Sequence: Synthetic peptide
  Seed: PRMCSLMQGSTLPRRSG
PRMWSLMQASTIPRRSG

SEQ ID NO: 117391 - protein, 17 aa, Artificial Sequence
  Description of Artificial Sequence: Synthetic peptide
  Seed: PRMCSLMQGSTLPRRSG
PRMWSLMQASTLPRRSG

SEQ ID NO: 117392 - protein, 17 aa, Artificial Sequence
  Description of Artificial Sequence: Synthetic peptide
  Seed: PRMCSLMQGSTLPRRSG
PRMWSLMQASTMPRRSG

SEQ ID NO: 117393 - protein, 17 aa, Artificial Sequence
  Description of Artificial Sequence: Synthetic peptide
  Seed: PRMCSLMQGSTLPRRSG
PRMWSLMQASTNPRRSG

SEQ ID NO: 117394 - protein, 17 aa, Artificial Sequence
  Description of Artificial Sequence: Synthetic peptide
  Seed: PRMCSLMQGSTLPRRSG
PRMWSLMQASTQPRRSG

SEQ ID NO: 117395 - protein, 17 aa, Artificial Sequence
  Description of Artificial Sequence: Synthetic peptide
  Seed: PRMCSLMQGSTLPRRSG
PRMWSLMQASTSPRRSG

SEQ ID NO: 117396 - protein, 17 aa, Artificial Sequence
  Description of Artificial Sequence: Synthetic peptide
  Seed: PRMCSLMQGSTLPRRSG
PRMWSLMQASTTPRRSG

SEQ ID NO: 117397 - protein, 17 aa, Artificial Sequence
  Description of Artificial Sequence: Synthetic peptide
  Seed: PRMCSLMQGSTLPRRSG
PRMWSLMQASTVPRRSG

SEQ ID NO: 117398 - protein, 17 aa, Artificial Sequence
  Description of Artificial Sequence: Synthetic peptide
  Seed: PRMCSLMQGSTLPRRSG
PRMWSLMQGSTAPRRSG

SEQ ID NO: 117399 - protein, 17 aa, Artificial Sequence
  Description of Artificial Sequence: Synthetic peptide
  Seed: PRMCSLMQGSTLPRRSG
PRMWSLMQGSTGPRRSG

SEQ ID NO: 117400 - protein, 17 aa, Artificial Sequence
  Description of Artificial Sequence: Synthetic peptide
  Seed: PRMCSLMQGSTLPRRSG
PRMWSLMQGSTIPRRSG

SEQ ID NO: 117401 - protein, 17 aa, Artificial Sequence
  Description of Artificial Sequence: Synthetic peptide
  Seed: PRMCSLMQGSTLPRRSG
PRMWSLMQGSTLPRRSG

SEQ ID NO: 117402 - protein, 17 aa, Artificial Sequence
  Description of Artificial Sequence: Synthetic peptide
  Seed: PRMCSLMQGSTLPRRSG
PRMWSLMQGSTMPRRSG

SEQ ID NO: 117403 - protein, 17 aa, Artificial Sequence
  Description of Artificial Sequence: Synthetic peptide
  Seed: PRMCSLMQGSTLPRRSG
PRMWSLMQGSTNPRRSG

SEQ ID NO: 117404 - protein, 17 aa, Artificial Sequence
  Description of Artificial Sequence: Synthetic peptide
  Seed: PRMCSLMQGSTLPRRSG
PRMWSLMQGSTSPRRSG

SEQ ID NO: 117405 - protein, 17 aa, Artificial Sequence
  Description of Artificial Sequence: Synthetic peptide
  Seed: PRMCSLMQGSTLPRRSG
PRMWSLMQGSTTPRRSG

SEQ ID NO: 117406 - protein, 17 aa, Artificial Sequence
  Description of Artificial Sequence: Synthetic peptide
  Seed: PRMCSLMQGSTLPRRSG
PRMWSLMQGSTVPRRSG

SEQ ID NO: 117407 - protein, 17 aa, Artificial Sequence
  Description of Artificial Sequence: Synthetic peptide
  Seed: PRMCSLMQGSTLPRRSG
PRMWSLMQISTAPRRSG

SEQ ID NO: 117408 - protein, 17 aa, Artificial Sequence
  Description of Artificial Sequence: Synthetic peptide
  Seed: PRMCSLMQGSTLPRRSG
PRMWSLMQISTLPRRSG

SEQ ID NO: 117409 - protein, 17 aa, Artificial Sequence
  Description of Artificial Sequence: Synthetic peptide
  Seed: PRMCSLMQGSTLPRRSG
PRMWSLMQISTMPRRSG

SEQ ID NO: 117410 - protein, 17 aa, Artificial Sequence
  Description of Artificial Sequence: Synthetic peptide
  Seed: PRMCSLMQGSTLPRRSG
PRMWSLMQISTNPRRSG

SEQ ID NO: 117411 - protein, 17 aa, Artificial Sequence
  Description of Artificial Sequence: Synthetic peptide
  Seed: PRMCSLMQGSTLPRRSG
PRMWSLMQISTSPRRSG

SEQ ID NO: 117412 - protein, 17 aa, Artificial Sequence
  Description of Artificial Sequence: Synthetic peptide
  Seed: PRMCSLMQGSTLPRRSG
PRMWSLMQISTTPRRSG

SEQ ID NO: 117413 - protein, 17 aa, Artificial Sequence
  Description of Artificial Sequence: Synthetic peptide
  Seed: PRMCSLMQGSTLPRRSG
PRMWSLMQISTVPRRSG

SEQ ID NO: 117414 - protein, 17 aa, Artificial Sequence
  Description of Artificial Sequence: Synthetic peptide
  Seed: PRMCSLMQGSTLPRRSG
PRMWSLMQLSTAPRRSG

SEQ ID NO: 117415 - protein, 17 aa, Artificial Sequence
  Description of Artificial Sequence: Synthetic peptide
  Seed: PRMCSLMQGSTLPRRSG
PRMWSLMQLSTSPRRSG

SEQ ID NO: 117416 - protein, 17 aa, Artificial Sequence
  Description of Artificial Sequence: Synthetic peptide
  Seed: PRMCSLMQGSTLPRRSG
PRMWSLMQMSTAPRRSG

SEQ ID NO: 117417 - protein, 17 aa, Artificial Sequence
  Description of Artificial Sequence: Synthetic peptide
  Seed: PRMCSLMQGSTLPRRSG
PRMWSLMQNSTAPRRSG

SEQ ID NO: 117418 - protein, 17 aa, Artificial Sequence
  Description of Artificial Sequence: Synthetic peptide
  Seed: PRMCSLMQGSTLPRRSG
PRMWSLMQNSTIPRRSG

SEQ ID NO: 117419 - protein, 17 aa, Artificial Sequence
  Description of Artificial Sequence: Synthetic peptide
  Seed: PRMCSLMQGSTLPRRSG
PRMWSLMQNSTLPRRSG

SEQ ID NO: 117420 - protein, 17 aa, Artificial Sequence
  Description of Artificial Sequence: Synthetic peptide
  Seed: PRMCSLMQGSTLPRRSG
PRMWSLMQNSTMPRRSG

SEQ ID NO: 117421 - protein, 17 aa, Artificial Sequence
  Description of Artificial Sequence: Synthetic peptide
  Seed: PRMCSLMQGSTLPRRSG
PRMWSLMQNSTSPRRSG

SEQ ID NO: 117422 - protein, 17 aa, Artificial Sequence
  Description of Artificial Sequence: Synthetic peptide
  Seed: PRMCSLMQGSTLPRRSG
PRMWSLMQNSTTPRRSG

SEQ ID NO: 117423 - protein, 17 aa, Artificial Sequence
  Description of Artificial Sequence: Synthetic peptide
  Seed: PRMCSLMQGSTLPRRSG
PRMWSLMQNSTVPRRSG

SEQ ID NO: 117424 - protein, 17 aa, Artificial Sequence
  Description of Artificial Sequence: Synthetic peptide
  Seed: PRMCSLMQGSTLPRRSG
PRMWSLMQPSTAPRRSG

SEQ ID NO: 117425 - protein, 17 aa, Artificial Sequence
  Description of Artificial Sequence: Synthetic peptide
  Seed: PRMCSLMQGSTLPRRSG
PRMWSLMQPSTIPRRSG

SEQ ID NO: 117426 - protein, 17 aa, Artificial Sequence
  Description of Artificial Sequence: Synthetic peptide
  Seed: PRMCSLMQGSTLPRRSG
PRMWSLMQPSTLPRRSG

SEQ ID NO: 117427 - protein, 17 aa, Artificial Sequence
  Description of Artificial Sequence: Synthetic peptide
  Seed: PRMCSLMQGSTLPRRSG
PRMWSLMQPSTMPRRSG

SEQ ID NO: 117428 - protein, 17 aa, Artificial Sequence
  Description of Artificial Sequence: Synthetic peptide
  Seed: PRMCSLMQGSTLPRRSG
PRMWSLMQPSTNPRRSG

SEQ ID NO: 117429 - protein, 17 aa, Artificial Sequence
  Description of Artificial Sequence: Synthetic peptide
  Seed: PRMCSLMQGSTLPRRSG
PRMWSLMQPSTSPRRSG

SEQ ID NO: 117430 - protein, 17 aa, Artificial Sequence
  Description of Artificial Sequence: Synthetic peptide
  Seed: PRMCSLMQGSTLPRRSG
PRMWSLMQPSTTPRRSG

SEQ ID NO: 117431 - protein, 17 aa, Artificial Sequence
  Description of Artificial Sequence: Synthetic peptide
  Seed: PRMCSLMQGSTLPRRSG
PRMWSLMQPSTVPRRSG

SEQ ID NO: 117432 - protein, 17 aa, Artificial Sequence
  Description of Artificial Sequence: Synthetic peptide
  Seed: PRMCSLMQGSTLPRRSG
PRMWSLMQSSTAPRRSG

SEQ ID NO: 117433 - protein, 17 aa, Artificial Sequence
  Description of Artificial Sequence: Synthetic peptide
  Seed: PRMCSLMQGSTLPRRSG
PRMWSLMQSSTGPRRSG

SEQ ID NO: 117434 - protein, 17 aa, Artificial Sequence
  Description of Artificial Sequence: Synthetic peptide
  Seed: PRMCSLMQGSTLPRRSG
PRMWSLMQSSTIPRRSG

SEQ ID NO: 117435 - protein, 17 aa, Artificial Sequence
  Description of Artificial Sequence: Synthetic peptide
  Seed: PRMCSLMQGSTLPRRSG
PRMWSLMQSSTLPRRSG

SEQ ID NO: 117436 - protein, 17 aa, Artificial Sequence
  Description of Artificial Sequence: Synthetic peptide
  Seed: PRMCSLMQGSTLPRRSG
PRMWSLMQSSTMPRRSG

SEQ ID NO: 117437 - protein, 17 aa, Artificial Sequence
  Description of Artificial Sequence: Synthetic peptide
  Seed: PRMCSLMQGSTLPRRSG
PRMWSLMQSSTNPRRSG

SEQ ID NO: 117438 - protein, 17 aa, Artificial Sequence
  Description of Artificial Sequence: Synthetic peptide
  Seed: PRMCSLMQGSTLPRRSG
PRMWSLMQSSTSPRRSG

SEQ ID NO: 117439 - protein, 17 aa, Artificial Sequence
  Description of Artificial Sequence: Synthetic peptide
  Seed: PRMCSLMQGSTLPRRSG
PRMWSLMQSSTTPRRSG

SEQ ID NO: 117440 - protein, 17 aa, Artificial Sequence
  Description of Artificial Sequence: Synthetic peptide
  Seed: PRMCSLMQGSTLPRRSG
PRMWSLMQSSTVPRRSG

SEQ ID NO: 117441 - protein, 17 aa, Artificial Sequence
  Description of Artificial Sequence: Synthetic peptide
  Seed: PRMCSLMQGSTLPRRSG
PRMWSLMQTSTAPRRSG

SEQ ID NO: 117442 - protein, 17 aa, Artificial Sequence
  Description of Artificial Sequence: Synthetic peptide
  Seed: PRMCSLMQGSTLPRRSG
PRMWSLMQTSTIPRRSG

SEQ ID NO: 117443 - protein, 17 aa, Artificial Sequence
  Description of Artificial Sequence: Synthetic peptide
  Seed: PRMCSLMQGSTLPRRSG
PRMWSLMQTSTLPRRSG

SEQ ID NO: 117444 - protein, 17 aa, Artificial Sequence
  Description of Artificial Sequence: Synthetic peptide
  Seed: PRMCSLMQGSTLPRRSG
PRMWSLMQTSTMPRRSG

SEQ ID NO: 117445 - protein, 17 aa, Artificial Sequence
  Description of Artificial Sequence: Synthetic peptide
  Seed: PRMCSLMQGSTLPRRSG
PRMWSLMQTSTNPRRSG

SEQ ID NO: 117446 - protein, 17 aa, Artificial Sequence
  Description of Artificial Sequence: Synthetic peptide
  Seed: PRMCSLMQGSTLPRRSG
PRMWSLMQTSTSPRRSG

SEQ ID NO: 117447 - protein, 17 aa, Artificial Sequence
  Description of Artificial Sequence: Synthetic peptide
  Seed: PRMCSLMQGSTLPRRSG
PRMWSLMQTSTTPRRSG

SEQ ID NO: 117448 - protein, 17 aa, Artificial Sequence
  Description of Artificial Sequence: Synthetic peptide
  Seed: PRMCSLMQGSTLPRRSG
PRMWSLMQTSTVPRRSG

SEQ ID NO: 117449 - protein, 17 aa, Artificial Sequence
  Description of Artificial Sequence: Synthetic peptide
  Seed: PRMCSLMQGSTLPRRSG
PRMWSLMQVSTAPRRSG

SEQ ID NO: 117450 - protein, 17 aa, Artificial Sequence
  Description of Artificial Sequence: Synthetic peptide
  Seed: PRMCSLMQGSTLPRRSG
PRMWSLMQVSTGPRRSG

SEQ ID NO: 117451 - protein, 17 aa, Artificial Sequence
  Description of Artificial Sequence: Synthetic peptide
  Seed: PRMCSLMQGSTLPRRSG
PRMWSLMQVSTHPRRSG

SEQ ID NO: 117452 - protein, 17 aa, Artificial Sequence
  Description of Artificial Sequence: Synthetic peptide
  Seed: PRMCSLMQGSTLPRRSG
PRMWSLMQVSTIPRRSG

SEQ ID NO: 117453 - protein, 17 aa, Artificial Sequence
  Description of Artificial Sequence: Synthetic peptide
  Seed: PRMCSLMQGSTLPRRSG
PRMWSLMQVSTLPRRSG

SEQ ID NO: 117454 - protein, 17 aa, Artificial Sequence
  Description of Artificial Sequence: Synthetic peptide
  Seed: PRMCSLMQGSTLPRRSG
PRMWSLMQVSTMPRRSG

SEQ ID NO: 117455 - protein, 17 aa, Artificial Sequence
  Description of Artificial Sequence: Synthetic peptide
  Seed: PRMCSLMQGSTLPRRSG
PRMWSLMQVSTNPRRSG

SEQ ID NO: 117456 - protein, 17 aa, Artificial Sequence
  Description of Artificial Sequence: Synthetic peptide
  Seed: PRMCSLMQGSTLPRRSG
PRMWSLMQVSTSPRRSG

SEQ ID NO: 117457 - protein, 17 aa, Artificial Sequence
  Description of Artificial Sequence: Synthetic peptide
  Seed: PRMCSLMQGSTLPRRSG
PRMWSLMQVSTTPRRSG

SEQ ID NO: 117458 - protein, 17 aa, Artificial Sequence
  Description of Artificial Sequence: Synthetic peptide
  Seed: PRMCSLMQGSTLPRRSG
PRMWSLMQVSTVPRRSG

SEQ ID NO: 117459 - protein, 17 aa, Artificial Sequence
  Description of Artificial Sequence: Synthetic peptide
  Seed: PRMCSLMQGSTLPRRSG
PRMWSLQQASTAPRRSG

SEQ ID NO: 117460 - protein, 17 aa, Artificial Sequence
  Description of Artificial Sequence: Synthetic peptide
  Seed: PRMCSLMQGSTLPRRSG
PRMWSLQQASTIPRRSG

SEQ ID NO: 117461 - protein, 17 aa, Artificial Sequence
  Description of Artificial Sequence: Synthetic peptide
  Seed: PRMCSLMQGSTLPRRSG
PRMWSLQQASTLPRRSG

SEQ ID NO: 117462 - protein, 17 aa, Artificial Sequence
  Description of Artificial Sequence: Synthetic peptide
  Seed: PRMCSLMQGSTLPRRSG
PRMWSLQQASTVPRRSG

SEQ ID NO: 117463 - protein, 17 aa, Artificial Sequence
  Description of Artificial Sequence: Synthetic peptide
  Seed: PRMCSLMQGSTLPRRSG
PRMWSLQQGSTAPRRSG

SEQ ID NO: 117464 - protein, 17 aa, Artificial Sequence
  Description of Artificial Sequence: Synthetic peptide
  Seed: PRMCSLMQGSTLPRRSG
PRMWSLQQGSTIPRRSG

SEQ ID NO: 117465 - protein, 17 aa, Artificial Sequence
  Description of Artificial Sequence: Synthetic peptide
  Seed: PRMCSLMQGSTLPRRSG
PRMWSLQQGSTLPRRSG

SEQ ID NO: 117466 - protein, 17 aa, Artificial Sequence
  Description of Artificial Sequence: Synthetic peptide
  Seed: PRMCSLMQGSTLPRRSG
PRMWSLQQGSTVPRRSG

SEQ ID NO: 117467 - protein, 17 aa, Artificial Sequence
  Description of Artificial Sequence: Synthetic peptide
  Seed: PRMCSLMQGSTLPRRSG
PRMWSLQQSSTAPRRSG

SEQ ID NO: 117468 - protein, 17 aa, Artificial Sequence
  Description of Artificial Sequence: Synthetic peptide
  Seed: PRMCSLMQGSTLPRRSG
PRMWSLQQSSTIPRRSG

SEQ ID NO: 117469 - protein, 17 aa, Artificial Sequence
  Description of Artificial Sequence: Synthetic peptide
  Seed: PRMCSLMQGSTLPRRSG
PRMWSLQQSSTLPRRSG

SEQ ID NO: 117470 - protein, 17 aa, Artificial Sequence
  Description of Artificial Sequence: Synthetic peptide
  Seed: PRMCSLMQGSTLPRRSG
PRMWSLQQSSTVPRRSG

SEQ ID NO: 117471 - protein, 17 aa, Artificial Sequence
  Description of Artificial Sequence: Synthetic peptide
  Seed: PRMCSLMQGSTLPRRSG
PRMWSLSQASTIPRRSG

SEQ ID NO: 117472 - protein, 17 aa, Artificial Sequence
  Description of Artificial Sequence: Synthetic peptide
  Seed: PRMCSLMQGSTLPRRSG
PRMWSLSQASTLPRRSG

SEQ ID NO: 117473 - protein, 17 aa, Artificial Sequence
  Description of Artificial Sequence: Synthetic peptide
  Seed: PRMCSLMQGSTLPRRSG
PRMWSLSQASTVPRRSG

SEQ ID NO: 117474 - protein, 17 aa, Artificial Sequence
  Description of Artificial Sequence: Synthetic peptide
  Seed: PRMCSLMQGSTLPRRSG
PRMWSLVQASTAPRRSG

SEQ ID NO: 117475 - protein, 17 aa, Artificial Sequence
  Description of Artificial Sequence: Synthetic peptide
  Seed: PRMCSLMQGSTLPRRSG
PRMWSLVQASTIPRRSG

SEQ ID NO: 117476 - protein, 17 aa, Artificial Sequence
  Description of Artificial Sequence: Synthetic peptide
  Seed: PRMCSLMQGSTLPRRSG
PRMWSLVQASTLPRRSG

SEQ ID NO: 117477 - protein, 17 aa, Artificial Sequence
  Description of Artificial Sequence: Synthetic peptide
  Seed: PRMCSLMQGSTLPRRSG
PRMWSLVQASTNPRRSG

SEQ ID NO: 117478 - protein, 17 aa, Artificial Sequence
  Description of Artificial Sequence: Synthetic peptide
  Seed: PRMCSLMQGSTLPRRSG
PRMWSLVQASTSPRRSG

SEQ ID NO: 117479 - protein, 17 aa, Artificial Sequence
  Description of Artificial Sequence: Synthetic peptide
  Seed: PRMCSLMQGSTLPRRSG
PRMWSLVQASTVPRRSG

SEQ ID NO: 117480 - protein, 17 aa, Artificial Sequence
  Description of Artificial Sequence: Synthetic peptide
  Seed: PRMCSLMQGSTLPRRSG
PRMWSLVQGSTAPRRSG

SEQ ID NO: 117481 - protein, 17 aa, Artificial Sequence
  Description of Artificial Sequence: Synthetic peptide
  Seed: PRMCSLMQGSTLPRRSG
PRMWSLVQGSTIPRRSG

SEQ ID NO: 117482 - protein, 17 aa, Artificial Sequence
  Description of Artificial Sequence: Synthetic peptide
  Seed: PRMCSLMQGSTLPRRSG
PRMWSLVQGSTLPRRSG

SEQ ID NO: 117483 - protein, 17 aa, Artificial Sequence
  Description of Artificial Sequence: Synthetic peptide
  Seed: PRMCSLMQGSTLPRRSG
PRMWSLVQGSTVPRRSG

SEQ ID NO: 117484 - protein, 17 aa, Artificial Sequence
  Description of Artificial Sequence: Synthetic peptide
  Seed: PRMCSLMQGSTLPRRSG
PRMWSLVQPSTAPRRSG

SEQ ID NO: 117485 - protein, 17 aa, Artificial Sequence
  Description of Artificial Sequence: Synthetic peptide
  Seed: PRMCSLMQGSTLPRRSG
PRMWSLVQSSTAPRRSG

SEQ ID NO: 117486 - protein, 17 aa, Artificial Sequence
  Description of Artificial Sequence: Synthetic peptide
  Seed: PRMCSLMQGSTLPRRSG
PRMWSLVQSSTIPRRSG

SEQ ID NO: 117487 - protein, 17 aa, Artificial Sequence
  Description of Artificial Sequence: Synthetic peptide
  Seed: PRMCSLMQGSTLPRRSG
PRMWSLVQSSTLPRRSG

SEQ ID NO: 117488 - protein, 17 aa, Artificial Sequence
  Description of Artificial Sequence: Synthetic peptide
  Seed: PRMCSLMQGSTLPRRSG
PRMWSLVQSSTSPRRSG

SEQ ID NO: 117489 - protein, 17 aa, Artificial Sequence
  Description of Artificial Sequence: Synthetic peptide
  Seed: PRMCSLMQGSTLPRRSG
PRMWSLVQSSTVPRRSG

SEQ ID NO: 117490 - protein, 17 aa, Artificial Sequence
  Description of Artificial Sequence: Synthetic peptide
  Seed: PRMCSLMQGSTLPRRSG
PRMWSLVQTSTAPRRSG

SEQ ID NO: 117491 - protein, 17 aa, Artificial Sequence
  Description of Artificial Sequence: Synthetic peptide
  Seed: PRMCSLMQGSTLPRRSG
PRMWSLVQTSTSPRRSG

SEQ ID NO: 117492 - protein, 17 aa, Artificial Sequence
  Description of Artificial Sequence: Synthetic peptide
  Seed: PRMCSLMQGSTLPRRSG
PRMWSLVQVSTAPRRSG

SEQ ID NO: 117493 - protein, 17 aa, Artificial Sequence
  Description of Artificial Sequence: Synthetic peptide
  Seed: PRMCSLMQGSTLPRRSG
PRMYSLAQASTAPRRSG

SEQ ID NO: 117494 - protein, 17 aa, Artificial Sequence
  Description of Artificial Sequence: Synthetic peptide
  Seed: PRMCSLMQGSTLPRRSG
PRMYSLAQASTFPRRSG

SEQ ID NO: 117495 - protein, 17 aa, Artificial Sequence
  Description of Artificial Sequence: Synthetic peptide
  Seed: PRMCSLMQGSTLPRRSG
PRMYSLAQASTGPRRSG

SEQ ID NO: 117496 - protein, 17 aa, Artificial Sequence
  Description of Artificial Sequence: Synthetic peptide
  Seed: PRMCSLMQGSTLPRRSG
PRMYSLAQASTHPRRSG

SEQ ID NO: 117497 - protein, 17 aa, Artificial Sequence
  Description of Artificial Sequence: Synthetic peptide
  Seed: PRMCSLMQGSTLPRRSG
PRMYSLAQASTIPRRSG

SEQ ID NO: 117498 - protein, 17 aa, Artificial Sequence
  Description of Artificial Sequence: Synthetic peptide
  Seed: PRMCSLMQGSTLPRRSG
PRMYSLAQASTLPRRSG

SEQ ID NO: 117499 - protein, 17 aa, Artificial Sequence
  Description of Artificial Sequence: Synthetic peptide
  Seed: PRMCSLMQGSTLPRRSG
PRMYSLAQASTMPRRSG

SEQ ID NO: 117500 - protein, 17 aa, Artificial Sequence
  Description of Artificial Sequence: Synthetic peptide
  Seed: PRMCSLMQGSTLPRRSG
PRMYSLAQASTNPRRSG

SEQ ID NO: 117501 - protein, 17 aa, Artificial Sequence
  Description of Artificial Sequence: Synthetic peptide
  Seed: PRMCSLMQGSTLPRRSG
PRMYSLAQASTQPRRSG

SEQ ID NO: 117502 - protein, 17 aa, Artificial Sequence
  Description of Artificial Sequence: Synthetic peptide
  Seed: PRMCSLMQGSTLPRRSG
PRMYSLAQASTSPRRSG

SEQ ID NO: 117503 - protein, 17 aa, Artificial Sequence
  Description of Artificial Sequence: Synthetic peptide
  Seed: PRMCSLMQGSTLPRRSG
PRMYSLAQASTTPRRSG

SEQ ID NO: 117504 - protein, 17 aa, Artificial Sequence
  Description of Artificial Sequence: Synthetic peptide
  Seed: PRMCSLMQGSTLPRRSG
PRMYSLAQASTVPRRSG

SEQ ID NO: 117505 - protein, 17 aa, Artificial Sequence
  Description of Artificial Sequence: Synthetic peptide
  Seed: PRMCSLMQGSTLPRRSG
PRMYSLAQGSTAPRRSG

SEQ ID NO: 117506 - protein, 17 aa, Artificial Sequence
  Description of Artificial Sequence: Synthetic peptide
  Seed: PRMCSLMQGSTLPRRSG
PRMYSLAQGSTIPRRSG

SEQ ID NO: 117507 - protein, 17 aa, Artificial Sequence
  Description of Artificial Sequence: Synthetic peptide
  Seed: PRMCSLMQGSTLPRRSG
PRMYSLAQGSTLPRRSG

SEQ ID NO: 117508 - protein, 17 aa, Artificial Sequence
  Description of Artificial Sequence: Synthetic peptide
  Seed: PRMCSLMQGSTLPRRSG
PRMYSLAQGSTMPRRSG

SEQ ID NO: 117509 - protein, 17 aa, Artificial Sequence
  Description of Artificial Sequence: Synthetic peptide
  Seed: PRMCSLMQGSTLPRRSG
PRMYSLAQGSTSPRRSG

SEQ ID NO: 117510 - protein, 17 aa, Artificial Sequence
  Description of Artificial Sequence: Synthetic peptide
  Seed: PRMCSLMQGSTLPRRSG
PRMYSLAQGSTTPRRSG

SEQ ID NO: 117511 - protein, 17 aa, Artificial Sequence
  Description of Artificial Sequence: Synthetic peptide
  Seed: PRMCSLMQGSTLPRRSG
PRMYSLAQGSTVPRRSG

SEQ ID NO: 117512 - protein, 17 aa, Artificial Sequence
  Description of Artificial Sequence: Synthetic peptide
  Seed: PRMCSLMQGSTLPRRSG
PRMYSLAQISTAPRRSG

SEQ ID NO: 117513 - protein, 17 aa, Artificial Sequence
  Description of Artificial Sequence: Synthetic peptide
  Seed: PRMCSLMQGSTLPRRSG
PRMYSLAQISTIPRRSG

SEQ ID NO: 117514 - protein, 17 aa, Artificial Sequence
  Description of Artificial Sequence: Synthetic peptide
  Seed: PRMCSLMQGSTLPRRSG
PRMYSLAQISTLPRRSG

SEQ ID NO: 117515 - protein, 17 aa, Artificial Sequence
  Description of Artificial Sequence: Synthetic peptide
  Seed: PRMCSLMQGSTLPRRSG
PRMYSLAQISTMPRRSG

SEQ ID NO: 117516 - protein, 17 aa, Artificial Sequence
  Description of Artificial Sequence: Synthetic peptide
  Seed: PRMCSLMQGSTLPRRSG
PRMYSLAQISTNPRRSG

SEQ ID NO: 117517 - protein, 17 aa, Artificial Sequence
  Description of Artificial Sequence: Synthetic peptide
  Seed: PRMCSLMQGSTLPRRSG
PRMYSLAQISTSPRRSG

SEQ ID NO: 117518 - protein, 17 aa, Artificial Sequence
  Description of Artificial Sequence: Synthetic peptide
  Seed: PRMCSLMQGSTLPRRSG
PRMYSLAQISTTPRRSG

SEQ ID NO: 117519 - protein, 17 aa, Artificial Sequence
  Description of Artificial Sequence: Synthetic peptide
  Seed: PRMCSLMQGSTLPRRSG
PRMYSLAQISTVPRRSG

SEQ ID NO: 117520 - protein, 17 aa, Artificial Sequence
  Description of Artificial Sequence: Synthetic peptide
  Seed: PRMCSLMQGSTLPRRSG
PRMYSLAQLSTAPRRSG

SEQ ID NO: 117521 - protein, 17 aa, Artificial Sequence
  Description of Artificial Sequence: Synthetic peptide
  Seed: PRMCSLMQGSTLPRRSG
PRMYSLAQNSTAPRRSG

SEQ ID NO: 117522 - protein, 17 aa, Artificial Sequence
  Description of Artificial Sequence: Synthetic peptide
  Seed: PRMCSLMQGSTLPRRSG
PRMYSLAQNSTIPRRSG

SEQ ID NO: 117523 - protein, 17 aa, Artificial Sequence
  Description of Artificial Sequence: Synthetic peptide
  Seed: PRMCSLMQGSTLPRRSG
PRMYSLAQNSTLPRRSG

SEQ ID NO: 117524 - protein, 17 aa, Artificial Sequence
  Description of Artificial Sequence: Synthetic peptide
  Seed: PRMCSLMQGSTLPRRSG
PRMYSLAQNSTVPRRSG

SEQ ID NO: 117525 - protein, 17 aa, Artificial Sequence
  Description of Artificial Sequence: Synthetic peptide
  Seed: PRMCSLMQGSTLPRRSG
PRMYSLAQPSTAPRRSG

SEQ ID NO: 117526 - protein, 17 aa, Artificial Sequence
  Description of Artificial Sequence: Synthetic peptide
  Seed: PRMCSLMQGSTLPRRSG
PRMYSLAQPSTIPRRSG

SEQ ID NO: 117527 - protein, 17 aa, Artificial Sequence
  Description of Artificial Sequence: Synthetic peptide
  Seed: PRMCSLMQGSTLPRRSG
PRMYSLAQPSTLPRRSG

SEQ ID NO: 117528 - protein, 17 aa, Artificial Sequence
  Description of Artificial Sequence: Synthetic peptide
  Seed: PRMCSLMQGSTLPRRSG
PRMYSLAQPSTMPRRSG

SEQ ID NO: 117529 - protein, 17 aa, Artificial Sequence
  Description of Artificial Sequence: Synthetic peptide
  Seed: PRMCSLMQGSTLPRRSG
PRMYSLAQPSTNPRRSG

SEQ ID NO: 117530 - protein, 17 aa, Artificial Sequence
  Description of Artificial Sequence: Synthetic peptide
  Seed: PRMCSLMQGSTLPRRSG
PRMYSLAQPSTSPRRSG

SEQ ID NO: 117531 - protein, 17 aa, Artificial Sequence
  Description of Artificial Sequence: Synthetic peptide
  Seed: PRMCSLMQGSTLPRRSG
PRMYSLAQPSTTPRRSG

SEQ ID NO: 117532 - protein, 17 aa, Artificial Sequence
  Description of Artificial Sequence: Synthetic peptide
  Seed: PRMCSLMQGSTLPRRSG
PRMYSLAQPSTVPRRSG

SEQ ID NO: 117533 - protein, 17 aa, Artificial Sequence
  Description of Artificial Sequence: Synthetic peptide
  Seed: PRMCSLMQGSTLPRRSG
PRMYSLAQSSTAPRRSG

SEQ ID NO: 117534 - protein, 17 aa, Artificial Sequence
  Description of Artificial Sequence: Synthetic peptide
  Seed: PRMCSLMQGSTLPRRSG
PRMYSLAQSSTIPRRSG

SEQ ID NO: 117535 - protein, 17 aa, Artificial Sequence
  Description of Artificial Sequence: Synthetic peptide
  Seed: PRMCSLMQGSTLPRRSG
PRMYSLAQSSTLPRRSG

SEQ ID NO: 117536 - protein, 17 aa, Artificial Sequence
  Description of Artificial Sequence: Synthetic peptide
  Seed: PRMCSLMQGSTLPRRSG
PRMYSLAQSSTMPRRSG

SEQ ID NO: 117537 - protein, 17 aa, Artificial Sequence
  Description of Artificial Sequence: Synthetic peptide
  Seed: PRMCSLMQGSTLPRRSG
PRMYSLAQSSTNPRRSG

SEQ ID NO: 117538 - protein, 17 aa, Artificial Sequence
  Description of Artificial Sequence: Synthetic peptide
  Seed: PRMCSLMQGSTLPRRSG
PRMYSLAQSSTSPRRSG

SEQ ID NO: 117539 - protein, 17 aa, Artificial Sequence
  Description of Artificial Sequence: Synthetic peptide
  Seed: PRMCSLMQGSTLPRRSG
PRMYSLAQSSTTPRRSG

SEQ ID NO: 117540 - protein, 17 aa, Artificial Sequence
  Description of Artificial Sequence: Synthetic peptide
  Seed: PRMCSLMQGSTLPRRSG
PRMYSLAQSSTVPRRSG

SEQ ID NO: 117541 - protein, 17 aa, Artificial Sequence
  Description of Artificial Sequence: Synthetic peptide
  Seed: PRMCSLMQGSTLPRRSG
PRMYSLAQTSTAPRRSG

SEQ ID NO: 117542 - protein, 17 aa, Artificial Sequence
  Description of Artificial Sequence: Synthetic peptide
  Seed: PRMCSLMQGSTLPRRSG
PRMYSLAQTSTIPRRSG

SEQ ID NO: 117543 - protein, 17 aa, Artificial Sequence
  Description of Artificial Sequence: Synthetic peptide
  Seed: PRMCSLMQGSTLPRRSG
PRMYSLAQTSTLPRRSG

SEQ ID NO: 117544 - protein, 17 aa, Artificial Sequence
  Description of Artificial Sequence: Synthetic peptide
  Seed: PRMCSLMQGSTLPRRSG
PRMYSLAQTSTMPRRSG

SEQ ID NO: 117545 - protein, 17 aa, Artificial Sequence
  Description of Artificial Sequence: Synthetic peptide
  Seed: PRMCSLMQGSTLPRRSG
PRMYSLAQTSTNPRRSG

SEQ ID NO: 117546 - protein, 17 aa, Artificial Sequence
  Description of Artificial Sequence: Synthetic peptide
  Seed: PRMCSLMQGSTLPRRSG
PRMYSLAQTSTSPRRSG

SEQ ID NO: 117547 - protein, 17 aa, Artificial Sequence
  Description of Artificial Sequence: Synthetic peptide
  Seed: PRMCSLMQGSTLPRRSG
PRMYSLAQTSTTPRRSG

SEQ ID NO: 117548 - protein, 17 aa, Artificial Sequence
  Description of Artificial Sequence: Synthetic peptide
  Seed: PRMCSLMQGSTLPRRSG
PRMYSLAQTSTVPRRSG

SEQ ID NO: 117549 - protein, 17 aa, Artificial Sequence
  Description of Artificial Sequence: Synthetic peptide
  Seed: PRMCSLMQGSTLPRRSG
PRMYSLAQVSTAPRRSG

SEQ ID NO: 117550 - protein, 17 aa, Artificial Sequence
  Description of Artificial Sequence: Synthetic peptide
  Seed: PRMCSLMQGSTLPRRSG
PRMYSLAQVSTIPRRSG

SEQ ID NO: 117551 - protein, 17 aa, Artificial Sequence
  Description of Artificial Sequence: Synthetic peptide
  Seed: PRMCSLMQGSTLPRRSG
PRMYSLAQVSTLPRRSG

SEQ ID NO: 117552 - protein, 17 aa, Artificial Sequence
  Description of Artificial Sequence: Synthetic peptide
  Seed: PRMCSLMQGSTLPRRSG
PRMYSLAQVSTMPRRSG

SEQ ID NO: 117553 - protein, 17 aa, Artificial Sequence
  Description of Artificial Sequence: Synthetic peptide
  Seed: PRMCSLMQGSTLPRRSG
PRMYSLAQVSTNPRRSG

SEQ ID NO: 117554 - protein, 17 aa, Artificial Sequence
  Description of Artificial Sequence: Synthetic peptide
  Seed: PRMCSLMQGSTLPRRSG
PRMYSLAQVSTSPRRSG

SEQ ID NO: 117555 - protein, 17 aa, Artificial Sequence
  Description of Artificial Sequence: Synthetic peptide
  Seed: PRMCSLMQGSTLPRRSG
PRMYSLAQVSTTPRRSG

SEQ ID NO: 117556 - protein, 17 aa, Artificial Sequence
  Description of Artificial Sequence: Synthetic peptide
  Seed: PRMCSLMQGSTLPRRSG
PRMYSLAQVSTVPRRSG

SEQ ID NO: 117557 - protein, 17 aa, Artificial Sequence
  Description of Artificial Sequence: Synthetic peptide
  Seed: PRMCSLMQGSTLPRRSG
PRMYSLEQASTAPRRSG

SEQ ID NO: 117558 - protein, 17 aa, Artificial Sequence
  Description of Artificial Sequence: Synthetic peptide
  Seed: PRMCSLMQGSTLPRRSG
PRMYSLEQASTIPRRSG

SEQ ID NO: 117559 - protein, 17 aa, Artificial Sequence
  Description of Artificial Sequence: Synthetic peptide
  Seed: PRMCSLMQGSTLPRRSG
PRMYSLEQASTLPRRSG

SEQ ID NO: 117560 - protein, 17 aa, Artificial Sequence
  Description of Artificial Sequence: Synthetic peptide
  Seed: PRMCSLMQGSTLPRRSG
PRMYSLEQASTVPRRSG

SEQ ID NO: 117561 - protein, 17 aa, Artificial Sequence
  Description of Artificial Sequence: Synthetic peptide
  Seed: PRMCSLMQGSTLPRRSG
PRMYSLEQGSTLPRRSG

SEQ ID NO: 117562 - protein, 17 aa, Artificial Sequence
  Description of Artificial Sequence: Synthetic peptide
  Seed: PRMCSLMQGSTLPRRSG
PRMYSLFQASTAPRRSG

SEQ ID NO: 117563 - protein, 17 aa, Artificial Sequence
  Description of Artificial Sequence: Synthetic peptide
  Seed: PRMCSLMQGSTLPRRSG
PRMYSLFQASTIPRRSG

SEQ ID NO: 117564 - protein, 17 aa, Artificial Sequence
  Description of Artificial Sequence: Synthetic peptide
  Seed: PRMCSLMQGSTLPRRSG
PRMYSLFQASTLPRRSG

SEQ ID NO: 117565 - protein, 17 aa, Artificial Sequence
  Description of Artificial Sequence: Synthetic peptide
  Seed: PRMCSLMQGSTLPRRSG
PRMYSLFQASTMPRRSG

SEQ ID NO: 117566 - protein, 17 aa, Artificial Sequence
  Description of Artificial Sequence: Synthetic peptide
  Seed: PRMCSLMQGSTLPRRSG
PRMYSLFQASTNPRRSG

SEQ ID NO: 117567 - protein, 17 aa, Artificial Sequence
  Description of Artificial Sequence: Synthetic peptide
  Seed: PRMCSLMQGSTLPRRSG
PRMYSLFQASTSPRRSG

SEQ ID NO: 117568 - protein, 17 aa, Artificial Sequence
  Description of Artificial Sequence: Synthetic peptide
  Seed: PRMCSLMQGSTLPRRSG
PRMYSLFQASTVPRRSG

SEQ ID NO: 117569 - protein, 17 aa, Artificial Sequence
  Description of Artificial Sequence: Synthetic peptide
  Seed: PRMCSLMQGSTLPRRSG
PRMYSLFQGSTAPRRSG

SEQ ID NO: 117570 - protein, 17 aa, Artificial Sequence
  Description of Artificial Sequence: Synthetic peptide
  Seed: PRMCSLMQGSTLPRRSG
PRMYSLFQGSTIPRRSG

SEQ ID NO: 117571 - protein, 17 aa, Artificial Sequence
  Description of Artificial Sequence: Synthetic peptide
  Seed: PRMCSLMQGSTLPRRSG
PRMYSLFQGSTLPRRSG

SEQ ID NO: 117572 - protein, 17 aa, Artificial Sequence
  Description of Artificial Sequence: Synthetic peptide
  Seed: PRMCSLMQGSTLPRRSG
PRMYSLFQGSTVPRRSG

SEQ ID NO: 117573 - protein, 17 aa, Artificial Sequence
  Description of Artificial Sequence: Synthetic peptide
  Seed: PRMCSLMQGSTLPRRSG
PRMYSLFQISTAPRRSG

SEQ ID NO: 117574 - protein, 17 aa, Artificial Sequence
  Description of Artificial Sequence: Synthetic peptide
  Seed: PRMCSLMQGSTLPRRSG
PRMYSLFQPSTAPRRSG

SEQ ID NO: 117575 - protein, 17 aa, Artificial Sequence
  Description of Artificial Sequence: Synthetic peptide
  Seed: PRMCSLMQGSTLPRRSG
PRMYSLFQPSTSPRRSG

SEQ ID NO: 117576 - protein, 17 aa, Artificial Sequence
  Description of Artificial Sequence: Synthetic peptide
  Seed: PRMCSLMQGSTLPRRSG
PRMYSLFQSSTAPRRSG

SEQ ID NO: 117577 - protein, 17 aa, Artificial Sequence
  Description of Artificial Sequence: Synthetic peptide
  Seed: PRMCSLMQGSTLPRRSG
PRMYSLFQSSTLPRRSG

SEQ ID NO: 117578 - protein, 17 aa, Artificial Sequence
  Description of Artificial Sequence: Synthetic peptide
  Seed: PRMCSLMQGSTLPRRSG
PRMYSLFQSSTVPRRSG

SEQ ID NO: 117579 - protein, 17 aa, Artificial Sequence
  Description of Artificial Sequence: Synthetic peptide
  Seed: PRMCSLMQGSTLPRRSG
PRMYSLFQTSTAPRRSG

SEQ ID NO: 117580 - protein, 17 aa, Artificial Sequence
  Description of Artificial Sequence: Synthetic peptide
  Seed: PRMCSLMQGSTLPRRSG
PRMYSLFQVSTAPRRSG

SEQ ID NO: 117581 - protein, 17 aa, Artificial Sequence
  Description of Artificial Sequence: Synthetic peptide
  Seed: PRMCSLMQGSTLPRRSG
PRMYSLFQVSTSPRRSG

SEQ ID NO: 117582 - protein, 17 aa, Artificial Sequence
  Description of Artificial Sequence: Synthetic peptide
  Seed: PRMCSLMQGSTLPRRSG
PRMYSLGQASTIPRRSG

SEQ ID NO: 117583 - protein, 17 aa, Artificial Sequence
  Description of Artificial Sequence: Synthetic peptide
  Seed: PRMCSLMQGSTLPRRSG
PRMYSLGQASTLPRRSG

SEQ ID NO: 117584 - protein, 17 aa, Artificial Sequence
  Description of Artificial Sequence: Synthetic peptide
  Seed: PRMCSLMQGSTLPRRSG
PRMYSLGQASTVPRRSG

SEQ ID NO: 117585 - protein, 17 aa, Artificial Sequence
  Description of Artificial Sequence: Synthetic peptide
  Seed: PRMCSLMQGSTLPRRSG
PRMYSLGQGSTLPRRSG

SEQ ID NO: 117586 - protein, 17 aa, Artificial Sequence
  Description of Artificial Sequence: Synthetic peptide
  Seed: PRMCSLMQGSTLPRRSG
PRMYSLGQSSTLPRRSG

SEQ ID NO: 117587 - protein, 17 aa, Artificial Sequence
  Description of Artificial Sequence: Synthetic peptide
  Seed: PRMCSLMQGSTLPRRSG
PRMYSLIQASTAPRRSG

SEQ ID NO: 117588 - protein, 17 aa, Artificial Sequence
  Description of Artificial Sequence: Synthetic peptide
  Seed: PRMCSLMQGSTLPRRSG
PRMYSLIQASTCPRRSG

SEQ ID NO: 117589 - protein, 17 aa, Artificial Sequence
  Description of Artificial Sequence: Synthetic peptide
  Seed: PRMCSLMQGSTLPRRSG
PRMYSLIQASTFPRRSG

SEQ ID NO: 117590 - protein, 17 aa, Artificial Sequence
  Description of Artificial Sequence: Synthetic peptide
  Seed: PRMCSLMQGSTLPRRSG
PRMYSLIQASTGPRRSG

SEQ ID NO: 117591 - protein, 17 aa, Artificial Sequence
  Description of Artificial Sequence: Synthetic peptide
  Seed: PRMCSLMQGSTLPRRSG
PRMYSLIQASTHPRRSG

SEQ ID NO: 117592 - protein, 17 aa, Artificial Sequence
  Description of Artificial Sequence: Synthetic peptide
  Seed: PRMCSLMQGSTLPRRSG
PRMYSLIQASTIPRRSG

SEQ ID NO: 117593 - protein, 17 aa, Artificial Sequence
  Description of Artificial Sequence: Synthetic peptide
  Seed: PRMCSLMQGSTLPRRSG
PRMYSLIQASTLPRRSG

SEQ ID NO: 117594 - protein, 17 aa, Artificial Sequence
  Description of Artificial Sequence: Synthetic peptide
  Seed: PRMCSLMQGSTLPRRSG
PRMYSLIQASTMPRRSG

SEQ ID NO: 117595 - protein, 17 aa, Artificial Sequence
  Description of Artificial Sequence: Synthetic peptide
  Seed: PRMCSLMQGSTLPRRSG
PRMYSLIQASTNPRRSG

SEQ ID NO: 117596 - protein, 17 aa, Artificial Sequence
  Description of Artificial Sequence: Synthetic peptide
  Seed: PRMCSLMQGSTLPRRSG
PRMYSLIQASTPPRRSG

SEQ ID NO: 117597 - protein, 17 aa, Artificial Sequence
  Description of Artificial Sequence: Synthetic peptide
  Seed: PRMCSLMQGSTLPRRSG
PRMYSLIQASTQPRRSG

SEQ ID NO: 117598 - protein, 17 aa, Artificial Sequence
  Description of Artificial Sequence: Synthetic peptide
  Seed: PRMCSLMQGSTLPRRSG
PRMYSLIQASTSPRRSG

SEQ ID NO: 117599 - protein, 17 aa, Artificial Sequence
  Description of Artificial Sequence: Synthetic peptide
  Seed: PRMCSLMQGSTLPRRSG
PRMYSLIQASTTPRRSG

SEQ ID NO: 117600 - protein, 17 aa, Artificial Sequence
  Description of Artificial Sequence: Synthetic peptide
  Seed: PRMCSLMQGSTLPRRSG
PRMYSLIQASTVPRRSG

SEQ ID NO: 117601 - protein, 17 aa, Artificial Sequence
  Description of Artificial Sequence: Synthetic peptide
  Seed: PRMCSLMQGSTLPRRSG
PRMYSLIQGSTAPRRSG

SEQ ID NO: 117602 - protein, 17 aa, Artificial Sequence
  Description of Artificial Sequence: Synthetic peptide
  Seed: PRMCSLMQGSTLPRRSG
PRMYSLIQGSTGPRRSG

SEQ ID NO: 117603 - protein, 17 aa, Artificial Sequence
  Description of Artificial Sequence: Synthetic peptide
  Seed: PRMCSLMQGSTLPRRSG
PRMYSLIQGSTIPRRSG

SEQ ID NO: 117604 - protein, 17 aa, Artificial Sequence
  Description of Artificial Sequence: Synthetic peptide
  Seed: PRMCSLMQGSTLPRRSG
PRMYSLIQGSTLPRRSG

SEQ ID NO: 117605 - protein, 17 aa, Artificial Sequence
  Description of Artificial Sequence: Synthetic peptide
  Seed: PRMCSLMQGSTLPRRSG
PRMYSLIQGSTMPRRSG

SEQ ID NO: 117606 - protein, 17 aa, Artificial Sequence
  Description of Artificial Sequence: Synthetic peptide
  Seed: PRMCSLMQGSTLPRRSG
PRMYSLIQGSTNPRRSG

SEQ ID NO: 117607 - protein, 17 aa, Artificial Sequence
  Description of Artificial Sequence: Synthetic peptide
  Seed: PRMCSLMQGSTLPRRSG
PRMYSLIQGSTSPRRSG

SEQ ID NO: 117608 - protein, 17 aa, Artificial Sequence
  Description of Artificial Sequence: Synthetic peptide
  Seed: PRMCSLMQGSTLPRRSG
PRMYSLIQGSTTPRRSG

SEQ ID NO: 117609 - protein, 17 aa, Artificial Sequence
  Description of Artificial Sequence: Synthetic peptide
  Seed: PRMCSLMQGSTLPRRSG
PRMYSLIQGSTVPRRSG

SEQ ID NO: 117610 - protein, 17 aa, Artificial Sequence
  Description of Artificial Sequence: Synthetic peptide
  Seed: PRMCSLMQGSTLPRRSG
PRMYSLIQISTAPRRSG

SEQ ID NO: 117611 - protein, 17 aa, Artificial Sequence
  Description of Artificial Sequence: Synthetic peptide
  Seed: PRMCSLMQGSTLPRRSG
PRMYSLIQISTGPRRSG

SEQ ID NO: 117612 - protein, 17 aa, Artificial Sequence
  Description of Artificial Sequence: Synthetic peptide
  Seed: PRMCSLMQGSTLPRRSG
PRMYSLIQISTIPRRSG

SEQ ID NO: 117613 - protein, 17 aa, Artificial Sequence
  Description of Artificial Sequence: Synthetic peptide
  Seed: PRMCSLMQGSTLPRRSG
PRMYSLIQISTLPRRSG

SEQ ID NO: 117614 - protein, 17 aa, Artificial Sequence
  Description of Artificial Sequence: Synthetic peptide
  Seed: PRMCSLMQGSTLPRRSG
PRMYSLIQISTMPRRSG

SEQ ID NO: 117615 - protein, 17 aa, Artificial Sequence
  Description of Artificial Sequence: Synthetic peptide
  Seed: PRMCSLMQGSTLPRRSG
PRMYSLIQISTNPRRSG

SEQ ID NO: 117616 - protein, 17 aa, Artificial Sequence
  Description of Artificial Sequence: Synthetic peptide
  Seed: PRMCSLMQGSTLPRRSG
PRMYSLIQISTSPRRSG

SEQ ID NO: 117617 - protein, 17 aa, Artificial Sequence
  Description of Artificial Sequence: Synthetic peptide
  Seed: PRMCSLMQGSTLPRRSG
PRMYSLIQISTTPRRSG

SEQ ID NO: 117618 - protein, 17 aa, Artificial Sequence
  Description of Artificial Sequence: Synthetic peptide
  Seed: PRMCSLMQGSTLPRRSG
PRMYSLIQISTVPRRSG

SEQ ID NO: 117619 - protein, 17 aa, Artificial Sequence
  Description of Artificial Sequence: Synthetic peptide
  Seed: PRMCSLMQGSTLPRRSG
PRMYSLIQLSTAPRRSG

SEQ ID NO: 117620 - protein, 17 aa, Artificial Sequence
  Description of Artificial Sequence: Synthetic peptide
  Seed: PRMCSLMQGSTLPRRSG
PRMYSLIQLSTNPRRSG

SEQ ID NO: 117621 - protein, 17 aa, Artificial Sequence
  Description of Artificial Sequence: Synthetic peptide
  Seed: PRMCSLMQGSTLPRRSG
PRMYSLIQLSTSPRRSG

SEQ ID NO: 117622 - protein, 17 aa, Artificial Sequence
  Description of Artificial Sequence: Synthetic peptide
  Seed: PRMCSLMQGSTLPRRSG
PRMYSLIQLSTVPRRSG

SEQ ID NO: 117623 - protein, 17 aa, Artificial Sequence
  Description of Artificial Sequence: Synthetic peptide
  Seed: PRMCSLMQGSTLPRRSG
PRMYSLIQMSTAPRRSG

SEQ ID NO: 117624 - protein, 17 aa, Artificial Sequence
  Description of Artificial Sequence: Synthetic peptide
  Seed: PRMCSLMQGSTLPRRSG
PRMYSLIQMSTLPRRSG

SEQ ID NO: 117625 - protein, 17 aa, Artificial Sequence
  Description of Artificial Sequence: Synthetic peptide
  Seed: PRMCSLMQGSTLPRRSG
PRMYSLIQMSTNPRRSG

SEQ ID NO: 117626 - protein, 17 aa, Artificial Sequence
  Description of Artificial Sequence: Synthetic peptide
  Seed: PRMCSLMQGSTLPRRSG
PRMYSLIQMSTSPRRSG

SEQ ID NO: 117627 - protein, 17 aa, Artificial Sequence
  Description of Artificial Sequence: Synthetic peptide
  Seed: PRMCSLMQGSTLPRRSG
PRMYSLIQMSTVPRRSG

SEQ ID NO: 117628 - protein, 17 aa, Artificial Sequence
  Description of Artificial Sequence: Synthetic peptide
  Seed: PRMCSLMQGSTLPRRSG
PRMYSLIQNSTAPRRSG

SEQ ID NO: 117629 - protein, 17 aa, Artificial Sequence
  Description of Artificial Sequence: Synthetic peptide
  Seed: PRMCSLMQGSTLPRRSG
PRMYSLIQNSTIPRRSG

SEQ ID NO: 117630 - protein, 17 aa, Artificial Sequence
  Description of Artificial Sequence: Synthetic peptide
  Seed: PRMCSLMQGSTLPRRSG
PRMYSLIQNSTLPRRSG

SEQ ID NO: 117631 - protein, 17 aa, Artificial Sequence
  Description of Artificial Sequence: Synthetic peptide
  Seed: PRMCSLMQGSTLPRRSG
PRMYSLIQNSTNPRRSG

SEQ ID NO: 117632 - protein, 17 aa, Artificial Sequence
  Description of Artificial Sequence: Synthetic peptide
  Seed: PRMCSLMQGSTLPRRSG
PRMYSLIQNSTSPRRSG

SEQ ID NO: 117633 - protein, 17 aa, Artificial Sequence
  Description of Artificial Sequence: Synthetic peptide
  Seed: PRMCSLMQGSTLPRRSG
PRMYSLIQNSTTPRRSG

SEQ ID NO: 117634 - protein, 17 aa, Artificial Sequence
  Description of Artificial Sequence: Synthetic peptide
  Seed: PRMCSLMQGSTLPRRSG
PRMYSLIQNSTVPRRSG

SEQ ID NO: 117635 - protein, 17 aa, Artificial Sequence
  Description of Artificial Sequence: Synthetic peptide
  Seed: PRMCSLMQGSTLPRRSG
PRMYSLIQPSTAPRRSG

SEQ ID NO: 117636 - protein, 17 aa, Artificial Sequence
  Description of Artificial Sequence: Synthetic peptide
  Seed: PRMCSLMQGSTLPRRSG
PRMYSLIQPSTGPRRSG

SEQ ID NO: 117637 - protein, 17 aa, Artificial Sequence
  Description of Artificial Sequence: Synthetic peptide
  Seed: PRMCSLMQGSTLPRRSG
PRMYSLIQPSTHPRRSG

SEQ ID NO: 117638 - protein, 17 aa, Artificial Sequence
  Description of Artificial Sequence: Synthetic peptide
  Seed: PRMCSLMQGSTLPRRSG
PRMYSLIQPSTIPRRSG

SEQ ID NO: 117639 - protein, 17 aa, Artificial Sequence
  Description of Artificial Sequence: Synthetic peptide
  Seed: PRMCSLMQGSTLPRRSG
PRMYSLIQPSTLPRRSG

SEQ ID NO: 117640 - protein, 17 aa, Artificial Sequence
  Description of Artificial Sequence: Synthetic peptide
  Seed: PRMCSLMQGSTLPRRSG
PRMYSLIQPSTMPRRSG

SEQ ID NO: 117641 - protein, 17 aa, Artificial Sequence
  Description of Artificial Sequence: Synthetic peptide
  Seed: PRMCSLMQGSTLPRRSG
PRMYSLIQPSTNPRRSG

SEQ ID NO: 117642 - protein, 17 aa, Artificial Sequence
  Description of Artificial Sequence: Synthetic peptide
  Seed: PRMCSLMQGSTLPRRSG
PRMYSLIQPSTQPRRSG

SEQ ID NO: 117643 - protein, 17 aa, Artificial Sequence
  Description of Artificial Sequence: Synthetic peptide
  Seed: PRMCSLMQGSTLPRRSG
PRMYSLIQPSTSPRRSG

SEQ ID NO: 117644 - protein, 17 aa, Artificial Sequence
  Description of Artificial Sequence: Synthetic peptide
  Seed: PRMCSLMQGSTLPRRSG
PRMYSLIQPSTTPRRSG

SEQ ID NO: 117645 - protein, 17 aa, Artificial Sequence
  Description of Artificial Sequence: Synthetic peptide
  Seed: PRMCSLMQGSTLPRRSG
PRMYSLIQPSTVPRRSG

SEQ ID NO: 117646 - protein, 17 aa, Artificial Sequence
  Description of Artificial Sequence: Synthetic peptide
  Seed: PRMCSLMQGSTLPRRSG
PRMYSLIQSSTAPRRSG

SEQ ID NO: 117647 - protein, 17 aa, Artificial Sequence
  Description of Artificial Sequence: Synthetic peptide
  Seed: PRMCSLMQGSTLPRRSG
PRMYSLIQSSTGPRRSG

SEQ ID NO: 117648 - protein, 17 aa, Artificial Sequence
  Description of Artificial Sequence: Synthetic peptide
  Seed: PRMCSLMQGSTLPRRSG
PRMYSLIQSSTHPRRSG

SEQ ID NO: 117649 - protein, 17 aa, Artificial Sequence
  Description of Artificial Sequence: Synthetic peptide
  Seed: PRMCSLMQGSTLPRRSG
PRMYSLIQSSTIPRRSG

SEQ ID NO: 117650 - protein, 17 aa, Artificial Sequence
  Description of Artificial Sequence: Synthetic peptide
  Seed: PRMCSLMQGSTLPRRSG
PRMYSLIQSSTLPRRSG

SEQ ID NO: 117651 - protein, 17 aa, Artificial Sequence
  Description of Artificial Sequence: Synthetic peptide
  Seed: PRMCSLMQGSTLPRRSG
PRMYSLIQSSTMPRRSG

SEQ ID NO: 117652 - protein, 17 aa, Artificial Sequence
  Description of Artificial Sequence: Synthetic peptide
  Seed: PRMCSLMQGSTLPRRSG
PRMYSLIQSSTNPRRSG

SEQ ID NO: 117653 - protein, 17 aa, Artificial Sequence
  Description of Artificial Sequence: Synthetic peptide
  Seed: PRMCSLMQGSTLPRRSG
PRMYSLIQSSTSPRRSG

SEQ ID NO: 117654 - protein, 17 aa, Artificial Sequence
  Description of Artificial Sequence: Synthetic peptide
  Seed: PRMCSLMQGSTLPRRSG
PRMYSLIQSSTTPRRSG

SEQ ID NO: 117655 - protein, 17 aa, Artificial Sequence
  Description of Artificial Sequence: Synthetic peptide
  Seed: PRMCSLMQGSTLPRRSG
PRMYSLIQSSTVPRRSG

SEQ ID NO: 117656 - protein, 17 aa, Artificial Sequence
  Description of Artificial Sequence: Synthetic peptide
  Seed: PRMCSLMQGSTLPRRSG
PRMYSLIQTSTAPRRSG

SEQ ID NO: 117657 - protein, 17 aa, Artificial Sequence
  Description of Artificial Sequence: Synthetic peptide
  Seed: PRMCSLMQGSTLPRRSG
PRMYSLIQTSTGPRRSG

SEQ ID NO: 117658 - protein, 17 aa, Artificial Sequence
  Description of Artificial Sequence: Synthetic peptide
  Seed: PRMCSLMQGSTLPRRSG
PRMYSLIQTSTHPRRSG

SEQ ID NO: 117659 - protein, 17 aa, Artificial Sequence
  Description of Artificial Sequence: Synthetic peptide
  Seed: PRMCSLMQGSTLPRRSG
PRMYSLIQTSTIPRRSG

SEQ ID NO: 117660 - protein, 17 aa, Artificial Sequence
  Description of Artificial Sequence: Synthetic peptide
  Seed: PRMCSLMQGSTLPRRSG
PRMYSLIQTSTLPRRSG

SEQ ID NO: 117661 - protein, 17 aa, Artificial Sequence
  Description of Artificial Sequence: Synthetic peptide
  Seed: PRMCSLMQGSTLPRRSG
PRMYSLIQTSTMPRRSG

SEQ ID NO: 117662 - protein, 17 aa, Artificial Sequence
  Description of Artificial Sequence: Synthetic peptide
  Seed: PRMCSLMQGSTLPRRSG
PRMYSLIQTSTNPRRSG

SEQ ID NO: 117663 - protein, 17 aa, Artificial Sequence
  Description of Artificial Sequence: Synthetic peptide
  Seed: PRMCSLMQGSTLPRRSG
PRMYSLIQTSTSPRRSG

SEQ ID NO: 117664 - protein, 17 aa, Artificial Sequence
  Description of Artificial Sequence: Synthetic peptide
  Seed: PRMCSLMQGSTLPRRSG
PRMYSLIQTSTTPRRSG

SEQ ID NO: 117665 - protein, 17 aa, Artificial Sequence
  Description of Artificial Sequence: Synthetic peptide
  Seed: PRMCSLMQGSTLPRRSG
PRMYSLIQTSTVPRRSG

SEQ ID NO: 117666 - protein, 17 aa, Artificial Sequence
  Description of Artificial Sequence: Synthetic peptide
  Seed: PRMCSLMQGSTLPRRSG
PRMYSLIQVSTAPRRSG

SEQ ID NO: 117667 - protein, 17 aa, Artificial Sequence
  Description of Artificial Sequence: Synthetic peptide
  Seed: PRMCSLMQGSTLPRRSG
PRMYSLIQVSTGPRRSG

SEQ ID NO: 117668 - protein, 17 aa, Artificial Sequence
  Description of Artificial Sequence: Synthetic peptide
  Seed: PRMCSLMQGSTLPRRSG
PRMYSLIQVSTHPRRSG

SEQ ID NO: 117669 - protein, 17 aa, Artificial Sequence
  Description of Artificial Sequence: Synthetic peptide
  Seed: PRMCSLMQGSTLPRRSG
PRMYSLIQVSTIPRRSG

SEQ ID NO: 117670 - protein, 17 aa, Artificial Sequence
  Description of Artificial Sequence: Synthetic peptide
  Seed: PRMCSLMQGSTLPRRSG
PRMYSLIQVSTLPRRSG

SEQ ID NO: 117671 - protein, 17 aa, Artificial Sequence
  Description of Artificial Sequence: Synthetic peptide
  Seed: PRMCSLMQGSTLPRRSG
PRMYSLIQVSTMPRRSG

SEQ ID NO: 117672 - protein, 17 aa, Artificial Sequence
  Description of Artificial Sequence: Synthetic peptide
  Seed: PRMCSLMQGSTLPRRSG
PRMYSLIQVSTNPRRSG

SEQ ID NO: 117673 - protein, 17 aa, Artificial Sequence
  Description of Artificial Sequence: Synthetic peptide
  Seed: PRMCSLMQGSTLPRRSG
PRMYSLIQVSTQPRRSG

SEQ ID NO: 117674 - protein, 17 aa, Artificial Sequence
  Description of Artificial Sequence: Synthetic peptide
  Seed: PRMCSLMQGSTLPRRSG
PRMYSLIQVSTSPRRSG

SEQ ID NO: 117675 - protein, 17 aa, Artificial Sequence
  Description of Artificial Sequence: Synthetic peptide
  Seed: PRMCSLMQGSTLPRRSG
PRMYSLIQVSTTPRRSG

SEQ ID NO: 117676 - protein, 17 aa, Artificial Sequence
  Description of Artificial Sequence: Synthetic peptide
  Seed: PRMCSLMQGSTLPRRSG
PRMYSLIQVSTVPRRSG

SEQ ID NO: 117677 - protein, 17 aa, Artificial Sequence
  Description of Artificial Sequence: Synthetic peptide
  Seed: PRMCSLMQGSTLPRRSG
PRMYSLLQASTAPRRSG

SEQ ID NO: 117678 - protein, 17 aa, Artificial Sequence
  Description of Artificial Sequence: Synthetic peptide
  Seed: PRMCSLMQGSTLPRRSG
PRMYSLLQASTCPRRSG

SEQ ID NO: 117679 - protein, 17 aa, Artificial Sequence
  Description of Artificial Sequence: Synthetic peptide
  Seed: PRMCSLMQGSTLPRRSG
PRMYSLLQASTEPRRSG

SEQ ID NO: 117680 - protein, 17 aa, Artificial Sequence
  Description of Artificial Sequence: Synthetic peptide
  Seed: PRMCSLMQGSTLPRRSG
PRMYSLLQASTFPRRSG

SEQ ID NO: 117681 - protein, 17 aa, Artificial Sequence
  Description of Artificial Sequence: Synthetic peptide
  Seed: PRMCSLMQGSTLPRRSG
PRMYSLLQASTGPRRSG

SEQ ID NO: 117682 - protein, 17 aa, Artificial Sequence
  Description of Artificial Sequence: Synthetic peptide
  Seed: PRMCSLMQGSTLPRRSG
PRMYSLLQASTHPRRSG

SEQ ID NO: 117683 - protein, 17 aa, Artificial Sequence
  Description of Artificial Sequence: Synthetic peptide
  Seed: PRMCSLMQGSTLPRRSG
PRMYSLLQASTIPRRSG

SEQ ID NO: 117684 - protein, 17 aa, Artificial Sequence
  Description of Artificial Sequence: Synthetic peptide
  Seed: PRMCSLMQGSTLPRRSG
PRMYSLLQASTLPRRSG

SEQ ID NO: 117685 - protein, 17 aa, Artificial Sequence
  Description of Artificial Sequence: Synthetic peptide
  Seed: PRMCSLMQGSTLPRRSG
PRMYSLLQASTMPRRSG

SEQ ID NO: 117686 - protein, 17 aa, Artificial Sequence
  Description of Artificial Sequence: Synthetic peptide
  Seed: PRMCSLMQGSTLPRRSG
PRMYSLLQASTNPRRSG

SEQ ID NO: 117687 - protein, 17 aa, Artificial Sequence
  Description of Artificial Sequence: Synthetic peptide
  Seed: PRMCSLMQGSTLPRRSG
PRMYSLLQASTPPRRSG

SEQ ID NO: 117688 - protein, 17 aa, Artificial Sequence
  Description of Artificial Sequence: Synthetic peptide
  Seed: PRMCSLMQGSTLPRRSG
PRMYSLLQASTQPRRSG

SEQ ID NO: 117689 - protein, 17 aa, Artificial Sequence
  Description of Artificial Sequence: Synthetic peptide
  Seed: PRMCSLMQGSTLPRRSG
PRMYSLLQASTSPRRSG

SEQ ID NO: 117690 - protein, 17 aa, Artificial Sequence
  Description of Artificial Sequence: Synthetic peptide
  Seed: PRMCSLMQGSTLPRRSG
PRMYSLLQASTTPRRSG

SEQ ID NO: 117691 - protein, 17 aa, Artificial Sequence
  Description of Artificial Sequence: Synthetic peptide
  Seed: PRMCSLMQGSTLPRRSG
PRMYSLLQASTVPRRSG

SEQ ID NO: 117692 - protein, 17 aa, Artificial Sequence
  Description of Artificial Sequence: Synthetic peptide
  Seed: PRMCSLMQGSTLPRRSG
PRMYSLLQASTWPRRSG

SEQ ID NO: 117693 - protein, 17 aa, Artificial Sequence
  Description of Artificial Sequence: Synthetic peptide
  Seed: PRMCSLMQGSTLPRRSG
PRMYSLLQASTYPRRSG

SEQ ID NO: 117694 - protein, 17 aa, Artificial Sequence
  Description of Artificial Sequence: Synthetic peptide
  Seed: PRMCSLMQGSTLPRRSG
PRMYSLLQGSTAPRRSG

SEQ ID NO: 117695 - protein, 17 aa, Artificial Sequence
  Description of Artificial Sequence: Synthetic peptide
  Seed: PRMCSLMQGSTLPRRSG
PRMYSLLQGSTCPRRSG

SEQ ID NO: 117696 - protein, 17 aa, Artificial Sequence
  Description of Artificial Sequence: Synthetic peptide
  Seed: PRMCSLMQGSTLPRRSG
PRMYSLLQGSTFPRRSG

SEQ ID NO: 117697 - protein, 17 aa, Artificial Sequence
  Description of Artificial Sequence: Synthetic peptide
  Seed: PRMCSLMQGSTLPRRSG
PRMYSLLQGSTGPRRSG

SEQ ID NO: 117698 - protein, 17 aa, Artificial Sequence
  Description of Artificial Sequence: Synthetic peptide
  Seed: PRMCSLMQGSTLPRRSG
PRMYSLLQGSTIPRRSG

SEQ ID NO: 117699 - protein, 17 aa, Artificial Sequence
  Description of Artificial Sequence: Synthetic peptide
  Seed: PRMCSLMQGSTLPRRSG
PRMYSLLQGSTLPRRSG

SEQ ID NO: 117700 - protein, 17 aa, Artificial Sequence
  Description of Artificial Sequence: Synthetic peptide
  Seed: PRMCSLMQGSTLPRRSG
PRMYSLLQGSTMPRRSG

SEQ ID NO: 117701 - protein, 17 aa, Artificial Sequence
  Description of Artificial Sequence: Synthetic peptide
  Seed: PRMCSLMQGSTLPRRSG
PRMYSLLQGSTNPRRSG

SEQ ID NO: 117702 - protein, 17 aa, Artificial Sequence
  Description of Artificial Sequence: Synthetic peptide
  Seed: PRMCSLMQGSTLPRRSG
PRMYSLLQGSTPPRRSG

SEQ ID NO: 117703 - protein, 17 aa, Artificial Sequence
  Description of Artificial Sequence: Synthetic peptide
  Seed: PRMCSLMQGSTLPRRSG
PRMYSLLQGSTSPRRSG

SEQ ID NO: 117704 - protein, 17 aa, Artificial Sequence
  Description of Artificial Sequence: Synthetic peptide
  Seed: PRMCSLMQGSTLPRRSG
PRMYSLLQGSTTPRRSG

SEQ ID NO: 117705 - protein, 17 aa, Artificial Sequence
  Description of Artificial Sequence: Synthetic peptide
  Seed: PRMCSLMQGSTLPRRSG
PRMYSLLQGSTVPRRSG

SEQ ID NO: 117706 - protein, 17 aa, Artificial Sequence
  Description of Artificial Sequence: Synthetic peptide
  Seed: PRMCSLMQGSTLPRRSG
PRMYSLLQISTAPRRSG

SEQ ID NO: 117707 - protein, 17 aa, Artificial Sequence
  Description of Artificial Sequence: Synthetic peptide
  Seed: PRMCSLMQGSTLPRRSG
PRMYSLLQISTGPRRSG

SEQ ID NO: 117708 - protein, 17 aa, Artificial Sequence
  Description of Artificial Sequence: Synthetic peptide
  Seed: PRMCSLMQGSTLPRRSG
PRMYSLLQISTHPRRSG

SEQ ID NO: 117709 - protein, 17 aa, Artificial Sequence
  Description of Artificial Sequence: Synthetic peptide
  Seed: PRMCSLMQGSTLPRRSG
PRMYSLLQISTIPRRSG

SEQ ID NO: 117710 - protein, 17 aa, Artificial Sequence
  Description of Artificial Sequence: Synthetic peptide
  Seed: PRMCSLMQGSTLPRRSG
PRMYSLLQISTLPRRSG

SEQ ID NO: 117711 - protein, 17 aa, Artificial Sequence
  Description of Artificial Sequence: Synthetic peptide
  Seed: PRMCSLMQGSTLPRRSG
PRMYSLLQISTMPRRSG

SEQ ID NO: 117712 - protein, 17 aa, Artificial Sequence
  Description of Artificial Sequence: Synthetic peptide
  Seed: PRMCSLMQGSTLPRRSG
PRMYSLLQISTNPRRSG

SEQ ID NO: 117713 - protein, 17 aa, Artificial Sequence
  Description of Artificial Sequence: Synthetic peptide
  Seed: PRMCSLMQGSTLPRRSG
PRMYSLLQISTQPRRSG

SEQ ID NO: 117714 - protein, 17 aa, Artificial Sequence
  Description of Artificial Sequence: Synthetic peptide
  Seed: PRMCSLMQGSTLPRRSG
PRMYSLLQISTSPRRSG

SEQ ID NO: 117715 - protein, 17 aa, Artificial Sequence
  Description of Artificial Sequence: Synthetic peptide
  Seed: PRMCSLMQGSTLPRRSG
PRMYSLLQISTTPRRSG

SEQ ID NO: 117716 - protein, 17 aa, Artificial Sequence
  Description of Artificial Sequence: Synthetic peptide
  Seed: PRMCSLMQGSTLPRRSG
PRMYSLLQISTVPRRSG

SEQ ID NO: 117717 - protein, 17 aa, Artificial Sequence
  Description of Artificial Sequence: Synthetic peptide
  Seed: PRMCSLMQGSTLPRRSG
PRMYSLLQLSTAPRRSG

SEQ ID NO: 117718 - protein, 17 aa, Artificial Sequence
  Description of Artificial Sequence: Synthetic peptide
  Seed: PRMCSLMQGSTLPRRSG
PRMYSLLQLSTIPRRSG

SEQ ID NO: 117719 - protein, 17 aa, Artificial Sequence
  Description of Artificial Sequence: Synthetic peptide
  Seed: PRMCSLMQGSTLPRRSG
PRMYSLLQLSTLPRRSG

SEQ ID NO: 117720 - protein, 17 aa, Artificial Sequence
  Description of Artificial Sequence: Synthetic peptide
  Seed: PRMCSLMQGSTLPRRSG
PRMYSLLQLSTMPRRSG

SEQ ID NO: 117721 - protein, 17 aa, Artificial Sequence
  Description of Artificial Sequence: Synthetic peptide
  Seed: PRMCSLMQGSTLPRRSG
PRMYSLLQLSTNPRRSG

SEQ ID NO: 117722 - protein, 17 aa, Artificial Sequence
  Description of Artificial Sequence: Synthetic peptide
  Seed: PRMCSLMQGSTLPRRSG
PRMYSLLQLSTSPRRSG

SEQ ID NO: 117723 - protein, 17 aa, Artificial Sequence
  Description of Artificial Sequence: Synthetic peptide
  Seed: PRMCSLMQGSTLPRRSG
PRMYSLLQLSTTPRRSG

SEQ ID NO: 117724 - protein, 17 aa, Artificial Sequence
  Description of Artificial Sequence: Synthetic peptide
  Seed: PRMCSLMQGSTLPRRSG
PRMYSLLQLSTVPRRSG

SEQ ID NO: 117725 - protein, 17 aa, Artificial Sequence
  Description of Artificial Sequence: Synthetic peptide
  Seed: PRMCSLMQGSTLPRRSG
PRMYSLLQMSTAPRRSG

SEQ ID NO: 117726 - protein, 17 aa, Artificial Sequence
  Description of Artificial Sequence: Synthetic peptide
  Seed: PRMCSLMQGSTLPRRSG
PRMYSLLQMSTIPRRSG

SEQ ID NO: 117727 - protein, 17 aa, Artificial Sequence
  Description of Artificial Sequence: Synthetic peptide
  Seed: PRMCSLMQGSTLPRRSG
PRMYSLLQMSTLPRRSG

SEQ ID NO: 117728 - protein, 17 aa, Artificial Sequence
  Description of Artificial Sequence: Synthetic peptide
  Seed: PRMCSLMQGSTLPRRSG
PRMYSLLQMSTMPRRSG

SEQ ID NO: 117729 - protein, 17 aa, Artificial Sequence
  Description of Artificial Sequence: Synthetic peptide
  Seed: PRMCSLMQGSTLPRRSG
PRMYSLLQMSTNPRRSG

SEQ ID NO: 117730 - protein, 17 aa, Artificial Sequence
  Description of Artificial Sequence: Synthetic peptide
  Seed: PRMCSLMQGSTLPRRSG
PRMYSLLQMSTSPRRSG

SEQ ID NO: 117731 - protein, 17 aa, Artificial Sequence
  Description of Artificial Sequence: Synthetic peptide
  Seed: PRMCSLMQGSTLPRRSG
PRMYSLLQMSTTPRRSG

SEQ ID NO: 117732 - protein, 17 aa, Artificial Sequence
  Description of Artificial Sequence: Synthetic peptide
  Seed: PRMCSLMQGSTLPRRSG
PRMYSLLQMSTVPRRSG

SEQ ID NO: 117733 - protein, 17 aa, Artificial Sequence
  Description of Artificial Sequence: Synthetic peptide
  Seed: PRMCSLMQGSTLPRRSG
PRMYSLLQNSTAPRRSG

SEQ ID NO: 117734 - protein, 17 aa, Artificial Sequence
  Description of Artificial Sequence: Synthetic peptide
  Seed: PRMCSLMQGSTLPRRSG
PRMYSLLQNSTIPRRSG

SEQ ID NO: 117735 - protein, 17 aa, Artificial Sequence
  Description of Artificial Sequence: Synthetic peptide
  Seed: PRMCSLMQGSTLPRRSG
PRMYSLLQNSTLPRRSG

SEQ ID NO: 117736 - protein, 17 aa, Artificial Sequence
  Description of Artificial Sequence: Synthetic peptide
  Seed: PRMCSLMQGSTLPRRSG
PRMYSLLQNSTMPRRSG

SEQ ID NO: 117737 - protein, 17 aa, Artificial Sequence
  Description of Artificial Sequence: Synthetic peptide
  Seed: PRMCSLMQGSTLPRRSG
PRMYSLLQNSTNPRRSG

SEQ ID NO: 117738 - protein, 17 aa, Artificial Sequence
  Description of Artificial Sequence: Synthetic peptide
  Seed: PRMCSLMQGSTLPRRSG
PRMYSLLQNSTSPRRSG

SEQ ID NO: 117739 - protein, 17 aa, Artificial Sequence
  Description of Artificial Sequence: Synthetic peptide
  Seed: PRMCSLMQGSTLPRRSG
PRMYSLLQNSTTPRRSG

SEQ ID NO: 117740 - protein, 17 aa, Artificial Sequence
  Description of Artificial Sequence: Synthetic peptide
  Seed: PRMCSLMQGSTLPRRSG
PRMYSLLQNSTVPRRSG

SEQ ID NO: 117741 - protein, 17 aa, Artificial Sequence
  Description of Artificial Sequence: Synthetic peptide
  Seed: PRMCSLMQGSTLPRRSG
PRMYSLLQPSTAPRRSG

SEQ ID NO: 117742 - protein, 17 aa, Artificial Sequence
  Description of Artificial Sequence: Synthetic peptide
  Seed: PRMCSLMQGSTLPRRSG
PRMYSLLQPSTFPRRSG

SEQ ID NO: 117743 - protein, 17 aa, Artificial Sequence
  Description of Artificial Sequence: Synthetic peptide
  Seed: PRMCSLMQGSTLPRRSG
PRMYSLLQPSTGPRRSG

SEQ ID NO: 117744 - protein, 17 aa, Artificial Sequence
  Description of Artificial Sequence: Synthetic peptide
  Seed: PRMCSLMQGSTLPRRSG
PRMYSLLQPSTHPRRSG

SEQ ID NO: 117745 - protein, 17 aa, Artificial Sequence
  Description of Artificial Sequence: Synthetic peptide
  Seed: PRMCSLMQGSTLPRRSG
PRMYSLLQPSTIPRRSG

SEQ ID NO: 117746 - protein, 17 aa, Artificial Sequence
  Description of Artificial Sequence: Synthetic peptide
  Seed: PRMCSLMQGSTLPRRSG
PRMYSLLQPSTLPRRSG

SEQ ID NO: 117747 - protein, 17 aa, Artificial Sequence
  Description of Artificial Sequence: Synthetic peptide
  Seed: PRMCSLMQGSTLPRRSG
PRMYSLLQPSTMPRRSG

SEQ ID NO: 117748 - protein, 17 aa, Artificial Sequence
  Description of Artificial Sequence: Synthetic peptide
  Seed: PRMCSLMQGSTLPRRSG
PRMYSLLQPSTNPRRSG

SEQ ID NO: 117749 - protein, 17 aa, Artificial Sequence
  Description of Artificial Sequence: Synthetic peptide
  Seed: PRMCSLMQGSTLPRRSG
PRMYSLLQPSTPPRRSG

SEQ ID NO: 117750 - protein, 17 aa, Artificial Sequence
  Description of Artificial Sequence: Synthetic peptide
  Seed: PRMCSLMQGSTLPRRSG
PRMYSLLQPSTQPRRSG

SEQ ID NO: 117751 - protein, 17 aa, Artificial Sequence
  Description of Artificial Sequence: Synthetic peptide
  Seed: PRMCSLMQGSTLPRRSG
PRMYSLLQPSTSPRRSG

SEQ ID NO: 117752 - protein, 17 aa, Artificial Sequence
  Description of Artificial Sequence: Synthetic peptide
  Seed: PRMCSLMQGSTLPRRSG
PRMYSLLQPSTTPRRSG

SEQ ID NO: 117753 - protein, 17 aa, Artificial Sequence
  Description of Artificial Sequence: Synthetic peptide
  Seed: PRMCSLMQGSTLPRRSG
PRMYSLLQPSTVPRRSG

SEQ ID NO: 117754 - protein, 17 aa, Artificial Sequence
  Description of Artificial Sequence: Synthetic peptide
  Seed: PRMCSLMQGSTLPRRSG
PRMYSLLQSSTAPRRSG

SEQ ID NO: 117755 - protein, 17 aa, Artificial Sequence
  Description of Artificial Sequence: Synthetic peptide
  Seed: PRMCSLMQGSTLPRRSG
PRMYSLLQSSTCPRRSG

SEQ ID NO: 117756 - protein, 17 aa, Artificial Sequence
  Description of Artificial Sequence: Synthetic peptide
  Seed: PRMCSLMQGSTLPRRSG
PRMYSLLQSSTFPRRSG

SEQ ID NO: 117757 - protein, 17 aa, Artificial Sequence
  Description of Artificial Sequence: Synthetic peptide
  Seed: PRMCSLMQGSTLPRRSG
PRMYSLLQSSTGPRRSG

SEQ ID NO: 117758 - protein, 17 aa, Artificial Sequence
  Description of Artificial Sequence: Synthetic peptide
  Seed: PRMCSLMQGSTLPRRSG
PRMYSLLQSSTHPRRSG

SEQ ID NO: 117759 - protein, 17 aa, Artificial Sequence
  Description of Artificial Sequence: Synthetic peptide
  Seed: PRMCSLMQGSTLPRRSG
PRMYSLLQSSTIPRRSG

SEQ ID NO: 117760 - protein, 17 aa, Artificial Sequence
  Description of Artificial Sequence: Synthetic peptide
  Seed: PRMCSLMQGSTLPRRSG
PRMYSLLQSSTLPRRSG

SEQ ID NO: 117761 - protein, 17 aa, Artificial Sequence
  Description of Artificial Sequence: Synthetic peptide
  Seed: PRMCSLMQGSTLPRRSG
PRMYSLLQSSTMPRRSG

SEQ ID NO: 117762 - protein, 17 aa, Artificial Sequence
  Description of Artificial Sequence: Synthetic peptide
  Seed: PRMCSLMQGSTLPRRSG
PRMYSLLQSSTNPRRSG

SEQ ID NO: 117763 - protein, 17 aa, Artificial Sequence
  Description of Artificial Sequence: Synthetic peptide
  Seed: PRMCSLMQGSTLPRRSG
PRMYSLLQSSTPPRRSG

SEQ ID NO: 117764 - protein, 17 aa, Artificial Sequence
  Description of Artificial Sequence: Synthetic peptide
  Seed: PRMCSLMQGSTLPRRSG
PRMYSLLQSSTQPRRSG

SEQ ID NO: 117765 - protein, 17 aa, Artificial Sequence
  Description of Artificial Sequence: Synthetic peptide
  Seed: PRMCSLMQGSTLPRRSG
PRMYSLLQSSTSPRRSG

SEQ ID NO: 117766 - protein, 17 aa, Artificial Sequence
  Description of Artificial Sequence: Synthetic peptide
  Seed: PRMCSLMQGSTLPRRSG
PRMYSLLQSSTTPRRSG

SEQ ID NO: 117767 - protein, 17 aa, Artificial Sequence
  Description of Artificial Sequence: Synthetic peptide
  Seed: PRMCSLMQGSTLPRRSG
PRMYSLLQSSTVPRRSG

SEQ ID NO: 117768 - protein, 17 aa, Artificial Sequence
  Description of Artificial Sequence: Synthetic peptide
  Seed: PRMCSLMQGSTLPRRSG
PRMYSLLQTSTAPRRSG

SEQ ID NO: 117769 - protein, 17 aa, Artificial Sequence
  Description of Artificial Sequence: Synthetic peptide
  Seed: PRMCSLMQGSTLPRRSG
PRMYSLLQTSTGPRRSG

SEQ ID NO: 117770 - protein, 17 aa, Artificial Sequence
  Description of Artificial Sequence: Synthetic peptide
  Seed: PRMCSLMQGSTLPRRSG
PRMYSLLQTSTHPRRSG

SEQ ID NO: 117771 - protein, 17 aa, Artificial Sequence
  Description of Artificial Sequence: Synthetic peptide
  Seed: PRMCSLMQGSTLPRRSG
PRMYSLLQTSTIPRRSG

SEQ ID NO: 117772 - protein, 17 aa, Artificial Sequence
  Description of Artificial Sequence: Synthetic peptide
  Seed: PRMCSLMQGSTLPRRSG
PRMYSLLQTSTLPRRSG

SEQ ID NO: 117773 - protein, 17 aa, Artificial Sequence
  Description of Artificial Sequence: Synthetic peptide
  Seed: PRMCSLMQGSTLPRRSG
PRMYSLLQTSTMPRRSG

SEQ ID NO: 117774 - protein, 17 aa, Artificial Sequence
  Description of Artificial Sequence: Synthetic peptide
  Seed: PRMCSLMQGSTLPRRSG
PRMYSLLQTSTNPRRSG

SEQ ID NO: 117775 - protein, 17 aa, Artificial Sequence
  Description of Artificial Sequence: Synthetic peptide
  Seed: PRMCSLMQGSTLPRRSG
PRMYSLLQTSTSPRRSG

SEQ ID NO: 117776 - protein, 17 aa, Artificial Sequence
  Description of Artificial Sequence: Synthetic peptide
  Seed: PRMCSLMQGSTLPRRSG
PRMYSLLQTSTTPRRSG

SEQ ID NO: 117777 - protein, 17 aa, Artificial Sequence
  Description of Artificial Sequence: Synthetic peptide
  Seed: PRMCSLMQGSTLPRRSG
PRMYSLLQTSTVPRRSG

SEQ ID NO: 117778 - protein, 17 aa, Artificial Sequence
  Description of Artificial Sequence: Synthetic peptide
  Seed: PRMCSLMQGSTLPRRSG
PRMYSLLQVSTAPRRSG

SEQ ID NO: 117779 - protein, 17 aa, Artificial Sequence
  Description of Artificial Sequence: Synthetic peptide
  Seed: PRMCSLMQGSTLPRRSG
PRMYSLLQVSTGPRRSG

SEQ ID NO: 117780 - protein, 17 aa, Artificial Sequence
  Description of Artificial Sequence: Synthetic peptide
  Seed: PRMCSLMQGSTLPRRSG
PRMYSLLQVSTHPRRSG

SEQ ID NO: 117781 - protein, 17 aa, Artificial Sequence
  Description of Artificial Sequence: Synthetic peptide
  Seed: PRMCSLMQGSTLPRRSG
PRMYSLLQVSTIPRRSG

SEQ ID NO: 117782 - protein, 17 aa, Artificial Sequence
  Description of Artificial Sequence: Synthetic peptide
  Seed: PRMCSLMQGSTLPRRSG
PRMYSLLQVSTLPRRSG

SEQ ID NO: 117783 - protein, 17 aa, Artificial Sequence
  Description of Artificial Sequence: Synthetic peptide
  Seed: PRMCSLMQGSTLPRRSG
PRMYSLLQVSTMPRRSG

SEQ ID NO: 117784 - protein, 17 aa, Artificial Sequence
  Description of Artificial Sequence: Synthetic peptide
  Seed: PRMCSLMQGSTLPRRSG
PRMYSLLQVSTNPRRSG

SEQ ID NO: 117785 - protein, 17 aa, Artificial Sequence
  Description of Artificial Sequence: Synthetic peptide
  Seed: PRMCSLMQGSTLPRRSG
PRMYSLLQVSTPPRRSG

SEQ ID NO: 117786 - protein, 17 aa, Artificial Sequence
  Description of Artificial Sequence: Synthetic peptide
  Seed: PRMCSLMQGSTLPRRSG
PRMYSLLQVSTQPRRSG

SEQ ID NO: 117787 - protein, 17 aa, Artificial Sequence
  Description of Artificial Sequence: Synthetic peptide
  Seed: PRMCSLMQGSTLPRRSG
PRMYSLLQVSTSPRRSG

SEQ ID NO: 117788 - protein, 17 aa, Artificial Sequence
  Description of Artificial Sequence: Synthetic peptide
  Seed: PRMCSLMQGSTLPRRSG
PRMYSLLQVSTTPRRSG

SEQ ID NO: 117789 - protein, 17 aa, Artificial Sequence
  Description of Artificial Sequence: Synthetic peptide
  Seed: PRMCSLMQGSTLPRRSG
PRMYSLLQVSTVPRRSG

SEQ ID NO: 117790 - protein, 17 aa, Artificial Sequence
  Description of Artificial Sequence: Synthetic peptide
  Seed: PRMCSLMQGSTLPRRSG
PRMYSLMQASTAPRRSG

SEQ ID NO: 117791 - protein, 17 aa, Artificial Sequence
  Description of Artificial Sequence: Synthetic peptide
  Seed: PRMCSLMQGSTLPRRSG
PRMYSLMQASTCPRRSG

SEQ ID NO: 117792 - protein, 17 aa, Artificial Sequence
  Description of Artificial Sequence: Synthetic peptide
  Seed: PRMCSLMQGSTLPRRSG
PRMYSLMQASTEPRRSG

SEQ ID NO: 117793 - protein, 17 aa, Artificial Sequence
  Description of Artificial Sequence: Synthetic peptide
  Seed: PRMCSLMQGSTLPRRSG
PRMYSLMQASTFPRRSG

SEQ ID NO: 117794 - protein, 17 aa, Artificial Sequence
  Description of Artificial Sequence: Synthetic peptide
  Seed: PRMCSLMQGSTLPRRSG
PRMYSLMQASTGPRRSG

SEQ ID NO: 117795 - protein, 17 aa, Artificial Sequence
  Description of Artificial Sequence: Synthetic peptide
  Seed: PRMCSLMQGSTLPRRSG
PRMYSLMQASTHPRRSG

SEQ ID NO: 117796 - protein, 17 aa, Artificial Sequence
  Description of Artificial Sequence: Synthetic peptide
  Seed: PRMCSLMQGSTLPRRSG
PRMYSLMQASTIPRRSG

SEQ ID NO: 117797 - protein, 17 aa, Artificial Sequence
  Description of Artificial Sequence: Synthetic peptide
  Seed: PRMCSLMQGSTLPRRSG
PRMYSLMQASTLPRRSG

SEQ ID NO: 117798 - protein, 17 aa, Artificial Sequence
  Description of Artificial Sequence: Synthetic peptide
  Seed: PRMCSLMQGSTLPRRSG
PRMYSLMQASTMPRRSG

SEQ ID NO: 117799 - protein, 17 aa, Artificial Sequence
  Description of Artificial Sequence: Synthetic peptide
  Seed: PRMCSLMQGSTLPRRSG
PRMYSLMQASTNPRRSG

SEQ ID NO: 117800 - protein, 17 aa, Artificial Sequence
  Description of Artificial Sequence: Synthetic peptide
  Seed: PRMCSLMQGSTLPRRSG
PRMYSLMQASTPPRRSG

SEQ ID NO: 117801 - protein, 17 aa, Artificial Sequence
  Description of Artificial Sequence: Synthetic peptide
  Seed: PRMCSLMQGSTLPRRSG
PRMYSLMQASTQPRRSG

SEQ ID NO: 117802 - protein, 17 aa, Artificial Sequence
  Description of Artificial Sequence: Synthetic peptide
  Seed: PRMCSLMQGSTLPRRSG
PRMYSLMQASTSPRRSG

SEQ ID NO: 117803 - protein, 17 aa, Artificial Sequence
  Description of Artificial Sequence: Synthetic peptide
  Seed: PRMCSLMQGSTLPRRSG
PRMYSLMQASTTPRRSG

SEQ ID NO: 117804 - protein, 17 aa, Artificial Sequence
  Description of Artificial Sequence: Synthetic peptide
  Seed: PRMCSLMQGSTLPRRSG
PRMYSLMQASTVPRRSG

SEQ ID NO: 117805 - protein, 17 aa, Artificial Sequence
  Description of Artificial Sequence: Synthetic peptide
  Seed: PRMCSLMQGSTLPRRSG
PRMYSLMQASTWPRRSG

SEQ ID NO: 117806 - protein, 17 aa, Artificial Sequence
  Description of Artificial Sequence: Synthetic peptide
  Seed: PRMCSLMQGSTLPRRSG
PRMYSLMQASTYPRRSG

SEQ ID NO: 117807 - protein, 17 aa, Artificial Sequence
  Description of Artificial Sequence: Synthetic peptide
  Seed: PRMCSLMQGSTLPRRSG
PRMYSLMQGSTAPRRSG

SEQ ID NO: 117808 - protein, 17 aa, Artificial Sequence
  Description of Artificial Sequence: Synthetic peptide
  Seed: PRMCSLMQGSTLPRRSG
PRMYSLMQGSTCPRRSG

SEQ ID NO: 117809 - protein, 17 aa, Artificial Sequence
  Description of Artificial Sequence: Synthetic peptide
  Seed: PRMCSLMQGSTLPRRSG
PRMYSLMQGSTFPRRSG

SEQ ID NO: 117810 - protein, 17 aa, Artificial Sequence
  Description of Artificial Sequence: Synthetic peptide
  Seed: PRMCSLMQGSTLPRRSG
PRMYSLMQGSTGPRRSG

SEQ ID NO: 117811 - protein, 17 aa, Artificial Sequence
  Description of Artificial Sequence: Synthetic peptide
  Seed: PRMCSLMQGSTLPRRSG
PRMYSLMQGSTIPRRSG

SEQ ID NO: 117812 - protein, 17 aa, Artificial Sequence
  Description of Artificial Sequence: Synthetic peptide
  Seed: PRMCSLMQGSTLPRRSG
PRMYSLMQGSTLPRRSG

SEQ ID NO: 117813 - protein, 17 aa, Artificial Sequence
  Description of Artificial Sequence: Synthetic peptide
  Seed: PRMCSLMQGSTLPRRSG
PRMYSLMQGSTMPRRSG

SEQ ID NO: 117814 - protein, 17 aa, Artificial Sequence
  Description of Artificial Sequence: Synthetic peptide
  Seed: PRMCSLMQGSTLPRRSG
PRMYSLMQGSTNPRRSG

SEQ ID NO: 117815 - protein, 17 aa, Artificial Sequence
  Description of Artificial Sequence: Synthetic peptide
  Seed: PRMCSLMQGSTLPRRSG
PRMYSLMQGSTSPRRSG

SEQ ID NO: 117816 - protein, 17 aa, Artificial Sequence
  Description of Artificial Sequence: Synthetic peptide
  Seed: PRMCSLMQGSTLPRRSG
PRMYSLMQGSTTPRRSG

SEQ ID NO: 117817 - protein, 17 aa, Artificial Sequence
  Description of Artificial Sequence: Synthetic peptide
  Seed: PRMCSLMQGSTLPRRSG
PRMYSLMQGSTVPRRSG

SEQ ID NO: 117818 - protein, 17 aa, Artificial Sequence
  Description of Artificial Sequence: Synthetic peptide
  Seed: PRMCSLMQGSTLPRRSG
PRMYSLMQISTAPRRSG

SEQ ID NO: 117819 - protein, 17 aa, Artificial Sequence
  Description of Artificial Sequence: Synthetic peptide
  Seed: PRMCSLMQGSTLPRRSG
PRMYSLMQISTGPRRSG

SEQ ID NO: 117820 - protein, 17 aa, Artificial Sequence
  Description of Artificial Sequence: Synthetic peptide
  Seed: PRMCSLMQGSTLPRRSG
PRMYSLMQISTHPRRSG

SEQ ID NO: 117821 - protein, 17 aa, Artificial Sequence
  Description of Artificial Sequence: Synthetic peptide
  Seed: PRMCSLMQGSTLPRRSG
PRMYSLMQISTIPRRSG

SEQ ID NO: 117822 - protein, 17 aa, Artificial Sequence
  Description of Artificial Sequence: Synthetic peptide
  Seed: PRMCSLMQGSTLPRRSG
PRMYSLMQISTLPRRSG

SEQ ID NO: 117823 - protein, 17 aa, Artificial Sequence
  Description of Artificial Sequence: Synthetic peptide
  Seed: PRMCSLMQGSTLPRRSG
PRMYSLMQISTMPRRSG

SEQ ID NO: 117824 - protein, 17 aa, Artificial Sequence
  Description of Artificial Sequence: Synthetic peptide
  Seed: PRMCSLMQGSTLPRRSG
PRMYSLMQISTNPRRSG

SEQ ID NO: 117825 - protein, 17 aa, Artificial Sequence
  Description of Artificial Sequence: Synthetic peptide
  Seed: PRMCSLMQGSTLPRRSG
PRMYSLMQISTQPRRSG

SEQ ID NO: 117826 - protein, 17 aa, Artificial Sequence
  Description of Artificial Sequence: Synthetic peptide
  Seed: PRMCSLMQGSTLPRRSG
PRMYSLMQISTSPRRSG

SEQ ID NO: 117827 - protein, 17 aa, Artificial Sequence
  Description of Artificial Sequence: Synthetic peptide
  Seed: PRMCSLMQGSTLPRRSG
PRMYSLMQISTTPRRSG

SEQ ID NO: 117828 - protein, 17 aa, Artificial Sequence
  Description of Artificial Sequence: Synthetic peptide
  Seed: PRMCSLMQGSTLPRRSG
PRMYSLMQISTVPRRSG

SEQ ID NO: 117829 - protein, 17 aa, Artificial Sequence
  Description of Artificial Sequence: Synthetic peptide
  Seed: PRMCSLMQGSTLPRRSG
PRMYSLMQLSTAPRRSG

SEQ ID NO: 117830 - protein, 17 aa, Artificial Sequence
  Description of Artificial Sequence: Synthetic peptide
  Seed: PRMCSLMQGSTLPRRSG
PRMYSLMQLSTIPRRSG

SEQ ID NO: 117831 - protein, 17 aa, Artificial Sequence
  Description of Artificial Sequence: Synthetic peptide
  Seed: PRMCSLMQGSTLPRRSG
PRMYSLMQLSTLPRRSG

SEQ ID NO: 117832 - protein, 17 aa, Artificial Sequence
  Description of Artificial Sequence: Synthetic peptide
  Seed: PRMCSLMQGSTLPRRSG
PRMYSLMQLSTMPRRSG

SEQ ID NO: 117833 - protein, 17 aa, Artificial Sequence
  Description of Artificial Sequence: Synthetic peptide
  Seed: PRMCSLMQGSTLPRRSG
PRMYSLMQLSTNPRRSG

SEQ ID NO: 117834 - protein, 17 aa, Artificial Sequence
  Description of Artificial Sequence: Synthetic peptide
  Seed: PRMCSLMQGSTLPRRSG
PRMYSLMQLSTSPRRSG

SEQ ID NO: 117835 - protein, 17 aa, Artificial Sequence
  Description of Artificial Sequence: Synthetic peptide
  Seed: PRMCSLMQGSTLPRRSG
PRMYSLMQLSTTPRRSG

SEQ ID NO: 117836 - protein, 17 aa, Artificial Sequence
  Description of Artificial Sequence: Synthetic peptide
  Seed: PRMCSLMQGSTLPRRSG
PRMYSLMQLSTVPRRSG

SEQ ID NO: 117837 - protein, 17 aa, Artificial Sequence
  Description of Artificial Sequence: Synthetic peptide
  Seed: PRMCSLMQGSTLPRRSG
PRMYSLMQMSTAPRRSG

SEQ ID NO: 117838 - protein, 17 aa, Artificial Sequence
  Description of Artificial Sequence: Synthetic peptide
  Seed: PRMCSLMQGSTLPRRSG
PRMYSLMQMSTIPRRSG

SEQ ID NO: 117839 - protein, 17 aa, Artificial Sequence
  Description of Artificial Sequence: Synthetic peptide
  Seed: PRMCSLMQGSTLPRRSG
PRMYSLMQMSTLPRRSG

SEQ ID NO: 117840 - protein, 17 aa, Artificial Sequence
  Description of Artificial Sequence: Synthetic peptide
  Seed: PRMCSLMQGSTLPRRSG
PRMYSLMQMSTMPRRSG

SEQ ID NO: 117841 - protein, 17 aa, Artificial Sequence
  Description of Artificial Sequence: Synthetic peptide
  Seed: PRMCSLMQGSTLPRRSG
PRMYSLMQMSTNPRRSG

SEQ ID NO: 117842 - protein, 17 aa, Artificial Sequence
  Description of Artificial Sequence: Synthetic peptide
  Seed: PRMCSLMQGSTLPRRSG
PRMYSLMQMSTSPRRSG

SEQ ID NO: 117843 - protein, 17 aa, Artificial Sequence
  Description of Artificial Sequence: Synthetic peptide
  Seed: PRMCSLMQGSTLPRRSG
PRMYSLMQMSTTPRRSG

SEQ ID NO: 117844 - protein, 17 aa, Artificial Sequence
  Description of Artificial Sequence: Synthetic peptide
  Seed: PRMCSLMQGSTLPRRSG
PRMYSLMQMSTVPRRSG

SEQ ID NO: 117845 - protein, 17 aa, Artificial Sequence
  Description of Artificial Sequence: Synthetic peptide
  Seed: PRMCSLMQGSTLPRRSG
PRMYSLMQNSTAPRRSG

SEQ ID NO: 117846 - protein, 17 aa, Artificial Sequence
  Description of Artificial Sequence: Synthetic peptide
  Seed: PRMCSLMQGSTLPRRSG
PRMYSLMQNSTIPRRSG

SEQ ID NO: 117847 - protein, 17 aa, Artificial Sequence
  Description of Artificial Sequence: Synthetic peptide
  Seed: PRMCSLMQGSTLPRRSG
PRMYSLMQNSTLPRRSG

SEQ ID NO: 117848 - protein, 17 aa, Artificial Sequence
  Description of Artificial Sequence: Synthetic peptide
  Seed: PRMCSLMQGSTLPRRSG
PRMYSLMQNSTMPRRSG

SEQ ID NO: 117849 - protein, 17 aa, Artificial Sequence
  Description of Artificial Sequence: Synthetic peptide
  Seed: PRMCSLMQGSTLPRRSG
PRMYSLMQNSTNPRRSG

SEQ ID NO: 117850 - protein, 17 aa, Artificial Sequence
  Description of Artificial Sequence: Synthetic peptide
  Seed: PRMCSLMQGSTLPRRSG
PRMYSLMQNSTSPRRSG

SEQ ID NO: 117851 - protein, 17 aa, Artificial Sequence
  Description of Artificial Sequence: Synthetic peptide
  Seed: PRMCSLMQGSTLPRRSG
PRMYSLMQNSTTPRRSG

SEQ ID NO: 117852 - protein, 17 aa, Artificial Sequence
  Description of Artificial Sequence: Synthetic peptide
  Seed: PRMCSLMQGSTLPRRSG
PRMYSLMQNSTVPRRSG

SEQ ID NO: 117853 - protein, 17 aa, Artificial Sequence
  Description of Artificial Sequence: Synthetic peptide
  Seed: PRMCSLMQGSTLPRRSG
PRMYSLMQPSTAPRRSG

SEQ ID NO: 117854 - protein, 17 aa, Artificial Sequence
  Description of Artificial Sequence: Synthetic peptide
  Seed: PRMCSLMQGSTLPRRSG
PRMYSLMQPSTFPRRSG

SEQ ID NO: 117855 - protein, 17 aa, Artificial Sequence
  Description of Artificial Sequence: Synthetic peptide
  Seed: PRMCSLMQGSTLPRRSG
PRMYSLMQPSTGPRRSG

SEQ ID NO: 117856 - protein, 17 aa, Artificial Sequence
  Description of Artificial Sequence: Synthetic peptide
  Seed: PRMCSLMQGSTLPRRSG
PRMYSLMQPSTHPRRSG

SEQ ID NO: 117857 - protein, 17 aa, Artificial Sequence
  Description of Artificial Sequence: Synthetic peptide
  Seed: PRMCSLMQGSTLPRRSG
PRMYSLMQPSTIPRRSG

SEQ ID NO: 117858 - protein, 17 aa, Artificial Sequence
  Description of Artificial Sequence: Synthetic peptide
  Seed: PRMCSLMQGSTLPRRSG
PRMYSLMQPSTLPRRSG

SEQ ID NO: 117859 - protein, 17 aa, Artificial Sequence
  Description of Artificial Sequence: Synthetic peptide
  Seed: PRMCSLMQGSTLPRRSG
PRMYSLMQPSTMPRRSG

SEQ ID NO: 117860 - protein, 17 aa, Artificial Sequence
  Description of Artificial Sequence: Synthetic peptide
  Seed: PRMCSLMQGSTLPRRSG
PRMYSLMQPSTNPRRSG

SEQ ID NO: 117861 - protein, 17 aa, Artificial Sequence
  Description of Artificial Sequence: Synthetic peptide
  Seed: PRMCSLMQGSTLPRRSG
PRMYSLMQPSTPPRRSG

SEQ ID NO: 117862 - protein, 17 aa, Artificial Sequence
  Description of Artificial Sequence: Synthetic peptide
  Seed: PRMCSLMQGSTLPRRSG
PRMYSLMQPSTQPRRSG

SEQ ID NO: 117863 - protein, 17 aa, Artificial Sequence
  Description of Artificial Sequence: Synthetic peptide
  Seed: PRMCSLMQGSTLPRRSG
PRMYSLMQPSTSPRRSG

SEQ ID NO: 117864 - protein, 17 aa, Artificial Sequence
  Description of Artificial Sequence: Synthetic peptide
  Seed: PRMCSLMQGSTLPRRSG
PRMYSLMQPSTTPRRSG

SEQ ID NO: 117865 - protein, 17 aa, Artificial Sequence
  Description of Artificial Sequence: Synthetic peptide
  Seed: PRMCSLMQGSTLPRRSG
PRMYSLMQPSTVPRRSG

SEQ ID NO: 117866 - protein, 17 aa, Artificial Sequence
  Description of Artificial Sequence: Synthetic peptide
  Seed: PRMCSLMQGSTLPRRSG
PRMYSLMQSSTAPRRSG

SEQ ID NO: 117867 - protein, 17 aa, Artificial Sequence
  Description of Artificial Sequence: Synthetic peptide
  Seed: PRMCSLMQGSTLPRRSG
PRMYSLMQSSTCPRRSG

SEQ ID NO: 117868 - protein, 17 aa, Artificial Sequence
  Description of Artificial Sequence: Synthetic peptide
  Seed: PRMCSLMQGSTLPRRSG
PRMYSLMQSSTFPRRSG

SEQ ID NO: 117869 - protein, 17 aa, Artificial Sequence
  Description of Artificial Sequence: Synthetic peptide
  Seed: PRMCSLMQGSTLPRRSG
PRMYSLMQSSTGPRRSG

SEQ ID NO: 117870 - protein, 17 aa, Artificial Sequence
  Description of Artificial Sequence: Synthetic peptide
  Seed: PRMCSLMQGSTLPRRSG
PRMYSLMQSSTHPRRSG

SEQ ID NO: 117871 - protein, 17 aa, Artificial Sequence
  Description of Artificial Sequence: Synthetic peptide
  Seed: PRMCSLMQGSTLPRRSG
PRMYSLMQSSTIPRRSG

SEQ ID NO: 117872 - protein, 17 aa, Artificial Sequence
  Description of Artificial Sequence: Synthetic peptide
  Seed: PRMCSLMQGSTLPRRSG
PRMYSLMQSSTLPRRSG

SEQ ID NO: 117873 - protein, 17 aa, Artificial Sequence
  Description of Artificial Sequence: Synthetic peptide
  Seed: PRMCSLMQGSTLPRRSG
PRMYSLMQSSTMPRRSG

SEQ ID NO: 117874 - protein, 17 aa, Artificial Sequence
  Description of Artificial Sequence: Synthetic peptide
  Seed: PRMCSLMQGSTLPRRSG
PRMYSLMQSSTNPRRSG

SEQ ID NO: 117875 - protein, 17 aa, Artificial Sequence
  Description of Artificial Sequence: Synthetic peptide
  Seed: PRMCSLMQGSTLPRRSG
PRMYSLMQSSTPPRRSG

SEQ ID NO: 117876 - protein, 17 aa, Artificial Sequence
  Description of Artificial Sequence: Synthetic peptide
  Seed: PRMCSLMQGSTLPRRSG
PRMYSLMQSSTQPRRSG

SEQ ID NO: 117877 - protein, 17 aa, Artificial Sequence
  Description of Artificial Sequence: Synthetic peptide
  Seed: PRMCSLMQGSTLPRRSG
PRMYSLMQSSTSPRRSG

SEQ ID NO: 117878 - protein, 17 aa, Artificial Sequence
  Description of Artificial Sequence: Synthetic peptide
  Seed: PRMCSLMQGSTLPRRSG
PRMYSLMQSSTTPRRSG

SEQ ID NO: 117879 - protein, 17 aa, Artificial Sequence
  Description of Artificial Sequence: Synthetic peptide
  Seed: PRMCSLMQGSTLPRRSG
PRMYSLMQSSTVPRRSG

SEQ ID NO: 117880 - protein, 17 aa, Artificial Sequence
  Description of Artificial Sequence: Synthetic peptide
  Seed: PRMCSLMQGSTLPRRSG
PRMYSLMQTSTAPRRSG

SEQ ID NO: 117881 - protein, 17 aa, Artificial Sequence
  Description of Artificial Sequence: Synthetic peptide
  Seed: PRMCSLMQGSTLPRRSG
PRMYSLMQTSTGPRRSG

SEQ ID NO: 117882 - protein, 17 aa, Artificial Sequence
  Description of Artificial Sequence: Synthetic peptide
  Seed: PRMCSLMQGSTLPRRSG
PRMYSLMQTSTHPRRSG

SEQ ID NO: 117883 - protein, 17 aa, Artificial Sequence
  Description of Artificial Sequence: Synthetic peptide
  Seed: PRMCSLMQGSTLPRRSG
PRMYSLMQTSTIPRRSG

SEQ ID NO: 117884 - protein, 17 aa, Artificial Sequence
  Description of Artificial Sequence: Synthetic peptide
  Seed: PRMCSLMQGSTLPRRSG
PRMYSLMQTSTLPRRSG

SEQ ID NO: 117885 - protein, 17 aa, Artificial Sequence
  Description of Artificial Sequence: Synthetic peptide
  Seed: PRMCSLMQGSTLPRRSG
PRMYSLMQTSTMPRRSG

SEQ ID NO: 117886 - protein, 17 aa, Artificial Sequence
  Description of Artificial Sequence: Synthetic peptide
  Seed: PRMCSLMQGSTLPRRSG
PRMYSLMQTSTNPRRSG

SEQ ID NO: 117887 - protein, 17 aa, Artificial Sequence
  Description of Artificial Sequence: Synthetic peptide
  Seed: PRMCSLMQGSTLPRRSG
PRMYSLMQTSTSPRRSG

SEQ ID NO: 117888 - protein, 17 aa, Artificial Sequence
  Description of Artificial Sequence: Synthetic peptide
  Seed: PRMCSLMQGSTLPRRSG
PRMYSLMQTSTTPRRSG

SEQ ID NO: 117889 - protein, 17 aa, Artificial Sequence
  Description of Artificial Sequence: Synthetic peptide
  Seed: PRMCSLMQGSTLPRRSG
PRMYSLMQTSTVPRRSG

SEQ ID NO: 117890 - protein, 17 aa, Artificial Sequence
  Description of Artificial Sequence: Synthetic peptide
  Seed: PRMCSLMQGSTLPRRSG
PRMYSLMQVSTAPRRSG

SEQ ID NO: 117891 - protein, 17 aa, Artificial Sequence
  Description of Artificial Sequence: Synthetic peptide
  Seed: PRMCSLMQGSTLPRRSG
PRMYSLMQVSTGPRRSG

SEQ ID NO: 117892 - protein, 17 aa, Artificial Sequence
  Description of Artificial Sequence: Synthetic peptide
  Seed: PRMCSLMQGSTLPRRSG
PRMYSLMQVSTHPRRSG

SEQ ID NO: 117893 - protein, 17 aa, Artificial Sequence
  Description of Artificial Sequence: Synthetic peptide
  Seed: PRMCSLMQGSTLPRRSG
PRMYSLMQVSTIPRRSG

SEQ ID NO: 117894 - protein, 17 aa, Artificial Sequence
  Description of Artificial Sequence: Synthetic peptide
  Seed: PRMCSLMQGSTLPRRSG
PRMYSLMQVSTLPRRSG

SEQ ID NO: 117895 - protein, 17 aa, Artificial Sequence
  Description of Artificial Sequence: Synthetic peptide
  Seed: PRMCSLMQGSTLPRRSG
PRMYSLMQVSTMPRRSG

SEQ ID NO: 117896 - protein, 17 aa, Artificial Sequence
  Description of Artificial Sequence: Synthetic peptide
  Seed: PRMCSLMQGSTLPRRSG
PRMYSLMQVSTNPRRSG

SEQ ID NO: 117897 - protein, 17 aa, Artificial Sequence
  Description of Artificial Sequence: Synthetic peptide
  Seed: PRMCSLMQGSTLPRRSG
PRMYSLMQVSTPPRRSG

SEQ ID NO: 117898 - protein, 17 aa, Artificial Sequence
  Description of Artificial Sequence: Synthetic peptide
  Seed: PRMCSLMQGSTLPRRSG
PRMYSLMQVSTQPRRSG

SEQ ID NO: 117899 - protein, 17 aa, Artificial Sequence
  Description of Artificial Sequence: Synthetic peptide
  Seed: PRMCSLMQGSTLPRRSG
PRMYSLMQVSTSPRRSG

SEQ ID NO: 117900 - protein, 17 aa, Artificial Sequence
  Description of Artificial Sequence: Synthetic peptide
  Seed: PRMCSLMQGSTLPRRSG
PRMYSLMQVSTTPRRSG

SEQ ID NO: 117901 - protein, 17 aa, Artificial Sequence
  Description of Artificial Sequence: Synthetic peptide
  Seed: PRMCSLMQGSTLPRRSG
PRMYSLMQVSTVPRRSG

SEQ ID NO: 117902 - protein, 17 aa, Artificial Sequence
  Description of Artificial Sequence: Synthetic peptide
  Seed: PRMCSLMQGSTLPRRSG
PRMYSLNQASTLPRRSG

SEQ ID NO: 117903 - protein, 17 aa, Artificial Sequence
  Description of Artificial Sequence: Synthetic peptide
  Seed: PRMCSLMQGSTLPRRSG
PRMYSLQQASTAPRRSG

SEQ ID NO: 117904 - protein, 17 aa, Artificial Sequence
  Description of Artificial Sequence: Synthetic peptide
  Seed: PRMCSLMQGSTLPRRSG
PRMYSLQQASTIPRRSG

SEQ ID NO: 117905 - protein, 17 aa, Artificial Sequence
  Description of Artificial Sequence: Synthetic peptide
  Seed: PRMCSLMQGSTLPRRSG
PRMYSLQQASTLPRRSG

SEQ ID NO: 117906 - protein, 17 aa, Artificial Sequence
  Description of Artificial Sequence: Synthetic peptide
  Seed: PRMCSLMQGSTLPRRSG
PRMYSLQQASTMPRRSG

SEQ ID NO: 117907 - protein, 17 aa, Artificial Sequence
  Description of Artificial Sequence: Synthetic peptide
  Seed: PRMCSLMQGSTLPRRSG
PRMYSLQQASTNPRRSG

SEQ ID NO: 117908 - protein, 17 aa, Artificial Sequence
  Description of Artificial Sequence: Synthetic peptide
  Seed: PRMCSLMQGSTLPRRSG
PRMYSLQQASTSPRRSG

SEQ ID NO: 117909 - protein, 17 aa, Artificial Sequence
  Description of Artificial Sequence: Synthetic peptide
  Seed: PRMCSLMQGSTLPRRSG
PRMYSLQQASTTPRRSG

SEQ ID NO: 117910 - protein, 17 aa, Artificial Sequence
  Description of Artificial Sequence: Synthetic peptide
  Seed: PRMCSLMQGSTLPRRSG
PRMYSLQQASTVPRRSG

SEQ ID NO: 117911 - protein, 17 aa, Artificial Sequence
  Description of Artificial Sequence: Synthetic peptide
  Seed: PRMCSLMQGSTLPRRSG
PRMYSLQQGSTAPRRSG

SEQ ID NO: 117912 - protein, 17 aa, Artificial Sequence
  Description of Artificial Sequence: Synthetic peptide
  Seed: PRMCSLMQGSTLPRRSG
PRMYSLQQGSTIPRRSG

SEQ ID NO: 117913 - protein, 17 aa, Artificial Sequence
  Description of Artificial Sequence: Synthetic peptide
  Seed: PRMCSLMQGSTLPRRSG
PRMYSLQQGSTLPRRSG

SEQ ID NO: 117914 - protein, 17 aa, Artificial Sequence
  Description of Artificial Sequence: Synthetic peptide
  Seed: PRMCSLMQGSTLPRRSG
PRMYSLQQGSTMPRRSG

SEQ ID NO: 117915 - protein, 17 aa, Artificial Sequence
  Description of Artificial Sequence: Synthetic peptide
  Seed: PRMCSLMQGSTLPRRSG
PRMYSLQQGSTTPRRSG

SEQ ID NO: 117916 - protein, 17 aa, Artificial Sequence
  Description of Artificial Sequence: Synthetic peptide
  Seed: PRMCSLMQGSTLPRRSG
PRMYSLQQGSTVPRRSG

SEQ ID NO: 117917 - protein, 17 aa, Artificial Sequence
  Description of Artificial Sequence: Synthetic peptide
  Seed: PRMCSLMQGSTLPRRSG
PRMYSLQQISTAPRRSG

SEQ ID NO: 117918 - protein, 17 aa, Artificial Sequence
  Description of Artificial Sequence: Synthetic peptide
  Seed: PRMCSLMQGSTLPRRSG
PRMYSLQQNSTLPRRSG

SEQ ID NO: 117919 - protein, 17 aa, Artificial Sequence
  Description of Artificial Sequence: Synthetic peptide
  Seed: PRMCSLMQGSTLPRRSG
PRMYSLQQNSTVPRRSG

SEQ ID NO: 117920 - protein, 17 aa, Artificial Sequence
  Description of Artificial Sequence: Synthetic peptide
  Seed: PRMCSLMQGSTLPRRSG
PRMYSLQQPSTAPRRSG

SEQ ID NO: 117921 - protein, 17 aa, Artificial Sequence
  Description of Artificial Sequence: Synthetic peptide
  Seed: PRMCSLMQGSTLPRRSG
PRMYSLQQPSTIPRRSG

SEQ ID NO: 117922 - protein, 17 aa, Artificial Sequence
  Description of Artificial Sequence: Synthetic peptide
  Seed: PRMCSLMQGSTLPRRSG
PRMYSLQQPSTLPRRSG

SEQ ID NO: 117923 - protein, 17 aa, Artificial Sequence
  Description of Artificial Sequence: Synthetic peptide
  Seed: PRMCSLMQGSTLPRRSG
PRMYSLQQPSTVPRRSG

SEQ ID NO: 117924 - protein, 17 aa, Artificial Sequence
  Description of Artificial Sequence: Synthetic peptide
  Seed: PRMCSLMQGSTLPRRSG
PRMYSLQQSSTAPRRSG

SEQ ID NO: 117925 - protein, 17 aa, Artificial Sequence
  Description of Artificial Sequence: Synthetic peptide
  Seed: PRMCSLMQGSTLPRRSG
PRMYSLQQSSTIPRRSG

SEQ ID NO: 117926 - protein, 17 aa, Artificial Sequence
  Description of Artificial Sequence: Synthetic peptide
  Seed: PRMCSLMQGSTLPRRSG
PRMYSLQQSSTLPRRSG

SEQ ID NO: 117927 - protein, 17 aa, Artificial Sequence
  Description of Artificial Sequence: Synthetic peptide
  Seed: PRMCSLMQGSTLPRRSG
PRMYSLQQSSTMPRRSG

SEQ ID NO: 117928 - protein, 17 aa, Artificial Sequence
  Description of Artificial Sequence: Synthetic peptide
  Seed: PRMCSLMQGSTLPRRSG
PRMYSLQQSSTTPRRSG

SEQ ID NO: 117929 - protein, 17 aa, Artificial Sequence
  Description of Artificial Sequence: Synthetic peptide
  Seed: PRMCSLMQGSTLPRRSG
PRMYSLQQSSTVPRRSG

SEQ ID NO: 117930 - protein, 17 aa, Artificial Sequence
  Description of Artificial Sequence: Synthetic peptide
  Seed: PRMCSLMQGSTLPRRSG
PRMYSLQQTSTLPRRSG

SEQ ID NO: 117931 - protein, 17 aa, Artificial Sequence
  Description of Artificial Sequence: Synthetic peptide
  Seed: PRMCSLMQGSTLPRRSG
PRMYSLQQTSTVPRRSG

SEQ ID NO: 117932 - protein, 17 aa, Artificial Sequence
  Description of Artificial Sequence: Synthetic peptide
  Seed: PRMCSLMQGSTLPRRSG
PRMYSLQQVSTAPRRSG

SEQ ID NO: 117933 - protein, 17 aa, Artificial Sequence
  Description of Artificial Sequence: Synthetic peptide
  Seed: PRMCSLMQGSTLPRRSG
PRMYSLSQASTAPRRSG

SEQ ID NO: 117934 - protein, 17 aa, Artificial Sequence
  Description of Artificial Sequence: Synthetic peptide
  Seed: PRMCSLMQGSTLPRRSG
PRMYSLSQASTIPRRSG

SEQ ID NO: 117935 - protein, 17 aa, Artificial Sequence
  Description of Artificial Sequence: Synthetic peptide
  Seed: PRMCSLMQGSTLPRRSG
PRMYSLSQASTLPRRSG

SEQ ID NO: 117936 - protein, 17 aa, Artificial Sequence
  Description of Artificial Sequence: Synthetic peptide
  Seed: PRMCSLMQGSTLPRRSG
PRMYSLSQASTMPRRSG

SEQ ID NO: 117937 - protein, 17 aa, Artificial Sequence
  Description of Artificial Sequence: Synthetic peptide
  Seed: PRMCSLMQGSTLPRRSG
PRMYSLSQASTSPRRSG

SEQ ID NO: 117938 - protein, 17 aa, Artificial Sequence
  Description of Artificial Sequence: Synthetic peptide
  Seed: PRMCSLMQGSTLPRRSG
PRMYSLSQASTVPRRSG

SEQ ID NO: 117939 - protein, 17 aa, Artificial Sequence
  Description of Artificial Sequence: Synthetic peptide
  Seed: PRMCSLMQGSTLPRRSG
PRMYSLSQGSTIPRRSG

SEQ ID NO: 117940 - protein, 17 aa, Artificial Sequence
  Description of Artificial Sequence: Synthetic peptide
  Seed: PRMCSLMQGSTLPRRSG
PRMYSLSQGSTLPRRSG

SEQ ID NO: 117941 - protein, 17 aa, Artificial Sequence
  Description of Artificial Sequence: Synthetic peptide
  Seed: PRMCSLMQGSTLPRRSG
PRMYSLSQGSTVPRRSG

SEQ ID NO: 117942 - protein, 17 aa, Artificial Sequence
  Description of Artificial Sequence: Synthetic peptide
  Seed: PRMCSLMQGSTLPRRSG
PRMYSLSQSSTIPRRSG

SEQ ID NO: 117943 - protein, 17 aa, Artificial Sequence
  Description of Artificial Sequence: Synthetic peptide
  Seed: PRMCSLMQGSTLPRRSG
PRMYSLSQSSTLPRRSG

SEQ ID NO: 117944 - protein, 17 aa, Artificial Sequence
  Description of Artificial Sequence: Synthetic peptide
  Seed: PRMCSLMQGSTLPRRSG
PRMYSLSQSSTVPRRSG

SEQ ID NO: 117945 - protein, 17 aa, Artificial Sequence
  Description of Artificial Sequence: Synthetic peptide
  Seed: PRMCSLMQGSTLPRRSG
PRMYSLTQASTAPRRSG

SEQ ID NO: 117946 - protein, 17 aa, Artificial Sequence
  Description of Artificial Sequence: Synthetic peptide
  Seed: PRMCSLMQGSTLPRRSG
PRMYSLTQASTIPRRSG

SEQ ID NO: 117947 - protein, 17 aa, Artificial Sequence
  Description of Artificial Sequence: Synthetic peptide
  Seed: PRMCSLMQGSTLPRRSG
PRMYSLTQASTLPRRSG

SEQ ID NO: 117948 - protein, 17 aa, Artificial Sequence
  Description of Artificial Sequence: Synthetic peptide
  Seed: PRMCSLMQGSTLPRRSG
PRMYSLTQASTVPRRSG

SEQ ID NO: 117949 - protein, 17 aa, Artificial Sequence
  Description of Artificial Sequence: Synthetic peptide
  Seed: PRMCSLMQGSTLPRRSG
PRMYSLVQASTAPRRSG

SEQ ID NO: 117950 - protein, 17 aa, Artificial Sequence
  Description of Artificial Sequence: Synthetic peptide
  Seed: PRMCSLMQGSTLPRRSG
PRMYSLVQASTIPRRSG

SEQ ID NO: 117951 - protein, 17 aa, Artificial Sequence
  Description of Artificial Sequence: Synthetic peptide
  Seed: PRMCSLMQGSTLPRRSG
PRMYSLVQASTLPRRSG

SEQ ID NO: 117952 - protein, 17 aa, Artificial Sequence
  Description of Artificial Sequence: Synthetic peptide
  Seed: PRMCSLMQGSTLPRRSG
PRMYSLVQASTMPRRSG

SEQ ID NO: 117953 - protein, 17 aa, Artificial Sequence
  Description of Artificial Sequence: Synthetic peptide
  Seed: PRMCSLMQGSTLPRRSG
PRMYSLVQASTNPRRSG

SEQ ID NO: 117954 - protein, 17 aa, Artificial Sequence
  Description of Artificial Sequence: Synthetic peptide
  Seed: PRMCSLMQGSTLPRRSG
PRMYSLVQASTSPRRSG

SEQ ID NO: 117955 - protein, 17 aa, Artificial Sequence
  Description of Artificial Sequence: Synthetic peptide
  Seed: PRMCSLMQGSTLPRRSG
PRMYSLVQASTTPRRSG

SEQ ID NO: 117956 - protein, 17 aa, Artificial Sequence
  Description of Artificial Sequence: Synthetic peptide
  Seed: PRMCSLMQGSTLPRRSG
PRMYSLVQASTVPRRSG

SEQ ID NO: 117957 - protein, 17 aa, Artificial Sequence
  Description of Artificial Sequence: Synthetic peptide
  Seed: PRMCSLMQGSTLPRRSG
PRMYSLVQGSTAPRRSG

SEQ ID NO: 117958 - protein, 17 aa, Artificial Sequence
  Description of Artificial Sequence: Synthetic peptide
  Seed: PRMCSLMQGSTLPRRSG
PRMYSLVQGSTIPRRSG

SEQ ID NO: 117959 - protein, 17 aa, Artificial Sequence
  Description of Artificial Sequence: Synthetic peptide
  Seed: PRMCSLMQGSTLPRRSG
PRMYSLVQGSTLPRRSG

SEQ ID NO: 117960 - protein, 17 aa, Artificial Sequence
  Description of Artificial Sequence: Synthetic peptide
  Seed: PRMCSLMQGSTLPRRSG
PRMYSLVQGSTMPRRSG

SEQ ID NO: 117961 - protein, 17 aa, Artificial Sequence
  Description of Artificial Sequence: Synthetic peptide
  Seed: PRMCSLMQGSTLPRRSG
PRMYSLVQGSTSPRRSG

SEQ ID NO: 117962 - protein, 17 aa, Artificial Sequence
  Description of Artificial Sequence: Synthetic peptide
  Seed: PRMCSLMQGSTLPRRSG
PRMYSLVQGSTTPRRSG

SEQ ID NO: 117963 - protein, 17 aa, Artificial Sequence
  Description of Artificial Sequence: Synthetic peptide
  Seed: PRMCSLMQGSTLPRRSG
PRMYSLVQGSTVPRRSG

SEQ ID NO: 117964 - protein, 17 aa, Artificial Sequence
  Description of Artificial Sequence: Synthetic peptide
  Seed: PRMCSLMQGSTLPRRSG
PRMYSLVQISTAPRRSG

SEQ ID NO: 117965 - protein, 17 aa, Artificial Sequence
  Description of Artificial Sequence: Synthetic peptide
  Seed: PRMCSLMQGSTLPRRSG
PRMYSLVQISTNPRRSG

SEQ ID NO: 117966 - protein, 17 aa, Artificial Sequence
  Description of Artificial Sequence: Synthetic peptide
  Seed: PRMCSLMQGSTLPRRSG
PRMYSLVQISTSPRRSG

SEQ ID NO: 117967 - protein, 17 aa, Artificial Sequence
  Description of Artificial Sequence: Synthetic peptide
  Seed: PRMCSLMQGSTLPRRSG
PRMYSLVQISTTPRRSG

SEQ ID NO: 117968 - protein, 17 aa, Artificial Sequence
  Description of Artificial Sequence: Synthetic peptide
  Seed: PRMCSLMQGSTLPRRSG
PRMYSLVQISTVPRRSG

SEQ ID NO: 117969 - protein, 17 aa, Artificial Sequence
  Description of Artificial Sequence: Synthetic peptide
  Seed: PRMCSLMQGSTLPRRSG
PRMYSLVQMSTAPRRSG

SEQ ID NO: 117970 - protein, 17 aa, Artificial Sequence
  Description of Artificial Sequence: Synthetic peptide
  Seed: PRMCSLMQGSTLPRRSG
PRMYSLVQNSTAPRRSG

SEQ ID NO: 117971 - protein, 17 aa, Artificial Sequence
  Description of Artificial Sequence: Synthetic peptide
  Seed: PRMCSLMQGSTLPRRSG
PRMYSLVQNSTLPRRSG

SEQ ID NO: 117972 - protein, 17 aa, Artificial Sequence
  Description of Artificial Sequence: Synthetic peptide
  Seed: PRMCSLMQGSTLPRRSG
PRMYSLVQNSTVPRRSG

SEQ ID NO: 117973 - protein, 17 aa, Artificial Sequence
  Description of Artificial Sequence: Synthetic peptide
  Seed: PRMCSLMQGSTLPRRSG
PRMYSLVQPSTAPRRSG

SEQ ID NO: 117974 - protein, 17 aa, Artificial Sequence
  Description of Artificial Sequence: Synthetic peptide
  Seed: PRMCSLMQGSTLPRRSG
PRMYSLVQPSTIPRRSG

SEQ ID NO: 117975 - protein, 17 aa, Artificial Sequence
  Description of Artificial Sequence: Synthetic peptide
  Seed: PRMCSLMQGSTLPRRSG
PRMYSLVQPSTLPRRSG

SEQ ID NO: 117976 - protein, 17 aa, Artificial Sequence
  Description of Artificial Sequence: Synthetic peptide
  Seed: PRMCSLMQGSTLPRRSG
PRMYSLVQPSTMPRRSG

SEQ ID NO: 117977 - protein, 17 aa, Artificial Sequence
  Description of Artificial Sequence: Synthetic peptide
  Seed: PRMCSLMQGSTLPRRSG
PRMYSLVQPSTNPRRSG

SEQ ID NO: 117978 - protein, 17 aa, Artificial Sequence
  Description of Artificial Sequence: Synthetic peptide
  Seed: PRMCSLMQGSTLPRRSG
PRMYSLVQPSTSPRRSG

SEQ ID NO: 117979 - protein, 17 aa, Artificial Sequence
  Description of Artificial Sequence: Synthetic peptide
  Seed: PRMCSLMQGSTLPRRSG
PRMYSLVQPSTTPRRSG

SEQ ID NO: 117980 - protein, 17 aa, Artificial Sequence
  Description of Artificial Sequence: Synthetic peptide
  Seed: PRMCSLMQGSTLPRRSG
PRMYSLVQPSTVPRRSG

SEQ ID NO: 117981 - protein, 17 aa, Artificial Sequence
  Description of Artificial Sequence: Synthetic peptide
  Seed: PRMCSLMQGSTLPRRSG
PRMYSLVQSSTAPRRSG

SEQ ID NO: 117982 - protein, 17 aa, Artificial Sequence
  Description of Artificial Sequence: Synthetic peptide
  Seed: PRMCSLMQGSTLPRRSG
PRMYSLVQSSTIPRRSG

SEQ ID NO: 117983 - protein, 17 aa, Artificial Sequence
  Description of Artificial Sequence: Synthetic peptide
  Seed: PRMCSLMQGSTLPRRSG
PRMYSLVQSSTLPRRSG

SEQ ID NO: 117984 - protein, 17 aa, Artificial Sequence
  Description of Artificial Sequence: Synthetic peptide
  Seed: PRMCSLMQGSTLPRRSG
PRMYSLVQSSTMPRRSG

SEQ ID NO: 117985 - protein, 17 aa, Artificial Sequence
  Description of Artificial Sequence: Synthetic peptide
  Seed: PRMCSLMQGSTLPRRSG
PRMYSLVQSSTNPRRSG

SEQ ID NO: 117986 - protein, 17 aa, Artificial Sequence
  Description of Artificial Sequence: Synthetic peptide
  Seed: PRMCSLMQGSTLPRRSG
PRMYSLVQSSTSPRRSG

SEQ ID NO: 117987 - protein, 17 aa, Artificial Sequence
  Description of Artificial Sequence: Synthetic peptide
  Seed: PRMCSLMQGSTLPRRSG
PRMYSLVQSSTTPRRSG

SEQ ID NO: 117988 - protein, 17 aa, Artificial Sequence
  Description of Artificial Sequence: Synthetic peptide
  Seed: PRMCSLMQGSTLPRRSG
PRMYSLVQSSTVPRRSG

SEQ ID NO: 117989 - protein, 17 aa, Artificial Sequence
  Description of Artificial Sequence: Synthetic peptide
  Seed: PRMCSLMQGSTLPRRSG
PRMYSLVQTSTAPRRSG

SEQ ID NO: 117990 - protein, 17 aa, Artificial Sequence
  Description of Artificial Sequence: Synthetic peptide
  Seed: PRMCSLMQGSTLPRRSG
PRMYSLVQTSTIPRRSG

SEQ ID NO: 117991 - protein, 17 aa, Artificial Sequence
  Description of Artificial Sequence: Synthetic peptide
  Seed: PRMCSLMQGSTLPRRSG
PRMYSLVQTSTLPRRSG

SEQ ID NO: 117992 - protein, 17 aa, Artificial Sequence
  Description of Artificial Sequence: Synthetic peptide
  Seed: PRMCSLMQGSTLPRRSG
PRMYSLVQTSTMPRRSG

SEQ ID NO: 117993 - protein, 17 aa, Artificial Sequence
  Description of Artificial Sequence: Synthetic peptide
  Seed: PRMCSLMQGSTLPRRSG
PRMYSLVQTSTNPRRSG

SEQ ID NO: 117994 - protein, 17 aa, Artificial Sequence
  Description of Artificial Sequence: Synthetic peptide
  Seed: PRMCSLMQGSTLPRRSG
PRMYSLVQTSTSPRRSG

SEQ ID NO: 117995 - protein, 17 aa, Artificial Sequence
  Description of Artificial Sequence: Synthetic peptide
  Seed: PRMCSLMQGSTLPRRSG
PRMYSLVQTSTTPRRSG

SEQ ID NO: 117996 - protein, 17 aa, Artificial Sequence
  Description of Artificial Sequence: Synthetic peptide
  Seed: PRMCSLMQGSTLPRRSG
PRMYSLVQTSTVPRRSG

SEQ ID NO: 117997 - protein, 17 aa, Artificial Sequence
  Description of Artificial Sequence: Synthetic peptide
  Seed: PRMCSLMQGSTLPRRSG
PRMYSLVQVSTAPRRSG

SEQ ID NO: 117998 - protein, 17 aa, Artificial Sequence
  Description of Artificial Sequence: Synthetic peptide
  Seed: PRMCSLMQGSTLPRRSG
PRMYSLVQVSTIPRRSG

SEQ ID NO: 117999 - protein, 17 aa, Artificial Sequence
  Description of Artificial Sequence: Synthetic peptide
  Seed: PRMCSLMQGSTLPRRSG
PRMYSLVQVSTLPRRSG

SEQ ID NO: 118000 - protein, 17 aa, Artificial Sequence
  Description of Artificial Sequence: Synthetic peptide
  Seed: PRMCSLMQGSTLPRRSG
PRMYSLVQVSTMPRRSG

SEQ ID NO: 118001 - protein, 17 aa, Artificial Sequence
  Description of Artificial Sequence: Synthetic peptide
  Seed: PRMCSLMQGSTLPRRSG
PRMYSLVQVSTNPRRSG

SEQ ID NO: 118002 - protein, 17 aa, Artificial Sequence
  Description of Artificial Sequence: Synthetic peptide
  Seed: PRMCSLMQGSTLPRRSG
PRMYSLVQVSTSPRRSG

SEQ ID NO: 118003 - protein, 17 aa, Artificial Sequence
  Description of Artificial Sequence: Synthetic peptide
  Seed: PRMCSLMQGSTLPRRSG
PRMYSLVQVSTTPRRSG

SEQ ID NO: 118004 - protein, 17 aa, Artificial Sequence
  Description of Artificial Sequence: Synthetic peptide
  Seed: PRMCSLMQGSTLPRRSG
PRMYSLVQVSTVPRRSG

SEQ ID NO: 118005 - protein, 17 aa, Artificial Sequence
  Description of Artificial Sequence: Synthetic peptide
  Seed: PRMCSLMQGSTLPRRSG
PRMCSIMQISRLPRRSG

SEQ ID NO: 118006 - protein, 18 aa, Artificial Sequence
  Description of Artificial Sequence: Synthetic peptide
  Seed: PRMCSLMQGSTLPRRSGA
PRMFSLAQASTIPRRSGA

SEQ ID NO: 118007 - protein, 18 aa, Artificial Sequence
  Description of Artificial Sequence: Synthetic peptide
  Seed: PRMCSLMQGSTLPRRSGA
PRMFSLAQASTLPRRSGA

SEQ ID NO: 118008 - protein, 18 aa, Artificial Sequence
  Description of Artificial Sequence: Synthetic peptide
  Seed: PRMCSLMQGSTLPRRSGA
PRMFSLAQASTVPRRSGA

SEQ ID NO: 118009 - protein, 18 aa, Artificial Sequence
  Description of Artificial Sequence: Synthetic peptide
  Seed: PRMCSLMQGSTLPRRSGA
PRMFSLAQGSTLPRRSGA

SEQ ID NO: 118010 - protein, 18 aa, Artificial Sequence
  Description of Artificial Sequence: Synthetic peptide
  Seed: PRMCSLMQGSTLPRRSGA
PRMFSLIQASTAPRRSGA

SEQ ID NO: 118011 - protein, 18 aa, Artificial Sequence
  Description of Artificial Sequence: Synthetic peptide
  Seed: PRMCSLMQGSTLPRRSGA
PRMFSLIQASTIPRRSGA

SEQ ID NO: 118012 - protein, 18 aa, Artificial Sequence
  Description of Artificial Sequence: Synthetic peptide
  Seed: PRMCSLMQGSTLPRRSGA
PRMFSLIQASTLPRRSGA

SEQ ID NO: 118013 - protein, 18 aa, Artificial Sequence
  Description of Artificial Sequence: Synthetic peptide
  Seed: PRMCSLMQGSTLPRRSGA
PRMFSLIQASTVPRRSGA

SEQ ID NO: 118014 - protein, 18 aa, Artificial Sequence
  Description of Artificial Sequence: Synthetic peptide
  Seed: PRMCSLMQGSTLPRRSGA
PRMFSLIQGSTAPRRSGA

SEQ ID NO: 118015 - protein, 18 aa, Artificial Sequence
  Description of Artificial Sequence: Synthetic peptide
  Seed: PRMCSLMQGSTLPRRSGA
PRMFSLIQGSTIPRRSGA

SEQ ID NO: 118016 - protein, 18 aa, Artificial Sequence
  Description of Artificial Sequence: Synthetic peptide
  Seed: PRMCSLMQGSTLPRRSGA
PRMFSLIQGSTLPRRSGA

SEQ ID NO: 118017 - protein, 18 aa, Artificial Sequence
  Description of Artificial Sequence: Synthetic peptide
  Seed: PRMCSLMQGSTLPRRSGA
PRMFSLIQGSTVPRRSGA

SEQ ID NO: 118018 - protein, 18 aa, Artificial Sequence
  Description of Artificial Sequence: Synthetic peptide
  Seed: PRMCSLMQGSTLPRRSGA
PRMFSLIQSSTAPRRSGA

SEQ ID NO: 118019 - protein, 18 aa, Artificial Sequence
  Description of Artificial Sequence: Synthetic peptide
  Seed: PRMCSLMQGSTLPRRSGA
PRMFSLIQSSTIPRRSGA

SEQ ID NO: 118020 - protein, 18 aa, Artificial Sequence
  Description of Artificial Sequence: Synthetic peptide
  Seed: PRMCSLMQGSTLPRRSGA
PRMFSLIQSSTLPRRSGA

SEQ ID NO: 118021 - protein, 18 aa, Artificial Sequence
  Description of Artificial Sequence: Synthetic peptide
  Seed: PRMCSLMQGSTLPRRSGA
PRMFSLIQSSTVPRRSGA

SEQ ID NO: 118022 - protein, 18 aa, Artificial Sequence
  Description of Artificial Sequence: Synthetic peptide
  Seed: PRMCSLMQGSTLPRRSGA
PRMFSLLQASTAPRRSGA

SEQ ID NO: 118023 - protein, 18 aa, Artificial Sequence
  Description of Artificial Sequence: Synthetic peptide
  Seed: PRMCSLMQGSTLPRRSGA
PRMFSLLQASTIPRRSGA

SEQ ID NO: 118024 - protein, 18 aa, Artificial Sequence
  Description of Artificial Sequence: Synthetic peptide
  Seed: PRMCSLMQGSTLPRRSGA
PRMFSLLQASTLPRRSGA

SEQ ID NO: 118025 - protein, 18 aa, Artificial Sequence
  Description of Artificial Sequence: Synthetic peptide
  Seed: PRMCSLMQGSTLPRRSGA
PRMFSLLQASTMPRRSGA

SEQ ID NO: 118026 - protein, 18 aa, Artificial Sequence
  Description of Artificial Sequence: Synthetic peptide
  Seed: PRMCSLMQGSTLPRRSGA
PRMFSLLQASTSPRRSGA

SEQ ID NO: 118027 - protein, 18 aa, Artificial Sequence
  Description of Artificial Sequence: Synthetic peptide
  Seed: PRMCSLMQGSTLPRRSGA
PRMFSLLQASTTPRRSGA

SEQ ID NO: 118028 - protein, 18 aa, Artificial Sequence
  Description of Artificial Sequence: Synthetic peptide
  Seed: PRMCSLMQGSTLPRRSGA
PRMFSLLQASTVPRRSGA

SEQ ID NO: 118029 - protein, 18 aa, Artificial Sequence
  Description of Artificial Sequence: Synthetic peptide
  Seed: PRMCSLMQGSTLPRRSGA
PRMFSLLQGSTAPRRSGA

SEQ ID NO: 118030 - protein, 18 aa, Artificial Sequence
  Description of Artificial Sequence: Synthetic peptide
  Seed: PRMCSLMQGSTLPRRSGA
PRMFSLLQGSTIPRRSGA

SEQ ID NO: 118031 - protein, 18 aa, Artificial Sequence
  Description of Artificial Sequence: Synthetic peptide
  Seed: PRMCSLMQGSTLPRRSGA
PRMFSLLQGSTLPRRSGA

SEQ ID NO: 118032 - protein, 18 aa, Artificial Sequence
  Description of Artificial Sequence: Synthetic peptide
  Seed: PRMCSLMQGSTLPRRSGA
PRMFSLLQGSTMPRRSGA

SEQ ID NO: 118033 - protein, 18 aa, Artificial Sequence
  Description of Artificial Sequence: Synthetic peptide
  Seed: PRMCSLMQGSTLPRRSGA
PRMFSLLQGSTSPRRSGA

SEQ ID NO: 118034 - protein, 18 aa, Artificial Sequence
  Description of Artificial Sequence: Synthetic peptide
  Seed: PRMCSLMQGSTLPRRSGA
PRMFSLLQGSTTPRRSGA

SEQ ID NO: 118035 - protein, 18 aa, Artificial Sequence
  Description of Artificial Sequence: Synthetic peptide
  Seed: PRMCSLMQGSTLPRRSGA
PRMFSLLQGSTVPRRSGA

SEQ ID NO: 118036 - protein, 18 aa, Artificial Sequence
  Description of Artificial Sequence: Synthetic peptide
  Seed: PRMCSLMQGSTLPRRSGA
PRMFSLLQNSTIPRRSGA

SEQ ID NO: 118037 - protein, 18 aa, Artificial Sequence
  Description of Artificial Sequence: Synthetic peptide
  Seed: PRMCSLMQGSTLPRRSGA
PRMFSLLQNSTLPRRSGA

SEQ ID NO: 118038 - protein, 18 aa, Artificial Sequence
  Description of Artificial Sequence: Synthetic peptide
  Seed: PRMCSLMQGSTLPRRSGA
PRMFSLLQNSTVPRRSGA

SEQ ID NO: 118039 - protein, 18 aa, Artificial Sequence
  Description of Artificial Sequence: Synthetic peptide
  Seed: PRMCSLMQGSTLPRRSGA
PRMFSLLQPSTAPRRSGA

SEQ ID NO: 118040 - protein, 18 aa, Artificial Sequence
  Description of Artificial Sequence: Synthetic peptide
  Seed: PRMCSLMQGSTLPRRSGA
PRMFSLLQPSTIPRRSGA

SEQ ID NO: 118041 - protein, 18 aa, Artificial Sequence
  Description of Artificial Sequence: Synthetic peptide
  Seed: PRMCSLMQGSTLPRRSGA
PRMFSLLQPSTLPRRSGA

SEQ ID NO: 118042 - protein, 18 aa, Artificial Sequence
  Description of Artificial Sequence: Synthetic peptide
  Seed: PRMCSLMQGSTLPRRSGA
PRMFSLLQPSTVPRRSGA

SEQ ID NO: 118043 - protein, 18 aa, Artificial Sequence
  Description of Artificial Sequence: Synthetic peptide
  Seed: PRMCSLMQGSTLPRRSGA
PRMFSLLQSSTAPRRSGA

SEQ ID NO: 118044 - protein, 18 aa, Artificial Sequence
  Description of Artificial Sequence: Synthetic peptide
  Seed: PRMCSLMQGSTLPRRSGA
PRMFSLLQSSTIPRRSGA

SEQ ID NO: 118045 - protein, 18 aa, Artificial Sequence
  Description of Artificial Sequence: Synthetic peptide
  Seed: PRMCSLMQGSTLPRRSGA
PRMFSLLQSSTLPRRSGA

SEQ ID NO: 118046 - protein, 18 aa, Artificial Sequence
  Description of Artificial Sequence: Synthetic peptide
  Seed: PRMCSLMQGSTLPRRSGA
PRMFSLLQSSTMPRRSGA

SEQ ID NO: 118047 - protein, 18 aa, Artificial Sequence
  Description of Artificial Sequence: Synthetic peptide
  Seed: PRMCSLMQGSTLPRRSGA
PRMFSLLQSSTTPRRSGA

SEQ ID NO: 118048 - protein, 18 aa, Artificial Sequence
  Description of Artificial Sequence: Synthetic peptide
  Seed: PRMCSLMQGSTLPRRSGA
PRMFSLLQSSTVPRRSGA

SEQ ID NO: 118049 - protein, 18 aa, Artificial Sequence
  Description of Artificial Sequence: Synthetic peptide
  Seed: PRMCSLMQGSTLPRRSGA
PRMFSLLQTSTAPRRSGA

SEQ ID NO: 118050 - protein, 18 aa, Artificial Sequence
  Description of Artificial Sequence: Synthetic peptide
  Seed: PRMCSLMQGSTLPRRSGA
PRMFSLLQTSTIPRRSGA

SEQ ID NO: 118051 - protein, 18 aa, Artificial Sequence
  Description of Artificial Sequence: Synthetic peptide
  Seed: PRMCSLMQGSTLPRRSGA
PRMFSLLQTSTLPRRSGA

SEQ ID NO: 118052 - protein, 18 aa, Artificial Sequence
  Description of Artificial Sequence: Synthetic peptide
  Seed: PRMCSLMQGSTLPRRSGA
PRMFSLLQTSTVPRRSGA

SEQ ID NO: 118053 - protein, 18 aa, Artificial Sequence
  Description of Artificial Sequence: Synthetic peptide
  Seed: PRMCSLMQGSTLPRRSGA
PRMFSLMQASTAPRRSGA

SEQ ID NO: 118054 - protein, 18 aa, Artificial Sequence
  Description of Artificial Sequence: Synthetic peptide
  Seed: PRMCSLMQGSTLPRRSGA
PRMFSLMQASTIPRRSGA

SEQ ID NO: 118055 - protein, 18 aa, Artificial Sequence
  Description of Artificial Sequence: Synthetic peptide
  Seed: PRMCSLMQGSTLPRRSGA
PRMFSLMQASTLPRRSGA

SEQ ID NO: 118056 - protein, 18 aa, Artificial Sequence
  Description of Artificial Sequence: Synthetic peptide
  Seed: PRMCSLMQGSTLPRRSGA
PRMFSLMQASTMPRRSGA

SEQ ID NO: 118057 - protein, 18 aa, Artificial Sequence
  Description of Artificial Sequence: Synthetic peptide
  Seed: PRMCSLMQGSTLPRRSGA
PRMFSLMQASTSPRRSGA

SEQ ID NO: 118058 - protein, 18 aa, Artificial Sequence
  Description of Artificial Sequence: Synthetic peptide
  Seed: PRMCSLMQGSTLPRRSGA
PRMFSLMQASTTPRRSGA

SEQ ID NO: 118059 - protein, 18 aa, Artificial Sequence
  Description of Artificial Sequence: Synthetic peptide
  Seed: PRMCSLMQGSTLPRRSGA
PRMFSLMQASTVPRRSGA

SEQ ID NO: 118060 - protein, 18 aa, Artificial Sequence
  Description of Artificial Sequence: Synthetic peptide
  Seed: PRMCSLMQGSTLPRRSGA
PRMFSLMQGSTAPRRSGA

SEQ ID NO: 118061 - protein, 18 aa, Artificial Sequence
  Description of Artificial Sequence: Synthetic peptide
  Seed: PRMCSLMQGSTLPRRSGA
PRMFSLMQGSTIPRRSGA

SEQ ID NO: 118062 - protein, 18 aa, Artificial Sequence
  Description of Artificial Sequence: Synthetic peptide
  Seed: PRMCSLMQGSTLPRRSGA
PRMFSLMQGSTLPRRSGA

SEQ ID NO: 118063 - protein, 18 aa, Artificial Sequence
  Description of Artificial Sequence: Synthetic peptide
  Seed: PRMCSLMQGSTLPRRSGA
PRMFSLMQGSTMPRRSGA

SEQ ID NO: 118064 - protein, 18 aa, Artificial Sequence
  Description of Artificial Sequence: Synthetic peptide
  Seed: PRMCSLMQGSTLPRRSGA
PRMFSLMQGSTTPRRSGA

SEQ ID NO: 118065 - protein, 18 aa, Artificial Sequence
  Description of Artificial Sequence: Synthetic peptide
  Seed: PRMCSLMQGSTLPRRSGA
PRMFSLMQGSTVPRRSGA

SEQ ID NO: 118066 - protein, 18 aa, Artificial Sequence
  Description of Artificial Sequence: Synthetic peptide
  Seed: PRMCSLMQGSTLPRRSGA
PRMFSLMQNSTLPRRSGA

SEQ ID NO: 118067 - protein, 18 aa, Artificial Sequence
  Description of Artificial Sequence: Synthetic peptide
  Seed: PRMCSLMQGSTLPRRSGA
PRMFSLMQNSTVPRRSGA

SEQ ID NO: 118068 - protein, 18 aa, Artificial Sequence
  Description of Artificial Sequence: Synthetic peptide
  Seed: PRMCSLMQGSTLPRRSGA
PRMFSLMQPSTAPRRSGA

SEQ ID NO: 118069 - protein, 18 aa, Artificial Sequence
  Description of Artificial Sequence: Synthetic peptide
  Seed: PRMCSLMQGSTLPRRSGA
PRMFSLMQPSTIPRRSGA

SEQ ID NO: 118070 - protein, 18 aa, Artificial Sequence
  Description of Artificial Sequence: Synthetic peptide
  Seed: PRMCSLMQGSTLPRRSGA
PRMFSLMQPSTLPRRSGA

SEQ ID NO: 118071 - protein, 18 aa, Artificial Sequence
  Description of Artificial Sequence: Synthetic peptide
  Seed: PRMCSLMQGSTLPRRSGA
PRMFSLMQPSTVPRRSGA

SEQ ID NO: 118072 - protein, 18 aa, Artificial Sequence
  Description of Artificial Sequence: Synthetic peptide
  Seed: PRMCSLMQGSTLPRRSGA
PRMFSLMQSSTAPRRSGA

SEQ ID NO: 118073 - protein, 18 aa, Artificial Sequence
  Description of Artificial Sequence: Synthetic peptide
  Seed: PRMCSLMQGSTLPRRSGA
PRMFSLMQSSTIPRRSGA

SEQ ID NO: 118074 - protein, 18 aa, Artificial Sequence
  Description of Artificial Sequence: Synthetic peptide
  Seed: PRMCSLMQGSTLPRRSGA
PRMFSLMQSSTLPRRSGA

SEQ ID NO: 118075 - protein, 18 aa, Artificial Sequence
  Description of Artificial Sequence: Synthetic peptide
  Seed: PRMCSLMQGSTLPRRSGA
PRMFSLMQSSTMPRRSGA

SEQ ID NO: 118076 - protein, 18 aa, Artificial Sequence
  Description of Artificial Sequence: Synthetic peptide
  Seed: PRMCSLMQGSTLPRRSGA
PRMFSLMQSSTTPRRSGA

SEQ ID NO: 118077 - protein, 18 aa, Artificial Sequence
  Description of Artificial Sequence: Synthetic peptide
  Seed: PRMCSLMQGSTLPRRSGA
PRMFSLMQSSTVPRRSGA

SEQ ID NO: 118078 - protein, 18 aa, Artificial Sequence
  Description of Artificial Sequence: Synthetic peptide
  Seed: PRMCSLMQGSTLPRRSGA
PRMFSLMQTSTIPRRSGA

SEQ ID NO: 118079 - protein, 18 aa, Artificial Sequence
  Description of Artificial Sequence: Synthetic peptide
  Seed: PRMCSLMQGSTLPRRSGA
PRMFSLMQTSTLPRRSGA

SEQ ID NO: 118080 - protein, 18 aa, Artificial Sequence
  Description of Artificial Sequence: Synthetic peptide
  Seed: PRMCSLMQGSTLPRRSGA
PRMFSLMQTSTVPRRSGA

SEQ ID NO: 118081 - protein, 18 aa, Artificial Sequence
  Description of Artificial Sequence: Synthetic peptide
  Seed: PRMCSLMQGSTLPRRSGA
PRMFSLQQASTLPRRSGA

SEQ ID NO: 118082 - protein, 18 aa, Artificial Sequence
  Description of Artificial Sequence: Synthetic peptide
  Seed: PRMCSLMQGSTLPRRSGA
PRMFSLVQASTLPRRSGA

SEQ ID NO: 118083 - protein, 18 aa, Artificial Sequence
  Description of Artificial Sequence: Synthetic peptide
  Seed: PRMCSLMQGSTLPRRSGA
PRMISLLQASTLPRRSGA

SEQ ID NO: 118084 - protein, 18 aa, Artificial Sequence
  Description of Artificial Sequence: Synthetic peptide
  Seed: PRMCSLMQGSTLPRRSGA
PRMISLMQASTLPRRSGA

SEQ ID NO: 118085 - protein, 18 aa, Artificial Sequence
  Description of Artificial Sequence: Synthetic peptide
  Seed: PRMCSLMQGSTLPRRSGA
PRMWSLLQASTLPRRSGA

SEQ ID NO: 118086 - protein, 18 aa, Artificial Sequence
  Description of Artificial Sequence: Synthetic peptide
  Seed: PRMCSLMQGSTLPRRSGA
PRMWSLLQASTVPRRSGA

SEQ ID NO: 118087 - protein, 18 aa, Artificial Sequence
  Description of Artificial Sequence: Synthetic peptide
  Seed: PRMCSLMQGSTLPRRSGA
PRMWSLLQGSTAPRRSGA

SEQ ID NO: 118088 - protein, 18 aa, Artificial Sequence
  Description of Artificial Sequence: Synthetic peptide
  Seed: PRMCSLMQGSTLPRRSGA
PRMWSLLQGSTLPRRSGA

SEQ ID NO: 118089 - protein, 18 aa, Artificial Sequence
  Description of Artificial Sequence: Synthetic peptide
  Seed: PRMCSLMQGSTLPRRSGA
PRMWSLLQGSTVPRRSGA

SEQ ID NO: 118090 - protein, 18 aa, Artificial Sequence
  Description of Artificial Sequence: Synthetic peptide
  Seed: PRMCSLMQGSTLPRRSGA
PRMWSLMQASTLPRRSGA

SEQ ID NO: 118091 - protein, 18 aa, Artificial Sequence
  Description of Artificial Sequence: Synthetic peptide
  Seed: PRMCSLMQGSTLPRRSGA
PRMWSLMQASTVPRRSGA

SEQ ID NO: 118092 - protein, 18 aa, Artificial Sequence
  Description of Artificial Sequence: Synthetic peptide
  Seed: PRMCSLMQGSTLPRRSGA
PRMWSLMQGSTLPRRSGA

SEQ ID NO: 118093 - protein, 18 aa, Artificial Sequence
  Description of Artificial Sequence: Synthetic peptide
  Seed: PRMCSLMQGSTLPRRSGA
PRMWSLMQGSTVPRRSGA

SEQ ID NO: 118094 - protein, 18 aa, Artificial Sequence
  Description of Artificial Sequence: Synthetic peptide
  Seed: PRMCSLMQGSTLPRRSGA
PRMYSLIQASTLPRRSGA

SEQ ID NO: 118095 - protein, 18 aa, Artificial Sequence
  Description of Artificial Sequence: Synthetic peptide
  Seed: PRMCSLMQGSTLPRRSGA
PRMYSLIQASTVPRRSGA

SEQ ID NO: 118096 - protein, 18 aa, Artificial Sequence
  Description of Artificial Sequence: Synthetic peptide
  Seed: PRMCSLMQGSTLPRRSGA
PRMYSLIQGSTLPRRSGA

SEQ ID NO: 118097 - protein, 18 aa, Artificial Sequence
  Description of Artificial Sequence: Synthetic peptide
  Seed: PRMCSLMQGSTLPRRSGA
PRMYSLLQASTAPRRSGA

SEQ ID NO: 118098 - protein, 18 aa, Artificial Sequence
  Description of Artificial Sequence: Synthetic peptide
  Seed: PRMCSLMQGSTLPRRSGA
PRMYSLLQASTIPRRSGA

SEQ ID NO: 118099 - protein, 18 aa, Artificial Sequence
  Description of Artificial Sequence: Synthetic peptide
  Seed: PRMCSLMQGSTLPRRSGA
PRMYSLLQASTLPRRSGA

SEQ ID NO: 118100 - protein, 18 aa, Artificial Sequence
  Description of Artificial Sequence: Synthetic peptide
  Seed: PRMCSLMQGSTLPRRSGA
PRMYSLLQASTVPRRSGA

SEQ ID NO: 118101 - protein, 18 aa, Artificial Sequence
  Description of Artificial Sequence: Synthetic peptide
  Seed: PRMCSLMQGSTLPRRSGA
PRMYSLLQGSTAPRRSGA

SEQ ID NO: 118102 - protein, 18 aa, Artificial Sequence
  Description of Artificial Sequence: Synthetic peptide
  Seed: PRMCSLMQGSTLPRRSGA
PRMYSLLQGSTIPRRSGA

SEQ ID NO: 118103 - protein, 18 aa, Artificial Sequence
  Description of Artificial Sequence: Synthetic peptide
  Seed: PRMCSLMQGSTLPRRSGA
PRMYSLLQGSTLPRRSGA

SEQ ID NO: 118104 - protein, 18 aa, Artificial Sequence
  Description of Artificial Sequence: Synthetic peptide
  Seed: PRMCSLMQGSTLPRRSGA
PRMYSLLQGSTVPRRSGA

SEQ ID NO: 118105 - protein, 18 aa, Artificial Sequence
  Description of Artificial Sequence: Synthetic peptide
  Seed: PRMCSLMQGSTLPRRSGA
PRMYSLLQPSTIPRRSGA

SEQ ID NO: 118106 - protein, 18 aa, Artificial Sequence
  Description of Artificial Sequence: Synthetic peptide
  Seed: PRMCSLMQGSTLPRRSGA
PRMYSLLQPSTLPRRSGA

SEQ ID NO: 118107 - protein, 18 aa, Artificial Sequence
  Description of Artificial Sequence: Synthetic peptide
  Seed: PRMCSLMQGSTLPRRSGA
PRMYSLLQPSTVPRRSGA

SEQ ID NO: 118108 - protein, 18 aa, Artificial Sequence
  Description of Artificial Sequence: Synthetic peptide
  Seed: PRMCSLMQGSTLPRRSGA
PRMYSLLQSSTAPRRSGA

SEQ ID NO: 118109 - protein, 18 aa, Artificial Sequence
  Description of Artificial Sequence: Synthetic peptide
  Seed: PRMCSLMQGSTLPRRSGA
PRMYSLLQSSTIPRRSGA

SEQ ID NO: 118110 - protein, 18 aa, Artificial Sequence
  Description of Artificial Sequence: Synthetic peptide
  Seed: PRMCSLMQGSTLPRRSGA
PRMYSLLQSSTLPRRSGA

SEQ ID NO: 118111 - protein, 18 aa, Artificial Sequence
  Description of Artificial Sequence: Synthetic peptide
  Seed: PRMCSLMQGSTLPRRSGA
PRMYSLLQSSTVPRRSGA

SEQ ID NO: 118112 - protein, 18 aa, Artificial Sequence
  Description of Artificial Sequence: Synthetic peptide
  Seed: PRMCSLMQGSTLPRRSGA
PRMYSLMQASTAPRRSGA

SEQ ID NO: 118113 - protein, 18 aa, Artificial Sequence
  Description of Artificial Sequence: Synthetic peptide
  Seed: PRMCSLMQGSTLPRRSGA
PRMYSLMQASTIPRRSGA

SEQ ID NO: 118114 - protein, 18 aa, Artificial Sequence
  Description of Artificial Sequence: Synthetic peptide
  Seed: PRMCSLMQGSTLPRRSGA
PRMYSLMQASTLPRRSGA

SEQ ID NO: 118115 - protein, 18 aa, Artificial Sequence
  Description of Artificial Sequence: Synthetic peptide
  Seed: PRMCSLMQGSTLPRRSGA
PRMYSLMQASTVPRRSGA

SEQ ID NO: 118116 - protein, 18 aa, Artificial Sequence
  Description of Artificial Sequence: Synthetic peptide
  Seed: PRMCSLMQGSTLPRRSGA
PRMYSLMQGSTAPRRSGA

SEQ ID NO: 118117 - protein, 18 aa, Artificial Sequence
  Description of Artificial Sequence: Synthetic peptide
  Seed: PRMCSLMQGSTLPRRSGA
PRMYSLMQGSTIPRRSGA

SEQ ID NO: 118118 - protein, 18 aa, Artificial Sequence
  Description of Artificial Sequence: Synthetic peptide
  Seed: PRMCSLMQGSTLPRRSGA
PRMYSLMQGSTLPRRSGA

SEQ ID NO: 118119 - protein, 18 aa, Artificial Sequence
  Description of Artificial Sequence: Synthetic peptide
  Seed: PRMCSLMQGSTLPRRSGA
PRMYSLMQGSTVPRRSGA

SEQ ID NO: 118120 - protein, 18 aa, Artificial Sequence
  Description of Artificial Sequence: Synthetic peptide
  Seed: PRMCSLMQGSTLPRRSGA
PRMYSLMQPSTLPRRSGA

SEQ ID NO: 118121 - protein, 18 aa, Artificial Sequence
  Description of Artificial Sequence: Synthetic peptide
  Seed: PRMCSLMQGSTLPRRSGA
PRMYSLMQPSTVPRRSGA

SEQ ID NO: 118122 - protein, 18 aa, Artificial Sequence
  Description of Artificial Sequence: Synthetic peptide
  Seed: PRMCSLMQGSTLPRRSGA
PRMYSLMQSSTAPRRSGA

SEQ ID NO: 118123 - protein, 18 aa, Artificial Sequence
  Description of Artificial Sequence: Synthetic peptide
  Seed: PRMCSLMQGSTLPRRSGA
PRMYSLMQSSTIPRRSGA

SEQ ID NO: 118124 - protein, 18 aa, Artificial Sequence
  Description of Artificial Sequence: Synthetic peptide
  Seed: PRMCSLMQGSTLPRRSGA
PRMYSLMQSSTLPRRSGA

SEQ ID NO: 118125 - protein, 18 aa, Artificial Sequence
  Description of Artificial Sequence: Synthetic peptide
  Seed: PRMCSLMQGSTLPRRSGA
PRMYSLMQSSTVPRRSGA

SEQ ID NO: 118126 - protein, 19 aa, Artificial Sequence
  Description of Artificial Sequence: Synthetic peptide
  Seed: PRMCSLMQGSTLPRRSGAA
PRMFSLAQASTAPRRSGAA

SEQ ID NO: 118127 - protein, 19 aa, Artificial Sequence
  Description of Artificial Sequence: Synthetic peptide
  Seed: PRMCSLMQGSTLPRRSGAA
PRMFSLAQASTGPRRSGAA

SEQ ID NO: 118128 - protein, 19 aa, Artificial Sequence
  Description of Artificial Sequence: Synthetic peptide
  Seed: PRMCSLMQGSTLPRRSGAA
PRMFSLAQASTIPRRSGAA

SEQ ID NO: 118129 - protein, 19 aa, Artificial Sequence
  Description of Artificial Sequence: Synthetic peptide
  Seed: PRMCSLMQGSTLPRRSGAA
PRMFSLAQASTLPRRSGAA

SEQ ID NO: 118130 - protein, 19 aa, Artificial Sequence
  Description of Artificial Sequence: Synthetic peptide
  Seed: PRMCSLMQGSTLPRRSGAA
PRMFSLAQASTMPRRSGAA

SEQ ID NO: 118131 - protein, 19 aa, Artificial Sequence
  Description of Artificial Sequence: Synthetic peptide
  Seed: PRMCSLMQGSTLPRRSGAA
PRMFSLAQASTSPRRSGAA

SEQ ID NO: 118132 - protein, 19 aa, Artificial Sequence
  Description of Artificial Sequence: Synthetic peptide
  Seed: PRMCSLMQGSTLPRRSGAA
PRMFSLAQASTTPRRSGAA

SEQ ID NO: 118133 - protein, 19 aa, Artificial Sequence
  Description of Artificial Sequence: Synthetic peptide
  Seed: PRMCSLMQGSTLPRRSGAA
PRMFSLAQASTVPRRSGAA

SEQ ID NO: 118134 - protein, 19 aa, Artificial Sequence
  Description of Artificial Sequence: Synthetic peptide
  Seed: PRMCSLMQGSTLPRRSGAA
PRMFSLAQGSTAPRRSGAA

SEQ ID NO: 118135 - protein, 19 aa, Artificial Sequence
  Description of Artificial Sequence: Synthetic peptide
  Seed: PRMCSLMQGSTLPRRSGAA
PRMFSLAQGSTIPRRSGAA

SEQ ID NO: 118136 - protein, 19 aa, Artificial Sequence
  Description of Artificial Sequence: Synthetic peptide
  Seed: PRMCSLMQGSTLPRRSGAA
PRMFSLAQGSTLPRRSGAA

SEQ ID NO: 118137 - protein, 19 aa, Artificial Sequence
  Description of Artificial Sequence: Synthetic peptide
  Seed: PRMCSLMQGSTLPRRSGAA
PRMFSLAQGSTMPRRSGAA

SEQ ID NO: 118138 - protein, 19 aa, Artificial Sequence
  Description of Artificial Sequence: Synthetic peptide
  Seed: PRMCSLMQGSTLPRRSGAA
PRMFSLAQGSTSPRRSGAA

SEQ ID NO: 118139 - protein, 19 aa, Artificial Sequence
  Description of Artificial Sequence: Synthetic peptide
  Seed: PRMCSLMQGSTLPRRSGAA
PRMFSLAQGSTTPRRSGAA

SEQ ID NO: 118140 - protein, 19 aa, Artificial Sequence
  Description of Artificial Sequence: Synthetic peptide
  Seed: PRMCSLMQGSTLPRRSGAA
PRMFSLAQGSTVPRRSGAA

SEQ ID NO: 118141 - protein, 19 aa, Artificial Sequence
  Description of Artificial Sequence: Synthetic peptide
  Seed: PRMCSLMQGSTLPRRSGAA
PRMFSLAQNSTAPRRSGAA

SEQ ID NO: 118142 - protein, 19 aa, Artificial Sequence
  Description of Artificial Sequence: Synthetic peptide
  Seed: PRMCSLMQGSTLPRRSGAA
PRMFSLAQNSTIPRRSGAA

SEQ ID NO: 118143 - protein, 19 aa, Artificial Sequence
  Description of Artificial Sequence: Synthetic peptide
  Seed: PRMCSLMQGSTLPRRSGAA
PRMFSLAQNSTLPRRSGAA

SEQ ID NO: 118144 - protein, 19 aa, Artificial Sequence
  Description of Artificial Sequence: Synthetic peptide
  Seed: PRMCSLMQGSTLPRRSGAA
PRMFSLAQNSTVPRRSGAA

SEQ ID NO: 118145 - protein, 19 aa, Artificial Sequence
  Description of Artificial Sequence: Synthetic peptide
  Seed: PRMCSLMQGSTLPRRSGAA
PRMFSLAQPSTAPRRSGAA

SEQ ID NO: 118146 - protein, 19 aa, Artificial Sequence
  Description of Artificial Sequence: Synthetic peptide
  Seed: PRMCSLMQGSTLPRRSGAA
PRMFSLAQPSTIPRRSGAA

SEQ ID NO: 118147 - protein, 19 aa, Artificial Sequence
  Description of Artificial Sequence: Synthetic peptide
  Seed: PRMCSLMQGSTLPRRSGAA
PRMFSLAQPSTLPRRSGAA

SEQ ID NO: 118148 - protein, 19 aa, Artificial Sequence
  Description of Artificial Sequence: Synthetic peptide
  Seed: PRMCSLMQGSTLPRRSGAA
PRMFSLAQPSTMPRRSGAA

SEQ ID NO: 118149 - protein, 19 aa, Artificial Sequence
  Description of Artificial Sequence: Synthetic peptide
  Seed: PRMCSLMQGSTLPRRSGAA
PRMFSLAQPSTVPRRSGAA

SEQ ID NO: 118150 - protein, 19 aa, Artificial Sequence
  Description of Artificial Sequence: Synthetic peptide
  Seed: PRMCSLMQGSTLPRRSGAA
PRMFSLAQSSTAPRRSGAA

SEQ ID NO: 118151 - protein, 19 aa, Artificial Sequence
  Description of Artificial Sequence: Synthetic peptide
  Seed: PRMCSLMQGSTLPRRSGAA
PRMFSLAQSSTIPRRSGAA

SEQ ID NO: 118152 - protein, 19 aa, Artificial Sequence
  Description of Artificial Sequence: Synthetic peptide
  Seed: PRMCSLMQGSTLPRRSGAA
PRMFSLAQSSTLPRRSGAA

SEQ ID NO: 118153 - protein, 19 aa, Artificial Sequence
  Description of Artificial Sequence: Synthetic peptide
  Seed: PRMCSLMQGSTLPRRSGAA
PRMFSLAQSSTMPRRSGAA

SEQ ID NO: 118154 - protein, 19 aa, Artificial Sequence
  Description of Artificial Sequence: Synthetic peptide
  Seed: PRMCSLMQGSTLPRRSGAA
PRMFSLAQSSTTPRRSGAA

SEQ ID NO: 118155 - protein, 19 aa, Artificial Sequence
  Description of Artificial Sequence: Synthetic peptide
  Seed: PRMCSLMQGSTLPRRSGAA
PRMFSLAQSSTVPRRSGAA

SEQ ID NO: 118156 - protein, 19 aa, Artificial Sequence
  Description of Artificial Sequence: Synthetic peptide
  Seed: PRMCSLMQGSTLPRRSGAA
PRMFSLAQTSTIPRRSGAA

SEQ ID NO: 118157 - protein, 19 aa, Artificial Sequence
  Description of Artificial Sequence: Synthetic peptide
  Seed: PRMCSLMQGSTLPRRSGAA
PRMFSLAQTSTLPRRSGAA

SEQ ID NO: 118158 - protein, 19 aa, Artificial Sequence
  Description of Artificial Sequence: Synthetic peptide
  Seed: PRMCSLMQGSTLPRRSGAA
PRMFSLAQTSTVPRRSGAA

SEQ ID NO: 118159 - protein, 19 aa, Artificial Sequence
  Description of Artificial Sequence: Synthetic peptide
  Seed: PRMCSLMQGSTLPRRSGAA
PRMFSLAQVSTIPRRSGAA

SEQ ID NO: 118160 - protein, 19 aa, Artificial Sequence
  Description of Artificial Sequence: Synthetic peptide
  Seed: PRMCSLMQGSTLPRRSGAA
PRMFSLAQVSTLPRRSGAA

SEQ ID NO: 118161 - protein, 19 aa, Artificial Sequence
  Description of Artificial Sequence: Synthetic peptide
  Seed: PRMCSLMQGSTLPRRSGAA
PRMFSLAQVSTVPRRSGAA

SEQ ID NO: 118162 - protein, 19 aa, Artificial Sequence
  Description of Artificial Sequence: Synthetic peptide
  Seed: PRMCSLMQGSTLPRRSGAA
PRMFSLEQASTAPRRSGAA

SEQ ID NO: 118163 - protein, 19 aa, Artificial Sequence
  Description of Artificial Sequence: Synthetic peptide
  Seed: PRMCSLMQGSTLPRRSGAA
PRMFSLEQASTIPRRSGAA

SEQ ID NO: 118164 - protein, 19 aa, Artificial Sequence
  Description of Artificial Sequence: Synthetic peptide
  Seed: PRMCSLMQGSTLPRRSGAA
PRMFSLEQASTLPRRSGAA

SEQ ID NO: 118165 - protein, 19 aa, Artificial Sequence
  Description of Artificial Sequence: Synthetic peptide
  Seed: PRMCSLMQGSTLPRRSGAA
PRMFSLEQASTVPRRSGAA

SEQ ID NO: 118166 - protein, 19 aa, Artificial Sequence
  Description of Artificial Sequence: Synthetic peptide
  Seed: PRMCSLMQGSTLPRRSGAA
PRMFSLEQGSTLPRRSGAA

SEQ ID NO: 118167 - protein, 19 aa, Artificial Sequence
  Description of Artificial Sequence: Synthetic peptide
  Seed: PRMCSLMQGSTLPRRSGAA
PRMFSLEQGSTVPRRSGAA

SEQ ID NO: 118168 - protein, 19 aa, Artificial Sequence
  Description of Artificial Sequence: Synthetic peptide
  Seed: PRMCSLMQGSTLPRRSGAA
PRMFSLFQASTAPRRSGAA

SEQ ID NO: 118169 - protein, 19 aa, Artificial Sequence
  Description of Artificial Sequence: Synthetic peptide
  Seed: PRMCSLMQGSTLPRRSGAA
PRMFSLFQASTIPRRSGAA

SEQ ID NO: 118170 - protein, 19 aa, Artificial Sequence
  Description of Artificial Sequence: Synthetic peptide
  Seed: PRMCSLMQGSTLPRRSGAA
PRMFSLFQASTLPRRSGAA

SEQ ID NO: 118171 - protein, 19 aa, Artificial Sequence
  Description of Artificial Sequence: Synthetic peptide
  Seed: PRMCSLMQGSTLPRRSGAA
PRMFSLFQASTVPRRSGAA

SEQ ID NO: 118172 - protein, 19 aa, Artificial Sequence
  Description of Artificial Sequence: Synthetic peptide
  Seed: PRMCSLMQGSTLPRRSGAA
PRMFSLFQGSTVPRRSGAA

SEQ ID NO: 118173 - protein, 19 aa, Artificial Sequence
  Description of Artificial Sequence: Synthetic peptide
  Seed: PRMCSLMQGSTLPRRSGAA
PRMFSLFQSSTAPRRSGAA

SEQ ID NO: 118174 - protein, 19 aa, Artificial Sequence
  Description of Artificial Sequence: Synthetic peptide
  Seed: PRMCSLMQGSTLPRRSGAA
PRMFSLFQSSTVPRRSGAA

SEQ ID NO: 118175 - protein, 19 aa, Artificial Sequence
  Description of Artificial Sequence: Synthetic peptide
  Seed: PRMCSLMQGSTLPRRSGAA
PRMFSLGQASTIPRRSGAA

SEQ ID NO: 118176 - protein, 19 aa, Artificial Sequence
  Description of Artificial Sequence: Synthetic peptide
  Seed: PRMCSLMQGSTLPRRSGAA
PRMFSLGQASTLPRRSGAA

SEQ ID NO: 118177 - protein, 19 aa, Artificial Sequence
  Description of Artificial Sequence: Synthetic peptide
  Seed: PRMCSLMQGSTLPRRSGAA
PRMFSLGQASTVPRRSGAA

SEQ ID NO: 118178 - protein, 19 aa, Artificial Sequence
  Description of Artificial Sequence: Synthetic peptide
  Seed: PRMCSLMQGSTLPRRSGAA
PRMFSLIQASTAPRRSGAA

SEQ ID NO: 118179 - protein, 19 aa, Artificial Sequence
  Description of Artificial Sequence: Synthetic peptide
  Seed: PRMCSLMQGSTLPRRSGAA
PRMFSLIQASTCPRRSGAA

SEQ ID NO: 118180 - protein, 19 aa, Artificial Sequence
  Description of Artificial Sequence: Synthetic peptide
  Seed: PRMCSLMQGSTLPRRSGAA
PRMFSLIQASTGPRRSGAA

SEQ ID NO: 118181 - protein, 19 aa, Artificial Sequence
  Description of Artificial Sequence: Synthetic peptide
  Seed: PRMCSLMQGSTLPRRSGAA
PRMFSLIQASTIPRRSGAA

SEQ ID NO: 118182 - protein, 19 aa, Artificial Sequence
  Description of Artificial Sequence: Synthetic peptide
  Seed: PRMCSLMQGSTLPRRSGAA
PRMFSLIQASTLPRRSGAA

SEQ ID NO: 118183 - protein, 19 aa, Artificial Sequence
  Description of Artificial Sequence: Synthetic peptide
  Seed: PRMCSLMQGSTLPRRSGAA
PRMFSLIQASTMPRRSGAA

SEQ ID NO: 118184 - protein, 19 aa, Artificial Sequence
  Description of Artificial Sequence: Synthetic peptide
  Seed: PRMCSLMQGSTLPRRSGAA
PRMFSLIQASTSPRRSGAA

SEQ ID NO: 118185 - protein, 19 aa, Artificial Sequence
  Description of Artificial Sequence: Synthetic peptide
  Seed: PRMCSLMQGSTLPRRSGAA
PRMFSLIQASTTPRRSGAA

SEQ ID NO: 118186 - protein, 19 aa, Artificial Sequence
  Description of Artificial Sequence: Synthetic peptide
  Seed: PRMCSLMQGSTLPRRSGAA
PRMFSLIQASTVPRRSGAA

SEQ ID NO: 118187 - protein, 19 aa, Artificial Sequence
  Description of Artificial Sequence: Synthetic peptide
  Seed: PRMCSLMQGSTLPRRSGAA
PRMFSLIQGSTAPRRSGAA

SEQ ID NO: 118188 - protein, 19 aa, Artificial Sequence
  Description of Artificial Sequence: Synthetic peptide
  Seed: PRMCSLMQGSTLPRRSGAA
PRMFSLIQGSTGPRRSGAA

SEQ ID NO: 118189 - protein, 19 aa, Artificial Sequence
  Description of Artificial Sequence: Synthetic peptide
  Seed: PRMCSLMQGSTLPRRSGAA
PRMFSLIQGSTIPRRSGAA

SEQ ID NO: 118190 - protein, 19 aa, Artificial Sequence
  Description of Artificial Sequence: Synthetic peptide
  Seed: PRMCSLMQGSTLPRRSGAA
PRMFSLIQGSTLPRRSGAA

SEQ ID NO: 118191 - protein, 19 aa, Artificial Sequence
  Description of Artificial Sequence: Synthetic peptide
  Seed: PRMCSLMQGSTLPRRSGAA
PRMFSLIQGSTMPRRSGAA

SEQ ID NO: 118192 - protein, 19 aa, Artificial Sequence
  Description of Artificial Sequence: Synthetic peptide
  Seed: PRMCSLMQGSTLPRRSGAA
PRMFSLIQGSTSPRRSGAA

SEQ ID NO: 118193 - protein, 19 aa, Artificial Sequence
  Description of Artificial Sequence: Synthetic peptide
  Seed: PRMCSLMQGSTLPRRSGAA
PRMFSLIQGSTTPRRSGAA

SEQ ID NO: 118194 - protein, 19 aa, Artificial Sequence
  Description of Artificial Sequence: Synthetic peptide
  Seed: PRMCSLMQGSTLPRRSGAA
PRMFSLIQGSTVPRRSGAA

SEQ ID NO: 118195 - protein, 19 aa, Artificial Sequence
  Description of Artificial Sequence: Synthetic peptide
  Seed: PRMCSLMQGSTLPRRSGAA
PRMFSLIQNSTAPRRSGAA

SEQ ID NO: 118196 - protein, 19 aa, Artificial Sequence
  Description of Artificial Sequence: Synthetic peptide
  Seed: PRMCSLMQGSTLPRRSGAA
PRMFSLIQNSTIPRRSGAA

SEQ ID NO: 118197 - protein, 19 aa, Artificial Sequence
  Description of Artificial Sequence: Synthetic peptide
  Seed: PRMCSLMQGSTLPRRSGAA
PRMFSLIQNSTLPRRSGAA

SEQ ID NO: 118198 - protein, 19 aa, Artificial Sequence
  Description of Artificial Sequence: Synthetic peptide
  Seed: PRMCSLMQGSTLPRRSGAA
PRMFSLIQNSTVPRRSGAA

SEQ ID NO: 118199 - protein, 19 aa, Artificial Sequence
  Description of Artificial Sequence: Synthetic peptide
  Seed: PRMCSLMQGSTLPRRSGAA
PRMFSLIQPSTAPRRSGAA

SEQ ID NO: 118200 - protein, 19 aa, Artificial Sequence
  Description of Artificial Sequence: Synthetic peptide
  Seed: PRMCSLMQGSTLPRRSGAA
PRMFSLIQPSTIPRRSGAA

SEQ ID NO: 118201 - protein, 19 aa, Artificial Sequence
  Description of Artificial Sequence: Synthetic peptide
  Seed: PRMCSLMQGSTLPRRSGAA
PRMFSLIQPSTLPRRSGAA

SEQ ID NO: 118202 - protein, 19 aa, Artificial Sequence
  Description of Artificial Sequence: Synthetic peptide
  Seed: PRMCSLMQGSTLPRRSGAA
PRMFSLIQPSTMPRRSGAA

SEQ ID NO: 118203 - protein, 19 aa, Artificial Sequence
  Description of Artificial Sequence: Synthetic peptide
  Seed: PRMCSLMQGSTLPRRSGAA
PRMFSLIQPSTSPRRSGAA

SEQ ID NO: 118204 - protein, 19 aa, Artificial Sequence
  Description of Artificial Sequence: Synthetic peptide
  Seed: PRMCSLMQGSTLPRRSGAA
PRMFSLIQPSTTPRRSGAA

SEQ ID NO: 118205 - protein, 19 aa, Artificial Sequence
  Description of Artificial Sequence: Synthetic peptide
  Seed: PRMCSLMQGSTLPRRSGAA
PRMFSLIQPSTVPRRSGAA

SEQ ID NO: 118206 - protein, 19 aa, Artificial Sequence
  Description of Artificial Sequence: Synthetic peptide
  Seed: PRMCSLMQGSTLPRRSGAA
PRMFSLIQSSTAPRRSGAA

SEQ ID NO: 118207 - protein, 19 aa, Artificial Sequence
  Description of Artificial Sequence: Synthetic peptide
  Seed: PRMCSLMQGSTLPRRSGAA
PRMFSLIQSSTIPRRSGAA

SEQ ID NO: 118208 - protein, 19 aa, Artificial Sequence
  Description of Artificial Sequence: Synthetic peptide
  Seed: PRMCSLMQGSTLPRRSGAA
PRMFSLIQSSTLPRRSGAA

SEQ ID NO: 118209 - protein, 19 aa, Artificial Sequence
  Description of Artificial Sequence: Synthetic peptide
  Seed: PRMCSLMQGSTLPRRSGAA
PRMFSLIQSSTMPRRSGAA

SEQ ID NO: 118210 - protein, 19 aa, Artificial Sequence
  Description of Artificial Sequence: Synthetic peptide
  Seed: PRMCSLMQGSTLPRRSGAA
PRMFSLIQSSTSPRRSGAA

SEQ ID NO: 118211 - protein, 19 aa, Artificial Sequence
  Description of Artificial Sequence: Synthetic peptide
  Seed: PRMCSLMQGSTLPRRSGAA
PRMFSLIQSSTTPRRSGAA

SEQ ID NO: 118212 - protein, 19 aa, Artificial Sequence
  Description of Artificial Sequence: Synthetic peptide
  Seed: PRMCSLMQGSTLPRRSGAA
PRMFSLIQSSTVPRRSGAA

SEQ ID NO: 118213 - protein, 19 aa, Artificial Sequence
  Description of Artificial Sequence: Synthetic peptide
  Seed: PRMCSLMQGSTLPRRSGAA
PRMFSLIQTSTAPRRSGAA

SEQ ID NO: 118214 - protein, 19 aa, Artificial Sequence
  Description of Artificial Sequence: Synthetic peptide
  Seed: PRMCSLMQGSTLPRRSGAA
PRMFSLIQTSTIPRRSGAA

SEQ ID NO: 118215 - protein, 19 aa, Artificial Sequence
  Description of Artificial Sequence: Synthetic peptide
  Seed: PRMCSLMQGSTLPRRSGAA
PRMFSLIQTSTLPRRSGAA

SEQ ID NO: 118216 - protein, 19 aa, Artificial Sequence
  Description of Artificial Sequence: Synthetic peptide
  Seed: PRMCSLMQGSTLPRRSGAA
PRMFSLIQTSTVPRRSGAA

SEQ ID NO: 118217 - protein, 19 aa, Artificial Sequence
  Description of Artificial Sequence: Synthetic peptide
  Seed: PRMCSLMQGSTLPRRSGAA
PRMFSLIQVSTAPRRSGAA

SEQ ID NO: 118218 - protein, 19 aa, Artificial Sequence
  Description of Artificial Sequence: Synthetic peptide
  Seed: PRMCSLMQGSTLPRRSGAA
PRMFSLIQVSTIPRRSGAA

SEQ ID NO: 118219 - protein, 19 aa, Artificial Sequence
  Description of Artificial Sequence: Synthetic peptide
  Seed: PRMCSLMQGSTLPRRSGAA
PRMFSLIQVSTLPRRSGAA

SEQ ID NO: 118220 - protein, 19 aa, Artificial Sequence
  Description of Artificial Sequence: Synthetic peptide
  Seed: PRMCSLMQGSTLPRRSGAA
PRMFSLIQVSTVPRRSGAA

SEQ ID NO: 118221 - protein, 19 aa, Artificial Sequence
  Description of Artificial Sequence: Synthetic peptide
  Seed: PRMCSLMQGSTLPRRSGAA
PRMFSLLQASTAPRRSGAA

SEQ ID NO: 118222 - protein, 19 aa, Artificial Sequence
  Description of Artificial Sequence: Synthetic peptide
  Seed: PRMCSLMQGSTLPRRSGAA
PRMFSLLQASTCPRRSGAA

SEQ ID NO: 118223 - protein, 19 aa, Artificial Sequence
  Description of Artificial Sequence: Synthetic peptide
  Seed: PRMCSLMQGSTLPRRSGAA
PRMFSLLQASTFPRRSGAA

SEQ ID NO: 118224 - protein, 19 aa, Artificial Sequence
  Description of Artificial Sequence: Synthetic peptide
  Seed: PRMCSLMQGSTLPRRSGAA
PRMFSLLQASTGPRRSGAA

SEQ ID NO: 118225 - protein, 19 aa, Artificial Sequence
  Description of Artificial Sequence: Synthetic peptide
  Seed: PRMCSLMQGSTLPRRSGAA
PRMFSLLQASTHPRRSGAA

SEQ ID NO: 118226 - protein, 19 aa, Artificial Sequence
  Description of Artificial Sequence: Synthetic peptide
  Seed: PRMCSLMQGSTLPRRSGAA
PRMFSLLQASTIPRRSGAA

SEQ ID NO: 118227 - protein, 19 aa, Artificial Sequence
  Description of Artificial Sequence: Synthetic peptide
  Seed: PRMCSLMQGSTLPRRSGAA
PRMFSLLQASTLPRRSGAA

SEQ ID NO: 118228 - protein, 19 aa, Artificial Sequence
  Description of Artificial Sequence: Synthetic peptide
  Seed: PRMCSLMQGSTLPRRSGAA
PRMFSLLQASTMPRRSGAA

SEQ ID NO: 118229 - protein, 19 aa, Artificial Sequence
  Description of Artificial Sequence: Synthetic peptide
  Seed: PRMCSLMQGSTLPRRSGAA
PRMFSLLQASTNPRRSGAA

SEQ ID NO: 118230 - protein, 19 aa, Artificial Sequence
  Description of Artificial Sequence: Synthetic peptide
  Seed: PRMCSLMQGSTLPRRSGAA
PRMFSLLQASTPPRRSGAA

SEQ ID NO: 118231 - protein, 19 aa, Artificial Sequence
  Description of Artificial Sequence: Synthetic peptide
  Seed: PRMCSLMQGSTLPRRSGAA
PRMFSLLQASTSPRRSGAA

SEQ ID NO: 118232 - protein, 19 aa, Artificial Sequence
  Description of Artificial Sequence: Synthetic peptide
  Seed: PRMCSLMQGSTLPRRSGAA
PRMFSLLQASTTPRRSGAA

SEQ ID NO: 118233 - protein, 19 aa, Artificial Sequence
  Description of Artificial Sequence: Synthetic peptide
  Seed: PRMCSLMQGSTLPRRSGAA
PRMFSLLQASTVPRRSGAA

SEQ ID NO: 118234 - protein, 19 aa, Artificial Sequence
  Description of Artificial Sequence: Synthetic peptide
  Seed: PRMCSLMQGSTLPRRSGAA
PRMFSLLQGSTAPRRSGAA

SEQ ID NO: 118235 - protein, 19 aa, Artificial Sequence
  Description of Artificial Sequence: Synthetic peptide
  Seed: PRMCSLMQGSTLPRRSGAA
PRMFSLLQGSTCPRRSGAA

SEQ ID NO: 118236 - protein, 19 aa, Artificial Sequence
  Description of Artificial Sequence: Synthetic peptide
  Seed: PRMCSLMQGSTLPRRSGAA
PRMFSLLQGSTFPRRSGAA

SEQ ID NO: 118237 - protein, 19 aa, Artificial Sequence
  Description of Artificial Sequence: Synthetic peptide
  Seed: PRMCSLMQGSTLPRRSGAA
PRMFSLLQGSTGPRRSGAA

SEQ ID NO: 118238 - protein, 19 aa, Artificial Sequence
  Description of Artificial Sequence: Synthetic peptide
  Seed: PRMCSLMQGSTLPRRSGAA
PRMFSLLQGSTIPRRSGAA

SEQ ID NO: 118239 - protein, 19 aa, Artificial Sequence
  Description of Artificial Sequence: Synthetic peptide
  Seed: PRMCSLMQGSTLPRRSGAA
PRMFSLLQGSTLPRRSGAA

SEQ ID NO: 118240 - protein, 19 aa, Artificial Sequence
  Description of Artificial Sequence: Synthetic peptide
  Seed: PRMCSLMQGSTLPRRSGAA
PRMFSLLQGSTMPRRSGAA

SEQ ID NO: 118241 - protein, 19 aa, Artificial Sequence
  Description of Artificial Sequence: Synthetic peptide
  Seed: PRMCSLMQGSTLPRRSGAA
PRMFSLLQGSTNPRRSGAA

SEQ ID NO: 118242 - protein, 19 aa, Artificial Sequence
  Description of Artificial Sequence: Synthetic peptide
  Seed: PRMCSLMQGSTLPRRSGAA
PRMFSLLQGSTSPRRSGAA

SEQ ID NO: 118243 - protein, 19 aa, Artificial Sequence
  Description of Artificial Sequence: Synthetic peptide
  Seed: PRMCSLMQGSTLPRRSGAA
PRMFSLLQGSTTPRRSGAA

SEQ ID NO: 118244 - protein, 19 aa, Artificial Sequence
  Description of Artificial Sequence: Synthetic peptide
  Seed: PRMCSLMQGSTLPRRSGAA
PRMFSLLQGSTVPRRSGAA

SEQ ID NO: 118245 - protein, 19 aa, Artificial Sequence
  Description of Artificial Sequence: Synthetic peptide
  Seed: PRMCSLMQGSTLPRRSGAA
PRMFSLLQISTAPRRSGAA

SEQ ID NO: 118246 - protein, 19 aa, Artificial Sequence
  Description of Artificial Sequence: Synthetic peptide
  Seed: PRMCSLMQGSTLPRRSGAA
PRMFSLLQISTIPRRSGAA

SEQ ID NO: 118247 - protein, 19 aa, Artificial Sequence
  Description of Artificial Sequence: Synthetic peptide
  Seed: PRMCSLMQGSTLPRRSGAA
PRMFSLLQISTLPRRSGAA

SEQ ID NO: 118248 - protein, 19 aa, Artificial Sequence
  Description of Artificial Sequence: Synthetic peptide
  Seed: PRMCSLMQGSTLPRRSGAA
PRMFSLLQISTVPRRSGAA

SEQ ID NO: 118249 - protein, 19 aa, Artificial Sequence
  Description of Artificial Sequence: Synthetic peptide
  Seed: PRMCSLMQGSTLPRRSGAA
PRMFSLLQNSTAPRRSGAA

SEQ ID NO: 118250 - protein, 19 aa, Artificial Sequence
  Description of Artificial Sequence: Synthetic peptide
  Seed: PRMCSLMQGSTLPRRSGAA
PRMFSLLQNSTIPRRSGAA

SEQ ID NO: 118251 - protein, 19 aa, Artificial Sequence
  Description of Artificial Sequence: Synthetic peptide
  Seed: PRMCSLMQGSTLPRRSGAA
PRMFSLLQNSTLPRRSGAA

SEQ ID NO: 118252 - protein, 19 aa, Artificial Sequence
  Description of Artificial Sequence: Synthetic peptide
  Seed: PRMCSLMQGSTLPRRSGAA
PRMFSLLQNSTMPRRSGAA

SEQ ID NO: 118253 - protein, 19 aa, Artificial Sequence
  Description of Artificial Sequence: Synthetic peptide
  Seed: PRMCSLMQGSTLPRRSGAA
PRMFSLLQNSTSPRRSGAA

SEQ ID NO: 118254 - protein, 19 aa, Artificial Sequence
  Description of Artificial Sequence: Synthetic peptide
  Seed: PRMCSLMQGSTLPRRSGAA
PRMFSLLQNSTTPRRSGAA

SEQ ID NO: 118255 - protein, 19 aa, Artificial Sequence
  Description of Artificial Sequence: Synthetic peptide
  Seed: PRMCSLMQGSTLPRRSGAA
PRMFSLLQNSTVPRRSGAA

SEQ ID NO: 118256 - protein, 19 aa, Artificial Sequence
  Description of Artificial Sequence: Synthetic peptide
  Seed: PRMCSLMQGSTLPRRSGAA
PRMFSLLQPSTAPRRSGAA

SEQ ID NO: 118257 - protein, 19 aa, Artificial Sequence
  Description of Artificial Sequence: Synthetic peptide
  Seed: PRMCSLMQGSTLPRRSGAA
PRMFSLLQPSTFPRRSGAA

SEQ ID NO: 118258 - protein, 19 aa, Artificial Sequence
  Description of Artificial Sequence: Synthetic peptide
  Seed: PRMCSLMQGSTLPRRSGAA
PRMFSLLQPSTGPRRSGAA

SEQ ID NO: 118259 - protein, 19 aa, Artificial Sequence
  Description of Artificial Sequence: Synthetic peptide
  Seed: PRMCSLMQGSTLPRRSGAA
PRMFSLLQPSTIPRRSGAA

SEQ ID NO: 118260 - protein, 19 aa, Artificial Sequence
  Description of Artificial Sequence: Synthetic peptide
  Seed: PRMCSLMQGSTLPRRSGAA
PRMFSLLQPSTLPRRSGAA

SEQ ID NO: 118261 - protein, 19 aa, Artificial Sequence
  Description of Artificial Sequence: Synthetic peptide
  Seed: PRMCSLMQGSTLPRRSGAA
PRMFSLLQPSTMPRRSGAA

SEQ ID NO: 118262 - protein, 19 aa, Artificial Sequence
  Description of Artificial Sequence: Synthetic peptide
  Seed: PRMCSLMQGSTLPRRSGAA
PRMFSLLQPSTSPRRSGAA

SEQ ID NO: 118263 - protein, 19 aa, Artificial Sequence
  Description of Artificial Sequence: Synthetic peptide
  Seed: PRMCSLMQGSTLPRRSGAA
PRMFSLLQPSTTPRRSGAA

SEQ ID NO: 118264 - protein, 19 aa, Artificial Sequence
  Description of Artificial Sequence: Synthetic peptide
  Seed: PRMCSLMQGSTLPRRSGAA
PRMFSLLQPSTVPRRSGAA

SEQ ID NO: 118265 - protein, 19 aa, Artificial Sequence
  Description of Artificial Sequence: Synthetic peptide
  Seed: PRMCSLMQGSTLPRRSGAA
PRMFSLLQSSTAPRRSGAA

SEQ ID NO: 118266 - protein, 19 aa, Artificial Sequence
  Description of Artificial Sequence: Synthetic peptide
  Seed: PRMCSLMQGSTLPRRSGAA
PRMFSLLQSSTCPRRSGAA

SEQ ID NO: 118267 - protein, 19 aa, Artificial Sequence
  Description of Artificial Sequence: Synthetic peptide
  Seed: PRMCSLMQGSTLPRRSGAA
PRMFSLLQSSTFPRRSGAA

SEQ ID NO: 118268 - protein, 19 aa, Artificial Sequence
  Description of Artificial Sequence: Synthetic peptide
  Seed: PRMCSLMQGSTLPRRSGAA
PRMFSLLQSSTGPRRSGAA

SEQ ID NO: 118269 - protein, 19 aa, Artificial Sequence
  Description of Artificial Sequence: Synthetic peptide
  Seed: PRMCSLMQGSTLPRRSGAA
PRMFSLLQSSTIPRRSGAA

SEQ ID NO: 118270 - protein, 19 aa, Artificial Sequence
  Description of Artificial Sequence: Synthetic peptide
  Seed: PRMCSLMQGSTLPRRSGAA
PRMFSLLQSSTLPRRSGAA

SEQ ID NO: 118271 - protein, 19 aa, Artificial Sequence
  Description of Artificial Sequence: Synthetic peptide
  Seed: PRMCSLMQGSTLPRRSGAA
PRMFSLLQSSTMPRRSGAA

SEQ ID NO: 118272 - protein, 19 aa, Artificial Sequence
  Description of Artificial Sequence: Synthetic peptide
  Seed: PRMCSLMQGSTLPRRSGAA
PRMFSLLQSSTNPRRSGAA

SEQ ID NO: 118273 - protein, 19 aa, Artificial Sequence
  Description of Artificial Sequence: Synthetic peptide
  Seed: PRMCSLMQGSTLPRRSGAA
PRMFSLLQSSTSPRRSGAA

SEQ ID NO: 118274 - protein, 19 aa, Artificial Sequence
  Description of Artificial Sequence: Synthetic peptide
  Seed: PRMCSLMQGSTLPRRSGAA
PRMFSLLQSSTTPRRSGAA

SEQ ID NO: 118275 - protein, 19 aa, Artificial Sequence
  Description of Artificial Sequence: Synthetic peptide
  Seed: PRMCSLMQGSTLPRRSGAA
PRMFSLLQSSTVPRRSGAA

SEQ ID NO: 118276 - protein, 19 aa, Artificial Sequence
  Description of Artificial Sequence: Synthetic peptide
  Seed: PRMCSLMQGSTLPRRSGAA
PRMFSLLQTSTAPRRSGAA

SEQ ID NO: 118277 - protein, 19 aa, Artificial Sequence
  Description of Artificial Sequence: Synthetic peptide
  Seed: PRMCSLMQGSTLPRRSGAA
PRMFSLLQTSTIPRRSGAA

SEQ ID NO: 118278 - protein, 19 aa, Artificial Sequence
  Description of Artificial Sequence: Synthetic peptide
  Seed: PRMCSLMQGSTLPRRSGAA
PRMFSLLQTSTLPRRSGAA

SEQ ID NO: 118279 - protein, 19 aa, Artificial Sequence
  Description of Artificial Sequence: Synthetic peptide
  Seed: PRMCSLMQGSTLPRRSGAA
PRMFSLLQTSTMPRRSGAA

SEQ ID NO: 118280 - protein, 19 aa, Artificial Sequence
  Description of Artificial Sequence: Synthetic peptide
  Seed: PRMCSLMQGSTLPRRSGAA
PRMFSLLQTSTSPRRSGAA

SEQ ID NO: 118281 - protein, 19 aa, Artificial Sequence
  Description of Artificial Sequence: Synthetic peptide
  Seed: PRMCSLMQGSTLPRRSGAA
PRMFSLLQTSTTPRRSGAA

SEQ ID NO: 118282 - protein, 19 aa, Artificial Sequence
  Description of Artificial Sequence: Synthetic peptide
  Seed: PRMCSLMQGSTLPRRSGAA
PRMFSLLQTSTVPRRSGAA

SEQ ID NO: 118283 - protein, 19 aa, Artificial Sequence
  Description of Artificial Sequence: Synthetic peptide
  Seed: PRMCSLMQGSTLPRRSGAA
PRMFSLLQVSTAPRRSGAA

SEQ ID NO: 118284 - protein, 19 aa, Artificial Sequence
  Description of Artificial Sequence: Synthetic peptide
  Seed: PRMCSLMQGSTLPRRSGAA
PRMFSLLQVSTIPRRSGAA

SEQ ID NO: 118285 - protein, 19 aa, Artificial Sequence
  Description of Artificial Sequence: Synthetic peptide
  Seed: PRMCSLMQGSTLPRRSGAA
PRMFSLLQVSTLPRRSGAA

SEQ ID NO: 118286 - protein, 19 aa, Artificial Sequence
  Description of Artificial Sequence: Synthetic peptide
  Seed: PRMCSLMQGSTLPRRSGAA
PRMFSLLQVSTMPRRSGAA

SEQ ID NO: 118287 - protein, 19 aa, Artificial Sequence
  Description of Artificial Sequence: Synthetic peptide
  Seed: PRMCSLMQGSTLPRRSGAA
PRMFSLLQVSTSPRRSGAA

SEQ ID NO: 118288 - protein, 19 aa, Artificial Sequence
  Description of Artificial Sequence: Synthetic peptide
  Seed: PRMCSLMQGSTLPRRSGAA
PRMFSLLQVSTTPRRSGAA

SEQ ID NO: 118289 - protein, 19 aa, Artificial Sequence
  Description of Artificial Sequence: Synthetic peptide
  Seed: PRMCSLMQGSTLPRRSGAA
PRMFSLLQVSTVPRRSGAA

SEQ ID NO: 118290 - protein, 19 aa, Artificial Sequence
  Description of Artificial Sequence: Synthetic peptide
  Seed: PRMCSLMQGSTLPRRSGAA
PRMFSLMQASTAPRRSGAA

SEQ ID NO: 118291 - protein, 19 aa, Artificial Sequence
  Description of Artificial Sequence: Synthetic peptide
  Seed: PRMCSLMQGSTLPRRSGAA
PRMFSLMQASTCPRRSGAA

SEQ ID NO: 118292 - protein, 19 aa, Artificial Sequence
  Description of Artificial Sequence: Synthetic peptide
  Seed: PRMCSLMQGSTLPRRSGAA
PRMFSLMQASTFPRRSGAA

SEQ ID NO: 118293 - protein, 19 aa, Artificial Sequence
  Description of Artificial Sequence: Synthetic peptide
  Seed: PRMCSLMQGSTLPRRSGAA
PRMFSLMQASTGPRRSGAA

SEQ ID NO: 118294 - protein, 19 aa, Artificial Sequence
  Description of Artificial Sequence: Synthetic peptide
  Seed: PRMCSLMQGSTLPRRSGAA
PRMFSLMQASTHPRRSGAA

SEQ ID NO: 118295 - protein, 19 aa, Artificial Sequence
  Description of Artificial Sequence: Synthetic peptide
  Seed: PRMCSLMQGSTLPRRSGAA
PRMFSLMQASTIPRRSGAA

SEQ ID NO: 118296 - protein, 19 aa, Artificial Sequence
  Description of Artificial Sequence: Synthetic peptide
  Seed: PRMCSLMQGSTLPRRSGAA
PRMFSLMQASTLPRRSGAA

SEQ ID NO: 118297 - protein, 19 aa, Artificial Sequence
  Description of Artificial Sequence: Synthetic peptide
  Seed: PRMCSLMQGSTLPRRSGAA
PRMFSLMQASTMPRRSGAA

SEQ ID NO: 118298 - protein, 19 aa, Artificial Sequence
  Description of Artificial Sequence: Synthetic peptide
  Seed: PRMCSLMQGSTLPRRSGAA
PRMFSLMQASTNPRRSGAA

SEQ ID NO: 118299 - protein, 19 aa, Artificial Sequence
  Description of Artificial Sequence: Synthetic peptide
  Seed: PRMCSLMQGSTLPRRSGAA
PRMFSLMQASTPPRRSGAA

SEQ ID NO: 118300 - protein, 19 aa, Artificial Sequence
  Description of Artificial Sequence: Synthetic peptide
  Seed: PRMCSLMQGSTLPRRSGAA
PRMFSLMQASTSPRRSGAA

SEQ ID NO: 118301 - protein, 19 aa, Artificial Sequence
  Description of Artificial Sequence: Synthetic peptide
  Seed: PRMCSLMQGSTLPRRSGAA
PRMFSLMQASTTPRRSGAA

SEQ ID NO: 118302 - protein, 19 aa, Artificial Sequence
  Description of Artificial Sequence: Synthetic peptide
  Seed: PRMCSLMQGSTLPRRSGAA
PRMFSLMQASTVPRRSGAA

SEQ ID NO: 118303 - protein, 19 aa, Artificial Sequence
  Description of Artificial Sequence: Synthetic peptide
  Seed: PRMCSLMQGSTLPRRSGAA
PRMFSLMQASTYPRRSGAA

SEQ ID NO: 118304 - protein, 19 aa, Artificial Sequence
  Description of Artificial Sequence: Synthetic peptide
  Seed: PRMCSLMQGSTLPRRSGAA
PRMFSLMQGSTAPRRSGAA

SEQ ID NO: 118305 - protein, 19 aa, Artificial Sequence
  Description of Artificial Sequence: Synthetic peptide
  Seed: PRMCSLMQGSTLPRRSGAA
PRMFSLMQGSTCPRRSGAA

SEQ ID NO: 118306 - protein, 19 aa, Artificial Sequence
  Description of Artificial Sequence: Synthetic peptide
  Seed: PRMCSLMQGSTLPRRSGAA
PRMFSLMQGSTFPRRSGAA

SEQ ID NO: 118307 - protein, 19 aa, Artificial Sequence
  Description of Artificial Sequence: Synthetic peptide
  Seed: PRMCSLMQGSTLPRRSGAA
PRMFSLMQGSTGPRRSGAA

SEQ ID NO: 118308 - protein, 19 aa, Artificial Sequence
  Description of Artificial Sequence: Synthetic peptide
  Seed: PRMCSLMQGSTLPRRSGAA
PRMFSLMQGSTIPRRSGAA

SEQ ID NO: 118309 - protein, 19 aa, Artificial Sequence
  Description of Artificial Sequence: Synthetic peptide
  Seed: PRMCSLMQGSTLPRRSGAA
PRMFSLMQGSTLPRRSGAA

SEQ ID NO: 118310 - protein, 19 aa, Artificial Sequence
  Description of Artificial Sequence: Synthetic peptide
  Seed: PRMCSLMQGSTLPRRSGAA
PRMFSLMQGSTMPRRSGAA

SEQ ID NO: 118311 - protein, 19 aa, Artificial Sequence
  Description of Artificial Sequence: Synthetic peptide
  Seed: PRMCSLMQGSTLPRRSGAA
PRMFSLMQGSTNPRRSGAA

SEQ ID NO: 118312 - protein, 19 aa, Artificial Sequence
  Description of Artificial Sequence: Synthetic peptide
  Seed: PRMCSLMQGSTLPRRSGAA
PRMFSLMQGSTSPRRSGAA

SEQ ID NO: 118313 - protein, 19 aa, Artificial Sequence
  Description of Artificial Sequence: Synthetic peptide
  Seed: PRMCSLMQGSTLPRRSGAA
PRMFSLMQGSTTPRRSGAA

SEQ ID NO: 118314 - protein, 19 aa, Artificial Sequence
  Description of Artificial Sequence: Synthetic peptide
  Seed: PRMCSLMQGSTLPRRSGAA
PRMFSLMQGSTVPRRSGAA

SEQ ID NO: 118315 - protein, 19 aa, Artificial Sequence
  Description of Artificial Sequence: Synthetic peptide
  Seed: PRMCSLMQGSTLPRRSGAA
PRMFSLMQISTAPRRSGAA

SEQ ID NO: 118316 - protein, 19 aa, Artificial Sequence
  Description of Artificial Sequence: Synthetic peptide
  Seed: PRMCSLMQGSTLPRRSGAA
PRMFSLMQISTIPRRSGAA

SEQ ID NO: 118317 - protein, 19 aa, Artificial Sequence
  Description of Artificial Sequence: Synthetic peptide
  Seed: PRMCSLMQGSTLPRRSGAA
PRMFSLMQISTLPRRSGAA

SEQ ID NO: 118318 - protein, 19 aa, Artificial Sequence
  Description of Artificial Sequence: Synthetic peptide
  Seed: PRMCSLMQGSTLPRRSGAA
PRMFSLMQISTVPRRSGAA

SEQ ID NO: 118319 - protein, 19 aa, Artificial Sequence
  Description of Artificial Sequence: Synthetic peptide
  Seed: PRMCSLMQGSTLPRRSGAA
PRMFSLMQNSTAPRRSGAA

SEQ ID NO: 118320 - protein, 19 aa, Artificial Sequence
  Description of Artificial Sequence: Synthetic peptide
  Seed: PRMCSLMQGSTLPRRSGAA
PRMFSLMQNSTIPRRSGAA

SEQ ID NO: 118321 - protein, 19 aa, Artificial Sequence
  Description of Artificial Sequence: Synthetic peptide
  Seed: PRMCSLMQGSTLPRRSGAA
PRMFSLMQNSTLPRRSGAA

SEQ ID NO: 118322 - protein, 19 aa, Artificial Sequence
  Description of Artificial Sequence: Synthetic peptide
  Seed: PRMCSLMQGSTLPRRSGAA
PRMFSLMQNSTMPRRSGAA

SEQ ID NO: 118323 - protein, 19 aa, Artificial Sequence
  Description of Artificial Sequence: Synthetic peptide
  Seed: PRMCSLMQGSTLPRRSGAA
PRMFSLMQNSTSPRRSGAA

SEQ ID NO: 118324 - protein, 19 aa, Artificial Sequence
  Description of Artificial Sequence: Synthetic peptide
  Seed: PRMCSLMQGSTLPRRSGAA
PRMFSLMQNSTTPRRSGAA

SEQ ID NO: 118325 - protein, 19 aa, Artificial Sequence
  Description of Artificial Sequence: Synthetic peptide
  Seed: PRMCSLMQGSTLPRRSGAA
PRMFSLMQNSTVPRRSGAA

SEQ ID NO: 118326 - protein, 19 aa, Artificial Sequence
  Description of Artificial Sequence: Synthetic peptide
  Seed: PRMCSLMQGSTLPRRSGAA
PRMFSLMQPSTAPRRSGAA

SEQ ID NO: 118327 - protein, 19 aa, Artificial Sequence
  Description of Artificial Sequence: Synthetic peptide
  Seed: PRMCSLMQGSTLPRRSGAA
PRMFSLMQPSTFPRRSGAA

SEQ ID NO: 118328 - protein, 19 aa, Artificial Sequence
  Description of Artificial Sequence: Synthetic peptide
  Seed: PRMCSLMQGSTLPRRSGAA
PRMFSLMQPSTGPRRSGAA

SEQ ID NO: 118329 - protein, 19 aa, Artificial Sequence
  Description of Artificial Sequence: Synthetic peptide
  Seed: PRMCSLMQGSTLPRRSGAA
PRMFSLMQPSTIPRRSGAA

SEQ ID NO: 118330 - protein, 19 aa, Artificial Sequence
  Description of Artificial Sequence: Synthetic peptide
  Seed: PRMCSLMQGSTLPRRSGAA
PRMFSLMQPSTLPRRSGAA

SEQ ID NO: 118331 - protein, 19 aa, Artificial Sequence
  Description of Artificial Sequence: Synthetic peptide
  Seed: PRMCSLMQGSTLPRRSGAA
PRMFSLMQPSTMPRRSGAA

SEQ ID NO: 118332 - protein, 19 aa, Artificial Sequence
  Description of Artificial Sequence: Synthetic peptide
  Seed: PRMCSLMQGSTLPRRSGAA
PRMFSLMQPSTSPRRSGAA

SEQ ID NO: 118333 - protein, 19 aa, Artificial Sequence
  Description of Artificial Sequence: Synthetic peptide
  Seed: PRMCSLMQGSTLPRRSGAA
PRMFSLMQPSTTPRRSGAA

SEQ ID NO: 118334 - protein, 19 aa, Artificial Sequence
  Description of Artificial Sequence: Synthetic peptide
  Seed: PRMCSLMQGSTLPRRSGAA
PRMFSLMQPSTVPRRSGAA

SEQ ID NO: 118335 - protein, 19 aa, Artificial Sequence
  Description of Artificial Sequence: Synthetic peptide
  Seed: PRMCSLMQGSTLPRRSGAA
PRMFSLMQSSTAPRRSGAA

SEQ ID NO: 118336 - protein, 19 aa, Artificial Sequence
  Description of Artificial Sequence: Synthetic peptide
  Seed: PRMCSLMQGSTLPRRSGAA
PRMFSLMQSSTCPRRSGAA

SEQ ID NO: 118337 - protein, 19 aa, Artificial Sequence
  Description of Artificial Sequence: Synthetic peptide
  Seed: PRMCSLMQGSTLPRRSGAA
PRMFSLMQSSTFPRRSGAA

SEQ ID NO: 118338 - protein, 19 aa, Artificial Sequence
  Description of Artificial Sequence: Synthetic peptide
  Seed: PRMCSLMQGSTLPRRSGAA
PRMFSLMQSSTGPRRSGAA

SEQ ID NO: 118339 - protein, 19 aa, Artificial Sequence
  Description of Artificial Sequence: Synthetic peptide
  Seed: PRMCSLMQGSTLPRRSGAA
PRMFSLMQSSTIPRRSGAA

SEQ ID NO: 118340 - protein, 19 aa, Artificial Sequence
  Description of Artificial Sequence: Synthetic peptide
  Seed: PRMCSLMQGSTLPRRSGAA
PRMFSLMQSSTLPRRSGAA

SEQ ID NO: 118341 - protein, 19 aa, Artificial Sequence
  Description of Artificial Sequence: Synthetic peptide
  Seed: PRMCSLMQGSTLPRRSGAA
PRMFSLMQSSTMPRRSGAA

SEQ ID NO: 118342 - protein, 19 aa, Artificial Sequence
  Description of Artificial Sequence: Synthetic peptide
  Seed: PRMCSLMQGSTLPRRSGAA
PRMFSLMQSSTSPRRSGAA

SEQ ID NO: 118343 - protein, 19 aa, Artificial Sequence
  Description of Artificial Sequence: Synthetic peptide
  Seed: PRMCSLMQGSTLPRRSGAA
PRMFSLMQSSTTPRRSGAA

SEQ ID NO: 118344 - protein, 19 aa, Artificial Sequence
  Description of Artificial Sequence: Synthetic peptide
  Seed: PRMCSLMQGSTLPRRSGAA
PRMFSLMQSSTVPRRSGAA

SEQ ID NO: 118345 - protein, 19 aa, Artificial Sequence
  Description of Artificial Sequence: Synthetic peptide
  Seed: PRMCSLMQGSTLPRRSGAA
PRMFSLMQTSTAPRRSGAA

SEQ ID NO: 118346 - protein, 19 aa, Artificial Sequence
  Description of Artificial Sequence: Synthetic peptide
  Seed: PRMCSLMQGSTLPRRSGAA
PRMFSLMQTSTIPRRSGAA

SEQ ID NO: 118347 - protein, 19 aa, Artificial Sequence
  Description of Artificial Sequence: Synthetic peptide
  Seed: PRMCSLMQGSTLPRRSGAA
PRMFSLMQTSTLPRRSGAA

SEQ ID NO: 118348 - protein, 19 aa, Artificial Sequence
  Description of Artificial Sequence: Synthetic peptide
  Seed: PRMCSLMQGSTLPRRSGAA
PRMFSLMQTSTMPRRSGAA

SEQ ID NO: 118349 - protein, 19 aa, Artificial Sequence
  Description of Artificial Sequence: Synthetic peptide
  Seed: PRMCSLMQGSTLPRRSGAA
PRMFSLMQTSTSPRRSGAA

SEQ ID NO: 118350 - protein, 19 aa, Artificial Sequence
  Description of Artificial Sequence: Synthetic peptide
  Seed: PRMCSLMQGSTLPRRSGAA
PRMFSLMQTSTTPRRSGAA

SEQ ID NO: 118351 - protein, 19 aa, Artificial Sequence
  Description of Artificial Sequence: Synthetic peptide
  Seed: PRMCSLMQGSTLPRRSGAA
PRMFSLMQTSTVPRRSGAA

SEQ ID NO: 118352 - protein, 19 aa, Artificial Sequence
  Description of Artificial Sequence: Synthetic peptide
  Seed: PRMCSLMQGSTLPRRSGAA
PRMFSLMQVSTAPRRSGAA

SEQ ID NO: 118353 - protein, 19 aa, Artificial Sequence
  Description of Artificial Sequence: Synthetic peptide
  Seed: PRMCSLMQGSTLPRRSGAA
PRMFSLMQVSTIPRRSGAA

SEQ ID NO: 118354 - protein, 19 aa, Artificial Sequence
  Description of Artificial Sequence: Synthetic peptide
  Seed: PRMCSLMQGSTLPRRSGAA
PRMFSLMQVSTLPRRSGAA

SEQ ID NO: 118355 - protein, 19 aa, Artificial Sequence
  Description of Artificial Sequence: Synthetic peptide
  Seed: PRMCSLMQGSTLPRRSGAA
PRMFSLMQVSTMPRRSGAA

SEQ ID NO: 118356 - protein, 19 aa, Artificial Sequence
  Description of Artificial Sequence: Synthetic peptide
  Seed: PRMCSLMQGSTLPRRSGAA
PRMFSLMQVSTSPRRSGAA

SEQ ID NO: 118357 - protein, 19 aa, Artificial Sequence
  Description of Artificial Sequence: Synthetic peptide
  Seed: PRMCSLMQGSTLPRRSGAA
PRMFSLMQVSTTPRRSGAA

SEQ ID NO: 118358 - protein, 19 aa, Artificial Sequence
  Description of Artificial Sequence: Synthetic peptide
  Seed: PRMCSLMQGSTLPRRSGAA
PRMFSLMQVSTVPRRSGAA

SEQ ID NO: 118359 - protein, 19 aa, Artificial Sequence
  Description of Artificial Sequence: Synthetic peptide
  Seed: PRMCSLMQGSTLPRRSGAA
PRMFSLNQASTIPRRSGAA

SEQ ID NO: 118360 - protein, 19 aa, Artificial Sequence
  Description of Artificial Sequence: Synthetic peptide
  Seed: PRMCSLMQGSTLPRRSGAA
PRMFSLNQASTLPRRSGAA

SEQ ID NO: 118361 - protein, 19 aa, Artificial Sequence
  Description of Artificial Sequence: Synthetic peptide
  Seed: PRMCSLMQGSTLPRRSGAA
PRMFSLNQASTVPRRSGAA

SEQ ID NO: 118362 - protein, 19 aa, Artificial Sequence
  Description of Artificial Sequence: Synthetic peptide
  Seed: PRMCSLMQGSTLPRRSGAA
PRMFSLQQASTAPRRSGAA

SEQ ID NO: 118363 - protein, 19 aa, Artificial Sequence
  Description of Artificial Sequence: Synthetic peptide
  Seed: PRMCSLMQGSTLPRRSGAA
PRMFSLQQASTIPRRSGAA

SEQ ID NO: 118364 - protein, 19 aa, Artificial Sequence
  Description of Artificial Sequence: Synthetic peptide
  Seed: PRMCSLMQGSTLPRRSGAA
PRMFSLQQASTLPRRSGAA

SEQ ID NO: 118365 - protein, 19 aa, Artificial Sequence
  Description of Artificial Sequence: Synthetic peptide
  Seed: PRMCSLMQGSTLPRRSGAA
PRMFSLQQASTMPRRSGAA

SEQ ID NO: 118366 - protein, 19 aa, Artificial Sequence
  Description of Artificial Sequence: Synthetic peptide
  Seed: PRMCSLMQGSTLPRRSGAA
PRMFSLQQASTSPRRSGAA

SEQ ID NO: 118367 - protein, 19 aa, Artificial Sequence
  Description of Artificial Sequence: Synthetic peptide
  Seed: PRMCSLMQGSTLPRRSGAA
PRMFSLQQASTTPRRSGAA

SEQ ID NO: 118368 - protein, 19 aa, Artificial Sequence
  Description of Artificial Sequence: Synthetic peptide
  Seed: PRMCSLMQGSTLPRRSGAA
PRMFSLQQASTVPRRSGAA

SEQ ID NO: 118369 - protein, 19 aa, Artificial Sequence
  Description of Artificial Sequence: Synthetic peptide
  Seed: PRMCSLMQGSTLPRRSGAA
PRMFSLQQGSTAPRRSGAA

SEQ ID NO: 118370 - protein, 19 aa, Artificial Sequence
  Description of Artificial Sequence: Synthetic peptide
  Seed: PRMCSLMQGSTLPRRSGAA
PRMFSLQQGSTIPRRSGAA

SEQ ID NO: 118371 - protein, 19 aa, Artificial Sequence
  Description of Artificial Sequence: Synthetic peptide
  Seed: PRMCSLMQGSTLPRRSGAA
PRMFSLQQGSTLPRRSGAA

SEQ ID NO: 118372 - protein, 19 aa, Artificial Sequence
  Description of Artificial Sequence: Synthetic peptide
  Seed: PRMCSLMQGSTLPRRSGAA
PRMFSLQQGSTMPRRSGAA

SEQ ID NO: 118373 - protein, 19 aa, Artificial Sequence
  Description of Artificial Sequence: Synthetic peptide
  Seed: PRMCSLMQGSTLPRRSGAA
PRMFSLQQGSTVPRRSGAA

SEQ ID NO: 118374 - protein, 19 aa, Artificial Sequence
  Description of Artificial Sequence: Synthetic peptide
  Seed: PRMCSLMQGSTLPRRSGAA
PRMFSLQQNSTLPRRSGAA

SEQ ID NO: 118375 - protein, 19 aa, Artificial Sequence
  Description of Artificial Sequence: Synthetic peptide
  Seed: PRMCSLMQGSTLPRRSGAA
PRMFSLQQNSTVPRRSGAA

SEQ ID NO: 118376 - protein, 19 aa, Artificial Sequence
  Description of Artificial Sequence: Synthetic peptide
  Seed: PRMCSLMQGSTLPRRSGAA
PRMFSLQQPSTAPRRSGAA

SEQ ID NO: 118377 - protein, 19 aa, Artificial Sequence
  Description of Artificial Sequence: Synthetic peptide
  Seed: PRMCSLMQGSTLPRRSGAA
PRMFSLQQPSTIPRRSGAA

SEQ ID NO: 118378 - protein, 19 aa, Artificial Sequence
  Description of Artificial Sequence: Synthetic peptide
  Seed: PRMCSLMQGSTLPRRSGAA
PRMFSLQQPSTLPRRSGAA

SEQ ID NO: 118379 - protein, 19 aa, Artificial Sequence
  Description of Artificial Sequence: Synthetic peptide
  Seed: PRMCSLMQGSTLPRRSGAA
PRMFSLQQPSTVPRRSGAA

SEQ ID NO: 118380 - protein, 19 aa, Artificial Sequence
  Description of Artificial Sequence: Synthetic peptide
  Seed: PRMCSLMQGSTLPRRSGAA
PRMFSLQQSSTAPRRSGAA

SEQ ID NO: 118381 - protein, 19 aa, Artificial Sequence
  Description of Artificial Sequence: Synthetic peptide
  Seed: PRMCSLMQGSTLPRRSGAA
PRMFSLQQSSTIPRRSGAA

SEQ ID NO: 118382 - protein, 19 aa, Artificial Sequence
  Description of Artificial Sequence: Synthetic peptide
  Seed: PRMCSLMQGSTLPRRSGAA
PRMFSLQQSSTLPRRSGAA

SEQ ID NO: 118383 - protein, 19 aa, Artificial Sequence
  Description of Artificial Sequence: Synthetic peptide
  Seed: PRMCSLMQGSTLPRRSGAA
PRMFSLQQSSTMPRRSGAA

SEQ ID NO: 118384 - protein, 19 aa, Artificial Sequence
  Description of Artificial Sequence: Synthetic peptide
  Seed: PRMCSLMQGSTLPRRSGAA
PRMFSLQQSSTVPRRSGAA

SEQ ID NO: 118385 - protein, 19 aa, Artificial Sequence
  Description of Artificial Sequence: Synthetic peptide
  Seed: PRMCSLMQGSTLPRRSGAA
PRMFSLQQTSTLPRRSGAA

SEQ ID NO: 118386 - protein, 19 aa, Artificial Sequence
  Description of Artificial Sequence: Synthetic peptide
  Seed: PRMCSLMQGSTLPRRSGAA
PRMFSLQQTSTVPRRSGAA

SEQ ID NO: 118387 - protein, 19 aa, Artificial Sequence
  Description of Artificial Sequence: Synthetic peptide
  Seed: PRMCSLMQGSTLPRRSGAA
PRMFSLSQASTAPRRSGAA

SEQ ID NO: 118388 - protein, 19 aa, Artificial Sequence
  Description of Artificial Sequence: Synthetic peptide
  Seed: PRMCSLMQGSTLPRRSGAA
PRMFSLSQASTIPRRSGAA

SEQ ID NO: 118389 - protein, 19 aa, Artificial Sequence
  Description of Artificial Sequence: Synthetic peptide
  Seed: PRMCSLMQGSTLPRRSGAA
PRMFSLSQASTLPRRSGAA

SEQ ID NO: 118390 - protein, 19 aa, Artificial Sequence
  Description of Artificial Sequence: Synthetic peptide
  Seed: PRMCSLMQGSTLPRRSGAA
PRMFSLSQASTMPRRSGAA

SEQ ID NO: 118391 - protein, 19 aa, Artificial Sequence
  Description of Artificial Sequence: Synthetic peptide
  Seed: PRMCSLMQGSTLPRRSGAA
PRMFSLSQASTVPRRSGAA

SEQ ID NO: 118392 - protein, 19 aa, Artificial Sequence
  Description of Artificial Sequence: Synthetic peptide
  Seed: PRMCSLMQGSTLPRRSGAA
PRMFSLSQGSTIPRRSGAA

SEQ ID NO: 118393 - protein, 19 aa, Artificial Sequence
  Description of Artificial Sequence: Synthetic peptide
  Seed: PRMCSLMQGSTLPRRSGAA
PRMFSLSQGSTLPRRSGAA

SEQ ID NO: 118394 - protein, 19 aa, Artificial Sequence
  Description of Artificial Sequence: Synthetic peptide
  Seed: PRMCSLMQGSTLPRRSGAA
PRMFSLSQGSTVPRRSGAA

SEQ ID NO: 118395 - protein, 19 aa, Artificial Sequence
  Description of Artificial Sequence: Synthetic peptide
  Seed: PRMCSLMQGSTLPRRSGAA
PRMFSLSQSSTIPRRSGAA

SEQ ID NO: 118396 - protein, 19 aa, Artificial Sequence
  Description of Artificial Sequence: Synthetic peptide
  Seed: PRMCSLMQGSTLPRRSGAA
PRMFSLSQSSTLPRRSGAA

SEQ ID NO: 118397 - protein, 19 aa, Artificial Sequence
  Description of Artificial Sequence: Synthetic peptide
  Seed: PRMCSLMQGSTLPRRSGAA
PRMFSLSQSSTVPRRSGAA

SEQ ID NO: 118398 - protein, 19 aa, Artificial Sequence
  Description of Artificial Sequence: Synthetic peptide
  Seed: PRMCSLMQGSTLPRRSGAA
PRMFSLTQASTIPRRSGAA

SEQ ID NO: 118399 - protein, 19 aa, Artificial Sequence
  Description of Artificial Sequence: Synthetic peptide
  Seed: PRMCSLMQGSTLPRRSGAA
PRMFSLTQASTLPRRSGAA

SEQ ID NO: 118400 - protein, 19 aa, Artificial Sequence
  Description of Artificial Sequence: Synthetic peptide
  Seed: PRMCSLMQGSTLPRRSGAA
PRMFSLTQASTVPRRSGAA

SEQ ID NO: 118401 - protein, 19 aa, Artificial Sequence
  Description of Artificial Sequence: Synthetic peptide
  Seed: PRMCSLMQGSTLPRRSGAA
PRMFSLVQASTAPRRSGAA

SEQ ID NO: 118402 - protein, 19 aa, Artificial Sequence
  Description of Artificial Sequence: Synthetic peptide
  Seed: PRMCSLMQGSTLPRRSGAA
PRMFSLVQASTIPRRSGAA

SEQ ID NO: 118403 - protein, 19 aa, Artificial Sequence
  Description of Artificial Sequence: Synthetic peptide
  Seed: PRMCSLMQGSTLPRRSGAA
PRMFSLVQASTLPRRSGAA

SEQ ID NO: 118404 - protein, 19 aa, Artificial Sequence
  Description of Artificial Sequence: Synthetic peptide
  Seed: PRMCSLMQGSTLPRRSGAA
PRMFSLVQASTMPRRSGAA

SEQ ID NO: 118405 - protein, 19 aa, Artificial Sequence
  Description of Artificial Sequence: Synthetic peptide
  Seed: PRMCSLMQGSTLPRRSGAA
PRMFSLVQASTSPRRSGAA

SEQ ID NO: 118406 - protein, 19 aa, Artificial Sequence
  Description of Artificial Sequence: Synthetic peptide
  Seed: PRMCSLMQGSTLPRRSGAA
PRMFSLVQASTTPRRSGAA

SEQ ID NO: 118407 - protein, 19 aa, Artificial Sequence
  Description of Artificial Sequence: Synthetic peptide
  Seed: PRMCSLMQGSTLPRRSGAA
PRMFSLVQASTVPRRSGAA

SEQ ID NO: 118408 - protein, 19 aa, Artificial Sequence
  Description of Artificial Sequence: Synthetic peptide
  Seed: PRMCSLMQGSTLPRRSGAA
PRMFSLVQGSTAPRRSGAA

SEQ ID NO: 118409 - protein, 19 aa, Artificial Sequence
  Description of Artificial Sequence: Synthetic peptide
  Seed: PRMCSLMQGSTLPRRSGAA
PRMFSLVQGSTIPRRSGAA

SEQ ID NO: 118410 - protein, 19 aa, Artificial Sequence
  Description of Artificial Sequence: Synthetic peptide
  Seed: PRMCSLMQGSTLPRRSGAA
PRMFSLVQGSTLPRRSGAA

SEQ ID NO: 118411 - protein, 19 aa, Artificial Sequence
  Description of Artificial Sequence: Synthetic peptide
  Seed: PRMCSLMQGSTLPRRSGAA
PRMFSLVQGSTMPRRSGAA

SEQ ID NO: 118412 - protein, 19 aa, Artificial Sequence
  Description of Artificial Sequence: Synthetic peptide
  Seed: PRMCSLMQGSTLPRRSGAA
PRMFSLVQGSTTPRRSGAA

SEQ ID NO: 118413 - protein, 19 aa, Artificial Sequence
  Description of Artificial Sequence: Synthetic peptide
  Seed: PRMCSLMQGSTLPRRSGAA
PRMFSLVQGSTVPRRSGAA

SEQ ID NO: 118414 - protein, 19 aa, Artificial Sequence
  Description of Artificial Sequence: Synthetic peptide
  Seed: PRMCSLMQGSTLPRRSGAA
PRMFSLVQNSTLPRRSGAA

SEQ ID NO: 118415 - protein, 19 aa, Artificial Sequence
  Description of Artificial Sequence: Synthetic peptide
  Seed: PRMCSLMQGSTLPRRSGAA
PRMFSLVQNSTVPRRSGAA

SEQ ID NO: 118416 - protein, 19 aa, Artificial Sequence
  Description of Artificial Sequence: Synthetic peptide
  Seed: PRMCSLMQGSTLPRRSGAA
PRMFSLVQPSTAPRRSGAA

SEQ ID NO: 118417 - protein, 19 aa, Artificial Sequence
  Description of Artificial Sequence: Synthetic peptide
  Seed: PRMCSLMQGSTLPRRSGAA
PRMFSLVQPSTIPRRSGAA

SEQ ID NO: 118418 - protein, 19 aa, Artificial Sequence
  Description of Artificial Sequence: Synthetic peptide
  Seed: PRMCSLMQGSTLPRRSGAA
PRMFSLVQPSTLPRRSGAA

SEQ ID NO: 118419 - protein, 19 aa, Artificial Sequence
  Description of Artificial Sequence: Synthetic peptide
  Seed: PRMCSLMQGSTLPRRSGAA
PRMFSLVQPSTVPRRSGAA

SEQ ID NO: 118420 - protein, 19 aa, Artificial Sequence
  Description of Artificial Sequence: Synthetic peptide
  Seed: PRMCSLMQGSTLPRRSGAA
PRMFSLVQSSTAPRRSGAA

SEQ ID NO: 118421 - protein, 19 aa, Artificial Sequence
  Description of Artificial Sequence: Synthetic peptide
  Seed: PRMCSLMQGSTLPRRSGAA
PRMFSLVQSSTIPRRSGAA

SEQ ID NO: 118422 - protein, 19 aa, Artificial Sequence
  Description of Artificial Sequence: Synthetic peptide
  Seed: PRMCSLMQGSTLPRRSGAA
PRMFSLVQSSTLPRRSGAA

SEQ ID NO: 118423 - protein, 19 aa, Artificial Sequence
  Description of Artificial Sequence: Synthetic peptide
  Seed: PRMCSLMQGSTLPRRSGAA
PRMFSLVQSSTTPRRSGAA

SEQ ID NO: 118424 - protein, 19 aa, Artificial Sequence
  Description of Artificial Sequence: Synthetic peptide
  Seed: PRMCSLMQGSTLPRRSGAA
PRMFSLVQSSTVPRRSGAA

SEQ ID NO: 118425 - protein, 19 aa, Artificial Sequence
  Description of Artificial Sequence: Synthetic peptide
  Seed: PRMCSLMQGSTLPRRSGAA
PRMFSLVQTSTIPRRSGAA

SEQ ID NO: 118426 - protein, 19 aa, Artificial Sequence
  Description of Artificial Sequence: Synthetic peptide
  Seed: PRMCSLMQGSTLPRRSGAA
PRMFSLVQTSTLPRRSGAA

SEQ ID NO: 118427 - protein, 19 aa, Artificial Sequence
  Description of Artificial Sequence: Synthetic peptide
  Seed: PRMCSLMQGSTLPRRSGAA
PRMFSLVQTSTVPRRSGAA

SEQ ID NO: 118428 - protein, 19 aa, Artificial Sequence
  Description of Artificial Sequence: Synthetic peptide
  Seed: PRMCSLMQGSTLPRRSGAA
PRMISLAQASTIPRRSGAA

SEQ ID NO: 118429 - protein, 19 aa, Artificial Sequence
  Description of Artificial Sequence: Synthetic peptide
  Seed: PRMCSLMQGSTLPRRSGAA
PRMISLAQASTLPRRSGAA

SEQ ID NO: 118430 - protein, 19 aa, Artificial Sequence
  Description of Artificial Sequence: Synthetic peptide
  Seed: PRMCSLMQGSTLPRRSGAA
PRMISLAQASTVPRRSGAA

SEQ ID NO: 118431 - protein, 19 aa, Artificial Sequence
  Description of Artificial Sequence: Synthetic peptide
  Seed: PRMCSLMQGSTLPRRSGAA
PRMISLAQGSTLPRRSGAA

SEQ ID NO: 118432 - protein, 19 aa, Artificial Sequence
  Description of Artificial Sequence: Synthetic peptide
  Seed: PRMCSLMQGSTLPRRSGAA
PRMISLIQASTAPRRSGAA

SEQ ID NO: 118433 - protein, 19 aa, Artificial Sequence
  Description of Artificial Sequence: Synthetic peptide
  Seed: PRMCSLMQGSTLPRRSGAA
PRMISLIQASTIPRRSGAA

SEQ ID NO: 118434 - protein, 19 aa, Artificial Sequence
  Description of Artificial Sequence: Synthetic peptide
  Seed: PRMCSLMQGSTLPRRSGAA
PRMISLIQASTLPRRSGAA

SEQ ID NO: 118435 - protein, 19 aa, Artificial Sequence
  Description of Artificial Sequence: Synthetic peptide
  Seed: PRMCSLMQGSTLPRRSGAA
PRMISLIQASTVPRRSGAA

SEQ ID NO: 118436 - protein, 19 aa, Artificial Sequence
  Description of Artificial Sequence: Synthetic peptide
  Seed: PRMCSLMQGSTLPRRSGAA
PRMISLIQGSTAPRRSGAA

SEQ ID NO: 118437 - protein, 19 aa, Artificial Sequence
  Description of Artificial Sequence: Synthetic peptide
  Seed: PRMCSLMQGSTLPRRSGAA
PRMISLIQGSTIPRRSGAA

SEQ ID NO: 118438 - protein, 19 aa, Artificial Sequence
  Description of Artificial Sequence: Synthetic peptide
  Seed: PRMCSLMQGSTLPRRSGAA
PRMISLIQGSTLPRRSGAA

SEQ ID NO: 118439 - protein, 19 aa, Artificial Sequence
  Description of Artificial Sequence: Synthetic peptide
  Seed: PRMCSLMQGSTLPRRSGAA
PRMISLIQGSTVPRRSGAA

SEQ ID NO: 118440 - protein, 19 aa, Artificial Sequence
  Description of Artificial Sequence: Synthetic peptide
  Seed: PRMCSLMQGSTLPRRSGAA
PRMISLIQSSTLPRRSGAA

SEQ ID NO: 118441 - protein, 19 aa, Artificial Sequence
  Description of Artificial Sequence: Synthetic peptide
  Seed: PRMCSLMQGSTLPRRSGAA
PRMISLIQSSTVPRRSGAA

SEQ ID NO: 118442 - protein, 19 aa, Artificial Sequence
  Description of Artificial Sequence: Synthetic peptide
  Seed: PRMCSLMQGSTLPRRSGAA
PRMISLLQASTAPRRSGAA

SEQ ID NO: 118443 - protein, 19 aa, Artificial Sequence
  Description of Artificial Sequence: Synthetic peptide
  Seed: PRMCSLMQGSTLPRRSGAA
PRMISLLQASTIPRRSGAA

SEQ ID NO: 118444 - protein, 19 aa, Artificial Sequence
  Description of Artificial Sequence: Synthetic peptide
  Seed: PRMCSLMQGSTLPRRSGAA
PRMISLLQASTLPRRSGAA

SEQ ID NO: 118445 - protein, 19 aa, Artificial Sequence
  Description of Artificial Sequence: Synthetic peptide
  Seed: PRMCSLMQGSTLPRRSGAA
PRMISLLQASTMPRRSGAA

SEQ ID NO: 118446 - protein, 19 aa, Artificial Sequence
  Description of Artificial Sequence: Synthetic peptide
  Seed: PRMCSLMQGSTLPRRSGAA
PRMISLLQASTSPRRSGAA

SEQ ID NO: 118447 - protein, 19 aa, Artificial Sequence
  Description of Artificial Sequence: Synthetic peptide
  Seed: PRMCSLMQGSTLPRRSGAA
PRMISLLQASTTPRRSGAA

SEQ ID NO: 118448 - protein, 19 aa, Artificial Sequence
  Description of Artificial Sequence: Synthetic peptide
  Seed: PRMCSLMQGSTLPRRSGAA
PRMISLLQASTVPRRSGAA

SEQ ID NO: 118449 - protein, 19 aa, Artificial Sequence
  Description of Artificial Sequence: Synthetic peptide
  Seed: PRMCSLMQGSTLPRRSGAA
PRMISLLQGSTAPRRSGAA

SEQ ID NO: 118450 - protein, 19 aa, Artificial Sequence
  Description of Artificial Sequence: Synthetic peptide
  Seed: PRMCSLMQGSTLPRRSGAA
PRMISLLQGSTIPRRSGAA

SEQ ID NO: 118451 - protein, 19 aa, Artificial Sequence
  Description of Artificial Sequence: Synthetic peptide
  Seed: PRMCSLMQGSTLPRRSGAA
PRMISLLQGSTLPRRSGAA

SEQ ID NO: 118452 - protein, 19 aa, Artificial Sequence
  Description of Artificial Sequence: Synthetic peptide
  Seed: PRMCSLMQGSTLPRRSGAA
PRMISLLQGSTMPRRSGAA

SEQ ID NO: 118453 - protein, 19 aa, Artificial Sequence
  Description of Artificial Sequence: Synthetic peptide
  Seed: PRMCSLMQGSTLPRRSGAA
PRMISLLQGSTSPRRSGAA

SEQ ID NO: 118454 - protein, 19 aa, Artificial Sequence
  Description of Artificial Sequence: Synthetic peptide
  Seed: PRMCSLMQGSTLPRRSGAA
PRMISLLQGSTTPRRSGAA

SEQ ID NO: 118455 - protein, 19 aa, Artificial Sequence
  Description of Artificial Sequence: Synthetic peptide
  Seed: PRMCSLMQGSTLPRRSGAA
PRMISLLQGSTVPRRSGAA

SEQ ID NO: 118456 - protein, 19 aa, Artificial Sequence
  Description of Artificial Sequence: Synthetic peptide
  Seed: PRMCSLMQGSTLPRRSGAA
PRMISLLQNSTIPRRSGAA

SEQ ID NO: 118457 - protein, 19 aa, Artificial Sequence
  Description of Artificial Sequence: Synthetic peptide
  Seed: PRMCSLMQGSTLPRRSGAA
PRMISLLQNSTLPRRSGAA

SEQ ID NO: 118458 - protein, 19 aa, Artificial Sequence
  Description of Artificial Sequence: Synthetic peptide
  Seed: PRMCSLMQGSTLPRRSGAA
PRMISLLQNSTVPRRSGAA

SEQ ID NO: 118459 - protein, 19 aa, Artificial Sequence
  Description of Artificial Sequence: Synthetic peptide
  Seed: PRMCSLMQGSTLPRRSGAA
PRMISLLQPSTAPRRSGAA

SEQ ID NO: 118460 - protein, 19 aa, Artificial Sequence
  Description of Artificial Sequence: Synthetic peptide
  Seed: PRMCSLMQGSTLPRRSGAA
PRMISLLQPSTIPRRSGAA

SEQ ID NO: 118461 - protein, 19 aa, Artificial Sequence
  Description of Artificial Sequence: Synthetic peptide
  Seed: PRMCSLMQGSTLPRRSGAA
PRMISLLQPSTLPRRSGAA

SEQ ID NO: 118462 - protein, 19 aa, Artificial Sequence
  Description of Artificial Sequence: Synthetic peptide
  Seed: PRMCSLMQGSTLPRRSGAA
PRMISLLQPSTVPRRSGAA

SEQ ID NO: 118463 - protein, 19 aa, Artificial Sequence
  Description of Artificial Sequence: Synthetic peptide
  Seed: PRMCSLMQGSTLPRRSGAA
PRMISLLQSSTAPRRSGAA

SEQ ID NO: 118464 - protein, 19 aa, Artificial Sequence
  Description of Artificial Sequence: Synthetic peptide
  Seed: PRMCSLMQGSTLPRRSGAA
PRMISLLQSSTIPRRSGAA

SEQ ID NO: 118465 - protein, 19 aa, Artificial Sequence
  Description of Artificial Sequence: Synthetic peptide
  Seed: PRMCSLMQGSTLPRRSGAA
PRMISLLQSSTLPRRSGAA

SEQ ID NO: 118466 - protein, 19 aa, Artificial Sequence
  Description of Artificial Sequence: Synthetic peptide
  Seed: PRMCSLMQGSTLPRRSGAA
PRMISLLQSSTMPRRSGAA

SEQ ID NO: 118467 - protein, 19 aa, Artificial Sequence
  Description of Artificial Sequence: Synthetic peptide
  Seed: PRMCSLMQGSTLPRRSGAA
PRMISLLQSSTTPRRSGAA

SEQ ID NO: 118468 - protein, 19 aa, Artificial Sequence
  Description of Artificial Sequence: Synthetic peptide
  Seed: PRMCSLMQGSTLPRRSGAA
PRMISLLQSSTVPRRSGAA

SEQ ID NO: 118469 - protein, 19 aa, Artificial Sequence
  Description of Artificial Sequence: Synthetic peptide
  Seed: PRMCSLMQGSTLPRRSGAA
PRMISLLQTSTIPRRSGAA

SEQ ID NO: 118470 - protein, 19 aa, Artificial Sequence
  Description of Artificial Sequence: Synthetic peptide
  Seed: PRMCSLMQGSTLPRRSGAA
PRMISLLQTSTLPRRSGAA

SEQ ID NO: 118471 - protein, 19 aa, Artificial Sequence
  Description of Artificial Sequence: Synthetic peptide
  Seed: PRMCSLMQGSTLPRRSGAA
PRMISLLQTSTVPRRSGAA

SEQ ID NO: 118472 - protein, 19 aa, Artificial Sequence
  Description of Artificial Sequence: Synthetic peptide
  Seed: PRMCSLMQGSTLPRRSGAA
PRMISLMQASTAPRRSGAA

SEQ ID NO: 118473 - protein, 19 aa, Artificial Sequence
  Description of Artificial Sequence: Synthetic peptide
  Seed: PRMCSLMQGSTLPRRSGAA
PRMISLMQASTIPRRSGAA

SEQ ID NO: 118474 - protein, 19 aa, Artificial Sequence
  Description of Artificial Sequence: Synthetic peptide
  Seed: PRMCSLMQGSTLPRRSGAA
PRMISLMQASTLPRRSGAA

SEQ ID NO: 118475 - protein, 19 aa, Artificial Sequence
  Description of Artificial Sequence: Synthetic peptide
  Seed: PRMCSLMQGSTLPRRSGAA
PRMISLMQASTMPRRSGAA

SEQ ID NO: 118476 - protein, 19 aa, Artificial Sequence
  Description of Artificial Sequence: Synthetic peptide
  Seed: PRMCSLMQGSTLPRRSGAA
PRMISLMQASTSPRRSGAA

SEQ ID NO: 118477 - protein, 19 aa, Artificial Sequence
  Description of Artificial Sequence: Synthetic peptide
  Seed: PRMCSLMQGSTLPRRSGAA
PRMISLMQASTTPRRSGAA

SEQ ID NO: 118478 - protein, 19 aa, Artificial Sequence
  Description of Artificial Sequence: Synthetic peptide
  Seed: PRMCSLMQGSTLPRRSGAA
PRMISLMQASTVPRRSGAA

SEQ ID NO: 118479 - protein, 19 aa, Artificial Sequence
  Description of Artificial Sequence: Synthetic peptide
  Seed: PRMCSLMQGSTLPRRSGAA
PRMISLMQGSTAPRRSGAA

SEQ ID NO: 118480 - protein, 19 aa, Artificial Sequence
  Description of Artificial Sequence: Synthetic peptide
  Seed: PRMCSLMQGSTLPRRSGAA
PRMISLMQGSTIPRRSGAA

SEQ ID NO: 118481 - protein, 19 aa, Artificial Sequence
  Description of Artificial Sequence: Synthetic peptide
  Seed: PRMCSLMQGSTLPRRSGAA
PRMISLMQGSTLPRRSGAA

SEQ ID NO: 118482 - protein, 19 aa, Artificial Sequence
  Description of Artificial Sequence: Synthetic peptide
  Seed: PRMCSLMQGSTLPRRSGAA
PRMISLMQGSTMPRRSGAA

SEQ ID NO: 118483 - protein, 19 aa, Artificial Sequence
  Description of Artificial Sequence: Synthetic peptide
  Seed: PRMCSLMQGSTLPRRSGAA
PRMISLMQGSTSPRRSGAA

SEQ ID NO: 118484 - protein, 19 aa, Artificial Sequence
  Description of Artificial Sequence: Synthetic peptide
  Seed: PRMCSLMQGSTLPRRSGAA
PRMISLMQGSTTPRRSGAA

SEQ ID NO: 118485 - protein, 19 aa, Artificial Sequence
  Description of Artificial Sequence: Synthetic peptide
  Seed: PRMCSLMQGSTLPRRSGAA
PRMISLMQGSTVPRRSGAA

SEQ ID NO: 118486 - protein, 19 aa, Artificial Sequence
  Description of Artificial Sequence: Synthetic peptide
  Seed: PRMCSLMQGSTLPRRSGAA
PRMISLMQNSTLPRRSGAA

SEQ ID NO: 118487 - protein, 19 aa, Artificial Sequence
  Description of Artificial Sequence: Synthetic peptide
  Seed: PRMCSLMQGSTLPRRSGAA
PRMISLMQNSTVPRRSGAA

SEQ ID NO: 118488 - protein, 19 aa, Artificial Sequence
  Description of Artificial Sequence: Synthetic peptide
  Seed: PRMCSLMQGSTLPRRSGAA
PRMISLMQPSTAPRRSGAA

SEQ ID NO: 118489 - protein, 19 aa, Artificial Sequence
  Description of Artificial Sequence: Synthetic peptide
  Seed: PRMCSLMQGSTLPRRSGAA
PRMISLMQPSTIPRRSGAA

SEQ ID NO: 118490 - protein, 19 aa, Artificial Sequence
  Description of Artificial Sequence: Synthetic peptide
  Seed: PRMCSLMQGSTLPRRSGAA
PRMISLMQPSTLPRRSGAA

SEQ ID NO: 118491 - protein, 19 aa, Artificial Sequence
  Description of Artificial Sequence: Synthetic peptide
  Seed: PRMCSLMQGSTLPRRSGAA
PRMISLMQPSTVPRRSGAA

SEQ ID NO: 118492 - protein, 19 aa, Artificial Sequence
  Description of Artificial Sequence: Synthetic peptide
  Seed: PRMCSLMQGSTLPRRSGAA
PRMISLMQSSTAPRRSGAA

SEQ ID NO: 118493 - protein, 19 aa, Artificial Sequence
  Description of Artificial Sequence: Synthetic peptide
  Seed: PRMCSLMQGSTLPRRSGAA
PRMISLMQSSTIPRRSGAA

SEQ ID NO: 118494 - protein, 19 aa, Artificial Sequence
  Description of Artificial Sequence: Synthetic peptide
  Seed: PRMCSLMQGSTLPRRSGAA
PRMISLMQSSTLPRRSGAA

SEQ ID NO: 118495 - protein, 19 aa, Artificial Sequence
  Description of Artificial Sequence: Synthetic peptide
  Seed: PRMCSLMQGSTLPRRSGAA
PRMISLMQSSTMPRRSGAA

SEQ ID NO: 118496 - protein, 19 aa, Artificial Sequence
  Description of Artificial Sequence: Synthetic peptide
  Seed: PRMCSLMQGSTLPRRSGAA
PRMISLMQSSTTPRRSGAA

SEQ ID NO: 118497 - protein, 19 aa, Artificial Sequence
  Description of Artificial Sequence: Synthetic peptide
  Seed: PRMCSLMQGSTLPRRSGAA
PRMISLMQSSTVPRRSGAA

SEQ ID NO: 118498 - protein, 19 aa, Artificial Sequence
  Description of Artificial Sequence: Synthetic peptide
  Seed: PRMCSLMQGSTLPRRSGAA
PRMISLMQTSTIPRRSGAA

SEQ ID NO: 118499 - protein, 19 aa, Artificial Sequence
  Description of Artificial Sequence: Synthetic peptide
  Seed: PRMCSLMQGSTLPRRSGAA
PRMISLMQTSTLPRRSGAA

SEQ ID NO: 118500 - protein, 19 aa, Artificial Sequence
  Description of Artificial Sequence: Synthetic peptide
  Seed: PRMCSLMQGSTLPRRSGAA
PRMISLMQTSTVPRRSGAA

SEQ ID NO: 118501 - protein, 19 aa, Artificial Sequence
  Description of Artificial Sequence: Synthetic peptide
  Seed: PRMCSLMQGSTLPRRSGAA
PRMISLQQASTIPRRSGAA

SEQ ID NO: 118502 - protein, 19 aa, Artificial Sequence
  Description of Artificial Sequence: Synthetic peptide
  Seed: PRMCSLMQGSTLPRRSGAA
PRMISLQQASTLPRRSGAA

SEQ ID NO: 118503 - protein, 19 aa, Artificial Sequence
  Description of Artificial Sequence: Synthetic peptide
  Seed: PRMCSLMQGSTLPRRSGAA
PRMISLQQASTVPRRSGAA

SEQ ID NO: 118504 - protein, 19 aa, Artificial Sequence
  Description of Artificial Sequence: Synthetic peptide
  Seed: PRMCSLMQGSTLPRRSGAA
PRMLSLAQASTLPRRSGAA

SEQ ID NO: 118505 - protein, 19 aa, Artificial Sequence
  Description of Artificial Sequence: Synthetic peptide
  Seed: PRMCSLMQGSTLPRRSGAA
PRMLSLIQASTAPRRSGAA

SEQ ID NO: 118506 - protein, 19 aa, Artificial Sequence
  Description of Artificial Sequence: Synthetic peptide
  Seed: PRMCSLMQGSTLPRRSGAA
PRMLSLIQASTIPRRSGAA

SEQ ID NO: 118507 - protein, 19 aa, Artificial Sequence
  Description of Artificial Sequence: Synthetic peptide
  Seed: PRMCSLMQGSTLPRRSGAA
PRMLSLIQASTLPRRSGAA

SEQ ID NO: 118508 - protein, 19 aa, Artificial Sequence
  Description of Artificial Sequence: Synthetic peptide
  Seed: PRMCSLMQGSTLPRRSGAA
PRMLSLIQASTVPRRSGAA

SEQ ID NO: 118509 - protein, 19 aa, Artificial Sequence
  Description of Artificial Sequence: Synthetic peptide
  Seed: PRMCSLMQGSTLPRRSGAA
PRMLSLIQGSTLPRRSGAA

SEQ ID NO: 118510 - protein, 19 aa, Artificial Sequence
  Description of Artificial Sequence: Synthetic peptide
  Seed: PRMCSLMQGSTLPRRSGAA
PRMLSLIQGSTVPRRSGAA

SEQ ID NO: 118511 - protein, 19 aa, Artificial Sequence
  Description of Artificial Sequence: Synthetic peptide
  Seed: PRMCSLMQGSTLPRRSGAA
PRMLSLLQASTAPRRSGAA

SEQ ID NO: 118512 - protein, 19 aa, Artificial Sequence
  Description of Artificial Sequence: Synthetic peptide
  Seed: PRMCSLMQGSTLPRRSGAA
PRMLSLLQASTIPRRSGAA

SEQ ID NO: 118513 - protein, 19 aa, Artificial Sequence
  Description of Artificial Sequence: Synthetic peptide
  Seed: PRMCSLMQGSTLPRRSGAA
PRMLSLLQASTLPRRSGAA

SEQ ID NO: 118514 - protein, 19 aa, Artificial Sequence
  Description of Artificial Sequence: Synthetic peptide
  Seed: PRMCSLMQGSTLPRRSGAA
PRMLSLLQASTMPRRSGAA

SEQ ID NO: 118515 - protein, 19 aa, Artificial Sequence
  Description of Artificial Sequence: Synthetic peptide
  Seed: PRMCSLMQGSTLPRRSGAA
PRMLSLLQASTSPRRSGAA

SEQ ID NO: 118516 - protein, 19 aa, Artificial Sequence
  Description of Artificial Sequence: Synthetic peptide
  Seed: PRMCSLMQGSTLPRRSGAA
PRMLSLLQASTTPRRSGAA

SEQ ID NO: 118517 - protein, 19 aa, Artificial Sequence
  Description of Artificial Sequence: Synthetic peptide
  Seed: PRMCSLMQGSTLPRRSGAA
PRMLSLLQASTVPRRSGAA

SEQ ID NO: 118518 - protein, 19 aa, Artificial Sequence
  Description of Artificial Sequence: Synthetic peptide
  Seed: PRMCSLMQGSTLPRRSGAA
PRMLSLLQGSTAPRRSGAA

SEQ ID NO: 118519 - protein, 19 aa, Artificial Sequence
  Description of Artificial Sequence: Synthetic peptide
  Seed: PRMCSLMQGSTLPRRSGAA
PRMLSLLQGSTIPRRSGAA

SEQ ID NO: 118520 - protein, 19 aa, Artificial Sequence
  Description of Artificial Sequence: Synthetic peptide
  Seed: PRMCSLMQGSTLPRRSGAA
PRMLSLLQGSTLPRRSGAA

SEQ ID NO: 118521 - protein, 19 aa, Artificial Sequence
  Description of Artificial Sequence: Synthetic peptide
  Seed: PRMCSLMQGSTLPRRSGAA
PRMLSLLQGSTMPRRSGAA

SEQ ID NO: 118522 - protein, 19 aa, Artificial Sequence
  Description of Artificial Sequence: Synthetic peptide
  Seed: PRMCSLMQGSTLPRRSGAA
PRMLSLLQGSTTPRRSGAA

SEQ ID NO: 118523 - protein, 19 aa, Artificial Sequence
  Description of Artificial Sequence: Synthetic peptide
  Seed: PRMCSLMQGSTLPRRSGAA
PRMLSLLQGSTVPRRSGAA

SEQ ID NO: 118524 - protein, 19 aa, Artificial Sequence
  Description of Artificial Sequence: Synthetic peptide
  Seed: PRMCSLMQGSTLPRRSGAA
PRMLSLLQPSTAPRRSGAA

SEQ ID NO: 118525 - protein, 19 aa, Artificial Sequence
  Description of Artificial Sequence: Synthetic peptide
  Seed: PRMCSLMQGSTLPRRSGAA
PRMLSLLQPSTIPRRSGAA

SEQ ID NO: 118526 - protein, 19 aa, Artificial Sequence
  Description of Artificial Sequence: Synthetic peptide
  Seed: PRMCSLMQGSTLPRRSGAA
PRMLSLLQPSTLPRRSGAA

SEQ ID NO: 118527 - protein, 19 aa, Artificial Sequence
  Description of Artificial Sequence: Synthetic peptide
  Seed: PRMCSLMQGSTLPRRSGAA
PRMLSLLQPSTVPRRSGAA

SEQ ID NO: 118528 - protein, 19 aa, Artificial Sequence
  Description of Artificial Sequence: Synthetic peptide
  Seed: PRMCSLMQGSTLPRRSGAA
PRMLSLLQSSTAPRRSGAA

SEQ ID NO: 118529 - protein, 19 aa, Artificial Sequence
  Description of Artificial Sequence: Synthetic peptide
  Seed: PRMCSLMQGSTLPRRSGAA
PRMLSLLQSSTIPRRSGAA

SEQ ID NO: 118530 - protein, 19 aa, Artificial Sequence
  Description of Artificial Sequence: Synthetic peptide
  Seed: PRMCSLMQGSTLPRRSGAA
PRMLSLLQSSTLPRRSGAA

SEQ ID NO: 118531 - protein, 19 aa, Artificial Sequence
  Description of Artificial Sequence: Synthetic peptide
  Seed: PRMCSLMQGSTLPRRSGAA
PRMLSLLQSSTVPRRSGAA

SEQ ID NO: 118532 - protein, 19 aa, Artificial Sequence
  Description of Artificial Sequence: Synthetic peptide
  Seed: PRMCSLMQGSTLPRRSGAA
PRMLSLMQASTAPRRSGAA

SEQ ID NO: 118533 - protein, 19 aa, Artificial Sequence
  Description of Artificial Sequence: Synthetic peptide
  Seed: PRMCSLMQGSTLPRRSGAA
PRMLSLMQASTIPRRSGAA

SEQ ID NO: 118534 - protein, 19 aa, Artificial Sequence
  Description of Artificial Sequence: Synthetic peptide
  Seed: PRMCSLMQGSTLPRRSGAA
PRMLSLMQASTLPRRSGAA

SEQ ID NO: 118535 - protein, 19 aa, Artificial Sequence
  Description of Artificial Sequence: Synthetic peptide
  Seed: PRMCSLMQGSTLPRRSGAA
PRMLSLMQASTMPRRSGAA

SEQ ID NO: 118536 - protein, 19 aa, Artificial Sequence
  Description of Artificial Sequence: Synthetic peptide
  Seed: PRMCSLMQGSTLPRRSGAA
PRMLSLMQASTSPRRSGAA

SEQ ID NO: 118537 - protein, 19 aa, Artificial Sequence
  Description of Artificial Sequence: Synthetic peptide
  Seed: PRMCSLMQGSTLPRRSGAA
PRMLSLMQASTTPRRSGAA

SEQ ID NO: 118538 - protein, 19 aa, Artificial Sequence
  Description of Artificial Sequence: Synthetic peptide
  Seed: PRMCSLMQGSTLPRRSGAA
PRMLSLMQASTVPRRSGAA

SEQ ID NO: 118539 - protein, 19 aa, Artificial Sequence
  Description of Artificial Sequence: Synthetic peptide
  Seed: PRMCSLMQGSTLPRRSGAA
PRMLSLMQGSTAPRRSGAA

SEQ ID NO: 118540 - protein, 19 aa, Artificial Sequence
  Description of Artificial Sequence: Synthetic peptide
  Seed: PRMCSLMQGSTLPRRSGAA
PRMLSLMQGSTIPRRSGAA

SEQ ID NO: 118541 - protein, 19 aa, Artificial Sequence
  Description of Artificial Sequence: Synthetic peptide
  Seed: PRMCSLMQGSTLPRRSGAA
PRMLSLMQGSTLPRRSGAA

SEQ ID NO: 118542 - protein, 19 aa, Artificial Sequence
  Description of Artificial Sequence: Synthetic peptide
  Seed: PRMCSLMQGSTLPRRSGAA
PRMLSLMQGSTMPRRSGAA

SEQ ID NO: 118543 - protein, 19 aa, Artificial Sequence
  Description of Artificial Sequence: Synthetic peptide
  Seed: PRMCSLMQGSTLPRRSGAA
PRMLSLMQGSTTPRRSGAA

SEQ ID NO: 118544 - protein, 19 aa, Artificial Sequence
  Description of Artificial Sequence: Synthetic peptide
  Seed: PRMCSLMQGSTLPRRSGAA
PRMLSLMQGSTVPRRSGAA

SEQ ID NO: 118545 - protein, 19 aa, Artificial Sequence
  Description of Artificial Sequence: Synthetic peptide
  Seed: PRMCSLMQGSTLPRRSGAA
PRMLSLMQPSTAPRRSGAA

SEQ ID NO: 118546 - protein, 19 aa, Artificial Sequence
  Description of Artificial Sequence: Synthetic peptide
  Seed: PRMCSLMQGSTLPRRSGAA
PRMLSLMQPSTIPRRSGAA

SEQ ID NO: 118547 - protein, 19 aa, Artificial Sequence
  Description of Artificial Sequence: Synthetic peptide
  Seed: PRMCSLMQGSTLPRRSGAA
PRMLSLMQPSTLPRRSGAA

SEQ ID NO: 118548 - protein, 19 aa, Artificial Sequence
  Description of Artificial Sequence: Synthetic peptide
  Seed: PRMCSLMQGSTLPRRSGAA
PRMLSLMQPSTVPRRSGAA

SEQ ID NO: 118549 - protein, 19 aa, Artificial Sequence
  Description of Artificial Sequence: Synthetic peptide
  Seed: PRMCSLMQGSTLPRRSGAA
PRMLSLMQSSTAPRRSGAA

SEQ ID NO: 118550 - protein, 19 aa, Artificial Sequence
  Description of Artificial Sequence: Synthetic peptide
  Seed: PRMCSLMQGSTLPRRSGAA
PRMLSLMQSSTIPRRSGAA

SEQ ID NO: 118551 - protein, 19 aa, Artificial Sequence
  Description of Artificial Sequence: Synthetic peptide
  Seed: PRMCSLMQGSTLPRRSGAA
PRMLSLMQSSTLPRRSGAA

SEQ ID NO: 118552 - protein, 19 aa, Artificial Sequence
  Description of Artificial Sequence: Synthetic peptide
  Seed: PRMCSLMQGSTLPRRSGAA
PRMLSLMQSSTVPRRSGAA

SEQ ID NO: 118553 - protein, 19 aa, Artificial Sequence
  Description of Artificial Sequence: Synthetic peptide
  Seed: PRMCSLMQGSTLPRRSGAA
PRMMSLLQASTAPRRSGAA

SEQ ID NO: 118554 - protein, 19 aa, Artificial Sequence
  Description of Artificial Sequence: Synthetic peptide
  Seed: PRMCSLMQGSTLPRRSGAA
PRMMSLLQASTIPRRSGAA

SEQ ID NO: 118555 - protein, 19 aa, Artificial Sequence
  Description of Artificial Sequence: Synthetic peptide
  Seed: PRMCSLMQGSTLPRRSGAA
PRMMSLLQASTLPRRSGAA

SEQ ID NO: 118556 - protein, 19 aa, Artificial Sequence
  Description of Artificial Sequence: Synthetic peptide
  Seed: PRMCSLMQGSTLPRRSGAA
PRMMSLLQASTVPRRSGAA

SEQ ID NO: 118557 - protein, 19 aa, Artificial Sequence
  Description of Artificial Sequence: Synthetic peptide
  Seed: PRMCSLMQGSTLPRRSGAA
PRMMSLLQGSTAPRRSGAA

SEQ ID NO: 118558 - protein, 19 aa, Artificial Sequence
  Description of Artificial Sequence: Synthetic peptide
  Seed: PRMCSLMQGSTLPRRSGAA
PRMMSLLQGSTIPRRSGAA

SEQ ID NO: 118559 - protein, 19 aa, Artificial Sequence
  Description of Artificial Sequence: Synthetic peptide
  Seed: PRMCSLMQGSTLPRRSGAA
PRMMSLLQGSTLPRRSGAA

SEQ ID NO: 118560 - protein, 19 aa, Artificial Sequence
  Description of Artificial Sequence: Synthetic peptide
  Seed: PRMCSLMQGSTLPRRSGAA
PRMMSLLQGSTVPRRSGAA

SEQ ID NO: 118561 - protein, 19 aa, Artificial Sequence
  Description of Artificial Sequence: Synthetic peptide
  Seed: PRMCSLMQGSTLPRRSGAA
PRMMSLLQSSTIPRRSGAA

SEQ ID NO: 118562 - protein, 19 aa, Artificial Sequence
  Description of Artificial Sequence: Synthetic peptide
  Seed: PRMCSLMQGSTLPRRSGAA
PRMMSLLQSSTLPRRSGAA

SEQ ID NO: 118563 - protein, 19 aa, Artificial Sequence
  Description of Artificial Sequence: Synthetic peptide
  Seed: PRMCSLMQGSTLPRRSGAA
PRMMSLLQSSTVPRRSGAA

SEQ ID NO: 118564 - protein, 19 aa, Artificial Sequence
  Description of Artificial Sequence: Synthetic peptide
  Seed: PRMCSLMQGSTLPRRSGAA
PRMMSLMQASTAPRRSGAA

SEQ ID NO: 118565 - protein, 19 aa, Artificial Sequence
  Description of Artificial Sequence: Synthetic peptide
  Seed: PRMCSLMQGSTLPRRSGAA
PRMMSLMQASTIPRRSGAA

SEQ ID NO: 118566 - protein, 19 aa, Artificial Sequence
  Description of Artificial Sequence: Synthetic peptide
  Seed: PRMCSLMQGSTLPRRSGAA
PRMMSLMQASTLPRRSGAA

SEQ ID NO: 118567 - protein, 19 aa, Artificial Sequence
  Description of Artificial Sequence: Synthetic peptide
  Seed: PRMCSLMQGSTLPRRSGAA
PRMMSLMQASTVPRRSGAA

SEQ ID NO: 118568 - protein, 19 aa, Artificial Sequence
  Description of Artificial Sequence: Synthetic peptide
  Seed: PRMCSLMQGSTLPRRSGAA
PRMMSLMQGSTAPRRSGAA

SEQ ID NO: 118569 - protein, 19 aa, Artificial Sequence
  Description of Artificial Sequence: Synthetic peptide
  Seed: PRMCSLMQGSTLPRRSGAA
PRMMSLMQGSTIPRRSGAA

SEQ ID NO: 118570 - protein, 19 aa, Artificial Sequence
  Description of Artificial Sequence: Synthetic peptide
  Seed: PRMCSLMQGSTLPRRSGAA
PRMMSLMQGSTLPRRSGAA

SEQ ID NO: 118571 - protein, 19 aa, Artificial Sequence
  Description of Artificial Sequence: Synthetic peptide
  Seed: PRMCSLMQGSTLPRRSGAA
PRMMSLMQGSTVPRRSGAA

SEQ ID NO: 118572 - protein, 19 aa, Artificial Sequence
  Description of Artificial Sequence: Synthetic peptide
  Seed: PRMCSLMQGSTLPRRSGAA
PRMMSLMQSSTIPRRSGAA

SEQ ID NO: 118573 - protein, 19 aa, Artificial Sequence
  Description of Artificial Sequence: Synthetic peptide
  Seed: PRMCSLMQGSTLPRRSGAA
PRMMSLMQSSTLPRRSGAA

SEQ ID NO: 118574 - protein, 19 aa, Artificial Sequence
  Description of Artificial Sequence: Synthetic peptide
  Seed: PRMCSLMQGSTLPRRSGAA
PRMMSLMQSSTVPRRSGAA

SEQ ID NO: 118575 - protein, 19 aa, Artificial Sequence
  Description of Artificial Sequence: Synthetic peptide
  Seed: PRMCSLMQGSTLPRRSGAA
PRMVSLLQASTAPRRSGAA

SEQ ID NO: 118576 - protein, 19 aa, Artificial Sequence
  Description of Artificial Sequence: Synthetic peptide
  Seed: PRMCSLMQGSTLPRRSGAA
PRMVSLLQASTIPRRSGAA

SEQ ID NO: 118577 - protein, 19 aa, Artificial Sequence
  Description of Artificial Sequence: Synthetic peptide
  Seed: PRMCSLMQGSTLPRRSGAA
PRMVSLLQASTLPRRSGAA

SEQ ID NO: 118578 - protein, 19 aa, Artificial Sequence
  Description of Artificial Sequence: Synthetic peptide
  Seed: PRMCSLMQGSTLPRRSGAA
PRMVSLLQASTVPRRSGAA

SEQ ID NO: 118579 - protein, 19 aa, Artificial Sequence
  Description of Artificial Sequence: Synthetic peptide
  Seed: PRMCSLMQGSTLPRRSGAA
PRMVSLLQGSTAPRRSGAA

SEQ ID NO: 118580 - protein, 19 aa, Artificial Sequence
  Description of Artificial Sequence: Synthetic peptide
  Seed: PRMCSLMQGSTLPRRSGAA
PRMVSLLQGSTIPRRSGAA

SEQ ID NO: 118581 - protein, 19 aa, Artificial Sequence
  Description of Artificial Sequence: Synthetic peptide
  Seed: PRMCSLMQGSTLPRRSGAA
PRMVSLLQGSTLPRRSGAA

SEQ ID NO: 118582 - protein, 19 aa, Artificial Sequence
  Description of Artificial Sequence: Synthetic peptide
  Seed: PRMCSLMQGSTLPRRSGAA
PRMVSLLQGSTVPRRSGAA

SEQ ID NO: 118583 - protein, 19 aa, Artificial Sequence
  Description of Artificial Sequence: Synthetic peptide
  Seed: PRMCSLMQGSTLPRRSGAA
PRMVSLLQSSTIPRRSGAA

SEQ ID NO: 118584 - protein, 19 aa, Artificial Sequence
  Description of Artificial Sequence: Synthetic peptide
  Seed: PRMCSLMQGSTLPRRSGAA
PRMVSLLQSSTLPRRSGAA

SEQ ID NO: 118585 - protein, 19 aa, Artificial Sequence
  Description of Artificial Sequence: Synthetic peptide
  Seed: PRMCSLMQGSTLPRRSGAA
PRMVSLLQSSTVPRRSGAA

SEQ ID NO: 118586 - protein, 19 aa, Artificial Sequence
  Description of Artificial Sequence: Synthetic peptide
  Seed: PRMCSLMQGSTLPRRSGAA
PRMVSLMQASTAPRRSGAA

SEQ ID NO: 118587 - protein, 19 aa, Artificial Sequence
  Description of Artificial Sequence: Synthetic peptide
  Seed: PRMCSLMQGSTLPRRSGAA
PRMVSLMQASTIPRRSGAA

SEQ ID NO: 118588 - protein, 19 aa, Artificial Sequence
  Description of Artificial Sequence: Synthetic peptide
  Seed: PRMCSLMQGSTLPRRSGAA
PRMVSLMQASTLPRRSGAA

SEQ ID NO: 118589 - protein, 19 aa, Artificial Sequence
  Description of Artificial Sequence: Synthetic peptide
  Seed: PRMCSLMQGSTLPRRSGAA
PRMVSLMQASTVPRRSGAA

SEQ ID NO: 118590 - protein, 19 aa, Artificial Sequence
  Description of Artificial Sequence: Synthetic peptide
  Seed: PRMCSLMQGSTLPRRSGAA
PRMVSLMQGSTAPRRSGAA

SEQ ID NO: 118591 - protein, 19 aa, Artificial Sequence
  Description of Artificial Sequence: Synthetic peptide
  Seed: PRMCSLMQGSTLPRRSGAA
PRMVSLMQGSTIPRRSGAA

SEQ ID NO: 118592 - protein, 19 aa, Artificial Sequence
  Description of Artificial Sequence: Synthetic peptide
  Seed: PRMCSLMQGSTLPRRSGAA
PRMVSLMQGSTLPRRSGAA

SEQ ID NO: 118593 - protein, 19 aa, Artificial Sequence
  Description of Artificial Sequence: Synthetic peptide
  Seed: PRMCSLMQGSTLPRRSGAA
PRMVSLMQGSTVPRRSGAA

SEQ ID NO: 118594 - protein, 19 aa, Artificial Sequence
  Description of Artificial Sequence: Synthetic peptide
  Seed: PRMCSLMQGSTLPRRSGAA
PRMVSLMQSSTIPRRSGAA

SEQ ID NO: 118595 - protein, 19 aa, Artificial Sequence
  Description of Artificial Sequence: Synthetic peptide
  Seed: PRMCSLMQGSTLPRRSGAA
PRMVSLMQSSTLPRRSGAA

SEQ ID NO: 118596 - protein, 19 aa, Artificial Sequence
  Description of Artificial Sequence: Synthetic peptide
  Seed: PRMCSLMQGSTLPRRSGAA
PRMVSLMQSSTVPRRSGAA

SEQ ID NO: 118597 - protein, 19 aa, Artificial Sequence
  Description of Artificial Sequence: Synthetic peptide
  Seed: PRMCSLMQGSTLPRRSGAA
PRMWSLAQASTAPRRSGAA

SEQ ID NO: 118598 - protein, 19 aa, Artificial Sequence
  Description of Artificial Sequence: Synthetic peptide
  Seed: PRMCSLMQGSTLPRRSGAA
PRMWSLAQASTIPRRSGAA

SEQ ID NO: 118599 - protein, 19 aa, Artificial Sequence
  Description of Artificial Sequence: Synthetic peptide
  Seed: PRMCSLMQGSTLPRRSGAA
PRMWSLAQASTLPRRSGAA

SEQ ID NO: 118600 - protein, 19 aa, Artificial Sequence
  Description of Artificial Sequence: Synthetic peptide
  Seed: PRMCSLMQGSTLPRRSGAA
PRMWSLAQASTVPRRSGAA

SEQ ID NO: 118601 - protein, 19 aa, Artificial Sequence
  Description of Artificial Sequence: Synthetic peptide
  Seed: PRMCSLMQGSTLPRRSGAA
PRMWSLAQGSTIPRRSGAA

SEQ ID NO: 118602 - protein, 19 aa, Artificial Sequence
  Description of Artificial Sequence: Synthetic peptide
  Seed: PRMCSLMQGSTLPRRSGAA
PRMWSLAQGSTLPRRSGAA

SEQ ID NO: 118603 - protein, 19 aa, Artificial Sequence
  Description of Artificial Sequence: Synthetic peptide
  Seed: PRMCSLMQGSTLPRRSGAA
PRMWSLAQGSTVPRRSGAA

SEQ ID NO: 118604 - protein, 19 aa, Artificial Sequence
  Description of Artificial Sequence: Synthetic peptide
  Seed: PRMCSLMQGSTLPRRSGAA
PRMWSLAQSSTIPRRSGAA

SEQ ID NO: 118605 - protein, 19 aa, Artificial Sequence
  Description of Artificial Sequence: Synthetic peptide
  Seed: PRMCSLMQGSTLPRRSGAA
PRMWSLAQSSTLPRRSGAA

SEQ ID NO: 118606 - protein, 19 aa, Artificial Sequence
  Description of Artificial Sequence: Synthetic peptide
  Seed: PRMCSLMQGSTLPRRSGAA
PRMWSLAQSSTVPRRSGAA

SEQ ID NO: 118607 - protein, 19 aa, Artificial Sequence
  Description of Artificial Sequence: Synthetic peptide
  Seed: PRMCSLMQGSTLPRRSGAA
PRMWSLIQASTAPRRSGAA

SEQ ID NO: 118608 - protein, 19 aa, Artificial Sequence
  Description of Artificial Sequence: Synthetic peptide
  Seed: PRMCSLMQGSTLPRRSGAA
PRMWSLIQASTIPRRSGAA

SEQ ID NO: 118609 - protein, 19 aa, Artificial Sequence
  Description of Artificial Sequence: Synthetic peptide
  Seed: PRMCSLMQGSTLPRRSGAA
PRMWSLIQASTLPRRSGAA

SEQ ID NO: 118610 - protein, 19 aa, Artificial Sequence
  Description of Artificial Sequence: Synthetic peptide
  Seed: PRMCSLMQGSTLPRRSGAA
PRMWSLIQASTMPRRSGAA

SEQ ID NO: 118611 - protein, 19 aa, Artificial Sequence
  Description of Artificial Sequence: Synthetic peptide
  Seed: PRMCSLMQGSTLPRRSGAA
PRMWSLIQASTTPRRSGAA

SEQ ID NO: 118612 - protein, 19 aa, Artificial Sequence
  Description of Artificial Sequence: Synthetic peptide
  Seed: PRMCSLMQGSTLPRRSGAA
PRMWSLIQASTVPRRSGAA

SEQ ID NO: 118613 - protein, 19 aa, Artificial Sequence
  Description of Artificial Sequence: Synthetic peptide
  Seed: PRMCSLMQGSTLPRRSGAA
PRMWSLIQGSTAPRRSGAA

SEQ ID NO: 118614 - protein, 19 aa, Artificial Sequence
  Description of Artificial Sequence: Synthetic peptide
  Seed: PRMCSLMQGSTLPRRSGAA
PRMWSLIQGSTIPRRSGAA

SEQ ID NO: 118615 - protein, 19 aa, Artificial Sequence
  Description of Artificial Sequence: Synthetic peptide
  Seed: PRMCSLMQGSTLPRRSGAA
PRMWSLIQGSTLPRRSGAA

SEQ ID NO: 118616 - protein, 19 aa, Artificial Sequence
  Description of Artificial Sequence: Synthetic peptide
  Seed: PRMCSLMQGSTLPRRSGAA
PRMWSLIQGSTVPRRSGAA

SEQ ID NO: 118617 - protein, 19 aa, Artificial Sequence
  Description of Artificial Sequence: Synthetic peptide
  Seed: PRMCSLMQGSTLPRRSGAA
PRMWSLIQPSTVPRRSGAA

SEQ ID NO: 118618 - protein, 19 aa, Artificial Sequence
  Description of Artificial Sequence: Synthetic peptide
  Seed: PRMCSLMQGSTLPRRSGAA
PRMWSLIQSSTAPRRSGAA

SEQ ID NO: 118619 - protein, 19 aa, Artificial Sequence
  Description of Artificial Sequence: Synthetic peptide
  Seed: PRMCSLMQGSTLPRRSGAA
PRMWSLIQSSTIPRRSGAA

SEQ ID NO: 118620 - protein, 19 aa, Artificial Sequence
  Description of Artificial Sequence: Synthetic peptide
  Seed: PRMCSLMQGSTLPRRSGAA
PRMWSLIQSSTLPRRSGAA

SEQ ID NO: 118621 - protein, 19 aa, Artificial Sequence
  Description of Artificial Sequence: Synthetic peptide
  Seed: PRMCSLMQGSTLPRRSGAA
PRMWSLIQSSTVPRRSGAA

SEQ ID NO: 118622 - protein, 19 aa, Artificial Sequence
  Description of Artificial Sequence: Synthetic peptide
  Seed: PRMCSLMQGSTLPRRSGAA
PRMWSLLQASTAPRRSGAA

SEQ ID NO: 118623 - protein, 19 aa, Artificial Sequence
  Description of Artificial Sequence: Synthetic peptide
  Seed: PRMCSLMQGSTLPRRSGAA
PRMWSLLQASTIPRRSGAA

SEQ ID NO: 118624 - protein, 19 aa, Artificial Sequence
  Description of Artificial Sequence: Synthetic peptide
  Seed: PRMCSLMQGSTLPRRSGAA
PRMWSLLQASTLPRRSGAA

SEQ ID NO: 118625 - protein, 19 aa, Artificial Sequence
  Description of Artificial Sequence: Synthetic peptide
  Seed: PRMCSLMQGSTLPRRSGAA
PRMWSLLQASTMPRRSGAA

SEQ ID NO: 118626 - protein, 19 aa, Artificial Sequence
  Description of Artificial Sequence: Synthetic peptide
  Seed: PRMCSLMQGSTLPRRSGAA
PRMWSLLQASTSPRRSGAA

SEQ ID NO: 118627 - protein, 19 aa, Artificial Sequence
  Description of Artificial Sequence: Synthetic peptide
  Seed: PRMCSLMQGSTLPRRSGAA
PRMWSLLQASTTPRRSGAA

SEQ ID NO: 118628 - protein, 19 aa, Artificial Sequence
  Description of Artificial Sequence: Synthetic peptide
  Seed: PRMCSLMQGSTLPRRSGAA
PRMWSLLQASTVPRRSGAA

SEQ ID NO: 118629 - protein, 19 aa, Artificial Sequence
  Description of Artificial Sequence: Synthetic peptide
  Seed: PRMCSLMQGSTLPRRSGAA
PRMWSLLQGSTAPRRSGAA

SEQ ID NO: 118630 - protein, 19 aa, Artificial Sequence
  Description of Artificial Sequence: Synthetic peptide
  Seed: PRMCSLMQGSTLPRRSGAA
PRMWSLLQGSTIPRRSGAA

SEQ ID NO: 118631 - protein, 19 aa, Artificial Sequence
  Description of Artificial Sequence: Synthetic peptide
  Seed: PRMCSLMQGSTLPRRSGAA
PRMWSLLQGSTLPRRSGAA

SEQ ID NO: 118632 - protein, 19 aa, Artificial Sequence
  Description of Artificial Sequence: Synthetic peptide
  Seed: PRMCSLMQGSTLPRRSGAA
PRMWSLLQGSTMPRRSGAA

SEQ ID NO: 118633 - protein, 19 aa, Artificial Sequence
  Description of Artificial Sequence: Synthetic peptide
  Seed: PRMCSLMQGSTLPRRSGAA
PRMWSLLQGSTSPRRSGAA

SEQ ID NO: 118634 - protein, 19 aa, Artificial Sequence
  Description of Artificial Sequence: Synthetic peptide
  Seed: PRMCSLMQGSTLPRRSGAA
PRMWSLLQGSTTPRRSGAA

SEQ ID NO: 118635 - protein, 19 aa, Artificial Sequence
  Description of Artificial Sequence: Synthetic peptide
  Seed: PRMCSLMQGSTLPRRSGAA
PRMWSLLQGSTVPRRSGAA

SEQ ID NO: 118636 - protein, 19 aa, Artificial Sequence
  Description of Artificial Sequence: Synthetic peptide
  Seed: PRMCSLMQGSTLPRRSGAA
PRMWSLLQNSTAPRRSGAA

SEQ ID NO: 118637 - protein, 19 aa, Artificial Sequence
  Description of Artificial Sequence: Synthetic peptide
  Seed: PRMCSLMQGSTLPRRSGAA
PRMWSLLQNSTIPRRSGAA

SEQ ID NO: 118638 - protein, 19 aa, Artificial Sequence
  Description of Artificial Sequence: Synthetic peptide
  Seed: PRMCSLMQGSTLPRRSGAA
PRMWSLLQNSTLPRRSGAA

SEQ ID NO: 118639 - protein, 19 aa, Artificial Sequence
  Description of Artificial Sequence: Synthetic peptide
  Seed: PRMCSLMQGSTLPRRSGAA
PRMWSLLQNSTVPRRSGAA

SEQ ID NO: 118640 - protein, 19 aa, Artificial Sequence
  Description of Artificial Sequence: Synthetic peptide
  Seed: PRMCSLMQGSTLPRRSGAA
PRMWSLLQPSTAPRRSGAA

SEQ ID NO: 118641 - protein, 19 aa, Artificial Sequence
  Description of Artificial Sequence: Synthetic peptide
  Seed: PRMCSLMQGSTLPRRSGAA
PRMWSLLQPSTIPRRSGAA

SEQ ID NO: 118642 - protein, 19 aa, Artificial Sequence
  Description of Artificial Sequence: Synthetic peptide
  Seed: PRMCSLMQGSTLPRRSGAA
PRMWSLLQPSTLPRRSGAA

SEQ ID NO: 118643 - protein, 19 aa, Artificial Sequence
  Description of Artificial Sequence: Synthetic peptide
  Seed: PRMCSLMQGSTLPRRSGAA
PRMWSLLQPSTMPRRSGAA

SEQ ID NO: 118644 - protein, 19 aa, Artificial Sequence
  Description of Artificial Sequence: Synthetic peptide
  Seed: PRMCSLMQGSTLPRRSGAA
PRMWSLLQPSTTPRRSGAA

SEQ ID NO: 118645 - protein, 19 aa, Artificial Sequence
  Description of Artificial Sequence: Synthetic peptide
  Seed: PRMCSLMQGSTLPRRSGAA
PRMWSLLQPSTVPRRSGAA

SEQ ID NO: 118646 - protein, 19 aa, Artificial Sequence
  Description of Artificial Sequence: Synthetic peptide
  Seed: PRMCSLMQGSTLPRRSGAA
PRMWSLLQSSTAPRRSGAA

SEQ ID NO: 118647 - protein, 19 aa, Artificial Sequence
  Description of Artificial Sequence: Synthetic peptide
  Seed: PRMCSLMQGSTLPRRSGAA
PRMWSLLQSSTIPRRSGAA

SEQ ID NO: 118648 - protein, 19 aa, Artificial Sequence
  Description of Artificial Sequence: Synthetic peptide
  Seed: PRMCSLMQGSTLPRRSGAA
PRMWSLLQSSTLPRRSGAA

SEQ ID NO: 118649 - protein, 19 aa, Artificial Sequence
  Description of Artificial Sequence: Synthetic peptide
  Seed: PRMCSLMQGSTLPRRSGAA
PRMWSLLQSSTMPRRSGAA

SEQ ID NO: 118650 - protein, 19 aa, Artificial Sequence
  Description of Artificial Sequence: Synthetic peptide
  Seed: PRMCSLMQGSTLPRRSGAA
PRMWSLLQSSTSPRRSGAA

SEQ ID NO: 118651 - protein, 19 aa, Artificial Sequence
  Description of Artificial Sequence: Synthetic peptide
  Seed: PRMCSLMQGSTLPRRSGAA
PRMWSLLQSSTTPRRSGAA

SEQ ID NO: 118652 - protein, 19 aa, Artificial Sequence
  Description of Artificial Sequence: Synthetic peptide
  Seed: PRMCSLMQGSTLPRRSGAA
PRMWSLLQSSTVPRRSGAA

SEQ ID NO: 118653 - protein, 19 aa, Artificial Sequence
  Description of Artificial Sequence: Synthetic peptide
  Seed: PRMCSLMQGSTLPRRSGAA
PRMWSLLQTSTAPRRSGAA

SEQ ID NO: 118654 - protein, 19 aa, Artificial Sequence
  Description of Artificial Sequence: Synthetic peptide
  Seed: PRMCSLMQGSTLPRRSGAA
PRMWSLLQTSTIPRRSGAA

SEQ ID NO: 118655 - protein, 19 aa, Artificial Sequence
  Description of Artificial Sequence: Synthetic peptide
  Seed: PRMCSLMQGSTLPRRSGAA
PRMWSLLQTSTLPRRSGAA

SEQ ID NO: 118656 - protein, 19 aa, Artificial Sequence
  Description of Artificial Sequence: Synthetic peptide
  Seed: PRMCSLMQGSTLPRRSGAA
PRMWSLLQTSTVPRRSGAA

SEQ ID NO: 118657 - protein, 19 aa, Artificial Sequence
  Description of Artificial Sequence: Synthetic peptide
  Seed: PRMCSLMQGSTLPRRSGAA
PRMWSLMQASTAPRRSGAA

SEQ ID NO: 118658 - protein, 19 aa, Artificial Sequence
  Description of Artificial Sequence: Synthetic peptide
  Seed: PRMCSLMQGSTLPRRSGAA
PRMWSLMQASTIPRRSGAA

SEQ ID NO: 118659 - protein, 19 aa, Artificial Sequence
  Description of Artificial Sequence: Synthetic peptide
  Seed: PRMCSLMQGSTLPRRSGAA
PRMWSLMQASTLPRRSGAA

SEQ ID NO: 118660 - protein, 19 aa, Artificial Sequence
  Description of Artificial Sequence: Synthetic peptide
  Seed: PRMCSLMQGSTLPRRSGAA
PRMWSLMQASTMPRRSGAA

SEQ ID NO: 118661 - protein, 19 aa, Artificial Sequence
  Description of Artificial Sequence: Synthetic peptide
  Seed: PRMCSLMQGSTLPRRSGAA
PRMWSLMQASTSPRRSGAA

SEQ ID NO: 118662 - protein, 19 aa, Artificial Sequence
  Description of Artificial Sequence: Synthetic peptide
  Seed: PRMCSLMQGSTLPRRSGAA
PRMWSLMQASTTPRRSGAA

SEQ ID NO: 118663 - protein, 19 aa, Artificial Sequence
  Description of Artificial Sequence: Synthetic peptide
  Seed: PRMCSLMQGSTLPRRSGAA
PRMWSLMQASTVPRRSGAA

SEQ ID NO: 118664 - protein, 19 aa, Artificial Sequence
  Description of Artificial Sequence: Synthetic peptide
  Seed: PRMCSLMQGSTLPRRSGAA
PRMWSLMQGSTAPRRSGAA

SEQ ID NO: 118665 - protein, 19 aa, Artificial Sequence
  Description of Artificial Sequence: Synthetic peptide
  Seed: PRMCSLMQGSTLPRRSGAA
PRMWSLMQGSTIPRRSGAA

SEQ ID NO: 118666 - protein, 19 aa, Artificial Sequence
  Description of Artificial Sequence: Synthetic peptide
  Seed: PRMCSLMQGSTLPRRSGAA
PRMWSLMQGSTLPRRSGAA

SEQ ID NO: 118667 - protein, 19 aa, Artificial Sequence
  Description of Artificial Sequence: Synthetic peptide
  Seed: PRMCSLMQGSTLPRRSGAA
PRMWSLMQGSTMPRRSGAA

SEQ ID NO: 118668 - protein, 19 aa, Artificial Sequence
  Description of Artificial Sequence: Synthetic peptide
  Seed: PRMCSLMQGSTLPRRSGAA
PRMWSLMQGSTSPRRSGAA

SEQ ID NO: 118669 - protein, 19 aa, Artificial Sequence
  Description of Artificial Sequence: Synthetic peptide
  Seed: PRMCSLMQGSTLPRRSGAA
PRMWSLMQGSTTPRRSGAA

SEQ ID NO: 118670 - protein, 19 aa, Artificial Sequence
  Description of Artificial Sequence: Synthetic peptide
  Seed: PRMCSLMQGSTLPRRSGAA
PRMWSLMQGSTVPRRSGAA

SEQ ID NO: 118671 - protein, 19 aa, Artificial Sequence
  Description of Artificial Sequence: Synthetic peptide
  Seed: PRMCSLMQGSTLPRRSGAA
PRMWSLMQNSTAPRRSGAA

SEQ ID NO: 118672 - protein, 19 aa, Artificial Sequence
  Description of Artificial Sequence: Synthetic peptide
  Seed: PRMCSLMQGSTLPRRSGAA
PRMWSLMQNSTIPRRSGAA

SEQ ID NO: 118673 - protein, 19 aa, Artificial Sequence
  Description of Artificial Sequence: Synthetic peptide
  Seed: PRMCSLMQGSTLPRRSGAA
PRMWSLMQNSTLPRRSGAA

SEQ ID NO: 118674 - protein, 19 aa, Artificial Sequence
  Description of Artificial Sequence: Synthetic peptide
  Seed: PRMCSLMQGSTLPRRSGAA
PRMWSLMQNSTVPRRSGAA

SEQ ID NO: 118675 - protein, 19 aa, Artificial Sequence
  Description of Artificial Sequence: Synthetic peptide
  Seed: PRMCSLMQGSTLPRRSGAA
PRMWSLMQPSTAPRRSGAA

SEQ ID NO: 118676 - protein, 19 aa, Artificial Sequence
  Description of Artificial Sequence: Synthetic peptide
  Seed: PRMCSLMQGSTLPRRSGAA
PRMWSLMQPSTIPRRSGAA

SEQ ID NO: 118677 - protein, 19 aa, Artificial Sequence
  Description of Artificial Sequence: Synthetic peptide
  Seed: PRMCSLMQGSTLPRRSGAA
PRMWSLMQPSTLPRRSGAA

SEQ ID NO: 118678 - protein, 19 aa, Artificial Sequence
  Description of Artificial Sequence: Synthetic peptide
  Seed: PRMCSLMQGSTLPRRSGAA
PRMWSLMQPSTVPRRSGAA

SEQ ID NO: 118679 - protein, 19 aa, Artificial Sequence
  Description of Artificial Sequence: Synthetic peptide
  Seed: PRMCSLMQGSTLPRRSGAA
PRMWSLMQSSTAPRRSGAA

SEQ ID NO: 118680 - protein, 19 aa, Artificial Sequence
  Description of Artificial Sequence: Synthetic peptide
  Seed: PRMCSLMQGSTLPRRSGAA
PRMWSLMQSSTIPRRSGAA

SEQ ID NO: 118681 - protein, 19 aa, Artificial Sequence
  Description of Artificial Sequence: Synthetic peptide
  Seed: PRMCSLMQGSTLPRRSGAA
PRMWSLMQSSTLPRRSGAA

SEQ ID NO: 118682 - protein, 19 aa, Artificial Sequence
  Description of Artificial Sequence: Synthetic peptide
  Seed: PRMCSLMQGSTLPRRSGAA
PRMWSLMQSSTMPRRSGAA

SEQ ID NO: 118683 - protein, 19 aa, Artificial Sequence
  Description of Artificial Sequence: Synthetic peptide
  Seed: PRMCSLMQGSTLPRRSGAA
PRMWSLMQSSTSPRRSGAA

SEQ ID NO: 118684 - protein, 19 aa, Artificial Sequence
  Description of Artificial Sequence: Synthetic peptide
  Seed: PRMCSLMQGSTLPRRSGAA
PRMWSLMQSSTTPRRSGAA

SEQ ID NO: 118685 - protein, 19 aa, Artificial Sequence
  Description of Artificial Sequence: Synthetic peptide
  Seed: PRMCSLMQGSTLPRRSGAA
PRMWSLMQSSTVPRRSGAA

SEQ ID NO: 118686 - protein, 19 aa, Artificial Sequence
  Description of Artificial Sequence: Synthetic peptide
  Seed: PRMCSLMQGSTLPRRSGAA
PRMWSLMQTSTAPRRSGAA

SEQ ID NO: 118687 - protein, 19 aa, Artificial Sequence
  Description of Artificial Sequence: Synthetic peptide
  Seed: PRMCSLMQGSTLPRRSGAA
PRMWSLMQTSTIPRRSGAA

SEQ ID NO: 118688 - protein, 19 aa, Artificial Sequence
  Description of Artificial Sequence: Synthetic peptide
  Seed: PRMCSLMQGSTLPRRSGAA
PRMWSLMQTSTLPRRSGAA

SEQ ID NO: 118689 - protein, 19 aa, Artificial Sequence
  Description of Artificial Sequence: Synthetic peptide
  Seed: PRMCSLMQGSTLPRRSGAA
PRMWSLMQTSTVPRRSGAA

SEQ ID NO: 118690 - protein, 19 aa, Artificial Sequence
  Description of Artificial Sequence: Synthetic peptide
  Seed: PRMCSLMQGSTLPRRSGAA
PRMWSLQQASTIPRRSGAA

SEQ ID NO: 118691 - protein, 19 aa, Artificial Sequence
  Description of Artificial Sequence: Synthetic peptide
  Seed: PRMCSLMQGSTLPRRSGAA
PRMWSLQQASTLPRRSGAA

SEQ ID NO: 118692 - protein, 19 aa, Artificial Sequence
  Description of Artificial Sequence: Synthetic peptide
  Seed: PRMCSLMQGSTLPRRSGAA
PRMWSLQQASTVPRRSGAA

SEQ ID NO: 118693 - protein, 19 aa, Artificial Sequence
  Description of Artificial Sequence: Synthetic peptide
  Seed: PRMCSLMQGSTLPRRSGAA
PRMWSLQQGSTLPRRSGAA

SEQ ID NO: 118694 - protein, 19 aa, Artificial Sequence
  Description of Artificial Sequence: Synthetic peptide
  Seed: PRMCSLMQGSTLPRRSGAA
PRMWSLVQASTAPRRSGAA

SEQ ID NO: 118695 - protein, 19 aa, Artificial Sequence
  Description of Artificial Sequence: Synthetic peptide
  Seed: PRMCSLMQGSTLPRRSGAA
PRMWSLVQASTIPRRSGAA

SEQ ID NO: 118696 - protein, 19 aa, Artificial Sequence
  Description of Artificial Sequence: Synthetic peptide
  Seed: PRMCSLMQGSTLPRRSGAA
PRMWSLVQASTLPRRSGAA

SEQ ID NO: 118697 - protein, 19 aa, Artificial Sequence
  Description of Artificial Sequence: Synthetic peptide
  Seed: PRMCSLMQGSTLPRRSGAA
PRMWSLVQASTVPRRSGAA

SEQ ID NO: 118698 - protein, 19 aa, Artificial Sequence
  Description of Artificial Sequence: Synthetic peptide
  Seed: PRMCSLMQGSTLPRRSGAA
PRMWSLVQGSTLPRRSGAA

SEQ ID NO: 118699 - protein, 19 aa, Artificial Sequence
  Description of Artificial Sequence: Synthetic peptide
  Seed: PRMCSLMQGSTLPRRSGAA
PRMWSLVQGSTVPRRSGAA

SEQ ID NO: 118700 - protein, 19 aa, Artificial Sequence
  Description of Artificial Sequence: Synthetic peptide
  Seed: PRMCSLMQGSTLPRRSGAA
PRMYSLAQASTAPRRSGAA

SEQ ID NO: 118701 - protein, 19 aa, Artificial Sequence
  Description of Artificial Sequence: Synthetic peptide
  Seed: PRMCSLMQGSTLPRRSGAA
PRMYSLAQASTIPRRSGAA

SEQ ID NO: 118702 - protein, 19 aa, Artificial Sequence
  Description of Artificial Sequence: Synthetic peptide
  Seed: PRMCSLMQGSTLPRRSGAA
PRMYSLAQASTLPRRSGAA

SEQ ID NO: 118703 - protein, 19 aa, Artificial Sequence
  Description of Artificial Sequence: Synthetic peptide
  Seed: PRMCSLMQGSTLPRRSGAA
PRMYSLAQASTMPRRSGAA

SEQ ID NO: 118704 - protein, 19 aa, Artificial Sequence
  Description of Artificial Sequence: Synthetic peptide
  Seed: PRMCSLMQGSTLPRRSGAA
PRMYSLAQASTSPRRSGAA

SEQ ID NO: 118705 - protein, 19 aa, Artificial Sequence
  Description of Artificial Sequence: Synthetic peptide
  Seed: PRMCSLMQGSTLPRRSGAA
PRMYSLAQASTTPRRSGAA

SEQ ID NO: 118706 - protein, 19 aa, Artificial Sequence
  Description of Artificial Sequence: Synthetic peptide
  Seed: PRMCSLMQGSTLPRRSGAA
PRMYSLAQASTVPRRSGAA

SEQ ID NO: 118707 - protein, 19 aa, Artificial Sequence
  Description of Artificial Sequence: Synthetic peptide
  Seed: PRMCSLMQGSTLPRRSGAA
PRMYSLAQGSTAPRRSGAA

SEQ ID NO: 118708 - protein, 19 aa, Artificial Sequence
  Description of Artificial Sequence: Synthetic peptide
  Seed: PRMCSLMQGSTLPRRSGAA
PRMYSLAQGSTIPRRSGAA

SEQ ID NO: 118709 - protein, 19 aa, Artificial Sequence
  Description of Artificial Sequence: Synthetic peptide
  Seed: PRMCSLMQGSTLPRRSGAA
PRMYSLAQGSTLPRRSGAA

SEQ ID NO: 118710 - protein, 19 aa, Artificial Sequence
  Description of Artificial Sequence: Synthetic peptide
  Seed: PRMCSLMQGSTLPRRSGAA
PRMYSLAQGSTMPRRSGAA

SEQ ID NO: 118711 - protein, 19 aa, Artificial Sequence
  Description of Artificial Sequence: Synthetic peptide
  Seed: PRMCSLMQGSTLPRRSGAA
PRMYSLAQGSTVPRRSGAA

SEQ ID NO: 118712 - protein, 19 aa, Artificial Sequence
  Description of Artificial Sequence: Synthetic peptide
  Seed: PRMCSLMQGSTLPRRSGAA
PRMYSLAQNSTLPRRSGAA

SEQ ID NO: 118713 - protein, 19 aa, Artificial Sequence
  Description of Artificial Sequence: Synthetic peptide
  Seed: PRMCSLMQGSTLPRRSGAA
PRMYSLAQNSTVPRRSGAA

SEQ ID NO: 118714 - protein, 19 aa, Artificial Sequence
  Description of Artificial Sequence: Synthetic peptide
  Seed: PRMCSLMQGSTLPRRSGAA
PRMYSLAQPSTAPRRSGAA

SEQ ID NO: 118715 - protein, 19 aa, Artificial Sequence
  Description of Artificial Sequence: Synthetic peptide
  Seed: PRMCSLMQGSTLPRRSGAA
PRMYSLAQPSTIPRRSGAA

SEQ ID NO: 118716 - protein, 19 aa, Artificial Sequence
  Description of Artificial Sequence: Synthetic peptide
  Seed: PRMCSLMQGSTLPRRSGAA
PRMYSLAQPSTLPRRSGAA

SEQ ID NO: 118717 - protein, 19 aa, Artificial Sequence
  Description of Artificial Sequence: Synthetic peptide
  Seed: PRMCSLMQGSTLPRRSGAA
PRMYSLAQPSTVPRRSGAA

SEQ ID NO: 118718 - protein, 19 aa, Artificial Sequence
  Description of Artificial Sequence: Synthetic peptide
  Seed: PRMCSLMQGSTLPRRSGAA
PRMYSLAQSSTAPRRSGAA

SEQ ID NO: 118719 - protein, 19 aa, Artificial Sequence
  Description of Artificial Sequence: Synthetic peptide
  Seed: PRMCSLMQGSTLPRRSGAA
PRMYSLAQSSTIPRRSGAA

SEQ ID NO: 118720 - protein, 19 aa, Artificial Sequence
  Description of Artificial Sequence: Synthetic peptide
  Seed: PRMCSLMQGSTLPRRSGAA
PRMYSLAQSSTLPRRSGAA

SEQ ID NO: 118721 - protein, 19 aa, Artificial Sequence
  Description of Artificial Sequence: Synthetic peptide
  Seed: PRMCSLMQGSTLPRRSGAA
PRMYSLAQSSTMPRRSGAA

SEQ ID NO: 118722 - protein, 19 aa, Artificial Sequence
  Description of Artificial Sequence: Synthetic peptide
  Seed: PRMCSLMQGSTLPRRSGAA
PRMYSLAQSSTVPRRSGAA

SEQ ID NO: 118723 - protein, 19 aa, Artificial Sequence
  Description of Artificial Sequence: Synthetic peptide
  Seed: PRMCSLMQGSTLPRRSGAA
PRMYSLAQTSTIPRRSGAA

SEQ ID NO: 118724 - protein, 19 aa, Artificial Sequence
  Description of Artificial Sequence: Synthetic peptide
  Seed: PRMCSLMQGSTLPRRSGAA
PRMYSLAQTSTLPRRSGAA

SEQ ID NO: 118725 - protein, 19 aa, Artificial Sequence
  Description of Artificial Sequence: Synthetic peptide
  Seed: PRMCSLMQGSTLPRRSGAA
PRMYSLAQTSTVPRRSGAA

SEQ ID NO: 118726 - protein, 19 aa, Artificial Sequence
  Description of Artificial Sequence: Synthetic peptide
  Seed: PRMCSLMQGSTLPRRSGAA
PRMYSLEQASTLPRRSGAA

SEQ ID NO: 118727 - protein, 19 aa, Artificial Sequence
  Description of Artificial Sequence: Synthetic peptide
  Seed: PRMCSLMQGSTLPRRSGAA
PRMYSLEQASTVPRRSGAA

SEQ ID NO: 118728 - protein, 19 aa, Artificial Sequence
  Description of Artificial Sequence: Synthetic peptide
  Seed: PRMCSLMQGSTLPRRSGAA
PRMYSLFQASTAPRRSGAA

SEQ ID NO: 118729 - protein, 19 aa, Artificial Sequence
  Description of Artificial Sequence: Synthetic peptide
  Seed: PRMCSLMQGSTLPRRSGAA
PRMYSLFQASTIPRRSGAA

SEQ ID NO: 118730 - protein, 19 aa, Artificial Sequence
  Description of Artificial Sequence: Synthetic peptide
  Seed: PRMCSLMQGSTLPRRSGAA
PRMYSLFQASTLPRRSGAA

SEQ ID NO: 118731 - protein, 19 aa, Artificial Sequence
  Description of Artificial Sequence: Synthetic peptide
  Seed: PRMCSLMQGSTLPRRSGAA
PRMYSLFQASTVPRRSGAA

SEQ ID NO: 118732 - protein, 19 aa, Artificial Sequence
  Description of Artificial Sequence: Synthetic peptide
  Seed: PRMCSLMQGSTLPRRSGAA
PRMYSLGQASTIPRRSGAA

SEQ ID NO: 118733 - protein, 19 aa, Artificial Sequence
  Description of Artificial Sequence: Synthetic peptide
  Seed: PRMCSLMQGSTLPRRSGAA
PRMYSLGQASTLPRRSGAA

SEQ ID NO: 118734 - protein, 19 aa, Artificial Sequence
  Description of Artificial Sequence: Synthetic peptide
  Seed: PRMCSLMQGSTLPRRSGAA
PRMYSLGQASTVPRRSGAA

SEQ ID NO: 118735 - protein, 19 aa, Artificial Sequence
  Description of Artificial Sequence: Synthetic peptide
  Seed: PRMCSLMQGSTLPRRSGAA
PRMYSLIQASTAPRRSGAA

SEQ ID NO: 118736 - protein, 19 aa, Artificial Sequence
  Description of Artificial Sequence: Synthetic peptide
  Seed: PRMCSLMQGSTLPRRSGAA
PRMYSLIQASTGPRRSGAA

SEQ ID NO: 118737 - protein, 19 aa, Artificial Sequence
  Description of Artificial Sequence: Synthetic peptide
  Seed: PRMCSLMQGSTLPRRSGAA
PRMYSLIQASTIPRRSGAA

SEQ ID NO: 118738 - protein, 19 aa, Artificial Sequence
  Description of Artificial Sequence: Synthetic peptide
  Seed: PRMCSLMQGSTLPRRSGAA
PRMYSLIQASTLPRRSGAA

SEQ ID NO: 118739 - protein, 19 aa, Artificial Sequence
  Description of Artificial Sequence: Synthetic peptide
  Seed: PRMCSLMQGSTLPRRSGAA
PRMYSLIQASTMPRRSGAA

SEQ ID NO: 118740 - protein, 19 aa, Artificial Sequence
  Description of Artificial Sequence: Synthetic peptide
  Seed: PRMCSLMQGSTLPRRSGAA
PRMYSLIQASTSPRRSGAA

SEQ ID NO: 118741 - protein, 19 aa, Artificial Sequence
  Description of Artificial Sequence: Synthetic peptide
  Seed: PRMCSLMQGSTLPRRSGAA
PRMYSLIQASTTPRRSGAA

SEQ ID NO: 118742 - protein, 19 aa, Artificial Sequence
  Description of Artificial Sequence: Synthetic peptide
  Seed: PRMCSLMQGSTLPRRSGAA
PRMYSLIQASTVPRRSGAA

SEQ ID NO: 118743 - protein, 19 aa, Artificial Sequence
  Description of Artificial Sequence: Synthetic peptide
  Seed: PRMCSLMQGSTLPRRSGAA
PRMYSLIQGSTAPRRSGAA

SEQ ID NO: 118744 - protein, 19 aa, Artificial Sequence
  Description of Artificial Sequence: Synthetic peptide
  Seed: PRMCSLMQGSTLPRRSGAA
PRMYSLIQGSTIPRRSGAA

SEQ ID NO: 118745 - protein, 19 aa, Artificial Sequence
  Description of Artificial Sequence: Synthetic peptide
  Seed: PRMCSLMQGSTLPRRSGAA
PRMYSLIQGSTLPRRSGAA

SEQ ID NO: 118746 - protein, 19 aa, Artificial Sequence
  Description of Artificial Sequence: Synthetic peptide
  Seed: PRMCSLMQGSTLPRRSGAA
PRMYSLIQGSTMPRRSGAA

SEQ ID NO: 118747 - protein, 19 aa, Artificial Sequence
  Description of Artificial Sequence: Synthetic peptide
  Seed: PRMCSLMQGSTLPRRSGAA
PRMYSLIQGSTSPRRSGAA

SEQ ID NO: 118748 - protein, 19 aa, Artificial Sequence
  Description of Artificial Sequence: Synthetic peptide
  Seed: PRMCSLMQGSTLPRRSGAA
PRMYSLIQGSTTPRRSGAA

SEQ ID NO: 118749 - protein, 19 aa, Artificial Sequence
  Description of Artificial Sequence: Synthetic peptide
  Seed: PRMCSLMQGSTLPRRSGAA
PRMYSLIQGSTVPRRSGAA

SEQ ID NO: 118750 - protein, 19 aa, Artificial Sequence
  Description of Artificial Sequence: Synthetic peptide
  Seed: PRMCSLMQGSTLPRRSGAA
PRMYSLIQNSTAPRRSGAA

SEQ ID NO: 118751 - protein, 19 aa, Artificial Sequence
  Description of Artificial Sequence: Synthetic peptide
  Seed: PRMCSLMQGSTLPRRSGAA
PRMYSLIQNSTIPRRSGAA

SEQ ID NO: 118752 - protein, 19 aa, Artificial Sequence
  Description of Artificial Sequence: Synthetic peptide
  Seed: PRMCSLMQGSTLPRRSGAA
PRMYSLIQNSTLPRRSGAA

SEQ ID NO: 118753 - protein, 19 aa, Artificial Sequence
  Description of Artificial Sequence: Synthetic peptide
  Seed: PRMCSLMQGSTLPRRSGAA
PRMYSLIQNSTVPRRSGAA

SEQ ID NO: 118754 - protein, 19 aa, Artificial Sequence
  Description of Artificial Sequence: Synthetic peptide
  Seed: PRMCSLMQGSTLPRRSGAA
PRMYSLIQPSTAPRRSGAA

SEQ ID NO: 118755 - protein, 19 aa, Artificial Sequence
  Description of Artificial Sequence: Synthetic peptide
  Seed: PRMCSLMQGSTLPRRSGAA
PRMYSLIQPSTIPRRSGAA

SEQ ID NO: 118756 - protein, 19 aa, Artificial Sequence
  Description of Artificial Sequence: Synthetic peptide
  Seed: PRMCSLMQGSTLPRRSGAA
PRMYSLIQPSTLPRRSGAA

SEQ ID NO: 118757 - protein, 19 aa, Artificial Sequence
  Description of Artificial Sequence: Synthetic peptide
  Seed: PRMCSLMQGSTLPRRSGAA
PRMYSLIQPSTMPRRSGAA

SEQ ID NO: 118758 - protein, 19 aa, Artificial Sequence
  Description of Artificial Sequence: Synthetic peptide
  Seed: PRMCSLMQGSTLPRRSGAA
PRMYSLIQPSTTPRRSGAA

SEQ ID NO: 118759 - protein, 19 aa, Artificial Sequence
  Description of Artificial Sequence: Synthetic peptide
  Seed: PRMCSLMQGSTLPRRSGAA
PRMYSLIQPSTVPRRSGAA

SEQ ID NO: 118760 - protein, 19 aa, Artificial Sequence
  Description of Artificial Sequence: Synthetic peptide
  Seed: PRMCSLMQGSTLPRRSGAA
PRMYSLIQSSTAPRRSGAA

SEQ ID NO: 118761 - protein, 19 aa, Artificial Sequence
  Description of Artificial Sequence: Synthetic peptide
  Seed: PRMCSLMQGSTLPRRSGAA
PRMYSLIQSSTIPRRSGAA

SEQ ID NO: 118762 - protein, 19 aa, Artificial Sequence
  Description of Artificial Sequence: Synthetic peptide
  Seed: PRMCSLMQGSTLPRRSGAA
PRMYSLIQSSTLPRRSGAA

SEQ ID NO: 118763 - protein, 19 aa, Artificial Sequence
  Description of Artificial Sequence: Synthetic peptide
  Seed: PRMCSLMQGSTLPRRSGAA
PRMYSLIQSSTMPRRSGAA

SEQ ID NO: 118764 - protein, 19 aa, Artificial Sequence
  Description of Artificial Sequence: Synthetic peptide
  Seed: PRMCSLMQGSTLPRRSGAA
PRMYSLIQSSTSPRRSGAA

SEQ ID NO: 118765 - protein, 19 aa, Artificial Sequence
  Description of Artificial Sequence: Synthetic peptide
  Seed: PRMCSLMQGSTLPRRSGAA
PRMYSLIQSSTTPRRSGAA

SEQ ID NO: 118766 - protein, 19 aa, Artificial Sequence
  Description of Artificial Sequence: Synthetic peptide
  Seed: PRMCSLMQGSTLPRRSGAA
PRMYSLIQSSTVPRRSGAA

SEQ ID NO: 118767 - protein, 19 aa, Artificial Sequence
  Description of Artificial Sequence: Synthetic peptide
  Seed: PRMCSLMQGSTLPRRSGAA
PRMYSLIQTSTAPRRSGAA

SEQ ID NO: 118768 - protein, 19 aa, Artificial Sequence
  Description of Artificial Sequence: Synthetic peptide
  Seed: PRMCSLMQGSTLPRRSGAA
PRMYSLIQTSTIPRRSGAA

SEQ ID NO: 118769 - protein, 19 aa, Artificial Sequence
  Description of Artificial Sequence: Synthetic peptide
  Seed: PRMCSLMQGSTLPRRSGAA
PRMYSLIQTSTLPRRSGAA

SEQ ID NO: 118770 - protein, 19 aa, Artificial Sequence
  Description of Artificial Sequence: Synthetic peptide
  Seed: PRMCSLMQGSTLPRRSGAA
PRMYSLIQTSTVPRRSGAA

SEQ ID NO: 118771 - protein, 19 aa, Artificial Sequence
  Description of Artificial Sequence: Synthetic peptide
  Seed: PRMCSLMQGSTLPRRSGAA
PRMYSLIQVSTVPRRSGAA

SEQ ID NO: 118772 - protein, 19 aa, Artificial Sequence
  Description of Artificial Sequence: Synthetic peptide
  Seed: PRMCSLMQGSTLPRRSGAA
PRMYSLLQASTAPRRSGAA

SEQ ID NO: 118773 - protein, 19 aa, Artificial Sequence
  Description of Artificial Sequence: Synthetic peptide
  Seed: PRMCSLMQGSTLPRRSGAA
PRMYSLLQASTCPRRSGAA

SEQ ID NO: 118774 - protein, 19 aa, Artificial Sequence
  Description of Artificial Sequence: Synthetic peptide
  Seed: PRMCSLMQGSTLPRRSGAA
PRMYSLLQASTFPRRSGAA

SEQ ID NO: 118775 - protein, 19 aa, Artificial Sequence
  Description of Artificial Sequence: Synthetic peptide
  Seed: PRMCSLMQGSTLPRRSGAA
PRMYSLLQASTGPRRSGAA

SEQ ID NO: 118776 - protein, 19 aa, Artificial Sequence
  Description of Artificial Sequence: Synthetic peptide
  Seed: PRMCSLMQGSTLPRRSGAA
PRMYSLLQASTIPRRSGAA

SEQ ID NO: 118777 - protein, 19 aa, Artificial Sequence
  Description of Artificial Sequence: Synthetic peptide
  Seed: PRMCSLMQGSTLPRRSGAA
PRMYSLLQASTLPRRSGAA

SEQ ID NO: 118778 - protein, 19 aa, Artificial Sequence
  Description of Artificial Sequence: Synthetic peptide
  Seed: PRMCSLMQGSTLPRRSGAA
PRMYSLLQASTMPRRSGAA

SEQ ID NO: 118779 - protein, 19 aa, Artificial Sequence
  Description of Artificial Sequence: Synthetic peptide
  Seed: PRMCSLMQGSTLPRRSGAA
PRMYSLLQASTSPRRSGAA

SEQ ID NO: 118780 - protein, 19 aa, Artificial Sequence
  Description of Artificial Sequence: Synthetic peptide
  Seed: PRMCSLMQGSTLPRRSGAA
PRMYSLLQASTTPRRSGAA

SEQ ID NO: 118781 - protein, 19 aa, Artificial Sequence
  Description of Artificial Sequence: Synthetic peptide
  Seed: PRMCSLMQGSTLPRRSGAA
PRMYSLLQASTVPRRSGAA

SEQ ID NO: 118782 - protein, 19 aa, Artificial Sequence
  Description of Artificial Sequence: Synthetic peptide
  Seed: PRMCSLMQGSTLPRRSGAA
PRMYSLLQGSTAPRRSGAA

SEQ ID NO: 118783 - protein, 19 aa, Artificial Sequence
  Description of Artificial Sequence: Synthetic peptide
  Seed: PRMCSLMQGSTLPRRSGAA
PRMYSLLQGSTFPRRSGAA

SEQ ID NO: 118784 - protein, 19 aa, Artificial Sequence
  Description of Artificial Sequence: Synthetic peptide
  Seed: PRMCSLMQGSTLPRRSGAA
PRMYSLLQGSTGPRRSGAA

SEQ ID NO: 118785 - protein, 19 aa, Artificial Sequence
  Description of Artificial Sequence: Synthetic peptide
  Seed: PRMCSLMQGSTLPRRSGAA
PRMYSLLQGSTIPRRSGAA

SEQ ID NO: 118786 - protein, 19 aa, Artificial Sequence
  Description of Artificial Sequence: Synthetic peptide
  Seed: PRMCSLMQGSTLPRRSGAA
PRMYSLLQGSTLPRRSGAA

SEQ ID NO: 118787 - protein, 19 aa, Artificial Sequence
  Description of Artificial Sequence: Synthetic peptide
  Seed: PRMCSLMQGSTLPRRSGAA
PRMYSLLQGSTMPRRSGAA

SEQ ID NO: 118788 - protein, 19 aa, Artificial Sequence
  Description of Artificial Sequence: Synthetic peptide
  Seed: PRMCSLMQGSTLPRRSGAA
PRMYSLLQGSTSPRRSGAA

SEQ ID NO: 118789 - protein, 19 aa, Artificial Sequence
  Description of Artificial Sequence: Synthetic peptide
  Seed: PRMCSLMQGSTLPRRSGAA
PRMYSLLQGSTTPRRSGAA

SEQ ID NO: 118790 - protein, 19 aa, Artificial Sequence
  Description of Artificial Sequence: Synthetic peptide
  Seed: PRMCSLMQGSTLPRRSGAA
PRMYSLLQGSTVPRRSGAA

SEQ ID NO: 118791 - protein, 19 aa, Artificial Sequence
  Description of Artificial Sequence: Synthetic peptide
  Seed: PRMCSLMQGSTLPRRSGAA
PRMYSLLQISTAPRRSGAA

SEQ ID NO: 118792 - protein, 19 aa, Artificial Sequence
  Description of Artificial Sequence: Synthetic peptide
  Seed: PRMCSLMQGSTLPRRSGAA
PRMYSLLQISTIPRRSGAA

SEQ ID NO: 118793 - protein, 19 aa, Artificial Sequence
  Description of Artificial Sequence: Synthetic peptide
  Seed: PRMCSLMQGSTLPRRSGAA
PRMYSLLQISTLPRRSGAA

SEQ ID NO: 118794 - protein, 19 aa, Artificial Sequence
  Description of Artificial Sequence: Synthetic peptide
  Seed: PRMCSLMQGSTLPRRSGAA
PRMYSLLQISTVPRRSGAA

SEQ ID NO: 118795 - protein, 19 aa, Artificial Sequence
  Description of Artificial Sequence: Synthetic peptide
  Seed: PRMCSLMQGSTLPRRSGAA
PRMYSLLQNSTAPRRSGAA

SEQ ID NO: 118796 - protein, 19 aa, Artificial Sequence
  Description of Artificial Sequence: Synthetic peptide
  Seed: PRMCSLMQGSTLPRRSGAA
PRMYSLLQNSTIPRRSGAA

SEQ ID NO: 118797 - protein, 19 aa, Artificial Sequence
  Description of Artificial Sequence: Synthetic peptide
  Seed: PRMCSLMQGSTLPRRSGAA
PRMYSLLQNSTLPRRSGAA

SEQ ID NO: 118798 - protein, 19 aa, Artificial Sequence
  Description of Artificial Sequence: Synthetic peptide
  Seed: PRMCSLMQGSTLPRRSGAA
PRMYSLLQNSTMPRRSGAA

SEQ ID NO: 118799 - protein, 19 aa, Artificial Sequence
  Description of Artificial Sequence: Synthetic peptide
  Seed: PRMCSLMQGSTLPRRSGAA
PRMYSLLQNSTTPRRSGAA

SEQ ID NO: 118800 - protein, 19 aa, Artificial Sequence
  Description of Artificial Sequence: Synthetic peptide
  Seed: PRMCSLMQGSTLPRRSGAA
PRMYSLLQNSTVPRRSGAA

SEQ ID NO: 118801 - protein, 19 aa, Artificial Sequence
  Description of Artificial Sequence: Synthetic peptide
  Seed: PRMCSLMQGSTLPRRSGAA
PRMYSLLQPSTAPRRSGAA

SEQ ID NO: 118802 - protein, 19 aa, Artificial Sequence
  Description of Artificial Sequence: Synthetic peptide
  Seed: PRMCSLMQGSTLPRRSGAA
PRMYSLLQPSTIPRRSGAA

SEQ ID NO: 118803 - protein, 19 aa, Artificial Sequence
  Description of Artificial Sequence: Synthetic peptide
  Seed: PRMCSLMQGSTLPRRSGAA
PRMYSLLQPSTLPRRSGAA

SEQ ID NO: 118804 - protein, 19 aa, Artificial Sequence
  Description of Artificial Sequence: Synthetic peptide
  Seed: PRMCSLMQGSTLPRRSGAA
PRMYSLLQPSTMPRRSGAA

SEQ ID NO: 118805 - protein, 19 aa, Artificial Sequence
  Description of Artificial Sequence: Synthetic peptide
  Seed: PRMCSLMQGSTLPRRSGAA
PRMYSLLQPSTSPRRSGAA

SEQ ID NO: 118806 - protein, 19 aa, Artificial Sequence
  Description of Artificial Sequence: Synthetic peptide
  Seed: PRMCSLMQGSTLPRRSGAA
PRMYSLLQPSTTPRRSGAA

SEQ ID NO: 118807 - protein, 19 aa, Artificial Sequence
  Description of Artificial Sequence: Synthetic peptide
  Seed: PRMCSLMQGSTLPRRSGAA
PRMYSLLQPSTVPRRSGAA

SEQ ID NO: 118808 - protein, 19 aa, Artificial Sequence
  Description of Artificial Sequence: Synthetic peptide
  Seed: PRMCSLMQGSTLPRRSGAA
PRMYSLLQSSTAPRRSGAA

SEQ ID NO: 118809 - protein, 19 aa, Artificial Sequence
  Description of Artificial Sequence: Synthetic peptide
  Seed: PRMCSLMQGSTLPRRSGAA
PRMYSLLQSSTGPRRSGAA

SEQ ID NO: 118810 - protein, 19 aa, Artificial Sequence
  Description of Artificial Sequence: Synthetic peptide
  Seed: PRMCSLMQGSTLPRRSGAA
PRMYSLLQSSTIPRRSGAA

SEQ ID NO: 118811 - protein, 19 aa, Artificial Sequence
  Description of Artificial Sequence: Synthetic peptide
  Seed: PRMCSLMQGSTLPRRSGAA
PRMYSLLQSSTLPRRSGAA

SEQ ID NO: 118812 - protein, 19 aa, Artificial Sequence
  Description of Artificial Sequence: Synthetic peptide
  Seed: PRMCSLMQGSTLPRRSGAA
PRMYSLLQSSTMPRRSGAA

SEQ ID NO: 118813 - protein, 19 aa, Artificial Sequence
  Description of Artificial Sequence: Synthetic peptide
  Seed: PRMCSLMQGSTLPRRSGAA
PRMYSLLQSSTSPRRSGAA

SEQ ID NO: 118814 - protein, 19 aa, Artificial Sequence
  Description of Artificial Sequence: Synthetic peptide
  Seed: PRMCSLMQGSTLPRRSGAA
PRMYSLLQSSTTPRRSGAA

SEQ ID NO: 118815 - protein, 19 aa, Artificial Sequence
  Description of Artificial Sequence: Synthetic peptide
  Seed: PRMCSLMQGSTLPRRSGAA
PRMYSLLQSSTVPRRSGAA

SEQ ID NO: 118816 - protein, 19 aa, Artificial Sequence
  Description of Artificial Sequence: Synthetic peptide
  Seed: PRMCSLMQGSTLPRRSGAA
PRMYSLLQTSTAPRRSGAA

SEQ ID NO: 118817 - protein, 19 aa, Artificial Sequence
  Description of Artificial Sequence: Synthetic peptide
  Seed: PRMCSLMQGSTLPRRSGAA
PRMYSLLQTSTIPRRSGAA

SEQ ID NO: 118818 - protein, 19 aa, Artificial Sequence
  Description of Artificial Sequence: Synthetic peptide
  Seed: PRMCSLMQGSTLPRRSGAA
PRMYSLLQTSTLPRRSGAA

SEQ ID NO: 118819 - protein, 19 aa, Artificial Sequence
  Description of Artificial Sequence: Synthetic peptide
  Seed: PRMCSLMQGSTLPRRSGAA
PRMYSLLQTSTMPRRSGAA

SEQ ID NO: 118820 - protein, 19 aa, Artificial Sequence
  Description of Artificial Sequence: Synthetic peptide
  Seed: PRMCSLMQGSTLPRRSGAA
PRMYSLLQTSTSPRRSGAA

SEQ ID NO: 118821 - protein, 19 aa, Artificial Sequence
  Description of Artificial Sequence: Synthetic peptide
  Seed: PRMCSLMQGSTLPRRSGAA
PRMYSLLQTSTTPRRSGAA

SEQ ID NO: 118822 - protein, 19 aa, Artificial Sequence
  Description of Artificial Sequence: Synthetic peptide
  Seed: PRMCSLMQGSTLPRRSGAA
PRMYSLLQTSTVPRRSGAA

SEQ ID NO: 118823 - protein, 19 aa, Artificial Sequence
  Description of Artificial Sequence: Synthetic peptide
  Seed: PRMCSLMQGSTLPRRSGAA
PRMYSLLQVSTAPRRSGAA

SEQ ID NO: 118824 - protein, 19 aa, Artificial Sequence
  Description of Artificial Sequence: Synthetic peptide
  Seed: PRMCSLMQGSTLPRRSGAA
PRMYSLLQVSTIPRRSGAA

SEQ ID NO: 118825 - protein, 19 aa, Artificial Sequence
  Description of Artificial Sequence: Synthetic peptide
  Seed: PRMCSLMQGSTLPRRSGAA
PRMYSLLQVSTLPRRSGAA

SEQ ID NO: 118826 - protein, 19 aa, Artificial Sequence
  Description of Artificial Sequence: Synthetic peptide
  Seed: PRMCSLMQGSTLPRRSGAA
PRMYSLLQVSTMPRRSGAA

SEQ ID NO: 118827 - protein, 19 aa, Artificial Sequence
  Description of Artificial Sequence: Synthetic peptide
  Seed: PRMCSLMQGSTLPRRSGAA
PRMYSLLQVSTTPRRSGAA

SEQ ID NO: 118828 - protein, 19 aa, Artificial Sequence
  Description of Artificial Sequence: Synthetic peptide
  Seed: PRMCSLMQGSTLPRRSGAA
PRMYSLLQVSTVPRRSGAA

SEQ ID NO: 118829 - protein, 19 aa, Artificial Sequence
  Description of Artificial Sequence: Synthetic peptide
  Seed: PRMCSLMQGSTLPRRSGAA
PRMYSLMQASTAPRRSGAA

SEQ ID NO: 118830 - protein, 19 aa, Artificial Sequence
  Description of Artificial Sequence: Synthetic peptide
  Seed: PRMCSLMQGSTLPRRSGAA
PRMYSLMQASTFPRRSGAA

SEQ ID NO: 118831 - protein, 19 aa, Artificial Sequence
  Description of Artificial Sequence: Synthetic peptide
  Seed: PRMCSLMQGSTLPRRSGAA
PRMYSLMQASTGPRRSGAA

SEQ ID NO: 118832 - protein, 19 aa, Artificial Sequence
  Description of Artificial Sequence: Synthetic peptide
  Seed: PRMCSLMQGSTLPRRSGAA
PRMYSLMQASTIPRRSGAA

SEQ ID NO: 118833 - protein, 19 aa, Artificial Sequence
  Description of Artificial Sequence: Synthetic peptide
  Seed: PRMCSLMQGSTLPRRSGAA
PRMYSLMQASTLPRRSGAA

SEQ ID NO: 118834 - protein, 19 aa, Artificial Sequence
  Description of Artificial Sequence: Synthetic peptide
  Seed: PRMCSLMQGSTLPRRSGAA
PRMYSLMQASTMPRRSGAA

SEQ ID NO: 118835 - protein, 19 aa, Artificial Sequence
  Description of Artificial Sequence: Synthetic peptide
  Seed: PRMCSLMQGSTLPRRSGAA
PRMYSLMQASTSPRRSGAA

SEQ ID NO: 118836 - protein, 19 aa, Artificial Sequence
  Description of Artificial Sequence: Synthetic peptide
  Seed: PRMCSLMQGSTLPRRSGAA
PRMYSLMQASTTPRRSGAA

SEQ ID NO: 118837 - protein, 19 aa, Artificial Sequence
  Description of Artificial Sequence: Synthetic peptide
  Seed: PRMCSLMQGSTLPRRSGAA
PRMYSLMQASTVPRRSGAA

SEQ ID NO: 118838 - protein, 19 aa, Artificial Sequence
  Description of Artificial Sequence: Synthetic peptide
  Seed: PRMCSLMQGSTLPRRSGAA
PRMYSLMQGSTAPRRSGAA

SEQ ID NO: 118839 - protein, 19 aa, Artificial Sequence
  Description of Artificial Sequence: Synthetic peptide
  Seed: PRMCSLMQGSTLPRRSGAA
PRMYSLMQGSTFPRRSGAA

SEQ ID NO: 118840 - protein, 19 aa, Artificial Sequence
  Description of Artificial Sequence: Synthetic peptide
  Seed: PRMCSLMQGSTLPRRSGAA
PRMYSLMQGSTGPRRSGAA

SEQ ID NO: 118841 - protein, 19 aa, Artificial Sequence
  Description of Artificial Sequence: Synthetic peptide
  Seed: PRMCSLMQGSTLPRRSGAA
PRMYSLMQGSTIPRRSGAA

SEQ ID NO: 118842 - protein, 19 aa, Artificial Sequence
  Description of Artificial Sequence: Synthetic peptide
  Seed: PRMCSLMQGSTLPRRSGAA
PRMYSLMQGSTLPRRSGAA

SEQ ID NO: 118843 - protein, 19 aa, Artificial Sequence
  Description of Artificial Sequence: Synthetic peptide
  Seed: PRMCSLMQGSTLPRRSGAA
PRMYSLMQGSTMPRRSGAA

SEQ ID NO: 118844 - protein, 19 aa, Artificial Sequence
  Description of Artificial Sequence: Synthetic peptide
  Seed: PRMCSLMQGSTLPRRSGAA
PRMYSLMQGSTSPRRSGAA

SEQ ID NO: 118845 - protein, 19 aa, Artificial Sequence
  Description of Artificial Sequence: Synthetic peptide
  Seed: PRMCSLMQGSTLPRRSGAA
PRMYSLMQGSTTPRRSGAA

SEQ ID NO: 118846 - protein, 19 aa, Artificial Sequence
  Description of Artificial Sequence: Synthetic peptide
  Seed: PRMCSLMQGSTLPRRSGAA
PRMYSLMQGSTVPRRSGAA

SEQ ID NO: 118847 - protein, 19 aa, Artificial Sequence
  Description of Artificial Sequence: Synthetic peptide
  Seed: PRMCSLMQGSTLPRRSGAA
PRMYSLMQISTLPRRSGAA

SEQ ID NO: 118848 - protein, 19 aa, Artificial Sequence
  Description of Artificial Sequence: Synthetic peptide
  Seed: PRMCSLMQGSTLPRRSGAA
PRMYSLMQISTVPRRSGAA

SEQ ID NO: 118849 - protein, 19 aa, Artificial Sequence
  Description of Artificial Sequence: Synthetic peptide
  Seed: PRMCSLMQGSTLPRRSGAA
PRMYSLMQNSTAPRRSGAA

SEQ ID NO: 118850 - protein, 19 aa, Artificial Sequence
  Description of Artificial Sequence: Synthetic peptide
  Seed: PRMCSLMQGSTLPRRSGAA
PRMYSLMQNSTIPRRSGAA

SEQ ID NO: 118851 - protein, 19 aa, Artificial Sequence
  Description of Artificial Sequence: Synthetic peptide
  Seed: PRMCSLMQGSTLPRRSGAA
PRMYSLMQNSTLPRRSGAA

SEQ ID NO: 118852 - protein, 19 aa, Artificial Sequence
  Description of Artificial Sequence: Synthetic peptide
  Seed: PRMCSLMQGSTLPRRSGAA
PRMYSLMQNSTMPRRSGAA

SEQ ID NO: 118853 - protein, 19 aa, Artificial Sequence
  Description of Artificial Sequence: Synthetic peptide
  Seed: PRMCSLMQGSTLPRRSGAA
PRMYSLMQNSTTPRRSGAA

SEQ ID NO: 118854 - protein, 19 aa, Artificial Sequence
  Description of Artificial Sequence: Synthetic peptide
  Seed: PRMCSLMQGSTLPRRSGAA
PRMYSLMQNSTVPRRSGAA

SEQ ID NO: 118855 - protein, 19 aa, Artificial Sequence
  Description of Artificial Sequence: Synthetic peptide
  Seed: PRMCSLMQGSTLPRRSGAA
PRMYSLMQPSTAPRRSGAA

SEQ ID NO: 118856 - protein, 19 aa, Artificial Sequence
  Description of Artificial Sequence: Synthetic peptide
  Seed: PRMCSLMQGSTLPRRSGAA
PRMYSLMQPSTIPRRSGAA

SEQ ID NO: 118857 - protein, 19 aa, Artificial Sequence
  Description of Artificial Sequence: Synthetic peptide
  Seed: PRMCSLMQGSTLPRRSGAA
PRMYSLMQPSTLPRRSGAA

SEQ ID NO: 118858 - protein, 19 aa, Artificial Sequence
  Description of Artificial Sequence: Synthetic peptide
  Seed: PRMCSLMQGSTLPRRSGAA
PRMYSLMQPSTMPRRSGAA

SEQ ID NO: 118859 - protein, 19 aa, Artificial Sequence
  Description of Artificial Sequence: Synthetic peptide
  Seed: PRMCSLMQGSTLPRRSGAA
PRMYSLMQPSTSPRRSGAA

SEQ ID NO: 118860 - protein, 19 aa, Artificial Sequence
  Description of Artificial Sequence: Synthetic peptide
  Seed: PRMCSLMQGSTLPRRSGAA
PRMYSLMQPSTTPRRSGAA

SEQ ID NO: 118861 - protein, 19 aa, Artificial Sequence
  Description of Artificial Sequence: Synthetic peptide
  Seed: PRMCSLMQGSTLPRRSGAA
PRMYSLMQPSTVPRRSGAA

SEQ ID NO: 118862 - protein, 19 aa, Artificial Sequence
  Description of Artificial Sequence: Synthetic peptide
  Seed: PRMCSLMQGSTLPRRSGAA
PRMYSLMQSSTAPRRSGAA

SEQ ID NO: 118863 - protein, 19 aa, Artificial Sequence
  Description of Artificial Sequence: Synthetic peptide
  Seed: PRMCSLMQGSTLPRRSGAA
PRMYSLMQSSTGPRRSGAA

SEQ ID NO: 118864 - protein, 19 aa, Artificial Sequence
  Description of Artificial Sequence: Synthetic peptide
  Seed: PRMCSLMQGSTLPRRSGAA
PRMYSLMQSSTIPRRSGAA

SEQ ID NO: 118865 - protein, 19 aa, Artificial Sequence
  Description of Artificial Sequence: Synthetic peptide
  Seed: PRMCSLMQGSTLPRRSGAA
PRMYSLMQSSTLPRRSGAA

SEQ ID NO: 118866 - protein, 19 aa, Artificial Sequence
  Description of Artificial Sequence: Synthetic peptide
  Seed: PRMCSLMQGSTLPRRSGAA
PRMYSLMQSSTMPRRSGAA

SEQ ID NO: 118867 - protein, 19 aa, Artificial Sequence
  Description of Artificial Sequence: Synthetic peptide
  Seed: PRMCSLMQGSTLPRRSGAA
PRMYSLMQSSTSPRRSGAA

SEQ ID NO: 118868 - protein, 19 aa, Artificial Sequence
  Description of Artificial Sequence: Synthetic peptide
  Seed: PRMCSLMQGSTLPRRSGAA
PRMYSLMQSSTTPRRSGAA

SEQ ID NO: 118869 - protein, 19 aa, Artificial Sequence
  Description of Artificial Sequence: Synthetic peptide
  Seed: PRMCSLMQGSTLPRRSGAA
PRMYSLMQSSTVPRRSGAA

SEQ ID NO: 118870 - protein, 19 aa, Artificial Sequence
  Description of Artificial Sequence: Synthetic peptide
  Seed: PRMCSLMQGSTLPRRSGAA
PRMYSLMQTSTAPRRSGAA

SEQ ID NO: 118871 - protein, 19 aa, Artificial Sequence
  Description of Artificial Sequence: Synthetic peptide
  Seed: PRMCSLMQGSTLPRRSGAA
PRMYSLMQTSTIPRRSGAA

SEQ ID NO: 118872 - protein, 19 aa, Artificial Sequence
  Description of Artificial Sequence: Synthetic peptide
  Seed: PRMCSLMQGSTLPRRSGAA
PRMYSLMQTSTLPRRSGAA

SEQ ID NO: 118873 - protein, 19 aa, Artificial Sequence
  Description of Artificial Sequence: Synthetic peptide
  Seed: PRMCSLMQGSTLPRRSGAA
PRMYSLMQTSTMPRRSGAA

SEQ ID NO: 118874 - protein, 19 aa, Artificial Sequence
  Description of Artificial Sequence: Synthetic peptide
  Seed: PRMCSLMQGSTLPRRSGAA
PRMYSLMQTSTTPRRSGAA

SEQ ID NO: 118875 - protein, 19 aa, Artificial Sequence
  Description of Artificial Sequence: Synthetic peptide
  Seed: PRMCSLMQGSTLPRRSGAA
PRMYSLMQTSTVPRRSGAA

SEQ ID NO: 118876 - protein, 19 aa, Artificial Sequence
  Description of Artificial Sequence: Synthetic peptide
  Seed: PRMCSLMQGSTLPRRSGAA
PRMYSLMQVSTAPRRSGAA

SEQ ID NO: 118877 - protein, 19 aa, Artificial Sequence
  Description of Artificial Sequence: Synthetic peptide
  Seed: PRMCSLMQGSTLPRRSGAA
PRMYSLMQVSTIPRRSGAA

SEQ ID NO: 118878 - protein, 19 aa, Artificial Sequence
  Description of Artificial Sequence: Synthetic peptide
  Seed: PRMCSLMQGSTLPRRSGAA
PRMYSLMQVSTLPRRSGAA

SEQ ID NO: 118879 - protein, 19 aa, Artificial Sequence
  Description of Artificial Sequence: Synthetic peptide
  Seed: PRMCSLMQGSTLPRRSGAA
PRMYSLMQVSTVPRRSGAA

SEQ ID NO: 118880 - protein, 19 aa, Artificial Sequence
  Description of Artificial Sequence: Synthetic peptide
  Seed: PRMCSLMQGSTLPRRSGAA
PRMYSLQQASTAPRRSGAA

SEQ ID NO: 118881 - protein, 19 aa, Artificial Sequence
  Description of Artificial Sequence: Synthetic peptide
  Seed: PRMCSLMQGSTLPRRSGAA
PRMYSLQQASTIPRRSGAA

SEQ ID NO: 118882 - protein, 19 aa, Artificial Sequence
  Description of Artificial Sequence: Synthetic peptide
  Seed: PRMCSLMQGSTLPRRSGAA
PRMYSLQQASTLPRRSGAA

SEQ ID NO: 118883 - protein, 19 aa, Artificial Sequence
  Description of Artificial Sequence: Synthetic peptide
  Seed: PRMCSLMQGSTLPRRSGAA
PRMYSLQQASTMPRRSGAA

SEQ ID NO: 118884 - protein, 19 aa, Artificial Sequence
  Description of Artificial Sequence: Synthetic peptide
  Seed: PRMCSLMQGSTLPRRSGAA
PRMYSLQQASTVPRRSGAA

SEQ ID NO: 118885 - protein, 19 aa, Artificial Sequence
  Description of Artificial Sequence: Synthetic peptide
  Seed: PRMCSLMQGSTLPRRSGAA
PRMYSLQQGSTAPRRSGAA

SEQ ID NO: 118886 - protein, 19 aa, Artificial Sequence
  Description of Artificial Sequence: Synthetic peptide
  Seed: PRMCSLMQGSTLPRRSGAA
PRMYSLQQGSTIPRRSGAA

SEQ ID NO: 118887 - protein, 19 aa, Artificial Sequence
  Description of Artificial Sequence: Synthetic peptide
  Seed: PRMCSLMQGSTLPRRSGAA
PRMYSLQQGSTLPRRSGAA

SEQ ID NO: 118888 - protein, 19 aa, Artificial Sequence
  Description of Artificial Sequence: Synthetic peptide
  Seed: PRMCSLMQGSTLPRRSGAA
PRMYSLQQGSTVPRRSGAA

SEQ ID NO: 118889 - protein, 19 aa, Artificial Sequence
  Description of Artificial Sequence: Synthetic peptide
  Seed: PRMCSLMQGSTLPRRSGAA
PRMYSLQQPSTLPRRSGAA

SEQ ID NO: 118890 - protein, 19 aa, Artificial Sequence
  Description of Artificial Sequence: Synthetic peptide
  Seed: PRMCSLMQGSTLPRRSGAA
PRMYSLQQPSTVPRRSGAA

SEQ ID NO: 118891 - protein, 19 aa, Artificial Sequence
  Description of Artificial Sequence: Synthetic peptide
  Seed: PRMCSLMQGSTLPRRSGAA
PRMYSLQQSSTAPRRSGAA

SEQ ID NO: 118892 - protein, 19 aa, Artificial Sequence
  Description of Artificial Sequence: Synthetic peptide
  Seed: PRMCSLMQGSTLPRRSGAA
PRMYSLQQSSTIPRRSGAA

SEQ ID NO: 118893 - protein, 19 aa, Artificial Sequence
  Description of Artificial Sequence: Synthetic peptide
  Seed: PRMCSLMQGSTLPRRSGAA
PRMYSLQQSSTLPRRSGAA

SEQ ID NO: 118894 - protein, 19 aa, Artificial Sequence
  Description of Artificial Sequence: Synthetic peptide
  Seed: PRMCSLMQGSTLPRRSGAA
PRMYSLQQSSTVPRRSGAA

SEQ ID NO: 118895 - protein, 19 aa, Artificial Sequence
  Description of Artificial Sequence: Synthetic peptide
  Seed: PRMCSLMQGSTLPRRSGAA
PRMYSLSQASTAPRRSGAA

SEQ ID NO: 118896 - protein, 19 aa, Artificial Sequence
  Description of Artificial Sequence: Synthetic peptide
  Seed: PRMCSLMQGSTLPRRSGAA
PRMYSLSQASTIPRRSGAA

SEQ ID NO: 118897 - protein, 19 aa, Artificial Sequence
  Description of Artificial Sequence: Synthetic peptide
  Seed: PRMCSLMQGSTLPRRSGAA
PRMYSLSQASTLPRRSGAA

SEQ ID NO: 118898 - protein, 19 aa, Artificial Sequence
  Description of Artificial Sequence: Synthetic peptide
  Seed: PRMCSLMQGSTLPRRSGAA
PRMYSLSQASTVPRRSGAA

SEQ ID NO: 118899 - protein, 19 aa, Artificial Sequence
  Description of Artificial Sequence: Synthetic peptide
  Seed: PRMCSLMQGSTLPRRSGAA
PRMYSLSQGSTLPRRSGAA

SEQ ID NO: 118900 - protein, 19 aa, Artificial Sequence
  Description of Artificial Sequence: Synthetic peptide
  Seed: PRMCSLMQGSTLPRRSGAA
PRMYSLTQASTVPRRSGAA

SEQ ID NO: 118901 - protein, 19 aa, Artificial Sequence
  Description of Artificial Sequence: Synthetic peptide
  Seed: PRMCSLMQGSTLPRRSGAA
PRMYSLVQASTAPRRSGAA

SEQ ID NO: 118902 - protein, 19 aa, Artificial Sequence
  Description of Artificial Sequence: Synthetic peptide
  Seed: PRMCSLMQGSTLPRRSGAA
PRMYSLVQASTIPRRSGAA

SEQ ID NO: 118903 - protein, 19 aa, Artificial Sequence
  Description of Artificial Sequence: Synthetic peptide
  Seed: PRMCSLMQGSTLPRRSGAA
PRMYSLVQASTLPRRSGAA

SEQ ID NO: 118904 - protein, 19 aa, Artificial Sequence
  Description of Artificial Sequence: Synthetic peptide
  Seed: PRMCSLMQGSTLPRRSGAA
PRMYSLVQASTMPRRSGAA

SEQ ID NO: 118905 - protein, 19 aa, Artificial Sequence
  Description of Artificial Sequence: Synthetic peptide
  Seed: PRMCSLMQGSTLPRRSGAA
PRMYSLVQASTTPRRSGAA

SEQ ID NO: 118906 - protein, 19 aa, Artificial Sequence
  Description of Artificial Sequence: Synthetic peptide
  Seed: PRMCSLMQGSTLPRRSGAA
PRMYSLVQASTVPRRSGAA

SEQ ID NO: 118907 - protein, 19 aa, Artificial Sequence
  Description of Artificial Sequence: Synthetic peptide
  Seed: PRMCSLMQGSTLPRRSGAA
PRMYSLVQGSTAPRRSGAA

SEQ ID NO: 118908 - protein, 19 aa, Artificial Sequence
  Description of Artificial Sequence: Synthetic peptide
  Seed: PRMCSLMQGSTLPRRSGAA
PRMYSLVQGSTIPRRSGAA

SEQ ID NO: 118909 - protein, 19 aa, Artificial Sequence
  Description of Artificial Sequence: Synthetic peptide
  Seed: PRMCSLMQGSTLPRRSGAA
PRMYSLVQGSTLPRRSGAA

SEQ ID NO: 118910 - protein, 19 aa, Artificial Sequence
  Description of Artificial Sequence: Synthetic peptide
  Seed: PRMCSLMQGSTLPRRSGAA
PRMYSLVQGSTVPRRSGAA

SEQ ID NO: 118911 - protein, 19 aa, Artificial Sequence
  Description of Artificial Sequence: Synthetic peptide
  Seed: PRMCSLMQGSTLPRRSGAA
PRMYSLVQPSTAPRRSGAA

SEQ ID NO: 118912 - protein, 19 aa, Artificial Sequence
  Description of Artificial Sequence: Synthetic peptide
  Seed: PRMCSLMQGSTLPRRSGAA
PRMYSLVQPSTIPRRSGAA

SEQ ID NO: 118913 - protein, 19 aa, Artificial Sequence
  Description of Artificial Sequence: Synthetic peptide
  Seed: PRMCSLMQGSTLPRRSGAA
PRMYSLVQPSTLPRRSGAA

SEQ ID NO: 118914 - protein, 19 aa, Artificial Sequence
  Description of Artificial Sequence: Synthetic peptide
  Seed: PRMCSLMQGSTLPRRSGAA
PRMYSLVQPSTVPRRSGAA

SEQ ID NO: 118915 - protein, 19 aa, Artificial Sequence
  Description of Artificial Sequence: Synthetic peptide
  Seed: PRMCSLMQGSTLPRRSGAA
PRMYSLVQSSTAPRRSGAA

SEQ ID NO: 118916 - protein, 19 aa, Artificial Sequence
  Description of Artificial Sequence: Synthetic peptide
  Seed: PRMCSLMQGSTLPRRSGAA
PRMYSLVQSSTIPRRSGAA

SEQ ID NO: 118917 - protein, 19 aa, Artificial Sequence
  Description of Artificial Sequence: Synthetic peptide
  Seed: PRMCSLMQGSTLPRRSGAA
PRMYSLVQSSTLPRRSGAA

SEQ ID NO: 118918 - protein, 19 aa, Artificial Sequence
  Description of Artificial Sequence: Synthetic peptide
  Seed: PRMCSLMQGSTLPRRSGAA
PRMYSLVQSSTVPRRSGAA

SEQ ID NO: 118919 - protein, 19 aa, Artificial Sequence
  Description of Artificial Sequence: Synthetic peptide
  Seed: PRMCSLMQGSTLPRRSGAA
PRMCSLMFGSALARRAGAA

SEQ ID NO: 118920 - protein, 19 aa, Artificial Sequence
  Description of Artificial Sequence: Synthetic peptide
  Seed: PRMCSLMQGSTLPRRSGAA
PRMCSLMFGSALARRIGAA

SEQ ID NO: 118921 - protein, 19 aa, Artificial Sequence
  Description of Artificial Sequence: Synthetic peptide
  Seed: PRMCSLMQGSTLPRRSGAA
PRMCSLMFGSALARRNGAA

SEQ ID NO: 118922 - protein, 19 aa, Artificial Sequence
  Description of Artificial Sequence: Synthetic peptide
  Seed: PRMCSLMQGSTLPRRSGAA
PRMCSLMFGSALARRSGAA

SEQ ID NO: 118923 - protein, 19 aa, Artificial Sequence
  Description of Artificial Sequence: Synthetic peptide
  Seed: PRMCSLMQGSTLPRRSGAA
PRMCSLMFGSALARRVGAA

SEQ ID NO: 118924 - protein, 19 aa, Artificial Sequence
  Description of Artificial Sequence: Synthetic peptide
  Seed: PRMCSLMQGSTLPRRSGAA
PRMCSLMFGSALSRRAGAA

SEQ ID NO: 118925 - protein, 19 aa, Artificial Sequence
  Description of Artificial Sequence: Synthetic peptide
  Seed: PRMCSLMQGSTLPRRSGAA
PRMCSLMFGSILARRAGAA

SEQ ID NO: 118926 - protein, 19 aa, Artificial Sequence
  Description of Artificial Sequence: Synthetic peptide
  Seed: PRMCSLMQGSTLPRRSGAA
PRMCSLMFGSILARRIGAA

SEQ ID NO: 118927 - protein, 19 aa, Artificial Sequence
  Description of Artificial Sequence: Synthetic peptide
  Seed: PRMCSLMQGSTLPRRSGAA
PRMCSLMFGSILARRLGAA

SEQ ID NO: 118928 - protein, 19 aa, Artificial Sequence
  Description of Artificial Sequence: Synthetic peptide
  Seed: PRMCSLMQGSTLPRRSGAA
PRMCSLMFGSILARRMGAA

SEQ ID NO: 118929 - protein, 19 aa, Artificial Sequence
  Description of Artificial Sequence: Synthetic peptide
  Seed: PRMCSLMQGSTLPRRSGAA
PRMCSLMFGSILARRNGAA

SEQ ID NO: 118930 - protein, 19 aa, Artificial Sequence
  Description of Artificial Sequence: Synthetic peptide
  Seed: PRMCSLMQGSTLPRRSGAA
PRMCSLMFGSILARRSGAA

SEQ ID NO: 118931 - protein, 19 aa, Artificial Sequence
  Description of Artificial Sequence: Synthetic peptide
  Seed: PRMCSLMQGSTLPRRSGAA
PRMCSLMFGSILARRTGAA

SEQ ID NO: 118932 - protein, 19 aa, Artificial Sequence
  Description of Artificial Sequence: Synthetic peptide
  Seed: PRMCSLMQGSTLPRRSGAA
PRMCSLMFGSILARRVGAA

SEQ ID NO: 118933 - protein, 19 aa, Artificial Sequence
  Description of Artificial Sequence: Synthetic peptide
  Seed: PRMCSLMQGSTLPRRSGAA
PRMCSLMFGSILPRRAGAA

SEQ ID NO: 118934 - protein, 19 aa, Artificial Sequence
  Description of Artificial Sequence: Synthetic peptide
  Seed: PRMCSLMQGSTLPRRSGAA
PRMCSLMFGSILPRRNGAA

SEQ ID NO: 118935 - protein, 19 aa, Artificial Sequence
  Description of Artificial Sequence: Synthetic peptide
  Seed: PRMCSLMQGSTLPRRSGAA
PRMCSLMFGSILPRRSGAA

SEQ ID NO: 118936 - protein, 19 aa, Artificial Sequence
  Description of Artificial Sequence: Synthetic peptide
  Seed: PRMCSLMQGSTLPRRSGAA
PRMCSLMFGSILPRRVGAA

SEQ ID NO: 118937 - protein, 19 aa, Artificial Sequence
  Description of Artificial Sequence: Synthetic peptide
  Seed: PRMCSLMQGSTLPRRSGAA
PRMCSLMFGSILSRRAGAA

SEQ ID NO: 118938 - protein, 19 aa, Artificial Sequence
  Description of Artificial Sequence: Synthetic peptide
  Seed: PRMCSLMQGSTLPRRSGAA
PRMCSLMFGSILSRRIGAA

SEQ ID NO: 118939 - protein, 19 aa, Artificial Sequence
  Description of Artificial Sequence: Synthetic peptide
  Seed: PRMCSLMQGSTLPRRSGAA
PRMCSLMFGSILSRRNGAA

SEQ ID NO: 118940 - protein, 19 aa, Artificial Sequence
  Description of Artificial Sequence: Synthetic peptide
  Seed: PRMCSLMQGSTLPRRSGAA
PRMCSLMFGSILSRRSGAA

SEQ ID NO: 118941 - protein, 19 aa, Artificial Sequence
  Description of Artificial Sequence: Synthetic peptide
  Seed: PRMCSLMQGSTLPRRSGAA
PRMCSLMFGSILSRRVGAA

SEQ ID NO: 118942 - protein, 19 aa, Artificial Sequence
  Description of Artificial Sequence: Synthetic peptide
  Seed: PRMCSLMQGSTLPRRSGAA
PRMCSLMFGSILTRRAGAA

SEQ ID NO: 118943 - protein, 19 aa, Artificial Sequence
  Description of Artificial Sequence: Synthetic peptide
  Seed: PRMCSLMQGSTLPRRSGAA
PRMCSLMFGSILTRRNGAA

SEQ ID NO: 118944 - protein, 19 aa, Artificial Sequence
  Description of Artificial Sequence: Synthetic peptide
  Seed: PRMCSLMQGSTLPRRSGAA
PRMCSLMFGSILTRRSGAA

SEQ ID NO: 118945 - protein, 19 aa, Artificial Sequence
  Description of Artificial Sequence: Synthetic peptide
  Seed: PRMCSLMQGSTLPRRSGAA
PRMCSLMFGSILTRRVGAA

SEQ ID NO: 118946 - protein, 19 aa, Artificial Sequence
  Description of Artificial Sequence: Synthetic peptide
  Seed: PRMCSLMQGSTLPRRSGAA
PRMCSLMFGSILVRRAGAA

SEQ ID NO: 118947 - protein, 19 aa, Artificial Sequence
  Description of Artificial Sequence: Synthetic peptide
  Seed: PRMCSLMQGSTLPRRSGAA
PRMCSLMFGSILVRRNGAA

SEQ ID NO: 118948 - protein, 19 aa, Artificial Sequence
  Description of Artificial Sequence: Synthetic peptide
  Seed: PRMCSLMQGSTLPRRSGAA
PRMCSLMFGSLLARRAGAA

SEQ ID NO: 118949 - protein, 19 aa, Artificial Sequence
  Description of Artificial Sequence: Synthetic peptide
  Seed: PRMCSLMQGSTLPRRSGAA
PRMCSLMFGSLLARRIGAA

SEQ ID NO: 118950 - protein, 19 aa, Artificial Sequence
  Description of Artificial Sequence: Synthetic peptide
  Seed: PRMCSLMQGSTLPRRSGAA
PRMCSLMFGSLLARRLGAA

SEQ ID NO: 118951 - protein, 19 aa, Artificial Sequence
  Description of Artificial Sequence: Synthetic peptide
  Seed: PRMCSLMQGSTLPRRSGAA
PRMCSLMFGSLLARRMGAA

SEQ ID NO: 118952 - protein, 19 aa, Artificial Sequence
  Description of Artificial Sequence: Synthetic peptide
  Seed: PRMCSLMQGSTLPRRSGAA
PRMCSLMFGSLLARRNGAA

SEQ ID NO: 118953 - protein, 19 aa, Artificial Sequence
  Description of Artificial Sequence: Synthetic peptide
  Seed: PRMCSLMQGSTLPRRSGAA
PRMCSLMFGSLLARRSGAA

SEQ ID NO: 118954 - protein, 19 aa, Artificial Sequence
  Description of Artificial Sequence: Synthetic peptide
  Seed: PRMCSLMQGSTLPRRSGAA
PRMCSLMFGSLLARRTGAA

SEQ ID NO: 118955 - protein, 19 aa, Artificial Sequence
  Description of Artificial Sequence: Synthetic peptide
  Seed: PRMCSLMQGSTLPRRSGAA
PRMCSLMFGSLLARRVGAA

SEQ ID NO: 118956 - protein, 19 aa, Artificial Sequence
  Description of Artificial Sequence: Synthetic peptide
  Seed: PRMCSLMQGSTLPRRSGAA
PRMCSLMFGSLLGRRAGAA

SEQ ID NO: 118957 - protein, 19 aa, Artificial Sequence
  Description of Artificial Sequence: Synthetic peptide
  Seed: PRMCSLMQGSTLPRRSGAA
PRMCSLMFGSLLPRRAGAA

SEQ ID NO: 118958 - protein, 19 aa, Artificial Sequence
  Description of Artificial Sequence: Synthetic peptide
  Seed: PRMCSLMQGSTLPRRSGAA
PRMCSLMFGSLLPRRIGAA

SEQ ID NO: 118959 - protein, 19 aa, Artificial Sequence
  Description of Artificial Sequence: Synthetic peptide
  Seed: PRMCSLMQGSTLPRRSGAA
PRMCSLMFGSLLPRRLGAA

SEQ ID NO: 118960 - protein, 19 aa, Artificial Sequence
  Description of Artificial Sequence: Synthetic peptide
  Seed: PRMCSLMQGSTLPRRSGAA
PRMCSLMFGSLLPRRNGAA

SEQ ID NO: 118961 - protein, 19 aa, Artificial Sequence
  Description of Artificial Sequence: Synthetic peptide
  Seed: PRMCSLMQGSTLPRRSGAA
PRMCSLMFGSLLPRRSGAA

SEQ ID NO: 118962 - protein, 19 aa, Artificial Sequence
  Description of Artificial Sequence: Synthetic peptide
  Seed: PRMCSLMQGSTLPRRSGAA
PRMCSLMFGSLLPRRVGAA

SEQ ID NO: 118963 - protein, 19 aa, Artificial Sequence
  Description of Artificial Sequence: Synthetic peptide
  Seed: PRMCSLMQGSTLPRRSGAA
PRMCSLMFGSLLSRRAGAA

SEQ ID NO: 118964 - protein, 19 aa, Artificial Sequence
  Description of Artificial Sequence: Synthetic peptide
  Seed: PRMCSLMQGSTLPRRSGAA
PRMCSLMFGSLLSRRIGAA

SEQ ID NO: 118965 - protein, 19 aa, Artificial Sequence
  Description of Artificial Sequence: Synthetic peptide
  Seed: PRMCSLMQGSTLPRRSGAA
PRMCSLMFGSLLSRRLGAA

SEQ ID NO: 118966 - protein, 19 aa, Artificial Sequence
  Description of Artificial Sequence: Synthetic peptide
  Seed: PRMCSLMQGSTLPRRSGAA
PRMCSLMFGSLLSRRMGAA

SEQ ID NO: 118967 - protein, 19 aa, Artificial Sequence
  Description of Artificial Sequence: Synthetic peptide
  Seed: PRMCSLMQGSTLPRRSGAA
PRMCSLMFGSLLSRRNGAA

SEQ ID NO: 118968 - protein, 19 aa, Artificial Sequence
  Description of Artificial Sequence: Synthetic peptide
  Seed: PRMCSLMQGSTLPRRSGAA
PRMCSLMFGSLLSRRSGAA

SEQ ID NO: 118969 - protein, 19 aa, Artificial Sequence
  Description of Artificial Sequence: Synthetic peptide
  Seed: PRMCSLMQGSTLPRRSGAA
PRMCSLMFGSLLSRRTGAA

SEQ ID NO: 118970 - protein, 19 aa, Artificial Sequence
  Description of Artificial Sequence: Synthetic peptide
  Seed: PRMCSLMQGSTLPRRSGAA
PRMCSLMFGSLLSRRVGAA

SEQ ID NO: 118971 - protein, 19 aa, Artificial Sequence
  Description of Artificial Sequence: Synthetic peptide
  Seed: PRMCSLMQGSTLPRRSGAA
PRMCSLMFGSLLTRRAGAA

SEQ ID NO: 118972 - protein, 19 aa, Artificial Sequence
  Description of Artificial Sequence: Synthetic peptide
  Seed: PRMCSLMQGSTLPRRSGAA
PRMCSLMFGSLLTRRIGAA

SEQ ID NO: 118973 - protein, 19 aa, Artificial Sequence
  Description of Artificial Sequence: Synthetic peptide
  Seed: PRMCSLMQGSTLPRRSGAA
PRMCSLMFGSLLTRRLGAA

SEQ ID NO: 118974 - protein, 19 aa, Artificial Sequence
  Description of Artificial Sequence: Synthetic peptide
  Seed: PRMCSLMQGSTLPRRSGAA
PRMCSLMFGSLLTRRNGAA

SEQ ID NO: 118975 - protein, 19 aa, Artificial Sequence
  Description of Artificial Sequence: Synthetic peptide
  Seed: PRMCSLMQGSTLPRRSGAA
PRMCSLMFGSLLTRRSGAA

SEQ ID NO: 118976 - protein, 19 aa, Artificial Sequence
  Description of Artificial Sequence: Synthetic peptide
  Seed: PRMCSLMQGSTLPRRSGAA
PRMCSLMFGSLLTRRTGAA

SEQ ID NO: 118977 - protein, 19 aa, Artificial Sequence
  Description of Artificial Sequence: Synthetic peptide
  Seed: PRMCSLMQGSTLPRRSGAA
PRMCSLMFGSLLTRRVGAA

SEQ ID NO: 118978 - protein, 19 aa, Artificial Sequence
  Description of Artificial Sequence: Synthetic peptide
  Seed: PRMCSLMQGSTLPRRSGAA
PRMCSLMFGSLLVRRAGAA

SEQ ID NO: 118979 - protein, 19 aa, Artificial Sequence
  Description of Artificial Sequence: Synthetic peptide
  Seed: PRMCSLMQGSTLPRRSGAA
PRMCSLMFGSLLVRRNGAA

SEQ ID NO: 118980 - protein, 19 aa, Artificial Sequence
  Description of Artificial Sequence: Synthetic peptide
  Seed: PRMCSLMQGSTLPRRSGAA
PRMCSLMFGSLLVRRSGAA

SEQ ID NO: 118981 - protein, 19 aa, Artificial Sequence
  Description of Artificial Sequence: Synthetic peptide
  Seed: PRMCSLMQGSTLPRRSGAA
PRMCSLMFGSLLVRRVGAA

SEQ ID NO: 118982 - protein, 19 aa, Artificial Sequence
  Description of Artificial Sequence: Synthetic peptide
  Seed: PRMCSLMQGSTLPRRSGAA
PRMCSLMFGSMLARRAGAA

SEQ ID NO: 118983 - protein, 19 aa, Artificial Sequence
  Description of Artificial Sequence: Synthetic peptide
  Seed: PRMCSLMQGSTLPRRSGAA
PRMCSLMFGSMLARRGGAA

SEQ ID NO: 118984 - protein, 19 aa, Artificial Sequence
  Description of Artificial Sequence: Synthetic peptide
  Seed: PRMCSLMQGSTLPRRSGAA
PRMCSLMFGSMLARRIGAA

SEQ ID NO: 118985 - protein, 19 aa, Artificial Sequence
  Description of Artificial Sequence: Synthetic peptide
  Seed: PRMCSLMQGSTLPRRSGAA
PRMCSLMFGSMLARRLGAA

SEQ ID NO: 118986 - protein, 19 aa, Artificial Sequence
  Description of Artificial Sequence: Synthetic peptide
  Seed: PRMCSLMQGSTLPRRSGAA
PRMCSLMFGSMLARRMGAA

SEQ ID NO: 118987 - protein, 19 aa, Artificial Sequence
  Description of Artificial Sequence: Synthetic peptide
  Seed: PRMCSLMQGSTLPRRSGAA
PRMCSLMFGSMLARRNGAA

SEQ ID NO: 118988 - protein, 19 aa, Artificial Sequence
  Description of Artificial Sequence: Synthetic peptide
  Seed: PRMCSLMQGSTLPRRSGAA
PRMCSLMFGSMLARRSGAA

SEQ ID NO: 118989 - protein, 19 aa, Artificial Sequence
  Description of Artificial Sequence: Synthetic peptide
  Seed: PRMCSLMQGSTLPRRSGAA
PRMCSLMFGSMLARRTGAA

SEQ ID NO: 118990 - protein, 19 aa, Artificial Sequence
  Description of Artificial Sequence: Synthetic peptide
  Seed: PRMCSLMQGSTLPRRSGAA
PRMCSLMFGSMLARRVGAA

SEQ ID NO: 118991 - protein, 19 aa, Artificial Sequence
  Description of Artificial Sequence: Synthetic peptide
  Seed: PRMCSLMQGSTLPRRSGAA
PRMCSLMFGSMLGRRAGAA

SEQ ID NO: 118992 - protein, 19 aa, Artificial Sequence
  Description of Artificial Sequence: Synthetic peptide
  Seed: PRMCSLMQGSTLPRRSGAA
PRMCSLMFGSMLGRRVGAA

SEQ ID NO: 118993 - protein, 19 aa, Artificial Sequence
  Description of Artificial Sequence: Synthetic peptide
  Seed: PRMCSLMQGSTLPRRSGAA
PRMCSLMFGSMLIRRAGAA

SEQ ID NO: 118994 - protein, 19 aa, Artificial Sequence
  Description of Artificial Sequence: Synthetic peptide
  Seed: PRMCSLMQGSTLPRRSGAA
PRMCSLMFGSMLIRRNGAA

SEQ ID NO: 118995 - protein, 19 aa, Artificial Sequence
  Description of Artificial Sequence: Synthetic peptide
  Seed: PRMCSLMQGSTLPRRSGAA
PRMCSLMFGSMLPRRAGAA

SEQ ID NO: 118996 - protein, 19 aa, Artificial Sequence
  Description of Artificial Sequence: Synthetic peptide
  Seed: PRMCSLMQGSTLPRRSGAA
PRMCSLMFGSMLPRRIGAA

SEQ ID NO: 118997 - protein, 19 aa, Artificial Sequence
  Description of Artificial Sequence: Synthetic peptide
  Seed: PRMCSLMQGSTLPRRSGAA
PRMCSLMFGSMLPRRLGAA

SEQ ID NO: 118998 - protein, 19 aa, Artificial Sequence
  Description of Artificial Sequence: Synthetic peptide
  Seed: PRMCSLMQGSTLPRRSGAA
PRMCSLMFGSMLPRRMGAA

SEQ ID NO: 118999 - protein, 19 aa, Artificial Sequence
  Description of Artificial Sequence: Synthetic peptide
  Seed: PRMCSLMQGSTLPRRSGAA
PRMCSLMFGSMLPRRNGAA

SEQ ID NO: 119000 - protein, 19 aa, Artificial Sequence
  Description of Artificial Sequence: Synthetic peptide
  Seed: PRMCSLMQGSTLPRRSGAA
PRMCSLMFGSMLPRRSGAA

SEQ ID NO: 119001 - protein, 19 aa, Artificial Sequence
  Description of Artificial Sequence: Synthetic peptide
  Seed: PRMCSLMQGSTLPRRSGAA
PRMCSLMFGSMLPRRTGAA

SEQ ID NO: 119002 - protein, 19 aa, Artificial Sequence
  Description of Artificial Sequence: Synthetic peptide
  Seed: PRMCSLMQGSTLPRRSGAA
PRMCSLMFGSMLPRRVGAA

SEQ ID NO: 119003 - protein, 19 aa, Artificial Sequence
  Description of Artificial Sequence: Synthetic peptide
  Seed: PRMCSLMQGSTLPRRSGAA
PRMCSLMFGSMLSRRAGAA

SEQ ID NO: 119004 - protein, 19 aa, Artificial Sequence
  Description of Artificial Sequence: Synthetic peptide
  Seed: PRMCSLMQGSTLPRRSGAA
PRMCSLMFGSMLSRRIGAA

SEQ ID NO: 119005 - protein, 19 aa, Artificial Sequence
  Description of Artificial Sequence: Synthetic peptide
  Seed: PRMCSLMQGSTLPRRSGAA
PRMCSLMFGSMLSRRLGAA

SEQ ID NO: 119006 - protein, 19 aa, Artificial Sequence
  Description of Artificial Sequence: Synthetic peptide
  Seed: PRMCSLMQGSTLPRRSGAA
PRMCSLMFGSMLSRRMGAA

SEQ ID NO: 119007 - protein, 19 aa, Artificial Sequence
  Description of Artificial Sequence: Synthetic peptide
  Seed: PRMCSLMQGSTLPRRSGAA
PRMCSLMFGSMLSRRNGAA

SEQ ID NO: 119008 - protein, 19 aa, Artificial Sequence
  Description of Artificial Sequence: Synthetic peptide
  Seed: PRMCSLMQGSTLPRRSGAA
PRMCSLMFGSMLSRRSGAA

SEQ ID NO: 119009 - protein, 19 aa, Artificial Sequence
  Description of Artificial Sequence: Synthetic peptide
  Seed: PRMCSLMQGSTLPRRSGAA
PRMCSLMFGSMLSRRTGAA

SEQ ID NO: 119010 - protein, 19 aa, Artificial Sequence
  Description of Artificial Sequence: Synthetic peptide
  Seed: PRMCSLMQGSTLPRRSGAA
PRMCSLMFGSMLSRRVGAA

SEQ ID NO: 119011 - protein, 19 aa, Artificial Sequence
  Description of Artificial Sequence: Synthetic peptide
  Seed: PRMCSLMQGSTLPRRSGAA
PRMCSLMFGSMLTRRAGAA

SEQ ID NO: 119012 - protein, 19 aa, Artificial Sequence
  Description of Artificial Sequence: Synthetic peptide
  Seed: PRMCSLMQGSTLPRRSGAA
PRMCSLMFGSMLTRRIGAA

SEQ ID NO: 119013 - protein, 19 aa, Artificial Sequence
  Description of Artificial Sequence: Synthetic peptide
  Seed: PRMCSLMQGSTLPRRSGAA
PRMCSLMFGSMLTRRLGAA

SEQ ID NO: 119014 - protein, 19 aa, Artificial Sequence
  Description of Artificial Sequence: Synthetic peptide
  Seed: PRMCSLMQGSTLPRRSGAA
PRMCSLMFGSMLTRRMGAA

SEQ ID NO: 119015 - protein, 19 aa, Artificial Sequence
  Description of Artificial Sequence: Synthetic peptide
  Seed: PRMCSLMQGSTLPRRSGAA
PRMCSLMFGSMLTRRNGAA

SEQ ID NO: 119016 - protein, 19 aa, Artificial Sequence
  Description of Artificial Sequence: Synthetic peptide
  Seed: PRMCSLMQGSTLPRRSGAA
PRMCSLMFGSMLTRRSGAA

SEQ ID NO: 119017 - protein, 19 aa, Artificial Sequence
  Description of Artificial Sequence: Synthetic peptide
  Seed: PRMCSLMQGSTLPRRSGAA
PRMCSLMFGSMLTRRTGAA

SEQ ID NO: 119018 - protein, 19 aa, Artificial Sequence
  Description of Artificial Sequence: Synthetic peptide
  Seed: PRMCSLMQGSTLPRRSGAA
PRMCSLMFGSMLTRRVGAA

SEQ ID NO: 119019 - protein, 19 aa, Artificial Sequence
  Description of Artificial Sequence: Synthetic peptide
  Seed: PRMCSLMQGSTLPRRSGAA
PRMCSLMFGSMLVRRAGAA

SEQ ID NO: 119020 - protein, 19 aa, Artificial Sequence
  Description of Artificial Sequence: Synthetic peptide
  Seed: PRMCSLMQGSTLPRRSGAA
PRMCSLMFGSMLVRRIGAA

SEQ ID NO: 119021 - protein, 19 aa, Artificial Sequence
  Description of Artificial Sequence: Synthetic peptide
  Seed: PRMCSLMQGSTLPRRSGAA
PRMCSLMFGSMLVRRLGAA

SEQ ID NO: 119022 - protein, 19 aa, Artificial Sequence
  Description of Artificial Sequence: Synthetic peptide
  Seed: PRMCSLMQGSTLPRRSGAA
PRMCSLMFGSMLVRRNGAA

SEQ ID NO: 119023 - protein, 19 aa, Artificial Sequence
  Description of Artificial Sequence: Synthetic peptide
  Seed: PRMCSLMQGSTLPRRSGAA
PRMCSLMFGSMLVRRSGAA

SEQ ID NO: 119024 - protein, 19 aa, Artificial Sequence
  Description of Artificial Sequence: Synthetic peptide
  Seed: PRMCSLMQGSTLPRRSGAA
PRMCSLMFGSMLVRRTGAA

SEQ ID NO: 119025 - protein, 19 aa, Artificial Sequence
  Description of Artificial Sequence: Synthetic peptide
  Seed: PRMCSLMQGSTLPRRSGAA
PRMCSLMFGSMLVRRVGAA

SEQ ID NO: 119026 - protein, 19 aa, Artificial Sequence
  Description of Artificial Sequence: Synthetic peptide
  Seed: PRMCSLMQGSTLPRRSGAA
PRMCSLMFGSVLARRAGAA

SEQ ID NO: 119027 - protein, 19 aa, Artificial Sequence
  Description of Artificial Sequence: Synthetic peptide
  Seed: PRMCSLMQGSTLPRRSGAA
PRMCSLMYGSALARRAGAA

SEQ ID NO: 119028 - protein, 19 aa, Artificial Sequence
  Description of Artificial Sequence: Synthetic peptide
  Seed: PRMCSLMQGSTLPRRSGAA
PRMCSLMYGSILARRAGAA

SEQ ID NO: 119029 - protein, 19 aa, Artificial Sequence
  Description of Artificial Sequence: Synthetic peptide
  Seed: PRMCSLMQGSTLPRRSGAA
PRMCSLMYGSILARRIGAA

SEQ ID NO: 119030 - protein, 19 aa, Artificial Sequence
  Description of Artificial Sequence: Synthetic peptide
  Seed: PRMCSLMQGSTLPRRSGAA
PRMCSLMYGSILARRLGAA

SEQ ID NO: 119031 - protein, 19 aa, Artificial Sequence
  Description of Artificial Sequence: Synthetic peptide
  Seed: PRMCSLMQGSTLPRRSGAA
PRMCSLMYGSILARRNGAA

SEQ ID NO: 119032 - protein, 19 aa, Artificial Sequence
  Description of Artificial Sequence: Synthetic peptide
  Seed: PRMCSLMQGSTLPRRSGAA
PRMCSLMYGSILARRSGAA

SEQ ID NO: 119033 - protein, 19 aa, Artificial Sequence
  Description of Artificial Sequence: Synthetic peptide
  Seed: PRMCSLMQGSTLPRRSGAA
PRMCSLMYGSILARRVGAA

SEQ ID NO: 119034 - protein, 19 aa, Artificial Sequence
  Description of Artificial Sequence: Synthetic peptide
  Seed: PRMCSLMQGSTLPRRSGAA
PRMCSLMYGSILPRRAGAA

SEQ ID NO: 119035 - protein, 19 aa, Artificial Sequence
  Description of Artificial Sequence: Synthetic peptide
  Seed: PRMCSLMQGSTLPRRSGAA
PRMCSLMYGSILSRRAGAA

SEQ ID NO: 119036 - protein, 19 aa, Artificial Sequence
  Description of Artificial Sequence: Synthetic peptide
  Seed: PRMCSLMQGSTLPRRSGAA
PRMCSLMYGSILSRRVGAA

SEQ ID NO: 119037 - protein, 19 aa, Artificial Sequence
  Description of Artificial Sequence: Synthetic peptide
  Seed: PRMCSLMQGSTLPRRSGAA
PRMCSLMYGSILTRRAGAA

SEQ ID NO: 119038 - protein, 19 aa, Artificial Sequence
  Description of Artificial Sequence: Synthetic peptide
  Seed: PRMCSLMQGSTLPRRSGAA
PRMCSLMYGSILTRRVGAA

SEQ ID NO: 119039 - protein, 19 aa, Artificial Sequence
  Description of Artificial Sequence: Synthetic peptide
  Seed: PRMCSLMQGSTLPRRSGAA
PRMCSLMYGSLLARRAGAA

SEQ ID NO: 119040 - protein, 19 aa, Artificial Sequence
  Description of Artificial Sequence: Synthetic peptide
  Seed: PRMCSLMQGSTLPRRSGAA
PRMCSLMYGSLLARRIGAA

SEQ ID NO: 119041 - protein, 19 aa, Artificial Sequence
  Description of Artificial Sequence: Synthetic peptide
  Seed: PRMCSLMQGSTLPRRSGAA
PRMCSLMYGSLLARRLGAA

SEQ ID NO: 119042 - protein, 19 aa, Artificial Sequence
  Description of Artificial Sequence: Synthetic peptide
  Seed: PRMCSLMQGSTLPRRSGAA
PRMCSLMYGSLLARRMGAA

SEQ ID NO: 119043 - protein, 19 aa, Artificial Sequence
  Description of Artificial Sequence: Synthetic peptide
  Seed: PRMCSLMQGSTLPRRSGAA
PRMCSLMYGSLLARRNGAA

SEQ ID NO: 119044 - protein, 19 aa, Artificial Sequence
  Description of Artificial Sequence: Synthetic peptide
  Seed: PRMCSLMQGSTLPRRSGAA
PRMCSLMYGSLLARRSGAA

SEQ ID NO: 119045 - protein, 19 aa, Artificial Sequence
  Description of Artificial Sequence: Synthetic peptide
  Seed: PRMCSLMQGSTLPRRSGAA
PRMCSLMYGSLLARRTGAA

SEQ ID NO: 119046 - protein, 19 aa, Artificial Sequence
  Description of Artificial Sequence: Synthetic peptide
  Seed: PRMCSLMQGSTLPRRSGAA
PRMCSLMYGSLLARRVGAA

SEQ ID NO: 119047 - protein, 19 aa, Artificial Sequence
  Description of Artificial Sequence: Synthetic peptide
  Seed: PRMCSLMQGSTLPRRSGAA
PRMCSLMYGSLLPRRAGAA

SEQ ID NO: 119048 - protein, 19 aa, Artificial Sequence
  Description of Artificial Sequence: Synthetic peptide
  Seed: PRMCSLMQGSTLPRRSGAA
PRMCSLMYGSLLPRRIGAA

SEQ ID NO: 119049 - protein, 19 aa, Artificial Sequence
  Description of Artificial Sequence: Synthetic peptide
  Seed: PRMCSLMQGSTLPRRSGAA
PRMCSLMYGSLLPRRVGAA

SEQ ID NO: 119050 - protein, 19 aa, Artificial Sequence
  Description of Artificial Sequence: Synthetic peptide
  Seed: PRMCSLMQGSTLPRRSGAA
PRMCSLMYGSLLSRRAGAA

SEQ ID NO: 119051 - protein, 19 aa, Artificial Sequence
  Description of Artificial Sequence: Synthetic peptide
  Seed: PRMCSLMQGSTLPRRSGAA
PRMCSLMYGSLLSRRIGAA

SEQ ID NO: 119052 - protein, 19 aa, Artificial Sequence
  Description of Artificial Sequence: Synthetic peptide
  Seed: PRMCSLMQGSTLPRRSGAA
PRMCSLMYGSLLSRRLGAA

SEQ ID NO: 119053 - protein, 19 aa, Artificial Sequence
  Description of Artificial Sequence: Synthetic peptide
  Seed: PRMCSLMQGSTLPRRSGAA
PRMCSLMYGSLLSRRNGAA

SEQ ID NO: 119054 - protein, 19 aa, Artificial Sequence
  Description of Artificial Sequence: Synthetic peptide
  Seed: PRMCSLMQGSTLPRRSGAA
PRMCSLMYGSLLSRRSGAA

SEQ ID NO: 119055 - protein, 19 aa, Artificial Sequence
  Description of Artificial Sequence: Synthetic peptide
  Seed: PRMCSLMQGSTLPRRSGAA
PRMCSLMYGSLLSRRVGAA

SEQ ID NO: 119056 - protein, 19 aa, Artificial Sequence
  Description of Artificial Sequence: Synthetic peptide
  Seed: PRMCSLMQGSTLPRRSGAA
PRMCSLMYGSLLTRRAGAA

SEQ ID NO: 119057 - protein, 19 aa, Artificial Sequence
  Description of Artificial Sequence: Synthetic peptide
  Seed: PRMCSLMQGSTLPRRSGAA
PRMCSLMYGSLLTRRIGAA

SEQ ID NO: 119058 - protein, 19 aa, Artificial Sequence
  Description of Artificial Sequence: Synthetic peptide
  Seed: PRMCSLMQGSTLPRRSGAA
PRMCSLMYGSLLTRRLGAA

SEQ ID NO: 119059 - protein, 19 aa, Artificial Sequence
  Description of Artificial Sequence: Synthetic peptide
  Seed: PRMCSLMQGSTLPRRSGAA
PRMCSLMYGSLLTRRNGAA

SEQ ID NO: 119060 - protein, 19 aa, Artificial Sequence
  Description of Artificial Sequence: Synthetic peptide
  Seed: PRMCSLMQGSTLPRRSGAA
PRMCSLMYGSLLTRRVGAA

SEQ ID NO: 119061 - protein, 19 aa, Artificial Sequence
  Description of Artificial Sequence: Synthetic peptide
  Seed: PRMCSLMQGSTLPRRSGAA
PRMCSLMYGSLLVRRAGAA

SEQ ID NO: 119062 - protein, 19 aa, Artificial Sequence
  Description of Artificial Sequence: Synthetic peptide
  Seed: PRMCSLMQGSTLPRRSGAA
PRMCSLMYGSLLVRRVGAA

SEQ ID NO: 119063 - protein, 19 aa, Artificial Sequence
  Description of Artificial Sequence: Synthetic peptide
  Seed: PRMCSLMQGSTLPRRSGAA
PRMCSLMYGSMLARRAGAA

SEQ ID NO: 119064 - protein, 19 aa, Artificial Sequence
  Description of Artificial Sequence: Synthetic peptide
  Seed: PRMCSLMQGSTLPRRSGAA
PRMCSLMYGSMLARRIGAA

SEQ ID NO: 119065 - protein, 19 aa, Artificial Sequence
  Description of Artificial Sequence: Synthetic peptide
  Seed: PRMCSLMQGSTLPRRSGAA
PRMCSLMYGSMLARRLGAA

SEQ ID NO: 119066 - protein, 19 aa, Artificial Sequence
  Description of Artificial Sequence: Synthetic peptide
  Seed: PRMCSLMQGSTLPRRSGAA
PRMCSLMYGSMLARRMGAA

SEQ ID NO: 119067 - protein, 19 aa, Artificial Sequence
  Description of Artificial Sequence: Synthetic peptide
  Seed: PRMCSLMQGSTLPRRSGAA
PRMCSLMYGSMLARRNGAA

SEQ ID NO: 119068 - protein, 19 aa, Artificial Sequence
  Description of Artificial Sequence: Synthetic peptide
  Seed: PRMCSLMQGSTLPRRSGAA
PRMCSLMYGSMLARRSGAA

SEQ ID NO: 119069 - protein, 19 aa, Artificial Sequence
  Description of Artificial Sequence: Synthetic peptide
  Seed: PRMCSLMQGSTLPRRSGAA
PRMCSLMYGSMLARRTGAA

SEQ ID NO: 119070 - protein, 19 aa, Artificial Sequence
  Description of Artificial Sequence: Synthetic peptide
  Seed: PRMCSLMQGSTLPRRSGAA
PRMCSLMYGSMLARRVGAA

SEQ ID NO: 119071 - protein, 19 aa, Artificial Sequence
  Description of Artificial Sequence: Synthetic peptide
  Seed: PRMCSLMQGSTLPRRSGAA
PRMCSLMYGSMLPRRAGAA

SEQ ID NO: 119072 - protein, 19 aa, Artificial Sequence
  Description of Artificial Sequence: Synthetic peptide
  Seed: PRMCSLMQGSTLPRRSGAA
PRMCSLMYGSMLPRRIGAA

SEQ ID NO: 119073 - protein, 19 aa, Artificial Sequence
  Description of Artificial Sequence: Synthetic peptide
  Seed: PRMCSLMQGSTLPRRSGAA
PRMCSLMYGSMLPRRLGAA

SEQ ID NO: 119074 - protein, 19 aa, Artificial Sequence
  Description of Artificial Sequence: Synthetic peptide
  Seed: PRMCSLMQGSTLPRRSGAA
PRMCSLMYGSMLPRRVGAA

SEQ ID NO: 119075 - protein, 19 aa, Artificial Sequence
  Description of Artificial Sequence: Synthetic peptide
  Seed: PRMCSLMQGSTLPRRSGAA
PRMCSLMYGSMLSRRAGAA

SEQ ID NO: 119076 - protein, 19 aa, Artificial Sequence
  Description of Artificial Sequence: Synthetic peptide
  Seed: PRMCSLMQGSTLPRRSGAA
PRMCSLMYGSMLSRRIGAA

SEQ ID NO: 119077 - protein, 19 aa, Artificial Sequence
  Description of Artificial Sequence: Synthetic peptide
  Seed: PRMCSLMQGSTLPRRSGAA
PRMCSLMYGSMLSRRLGAA

SEQ ID NO: 119078 - protein, 19 aa, Artificial Sequence
  Description of Artificial Sequence: Synthetic peptide
  Seed: PRMCSLMQGSTLPRRSGAA
PRMCSLMYGSMLSRRMGAA

SEQ ID NO: 119079 - protein, 19 aa, Artificial Sequence
  Description of Artificial Sequence: Synthetic peptide
  Seed: PRMCSLMQGSTLPRRSGAA
PRMCSLMYGSMLSRRNGAA

SEQ ID NO: 119080 - protein, 19 aa, Artificial Sequence
  Description of Artificial Sequence: Synthetic peptide
  Seed: PRMCSLMQGSTLPRRSGAA
PRMCSLMYGSMLSRRSGAA

SEQ ID NO: 119081 - protein, 19 aa, Artificial Sequence
  Description of Artificial Sequence: Synthetic peptide
  Seed: PRMCSLMQGSTLPRRSGAA
PRMCSLMYGSMLSRRTGAA

SEQ ID NO: 119082 - protein, 19 aa, Artificial Sequence
  Description of Artificial Sequence: Synthetic peptide
  Seed: PRMCSLMQGSTLPRRSGAA
PRMCSLMYGSMLSRRVGAA

SEQ ID NO: 119083 - protein, 19 aa, Artificial Sequence
  Description of Artificial Sequence: Synthetic peptide
  Seed: PRMCSLMQGSTLPRRSGAA
PRMCSLMYGSMLTRRAGAA

SEQ ID NO: 119084 - protein, 19 aa, Artificial Sequence
  Description of Artificial Sequence: Synthetic peptide
  Seed: PRMCSLMQGSTLPRRSGAA
PRMCSLMYGSMLTRRIGAA

SEQ ID NO: 119085 - protein, 19 aa, Artificial Sequence
  Description of Artificial Sequence: Synthetic peptide
  Seed: PRMCSLMQGSTLPRRSGAA
PRMCSLMYGSMLTRRLGAA

SEQ ID NO: 119086 - protein, 19 aa, Artificial Sequence
  Description of Artificial Sequence: Synthetic peptide
  Seed: PRMCSLMQGSTLPRRSGAA
PRMCSLMYGSMLTRRMGAA

SEQ ID NO: 119087 - protein, 19 aa, Artificial Sequence
  Description of Artificial Sequence: Synthetic peptide
  Seed: PRMCSLMQGSTLPRRSGAA
PRMCSLMYGSMLTRRNGAA

SEQ ID NO: 119088 - protein, 19 aa, Artificial Sequence
  Description of Artificial Sequence: Synthetic peptide
  Seed: PRMCSLMQGSTLPRRSGAA
PRMCSLMYGSMLTRRSGAA

SEQ ID NO: 119089 - protein, 19 aa, Artificial Sequence
  Description of Artificial Sequence: Synthetic peptide
  Seed: PRMCSLMQGSTLPRRSGAA
PRMCSLMYGSMLTRRTGAA

SEQ ID NO: 119090 - protein, 19 aa, Artificial Sequence
  Description of Artificial Sequence: Synthetic peptide
  Seed: PRMCSLMQGSTLPRRSGAA
PRMCSLMYGSMLTRRVGAA

SEQ ID NO: 119091 - protein, 19 aa, Artificial Sequence
  Description of Artificial Sequence: Synthetic peptide
  Seed: PRMCSLMQGSTLPRRSGAA
PRMCSLMYGSMLVRRAGAA

SEQ ID NO: 119092 - protein, 19 aa, Artificial Sequence
  Description of Artificial Sequence: Synthetic peptide
  Seed: PRMCSLMQGSTLPRRSGAA
PRMCSLMYGSMLVRRIGAA

SEQ ID NO: 119093 - protein, 19 aa, Artificial Sequence
  Description of Artificial Sequence: Synthetic peptide
  Seed: PRMCSLMQGSTLPRRSGAA
PRMCSLMYGSMLVRRLGAA

SEQ ID NO: 119094 - protein, 19 aa, Artificial Sequence
  Description of Artificial Sequence: Synthetic peptide
  Seed: PRMCSLMQGSTLPRRSGAA
PRMCSLMYGSMLVRRNGAA

SEQ ID NO: 119095 - protein, 19 aa, Artificial Sequence
  Description of Artificial Sequence: Synthetic peptide
  Seed: PRMCSLMQGSTLPRRSGAA
PRMCSLMYGSMLVRRSGAA

SEQ ID NO: 119096 - protein, 19 aa, Artificial Sequence
  Description of Artificial Sequence: Synthetic peptide
  Seed: PRMCSLMQGSTLPRRSGAA
PRMCSLMYGSMLVRRTGAA

SEQ ID NO: 119097 - protein, 19 aa, Artificial Sequence
  Description of Artificial Sequence: Synthetic peptide
  Seed: PRMCSLMQGSTLPRRSGAA
PRMCSLMYGSMLVRRVGAA

SEQ ID NO: 119098 - protein, 20 aa, Artificial Sequence
  Description of Artificial Sequence: Synthetic peptide
  Seed: PRMCSLMQGSTLPRRSGAAG
PRMCSLMQISTIPRRSGAAG

SEQ ID NO: 119099 - protein, 20 aa, Artificial Sequence
  Description of Artificial Sequence: Synthetic peptide
  Seed: PRMCSLMQGSTLPRRSGAAG
PRMCSLMQISTLPRRSGAAG

SEQ ID NO: 119100 - protein, 20 aa, Artificial Sequence
  Description of Artificial Sequence: Synthetic peptide
  Seed: PRMCSLMQGSTLPRRSGAAG
PRMCSLMQISTMPRRSGAAG

SEQ ID NO: 119101 - protein, 20 aa, Artificial Sequence
  Description of Artificial Sequence: Synthetic peptide
  Seed: PRMCSLMQGSTLPRRSGAAG
PRMCSLMQLSTLPRRSGAAG

SEQ ID NO: 119102 - protein, 20 aa, Artificial Sequence
  Description of Artificial Sequence: Synthetic peptide
  Seed: PRMCSLMQGSTLPRRSGAAG
PRMCSLMQLSTMPRRSGAAG

SEQ ID NO: 119103 - protein, 20 aa, Artificial Sequence
  Description of Artificial Sequence: Synthetic peptide
  Seed: PRMCSLMQGSTLPRRSGAAG
PRMFSLAQASTAPRRSGAAG

SEQ ID NO: 119104 - protein, 20 aa, Artificial Sequence
  Description of Artificial Sequence: Synthetic peptide
  Seed: PRMCSLMQGSTLPRRSGAAG
PRMFSLAQASTCPRRSGAAG

SEQ ID NO: 119105 - protein, 20 aa, Artificial Sequence
  Description of Artificial Sequence: Synthetic peptide
  Seed: PRMCSLMQGSTLPRRSGAAG
PRMFSLAQASTFPRRSGAAG

SEQ ID NO: 119106 - protein, 20 aa, Artificial Sequence
  Description of Artificial Sequence: Synthetic peptide
  Seed: PRMCSLMQGSTLPRRSGAAG
PRMFSLAQASTGPRRSGAAG

SEQ ID NO: 119107 - protein, 20 aa, Artificial Sequence
  Description of Artificial Sequence: Synthetic peptide
  Seed: PRMCSLMQGSTLPRRSGAAG
PRMFSLAQASTIPRRSGAAG

SEQ ID NO: 119108 - protein, 20 aa, Artificial Sequence
  Description of Artificial Sequence: Synthetic peptide
  Seed: PRMCSLMQGSTLPRRSGAAG
PRMFSLAQASTLPRRSGAAG

SEQ ID NO: 119109 - protein, 20 aa, Artificial Sequence
  Description of Artificial Sequence: Synthetic peptide
  Seed: PRMCSLMQGSTLPRRSGAAG
PRMFSLAQASTMPRRSGAAG

SEQ ID NO: 119110 - protein, 20 aa, Artificial Sequence
  Description of Artificial Sequence: Synthetic peptide
  Seed: PRMCSLMQGSTLPRRSGAAG
PRMFSLAQASTNPRRSGAAG

SEQ ID NO: 119111 - protein, 20 aa, Artificial Sequence
  Description of Artificial Sequence: Synthetic peptide
  Seed: PRMCSLMQGSTLPRRSGAAG
PRMFSLAQASTSPRRSGAAG

SEQ ID NO: 119112 - protein, 20 aa, Artificial Sequence
  Description of Artificial Sequence: Synthetic peptide
  Seed: PRMCSLMQGSTLPRRSGAAG
PRMFSLAQASTTPRRSGAAG

SEQ ID NO: 119113 - protein, 20 aa, Artificial Sequence
  Description of Artificial Sequence: Synthetic peptide
  Seed: PRMCSLMQGSTLPRRSGAAG
PRMFSLAQASTVPRRSGAAG

SEQ ID NO: 119114 - protein, 20 aa, Artificial Sequence
  Description of Artificial Sequence: Synthetic peptide
  Seed: PRMCSLMQGSTLPRRSGAAG
PRMFSLAQASTYPRRSGAAG

SEQ ID NO: 119115 - protein, 20 aa, Artificial Sequence
  Description of Artificial Sequence: Synthetic peptide
  Seed: PRMCSLMQGSTLPRRSGAAG
PRMFSLAQGSTAPRRSGAAG

SEQ ID NO: 119116 - protein, 20 aa, Artificial Sequence
  Description of Artificial Sequence: Synthetic peptide
  Seed: PRMCSLMQGSTLPRRSGAAG
PRMFSLAQGSTGPRRSGAAG

SEQ ID NO: 119117 - protein, 20 aa, Artificial Sequence
  Description of Artificial Sequence: Synthetic peptide
  Seed: PRMCSLMQGSTLPRRSGAAG
PRMFSLAQGSTIPRRSGAAG

SEQ ID NO: 119118 - protein, 20 aa, Artificial Sequence
  Description of Artificial Sequence: Synthetic peptide
  Seed: PRMCSLMQGSTLPRRSGAAG
PRMFSLAQGSTLPRRSGAAG

SEQ ID NO: 119119 - protein, 20 aa, Artificial Sequence
  Description of Artificial Sequence: Synthetic peptide
  Seed: PRMCSLMQGSTLPRRSGAAG
PRMFSLAQGSTMPRRSGAAG

SEQ ID NO: 119120 - protein, 20 aa, Artificial Sequence
  Description of Artificial Sequence: Synthetic peptide
  Seed: PRMCSLMQGSTLPRRSGAAG
PRMFSLAQGSTSPRRSGAAG

SEQ ID NO: 119121 - protein, 20 aa, Artificial Sequence
  Description of Artificial Sequence: Synthetic peptide
  Seed: PRMCSLMQGSTLPRRSGAAG
PRMFSLAQGSTTPRRSGAAG

SEQ ID NO: 119122 - protein, 20 aa, Artificial Sequence
  Description of Artificial Sequence: Synthetic peptide
  Seed: PRMCSLMQGSTLPRRSGAAG
PRMFSLAQGSTVPRRSGAAG

SEQ ID NO: 119123 - protein, 20 aa, Artificial Sequence
  Description of Artificial Sequence: Synthetic peptide
  Seed: PRMCSLMQGSTLPRRSGAAG
PRMFSLAQISTIPRRSGAAG

SEQ ID NO: 119124 - protein, 20 aa, Artificial Sequence
  Description of Artificial Sequence: Synthetic peptide
  Seed: PRMCSLMQGSTLPRRSGAAG
PRMFSLAQISTVPRRSGAAG

SEQ ID NO: 119125 - protein, 20 aa, Artificial Sequence
  Description of Artificial Sequence: Synthetic peptide
  Seed: PRMCSLMQGSTLPRRSGAAG
PRMFSLAQNSTAPRRSGAAG

SEQ ID NO: 119126 - protein, 20 aa, Artificial Sequence
  Description of Artificial Sequence: Synthetic peptide
  Seed: PRMCSLMQGSTLPRRSGAAG
PRMFSLAQNSTIPRRSGAAG

SEQ ID NO: 119127 - protein, 20 aa, Artificial Sequence
  Description of Artificial Sequence: Synthetic peptide
  Seed: PRMCSLMQGSTLPRRSGAAG
PRMFSLAQNSTLPRRSGAAG

SEQ ID NO: 119128 - protein, 20 aa, Artificial Sequence
  Description of Artificial Sequence: Synthetic peptide
  Seed: PRMCSLMQGSTLPRRSGAAG
PRMFSLAQNSTMPRRSGAAG

SEQ ID NO: 119129 - protein, 20 aa, Artificial Sequence
  Description of Artificial Sequence: Synthetic peptide
  Seed: PRMCSLMQGSTLPRRSGAAG
PRMFSLAQNSTVPRRSGAAG

SEQ ID NO: 119130 - protein, 20 aa, Artificial Sequence
  Description of Artificial Sequence: Synthetic peptide
  Seed: PRMCSLMQGSTLPRRSGAAG
PRMFSLAQPSTAPRRSGAAG

SEQ ID NO: 119131 - protein, 20 aa, Artificial Sequence
  Description of Artificial Sequence: Synthetic peptide
  Seed: PRMCSLMQGSTLPRRSGAAG
PRMFSLAQPSTIPRRSGAAG

SEQ ID NO: 119132 - protein, 20 aa, Artificial Sequence
  Description of Artificial Sequence: Synthetic peptide
  Seed: PRMCSLMQGSTLPRRSGAAG
PRMFSLAQPSTLPRRSGAAG

SEQ ID NO: 119133 - protein, 20 aa, Artificial Sequence
  Description of Artificial Sequence: Synthetic peptide
  Seed: PRMCSLMQGSTLPRRSGAAG
PRMFSLAQPSTMPRRSGAAG

SEQ ID NO: 119134 - protein, 20 aa, Artificial Sequence
  Description of Artificial Sequence: Synthetic peptide
  Seed: PRMCSLMQGSTLPRRSGAAG
PRMFSLAQPSTSPRRSGAAG

SEQ ID NO: 119135 - protein, 20 aa, Artificial Sequence
  Description of Artificial Sequence: Synthetic peptide
  Seed: PRMCSLMQGSTLPRRSGAAG
PRMFSLAQPSTTPRRSGAAG

SEQ ID NO: 119136 - protein, 20 aa, Artificial Sequence
  Description of Artificial Sequence: Synthetic peptide
  Seed: PRMCSLMQGSTLPRRSGAAG
PRMFSLAQPSTVPRRSGAAG

SEQ ID NO: 119137 - protein, 20 aa, Artificial Sequence
  Description of Artificial Sequence: Synthetic peptide
  Seed: PRMCSLMQGSTLPRRSGAAG
PRMFSLAQSSTAPRRSGAAG

SEQ ID NO: 119138 - protein, 20 aa, Artificial Sequence
  Description of Artificial Sequence: Synthetic peptide
  Seed: PRMCSLMQGSTLPRRSGAAG
PRMFSLAQSSTGPRRSGAAG

SEQ ID NO: 119139 - protein, 20 aa, Artificial Sequence
  Description of Artificial Sequence: Synthetic peptide
  Seed: PRMCSLMQGSTLPRRSGAAG
PRMFSLAQSSTIPRRSGAAG

SEQ ID NO: 119140 - protein, 20 aa, Artificial Sequence
  Description of Artificial Sequence: Synthetic peptide
  Seed: PRMCSLMQGSTLPRRSGAAG
PRMFSLAQSSTLPRRSGAAG

SEQ ID NO: 119141 - protein, 20 aa, Artificial Sequence
  Description of Artificial Sequence: Synthetic peptide
  Seed: PRMCSLMQGSTLPRRSGAAG
PRMFSLAQSSTMPRRSGAAG

SEQ ID NO: 119142 - protein, 20 aa, Artificial Sequence
  Description of Artificial Sequence: Synthetic peptide
  Seed: PRMCSLMQGSTLPRRSGAAG
PRMFSLAQSSTSPRRSGAAG

SEQ ID NO: 119143 - protein, 20 aa, Artificial Sequence
  Description of Artificial Sequence: Synthetic peptide
  Seed: PRMCSLMQGSTLPRRSGAAG
PRMFSLAQSSTTPRRSGAAG

SEQ ID NO: 119144 - protein, 20 aa, Artificial Sequence
  Description of Artificial Sequence: Synthetic peptide
  Seed: PRMCSLMQGSTLPRRSGAAG
PRMFSLAQSSTVPRRSGAAG

SEQ ID NO: 119145 - protein, 20 aa, Artificial Sequence
  Description of Artificial Sequence: Synthetic peptide
  Seed: PRMCSLMQGSTLPRRSGAAG
PRMFSLAQTSTAPRRSGAAG

SEQ ID NO: 119146 - protein, 20 aa, Artificial Sequence
  Description of Artificial Sequence: Synthetic peptide
  Seed: PRMCSLMQGSTLPRRSGAAG
PRMFSLAQTSTIPRRSGAAG

SEQ ID NO: 119147 - protein, 20 aa, Artificial Sequence
  Description of Artificial Sequence: Synthetic peptide
  Seed: PRMCSLMQGSTLPRRSGAAG
PRMFSLAQTSTLPRRSGAAG

SEQ ID NO: 119148 - protein, 20 aa, Artificial Sequence
  Description of Artificial Sequence: Synthetic peptide
  Seed: PRMCSLMQGSTLPRRSGAAG
PRMFSLAQTSTMPRRSGAAG

SEQ ID NO: 119149 - protein, 20 aa, Artificial Sequence
  Description of Artificial Sequence: Synthetic peptide
  Seed: PRMCSLMQGSTLPRRSGAAG
PRMFSLAQTSTTPRRSGAAG

SEQ ID NO: 119150 - protein, 20 aa, Artificial Sequence
  Description of Artificial Sequence: Synthetic peptide
  Seed: PRMCSLMQGSTLPRRSGAAG
PRMFSLAQTSTVPRRSGAAG

SEQ ID NO: 119151 - protein, 20 aa, Artificial Sequence
  Description of Artificial Sequence: Synthetic peptide
  Seed: PRMCSLMQGSTLPRRSGAAG
PRMFSLAQVSTAPRRSGAAG

SEQ ID NO: 119152 - protein, 20 aa, Artificial Sequence
  Description of Artificial Sequence: Synthetic peptide
  Seed: PRMCSLMQGSTLPRRSGAAG
PRMFSLAQVSTIPRRSGAAG

SEQ ID NO: 119153 - protein, 20 aa, Artificial Sequence
  Description of Artificial Sequence: Synthetic peptide
  Seed: PRMCSLMQGSTLPRRSGAAG
PRMFSLAQVSTLPRRSGAAG

SEQ ID NO: 119154 - protein, 20 aa, Artificial Sequence
  Description of Artificial Sequence: Synthetic peptide
  Seed: PRMCSLMQGSTLPRRSGAAG
PRMFSLAQVSTMPRRSGAAG

SEQ ID NO: 119155 - protein, 20 aa, Artificial Sequence
  Description of Artificial Sequence: Synthetic peptide
  Seed: PRMCSLMQGSTLPRRSGAAG
PRMFSLAQVSTVPRRSGAAG

SEQ ID NO: 119156 - protein, 20 aa, Artificial Sequence
  Description of Artificial Sequence: Synthetic peptide
  Seed: PRMCSLMQGSTLPRRSGAAG
PRMFSLCQASTAPRRSGAAG

SEQ ID NO: 119157 - protein, 20 aa, Artificial Sequence
  Description of Artificial Sequence: Synthetic peptide
  Seed: PRMCSLMQGSTLPRRSGAAG
PRMFSLCQASTIPRRSGAAG

SEQ ID NO: 119158 - protein, 20 aa, Artificial Sequence
  Description of Artificial Sequence: Synthetic peptide
  Seed: PRMCSLMQGSTLPRRSGAAG
PRMFSLCQASTLPRRSGAAG

SEQ ID NO: 119159 - protein, 20 aa, Artificial Sequence
  Description of Artificial Sequence: Synthetic peptide
  Seed: PRMCSLMQGSTLPRRSGAAG
PRMFSLCQASTVPRRSGAAG

SEQ ID NO: 119160 - protein, 20 aa, Artificial Sequence
  Description of Artificial Sequence: Synthetic peptide
  Seed: PRMCSLMQGSTLPRRSGAAG
PRMFSLEQASTAPRRSGAAG

SEQ ID NO: 119161 - protein, 20 aa, Artificial Sequence
  Description of Artificial Sequence: Synthetic peptide
  Seed: PRMCSLMQGSTLPRRSGAAG
PRMFSLEQASTIPRRSGAAG

SEQ ID NO: 119162 - protein, 20 aa, Artificial Sequence
  Description of Artificial Sequence: Synthetic peptide
  Seed: PRMCSLMQGSTLPRRSGAAG
PRMFSLEQASTLPRRSGAAG

SEQ ID NO: 119163 - protein, 20 aa, Artificial Sequence
  Description of Artificial Sequence: Synthetic peptide
  Seed: PRMCSLMQGSTLPRRSGAAG
PRMFSLEQASTMPRRSGAAG

SEQ ID NO: 119164 - protein, 20 aa, Artificial Sequence
  Description of Artificial Sequence: Synthetic peptide
  Seed: PRMCSLMQGSTLPRRSGAAG
PRMFSLEQASTSPRRSGAAG

SEQ ID NO: 119165 - protein, 20 aa, Artificial Sequence
  Description of Artificial Sequence: Synthetic peptide
  Seed: PRMCSLMQGSTLPRRSGAAG
PRMFSLEQASTTPRRSGAAG

SEQ ID NO: 119166 - protein, 20 aa, Artificial Sequence
  Description of Artificial Sequence: Synthetic peptide
  Seed: PRMCSLMQGSTLPRRSGAAG
PRMFSLEQASTVPRRSGAAG

SEQ ID NO: 119167 - protein, 20 aa, Artificial Sequence
  Description of Artificial Sequence: Synthetic peptide
  Seed: PRMCSLMQGSTLPRRSGAAG
PRMFSLEQGSTAPRRSGAAG

SEQ ID NO: 119168 - protein, 20 aa, Artificial Sequence
  Description of Artificial Sequence: Synthetic peptide
  Seed: PRMCSLMQGSTLPRRSGAAG
PRMFSLEQGSTIPRRSGAAG

SEQ ID NO: 119169 - protein, 20 aa, Artificial Sequence
  Description of Artificial Sequence: Synthetic peptide
  Seed: PRMCSLMQGSTLPRRSGAAG
PRMFSLEQGSTLPRRSGAAG

SEQ ID NO: 119170 - protein, 20 aa, Artificial Sequence
  Description of Artificial Sequence: Synthetic peptide
  Seed: PRMCSLMQGSTLPRRSGAAG
PRMFSLEQGSTVPRRSGAAG

SEQ ID NO: 119171 - protein, 20 aa, Artificial Sequence
  Description of Artificial Sequence: Synthetic peptide
  Seed: PRMCSLMQGSTLPRRSGAAG
PRMFSLEQPSTIPRRSGAAG

SEQ ID NO: 119172 - protein, 20 aa, Artificial Sequence
  Description of Artificial Sequence: Synthetic peptide
  Seed: PRMCSLMQGSTLPRRSGAAG
PRMFSLEQPSTLPRRSGAAG

SEQ ID NO: 119173 - protein, 20 aa, Artificial Sequence
  Description of Artificial Sequence: Synthetic peptide
  Seed: PRMCSLMQGSTLPRRSGAAG
PRMFSLEQPSTVPRRSGAAG

SEQ ID NO: 119174 - protein, 20 aa, Artificial Sequence
  Description of Artificial Sequence: Synthetic peptide
  Seed: PRMCSLMQGSTLPRRSGAAG
PRMFSLEQSSTAPRRSGAAG

SEQ ID NO: 119175 - protein, 20 aa, Artificial Sequence
  Description of Artificial Sequence: Synthetic peptide
  Seed: PRMCSLMQGSTLPRRSGAAG
PRMFSLEQSSTIPRRSGAAG

SEQ ID NO: 119176 - protein, 20 aa, Artificial Sequence
  Description of Artificial Sequence: Synthetic peptide
  Seed: PRMCSLMQGSTLPRRSGAAG
PRMFSLEQSSTLPRRSGAAG

SEQ ID NO: 119177 - protein, 20 aa, Artificial Sequence
  Description of Artificial Sequence: Synthetic peptide
  Seed: PRMCSLMQGSTLPRRSGAAG
PRMFSLEQSSTVPRRSGAAG

SEQ ID NO: 119178 - protein, 20 aa, Artificial Sequence
  Description of Artificial Sequence: Synthetic peptide
  Seed: PRMCSLMQGSTLPRRSGAAG
PRMFSLFQASTAPRRSGAAG

SEQ ID NO: 119179 - protein, 20 aa, Artificial Sequence
  Description of Artificial Sequence: Synthetic peptide
  Seed: PRMCSLMQGSTLPRRSGAAG
PRMFSLFQASTIPRRSGAAG

SEQ ID NO: 119180 - protein, 20 aa, Artificial Sequence
  Description of Artificial Sequence: Synthetic peptide
  Seed: PRMCSLMQGSTLPRRSGAAG
PRMFSLFQASTLPRRSGAAG

SEQ ID NO: 119181 - protein, 20 aa, Artificial Sequence
  Description of Artificial Sequence: Synthetic peptide
  Seed: PRMCSLMQGSTLPRRSGAAG
PRMFSLFQASTMPRRSGAAG

SEQ ID NO: 119182 - protein, 20 aa, Artificial Sequence
  Description of Artificial Sequence: Synthetic peptide
  Seed: PRMCSLMQGSTLPRRSGAAG
PRMFSLFQASTSPRRSGAAG

SEQ ID NO: 119183 - protein, 20 aa, Artificial Sequence
  Description of Artificial Sequence: Synthetic peptide
  Seed: PRMCSLMQGSTLPRRSGAAG
PRMFSLFQASTTPRRSGAAG

SEQ ID NO: 119184 - protein, 20 aa, Artificial Sequence
  Description of Artificial Sequence: Synthetic peptide
  Seed: PRMCSLMQGSTLPRRSGAAG
PRMFSLFQASTVPRRSGAAG

SEQ ID NO: 119185 - protein, 20 aa, Artificial Sequence
  Description of Artificial Sequence: Synthetic peptide
  Seed: PRMCSLMQGSTLPRRSGAAG
PRMFSLFQGSTAPRRSGAAG

SEQ ID NO: 119186 - protein, 20 aa, Artificial Sequence
  Description of Artificial Sequence: Synthetic peptide
  Seed: PRMCSLMQGSTLPRRSGAAG
PRMFSLFQGSTIPRRSGAAG

SEQ ID NO: 119187 - protein, 20 aa, Artificial Sequence
  Description of Artificial Sequence: Synthetic peptide
  Seed: PRMCSLMQGSTLPRRSGAAG
PRMFSLFQGSTLPRRSGAAG

SEQ ID NO: 119188 - protein, 20 aa, Artificial Sequence
  Description of Artificial Sequence: Synthetic peptide
  Seed: PRMCSLMQGSTLPRRSGAAG
PRMFSLFQGSTVPRRSGAAG

SEQ ID NO: 119189 - protein, 20 aa, Artificial Sequence
  Description of Artificial Sequence: Synthetic peptide
  Seed: PRMCSLMQGSTLPRRSGAAG
PRMFSLFQPSTAPRRSGAAG

SEQ ID NO: 119190 - protein, 20 aa, Artificial Sequence
  Description of Artificial Sequence: Synthetic peptide
  Seed: PRMCSLMQGSTLPRRSGAAG
PRMFSLFQPSTIPRRSGAAG

SEQ ID NO: 119191 - protein, 20 aa, Artificial Sequence
  Description of Artificial Sequence: Synthetic peptide
  Seed: PRMCSLMQGSTLPRRSGAAG
PRMFSLFQPSTVPRRSGAAG

SEQ ID NO: 119192 - protein, 20 aa, Artificial Sequence
  Description of Artificial Sequence: Synthetic peptide
  Seed: PRMCSLMQGSTLPRRSGAAG
PRMFSLFQSSTAPRRSGAAG

SEQ ID NO: 119193 - protein, 20 aa, Artificial Sequence
  Description of Artificial Sequence: Synthetic peptide
  Seed: PRMCSLMQGSTLPRRSGAAG
PRMFSLFQSSTIPRRSGAAG

SEQ ID NO: 119194 - protein, 20 aa, Artificial Sequence
  Description of Artificial Sequence: Synthetic peptide
  Seed: PRMCSLMQGSTLPRRSGAAG
PRMFSLFQSSTLPRRSGAAG

SEQ ID NO: 119195 - protein, 20 aa, Artificial Sequence
  Description of Artificial Sequence: Synthetic peptide
  Seed: PRMCSLMQGSTLPRRSGAAG
PRMFSLFQSSTVPRRSGAAG

SEQ ID NO: 119196 - protein, 20 aa, Artificial Sequence
  Description of Artificial Sequence: Synthetic peptide
  Seed: PRMCSLMQGSTLPRRSGAAG
PRMFSLFQTSTAPRRSGAAG

SEQ ID NO: 119197 - protein, 20 aa, Artificial Sequence
  Description of Artificial Sequence: Synthetic peptide
  Seed: PRMCSLMQGSTLPRRSGAAG
PRMFSLGQASTAPRRSGAAG

SEQ ID NO: 119198 - protein, 20 aa, Artificial Sequence
  Description of Artificial Sequence: Synthetic peptide
  Seed: PRMCSLMQGSTLPRRSGAAG
PRMFSLGQASTIPRRSGAAG

SEQ ID NO: 119199 - protein, 20 aa, Artificial Sequence
  Description of Artificial Sequence: Synthetic peptide
  Seed: PRMCSLMQGSTLPRRSGAAG
PRMFSLGQASTLPRRSGAAG

SEQ ID NO: 119200 - protein, 20 aa, Artificial Sequence
  Description of Artificial Sequence: Synthetic peptide
  Seed: PRMCSLMQGSTLPRRSGAAG
PRMFSLGQASTMPRRSGAAG

SEQ ID NO: 119201 - protein, 20 aa, Artificial Sequence
  Description of Artificial Sequence: Synthetic peptide
  Seed: PRMCSLMQGSTLPRRSGAAG
PRMFSLGQASTVPRRSGAAG

SEQ ID NO: 119202 - protein, 20 aa, Artificial Sequence
  Description of Artificial Sequence: Synthetic peptide
  Seed: PRMCSLMQGSTLPRRSGAAG
PRMFSLGQGSTIPRRSGAAG

SEQ ID NO: 119203 - protein, 20 aa, Artificial Sequence
  Description of Artificial Sequence: Synthetic peptide
  Seed: PRMCSLMQGSTLPRRSGAAG
PRMFSLGQGSTLPRRSGAAG

SEQ ID NO: 119204 - protein, 20 aa, Artificial Sequence
  Description of Artificial Sequence: Synthetic peptide
  Seed: PRMCSLMQGSTLPRRSGAAG
PRMFSLGQGSTVPRRSGAAG

SEQ ID NO: 119205 - protein, 20 aa, Artificial Sequence
  Description of Artificial Sequence: Synthetic peptide
  Seed: PRMCSLMQGSTLPRRSGAAG
PRMFSLGQPSTIPRRSGAAG

SEQ ID NO: 119206 - protein, 20 aa, Artificial Sequence
  Description of Artificial Sequence: Synthetic peptide
  Seed: PRMCSLMQGSTLPRRSGAAG
PRMFSLGQPSTLPRRSGAAG

SEQ ID NO: 119207 - protein, 20 aa, Artificial Sequence
  Description of Artificial Sequence: Synthetic peptide
  Seed: PRMCSLMQGSTLPRRSGAAG
PRMFSLGQPSTVPRRSGAAG

SEQ ID NO: 119208 - protein, 20 aa, Artificial Sequence
  Description of Artificial Sequence: Synthetic peptide
  Seed: PRMCSLMQGSTLPRRSGAAG
PRMFSLGQSSTIPRRSGAAG

SEQ ID NO: 119209 - protein, 20 aa, Artificial Sequence
  Description of Artificial Sequence: Synthetic peptide
  Seed: PRMCSLMQGSTLPRRSGAAG
PRMFSLGQSSTLPRRSGAAG

SEQ ID NO: 119210 - protein, 20 aa, Artificial Sequence
  Description of Artificial Sequence: Synthetic peptide
  Seed: PRMCSLMQGSTLPRRSGAAG
PRMFSLGQSSTVPRRSGAAG

SEQ ID NO: 119211 - protein, 20 aa, Artificial Sequence
  Description of Artificial Sequence: Synthetic peptide
  Seed: PRMCSLMQGSTLPRRSGAAG
PRMFSLHQASTAPRRSGAAG

SEQ ID NO: 119212 - protein, 20 aa, Artificial Sequence
  Description of Artificial Sequence: Synthetic peptide
  Seed: PRMCSLMQGSTLPRRSGAAG
PRMFSLHQASTIPRRSGAAG

SEQ ID NO: 119213 - protein, 20 aa, Artificial Sequence
  Description of Artificial Sequence: Synthetic peptide
  Seed: PRMCSLMQGSTLPRRSGAAG
PRMFSLHQASTLPRRSGAAG

SEQ ID NO: 119214 - protein, 20 aa, Artificial Sequence
  Description of Artificial Sequence: Synthetic peptide
  Seed: PRMCSLMQGSTLPRRSGAAG
PRMFSLHQASTVPRRSGAAG

SEQ ID NO: 119215 - protein, 20 aa, Artificial Sequence
  Description of Artificial Sequence: Synthetic peptide
  Seed: PRMCSLMQGSTLPRRSGAAG
PRMFSLHQGSTLPRRSGAAG

SEQ ID NO: 119216 - protein, 20 aa, Artificial Sequence
  Description of Artificial Sequence: Synthetic peptide
  Seed: PRMCSLMQGSTLPRRSGAAG
PRMFSLIQASTAPRRSGAAG

SEQ ID NO: 119217 - protein, 20 aa, Artificial Sequence
  Description of Artificial Sequence: Synthetic peptide
  Seed: PRMCSLMQGSTLPRRSGAAG
PRMFSLIQASTCPRRSGAAG

SEQ ID NO: 119218 - protein, 20 aa, Artificial Sequence
  Description of Artificial Sequence: Synthetic peptide
  Seed: PRMCSLMQGSTLPRRSGAAG
PRMFSLIQASTFPRRSGAAG

SEQ ID NO: 119219 - protein, 20 aa, Artificial Sequence
  Description of Artificial Sequence: Synthetic peptide
  Seed: PRMCSLMQGSTLPRRSGAAG
PRMFSLIQASTGPRRSGAAG

SEQ ID NO: 119220 - protein, 20 aa, Artificial Sequence
  Description of Artificial Sequence: Synthetic peptide
  Seed: PRMCSLMQGSTLPRRSGAAG
PRMFSLIQASTHPRRSGAAG

SEQ ID NO: 119221 - protein, 20 aa, Artificial Sequence
  Description of Artificial Sequence: Synthetic peptide
  Seed: PRMCSLMQGSTLPRRSGAAG
PRMFSLIQASTIPRRSGAAG

SEQ ID NO: 119222 - protein, 20 aa, Artificial Sequence
  Description of Artificial Sequence: Synthetic peptide
  Seed: PRMCSLMQGSTLPRRSGAAG
PRMFSLIQASTLPRRSGAAG

SEQ ID NO: 119223 - protein, 20 aa, Artificial Sequence
  Description of Artificial Sequence: Synthetic peptide
  Seed: PRMCSLMQGSTLPRRSGAAG
PRMFSLIQASTMPRRSGAAG

SEQ ID NO: 119224 - protein, 20 aa, Artificial Sequence
  Description of Artificial Sequence: Synthetic peptide
  Seed: PRMCSLMQGSTLPRRSGAAG
PRMFSLIQASTNPRRSGAAG

SEQ ID NO: 119225 - protein, 20 aa, Artificial Sequence
  Description of Artificial Sequence: Synthetic peptide
  Seed: PRMCSLMQGSTLPRRSGAAG
PRMFSLIQASTSPRRSGAAG

SEQ ID NO: 119226 - protein, 20 aa, Artificial Sequence
  Description of Artificial Sequence: Synthetic peptide
  Seed: PRMCSLMQGSTLPRRSGAAG
PRMFSLIQASTTPRRSGAAG

SEQ ID NO: 119227 - protein, 20 aa, Artificial Sequence
  Description of Artificial Sequence: Synthetic peptide
  Seed: PRMCSLMQGSTLPRRSGAAG
PRMFSLIQASTVPRRSGAAG

SEQ ID NO: 119228 - protein, 20 aa, Artificial Sequence
  Description of Artificial Sequence: Synthetic peptide
  Seed: PRMCSLMQGSTLPRRSGAAG
PRMFSLIQASTYPRRSGAAG

SEQ ID NO: 119229 - protein, 20 aa, Artificial Sequence
  Description of Artificial Sequence: Synthetic peptide
  Seed: PRMCSLMQGSTLPRRSGAAG
PRMFSLIQGSTAPRRSGAAG

SEQ ID NO: 119230 - protein, 20 aa, Artificial Sequence
  Description of Artificial Sequence: Synthetic peptide
  Seed: PRMCSLMQGSTLPRRSGAAG
PRMFSLIQGSTCPRRSGAAG

SEQ ID NO: 119231 - protein, 20 aa, Artificial Sequence
  Description of Artificial Sequence: Synthetic peptide
  Seed: PRMCSLMQGSTLPRRSGAAG
PRMFSLIQGSTFPRRSGAAG

SEQ ID NO: 119232 - protein, 20 aa, Artificial Sequence
  Description of Artificial Sequence: Synthetic peptide
  Seed: PRMCSLMQGSTLPRRSGAAG
PRMFSLIQGSTGPRRSGAAG

SEQ ID NO: 119233 - protein, 20 aa, Artificial Sequence
  Description of Artificial Sequence: Synthetic peptide
  Seed: PRMCSLMQGSTLPRRSGAAG
PRMFSLIQGSTIPRRSGAAG

SEQ ID NO: 119234 - protein, 20 aa, Artificial Sequence
  Description of Artificial Sequence: Synthetic peptide
  Seed: PRMCSLMQGSTLPRRSGAAG
PRMFSLIQGSTLPRRSGAAG

SEQ ID NO: 119235 - protein, 20 aa, Artificial Sequence
  Description of Artificial Sequence: Synthetic peptide
  Seed: PRMCSLMQGSTLPRRSGAAG
PRMFSLIQGSTMPRRSGAAG

SEQ ID NO: 119236 - protein, 20 aa, Artificial Sequence
  Description of Artificial Sequence: Synthetic peptide
  Seed: PRMCSLMQGSTLPRRSGAAG
PRMFSLIQGSTNPRRSGAAG

SEQ ID NO: 119237 - protein, 20 aa, Artificial Sequence
  Description of Artificial Sequence: Synthetic peptide
  Seed: PRMCSLMQGSTLPRRSGAAG
PRMFSLIQGSTSPRRSGAAG

SEQ ID NO: 119238 - protein, 20 aa, Artificial Sequence
  Description of Artificial Sequence: Synthetic peptide
  Seed: PRMCSLMQGSTLPRRSGAAG
PRMFSLIQGSTTPRRSGAAG

SEQ ID NO: 119239 - protein, 20 aa, Artificial Sequence
  Description of Artificial Sequence: Synthetic peptide
  Seed: PRMCSLMQGSTLPRRSGAAG
PRMFSLIQGSTVPRRSGAAG

SEQ ID NO: 119240 - protein, 20 aa, Artificial Sequence
  Description of Artificial Sequence: Synthetic peptide
  Seed: PRMCSLMQGSTLPRRSGAAG
PRMFSLIQISTAPRRSGAAG

SEQ ID NO: 119241 - protein, 20 aa, Artificial Sequence
  Description of Artificial Sequence: Synthetic peptide
  Seed: PRMCSLMQGSTLPRRSGAAG
PRMFSLIQISTVPRRSGAAG

SEQ ID NO: 119242 - protein, 20 aa, Artificial Sequence
  Description of Artificial Sequence: Synthetic peptide
  Seed: PRMCSLMQGSTLPRRSGAAG
PRMFSLIQNSTAPRRSGAAG

SEQ ID NO: 119243 - protein, 20 aa, Artificial Sequence
  Description of Artificial Sequence: Synthetic peptide
  Seed: PRMCSLMQGSTLPRRSGAAG
PRMFSLIQNSTIPRRSGAAG

SEQ ID NO: 119244 - protein, 20 aa, Artificial Sequence
  Description of Artificial Sequence: Synthetic peptide
  Seed: PRMCSLMQGSTLPRRSGAAG
PRMFSLIQNSTLPRRSGAAG

SEQ ID NO: 119245 - protein, 20 aa, Artificial Sequence
  Description of Artificial Sequence: Synthetic peptide
  Seed: PRMCSLMQGSTLPRRSGAAG
PRMFSLIQNSTMPRRSGAAG

SEQ ID NO: 119246 - protein, 20 aa, Artificial Sequence
  Description of Artificial Sequence: Synthetic peptide
  Seed: PRMCSLMQGSTLPRRSGAAG
PRMFSLIQNSTSPRRSGAAG

SEQ ID NO: 119247 - protein, 20 aa, Artificial Sequence
  Description of Artificial Sequence: Synthetic peptide
  Seed: PRMCSLMQGSTLPRRSGAAG
PRMFSLIQNSTTPRRSGAAG

SEQ ID NO: 119248 - protein, 20 aa, Artificial Sequence
  Description of Artificial Sequence: Synthetic peptide
  Seed: PRMCSLMQGSTLPRRSGAAG
PRMFSLIQNSTVPRRSGAAG

SEQ ID NO: 119249 - protein, 20 aa, Artificial Sequence
  Description of Artificial Sequence: Synthetic peptide
  Seed: PRMCSLMQGSTLPRRSGAAG
PRMFSLIQPSTAPRRSGAAG

SEQ ID NO: 119250 - protein, 20 aa, Artificial Sequence
  Description of Artificial Sequence: Synthetic peptide
  Seed: PRMCSLMQGSTLPRRSGAAG
PRMFSLIQPSTGPRRSGAAG

SEQ ID NO: 119251 - protein, 20 aa, Artificial Sequence
  Description of Artificial Sequence: Synthetic peptide
  Seed: PRMCSLMQGSTLPRRSGAAG
PRMFSLIQPSTIPRRSGAAG

SEQ ID NO: 119252 - protein, 20 aa, Artificial Sequence
  Description of Artificial Sequence: Synthetic peptide
  Seed: PRMCSLMQGSTLPRRSGAAG
PRMFSLIQPSTLPRRSGAAG

SEQ ID NO: 119253 - protein, 20 aa, Artificial Sequence
  Description of Artificial Sequence: Synthetic peptide
  Seed: PRMCSLMQGSTLPRRSGAAG
PRMFSLIQPSTMPRRSGAAG

SEQ ID NO: 119254 - protein, 20 aa, Artificial Sequence
  Description of Artificial Sequence: Synthetic peptide
  Seed: PRMCSLMQGSTLPRRSGAAG
PRMFSLIQPSTSPRRSGAAG

SEQ ID NO: 119255 - protein, 20 aa, Artificial Sequence
  Description of Artificial Sequence: Synthetic peptide
  Seed: PRMCSLMQGSTLPRRSGAAG
PRMFSLIQPSTTPRRSGAAG

SEQ ID NO: 119256 - protein, 20 aa, Artificial Sequence
  Description of Artificial Sequence: Synthetic peptide
  Seed: PRMCSLMQGSTLPRRSGAAG
PRMFSLIQPSTVPRRSGAAG

SEQ ID NO: 119257 - protein, 20 aa, Artificial Sequence
  Description of Artificial Sequence: Synthetic peptide
  Seed: PRMCSLMQGSTLPRRSGAAG
PRMFSLIQSSTAPRRSGAAG

SEQ ID NO: 119258 - protein, 20 aa, Artificial Sequence
  Description of Artificial Sequence: Synthetic peptide
  Seed: PRMCSLMQGSTLPRRSGAAG
PRMFSLIQSSTCPRRSGAAG

SEQ ID NO: 119259 - protein, 20 aa, Artificial Sequence
  Description of Artificial Sequence: Synthetic peptide
  Seed: PRMCSLMQGSTLPRRSGAAG
PRMFSLIQSSTGPRRSGAAG

SEQ ID NO: 119260 - protein, 20 aa, Artificial Sequence
  Description of Artificial Sequence: Synthetic peptide
  Seed: PRMCSLMQGSTLPRRSGAAG
PRMFSLIQSSTIPRRSGAAG

SEQ ID NO: 119261 - protein, 20 aa, Artificial Sequence
  Description of Artificial Sequence: Synthetic peptide
  Seed: PRMCSLMQGSTLPRRSGAAG
PRMFSLIQSSTLPRRSGAAG

SEQ ID NO: 119262 - protein, 20 aa, Artificial Sequence
  Description of Artificial Sequence: Synthetic peptide
  Seed: PRMCSLMQGSTLPRRSGAAG
PRMFSLIQSSTMPRRSGAAG

SEQ ID NO: 119263 - protein, 20 aa, Artificial Sequence
  Description of Artificial Sequence: Synthetic peptide
  Seed: PRMCSLMQGSTLPRRSGAAG
PRMFSLIQSSTSPRRSGAAG

SEQ ID NO: 119264 - protein, 20 aa, Artificial Sequence
  Description of Artificial Sequence: Synthetic peptide
  Seed: PRMCSLMQGSTLPRRSGAAG
PRMFSLIQSSTTPRRSGAAG

SEQ ID NO: 119265 - protein, 20 aa, Artificial Sequence
  Description of Artificial Sequence: Synthetic peptide
  Seed: PRMCSLMQGSTLPRRSGAAG
PRMFSLIQSSTVPRRSGAAG

SEQ ID NO: 119266 - protein, 20 aa, Artificial Sequence
  Description of Artificial Sequence: Synthetic peptide
  Seed: PRMCSLMQGSTLPRRSGAAG
PRMFSLIQTSTAPRRSGAAG

SEQ ID NO: 119267 - protein, 20 aa, Artificial Sequence
  Description of Artificial Sequence: Synthetic peptide
  Seed: PRMCSLMQGSTLPRRSGAAG
PRMFSLIQTSTIPRRSGAAG

SEQ ID NO: 119268 - protein, 20 aa, Artificial Sequence
  Description of Artificial Sequence: Synthetic peptide
  Seed: PRMCSLMQGSTLPRRSGAAG
PRMFSLIQTSTLPRRSGAAG

SEQ ID NO: 119269 - protein, 20 aa, Artificial Sequence
  Description of Artificial Sequence: Synthetic peptide
  Seed: PRMCSLMQGSTLPRRSGAAG
PRMFSLIQTSTMPRRSGAAG

SEQ ID NO: 119270 - protein, 20 aa, Artificial Sequence
  Description of Artificial Sequence: Synthetic peptide
  Seed: PRMCSLMQGSTLPRRSGAAG
PRMFSLIQTSTSPRRSGAAG

SEQ ID NO: 119271 - protein, 20 aa, Artificial Sequence
  Description of Artificial Sequence: Synthetic peptide
  Seed: PRMCSLMQGSTLPRRSGAAG
PRMFSLIQTSTTPRRSGAAG

SEQ ID NO: 119272 - protein, 20 aa, Artificial Sequence
  Description of Artificial Sequence: Synthetic peptide
  Seed: PRMCSLMQGSTLPRRSGAAG
PRMFSLIQTSTVPRRSGAAG

SEQ ID NO: 119273 - protein, 20 aa, Artificial Sequence
  Description of Artificial Sequence: Synthetic peptide
  Seed: PRMCSLMQGSTLPRRSGAAG
PRMFSLIQVSTAPRRSGAAG

SEQ ID NO: 119274 - protein, 20 aa, Artificial Sequence
  Description of Artificial Sequence: Synthetic peptide
  Seed: PRMCSLMQGSTLPRRSGAAG
PRMFSLIQVSTIPRRSGAAG

SEQ ID NO: 119275 - protein, 20 aa, Artificial Sequence
  Description of Artificial Sequence: Synthetic peptide
  Seed: PRMCSLMQGSTLPRRSGAAG
PRMFSLIQVSTLPRRSGAAG

SEQ ID NO: 119276 - protein, 20 aa, Artificial Sequence
  Description of Artificial Sequence: Synthetic peptide
  Seed: PRMCSLMQGSTLPRRSGAAG
PRMFSLIQVSTSPRRSGAAG

SEQ ID NO: 119277 - protein, 20 aa, Artificial Sequence
  Description of Artificial Sequence: Synthetic peptide
  Seed: PRMCSLMQGSTLPRRSGAAG
PRMFSLIQVSTTPRRSGAAG

SEQ ID NO: 119278 - protein, 20 aa, Artificial Sequence
  Description of Artificial Sequence: Synthetic peptide
  Seed: PRMCSLMQGSTLPRRSGAAG
PRMFSLIQVSTVPRRSGAAG

SEQ ID NO: 119279 - protein, 20 aa, Artificial Sequence
  Description of Artificial Sequence: Synthetic peptide
  Seed: PRMCSLMQGSTLPRRSGAAG
PRMFSLLQASTAPRRSGAAG

SEQ ID NO: 119280 - protein, 20 aa, Artificial Sequence
  Description of Artificial Sequence: Synthetic peptide
  Seed: PRMCSLMQGSTLPRRSGAAG
PRMFSLLQASTCPRRSGAAG

SEQ ID NO: 119281 - protein, 20 aa, Artificial Sequence
  Description of Artificial Sequence: Synthetic peptide
  Seed: PRMCSLMQGSTLPRRSGAAG
PRMFSLLQASTFPRRSGAAG

SEQ ID NO: 119282 - protein, 20 aa, Artificial Sequence
  Description of Artificial Sequence: Synthetic peptide
  Seed: PRMCSLMQGSTLPRRSGAAG
PRMFSLLQASTGPRRSGAAG

SEQ ID NO: 119283 - protein, 20 aa, Artificial Sequence
  Description of Artificial Sequence: Synthetic peptide
  Seed: PRMCSLMQGSTLPRRSGAAG
PRMFSLLQASTHPRRSGAAG

SEQ ID NO: 119284 - protein, 20 aa, Artificial Sequence
  Description of Artificial Sequence: Synthetic peptide
  Seed: PRMCSLMQGSTLPRRSGAAG
PRMFSLLQASTIPRRSGAAG

SEQ ID NO: 119285 - protein, 20 aa, Artificial Sequence
  Description of Artificial Sequence: Synthetic peptide
  Seed: PRMCSLMQGSTLPRRSGAAG
PRMFSLLQASTLPRRSGAAG

SEQ ID NO: 119286 - protein, 20 aa, Artificial Sequence
  Description of Artificial Sequence: Synthetic peptide
  Seed: PRMCSLMQGSTLPRRSGAAG
PRMFSLLQASTMPRRSGAAG

SEQ ID NO: 119287 - protein, 20 aa, Artificial Sequence
  Description of Artificial Sequence: Synthetic peptide
  Seed: PRMCSLMQGSTLPRRSGAAG
PRMFSLLQASTNPRRSGAAG

SEQ ID NO: 119288 - protein, 20 aa, Artificial Sequence
  Description of Artificial Sequence: Synthetic peptide
  Seed: PRMCSLMQGSTLPRRSGAAG
PRMFSLLQASTPPRRSGAAG

SEQ ID NO: 119289 - protein, 20 aa, Artificial Sequence
  Description of Artificial Sequence: Synthetic peptide
  Seed: PRMCSLMQGSTLPRRSGAAG
PRMFSLLQASTQPRRSGAAG

SEQ ID NO: 119290 - protein, 20 aa, Artificial Sequence
  Description of Artificial Sequence: Synthetic peptide
  Seed: PRMCSLMQGSTLPRRSGAAG
PRMFSLLQASTRPRRSGAAG

SEQ ID NO: 119291 - protein, 20 aa, Artificial Sequence
  Description of Artificial Sequence: Synthetic peptide
  Seed: PRMCSLMQGSTLPRRSGAAG
PRMFSLLQASTSPRRSGAAG

SEQ ID NO: 119292 - protein, 20 aa, Artificial Sequence
  Description of Artificial Sequence: Synthetic peptide
  Seed: PRMCSLMQGSTLPRRSGAAG
PRMFSLLQASTTPRRSGAAG

SEQ ID NO: 119293 - protein, 20 aa, Artificial Sequence
  Description of Artificial Sequence: Synthetic peptide
  Seed: PRMCSLMQGSTLPRRSGAAG
PRMFSLLQASTVPRRSGAAG

SEQ ID NO: 119294 - protein, 20 aa, Artificial Sequence
  Description of Artificial Sequence: Synthetic peptide
  Seed: PRMCSLMQGSTLPRRSGAAG
PRMFSLLQASTYPRRSGAAG

SEQ ID NO: 119295 - protein, 20 aa, Artificial Sequence
  Description of Artificial Sequence: Synthetic peptide
  Seed: PRMCSLMQGSTLPRRSGAAG
PRMFSLLQCSTVPRRSGAAG

SEQ ID NO: 119296 - protein, 20 aa, Artificial Sequence
  Description of Artificial Sequence: Synthetic peptide
  Seed: PRMCSLMQGSTLPRRSGAAG
PRMFSLLQESTVPRRSGAAG

SEQ ID NO: 119297 - protein, 20 aa, Artificial Sequence
  Description of Artificial Sequence: Synthetic peptide
  Seed: PRMCSLMQGSTLPRRSGAAG
PRMFSLLQGSTAPRRSGAAG

SEQ ID NO: 119298 - protein, 20 aa, Artificial Sequence
  Description of Artificial Sequence: Synthetic peptide
  Seed: PRMCSLMQGSTLPRRSGAAG
PRMFSLLQGSTCPRRSGAAG

SEQ ID NO: 119299 - protein, 20 aa, Artificial Sequence
  Description of Artificial Sequence: Synthetic peptide
  Seed: PRMCSLMQGSTLPRRSGAAG
PRMFSLLQGSTFPRRSGAAG

SEQ ID NO: 119300 - protein, 20 aa, Artificial Sequence
  Description of Artificial Sequence: Synthetic peptide
  Seed: PRMCSLMQGSTLPRRSGAAG
PRMFSLLQGSTGPRRSGAAG

SEQ ID NO: 119301 - protein, 20 aa, Artificial Sequence
  Description of Artificial Sequence: Synthetic peptide
  Seed: PRMCSLMQGSTLPRRSGAAG
PRMFSLLQGSTHPRRSGAAG

SEQ ID NO: 119302 - protein, 20 aa, Artificial Sequence
  Description of Artificial Sequence: Synthetic peptide
  Seed: PRMCSLMQGSTLPRRSGAAG
PRMFSLLQGSTIPRRSGAAG

SEQ ID NO: 119303 - protein, 20 aa, Artificial Sequence
  Description of Artificial Sequence: Synthetic peptide
  Seed: PRMCSLMQGSTLPRRSGAAG
PRMFSLLQGSTLPRRSGAAG

SEQ ID NO: 119304 - protein, 20 aa, Artificial Sequence
  Description of Artificial Sequence: Synthetic peptide
  Seed: PRMCSLMQGSTLPRRSGAAG
PRMFSLLQGSTMPRRSGAAG

SEQ ID NO: 119305 - protein, 20 aa, Artificial Sequence
  Description of Artificial Sequence: Synthetic peptide
  Seed: PRMCSLMQGSTLPRRSGAAG
PRMFSLLQGSTNPRRSGAAG

SEQ ID NO: 119306 - protein, 20 aa, Artificial Sequence
  Description of Artificial Sequence: Synthetic peptide
  Seed: PRMCSLMQGSTLPRRSGAAG
PRMFSLLQGSTPPRRSGAAG

SEQ ID NO: 119307 - protein, 20 aa, Artificial Sequence
  Description of Artificial Sequence: Synthetic peptide
  Seed: PRMCSLMQGSTLPRRSGAAG
PRMFSLLQGSTQPRRSGAAG

SEQ ID NO: 119308 - protein, 20 aa, Artificial Sequence
  Description of Artificial Sequence: Synthetic peptide
  Seed: PRMCSLMQGSTLPRRSGAAG
PRMFSLLQGSTSPRRSGAAG

SEQ ID NO: 119309 - protein, 20 aa, Artificial Sequence
  Description of Artificial Sequence: Synthetic peptide
  Seed: PRMCSLMQGSTLPRRSGAAG
PRMFSLLQGSTTPRRSGAAG

SEQ ID NO: 119310 - protein, 20 aa, Artificial Sequence
  Description of Artificial Sequence: Synthetic peptide
  Seed: PRMCSLMQGSTLPRRSGAAG
PRMFSLLQGSTVPRRSGAAG

SEQ ID NO: 119311 - protein, 20 aa, Artificial Sequence
  Description of Artificial Sequence: Synthetic peptide
  Seed: PRMCSLMQGSTLPRRSGAAG
PRMFSLLQGSTYPRRSGAAG

SEQ ID NO: 119312 - protein, 20 aa, Artificial Sequence
  Description of Artificial Sequence: Synthetic peptide
  Seed: PRMCSLMQGSTLPRRSGAAG
PRMFSLLQHSTAPRRSGAAG

SEQ ID NO: 119313 - protein, 20 aa, Artificial Sequence
  Description of Artificial Sequence: Synthetic peptide
  Seed: PRMCSLMQGSTLPRRSGAAG
PRMFSLLQHSTIPRRSGAAG

SEQ ID NO: 119314 - protein, 20 aa, Artificial Sequence
  Description of Artificial Sequence: Synthetic peptide
  Seed: PRMCSLMQGSTLPRRSGAAG
PRMFSLLQHSTLPRRSGAAG

SEQ ID NO: 119315 - protein, 20 aa, Artificial Sequence
  Description of Artificial Sequence: Synthetic peptide
  Seed: PRMCSLMQGSTLPRRSGAAG
PRMFSLLQHSTVPRRSGAAG

SEQ ID NO: 119316 - protein, 20 aa, Artificial Sequence
  Description of Artificial Sequence: Synthetic peptide
  Seed: PRMCSLMQGSTLPRRSGAAG
PRMFSLLQISTAPRRSGAAG

SEQ ID NO: 119317 - protein, 20 aa, Artificial Sequence
  Description of Artificial Sequence: Synthetic peptide
  Seed: PRMCSLMQGSTLPRRSGAAG
PRMFSLLQISTIPRRSGAAG

SEQ ID NO: 119318 - protein, 20 aa, Artificial Sequence
  Description of Artificial Sequence: Synthetic peptide
  Seed: PRMCSLMQGSTLPRRSGAAG
PRMFSLLQISTLPRRSGAAG

SEQ ID NO: 119319 - protein, 20 aa, Artificial Sequence
  Description of Artificial Sequence: Synthetic peptide
  Seed: PRMCSLMQGSTLPRRSGAAG
PRMFSLLQISTMPRRSGAAG

SEQ ID NO: 119320 - protein, 20 aa, Artificial Sequence
  Description of Artificial Sequence: Synthetic peptide
  Seed: PRMCSLMQGSTLPRRSGAAG
PRMFSLLQISTSPRRSGAAG

SEQ ID NO: 119321 - protein, 20 aa, Artificial Sequence
  Description of Artificial Sequence: Synthetic peptide
  Seed: PRMCSLMQGSTLPRRSGAAG
PRMFSLLQISTTPRRSGAAG

SEQ ID NO: 119322 - protein, 20 aa, Artificial Sequence
  Description of Artificial Sequence: Synthetic peptide
  Seed: PRMCSLMQGSTLPRRSGAAG
PRMFSLLQISTVPRRSGAAG

SEQ ID NO: 119323 - protein, 20 aa, Artificial Sequence
  Description of Artificial Sequence: Synthetic peptide
  Seed: PRMCSLMQGSTLPRRSGAAG
PRMFSLLQLSTAPRRSGAAG

SEQ ID NO: 119324 - protein, 20 aa, Artificial Sequence
  Description of Artificial Sequence: Synthetic peptide
  Seed: PRMCSLMQGSTLPRRSGAAG
PRMFSLLQLSTVPRRSGAAG

SEQ ID NO: 119325 - protein, 20 aa, Artificial Sequence
  Description of Artificial Sequence: Synthetic peptide
  Seed: PRMCSLMQGSTLPRRSGAAG
PRMFSLLQMSTAPRRSGAAG

SEQ ID NO: 119326 - protein, 20 aa, Artificial Sequence
  Description of Artificial Sequence: Synthetic peptide
  Seed: PRMCSLMQGSTLPRRSGAAG
PRMFSLLQMSTIPRRSGAAG

SEQ ID NO: 119327 - protein, 20 aa, Artificial Sequence
  Description of Artificial Sequence: Synthetic peptide
  Seed: PRMCSLMQGSTLPRRSGAAG
PRMFSLLQMSTLPRRSGAAG

SEQ ID NO: 119328 - protein, 20 aa, Artificial Sequence
  Description of Artificial Sequence: Synthetic peptide
  Seed: PRMCSLMQGSTLPRRSGAAG
PRMFSLLQMSTVPRRSGAAG

SEQ ID NO: 119329 - protein, 20 aa, Artificial Sequence
  Description of Artificial Sequence: Synthetic peptide
  Seed: PRMCSLMQGSTLPRRSGAAG
PRMFSLLQNSTAPRRSGAAG

SEQ ID NO: 119330 - protein, 20 aa, Artificial Sequence
  Description of Artificial Sequence: Synthetic peptide
  Seed: PRMCSLMQGSTLPRRSGAAG
PRMFSLLQNSTFPRRSGAAG

SEQ ID NO: 119331 - protein, 20 aa, Artificial Sequence
  Description of Artificial Sequence: Synthetic peptide
  Seed: PRMCSLMQGSTLPRRSGAAG
PRMFSLLQNSTGPRRSGAAG

SEQ ID NO: 119332 - protein, 20 aa, Artificial Sequence
  Description of Artificial Sequence: Synthetic peptide
  Seed: PRMCSLMQGSTLPRRSGAAG
PRMFSLLQNSTIPRRSGAAG

SEQ ID NO: 119333 - protein, 20 aa, Artificial Sequence
  Description of Artificial Sequence: Synthetic peptide
  Seed: PRMCSLMQGSTLPRRSGAAG
PRMFSLLQNSTLPRRSGAAG

SEQ ID NO: 119334 - protein, 20 aa, Artificial Sequence
  Description of Artificial Sequence: Synthetic peptide
  Seed: PRMCSLMQGSTLPRRSGAAG
PRMFSLLQNSTMPRRSGAAG

SEQ ID NO: 119335 - protein, 20 aa, Artificial Sequence
  Description of Artificial Sequence: Synthetic peptide
  Seed: PRMCSLMQGSTLPRRSGAAG
PRMFSLLQNSTSPRRSGAAG

SEQ ID NO: 119336 - protein, 20 aa, Artificial Sequence
  Description of Artificial Sequence: Synthetic peptide
  Seed: PRMCSLMQGSTLPRRSGAAG
PRMFSLLQNSTTPRRSGAAG

SEQ ID NO: 119337 - protein, 20 aa, Artificial Sequence
  Description of Artificial Sequence: Synthetic peptide
  Seed: PRMCSLMQGSTLPRRSGAAG
PRMFSLLQNSTVPRRSGAAG

SEQ ID NO: 119338 - protein, 20 aa, Artificial Sequence
  Description of Artificial Sequence: Synthetic peptide
  Seed: PRMCSLMQGSTLPRRSGAAG
PRMFSLLQPSTAPRRSGAAG

SEQ ID NO: 119339 - protein, 20 aa, Artificial Sequence
  Description of Artificial Sequence: Synthetic peptide
  Seed: PRMCSLMQGSTLPRRSGAAG
PRMFSLLQPSTCPRRSGAAG

SEQ ID NO: 119340 - protein, 20 aa, Artificial Sequence
  Description of Artificial Sequence: Synthetic peptide
  Seed: PRMCSLMQGSTLPRRSGAAG
PRMFSLLQPSTFPRRSGAAG

SEQ ID NO: 119341 - protein, 20 aa, Artificial Sequence
  Description of Artificial Sequence: Synthetic peptide
  Seed: PRMCSLMQGSTLPRRSGAAG
PRMFSLLQPSTGPRRSGAAG

SEQ ID NO: 119342 - protein, 20 aa, Artificial Sequence
  Description of Artificial Sequence: Synthetic peptide
  Seed: PRMCSLMQGSTLPRRSGAAG
PRMFSLLQPSTIPRRSGAAG

SEQ ID NO: 119343 - protein, 20 aa, Artificial Sequence
  Description of Artificial Sequence: Synthetic peptide
  Seed: PRMCSLMQGSTLPRRSGAAG
PRMFSLLQPSTLPRRSGAAG

SEQ ID NO: 119344 - protein, 20 aa, Artificial Sequence
  Description of Artificial Sequence: Synthetic peptide
  Seed: PRMCSLMQGSTLPRRSGAAG
PRMFSLLQPSTMPRRSGAAG

SEQ ID NO: 119345 - protein, 20 aa, Artificial Sequence
  Description of Artificial Sequence: Synthetic peptide
  Seed: PRMCSLMQGSTLPRRSGAAG
PRMFSLLQPSTNPRRSGAAG

SEQ ID NO: 119346 - protein, 20 aa, Artificial Sequence
  Description of Artificial Sequence: Synthetic peptide
  Seed: PRMCSLMQGSTLPRRSGAAG
PRMFSLLQPSTSPRRSGAAG

SEQ ID NO: 119347 - protein, 20 aa, Artificial Sequence
  Description of Artificial Sequence: Synthetic peptide
  Seed: PRMCSLMQGSTLPRRSGAAG
PRMFSLLQPSTTPRRSGAAG

SEQ ID NO: 119348 - protein, 20 aa, Artificial Sequence
  Description of Artificial Sequence: Synthetic peptide
  Seed: PRMCSLMQGSTLPRRSGAAG
PRMFSLLQPSTVPRRSGAAG

SEQ ID NO: 119349 - protein, 20 aa, Artificial Sequence
  Description of Artificial Sequence: Synthetic peptide
  Seed: PRMCSLMQGSTLPRRSGAAG
PRMFSLLQPSTYPRRSGAAG

SEQ ID NO: 119350 - protein, 20 aa, Artificial Sequence
  Description of Artificial Sequence: Synthetic peptide
  Seed: PRMCSLMQGSTLPRRSGAAG
PRMFSLLQQSTLPRRSGAAG

SEQ ID NO: 119351 - protein, 20 aa, Artificial Sequence
  Description of Artificial Sequence: Synthetic peptide
  Seed: PRMCSLMQGSTLPRRSGAAG
PRMFSLLQQSTVPRRSGAAG

SEQ ID NO: 119352 - protein, 20 aa, Artificial Sequence
  Description of Artificial Sequence: Synthetic peptide
  Seed: PRMCSLMQGSTLPRRSGAAG
PRMFSLLQSSTAPRRSGAAG

SEQ ID NO: 119353 - protein, 20 aa, Artificial Sequence
  Description of Artificial Sequence: Synthetic peptide
  Seed: PRMCSLMQGSTLPRRSGAAG
PRMFSLLQSSTCPRRSGAAG

SEQ ID NO: 119354 - protein, 20 aa, Artificial Sequence
  Description of Artificial Sequence: Synthetic peptide
  Seed: PRMCSLMQGSTLPRRSGAAG
PRMFSLLQSSTFPRRSGAAG

SEQ ID NO: 119355 - protein, 20 aa, Artificial Sequence
  Description of Artificial Sequence: Synthetic peptide
  Seed: PRMCSLMQGSTLPRRSGAAG
PRMFSLLQSSTGPRRSGAAG

SEQ ID NO: 119356 - protein, 20 aa, Artificial Sequence
  Description of Artificial Sequence: Synthetic peptide
  Seed: PRMCSLMQGSTLPRRSGAAG
PRMFSLLQSSTIPRRSGAAG

SEQ ID NO: 119357 - protein, 20 aa, Artificial Sequence
  Description of Artificial Sequence: Synthetic peptide
  Seed: PRMCSLMQGSTLPRRSGAAG
PRMFSLLQSSTLPRRSGAAG

SEQ ID NO: 119358 - protein, 20 aa, Artificial Sequence
  Description of Artificial Sequence: Synthetic peptide
  Seed: PRMCSLMQGSTLPRRSGAAG
PRMFSLLQSSTMPRRSGAAG

SEQ ID NO: 119359 - protein, 20 aa, Artificial Sequence
  Description of Artificial Sequence: Synthetic peptide
  Seed: PRMCSLMQGSTLPRRSGAAG
PRMFSLLQSSTNPRRSGAAG

SEQ ID NO: 119360 - protein, 20 aa, Artificial Sequence
  Description of Artificial Sequence: Synthetic peptide
  Seed: PRMCSLMQGSTLPRRSGAAG
PRMFSLLQSSTSPRRSGAAG

SEQ ID NO: 119361 - protein, 20 aa, Artificial Sequence
  Description of Artificial Sequence: Synthetic peptide
  Seed: PRMCSLMQGSTLPRRSGAAG
PRMFSLLQSSTTPRRSGAAG

SEQ ID NO: 119362 - protein, 20 aa, Artificial Sequence
  Description of Artificial Sequence: Synthetic peptide
  Seed: PRMCSLMQGSTLPRRSGAAG
PRMFSLLQSSTVPRRSGAAG

SEQ ID NO: 119363 - protein, 20 aa, Artificial Sequence
  Description of Artificial Sequence: Synthetic peptide
  Seed: PRMCSLMQGSTLPRRSGAAG
PRMFSLLQSSTYPRRSGAAG

SEQ ID NO: 119364 - protein, 20 aa, Artificial Sequence
  Description of Artificial Sequence: Synthetic peptide
  Seed: PRMCSLMQGSTLPRRSGAAG
PRMFSLLQTSTAPRRSGAAG

SEQ ID NO: 119365 - protein, 20 aa, Artificial Sequence
  Description of Artificial Sequence: Synthetic peptide
  Seed: PRMCSLMQGSTLPRRSGAAG
PRMFSLLQTSTGPRRSGAAG

SEQ ID NO: 119366 - protein, 20 aa, Artificial Sequence
  Description of Artificial Sequence: Synthetic peptide
  Seed: PRMCSLMQGSTLPRRSGAAG
PRMFSLLQTSTIPRRSGAAG

SEQ ID NO: 119367 - protein, 20 aa, Artificial Sequence
  Description of Artificial Sequence: Synthetic peptide
  Seed: PRMCSLMQGSTLPRRSGAAG
PRMFSLLQTSTLPRRSGAAG

SEQ ID NO: 119368 - protein, 20 aa, Artificial Sequence
  Description of Artificial Sequence: Synthetic peptide
  Seed: PRMCSLMQGSTLPRRSGAAG
PRMFSLLQTSTMPRRSGAAG

SEQ ID NO: 119369 - protein, 20 aa, Artificial Sequence
  Description of Artificial Sequence: Synthetic peptide
  Seed: PRMCSLMQGSTLPRRSGAAG
PRMFSLLQTSTNPRRSGAAG

SEQ ID NO: 119370 - protein, 20 aa, Artificial Sequence
  Description of Artificial Sequence: Synthetic peptide
  Seed: PRMCSLMQGSTLPRRSGAAG
PRMFSLLQTSTSPRRSGAAG

SEQ ID NO: 119371 - protein, 20 aa, Artificial Sequence
  Description of Artificial Sequence: Synthetic peptide
  Seed: PRMCSLMQGSTLPRRSGAAG
PRMFSLLQTSTTPRRSGAAG

SEQ ID NO: 119372 - protein, 20 aa, Artificial Sequence
  Description of Artificial Sequence: Synthetic peptide
  Seed: PRMCSLMQGSTLPRRSGAAG
PRMFSLLQTSTVPRRSGAAG

SEQ ID NO: 119373 - protein, 20 aa, Artificial Sequence
  Description of Artificial Sequence: Synthetic peptide
  Seed: PRMCSLMQGSTLPRRSGAAG
PRMFSLLQVSTAPRRSGAAG

SEQ ID NO: 119374 - protein, 20 aa, Artificial Sequence
  Description of Artificial Sequence: Synthetic peptide
  Seed: PRMCSLMQGSTLPRRSGAAG
PRMFSLLQVSTGPRRSGAAG

SEQ ID NO: 119375 - protein, 20 aa, Artificial Sequence
  Description of Artificial Sequence: Synthetic peptide
  Seed: PRMCSLMQGSTLPRRSGAAG
PRMFSLLQVSTIPRRSGAAG

SEQ ID NO: 119376 - protein, 20 aa, Artificial Sequence
  Description of Artificial Sequence: Synthetic peptide
  Seed: PRMCSLMQGSTLPRRSGAAG
PRMFSLLQVSTLPRRSGAAG

SEQ ID NO: 119377 - protein, 20 aa, Artificial Sequence
  Description of Artificial Sequence: Synthetic peptide
  Seed: PRMCSLMQGSTLPRRSGAAG
PRMFSLLQVSTMPRRSGAAG

SEQ ID NO: 119378 - protein, 20 aa, Artificial Sequence
  Description of Artificial Sequence: Synthetic peptide
  Seed: PRMCSLMQGSTLPRRSGAAG
PRMFSLLQVSTSPRRSGAAG

SEQ ID NO: 119379 - protein, 20 aa, Artificial Sequence
  Description of Artificial Sequence: Synthetic peptide
  Seed: PRMCSLMQGSTLPRRSGAAG
PRMFSLLQVSTTPRRSGAAG

SEQ ID NO: 119380 - protein, 20 aa, Artificial Sequence
  Description of Artificial Sequence: Synthetic peptide
  Seed: PRMCSLMQGSTLPRRSGAAG
PRMFSLLQVSTVPRRSGAAG

SEQ ID NO: 119381 - protein, 20 aa, Artificial Sequence
  Description of Artificial Sequence: Synthetic peptide
  Seed: PRMCSLMQGSTLPRRSGAAG
PRMFSLMQASTAPRRSGAAG

SEQ ID NO: 119382 - protein, 20 aa, Artificial Sequence
  Description of Artificial Sequence: Synthetic peptide
  Seed: PRMCSLMQGSTLPRRSGAAG
PRMFSLMQASTCPRRSGAAG

SEQ ID NO: 119383 - protein, 20 aa, Artificial Sequence
  Description of Artificial Sequence: Synthetic peptide
  Seed: PRMCSLMQGSTLPRRSGAAG
PRMFSLMQASTFPRRSGAAG

SEQ ID NO: 119384 - protein, 20 aa, Artificial Sequence
  Description of Artificial Sequence: Synthetic peptide
  Seed: PRMCSLMQGSTLPRRSGAAG
PRMFSLMQASTGPRRSGAAG

SEQ ID NO: 119385 - protein, 20 aa, Artificial Sequence
  Description of Artificial Sequence: Synthetic peptide
  Seed: PRMCSLMQGSTLPRRSGAAG
PRMFSLMQASTHPRRSGAAG

SEQ ID NO: 119386 - protein, 20 aa, Artificial Sequence
  Description of Artificial Sequence: Synthetic peptide
  Seed: PRMCSLMQGSTLPRRSGAAG
PRMFSLMQASTIPRRSGAAG

SEQ ID NO: 119387 - protein, 20 aa, Artificial Sequence
  Description of Artificial Sequence: Synthetic peptide
  Seed: PRMCSLMQGSTLPRRSGAAG
PRMFSLMQASTKPRRSGAAG

SEQ ID NO: 119388 - protein, 20 aa, Artificial Sequence
  Description of Artificial Sequence: Synthetic peptide
  Seed: PRMCSLMQGSTLPRRSGAAG
PRMFSLMQASTLPRRSGAAG

SEQ ID NO: 119389 - protein, 20 aa, Artificial Sequence
  Description of Artificial Sequence: Synthetic peptide
  Seed: PRMCSLMQGSTLPRRSGAAG
PRMFSLMQASTMPRRSGAAG

SEQ ID NO: 119390 - protein, 20 aa, Artificial Sequence
  Description of Artificial Sequence: Synthetic peptide
  Seed: PRMCSLMQGSTLPRRSGAAG
PRMFSLMQASTNPRRSGAAG

SEQ ID NO: 119391 - protein, 20 aa, Artificial Sequence
  Description of Artificial Sequence: Synthetic peptide
  Seed: PRMCSLMQGSTLPRRSGAAG
PRMFSLMQASTPPRRSGAAG

SEQ ID NO: 119392 - protein, 20 aa, Artificial Sequence
  Description of Artificial Sequence: Synthetic peptide
  Seed: PRMCSLMQGSTLPRRSGAAG
PRMFSLMQASTQPRRSGAAG

SEQ ID NO: 119393 - protein, 20 aa, Artificial Sequence
  Description of Artificial Sequence: Synthetic peptide
  Seed: PRMCSLMQGSTLPRRSGAAG
PRMFSLMQASTRPRRSGAAG

SEQ ID NO: 119394 - protein, 20 aa, Artificial Sequence
  Description of Artificial Sequence: Synthetic peptide
  Seed: PRMCSLMQGSTLPRRSGAAG
PRMFSLMQASTSPRRSGAAG

SEQ ID NO: 119395 - protein, 20 aa, Artificial Sequence
  Description of Artificial Sequence: Synthetic peptide
  Seed: PRMCSLMQGSTLPRRSGAAG
PRMFSLMQASTTPRRSGAAG

SEQ ID NO: 119396 - protein, 20 aa, Artificial Sequence
  Description of Artificial Sequence: Synthetic peptide
  Seed: PRMCSLMQGSTLPRRSGAAG
PRMFSLMQASTVPRRSGAAG

SEQ ID NO: 119397 - protein, 20 aa, Artificial Sequence
  Description of Artificial Sequence: Synthetic peptide
  Seed: PRMCSLMQGSTLPRRSGAAG
PRMFSLMQASTWPRRSGAAG

SEQ ID NO: 119398 - protein, 20 aa, Artificial Sequence
  Description of Artificial Sequence: Synthetic peptide
  Seed: PRMCSLMQGSTLPRRSGAAG
PRMFSLMQASTYPRRSGAAG

SEQ ID NO: 119399 - protein, 20 aa, Artificial Sequence
  Description of Artificial Sequence: Synthetic peptide
  Seed: PRMCSLMQGSTLPRRSGAAG
PRMFSLMQCSTLPRRSGAAG

SEQ ID NO: 119400 - protein, 20 aa, Artificial Sequence
  Description of Artificial Sequence: Synthetic peptide
  Seed: PRMCSLMQGSTLPRRSGAAG
PRMFSLMQCSTVPRRSGAAG

SEQ ID NO: 119401 - protein, 20 aa, Artificial Sequence
  Description of Artificial Sequence: Synthetic peptide
  Seed: PRMCSLMQGSTLPRRSGAAG
PRMFSLMQESTIPRRSGAAG

SEQ ID NO: 119402 - protein, 20 aa, Artificial Sequence
  Description of Artificial Sequence: Synthetic peptide
  Seed: PRMCSLMQGSTLPRRSGAAG
PRMFSLMQESTLPRRSGAAG

SEQ ID NO: 119403 - protein, 20 aa, Artificial Sequence
  Description of Artificial Sequence: Synthetic peptide
  Seed: PRMCSLMQGSTLPRRSGAAG
PRMFSLMQESTVPRRSGAAG

SEQ ID NO: 119404 - protein, 20 aa, Artificial Sequence
  Description of Artificial Sequence: Synthetic peptide
  Seed: PRMCSLMQGSTLPRRSGAAG
PRMFSLMQGSTAPRRSGAAG

SEQ ID NO: 119405 - protein, 20 aa, Artificial Sequence
  Description of Artificial Sequence: Synthetic peptide
  Seed: PRMCSLMQGSTLPRRSGAAG
PRMFSLMQGSTCPRRSGAAG

SEQ ID NO: 119406 - protein, 20 aa, Artificial Sequence
  Description of Artificial Sequence: Synthetic peptide
  Seed: PRMCSLMQGSTLPRRSGAAG
PRMFSLMQGSTFPRRSGAAG

SEQ ID NO: 119407 - protein, 20 aa, Artificial Sequence
  Description of Artificial Sequence: Synthetic peptide
  Seed: PRMCSLMQGSTLPRRSGAAG
PRMFSLMQGSTGPRRSGAAG

SEQ ID NO: 119408 - protein, 20 aa, Artificial Sequence
  Description of Artificial Sequence: Synthetic peptide
  Seed: PRMCSLMQGSTLPRRSGAAG
PRMFSLMQGSTHPRRSGAAG

SEQ ID NO: 119409 - protein, 20 aa, Artificial Sequence
  Description of Artificial Sequence: Synthetic peptide
  Seed: PRMCSLMQGSTLPRRSGAAG
PRMFSLMQGSTIPRRSGAAG

SEQ ID NO: 119410 - protein, 20 aa, Artificial Sequence
  Description of Artificial Sequence: Synthetic peptide
  Seed: PRMCSLMQGSTLPRRSGAAG
PRMFSLMQGSTLPRRSGAAG

SEQ ID NO: 119411 - protein, 20 aa, Artificial Sequence
  Description of Artificial Sequence: Synthetic peptide
  Seed: PRMCSLMQGSTLPRRSGAAG
PRMFSLMQGSTMPRRSGAAG

SEQ ID NO: 119412 - protein, 20 aa, Artificial Sequence
  Description of Artificial Sequence: Synthetic peptide
  Seed: PRMCSLMQGSTLPRRSGAAG
PRMFSLMQGSTNPRRSGAAG

SEQ ID NO: 119413 - protein, 20 aa, Artificial Sequence
  Description of Artificial Sequence: Synthetic peptide
  Seed: PRMCSLMQGSTLPRRSGAAG
PRMFSLMQGSTPPRRSGAAG

SEQ ID NO: 119414 - protein, 20 aa, Artificial Sequence
  Description of Artificial Sequence: Synthetic peptide
  Seed: PRMCSLMQGSTLPRRSGAAG
PRMFSLMQGSTQPRRSGAAG

SEQ ID NO: 119415 - protein, 20 aa, Artificial Sequence
  Description of Artificial Sequence: Synthetic peptide
  Seed: PRMCSLMQGSTLPRRSGAAG
PRMFSLMQGSTSPRRSGAAG

SEQ ID NO: 119416 - protein, 20 aa, Artificial Sequence
  Description of Artificial Sequence: Synthetic peptide
  Seed: PRMCSLMQGSTLPRRSGAAG
PRMFSLMQGSTTPRRSGAAG

SEQ ID NO: 119417 - protein, 20 aa, Artificial Sequence
  Description of Artificial Sequence: Synthetic peptide
  Seed: PRMCSLMQGSTLPRRSGAAG
PRMFSLMQGSTVPRRSGAAG

SEQ ID NO: 119418 - protein, 20 aa, Artificial Sequence
  Description of Artificial Sequence: Synthetic peptide
  Seed: PRMCSLMQGSTLPRRSGAAG
PRMFSLMQGSTYPRRSGAAG

SEQ ID NO: 119419 - protein, 20 aa, Artificial Sequence
  Description of Artificial Sequence: Synthetic peptide
  Seed: PRMCSLMQGSTLPRRSGAAG
PRMFSLMQHSTAPRRSGAAG

SEQ ID NO: 119420 - protein, 20 aa, Artificial Sequence
  Description of Artificial Sequence: Synthetic peptide
  Seed: PRMCSLMQGSTLPRRSGAAG
PRMFSLMQHSTIPRRSGAAG

SEQ ID NO: 119421 - protein, 20 aa, Artificial Sequence
  Description of Artificial Sequence: Synthetic peptide
  Seed: PRMCSLMQGSTLPRRSGAAG
PRMFSLMQHSTLPRRSGAAG

SEQ ID NO: 119422 - protein, 20 aa, Artificial Sequence
  Description of Artificial Sequence: Synthetic peptide
  Seed: PRMCSLMQGSTLPRRSGAAG
PRMFSLMQHSTVPRRSGAAG

SEQ ID NO: 119423 - protein, 20 aa, Artificial Sequence
  Description of Artificial Sequence: Synthetic peptide
  Seed: PRMCSLMQGSTLPRRSGAAG
PRMFSLMQISTAPRRSGAAG

SEQ ID NO: 119424 - protein, 20 aa, Artificial Sequence
  Description of Artificial Sequence: Synthetic peptide
  Seed: PRMCSLMQGSTLPRRSGAAG
PRMFSLMQISTIPRRSGAAG

SEQ ID NO: 119425 - protein, 20 aa, Artificial Sequence
  Description of Artificial Sequence: Synthetic peptide
  Seed: PRMCSLMQGSTLPRRSGAAG
PRMFSLMQISTLPRRSGAAG

SEQ ID NO: 119426 - protein, 20 aa, Artificial Sequence
  Description of Artificial Sequence: Synthetic peptide
  Seed: PRMCSLMQGSTLPRRSGAAG
PRMFSLMQISTMPRRSGAAG

SEQ ID NO: 119427 - protein, 20 aa, Artificial Sequence
  Description of Artificial Sequence: Synthetic peptide
  Seed: PRMCSLMQGSTLPRRSGAAG
PRMFSLMQISTSPRRSGAAG

SEQ ID NO: 119428 - protein, 20 aa, Artificial Sequence
  Description of Artificial Sequence: Synthetic peptide
  Seed: PRMCSLMQGSTLPRRSGAAG
PRMFSLMQISTTPRRSGAAG

SEQ ID NO: 119429 - protein, 20 aa, Artificial Sequence
  Description of Artificial Sequence: Synthetic peptide
  Seed: PRMCSLMQGSTLPRRSGAAG
PRMFSLMQISTVPRRSGAAG

SEQ ID NO: 119430 - protein, 20 aa, Artificial Sequence
  Description of Artificial Sequence: Synthetic peptide
  Seed: PRMCSLMQGSTLPRRSGAAG
PRMFSLMQLSTAPRRSGAAG

SEQ ID NO: 119431 - protein, 20 aa, Artificial Sequence
  Description of Artificial Sequence: Synthetic peptide
  Seed: PRMCSLMQGSTLPRRSGAAG
PRMFSLMQLSTIPRRSGAAG

SEQ ID NO: 119432 - protein, 20 aa, Artificial Sequence
  Description of Artificial Sequence: Synthetic peptide
  Seed: PRMCSLMQGSTLPRRSGAAG
PRMFSLMQLSTLPRRSGAAG

SEQ ID NO: 119433 - protein, 20 aa, Artificial Sequence
  Description of Artificial Sequence: Synthetic peptide
  Seed: PRMCSLMQGSTLPRRSGAAG
PRMFSLMQLSTVPRRSGAAG

SEQ ID NO: 119434 - protein, 20 aa, Artificial Sequence
  Description of Artificial Sequence: Synthetic peptide
  Seed: PRMCSLMQGSTLPRRSGAAG
PRMFSLMQMSTAPRRSGAAG

SEQ ID NO: 119435 - protein, 20 aa, Artificial Sequence
  Description of Artificial Sequence: Synthetic peptide
  Seed: PRMCSLMQGSTLPRRSGAAG
PRMFSLMQMSTIPRRSGAAG

SEQ ID NO: 119436 - protein, 20 aa, Artificial Sequence
  Description of Artificial Sequence: Synthetic peptide
  Seed: PRMCSLMQGSTLPRRSGAAG
PRMFSLMQMSTLPRRSGAAG

SEQ ID NO: 119437 - protein, 20 aa, Artificial Sequence
  Description of Artificial Sequence: Synthetic peptide
  Seed: PRMCSLMQGSTLPRRSGAAG
PRMFSLMQMSTVPRRSGAAG

SEQ ID NO: 119438 - protein, 20 aa, Artificial Sequence
  Description of Artificial Sequence: Synthetic peptide
  Seed: PRMCSLMQGSTLPRRSGAAG
PRMFSLMQNSTAPRRSGAAG

SEQ ID NO: 119439 - protein, 20 aa, Artificial Sequence
  Description of Artificial Sequence: Synthetic peptide
  Seed: PRMCSLMQGSTLPRRSGAAG
PRMFSLMQNSTFPRRSGAAG

SEQ ID NO: 119440 - protein, 20 aa, Artificial Sequence
  Description of Artificial Sequence: Synthetic peptide
  Seed: PRMCSLMQGSTLPRRSGAAG
PRMFSLMQNSTGPRRSGAAG

SEQ ID NO: 119441 - protein, 20 aa, Artificial Sequence
  Description of Artificial Sequence: Synthetic peptide
  Seed: PRMCSLMQGSTLPRRSGAAG
PRMFSLMQNSTIPRRSGAAG

SEQ ID NO: 119442 - protein, 20 aa, Artificial Sequence
  Description of Artificial Sequence: Synthetic peptide
  Seed: PRMCSLMQGSTLPRRSGAAG
PRMFSLMQNSTLPRRSGAAG

SEQ ID NO: 119443 - protein, 20 aa, Artificial Sequence
  Description of Artificial Sequence: Synthetic peptide
  Seed: PRMCSLMQGSTLPRRSGAAG
PRMFSLMQNSTMPRRSGAAG

SEQ ID NO: 119444 - protein, 20 aa, Artificial Sequence
  Description of Artificial Sequence: Synthetic peptide
  Seed: PRMCSLMQGSTLPRRSGAAG
PRMFSLMQNSTSPRRSGAAG

SEQ ID NO: 119445 - protein, 20 aa, Artificial Sequence
  Description of Artificial Sequence: Synthetic peptide
  Seed: PRMCSLMQGSTLPRRSGAAG
PRMFSLMQNSTTPRRSGAAG

SEQ ID NO: 119446 - protein, 20 aa, Artificial Sequence
  Description of Artificial Sequence: Synthetic peptide
  Seed: PRMCSLMQGSTLPRRSGAAG
PRMFSLMQNSTVPRRSGAAG

SEQ ID NO: 119447 - protein, 20 aa, Artificial Sequence
  Description of Artificial Sequence: Synthetic peptide
  Seed: PRMCSLMQGSTLPRRSGAAG
PRMFSLMQPSTAPRRSGAAG

SEQ ID NO: 119448 - protein, 20 aa, Artificial Sequence
  Description of Artificial Sequence: Synthetic peptide
  Seed: PRMCSLMQGSTLPRRSGAAG
PRMFSLMQPSTCPRRSGAAG

SEQ ID NO: 119449 - protein, 20 aa, Artificial Sequence
  Description of Artificial Sequence: Synthetic peptide
  Seed: PRMCSLMQGSTLPRRSGAAG
PRMFSLMQPSTFPRRSGAAG

SEQ ID NO: 119450 - protein, 20 aa, Artificial Sequence
  Description of Artificial Sequence: Synthetic peptide
  Seed: PRMCSLMQGSTLPRRSGAAG
PRMFSLMQPSTGPRRSGAAG

SEQ ID NO: 119451 - protein, 20 aa, Artificial Sequence
  Description of Artificial Sequence: Synthetic peptide
  Seed: PRMCSLMQGSTLPRRSGAAG
PRMFSLMQPSTIPRRSGAAG

SEQ ID NO: 119452 - protein, 20 aa, Artificial Sequence
  Description of Artificial Sequence: Synthetic peptide
  Seed: PRMCSLMQGSTLPRRSGAAG
PRMFSLMQPSTLPRRSGAAG

SEQ ID NO: 119453 - protein, 20 aa, Artificial Sequence
  Description of Artificial Sequence: Synthetic peptide
  Seed: PRMCSLMQGSTLPRRSGAAG
PRMFSLMQPSTMPRRSGAAG

SEQ ID NO: 119454 - protein, 20 aa, Artificial Sequence
  Description of Artificial Sequence: Synthetic peptide
  Seed: PRMCSLMQGSTLPRRSGAAG
PRMFSLMQPSTNPRRSGAAG

SEQ ID NO: 119455 - protein, 20 aa, Artificial Sequence
  Description of Artificial Sequence: Synthetic peptide
  Seed: PRMCSLMQGSTLPRRSGAAG
PRMFSLMQPSTSPRRSGAAG

SEQ ID NO: 119456 - protein, 20 aa, Artificial Sequence
  Description of Artificial Sequence: Synthetic peptide
  Seed: PRMCSLMQGSTLPRRSGAAG
PRMFSLMQPSTTPRRSGAAG

SEQ ID NO: 119457 - protein, 20 aa, Artificial Sequence
  Description of Artificial Sequence: Synthetic peptide
  Seed: PRMCSLMQGSTLPRRSGAAG
PRMFSLMQPSTVPRRSGAAG

SEQ ID NO: 119458 - protein, 20 aa, Artificial Sequence
  Description of Artificial Sequence: Synthetic peptide
  Seed: PRMCSLMQGSTLPRRSGAAG
PRMFSLMQPSTYPRRSGAAG

SEQ ID NO: 119459 - protein, 20 aa, Artificial Sequence
  Description of Artificial Sequence: Synthetic peptide
  Seed: PRMCSLMQGSTLPRRSGAAG
PRMFSLMQQSTIPRRSGAAG

SEQ ID NO: 119460 - protein, 20 aa, Artificial Sequence
  Description of Artificial Sequence: Synthetic peptide
  Seed: PRMCSLMQGSTLPRRSGAAG
PRMFSLMQQSTLPRRSGAAG

SEQ ID NO: 119461 - protein, 20 aa, Artificial Sequence
  Description of Artificial Sequence: Synthetic peptide
  Seed: PRMCSLMQGSTLPRRSGAAG
PRMFSLMQQSTVPRRSGAAG

SEQ ID NO: 119462 - protein, 20 aa, Artificial Sequence
  Description of Artificial Sequence: Synthetic peptide
  Seed: PRMCSLMQGSTLPRRSGAAG
PRMFSLMQSSTAPRRSGAAG

SEQ ID NO: 119463 - protein, 20 aa, Artificial Sequence
  Description of Artificial Sequence: Synthetic peptide
  Seed: PRMCSLMQGSTLPRRSGAAG
PRMFSLMQSSTCPRRSGAAG

SEQ ID NO: 119464 - protein, 20 aa, Artificial Sequence
  Description of Artificial Sequence: Synthetic peptide
  Seed: PRMCSLMQGSTLPRRSGAAG
PRMFSLMQSSTFPRRSGAAG

SEQ ID NO: 119465 - protein, 20 aa, Artificial Sequence
  Description of Artificial Sequence: Synthetic peptide
  Seed: PRMCSLMQGSTLPRRSGAAG
PRMFSLMQSSTGPRRSGAAG

SEQ ID NO: 119466 - protein, 20 aa, Artificial Sequence
  Description of Artificial Sequence: Synthetic peptide
  Seed: PRMCSLMQGSTLPRRSGAAG
PRMFSLMQSSTHPRRSGAAG

SEQ ID NO: 119467 - protein, 20 aa, Artificial Sequence
  Description of Artificial Sequence: Synthetic peptide
  Seed: PRMCSLMQGSTLPRRSGAAG
PRMFSLMQSSTIPRRSGAAG

SEQ ID NO: 119468 - protein, 20 aa, Artificial Sequence
  Description of Artificial Sequence: Synthetic peptide
  Seed: PRMCSLMQGSTLPRRSGAAG
PRMFSLMQSSTLPRRSGAAG

SEQ ID NO: 119469 - protein, 20 aa, Artificial Sequence
  Description of Artificial Sequence: Synthetic peptide
  Seed: PRMCSLMQGSTLPRRSGAAG
PRMFSLMQSSTMPRRSGAAG

SEQ ID NO: 119470 - protein, 20 aa, Artificial Sequence
  Description of Artificial Sequence: Synthetic peptide
  Seed: PRMCSLMQGSTLPRRSGAAG
PRMFSLMQSSTNPRRSGAAG

SEQ ID NO: 119471 - protein, 20 aa, Artificial Sequence
  Description of Artificial Sequence: Synthetic peptide
  Seed: PRMCSLMQGSTLPRRSGAAG
PRMFSLMQSSTSPRRSGAAG

SEQ ID NO: 119472 - protein, 20 aa, Artificial Sequence
  Description of Artificial Sequence: Synthetic peptide
  Seed: PRMCSLMQGSTLPRRSGAAG
PRMFSLMQSSTTPRRSGAAG

SEQ ID NO: 119473 - protein, 20 aa, Artificial Sequence
  Description of Artificial Sequence: Synthetic peptide
  Seed: PRMCSLMQGSTLPRRSGAAG
PRMFSLMQSSTVPRRSGAAG

SEQ ID NO: 119474 - protein, 20 aa, Artificial Sequence
  Description of Artificial Sequence: Synthetic peptide
  Seed: PRMCSLMQGSTLPRRSGAAG
PRMFSLMQSSTYPRRSGAAG

SEQ ID NO: 119475 - protein, 20 aa, Artificial Sequence
  Description of Artificial Sequence: Synthetic peptide
  Seed: PRMCSLMQGSTLPRRSGAAG
PRMFSLMQTSTAPRRSGAAG

SEQ ID NO: 119476 - protein, 20 aa, Artificial Sequence
  Description of Artificial Sequence: Synthetic peptide
  Seed: PRMCSLMQGSTLPRRSGAAG
PRMFSLMQTSTFPRRSGAAG

SEQ ID NO: 119477 - protein, 20 aa, Artificial Sequence
  Description of Artificial Sequence: Synthetic peptide
  Seed: PRMCSLMQGSTLPRRSGAAG
PRMFSLMQTSTGPRRSGAAG

SEQ ID NO: 119478 - protein, 20 aa, Artificial Sequence
  Description of Artificial Sequence: Synthetic peptide
  Seed: PRMCSLMQGSTLPRRSGAAG
PRMFSLMQTSTIPRRSGAAG

SEQ ID NO: 119479 - protein, 20 aa, Artificial Sequence
  Description of Artificial Sequence: Synthetic peptide
  Seed: PRMCSLMQGSTLPRRSGAAG
PRMFSLMQTSTLPRRSGAAG

SEQ ID NO: 119480 - protein, 20 aa, Artificial Sequence
  Description of Artificial Sequence: Synthetic peptide
  Seed: PRMCSLMQGSTLPRRSGAAG
PRMFSLMQTSTMPRRSGAAG

SEQ ID NO: 119481 - protein, 20 aa, Artificial Sequence
  Description of Artificial Sequence: Synthetic peptide
  Seed: PRMCSLMQGSTLPRRSGAAG
PRMFSLMQTSTNPRRSGAAG

SEQ ID NO: 119482 - protein, 20 aa, Artificial Sequence
  Description of Artificial Sequence: Synthetic peptide
  Seed: PRMCSLMQGSTLPRRSGAAG
PRMFSLMQTSTSPRRSGAAG

SEQ ID NO: 119483 - protein, 20 aa, Artificial Sequence
  Description of Artificial Sequence: Synthetic peptide
  Seed: PRMCSLMQGSTLPRRSGAAG
PRMFSLMQTSTTPRRSGAAG

SEQ ID NO: 119484 - protein, 20 aa, Artificial Sequence
  Description of Artificial Sequence: Synthetic peptide
  Seed: PRMCSLMQGSTLPRRSGAAG
PRMFSLMQTSTVPRRSGAAG

SEQ ID NO: 119485 - protein, 20 aa, Artificial Sequence
  Description of Artificial Sequence: Synthetic peptide
  Seed: PRMCSLMQGSTLPRRSGAAG
PRMFSLMQVSTAPRRSGAAG

SEQ ID NO: 119486 - protein, 20 aa, Artificial Sequence
  Description of Artificial Sequence: Synthetic peptide
  Seed: PRMCSLMQGSTLPRRSGAAG
PRMFSLMQVSTGPRRSGAAG

SEQ ID NO: 119487 - protein, 20 aa, Artificial Sequence
  Description of Artificial Sequence: Synthetic peptide
  Seed: PRMCSLMQGSTLPRRSGAAG
PRMFSLMQVSTIPRRSGAAG

SEQ ID NO: 119488 - protein, 20 aa, Artificial Sequence
  Description of Artificial Sequence: Synthetic peptide
  Seed: PRMCSLMQGSTLPRRSGAAG
PRMFSLMQVSTLPRRSGAAG

SEQ ID NO: 119489 - protein, 20 aa, Artificial Sequence
  Description of Artificial Sequence: Synthetic peptide
  Seed: PRMCSLMQGSTLPRRSGAAG
PRMFSLMQVSTMPRRSGAAG

SEQ ID NO: 119490 - protein, 20 aa, Artificial Sequence
  Description of Artificial Sequence: Synthetic peptide
  Seed: PRMCSLMQGSTLPRRSGAAG
PRMFSLMQVSTNPRRSGAAG

SEQ ID NO: 119491 - protein, 20 aa, Artificial Sequence
  Description of Artificial Sequence: Synthetic peptide
  Seed: PRMCSLMQGSTLPRRSGAAG
PRMFSLMQVSTSPRRSGAAG

SEQ ID NO: 119492 - protein, 20 aa, Artificial Sequence
  Description of Artificial Sequence: Synthetic peptide
  Seed: PRMCSLMQGSTLPRRSGAAG
PRMFSLMQVSTTPRRSGAAG

SEQ ID NO: 119493 - protein, 20 aa, Artificial Sequence
  Description of Artificial Sequence: Synthetic peptide
  Seed: PRMCSLMQGSTLPRRSGAAG
PRMFSLMQVSTVPRRSGAAG

SEQ ID NO: 119494 - protein, 20 aa, Artificial Sequence
  Description of Artificial Sequence: Synthetic peptide
  Seed: PRMCSLMQGSTLPRRSGAAG
PRMFSLNQASTAPRRSGAAG

SEQ ID NO: 119495 - protein, 20 aa, Artificial Sequence
  Description of Artificial Sequence: Synthetic peptide
  Seed: PRMCSLMQGSTLPRRSGAAG
PRMFSLNQASTIPRRSGAAG

SEQ ID NO: 119496 - protein, 20 aa, Artificial Sequence
  Description of Artificial Sequence: Synthetic peptide
  Seed: PRMCSLMQGSTLPRRSGAAG
PRMFSLNQASTLPRRSGAAG

SEQ ID NO: 119497 - protein, 20 aa, Artificial Sequence
  Description of Artificial Sequence: Synthetic peptide
  Seed: PRMCSLMQGSTLPRRSGAAG
PRMFSLNQASTMPRRSGAAG

SEQ ID NO: 119498 - protein, 20 aa, Artificial Sequence
  Description of Artificial Sequence: Synthetic peptide
  Seed: PRMCSLMQGSTLPRRSGAAG
PRMFSLNQASTVPRRSGAAG

SEQ ID NO: 119499 - protein, 20 aa, Artificial Sequence
  Description of Artificial Sequence: Synthetic peptide
  Seed: PRMCSLMQGSTLPRRSGAAG
PRMFSLNQGSTIPRRSGAAG

SEQ ID NO: 119500 - protein, 20 aa, Artificial Sequence
  Description of Artificial Sequence: Synthetic peptide
  Seed: PRMCSLMQGSTLPRRSGAAG
PRMFSLNQGSTLPRRSGAAG

SEQ ID NO: 119501 - protein, 20 aa, Artificial Sequence
  Description of Artificial Sequence: Synthetic peptide
  Seed: PRMCSLMQGSTLPRRSGAAG
PRMFSLNQGSTVPRRSGAAG

SEQ ID NO: 119502 - protein, 20 aa, Artificial Sequence
  Description of Artificial Sequence: Synthetic peptide
  Seed: PRMCSLMQGSTLPRRSGAAG
PRMFSLNQSSTLPRRSGAAG

SEQ ID NO: 119503 - protein, 20 aa, Artificial Sequence
  Description of Artificial Sequence: Synthetic peptide
  Seed: PRMCSLMQGSTLPRRSGAAG
PRMFSLNQSSTVPRRSGAAG

SEQ ID NO: 119504 - protein, 20 aa, Artificial Sequence
  Description of Artificial Sequence: Synthetic peptide
  Seed: PRMCSLMQGSTLPRRSGAAG
PRMFSLQQASTAPRRSGAAG

SEQ ID NO: 119505 - protein, 20 aa, Artificial Sequence
  Description of Artificial Sequence: Synthetic peptide
  Seed: PRMCSLMQGSTLPRRSGAAG
PRMFSLQQASTCPRRSGAAG

SEQ ID NO: 119506 - protein, 20 aa, Artificial Sequence
  Description of Artificial Sequence: Synthetic peptide
  Seed: PRMCSLMQGSTLPRRSGAAG
PRMFSLQQASTFPRRSGAAG

SEQ ID NO: 119507 - protein, 20 aa, Artificial Sequence
  Description of Artificial Sequence: Synthetic peptide
  Seed: PRMCSLMQGSTLPRRSGAAG
PRMFSLQQASTGPRRSGAAG

SEQ ID NO: 119508 - protein, 20 aa, Artificial Sequence
  Description of Artificial Sequence: Synthetic peptide
  Seed: PRMCSLMQGSTLPRRSGAAG
PRMFSLQQASTIPRRSGAAG

SEQ ID NO: 119509 - protein, 20 aa, Artificial Sequence
  Description of Artificial Sequence: Synthetic peptide
  Seed: PRMCSLMQGSTLPRRSGAAG
PRMFSLQQASTLPRRSGAAG

SEQ ID NO: 119510 - protein, 20 aa, Artificial Sequence
  Description of Artificial Sequence: Synthetic peptide
  Seed: PRMCSLMQGSTLPRRSGAAG
PRMFSLQQASTMPRRSGAAG

SEQ ID NO: 119511 - protein, 20 aa, Artificial Sequence
  Description of Artificial Sequence: Synthetic peptide
  Seed: PRMCSLMQGSTLPRRSGAAG
PRMFSLQQASTSPRRSGAAG

SEQ ID NO: 119512 - protein, 20 aa, Artificial Sequence
  Description of Artificial Sequence: Synthetic peptide
  Seed: PRMCSLMQGSTLPRRSGAAG
PRMFSLQQASTTPRRSGAAG

SEQ ID NO: 119513 - protein, 20 aa, Artificial Sequence
  Description of Artificial Sequence: Synthetic peptide
  Seed: PRMCSLMQGSTLPRRSGAAG
PRMFSLQQASTVPRRSGAAG

SEQ ID NO: 119514 - protein, 20 aa, Artificial Sequence
  Description of Artificial Sequence: Synthetic peptide
  Seed: PRMCSLMQGSTLPRRSGAAG
PRMFSLQQGSTAPRRSGAAG

SEQ ID NO: 119515 - protein, 20 aa, Artificial Sequence
  Description of Artificial Sequence: Synthetic peptide
  Seed: PRMCSLMQGSTLPRRSGAAG
PRMFSLQQGSTIPRRSGAAG

SEQ ID NO: 119516 - protein, 20 aa, Artificial Sequence
  Description of Artificial Sequence: Synthetic peptide
  Seed: PRMCSLMQGSTLPRRSGAAG
PRMFSLQQGSTLPRRSGAAG

SEQ ID NO: 119517 - protein, 20 aa, Artificial Sequence
  Description of Artificial Sequence: Synthetic peptide
  Seed: PRMCSLMQGSTLPRRSGAAG
PRMFSLQQGSTMPRRSGAAG

SEQ ID NO: 119518 - protein, 20 aa, Artificial Sequence
  Description of Artificial Sequence: Synthetic peptide
  Seed: PRMCSLMQGSTLPRRSGAAG
PRMFSLQQGSTSPRRSGAAG

SEQ ID NO: 119519 - protein, 20 aa, Artificial Sequence
  Description of Artificial Sequence: Synthetic peptide
  Seed: PRMCSLMQGSTLPRRSGAAG
PRMFSLQQGSTTPRRSGAAG

SEQ ID NO: 119520 - protein, 20 aa, Artificial Sequence
  Description of Artificial Sequence: Synthetic peptide
  Seed: PRMCSLMQGSTLPRRSGAAG
PRMFSLQQGSTVPRRSGAAG

SEQ ID NO: 119521 - protein, 20 aa, Artificial Sequence
  Description of Artificial Sequence: Synthetic peptide
  Seed: PRMCSLMQGSTLPRRSGAAG
PRMFSLQQNSTAPRRSGAAG

SEQ ID NO: 119522 - protein, 20 aa, Artificial Sequence
  Description of Artificial Sequence: Synthetic peptide
  Seed: PRMCSLMQGSTLPRRSGAAG
PRMFSLQQNSTIPRRSGAAG

SEQ ID NO: 119523 - protein, 20 aa, Artificial Sequence
  Description of Artificial Sequence: Synthetic peptide
  Seed: PRMCSLMQGSTLPRRSGAAG
PRMFSLQQNSTLPRRSGAAG

SEQ ID NO: 119524 - protein, 20 aa, Artificial Sequence
  Description of Artificial Sequence: Synthetic peptide
  Seed: PRMCSLMQGSTLPRRSGAAG
PRMFSLQQNSTVPRRSGAAG

SEQ ID NO: 119525 - protein, 20 aa, Artificial Sequence
  Description of Artificial Sequence: Synthetic peptide
  Seed: PRMCSLMQGSTLPRRSGAAG
PRMFSLQQPSTAPRRSGAAG

SEQ ID NO: 119526 - protein, 20 aa, Artificial Sequence
  Description of Artificial Sequence: Synthetic peptide
  Seed: PRMCSLMQGSTLPRRSGAAG
PRMFSLQQPSTIPRRSGAAG

SEQ ID NO: 119527 - protein, 20 aa, Artificial Sequence
  Description of Artificial Sequence: Synthetic peptide
  Seed: PRMCSLMQGSTLPRRSGAAG
PRMFSLQQPSTLPRRSGAAG

SEQ ID NO: 119528 - protein, 20 aa, Artificial Sequence
  Description of Artificial Sequence: Synthetic peptide
  Seed: PRMCSLMQGSTLPRRSGAAG
PRMFSLQQPSTMPRRSGAAG

SEQ ID NO: 119529 - protein, 20 aa, Artificial Sequence
  Description of Artificial Sequence: Synthetic peptide
  Seed: PRMCSLMQGSTLPRRSGAAG
PRMFSLQQPSTVPRRSGAAG

SEQ ID NO: 119530 - protein, 20 aa, Artificial Sequence
  Description of Artificial Sequence: Synthetic peptide
  Seed: PRMCSLMQGSTLPRRSGAAG
PRMFSLQQSSTAPRRSGAAG

SEQ ID NO: 119531 - protein, 20 aa, Artificial Sequence
  Description of Artificial Sequence: Synthetic peptide
  Seed: PRMCSLMQGSTLPRRSGAAG
PRMFSLQQSSTIPRRSGAAG

SEQ ID NO: 119532 - protein, 20 aa, Artificial Sequence
  Description of Artificial Sequence: Synthetic peptide
  Seed: PRMCSLMQGSTLPRRSGAAG
PRMFSLQQSSTLPRRSGAAG

SEQ ID NO: 119533 - protein, 20 aa, Artificial Sequence
  Description of Artificial Sequence: Synthetic peptide
  Seed: PRMCSLMQGSTLPRRSGAAG
PRMFSLQQSSTMPRRSGAAG

SEQ ID NO: 119534 - protein, 20 aa, Artificial Sequence
  Description of Artificial Sequence: Synthetic peptide
  Seed: PRMCSLMQGSTLPRRSGAAG
PRMFSLQQSSTSPRRSGAAG

SEQ ID NO: 119535 - protein, 20 aa, Artificial Sequence
  Description of Artificial Sequence: Synthetic peptide
  Seed: PRMCSLMQGSTLPRRSGAAG
PRMFSLQQSSTTPRRSGAAG

SEQ ID NO: 119536 - protein, 20 aa, Artificial Sequence
  Description of Artificial Sequence: Synthetic peptide
  Seed: PRMCSLMQGSTLPRRSGAAG
PRMFSLQQSSTVPRRSGAAG

SEQ ID NO: 119537 - protein, 20 aa, Artificial Sequence
  Description of Artificial Sequence: Synthetic peptide
  Seed: PRMCSLMQGSTLPRRSGAAG
PRMFSLQQTSTAPRRSGAAG

SEQ ID NO: 119538 - protein, 20 aa, Artificial Sequence
  Description of Artificial Sequence: Synthetic peptide
  Seed: PRMCSLMQGSTLPRRSGAAG
PRMFSLQQTSTIPRRSGAAG

SEQ ID NO: 119539 - protein, 20 aa, Artificial Sequence
  Description of Artificial Sequence: Synthetic peptide
  Seed: PRMCSLMQGSTLPRRSGAAG
PRMFSLQQTSTLPRRSGAAG

SEQ ID NO: 119540 - protein, 20 aa, Artificial Sequence
  Description of Artificial Sequence: Synthetic peptide
  Seed: PRMCSLMQGSTLPRRSGAAG
PRMFSLQQTSTVPRRSGAAG

SEQ ID NO: 119541 - protein, 20 aa, Artificial Sequence
  Description of Artificial Sequence: Synthetic peptide
  Seed: PRMCSLMQGSTLPRRSGAAG
PRMFSLQQVSTAPRRSGAAG

SEQ ID NO: 119542 - protein, 20 aa, Artificial Sequence
  Description of Artificial Sequence: Synthetic peptide
  Seed: PRMCSLMQGSTLPRRSGAAG
PRMFSLQQVSTIPRRSGAAG

SEQ ID NO: 119543 - protein, 20 aa, Artificial Sequence
  Description of Artificial Sequence: Synthetic peptide
  Seed: PRMCSLMQGSTLPRRSGAAG
PRMFSLQQVSTLPRRSGAAG

SEQ ID NO: 119544 - protein, 20 aa, Artificial Sequence
  Description of Artificial Sequence: Synthetic peptide
  Seed: PRMCSLMQGSTLPRRSGAAG
PRMFSLQQVSTVPRRSGAAG

SEQ ID NO: 119545 - protein, 20 aa, Artificial Sequence
  Description of Artificial Sequence: Synthetic peptide
  Seed: PRMCSLMQGSTLPRRSGAAG
PRMFSLSQASTAPRRSGAAG

SEQ ID NO: 119546 - protein, 20 aa, Artificial Sequence
  Description of Artificial Sequence: Synthetic peptide
  Seed: PRMCSLMQGSTLPRRSGAAG
PRMFSLSQASTFPRRSGAAG

SEQ ID NO: 119547 - protein, 20 aa, Artificial Sequence
  Description of Artificial Sequence: Synthetic peptide
  Seed: PRMCSLMQGSTLPRRSGAAG
PRMFSLSQASTIPRRSGAAG

SEQ ID NO: 119548 - protein, 20 aa, Artificial Sequence
  Description of Artificial Sequence: Synthetic peptide
  Seed: PRMCSLMQGSTLPRRSGAAG
PRMFSLSQASTLPRRSGAAG

SEQ ID NO: 119549 - protein, 20 aa, Artificial Sequence
  Description of Artificial Sequence: Synthetic peptide
  Seed: PRMCSLMQGSTLPRRSGAAG
PRMFSLSQASTMPRRSGAAG

SEQ ID NO: 119550 - protein, 20 aa, Artificial Sequence
  Description of Artificial Sequence: Synthetic peptide
  Seed: PRMCSLMQGSTLPRRSGAAG
PRMFSLSQASTSPRRSGAAG

SEQ ID NO: 119551 - protein, 20 aa, Artificial Sequence
  Description of Artificial Sequence: Synthetic peptide
  Seed: PRMCSLMQGSTLPRRSGAAG
PRMFSLSQASTTPRRSGAAG

SEQ ID NO: 119552 - protein, 20 aa, Artificial Sequence
  Description of Artificial Sequence: Synthetic peptide
  Seed: PRMCSLMQGSTLPRRSGAAG
PRMFSLSQASTVPRRSGAAG

SEQ ID NO: 119553 - protein, 20 aa, Artificial Sequence
  Description of Artificial Sequence: Synthetic peptide
  Seed: PRMCSLMQGSTLPRRSGAAG
PRMFSLSQGSTAPRRSGAAG

SEQ ID NO: 119554 - protein, 20 aa, Artificial Sequence
  Description of Artificial Sequence: Synthetic peptide
  Seed: PRMCSLMQGSTLPRRSGAAG
PRMFSLSQGSTIPRRSGAAG

SEQ ID NO: 119555 - protein, 20 aa, Artificial Sequence
  Description of Artificial Sequence: Synthetic peptide
  Seed: PRMCSLMQGSTLPRRSGAAG
PRMFSLSQGSTLPRRSGAAG

SEQ ID NO: 119556 - protein, 20 aa, Artificial Sequence
  Description of Artificial Sequence: Synthetic peptide
  Seed: PRMCSLMQGSTLPRRSGAAG
PRMFSLSQGSTMPRRSGAAG

SEQ ID NO: 119557 - protein, 20 aa, Artificial Sequence
  Description of Artificial Sequence: Synthetic peptide
  Seed: PRMCSLMQGSTLPRRSGAAG
PRMFSLSQGSTVPRRSGAAG

SEQ ID NO: 119558 - protein, 20 aa, Artificial Sequence
  Description of Artificial Sequence: Synthetic peptide
  Seed: PRMCSLMQGSTLPRRSGAAG
PRMFSLSQPSTAPRRSGAAG

SEQ ID NO: 119559 - protein, 20 aa, Artificial Sequence
  Description of Artificial Sequence: Synthetic peptide
  Seed: PRMCSLMQGSTLPRRSGAAG
PRMFSLSQPSTIPRRSGAAG

SEQ ID NO: 119560 - protein, 20 aa, Artificial Sequence
  Description of Artificial Sequence: Synthetic peptide
  Seed: PRMCSLMQGSTLPRRSGAAG
PRMFSLSQPSTLPRRSGAAG

SEQ ID NO: 119561 - protein, 20 aa, Artificial Sequence
  Description of Artificial Sequence: Synthetic peptide
  Seed: PRMCSLMQGSTLPRRSGAAG
PRMFSLSQPSTVPRRSGAAG

SEQ ID NO: 119562 - protein, 20 aa, Artificial Sequence
  Description of Artificial Sequence: Synthetic peptide
  Seed: PRMCSLMQGSTLPRRSGAAG
PRMFSLSQSSTAPRRSGAAG

SEQ ID NO: 119563 - protein, 20 aa, Artificial Sequence
  Description of Artificial Sequence: Synthetic peptide
  Seed: PRMCSLMQGSTLPRRSGAAG
PRMFSLSQSSTIPRRSGAAG

SEQ ID NO: 119564 - protein, 20 aa, Artificial Sequence
  Description of Artificial Sequence: Synthetic peptide
  Seed: PRMCSLMQGSTLPRRSGAAG
PRMFSLSQSSTLPRRSGAAG

SEQ ID NO: 119565 - protein, 20 aa, Artificial Sequence
  Description of Artificial Sequence: Synthetic peptide
  Seed: PRMCSLMQGSTLPRRSGAAG
PRMFSLSQSSTMPRRSGAAG

SEQ ID NO: 119566 - protein, 20 aa, Artificial Sequence
  Description of Artificial Sequence: Synthetic peptide
  Seed: PRMCSLMQGSTLPRRSGAAG
PRMFSLSQSSTVPRRSGAAG

SEQ ID NO: 119567 - protein, 20 aa, Artificial Sequence
  Description of Artificial Sequence: Synthetic peptide
  Seed: PRMCSLMQGSTLPRRSGAAG
PRMFSLTQASTAPRRSGAAG

SEQ ID NO: 119568 - protein, 20 aa, Artificial Sequence
  Description of Artificial Sequence: Synthetic peptide
  Seed: PRMCSLMQGSTLPRRSGAAG
PRMFSLTQASTIPRRSGAAG

SEQ ID NO: 119569 - protein, 20 aa, Artificial Sequence
  Description of Artificial Sequence: Synthetic peptide
  Seed: PRMCSLMQGSTLPRRSGAAG
PRMFSLTQASTLPRRSGAAG

SEQ ID NO: 119570 - protein, 20 aa, Artificial Sequence
  Description of Artificial Sequence: Synthetic peptide
  Seed: PRMCSLMQGSTLPRRSGAAG
PRMFSLTQASTMPRRSGAAG

SEQ ID NO: 119571 - protein, 20 aa, Artificial Sequence
  Description of Artificial Sequence: Synthetic peptide
  Seed: PRMCSLMQGSTLPRRSGAAG
PRMFSLTQASTTPRRSGAAG

SEQ ID NO: 119572 - protein, 20 aa, Artificial Sequence
  Description of Artificial Sequence: Synthetic peptide
  Seed: PRMCSLMQGSTLPRRSGAAG
PRMFSLTQASTVPRRSGAAG

SEQ ID NO: 119573 - protein, 20 aa, Artificial Sequence
  Description of Artificial Sequence: Synthetic peptide
  Seed: PRMCSLMQGSTLPRRSGAAG
PRMFSLTQGSTAPRRSGAAG

SEQ ID NO: 119574 - protein, 20 aa, Artificial Sequence
  Description of Artificial Sequence: Synthetic peptide
  Seed: PRMCSLMQGSTLPRRSGAAG
PRMFSLTQGSTIPRRSGAAG

SEQ ID NO: 119575 - protein, 20 aa, Artificial Sequence
  Description of Artificial Sequence: Synthetic peptide
  Seed: PRMCSLMQGSTLPRRSGAAG
PRMFSLTQGSTLPRRSGAAG

SEQ ID NO: 119576 - protein, 20 aa, Artificial Sequence
  Description of Artificial Sequence: Synthetic peptide
  Seed: PRMCSLMQGSTLPRRSGAAG
PRMFSLTQGSTVPRRSGAAG

SEQ ID NO: 119577 - protein, 20 aa, Artificial Sequence
  Description of Artificial Sequence: Synthetic peptide
  Seed: PRMCSLMQGSTLPRRSGAAG
PRMFSLTQPSTIPRRSGAAG

SEQ ID NO: 119578 - protein, 20 aa, Artificial Sequence
  Description of Artificial Sequence: Synthetic peptide
  Seed: PRMCSLMQGSTLPRRSGAAG
PRMFSLTQPSTLPRRSGAAG

SEQ ID NO: 119579 - protein, 20 aa, Artificial Sequence
  Description of Artificial Sequence: Synthetic peptide
  Seed: PRMCSLMQGSTLPRRSGAAG
PRMFSLTQPSTVPRRSGAAG

SEQ ID NO: 119580 - protein, 20 aa, Artificial Sequence
  Description of Artificial Sequence: Synthetic peptide
  Seed: PRMCSLMQGSTLPRRSGAAG
PRMFSLTQSSTAPRRSGAAG

SEQ ID NO: 119581 - protein, 20 aa, Artificial Sequence
  Description of Artificial Sequence: Synthetic peptide
  Seed: PRMCSLMQGSTLPRRSGAAG
PRMFSLTQSSTIPRRSGAAG

SEQ ID NO: 119582 - protein, 20 aa, Artificial Sequence
  Description of Artificial Sequence: Synthetic peptide
  Seed: PRMCSLMQGSTLPRRSGAAG
PRMFSLTQSSTLPRRSGAAG

SEQ ID NO: 119583 - protein, 20 aa, Artificial Sequence
  Description of Artificial Sequence: Synthetic peptide
  Seed: PRMCSLMQGSTLPRRSGAAG
PRMFSLTQSSTVPRRSGAAG

SEQ ID NO: 119584 - protein, 20 aa, Artificial Sequence
  Description of Artificial Sequence: Synthetic peptide
  Seed: PRMCSLMQGSTLPRRSGAAG
PRMFSLVQASTAPRRSGAAG

SEQ ID NO: 119585 - protein, 20 aa, Artificial Sequence
  Description of Artificial Sequence: Synthetic peptide
  Seed: PRMCSLMQGSTLPRRSGAAG
PRMFSLVQASTCPRRSGAAG

SEQ ID NO: 119586 - protein, 20 aa, Artificial Sequence
  Description of Artificial Sequence: Synthetic peptide
  Seed: PRMCSLMQGSTLPRRSGAAG
PRMFSLVQASTGPRRSGAAG

SEQ ID NO: 119587 - protein, 20 aa, Artificial Sequence
  Description of Artificial Sequence: Synthetic peptide
  Seed: PRMCSLMQGSTLPRRSGAAG
PRMFSLVQASTIPRRSGAAG

SEQ ID NO: 119588 - protein, 20 aa, Artificial Sequence
  Description of Artificial Sequence: Synthetic peptide
  Seed: PRMCSLMQGSTLPRRSGAAG
PRMFSLVQASTLPRRSGAAG

SEQ ID NO: 119589 - protein, 20 aa, Artificial Sequence
  Description of Artificial Sequence: Synthetic peptide
  Seed: PRMCSLMQGSTLPRRSGAAG
PRMFSLVQASTMPRRSGAAG

SEQ ID NO: 119590 - protein, 20 aa, Artificial Sequence
  Description of Artificial Sequence: Synthetic peptide
  Seed: PRMCSLMQGSTLPRRSGAAG
PRMFSLVQASTNPRRSGAAG

SEQ ID NO: 119591 - protein, 20 aa, Artificial Sequence
  Description of Artificial Sequence: Synthetic peptide
  Seed: PRMCSLMQGSTLPRRSGAAG
PRMFSLVQASTSPRRSGAAG

SEQ ID NO: 119592 - protein, 20 aa, Artificial Sequence
  Description of Artificial Sequence: Synthetic peptide
  Seed: PRMCSLMQGSTLPRRSGAAG
PRMFSLVQASTTPRRSGAAG

SEQ ID NO: 119593 - protein, 20 aa, Artificial Sequence
  Description of Artificial Sequence: Synthetic peptide
  Seed: PRMCSLMQGSTLPRRSGAAG
PRMFSLVQASTVPRRSGAAG

SEQ ID NO: 119594 - protein, 20 aa, Artificial Sequence
  Description of Artificial Sequence: Synthetic peptide
  Seed: PRMCSLMQGSTLPRRSGAAG
PRMFSLVQGSTAPRRSGAAG

SEQ ID NO: 119595 - protein, 20 aa, Artificial Sequence
  Description of Artificial Sequence: Synthetic peptide
  Seed: PRMCSLMQGSTLPRRSGAAG
PRMFSLVQGSTGPRRSGAAG

SEQ ID NO: 119596 - protein, 20 aa, Artificial Sequence
  Description of Artificial Sequence: Synthetic peptide
  Seed: PRMCSLMQGSTLPRRSGAAG
PRMFSLVQGSTIPRRSGAAG

SEQ ID NO: 119597 - protein, 20 aa, Artificial Sequence
  Description of Artificial Sequence: Synthetic peptide
  Seed: PRMCSLMQGSTLPRRSGAAG
PRMFSLVQGSTLPRRSGAAG

SEQ ID NO: 119598 - protein, 20 aa, Artificial Sequence
  Description of Artificial Sequence: Synthetic peptide
  Seed: PRMCSLMQGSTLPRRSGAAG
PRMFSLVQGSTMPRRSGAAG

SEQ ID NO: 119599 - protein, 20 aa, Artificial Sequence
  Description of Artificial Sequence: Synthetic peptide
  Seed: PRMCSLMQGSTLPRRSGAAG
PRMFSLVQGSTSPRRSGAAG

SEQ ID NO: 119600 - protein, 20 aa, Artificial Sequence
  Description of Artificial Sequence: Synthetic peptide
  Seed: PRMCSLMQGSTLPRRSGAAG
PRMFSLVQGSTTPRRSGAAG

SEQ ID NO: 119601 - protein, 20 aa, Artificial Sequence
  Description of Artificial Sequence: Synthetic peptide
  Seed: PRMCSLMQGSTLPRRSGAAG
PRMFSLVQGSTVPRRSGAAG

SEQ ID NO: 119602 - protein, 20 aa, Artificial Sequence
  Description of Artificial Sequence: Synthetic peptide
  Seed: PRMCSLMQGSTLPRRSGAAG
PRMFSLVQNSTAPRRSGAAG

SEQ ID NO: 119603 - protein, 20 aa, Artificial Sequence
  Description of Artificial Sequence: Synthetic peptide
  Seed: PRMCSLMQGSTLPRRSGAAG
PRMFSLVQNSTIPRRSGAAG

SEQ ID NO: 119604 - protein, 20 aa, Artificial Sequence
  Description of Artificial Sequence: Synthetic peptide
  Seed: PRMCSLMQGSTLPRRSGAAG
PRMFSLVQNSTLPRRSGAAG

SEQ ID NO: 119605 - protein, 20 aa, Artificial Sequence
  Description of Artificial Sequence: Synthetic peptide
  Seed: PRMCSLMQGSTLPRRSGAAG
PRMFSLVQNSTVPRRSGAAG

SEQ ID NO: 119606 - protein, 20 aa, Artificial Sequence
  Description of Artificial Sequence: Synthetic peptide
  Seed: PRMCSLMQGSTLPRRSGAAG
PRMFSLVQPSTAPRRSGAAG

SEQ ID NO: 119607 - protein, 20 aa, Artificial Sequence
  Description of Artificial Sequence: Synthetic peptide
  Seed: PRMCSLMQGSTLPRRSGAAG
PRMFSLVQPSTIPRRSGAAG

SEQ ID NO: 119608 - protein, 20 aa, Artificial Sequence
  Description of Artificial Sequence: Synthetic peptide
  Seed: PRMCSLMQGSTLPRRSGAAG
PRMFSLVQPSTLPRRSGAAG

SEQ ID NO: 119609 - protein, 20 aa, Artificial Sequence
  Description of Artificial Sequence: Synthetic peptide
  Seed: PRMCSLMQGSTLPRRSGAAG
PRMFSLVQPSTMPRRSGAAG

SEQ ID NO: 119610 - protein, 20 aa, Artificial Sequence
  Description of Artificial Sequence: Synthetic peptide
  Seed: PRMCSLMQGSTLPRRSGAAG
PRMFSLVQPSTSPRRSGAAG

SEQ ID NO: 119611 - protein, 20 aa, Artificial Sequence
  Description of Artificial Sequence: Synthetic peptide
  Seed: PRMCSLMQGSTLPRRSGAAG
PRMFSLVQPSTTPRRSGAAG

SEQ ID NO: 119612 - protein, 20 aa, Artificial Sequence
  Description of Artificial Sequence: Synthetic peptide
  Seed: PRMCSLMQGSTLPRRSGAAG
PRMFSLVQPSTVPRRSGAAG

SEQ ID NO: 119613 - protein, 20 aa, Artificial Sequence
  Description of Artificial Sequence: Synthetic peptide
  Seed: PRMCSLMQGSTLPRRSGAAG
PRMFSLVQSSTAPRRSGAAG

SEQ ID NO: 119614 - protein, 20 aa, Artificial Sequence
  Description of Artificial Sequence: Synthetic peptide
  Seed: PRMCSLMQGSTLPRRSGAAG
PRMFSLVQSSTIPRRSGAAG

SEQ ID NO: 119615 - protein, 20 aa, Artificial Sequence
  Description of Artificial Sequence: Synthetic peptide
  Seed: PRMCSLMQGSTLPRRSGAAG
PRMFSLVQSSTLPRRSGAAG

SEQ ID NO: 119616 - protein, 20 aa, Artificial Sequence
  Description of Artificial Sequence: Synthetic peptide
  Seed: PRMCSLMQGSTLPRRSGAAG
PRMFSLVQSSTMPRRSGAAG

SEQ ID NO: 119617 - protein, 20 aa, Artificial Sequence
  Description of Artificial Sequence: Synthetic peptide
  Seed: PRMCSLMQGSTLPRRSGAAG
PRMFSLVQSSTSPRRSGAAG

SEQ ID NO: 119618 - protein, 20 aa, Artificial Sequence
  Description of Artificial Sequence: Synthetic peptide
  Seed: PRMCSLMQGSTLPRRSGAAG
PRMFSLVQSSTTPRRSGAAG

SEQ ID NO: 119619 - protein, 20 aa, Artificial Sequence
  Description of Artificial Sequence: Synthetic peptide
  Seed: PRMCSLMQGSTLPRRSGAAG
PRMFSLVQSSTVPRRSGAAG

SEQ ID NO: 119620 - protein, 20 aa, Artificial Sequence
  Description of Artificial Sequence: Synthetic peptide
  Seed: PRMCSLMQGSTLPRRSGAAG
PRMFSLVQTSTAPRRSGAAG

SEQ ID NO: 119621 - protein, 20 aa, Artificial Sequence
  Description of Artificial Sequence: Synthetic peptide
  Seed: PRMCSLMQGSTLPRRSGAAG
PRMFSLVQTSTIPRRSGAAG

SEQ ID NO: 119622 - protein, 20 aa, Artificial Sequence
  Description of Artificial Sequence: Synthetic peptide
  Seed: PRMCSLMQGSTLPRRSGAAG
PRMFSLVQTSTLPRRSGAAG

SEQ ID NO: 119623 - protein, 20 aa, Artificial Sequence
  Description of Artificial Sequence: Synthetic peptide
  Seed: PRMCSLMQGSTLPRRSGAAG
PRMFSLVQTSTVPRRSGAAG

SEQ ID NO: 119624 - protein, 20 aa, Artificial Sequence
  Description of Artificial Sequence: Synthetic peptide
  Seed: PRMCSLMQGSTLPRRSGAAG
PRMFSLVQVSTAPRRSGAAG

SEQ ID NO: 119625 - protein, 20 aa, Artificial Sequence
  Description of Artificial Sequence: Synthetic peptide
  Seed: PRMCSLMQGSTLPRRSGAAG
PRMFSLVQVSTIPRRSGAAG

SEQ ID NO: 119626 - protein, 20 aa, Artificial Sequence
  Description of Artificial Sequence: Synthetic peptide
  Seed: PRMCSLMQGSTLPRRSGAAG
PRMFSLVQVSTVPRRSGAAG

SEQ ID NO: 119627 - protein, 20 aa, Artificial Sequence
  Description of Artificial Sequence: Synthetic peptide
  Seed: PRMCSLMQGSTLPRRSGAAG
PRMFSLWQASTAPRRSGAAG

SEQ ID NO: 119628 - protein, 20 aa, Artificial Sequence
  Description of Artificial Sequence: Synthetic peptide
  Seed: PRMCSLMQGSTLPRRSGAAG
PRMFSLWQASTVPRRSGAAG

SEQ ID NO: 119629 - protein, 20 aa, Artificial Sequence
  Description of Artificial Sequence: Synthetic peptide
  Seed: PRMCSLMQGSTLPRRSGAAG
PRMISLAQASTAPRRSGAAG

SEQ ID NO: 119630 - protein, 20 aa, Artificial Sequence
  Description of Artificial Sequence: Synthetic peptide
  Seed: PRMCSLMQGSTLPRRSGAAG
PRMISLAQASTIPRRSGAAG

SEQ ID NO: 119631 - protein, 20 aa, Artificial Sequence
  Description of Artificial Sequence: Synthetic peptide
  Seed: PRMCSLMQGSTLPRRSGAAG
PRMISLAQASTLPRRSGAAG

SEQ ID NO: 119632 - protein, 20 aa, Artificial Sequence
  Description of Artificial Sequence: Synthetic peptide
  Seed: PRMCSLMQGSTLPRRSGAAG
PRMISLAQASTMPRRSGAAG

SEQ ID NO: 119633 - protein, 20 aa, Artificial Sequence
  Description of Artificial Sequence: Synthetic peptide
  Seed: PRMCSLMQGSTLPRRSGAAG
PRMISLAQASTVPRRSGAAG

SEQ ID NO: 119634 - protein, 20 aa, Artificial Sequence
  Description of Artificial Sequence: Synthetic peptide
  Seed: PRMCSLMQGSTLPRRSGAAG
PRMISLAQGSTAPRRSGAAG

SEQ ID NO: 119635 - protein, 20 aa, Artificial Sequence
  Description of Artificial Sequence: Synthetic peptide
  Seed: PRMCSLMQGSTLPRRSGAAG
PRMISLAQGSTIPRRSGAAG

SEQ ID NO: 119636 - protein, 20 aa, Artificial Sequence
  Description of Artificial Sequence: Synthetic peptide
  Seed: PRMCSLMQGSTLPRRSGAAG
PRMISLAQGSTLPRRSGAAG

SEQ ID NO: 119637 - protein, 20 aa, Artificial Sequence
  Description of Artificial Sequence: Synthetic peptide
  Seed: PRMCSLMQGSTLPRRSGAAG
PRMISLAQGSTVPRRSGAAG

SEQ ID NO: 119638 - protein, 20 aa, Artificial Sequence
  Description of Artificial Sequence: Synthetic peptide
  Seed: PRMCSLMQGSTLPRRSGAAG
PRMISLAQSSTIPRRSGAAG

SEQ ID NO: 119639 - protein, 20 aa, Artificial Sequence
  Description of Artificial Sequence: Synthetic peptide
  Seed: PRMCSLMQGSTLPRRSGAAG
PRMISLAQSSTLPRRSGAAG

SEQ ID NO: 119640 - protein, 20 aa, Artificial Sequence
  Description of Artificial Sequence: Synthetic peptide
  Seed: PRMCSLMQGSTLPRRSGAAG
PRMISLAQSSTVPRRSGAAG

SEQ ID NO: 119641 - protein, 20 aa, Artificial Sequence
  Description of Artificial Sequence: Synthetic peptide
  Seed: PRMCSLMQGSTLPRRSGAAG
PRMISLFQASTVPRRSGAAG

SEQ ID NO: 119642 - protein, 20 aa, Artificial Sequence
  Description of Artificial Sequence: Synthetic peptide
  Seed: PRMCSLMQGSTLPRRSGAAG
PRMISLFQDSTIPRRSGAAG

SEQ ID NO: 119643 - protein, 20 aa, Artificial Sequence
  Description of Artificial Sequence: Synthetic peptide
  Seed: PRMCSLMQGSTLPRRSGAAG
PRMISLFQDSTVPRRSGAAG

SEQ ID NO: 119644 - protein, 20 aa, Artificial Sequence
  Description of Artificial Sequence: Synthetic peptide
  Seed: PRMCSLMQGSTLPRRSGAAG
PRMISLIQASTAPRRSGAAG

SEQ ID NO: 119645 - protein, 20 aa, Artificial Sequence
  Description of Artificial Sequence: Synthetic peptide
  Seed: PRMCSLMQGSTLPRRSGAAG
PRMISLIQASTIPRRSGAAG

SEQ ID NO: 119646 - protein, 20 aa, Artificial Sequence
  Description of Artificial Sequence: Synthetic peptide
  Seed: PRMCSLMQGSTLPRRSGAAG
PRMISLIQASTLPRRSGAAG

SEQ ID NO: 119647 - protein, 20 aa, Artificial Sequence
  Description of Artificial Sequence: Synthetic peptide
  Seed: PRMCSLMQGSTLPRRSGAAG
PRMISLIQASTMPRRSGAAG

SEQ ID NO: 119648 - protein, 20 aa, Artificial Sequence
  Description of Artificial Sequence: Synthetic peptide
  Seed: PRMCSLMQGSTLPRRSGAAG
PRMISLIQASTSPRRSGAAG

SEQ ID NO: 119649 - protein, 20 aa, Artificial Sequence
  Description of Artificial Sequence: Synthetic peptide
  Seed: PRMCSLMQGSTLPRRSGAAG
PRMISLIQASTTPRRSGAAG

SEQ ID NO: 119650 - protein, 20 aa, Artificial Sequence
  Description of Artificial Sequence: Synthetic peptide
  Seed: PRMCSLMQGSTLPRRSGAAG
PRMISLIQASTVPRRSGAAG

SEQ ID NO: 119651 - protein, 20 aa, Artificial Sequence
  Description of Artificial Sequence: Synthetic peptide
  Seed: PRMCSLMQGSTLPRRSGAAG
PRMISLIQGSTAPRRSGAAG

SEQ ID NO: 119652 - protein, 20 aa, Artificial Sequence
  Description of Artificial Sequence: Synthetic peptide
  Seed: PRMCSLMQGSTLPRRSGAAG
PRMISLIQGSTIPRRSGAAG

SEQ ID NO: 119653 - protein, 20 aa, Artificial Sequence
  Description of Artificial Sequence: Synthetic peptide
  Seed: PRMCSLMQGSTLPRRSGAAG
PRMISLIQGSTLPRRSGAAG

SEQ ID NO: 119654 - protein, 20 aa, Artificial Sequence
  Description of Artificial Sequence: Synthetic peptide
  Seed: PRMCSLMQGSTLPRRSGAAG
PRMISLIQGSTVPRRSGAAG

SEQ ID NO: 119655 - protein, 20 aa, Artificial Sequence
  Description of Artificial Sequence: Synthetic peptide
  Seed: PRMCSLMQGSTLPRRSGAAG
PRMISLIQPSTAPRRSGAAG

SEQ ID NO: 119656 - protein, 20 aa, Artificial Sequence
  Description of Artificial Sequence: Synthetic peptide
  Seed: PRMCSLMQGSTLPRRSGAAG
PRMISLIQPSTIPRRSGAAG

SEQ ID NO: 119657 - protein, 20 aa, Artificial Sequence
  Description of Artificial Sequence: Synthetic peptide
  Seed: PRMCSLMQGSTLPRRSGAAG
PRMISLIQPSTLPRRSGAAG

SEQ ID NO: 119658 - protein, 20 aa, Artificial Sequence
  Description of Artificial Sequence: Synthetic peptide
  Seed: PRMCSLMQGSTLPRRSGAAG
PRMISLIQPSTVPRRSGAAG

SEQ ID NO: 119659 - protein, 20 aa, Artificial Sequence
  Description of Artificial Sequence: Synthetic peptide
  Seed: PRMCSLMQGSTLPRRSGAAG
PRMISLIQSSTAPRRSGAAG

SEQ ID NO: 119660 - protein, 20 aa, Artificial Sequence
  Description of Artificial Sequence: Synthetic peptide
  Seed: PRMCSLMQGSTLPRRSGAAG
PRMISLIQSSTIPRRSGAAG

SEQ ID NO: 119661 - protein, 20 aa, Artificial Sequence
  Description of Artificial Sequence: Synthetic peptide
  Seed: PRMCSLMQGSTLPRRSGAAG
PRMISLIQSSTLPRRSGAAG

SEQ ID NO: 119662 - protein, 20 aa, Artificial Sequence
  Description of Artificial Sequence: Synthetic peptide
  Seed: PRMCSLMQGSTLPRRSGAAG
PRMISLIQSSTVPRRSGAAG

SEQ ID NO: 119663 - protein, 20 aa, Artificial Sequence
  Description of Artificial Sequence: Synthetic peptide
  Seed: PRMCSLMQGSTLPRRSGAAG
PRMISLLQASTAPRRSGAAG

SEQ ID NO: 119664 - protein, 20 aa, Artificial Sequence
  Description of Artificial Sequence: Synthetic peptide
  Seed: PRMCSLMQGSTLPRRSGAAG
PRMISLLQASTCPRRSGAAG

SEQ ID NO: 119665 - protein, 20 aa, Artificial Sequence
  Description of Artificial Sequence: Synthetic peptide
  Seed: PRMCSLMQGSTLPRRSGAAG
PRMISLLQASTGPRRSGAAG

SEQ ID NO: 119666 - protein, 20 aa, Artificial Sequence
  Description of Artificial Sequence: Synthetic peptide
  Seed: PRMCSLMQGSTLPRRSGAAG
PRMISLLQASTIPRRSGAAG

SEQ ID NO: 119667 - protein, 20 aa, Artificial Sequence
  Description of Artificial Sequence: Synthetic peptide
  Seed: PRMCSLMQGSTLPRRSGAAG
PRMISLLQASTLPRRSGAAG

SEQ ID NO: 119668 - protein, 20 aa, Artificial Sequence
  Description of Artificial Sequence: Synthetic peptide
  Seed: PRMCSLMQGSTLPRRSGAAG
PRMISLLQASTMPRRSGAAG

SEQ ID NO: 119669 - protein, 20 aa, Artificial Sequence
  Description of Artificial Sequence: Synthetic peptide
  Seed: PRMCSLMQGSTLPRRSGAAG
PRMISLLQASTSPRRSGAAG

SEQ ID NO: 119670 - protein, 20 aa, Artificial Sequence
  Description of Artificial Sequence: Synthetic peptide
  Seed: PRMCSLMQGSTLPRRSGAAG
PRMISLLQASTTPRRSGAAG

SEQ ID NO: 119671 - protein, 20 aa, Artificial Sequence
  Description of Artificial Sequence: Synthetic peptide
  Seed: PRMCSLMQGSTLPRRSGAAG
PRMISLLQASTVPRRSGAAG

SEQ ID NO: 119672 - protein, 20 aa, Artificial Sequence
  Description of Artificial Sequence: Synthetic peptide
  Seed: PRMCSLMQGSTLPRRSGAAG
PRMISLLQGSTAPRRSGAAG

SEQ ID NO: 119673 - protein, 20 aa, Artificial Sequence
  Description of Artificial Sequence: Synthetic peptide
  Seed: PRMCSLMQGSTLPRRSGAAG
PRMISLLQGSTGPRRSGAAG

SEQ ID NO: 119674 - protein, 20 aa, Artificial Sequence
  Description of Artificial Sequence: Synthetic peptide
  Seed: PRMCSLMQGSTLPRRSGAAG
PRMISLLQGSTIPRRSGAAG

SEQ ID NO: 119675 - protein, 20 aa, Artificial Sequence
  Description of Artificial Sequence: Synthetic peptide
  Seed: PRMCSLMQGSTLPRRSGAAG
PRMISLLQGSTLPRRSGAAG

SEQ ID NO: 119676 - protein, 20 aa, Artificial Sequence
  Description of Artificial Sequence: Synthetic peptide
  Seed: PRMCSLMQGSTLPRRSGAAG
PRMISLLQGSTMPRRSGAAG

SEQ ID NO: 119677 - protein, 20 aa, Artificial Sequence
  Description of Artificial Sequence: Synthetic peptide
  Seed: PRMCSLMQGSTLPRRSGAAG
PRMISLLQGSTSPRRSGAAG

SEQ ID NO: 119678 - protein, 20 aa, Artificial Sequence
  Description of Artificial Sequence: Synthetic peptide
  Seed: PRMCSLMQGSTLPRRSGAAG
PRMISLLQGSTTPRRSGAAG

SEQ ID NO: 119679 - protein, 20 aa, Artificial Sequence
  Description of Artificial Sequence: Synthetic peptide
  Seed: PRMCSLMQGSTLPRRSGAAG
PRMISLLQGSTVPRRSGAAG

SEQ ID NO: 119680 - protein, 20 aa, Artificial Sequence
  Description of Artificial Sequence: Synthetic peptide
  Seed: PRMCSLMQGSTLPRRSGAAG
PRMISLLQNSTAPRRSGAAG

SEQ ID NO: 119681 - protein, 20 aa, Artificial Sequence
  Description of Artificial Sequence: Synthetic peptide
  Seed: PRMCSLMQGSTLPRRSGAAG
PRMISLLQNSTIPRRSGAAG

SEQ ID NO: 119682 - protein, 20 aa, Artificial Sequence
  Description of Artificial Sequence: Synthetic peptide
  Seed: PRMCSLMQGSTLPRRSGAAG
PRMISLLQNSTLPRRSGAAG

SEQ ID NO: 119683 - protein, 20 aa, Artificial Sequence
  Description of Artificial Sequence: Synthetic peptide
  Seed: PRMCSLMQGSTLPRRSGAAG
PRMISLLQNSTVPRRSGAAG

SEQ ID NO: 119684 - protein, 20 aa, Artificial Sequence
  Description of Artificial Sequence: Synthetic peptide
  Seed: PRMCSLMQGSTLPRRSGAAG
PRMISLLQPSTAPRRSGAAG

SEQ ID NO: 119685 - protein, 20 aa, Artificial Sequence
  Description of Artificial Sequence: Synthetic peptide
  Seed: PRMCSLMQGSTLPRRSGAAG
PRMISLLQPSTIPRRSGAAG

SEQ ID NO: 119686 - protein, 20 aa, Artificial Sequence
  Description of Artificial Sequence: Synthetic peptide
  Seed: PRMCSLMQGSTLPRRSGAAG
PRMISLLQPSTLPRRSGAAG

SEQ ID NO: 119687 - protein, 20 aa, Artificial Sequence
  Description of Artificial Sequence: Synthetic peptide
  Seed: PRMCSLMQGSTLPRRSGAAG
PRMISLLQPSTMPRRSGAAG

SEQ ID NO: 119688 - protein, 20 aa, Artificial Sequence
  Description of Artificial Sequence: Synthetic peptide
  Seed: PRMCSLMQGSTLPRRSGAAG
PRMISLLQPSTSPRRSGAAG

SEQ ID NO: 119689 - protein, 20 aa, Artificial Sequence
  Description of Artificial Sequence: Synthetic peptide
  Seed: PRMCSLMQGSTLPRRSGAAG
PRMISLLQPSTTPRRSGAAG

SEQ ID NO: 119690 - protein, 20 aa, Artificial Sequence
  Description of Artificial Sequence: Synthetic peptide
  Seed: PRMCSLMQGSTLPRRSGAAG
PRMISLLQPSTVPRRSGAAG

SEQ ID NO: 119691 - protein, 20 aa, Artificial Sequence
  Description of Artificial Sequence: Synthetic peptide
  Seed: PRMCSLMQGSTLPRRSGAAG
PRMISLLQSSTAPRRSGAAG

SEQ ID NO: 119692 - protein, 20 aa, Artificial Sequence
  Description of Artificial Sequence: Synthetic peptide
  Seed: PRMCSLMQGSTLPRRSGAAG
PRMISLLQSSTIPRRSGAAG

SEQ ID NO: 119693 - protein, 20 aa, Artificial Sequence
  Description of Artificial Sequence: Synthetic peptide
  Seed: PRMCSLMQGSTLPRRSGAAG
PRMISLLQSSTLPRRSGAAG

SEQ ID NO: 119694 - protein, 20 aa, Artificial Sequence
  Description of Artificial Sequence: Synthetic peptide
  Seed: PRMCSLMQGSTLPRRSGAAG
PRMISLLQSSTMPRRSGAAG

SEQ ID NO: 119695 - protein, 20 aa, Artificial Sequence
  Description of Artificial Sequence: Synthetic peptide
  Seed: PRMCSLMQGSTLPRRSGAAG
PRMISLLQSSTSPRRSGAAG

SEQ ID NO: 119696 - protein, 20 aa, Artificial Sequence
  Description of Artificial Sequence: Synthetic peptide
  Seed: PRMCSLMQGSTLPRRSGAAG
PRMISLLQSSTTPRRSGAAG

SEQ ID NO: 119697 - protein, 20 aa, Artificial Sequence
  Description of Artificial Sequence: Synthetic peptide
  Seed: PRMCSLMQGSTLPRRSGAAG
PRMISLLQSSTVPRRSGAAG

SEQ ID NO: 119698 - protein, 20 aa, Artificial Sequence
  Description of Artificial Sequence: Synthetic peptide
  Seed: PRMCSLMQGSTLPRRSGAAG
PRMISLLQTSTAPRRSGAAG

SEQ ID NO: 119699 - protein, 20 aa, Artificial Sequence
  Description of Artificial Sequence: Synthetic peptide
  Seed: PRMCSLMQGSTLPRRSGAAG
PRMISLLQTSTIPRRSGAAG

SEQ ID NO: 119700 - protein, 20 aa, Artificial Sequence
  Description of Artificial Sequence: Synthetic peptide
  Seed: PRMCSLMQGSTLPRRSGAAG
PRMISLLQTSTLPRRSGAAG

SEQ ID NO: 119701 - protein, 20 aa, Artificial Sequence
  Description of Artificial Sequence: Synthetic peptide
  Seed: PRMCSLMQGSTLPRRSGAAG
PRMISLLQTSTVPRRSGAAG

SEQ ID NO: 119702 - protein, 20 aa, Artificial Sequence
  Description of Artificial Sequence: Synthetic peptide
  Seed: PRMCSLMQGSTLPRRSGAAG
PRMISLLQVSTAPRRSGAAG

SEQ ID NO: 119703 - protein, 20 aa, Artificial Sequence
  Description of Artificial Sequence: Synthetic peptide
  Seed: PRMCSLMQGSTLPRRSGAAG
PRMISLLQVSTVPRRSGAAG

SEQ ID NO: 119704 - protein, 20 aa, Artificial Sequence
  Description of Artificial Sequence: Synthetic peptide
  Seed: PRMCSLMQGSTLPRRSGAAG
PRMISLMQASTAPRRSGAAG

SEQ ID NO: 119705 - protein, 20 aa, Artificial Sequence
  Description of Artificial Sequence: Synthetic peptide
  Seed: PRMCSLMQGSTLPRRSGAAG
PRMISLMQASTCPRRSGAAG

SEQ ID NO: 119706 - protein, 20 aa, Artificial Sequence
  Description of Artificial Sequence: Synthetic peptide
  Seed: PRMCSLMQGSTLPRRSGAAG
PRMISLMQASTGPRRSGAAG

SEQ ID NO: 119707 - protein, 20 aa, Artificial Sequence
  Description of Artificial Sequence: Synthetic peptide
  Seed: PRMCSLMQGSTLPRRSGAAG
PRMISLMQASTIPRRSGAAG

SEQ ID NO: 119708 - protein, 20 aa, Artificial Sequence
  Description of Artificial Sequence: Synthetic peptide
  Seed: PRMCSLMQGSTLPRRSGAAG
PRMISLMQASTLPRRSGAAG

SEQ ID NO: 119709 - protein, 20 aa, Artificial Sequence
  Description of Artificial Sequence: Synthetic peptide
  Seed: PRMCSLMQGSTLPRRSGAAG
PRMISLMQASTMPRRSGAAG

SEQ ID NO: 119710 - protein, 20 aa, Artificial Sequence
  Description of Artificial Sequence: Synthetic peptide
  Seed: PRMCSLMQGSTLPRRSGAAG
PRMISLMQASTSPRRSGAAG

SEQ ID NO: 119711 - protein, 20 aa, Artificial Sequence
  Description of Artificial Sequence: Synthetic peptide
  Seed: PRMCSLMQGSTLPRRSGAAG
PRMISLMQASTTPRRSGAAG

SEQ ID NO: 119712 - protein, 20 aa, Artificial Sequence
  Description of Artificial Sequence: Synthetic peptide
  Seed: PRMCSLMQGSTLPRRSGAAG
PRMISLMQASTVPRRSGAAG

SEQ ID NO: 119713 - protein, 20 aa, Artificial Sequence
  Description of Artificial Sequence: Synthetic peptide
  Seed: PRMCSLMQGSTLPRRSGAAG
PRMISLMQGSTAPRRSGAAG

SEQ ID NO: 119714 - protein, 20 aa, Artificial Sequence
  Description of Artificial Sequence: Synthetic peptide
  Seed: PRMCSLMQGSTLPRRSGAAG
PRMISLMQGSTGPRRSGAAG

SEQ ID NO: 119715 - protein, 20 aa, Artificial Sequence
  Description of Artificial Sequence: Synthetic peptide
  Seed: PRMCSLMQGSTLPRRSGAAG
PRMISLMQGSTIPRRSGAAG

SEQ ID NO: 119716 - protein, 20 aa, Artificial Sequence
  Description of Artificial Sequence: Synthetic peptide
  Seed: PRMCSLMQGSTLPRRSGAAG
PRMISLMQGSTLPRRSGAAG

SEQ ID NO: 119717 - protein, 20 aa, Artificial Sequence
  Description of Artificial Sequence: Synthetic peptide
  Seed: PRMCSLMQGSTLPRRSGAAG
PRMISLMQGSTMPRRSGAAG

SEQ ID NO: 119718 - protein, 20 aa, Artificial Sequence
  Description of Artificial Sequence: Synthetic peptide
  Seed: PRMCSLMQGSTLPRRSGAAG
PRMISLMQGSTSPRRSGAAG

SEQ ID NO: 119719 - protein, 20 aa, Artificial Sequence
  Description of Artificial Sequence: Synthetic peptide
  Seed: PRMCSLMQGSTLPRRSGAAG
PRMISLMQGSTTPRRSGAAG

SEQ ID NO: 119720 - protein, 20 aa, Artificial Sequence
  Description of Artificial Sequence: Synthetic peptide
  Seed: PRMCSLMQGSTLPRRSGAAG
PRMISLMQGSTVPRRSGAAG

SEQ ID NO: 119721 - protein, 20 aa, Artificial Sequence
  Description of Artificial Sequence: Synthetic peptide
  Seed: PRMCSLMQGSTLPRRSGAAG
PRMISLMQNSTAPRRSGAAG

SEQ ID NO: 119722 - protein, 20 aa, Artificial Sequence
  Description of Artificial Sequence: Synthetic peptide
  Seed: PRMCSLMQGSTLPRRSGAAG
PRMISLMQNSTIPRRSGAAG

SEQ ID NO: 119723 - protein, 20 aa, Artificial Sequence
  Description of Artificial Sequence: Synthetic peptide
  Seed: PRMCSLMQGSTLPRRSGAAG
PRMISLMQNSTLPRRSGAAG

SEQ ID NO: 119724 - protein, 20 aa, Artificial Sequence
  Description of Artificial Sequence: Synthetic peptide
  Seed: PRMCSLMQGSTLPRRSGAAG
PRMISLMQNSTVPRRSGAAG

SEQ ID NO: 119725 - protein, 20 aa, Artificial Sequence
  Description of Artificial Sequence: Synthetic peptide
  Seed: PRMCSLMQGSTLPRRSGAAG
PRMISLMQPSTAPRRSGAAG

SEQ ID NO: 119726 - protein, 20 aa, Artificial Sequence
  Description of Artificial Sequence: Synthetic peptide
  Seed: PRMCSLMQGSTLPRRSGAAG
PRMISLMQPSTIPRRSGAAG

SEQ ID NO: 119727 - protein, 20 aa, Artificial Sequence
  Description of Artificial Sequence: Synthetic peptide
  Seed: PRMCSLMQGSTLPRRSGAAG
PRMISLMQPSTLPRRSGAAG

SEQ ID NO: 119728 - protein, 20 aa, Artificial Sequence
  Description of Artificial Sequence: Synthetic peptide
  Seed: PRMCSLMQGSTLPRRSGAAG
PRMISLMQPSTMPRRSGAAG

SEQ ID NO: 119729 - protein, 20 aa, Artificial Sequence
  Description of Artificial Sequence: Synthetic peptide
  Seed: PRMCSLMQGSTLPRRSGAAG
PRMISLMQPSTSPRRSGAAG

SEQ ID NO: 119730 - protein, 20 aa, Artificial Sequence
  Description of Artificial Sequence: Synthetic peptide
  Seed: PRMCSLMQGSTLPRRSGAAG
PRMISLMQPSTTPRRSGAAG

SEQ ID NO: 119731 - protein, 20 aa, Artificial Sequence
  Description of Artificial Sequence: Synthetic peptide
  Seed: PRMCSLMQGSTLPRRSGAAG
PRMISLMQPSTVPRRSGAAG

SEQ ID NO: 119732 - protein, 20 aa, Artificial Sequence
  Description of Artificial Sequence: Synthetic peptide
  Seed: PRMCSLMQGSTLPRRSGAAG
PRMISLMQSSTAPRRSGAAG

SEQ ID NO: 119733 - protein, 20 aa, Artificial Sequence
  Description of Artificial Sequence: Synthetic peptide
  Seed: PRMCSLMQGSTLPRRSGAAG
PRMISLMQSSTIPRRSGAAG

SEQ ID NO: 119734 - protein, 20 aa, Artificial Sequence
  Description of Artificial Sequence: Synthetic peptide
  Seed: PRMCSLMQGSTLPRRSGAAG
PRMISLMQSSTLPRRSGAAG

SEQ ID NO: 119735 - protein, 20 aa, Artificial Sequence
  Description of Artificial Sequence: Synthetic peptide
  Seed: PRMCSLMQGSTLPRRSGAAG
PRMISLMQSSTMPRRSGAAG

SEQ ID NO: 119736 - protein, 20 aa, Artificial Sequence
  Description of Artificial Sequence: Synthetic peptide
  Seed: PRMCSLMQGSTLPRRSGAAG
PRMISLMQSSTSPRRSGAAG

SEQ ID NO: 119737 - protein, 20 aa, Artificial Sequence
  Description of Artificial Sequence: Synthetic peptide
  Seed: PRMCSLMQGSTLPRRSGAAG
PRMISLMQSSTTPRRSGAAG

SEQ ID NO: 119738 - protein, 20 aa, Artificial Sequence
  Description of Artificial Sequence: Synthetic peptide
  Seed: PRMCSLMQGSTLPRRSGAAG
PRMISLMQSSTVPRRSGAAG

SEQ ID NO: 119739 - protein, 20 aa, Artificial Sequence
  Description of Artificial Sequence: Synthetic peptide
  Seed: PRMCSLMQGSTLPRRSGAAG
PRMISLMQTSTAPRRSGAAG

SEQ ID NO: 119740 - protein, 20 aa, Artificial Sequence
  Description of Artificial Sequence: Synthetic peptide
  Seed: PRMCSLMQGSTLPRRSGAAG
PRMISLMQTSTIPRRSGAAG

SEQ ID NO: 119741 - protein, 20 aa, Artificial Sequence
  Description of Artificial Sequence: Synthetic peptide
  Seed: PRMCSLMQGSTLPRRSGAAG
PRMISLMQTSTLPRRSGAAG

SEQ ID NO: 119742 - protein, 20 aa, Artificial Sequence
  Description of Artificial Sequence: Synthetic peptide
  Seed: PRMCSLMQGSTLPRRSGAAG
PRMISLMQTSTVPRRSGAAG

SEQ ID NO: 119743 - protein, 20 aa, Artificial Sequence
  Description of Artificial Sequence: Synthetic peptide
  Seed: PRMCSLMQGSTLPRRSGAAG
PRMISLMQVSTAPRRSGAAG

SEQ ID NO: 119744 - protein, 20 aa, Artificial Sequence
  Description of Artificial Sequence: Synthetic peptide
  Seed: PRMCSLMQGSTLPRRSGAAG
PRMISLMQVSTVPRRSGAAG

SEQ ID NO: 119745 - protein, 20 aa, Artificial Sequence
  Description of Artificial Sequence: Synthetic peptide
  Seed: PRMCSLMQGSTLPRRSGAAG
PRMISLQQASTAPRRSGAAG

SEQ ID NO: 119746 - protein, 20 aa, Artificial Sequence
  Description of Artificial Sequence: Synthetic peptide
  Seed: PRMCSLMQGSTLPRRSGAAG
PRMISLQQASTIPRRSGAAG

SEQ ID NO: 119747 - protein, 20 aa, Artificial Sequence
  Description of Artificial Sequence: Synthetic peptide
  Seed: PRMCSLMQGSTLPRRSGAAG
PRMISLQQASTLPRRSGAAG

SEQ ID NO: 119748 - protein, 20 aa, Artificial Sequence
  Description of Artificial Sequence: Synthetic peptide
  Seed: PRMCSLMQGSTLPRRSGAAG
PRMISLQQASTVPRRSGAAG

SEQ ID NO: 119749 - protein, 20 aa, Artificial Sequence
  Description of Artificial Sequence: Synthetic peptide
  Seed: PRMCSLMQGSTLPRRSGAAG
PRMISLQQGSTAPRRSGAAG

SEQ ID NO: 119750 - protein, 20 aa, Artificial Sequence
  Description of Artificial Sequence: Synthetic peptide
  Seed: PRMCSLMQGSTLPRRSGAAG
PRMISLQQGSTIPRRSGAAG

SEQ ID NO: 119751 - protein, 20 aa, Artificial Sequence
  Description of Artificial Sequence: Synthetic peptide
  Seed: PRMCSLMQGSTLPRRSGAAG
PRMISLQQGSTLPRRSGAAG

SEQ ID NO: 119752 - protein, 20 aa, Artificial Sequence
  Description of Artificial Sequence: Synthetic peptide
  Seed: PRMCSLMQGSTLPRRSGAAG
PRMISLQQGSTVPRRSGAAG

SEQ ID NO: 119753 - protein, 20 aa, Artificial Sequence
  Description of Artificial Sequence: Synthetic peptide
  Seed: PRMCSLMQGSTLPRRSGAAG
PRMISLQQSSTLPRRSGAAG

SEQ ID NO: 119754 - protein, 20 aa, Artificial Sequence
  Description of Artificial Sequence: Synthetic peptide
  Seed: PRMCSLMQGSTLPRRSGAAG
PRMISLQQSSTVPRRSGAAG

SEQ ID NO: 119755 - protein, 20 aa, Artificial Sequence
  Description of Artificial Sequence: Synthetic peptide
  Seed: PRMCSLMQGSTLPRRSGAAG
PRMISLVQASTAPRRSGAAG

SEQ ID NO: 119756 - protein, 20 aa, Artificial Sequence
  Description of Artificial Sequence: Synthetic peptide
  Seed: PRMCSLMQGSTLPRRSGAAG
PRMISLVQASTIPRRSGAAG

SEQ ID NO: 119757 - protein, 20 aa, Artificial Sequence
  Description of Artificial Sequence: Synthetic peptide
  Seed: PRMCSLMQGSTLPRRSGAAG
PRMISLVQASTLPRRSGAAG

SEQ ID NO: 119758 - protein, 20 aa, Artificial Sequence
  Description of Artificial Sequence: Synthetic peptide
  Seed: PRMCSLMQGSTLPRRSGAAG
PRMISLVQASTVPRRSGAAG

SEQ ID NO: 119759 - protein, 20 aa, Artificial Sequence
  Description of Artificial Sequence: Synthetic peptide
  Seed: PRMCSLMQGSTLPRRSGAAG
PRMISLVQGSTAPRRSGAAG

SEQ ID NO: 119760 - protein, 20 aa, Artificial Sequence
  Description of Artificial Sequence: Synthetic peptide
  Seed: PRMCSLMQGSTLPRRSGAAG
PRMISLVQGSTIPRRSGAAG

SEQ ID NO: 119761 - protein, 20 aa, Artificial Sequence
  Description of Artificial Sequence: Synthetic peptide
  Seed: PRMCSLMQGSTLPRRSGAAG
PRMISLVQGSTLPRRSGAAG

SEQ ID NO: 119762 - protein, 20 aa, Artificial Sequence
  Description of Artificial Sequence: Synthetic peptide
  Seed: PRMCSLMQGSTLPRRSGAAG
PRMISLVQGSTVPRRSGAAG

SEQ ID NO: 119763 - protein, 20 aa, Artificial Sequence
  Description of Artificial Sequence: Synthetic peptide
  Seed: PRMCSLMQGSTLPRRSGAAG
PRMLSLAQASTAPRRSGAAG

SEQ ID NO: 119764 - protein, 20 aa, Artificial Sequence
  Description of Artificial Sequence: Synthetic peptide
  Seed: PRMCSLMQGSTLPRRSGAAG
PRMLSLAQASTIPRRSGAAG

SEQ ID NO: 119765 - protein, 20 aa, Artificial Sequence
  Description of Artificial Sequence: Synthetic peptide
  Seed: PRMCSLMQGSTLPRRSGAAG
PRMLSLAQASTLPRRSGAAG

SEQ ID NO: 119766 - protein, 20 aa, Artificial Sequence
  Description of Artificial Sequence: Synthetic peptide
  Seed: PRMCSLMQGSTLPRRSGAAG
PRMLSLAQASTVPRRSGAAG

SEQ ID NO: 119767 - protein, 20 aa, Artificial Sequence
  Description of Artificial Sequence: Synthetic peptide
  Seed: PRMCSLMQGSTLPRRSGAAG
PRMLSLAQGSTLPRRSGAAG

SEQ ID NO: 119768 - protein, 20 aa, Artificial Sequence
  Description of Artificial Sequence: Synthetic peptide
  Seed: PRMCSLMQGSTLPRRSGAAG
PRMLSLAQGSTVPRRSGAAG

SEQ ID NO: 119769 - protein, 20 aa, Artificial Sequence
  Description of Artificial Sequence: Synthetic peptide
  Seed: PRMCSLMQGSTLPRRSGAAG
PRMLSLIQASTAPRRSGAAG

SEQ ID NO: 119770 - protein, 20 aa, Artificial Sequence
  Description of Artificial Sequence: Synthetic peptide
  Seed: PRMCSLMQGSTLPRRSGAAG
PRMLSLIQASTIPRRSGAAG

SEQ ID NO: 119771 - protein, 20 aa, Artificial Sequence
  Description of Artificial Sequence: Synthetic peptide
  Seed: PRMCSLMQGSTLPRRSGAAG
PRMLSLIQASTLPRRSGAAG

SEQ ID NO: 119772 - protein, 20 aa, Artificial Sequence
  Description of Artificial Sequence: Synthetic peptide
  Seed: PRMCSLMQGSTLPRRSGAAG
PRMLSLIQASTVPRRSGAAG

SEQ ID NO: 119773 - protein, 20 aa, Artificial Sequence
  Description of Artificial Sequence: Synthetic peptide
  Seed: PRMCSLMQGSTLPRRSGAAG
PRMLSLIQGSTAPRRSGAAG

SEQ ID NO: 119774 - protein, 20 aa, Artificial Sequence
  Description of Artificial Sequence: Synthetic peptide
  Seed: PRMCSLMQGSTLPRRSGAAG
PRMLSLIQGSTIPRRSGAAG

SEQ ID NO: 119775 - protein, 20 aa, Artificial Sequence
  Description of Artificial Sequence: Synthetic peptide
  Seed: PRMCSLMQGSTLPRRSGAAG
PRMLSLIQGSTLPRRSGAAG

SEQ ID NO: 119776 - protein, 20 aa, Artificial Sequence
  Description of Artificial Sequence: Synthetic peptide
  Seed: PRMCSLMQGSTLPRRSGAAG
PRMLSLIQGSTVPRRSGAAG

SEQ ID NO: 119777 - protein, 20 aa, Artificial Sequence
  Description of Artificial Sequence: Synthetic peptide
  Seed: PRMCSLMQGSTLPRRSGAAG
PRMLSLIQSSTAPRRSGAAG

SEQ ID NO: 119778 - protein, 20 aa, Artificial Sequence
  Description of Artificial Sequence: Synthetic peptide
  Seed: PRMCSLMQGSTLPRRSGAAG
PRMLSLIQSSTIPRRSGAAG

SEQ ID NO: 119779 - protein, 20 aa, Artificial Sequence
  Description of Artificial Sequence: Synthetic peptide
  Seed: PRMCSLMQGSTLPRRSGAAG
PRMLSLIQSSTLPRRSGAAG

SEQ ID NO: 119780 - protein, 20 aa, Artificial Sequence
  Description of Artificial Sequence: Synthetic peptide
  Seed: PRMCSLMQGSTLPRRSGAAG
PRMLSLIQSSTVPRRSGAAG

SEQ ID NO: 119781 - protein, 20 aa, Artificial Sequence
  Description of Artificial Sequence: Synthetic peptide
  Seed: PRMCSLMQGSTLPRRSGAAG
PRMLSLLQASTAPRRSGAAG

SEQ ID NO: 119782 - protein, 20 aa, Artificial Sequence
  Description of Artificial Sequence: Synthetic peptide
  Seed: PRMCSLMQGSTLPRRSGAAG
PRMLSLLQASTGPRRSGAAG

SEQ ID NO: 119783 - protein, 20 aa, Artificial Sequence
  Description of Artificial Sequence: Synthetic peptide
  Seed: PRMCSLMQGSTLPRRSGAAG
PRMLSLLQASTIPRRSGAAG

SEQ ID NO: 119784 - protein, 20 aa, Artificial Sequence
  Description of Artificial Sequence: Synthetic peptide
  Seed: PRMCSLMQGSTLPRRSGAAG
PRMLSLLQASTLPRRSGAAG

SEQ ID NO: 119785 - protein, 20 aa, Artificial Sequence
  Description of Artificial Sequence: Synthetic peptide
  Seed: PRMCSLMQGSTLPRRSGAAG
PRMLSLLQASTMPRRSGAAG

SEQ ID NO: 119786 - protein, 20 aa, Artificial Sequence
  Description of Artificial Sequence: Synthetic peptide
  Seed: PRMCSLMQGSTLPRRSGAAG
PRMLSLLQASTSPRRSGAAG

SEQ ID NO: 119787 - protein, 20 aa, Artificial Sequence
  Description of Artificial Sequence: Synthetic peptide
  Seed: PRMCSLMQGSTLPRRSGAAG
PRMLSLLQASTTPRRSGAAG

SEQ ID NO: 119788 - protein, 20 aa, Artificial Sequence
  Description of Artificial Sequence: Synthetic peptide
  Seed: PRMCSLMQGSTLPRRSGAAG
PRMLSLLQASTVPRRSGAAG

SEQ ID NO: 119789 - protein, 20 aa, Artificial Sequence
  Description of Artificial Sequence: Synthetic peptide
  Seed: PRMCSLMQGSTLPRRSGAAG
PRMLSLLQGSTAPRRSGAAG

SEQ ID NO: 119790 - protein, 20 aa, Artificial Sequence
  Description of Artificial Sequence: Synthetic peptide
  Seed: PRMCSLMQGSTLPRRSGAAG
PRMLSLLQGSTIPRRSGAAG

SEQ ID NO: 119791 - protein, 20 aa, Artificial Sequence
  Description of Artificial Sequence: Synthetic peptide
  Seed: PRMCSLMQGSTLPRRSGAAG
PRMLSLLQGSTLPRRSGAAG

SEQ ID NO: 119792 - protein, 20 aa, Artificial Sequence
  Description of Artificial Sequence: Synthetic peptide
  Seed: PRMCSLMQGSTLPRRSGAAG
PRMLSLLQGSTMPRRSGAAG

SEQ ID NO: 119793 - protein, 20 aa, Artificial Sequence
  Description of Artificial Sequence: Synthetic peptide
  Seed: PRMCSLMQGSTLPRRSGAAG
PRMLSLLQGSTSPRRSGAAG

SEQ ID NO: 119794 - protein, 20 aa, Artificial Sequence
  Description of Artificial Sequence: Synthetic peptide
  Seed: PRMCSLMQGSTLPRRSGAAG
PRMLSLLQGSTTPRRSGAAG

SEQ ID NO: 119795 - protein, 20 aa, Artificial Sequence
  Description of Artificial Sequence: Synthetic peptide
  Seed: PRMCSLMQGSTLPRRSGAAG
PRMLSLLQGSTVPRRSGAAG

SEQ ID NO: 119796 - protein, 20 aa, Artificial Sequence
  Description of Artificial Sequence: Synthetic peptide
  Seed: PRMCSLMQGSTLPRRSGAAG
PRMLSLLQNSTAPRRSGAAG

SEQ ID NO: 119797 - protein, 20 aa, Artificial Sequence
  Description of Artificial Sequence: Synthetic peptide
  Seed: PRMCSLMQGSTLPRRSGAAG
PRMLSLLQNSTIPRRSGAAG

SEQ ID NO: 119798 - protein, 20 aa, Artificial Sequence
  Description of Artificial Sequence: Synthetic peptide
  Seed: PRMCSLMQGSTLPRRSGAAG
PRMLSLLQNSTLPRRSGAAG

SEQ ID NO: 119799 - protein, 20 aa, Artificial Sequence
  Description of Artificial Sequence: Synthetic peptide
  Seed: PRMCSLMQGSTLPRRSGAAG
PRMLSLLQNSTVPRRSGAAG

SEQ ID NO: 119800 - protein, 20 aa, Artificial Sequence
  Description of Artificial Sequence: Synthetic peptide
  Seed: PRMCSLMQGSTLPRRSGAAG
PRMLSLLQPSTAPRRSGAAG

SEQ ID NO: 119801 - protein, 20 aa, Artificial Sequence
  Description of Artificial Sequence: Synthetic peptide
  Seed: PRMCSLMQGSTLPRRSGAAG
PRMLSLLQPSTIPRRSGAAG

SEQ ID NO: 119802 - protein, 20 aa, Artificial Sequence
  Description of Artificial Sequence: Synthetic peptide
  Seed: PRMCSLMQGSTLPRRSGAAG
PRMLSLLQPSTLPRRSGAAG

SEQ ID NO: 119803 - protein, 20 aa, Artificial Sequence
  Description of Artificial Sequence: Synthetic peptide
  Seed: PRMCSLMQGSTLPRRSGAAG
PRMLSLLQPSTMPRRSGAAG

SEQ ID NO: 119804 - protein, 20 aa, Artificial Sequence
  Description of Artificial Sequence: Synthetic peptide
  Seed: PRMCSLMQGSTLPRRSGAAG
PRMLSLLQPSTVPRRSGAAG

SEQ ID NO: 119805 - protein, 20 aa, Artificial Sequence
  Description of Artificial Sequence: Synthetic peptide
  Seed: PRMCSLMQGSTLPRRSGAAG
PRMLSLLQSSTAPRRSGAAG

SEQ ID NO: 119806 - protein, 20 aa, Artificial Sequence
  Description of Artificial Sequence: Synthetic peptide
  Seed: PRMCSLMQGSTLPRRSGAAG
PRMLSLLQSSTIPRRSGAAG

SEQ ID NO: 119807 - protein, 20 aa, Artificial Sequence
  Description of Artificial Sequence: Synthetic peptide
  Seed: PRMCSLMQGSTLPRRSGAAG
PRMLSLLQSSTLPRRSGAAG

SEQ ID NO: 119808 - protein, 20 aa, Artificial Sequence
  Description of Artificial Sequence: Synthetic peptide
  Seed: PRMCSLMQGSTLPRRSGAAG
PRMLSLLQSSTMPRRSGAAG

SEQ ID NO: 119809 - protein, 20 aa, Artificial Sequence
  Description of Artificial Sequence: Synthetic peptide
  Seed: PRMCSLMQGSTLPRRSGAAG
PRMLSLLQSSTTPRRSGAAG

SEQ ID NO: 119810 - protein, 20 aa, Artificial Sequence
  Description of Artificial Sequence: Synthetic peptide
  Seed: PRMCSLMQGSTLPRRSGAAG
PRMLSLLQSSTVPRRSGAAG

SEQ ID NO: 119811 - protein, 20 aa, Artificial Sequence
  Description of Artificial Sequence: Synthetic peptide
  Seed: PRMCSLMQGSTLPRRSGAAG
PRMLSLLQTSTAPRRSGAAG

SEQ ID NO: 119812 - protein, 20 aa, Artificial Sequence
  Description of Artificial Sequence: Synthetic peptide
  Seed: PRMCSLMQGSTLPRRSGAAG
PRMLSLLQTSTIPRRSGAAG

SEQ ID NO: 119813 - protein, 20 aa, Artificial Sequence
  Description of Artificial Sequence: Synthetic peptide
  Seed: PRMCSLMQGSTLPRRSGAAG
PRMLSLLQTSTLPRRSGAAG

SEQ ID NO: 119814 - protein, 20 aa, Artificial Sequence
  Description of Artificial Sequence: Synthetic peptide
  Seed: PRMCSLMQGSTLPRRSGAAG
PRMLSLLQTSTVPRRSGAAG

SEQ ID NO: 119815 - protein, 20 aa, Artificial Sequence
  Description of Artificial Sequence: Synthetic peptide
  Seed: PRMCSLMQGSTLPRRSGAAG
PRMLSLMQASTAPRRSGAAG

SEQ ID NO: 119816 - protein, 20 aa, Artificial Sequence
  Description of Artificial Sequence: Synthetic peptide
  Seed: PRMCSLMQGSTLPRRSGAAG
PRMLSLMQASTGPRRSGAAG

SEQ ID NO: 119817 - protein, 20 aa, Artificial Sequence
  Description of Artificial Sequence: Synthetic peptide
  Seed: PRMCSLMQGSTLPRRSGAAG
PRMLSLMQASTIPRRSGAAG

SEQ ID NO: 119818 - protein, 20 aa, Artificial Sequence
  Description of Artificial Sequence: Synthetic peptide
  Seed: PRMCSLMQGSTLPRRSGAAG
PRMLSLMQASTLPRRSGAAG

SEQ ID NO: 119819 - protein, 20 aa, Artificial Sequence
  Description of Artificial Sequence: Synthetic peptide
  Seed: PRMCSLMQGSTLPRRSGAAG
PRMLSLMQASTMPRRSGAAG

SEQ ID NO: 119820 - protein, 20 aa, Artificial Sequence
  Description of Artificial Sequence: Synthetic peptide
  Seed: PRMCSLMQGSTLPRRSGAAG
PRMLSLMQASTSPRRSGAAG

SEQ ID NO: 119821 - protein, 20 aa, Artificial Sequence
  Description of Artificial Sequence: Synthetic peptide
  Seed: PRMCSLMQGSTLPRRSGAAG
PRMLSLMQASTTPRRSGAAG

SEQ ID NO: 119822 - protein, 20 aa, Artificial Sequence
  Description of Artificial Sequence: Synthetic peptide
  Seed: PRMCSLMQGSTLPRRSGAAG
PRMLSLMQASTVPRRSGAAG

SEQ ID NO: 119823 - protein, 20 aa, Artificial Sequence
  Description of Artificial Sequence: Synthetic peptide
  Seed: PRMCSLMQGSTLPRRSGAAG
PRMLSLMQGSTAPRRSGAAG

SEQ ID NO: 119824 - protein, 20 aa, Artificial Sequence
  Description of Artificial Sequence: Synthetic peptide
  Seed: PRMCSLMQGSTLPRRSGAAG
PRMLSLMQGSTIPRRSGAAG

SEQ ID NO: 119825 - protein, 20 aa, Artificial Sequence
  Description of Artificial Sequence: Synthetic peptide
  Seed: PRMCSLMQGSTLPRRSGAAG
PRMLSLMQGSTLPRRSGAAG

SEQ ID NO: 119826 - protein, 20 aa, Artificial Sequence
  Description of Artificial Sequence: Synthetic peptide
  Seed: PRMCSLMQGSTLPRRSGAAG
PRMLSLMQGSTMPRRSGAAG

SEQ ID NO: 119827 - protein, 20 aa, Artificial Sequence
  Description of Artificial Sequence: Synthetic peptide
  Seed: PRMCSLMQGSTLPRRSGAAG
PRMLSLMQGSTSPRRSGAAG

SEQ ID NO: 119828 - protein, 20 aa, Artificial Sequence
  Description of Artificial Sequence: Synthetic peptide
  Seed: PRMCSLMQGSTLPRRSGAAG
PRMLSLMQGSTTPRRSGAAG

SEQ ID NO: 119829 - protein, 20 aa, Artificial Sequence
  Description of Artificial Sequence: Synthetic peptide
  Seed: PRMCSLMQGSTLPRRSGAAG
PRMLSLMQGSTVPRRSGAAG

SEQ ID NO: 119830 - protein, 20 aa, Artificial Sequence
  Description of Artificial Sequence: Synthetic peptide
  Seed: PRMCSLMQGSTLPRRSGAAG
PRMLSLMQNSTAPRRSGAAG

SEQ ID NO: 119831 - protein, 20 aa, Artificial Sequence
  Description of Artificial Sequence: Synthetic peptide
  Seed: PRMCSLMQGSTLPRRSGAAG
PRMLSLMQNSTIPRRSGAAG

SEQ ID NO: 119832 - protein, 20 aa, Artificial Sequence
  Description of Artificial Sequence: Synthetic peptide
  Seed: PRMCSLMQGSTLPRRSGAAG
PRMLSLMQNSTLPRRSGAAG

SEQ ID NO: 119833 - protein, 20 aa, Artificial Sequence
  Description of Artificial Sequence: Synthetic peptide
  Seed: PRMCSLMQGSTLPRRSGAAG
PRMLSLMQNSTVPRRSGAAG

SEQ ID NO: 119834 - protein, 20 aa, Artificial Sequence
  Description of Artificial Sequence: Synthetic peptide
  Seed: PRMCSLMQGSTLPRRSGAAG
PRMLSLMQPSTAPRRSGAAG

SEQ ID NO: 119835 - protein, 20 aa, Artificial Sequence
  Description of Artificial Sequence: Synthetic peptide
  Seed: PRMCSLMQGSTLPRRSGAAG
PRMLSLMQPSTIPRRSGAAG

SEQ ID NO: 119836 - protein, 20 aa, Artificial Sequence
  Description of Artificial Sequence: Synthetic peptide
  Seed: PRMCSLMQGSTLPRRSGAAG
PRMLSLMQPSTLPRRSGAAG

SEQ ID NO: 119837 - protein, 20 aa, Artificial Sequence
  Description of Artificial Sequence: Synthetic peptide
  Seed: PRMCSLMQGSTLPRRSGAAG
PRMLSLMQPSTMPRRSGAAG

SEQ ID NO: 119838 - protein, 20 aa, Artificial Sequence
  Description of Artificial Sequence: Synthetic peptide
  Seed: PRMCSLMQGSTLPRRSGAAG
PRMLSLMQPSTVPRRSGAAG

SEQ ID NO: 119839 - protein, 20 aa, Artificial Sequence
  Description of Artificial Sequence: Synthetic peptide
  Seed: PRMCSLMQGSTLPRRSGAAG
PRMLSLMQSSTAPRRSGAAG

SEQ ID NO: 119840 - protein, 20 aa, Artificial Sequence
  Description of Artificial Sequence: Synthetic peptide
  Seed: PRMCSLMQGSTLPRRSGAAG
PRMLSLMQSSTIPRRSGAAG

SEQ ID NO: 119841 - protein, 20 aa, Artificial Sequence
  Description of Artificial Sequence: Synthetic peptide
  Seed: PRMCSLMQGSTLPRRSGAAG
PRMLSLMQSSTLPRRSGAAG

SEQ ID NO: 119842 - protein, 20 aa, Artificial Sequence
  Description of Artificial Sequence: Synthetic peptide
  Seed: PRMCSLMQGSTLPRRSGAAG
PRMLSLMQSSTMPRRSGAAG

SEQ ID NO: 119843 - protein, 20 aa, Artificial Sequence
  Description of Artificial Sequence: Synthetic peptide
  Seed: PRMCSLMQGSTLPRRSGAAG
PRMLSLMQSSTTPRRSGAAG

SEQ ID NO: 119844 - protein, 20 aa, Artificial Sequence
  Description of Artificial Sequence: Synthetic peptide
  Seed: PRMCSLMQGSTLPRRSGAAG
PRMLSLMQSSTVPRRSGAAG

SEQ ID NO: 119845 - protein, 20 aa, Artificial Sequence
  Description of Artificial Sequence: Synthetic peptide
  Seed: PRMCSLMQGSTLPRRSGAAG
PRMLSLMQTSTAPRRSGAAG

SEQ ID NO: 119846 - protein, 20 aa, Artificial Sequence
  Description of Artificial Sequence: Synthetic peptide
  Seed: PRMCSLMQGSTLPRRSGAAG
PRMLSLMQTSTIPRRSGAAG

SEQ ID NO: 119847 - protein, 20 aa, Artificial Sequence
  Description of Artificial Sequence: Synthetic peptide
  Seed: PRMCSLMQGSTLPRRSGAAG
PRMLSLMQTSTLPRRSGAAG

SEQ ID NO: 119848 - protein, 20 aa, Artificial Sequence
  Description of Artificial Sequence: Synthetic peptide
  Seed: PRMCSLMQGSTLPRRSGAAG
PRMLSLMQTSTVPRRSGAAG

SEQ ID NO: 119849 - protein, 20 aa, Artificial Sequence
  Description of Artificial Sequence: Synthetic peptide
  Seed: PRMCSLMQGSTLPRRSGAAG
PRMLSLQQASTAPRRSGAAG

SEQ ID NO: 119850 - protein, 20 aa, Artificial Sequence
  Description of Artificial Sequence: Synthetic peptide
  Seed: PRMCSLMQGSTLPRRSGAAG
PRMLSLQQASTIPRRSGAAG

SEQ ID NO: 119851 - protein, 20 aa, Artificial Sequence
  Description of Artificial Sequence: Synthetic peptide
  Seed: PRMCSLMQGSTLPRRSGAAG
PRMLSLQQASTLPRRSGAAG

SEQ ID NO: 119852 - protein, 20 aa, Artificial Sequence
  Description of Artificial Sequence: Synthetic peptide
  Seed: PRMCSLMQGSTLPRRSGAAG
PRMLSLQQASTVPRRSGAAG

SEQ ID NO: 119853 - protein, 20 aa, Artificial Sequence
  Description of Artificial Sequence: Synthetic peptide
  Seed: PRMCSLMQGSTLPRRSGAAG
PRMLSLQQGSTLPRRSGAAG

SEQ ID NO: 119854 - protein, 20 aa, Artificial Sequence
  Description of Artificial Sequence: Synthetic peptide
  Seed: PRMCSLMQGSTLPRRSGAAG
PRMLSLQQGSTVPRRSGAAG

SEQ ID NO: 119855 - protein, 20 aa, Artificial Sequence
  Description of Artificial Sequence: Synthetic peptide
  Seed: PRMCSLMQGSTLPRRSGAAG
PRMLSLVQASTIPRRSGAAG

SEQ ID NO: 119856 - protein, 20 aa, Artificial Sequence
  Description of Artificial Sequence: Synthetic peptide
  Seed: PRMCSLMQGSTLPRRSGAAG
PRMLSLVQASTLPRRSGAAG

SEQ ID NO: 119857 - protein, 20 aa, Artificial Sequence
  Description of Artificial Sequence: Synthetic peptide
  Seed: PRMCSLMQGSTLPRRSGAAG
PRMLSLVQASTVPRRSGAAG

SEQ ID NO: 119858 - protein, 20 aa, Artificial Sequence
  Description of Artificial Sequence: Synthetic peptide
  Seed: PRMCSLMQGSTLPRRSGAAG
PRMMSLAQASTIPRRSGAAG

SEQ ID NO: 119859 - protein, 20 aa, Artificial Sequence
  Description of Artificial Sequence: Synthetic peptide
  Seed: PRMCSLMQGSTLPRRSGAAG
PRMMSLAQASTLPRRSGAAG

SEQ ID NO: 119860 - protein, 20 aa, Artificial Sequence
  Description of Artificial Sequence: Synthetic peptide
  Seed: PRMCSLMQGSTLPRRSGAAG
PRMMSLAQASTVPRRSGAAG

SEQ ID NO: 119861 - protein, 20 aa, Artificial Sequence
  Description of Artificial Sequence: Synthetic peptide
  Seed: PRMCSLMQGSTLPRRSGAAG
PRMMSLIQASTAPRRSGAAG

SEQ ID NO: 119862 - protein, 20 aa, Artificial Sequence
  Description of Artificial Sequence: Synthetic peptide
  Seed: PRMCSLMQGSTLPRRSGAAG
PRMMSLIQASTIPRRSGAAG

SEQ ID NO: 119863 - protein, 20 aa, Artificial Sequence
  Description of Artificial Sequence: Synthetic peptide
  Seed: PRMCSLMQGSTLPRRSGAAG
PRMMSLIQASTLPRRSGAAG

SEQ ID NO: 119864 - protein, 20 aa, Artificial Sequence
  Description of Artificial Sequence: Synthetic peptide
  Seed: PRMCSLMQGSTLPRRSGAAG
PRMMSLIQASTVPRRSGAAG

SEQ ID NO: 119865 - protein, 20 aa, Artificial Sequence
  Description of Artificial Sequence: Synthetic peptide
  Seed: PRMCSLMQGSTLPRRSGAAG
PRMMSLLQASTAPRRSGAAG

SEQ ID NO: 119866 - protein, 20 aa, Artificial Sequence
  Description of Artificial Sequence: Synthetic peptide
  Seed: PRMCSLMQGSTLPRRSGAAG
PRMMSLLQASTIPRRSGAAG

SEQ ID NO: 119867 - protein, 20 aa, Artificial Sequence
  Description of Artificial Sequence: Synthetic peptide
  Seed: PRMCSLMQGSTLPRRSGAAG
PRMMSLLQASTLPRRSGAAG

SEQ ID NO: 119868 - protein, 20 aa, Artificial Sequence
  Description of Artificial Sequence: Synthetic peptide
  Seed: PRMCSLMQGSTLPRRSGAAG
PRMMSLLQASTMPRRSGAAG

SEQ ID NO: 119869 - protein, 20 aa, Artificial Sequence
  Description of Artificial Sequence: Synthetic peptide
  Seed: PRMCSLMQGSTLPRRSGAAG
PRMMSLLQASTSPRRSGAAG

SEQ ID NO: 119870 - protein, 20 aa, Artificial Sequence
  Description of Artificial Sequence: Synthetic peptide
  Seed: PRMCSLMQGSTLPRRSGAAG
PRMMSLLQASTTPRRSGAAG

SEQ ID NO: 119871 - protein, 20 aa, Artificial Sequence
  Description of Artificial Sequence: Synthetic peptide
  Seed: PRMCSLMQGSTLPRRSGAAG
PRMMSLLQASTVPRRSGAAG

SEQ ID NO: 119872 - protein, 20 aa, Artificial Sequence
  Description of Artificial Sequence: Synthetic peptide
  Seed: PRMCSLMQGSTLPRRSGAAG
PRMMSLLQGSTAPRRSGAAG

SEQ ID NO: 119873 - protein, 20 aa, Artificial Sequence
  Description of Artificial Sequence: Synthetic peptide
  Seed: PRMCSLMQGSTLPRRSGAAG
PRMMSLLQGSTIPRRSGAAG

SEQ ID NO: 119874 - protein, 20 aa, Artificial Sequence
  Description of Artificial Sequence: Synthetic peptide
  Seed: PRMCSLMQGSTLPRRSGAAG
PRMMSLLQGSTLPRRSGAAG

SEQ ID NO: 119875 - protein, 20 aa, Artificial Sequence
  Description of Artificial Sequence: Synthetic peptide
  Seed: PRMCSLMQGSTLPRRSGAAG
PRMMSLLQGSTMPRRSGAAG

SEQ ID NO: 119876 - protein, 20 aa, Artificial Sequence
  Description of Artificial Sequence: Synthetic peptide
  Seed: PRMCSLMQGSTLPRRSGAAG
PRMMSLLQGSTVPRRSGAAG

SEQ ID NO: 119877 - protein, 20 aa, Artificial Sequence
  Description of Artificial Sequence: Synthetic peptide
  Seed: PRMCSLMQGSTLPRRSGAAG
PRMMSLLQPSTAPRRSGAAG

SEQ ID NO: 119878 - protein, 20 aa, Artificial Sequence
  Description of Artificial Sequence: Synthetic peptide
  Seed: PRMCSLMQGSTLPRRSGAAG
PRMMSLLQPSTIPRRSGAAG

SEQ ID NO: 119879 - protein, 20 aa, Artificial Sequence
  Description of Artificial Sequence: Synthetic peptide
  Seed: PRMCSLMQGSTLPRRSGAAG
PRMMSLLQPSTLPRRSGAAG

SEQ ID NO: 119880 - protein, 20 aa, Artificial Sequence
  Description of Artificial Sequence: Synthetic peptide
  Seed: PRMCSLMQGSTLPRRSGAAG
PRMMSLLQPSTVPRRSGAAG

SEQ ID NO: 119881 - protein, 20 aa, Artificial Sequence
  Description of Artificial Sequence: Synthetic peptide
  Seed: PRMCSLMQGSTLPRRSGAAG
PRMMSLLQSSTAPRRSGAAG

SEQ ID NO: 119882 - protein, 20 aa, Artificial Sequence
  Description of Artificial Sequence: Synthetic peptide
  Seed: PRMCSLMQGSTLPRRSGAAG
PRMMSLLQSSTIPRRSGAAG

SEQ ID NO: 119883 - protein, 20 aa, Artificial Sequence
  Description of Artificial Sequence: Synthetic peptide
  Seed: PRMCSLMQGSTLPRRSGAAG
PRMMSLLQSSTLPRRSGAAG

SEQ ID NO: 119884 - protein, 20 aa, Artificial Sequence
  Description of Artificial Sequence: Synthetic peptide
  Seed: PRMCSLMQGSTLPRRSGAAG
PRMMSLLQSSTVPRRSGAAG

SEQ ID NO: 119885 - protein, 20 aa, Artificial Sequence
  Description of Artificial Sequence: Synthetic peptide
  Seed: PRMCSLMQGSTLPRRSGAAG
PRMMSLMQASTAPRRSGAAG

SEQ ID NO: 119886 - protein, 20 aa, Artificial Sequence
  Description of Artificial Sequence: Synthetic peptide
  Seed: PRMCSLMQGSTLPRRSGAAG
PRMMSLMQASTIPRRSGAAG

SEQ ID NO: 119887 - protein, 20 aa, Artificial Sequence
  Description of Artificial Sequence: Synthetic peptide
  Seed: PRMCSLMQGSTLPRRSGAAG
PRMMSLMQASTLPRRSGAAG

SEQ ID NO: 119888 - protein, 20 aa, Artificial Sequence
  Description of Artificial Sequence: Synthetic peptide
  Seed: PRMCSLMQGSTLPRRSGAAG
PRMMSLMQASTMPRRSGAAG

SEQ ID NO: 119889 - protein, 20 aa, Artificial Sequence
  Description of Artificial Sequence: Synthetic peptide
  Seed: PRMCSLMQGSTLPRRSGAAG
PRMMSLMQASTSPRRSGAAG

SEQ ID NO: 119890 - protein, 20 aa, Artificial Sequence
  Description of Artificial Sequence: Synthetic peptide
  Seed: PRMCSLMQGSTLPRRSGAAG
PRMMSLMQASTTPRRSGAAG

SEQ ID NO: 119891 - protein, 20 aa, Artificial Sequence
  Description of Artificial Sequence: Synthetic peptide
  Seed: PRMCSLMQGSTLPRRSGAAG
PRMMSLMQASTVPRRSGAAG

SEQ ID NO: 119892 - protein, 20 aa, Artificial Sequence
  Description of Artificial Sequence: Synthetic peptide
  Seed: PRMCSLMQGSTLPRRSGAAG
PRMMSLMQGSTAPRRSGAAG

SEQ ID NO: 119893 - protein, 20 aa, Artificial Sequence
  Description of Artificial Sequence: Synthetic peptide
  Seed: PRMCSLMQGSTLPRRSGAAG
PRMMSLMQGSTIPRRSGAAG

SEQ ID NO: 119894 - protein, 20 aa, Artificial Sequence
  Description of Artificial Sequence: Synthetic peptide
  Seed: PRMCSLMQGSTLPRRSGAAG
PRMMSLMQGSTLPRRSGAAG

SEQ ID NO: 119895 - protein, 20 aa, Artificial Sequence
  Description of Artificial Sequence: Synthetic peptide
  Seed: PRMCSLMQGSTLPRRSGAAG
PRMMSLMQGSTMPRRSGAAG

SEQ ID NO: 119896 - protein, 20 aa, Artificial Sequence
  Description of Artificial Sequence: Synthetic peptide
  Seed: PRMCSLMQGSTLPRRSGAAG
PRMMSLMQGSTVPRRSGAAG

SEQ ID NO: 119897 - protein, 20 aa, Artificial Sequence
  Description of Artificial Sequence: Synthetic peptide
  Seed: PRMCSLMQGSTLPRRSGAAG
PRMMSLMQPSTIPRRSGAAG

SEQ ID NO: 119898 - protein, 20 aa, Artificial Sequence
  Description of Artificial Sequence: Synthetic peptide
  Seed: PRMCSLMQGSTLPRRSGAAG
PRMMSLMQPSTLPRRSGAAG

SEQ ID NO: 119899 - protein, 20 aa, Artificial Sequence
  Description of Artificial Sequence: Synthetic peptide
  Seed: PRMCSLMQGSTLPRRSGAAG
PRMMSLMQPSTVPRRSGAAG

SEQ ID NO: 119900 - protein, 20 aa, Artificial Sequence
  Description of Artificial Sequence: Synthetic peptide
  Seed: PRMCSLMQGSTLPRRSGAAG
PRMMSLMQSSTAPRRSGAAG

SEQ ID NO: 119901 - protein, 20 aa, Artificial Sequence
  Description of Artificial Sequence: Synthetic peptide
  Seed: PRMCSLMQGSTLPRRSGAAG
PRMMSLMQSSTIPRRSGAAG

SEQ ID NO: 119902 - protein, 20 aa, Artificial Sequence
  Description of Artificial Sequence: Synthetic peptide
  Seed: PRMCSLMQGSTLPRRSGAAG
PRMMSLMQSSTLPRRSGAAG

SEQ ID NO: 119903 - protein, 20 aa, Artificial Sequence
  Description of Artificial Sequence: Synthetic peptide
  Seed: PRMCSLMQGSTLPRRSGAAG
PRMMSLMQSSTVPRRSGAAG

SEQ ID NO: 119904 - protein, 20 aa, Artificial Sequence
  Description of Artificial Sequence: Synthetic peptide
  Seed: PRMCSLMQGSTLPRRSGAAG
PRMVSLIQASTAPRRSGAAG

SEQ ID NO: 119905 - protein, 20 aa, Artificial Sequence
  Description of Artificial Sequence: Synthetic peptide
  Seed: PRMCSLMQGSTLPRRSGAAG
PRMVSLIQASTIPRRSGAAG

SEQ ID NO: 119906 - protein, 20 aa, Artificial Sequence
  Description of Artificial Sequence: Synthetic peptide
  Seed: PRMCSLMQGSTLPRRSGAAG
PRMVSLIQASTLPRRSGAAG

SEQ ID NO: 119907 - protein, 20 aa, Artificial Sequence
  Description of Artificial Sequence: Synthetic peptide
  Seed: PRMCSLMQGSTLPRRSGAAG
PRMVSLIQASTVPRRSGAAG

SEQ ID NO: 119908 - protein, 20 aa, Artificial Sequence
  Description of Artificial Sequence: Synthetic peptide
  Seed: PRMCSLMQGSTLPRRSGAAG
PRMVSLIQGSTVPRRSGAAG

SEQ ID NO: 119909 - protein, 20 aa, Artificial Sequence
  Description of Artificial Sequence: Synthetic peptide
  Seed: PRMCSLMQGSTLPRRSGAAG
PRMVSLLQASTAPRRSGAAG

SEQ ID NO: 119910 - protein, 20 aa, Artificial Sequence
  Description of Artificial Sequence: Synthetic peptide
  Seed: PRMCSLMQGSTLPRRSGAAG
PRMVSLLQASTIPRRSGAAG

SEQ ID NO: 119911 - protein, 20 aa, Artificial Sequence
  Description of Artificial Sequence: Synthetic peptide
  Seed: PRMCSLMQGSTLPRRSGAAG
PRMVSLLQASTLPRRSGAAG

SEQ ID NO: 119912 - protein, 20 aa, Artificial Sequence
  Description of Artificial Sequence: Synthetic peptide
  Seed: PRMCSLMQGSTLPRRSGAAG
PRMVSLLQASTMPRRSGAAG

SEQ ID NO: 119913 - protein, 20 aa, Artificial Sequence
  Description of Artificial Sequence: Synthetic peptide
  Seed: PRMCSLMQGSTLPRRSGAAG
PRMVSLLQASTTPRRSGAAG

SEQ ID NO: 119914 - protein, 20 aa, Artificial Sequence
  Description of Artificial Sequence: Synthetic peptide
  Seed: PRMCSLMQGSTLPRRSGAAG
PRMVSLLQASTVPRRSGAAG

SEQ ID NO: 119915 - protein, 20 aa, Artificial Sequence
  Description of Artificial Sequence: Synthetic peptide
  Seed: PRMCSLMQGSTLPRRSGAAG
PRMVSLLQGSTAPRRSGAAG

SEQ ID NO: 119916 - protein, 20 aa, Artificial Sequence
  Description of Artificial Sequence: Synthetic peptide
  Seed: PRMCSLMQGSTLPRRSGAAG
PRMVSLLQGSTIPRRSGAAG

SEQ ID NO: 119917 - protein, 20 aa, Artificial Sequence
  Description of Artificial Sequence: Synthetic peptide
  Seed: PRMCSLMQGSTLPRRSGAAG
PRMVSLLQGSTLPRRSGAAG

SEQ ID NO: 119918 - protein, 20 aa, Artificial Sequence
  Description of Artificial Sequence: Synthetic peptide
  Seed: PRMCSLMQGSTLPRRSGAAG
PRMVSLLQGSTMPRRSGAAG

SEQ ID NO: 119919 - protein, 20 aa, Artificial Sequence
  Description of Artificial Sequence: Synthetic peptide
  Seed: PRMCSLMQGSTLPRRSGAAG
PRMVSLLQGSTTPRRSGAAG

SEQ ID NO: 119920 - protein, 20 aa, Artificial Sequence
  Description of Artificial Sequence: Synthetic peptide
  Seed: PRMCSLMQGSTLPRRSGAAG
PRMVSLLQGSTVPRRSGAAG

SEQ ID NO: 119921 - protein, 20 aa, Artificial Sequence
  Description of Artificial Sequence: Synthetic peptide
  Seed: PRMCSLMQGSTLPRRSGAAG
PRMVSLLQPSTAPRRSGAAG

SEQ ID NO: 119922 - protein, 20 aa, Artificial Sequence
  Description of Artificial Sequence: Synthetic peptide
  Seed: PRMCSLMQGSTLPRRSGAAG
PRMVSLLQPSTIPRRSGAAG

SEQ ID NO: 119923 - protein, 20 aa, Artificial Sequence
  Description of Artificial Sequence: Synthetic peptide
  Seed: PRMCSLMQGSTLPRRSGAAG
PRMVSLLQPSTLPRRSGAAG

SEQ ID NO: 119924 - protein, 20 aa, Artificial Sequence
  Description of Artificial Sequence: Synthetic peptide
  Seed: PRMCSLMQGSTLPRRSGAAG
PRMVSLLQPSTVPRRSGAAG

SEQ ID NO: 119925 - protein, 20 aa, Artificial Sequence
  Description of Artificial Sequence: Synthetic peptide
  Seed: PRMCSLMQGSTLPRRSGAAG
PRMVSLLQSSTAPRRSGAAG

SEQ ID NO: 119926 - protein, 20 aa, Artificial Sequence
  Description of Artificial Sequence: Synthetic peptide
  Seed: PRMCSLMQGSTLPRRSGAAG
PRMVSLLQSSTIPRRSGAAG

SEQ ID NO: 119927 - protein, 20 aa, Artificial Sequence
  Description of Artificial Sequence: Synthetic peptide
  Seed: PRMCSLMQGSTLPRRSGAAG
PRMVSLLQSSTLPRRSGAAG

SEQ ID NO: 119928 - protein, 20 aa, Artificial Sequence
  Description of Artificial Sequence: Synthetic peptide
  Seed: PRMCSLMQGSTLPRRSGAAG
PRMVSLLQSSTVPRRSGAAG

SEQ ID NO: 119929 - protein, 20 aa, Artificial Sequence
  Description of Artificial Sequence: Synthetic peptide
  Seed: PRMCSLMQGSTLPRRSGAAG
PRMVSLMQASTAPRRSGAAG

SEQ ID NO: 119930 - protein, 20 aa, Artificial Sequence
  Description of Artificial Sequence: Synthetic peptide
  Seed: PRMCSLMQGSTLPRRSGAAG
PRMVSLMQASTIPRRSGAAG

SEQ ID NO: 119931 - protein, 20 aa, Artificial Sequence
  Description of Artificial Sequence: Synthetic peptide
  Seed: PRMCSLMQGSTLPRRSGAAG
PRMVSLMQASTLPRRSGAAG

SEQ ID NO: 119932 - protein, 20 aa, Artificial Sequence
  Description of Artificial Sequence: Synthetic peptide
  Seed: PRMCSLMQGSTLPRRSGAAG
PRMVSLMQASTMPRRSGAAG

SEQ ID NO: 119933 - protein, 20 aa, Artificial Sequence
  Description of Artificial Sequence: Synthetic peptide
  Seed: PRMCSLMQGSTLPRRSGAAG
PRMVSLMQASTTPRRSGAAG

SEQ ID NO: 119934 - protein, 20 aa, Artificial Sequence
  Description of Artificial Sequence: Synthetic peptide
  Seed: PRMCSLMQGSTLPRRSGAAG
PRMVSLMQASTVPRRSGAAG

SEQ ID NO: 119935 - protein, 20 aa, Artificial Sequence
  Description of Artificial Sequence: Synthetic peptide
  Seed: PRMCSLMQGSTLPRRSGAAG
PRMVSLMQGSTAPRRSGAAG

SEQ ID NO: 119936 - protein, 20 aa, Artificial Sequence
  Description of Artificial Sequence: Synthetic peptide
  Seed: PRMCSLMQGSTLPRRSGAAG
PRMVSLMQGSTIPRRSGAAG

SEQ ID NO: 119937 - protein, 20 aa, Artificial Sequence
  Description of Artificial Sequence: Synthetic peptide
  Seed: PRMCSLMQGSTLPRRSGAAG
PRMVSLMQGSTLPRRSGAAG

SEQ ID NO: 119938 - protein, 20 aa, Artificial Sequence
  Description of Artificial Sequence: Synthetic peptide
  Seed: PRMCSLMQGSTLPRRSGAAG
PRMVSLMQGSTMPRRSGAAG

SEQ ID NO: 119939 - protein, 20 aa, Artificial Sequence
  Description of Artificial Sequence: Synthetic peptide
  Seed: PRMCSLMQGSTLPRRSGAAG
PRMVSLMQGSTVPRRSGAAG

SEQ ID NO: 119940 - protein, 20 aa, Artificial Sequence
  Description of Artificial Sequence: Synthetic peptide
  Seed: PRMCSLMQGSTLPRRSGAAG
PRMVSLMQPSTIPRRSGAAG

SEQ ID NO: 119941 - protein, 20 aa, Artificial Sequence
  Description of Artificial Sequence: Synthetic peptide
  Seed: PRMCSLMQGSTLPRRSGAAG
PRMVSLMQPSTLPRRSGAAG

SEQ ID NO: 119942 - protein, 20 aa, Artificial Sequence
  Description of Artificial Sequence: Synthetic peptide
  Seed: PRMCSLMQGSTLPRRSGAAG
PRMVSLMQPSTVPRRSGAAG

SEQ ID NO: 119943 - protein, 20 aa, Artificial Sequence
  Description of Artificial Sequence: Synthetic peptide
  Seed: PRMCSLMQGSTLPRRSGAAG
PRMVSLMQSSTAPRRSGAAG

SEQ ID NO: 119944 - protein, 20 aa, Artificial Sequence
  Description of Artificial Sequence: Synthetic peptide
  Seed: PRMCSLMQGSTLPRRSGAAG
PRMVSLMQSSTIPRRSGAAG

SEQ ID NO: 119945 - protein, 20 aa, Artificial Sequence
  Description of Artificial Sequence: Synthetic peptide
  Seed: PRMCSLMQGSTLPRRSGAAG
PRMVSLMQSSTLPRRSGAAG

SEQ ID NO: 119946 - protein, 20 aa, Artificial Sequence
  Description of Artificial Sequence: Synthetic peptide
  Seed: PRMCSLMQGSTLPRRSGAAG
PRMVSLMQSSTVPRRSGAAG

SEQ ID NO: 119947 - protein, 20 aa, Artificial Sequence
  Description of Artificial Sequence: Synthetic peptide
  Seed: PRMCSLMQGSTLPRRSGAAG
PRMWSLAQASTAPRRSGAAG

SEQ ID NO: 119948 - protein, 20 aa, Artificial Sequence
  Description of Artificial Sequence: Synthetic peptide
  Seed: PRMCSLMQGSTLPRRSGAAG
PRMWSLAQASTIPRRSGAAG

SEQ ID NO: 119949 - protein, 20 aa, Artificial Sequence
  Description of Artificial Sequence: Synthetic peptide
  Seed: PRMCSLMQGSTLPRRSGAAG
PRMWSLAQASTLPRRSGAAG

SEQ ID NO: 119950 - protein, 20 aa, Artificial Sequence
  Description of Artificial Sequence: Synthetic peptide
  Seed: PRMCSLMQGSTLPRRSGAAG
PRMWSLAQASTMPRRSGAAG

SEQ ID NO: 119951 - protein, 20 aa, Artificial Sequence
  Description of Artificial Sequence: Synthetic peptide
  Seed: PRMCSLMQGSTLPRRSGAAG
PRMWSLAQASTSPRRSGAAG

SEQ ID NO: 119952 - protein, 20 aa, Artificial Sequence
  Description of Artificial Sequence: Synthetic peptide
  Seed: PRMCSLMQGSTLPRRSGAAG
PRMWSLAQASTTPRRSGAAG

SEQ ID NO: 119953 - protein, 20 aa, Artificial Sequence
  Description of Artificial Sequence: Synthetic peptide
  Seed: PRMCSLMQGSTLPRRSGAAG
PRMWSLAQASTVPRRSGAAG

SEQ ID NO: 119954 - protein, 20 aa, Artificial Sequence
  Description of Artificial Sequence: Synthetic peptide
  Seed: PRMCSLMQGSTLPRRSGAAG
PRMWSLAQGSTAPRRSGAAG

SEQ ID NO: 119955 - protein, 20 aa, Artificial Sequence
  Description of Artificial Sequence: Synthetic peptide
  Seed: PRMCSLMQGSTLPRRSGAAG
PRMWSLAQGSTIPRRSGAAG

SEQ ID NO: 119956 - protein, 20 aa, Artificial Sequence
  Description of Artificial Sequence: Synthetic peptide
  Seed: PRMCSLMQGSTLPRRSGAAG
PRMWSLAQGSTLPRRSGAAG

SEQ ID NO: 119957 - protein, 20 aa, Artificial Sequence
  Description of Artificial Sequence: Synthetic peptide
  Seed: PRMCSLMQGSTLPRRSGAAG
PRMWSLAQGSTVPRRSGAAG

SEQ ID NO: 119958 - protein, 20 aa, Artificial Sequence
  Description of Artificial Sequence: Synthetic peptide
  Seed: PRMCSLMQGSTLPRRSGAAG
PRMWSLAQPSTIPRRSGAAG

SEQ ID NO: 119959 - protein, 20 aa, Artificial Sequence
  Description of Artificial Sequence: Synthetic peptide
  Seed: PRMCSLMQGSTLPRRSGAAG
PRMWSLAQPSTLPRRSGAAG

SEQ ID NO: 119960 - protein, 20 aa, Artificial Sequence
  Description of Artificial Sequence: Synthetic peptide
  Seed: PRMCSLMQGSTLPRRSGAAG
PRMWSLAQPSTVPRRSGAAG

SEQ ID NO: 119961 - protein, 20 aa, Artificial Sequence
  Description of Artificial Sequence: Synthetic peptide
  Seed: PRMCSLMQGSTLPRRSGAAG
PRMWSLAQSSTAPRRSGAAG

SEQ ID NO: 119962 - protein, 20 aa, Artificial Sequence
  Description of Artificial Sequence: Synthetic peptide
  Seed: PRMCSLMQGSTLPRRSGAAG
PRMWSLAQSSTIPRRSGAAG

SEQ ID NO: 119963 - protein, 20 aa, Artificial Sequence
  Description of Artificial Sequence: Synthetic peptide
  Seed: PRMCSLMQGSTLPRRSGAAG
PRMWSLAQSSTLPRRSGAAG

SEQ ID NO: 119964 - protein, 20 aa, Artificial Sequence
  Description of Artificial Sequence: Synthetic peptide
  Seed: PRMCSLMQGSTLPRRSGAAG
PRMWSLAQSSTVPRRSGAAG

SEQ ID NO: 119965 - protein, 20 aa, Artificial Sequence
  Description of Artificial Sequence: Synthetic peptide
  Seed: PRMCSLMQGSTLPRRSGAAG
PRMWSLEQASTLPRRSGAAG

SEQ ID NO: 119966 - protein, 20 aa, Artificial Sequence
  Description of Artificial Sequence: Synthetic peptide
  Seed: PRMCSLMQGSTLPRRSGAAG
PRMWSLEQASTVPRRSGAAG

SEQ ID NO: 119967 - protein, 20 aa, Artificial Sequence
  Description of Artificial Sequence: Synthetic peptide
  Seed: PRMCSLMQGSTLPRRSGAAG
PRMWSLFQASTAPRRSGAAG

SEQ ID NO: 119968 - protein, 20 aa, Artificial Sequence
  Description of Artificial Sequence: Synthetic peptide
  Seed: PRMCSLMQGSTLPRRSGAAG
PRMWSLFQASTVPRRSGAAG

SEQ ID NO: 119969 - protein, 20 aa, Artificial Sequence
  Description of Artificial Sequence: Synthetic peptide
  Seed: PRMCSLMQGSTLPRRSGAAG
PRMWSLIQASTAPRRSGAAG

SEQ ID NO: 119970 - protein, 20 aa, Artificial Sequence
  Description of Artificial Sequence: Synthetic peptide
  Seed: PRMCSLMQGSTLPRRSGAAG
PRMWSLIQASTIPRRSGAAG

SEQ ID NO: 119971 - protein, 20 aa, Artificial Sequence
  Description of Artificial Sequence: Synthetic peptide
  Seed: PRMCSLMQGSTLPRRSGAAG
PRMWSLIQASTLPRRSGAAG

SEQ ID NO: 119972 - protein, 20 aa, Artificial Sequence
  Description of Artificial Sequence: Synthetic peptide
  Seed: PRMCSLMQGSTLPRRSGAAG
PRMWSLIQASTMPRRSGAAG

SEQ ID NO: 119973 - protein, 20 aa, Artificial Sequence
  Description of Artificial Sequence: Synthetic peptide
  Seed: PRMCSLMQGSTLPRRSGAAG
PRMWSLIQASTSPRRSGAAG

SEQ ID NO: 119974 - protein, 20 aa, Artificial Sequence
  Description of Artificial Sequence: Synthetic peptide
  Seed: PRMCSLMQGSTLPRRSGAAG
PRMWSLIQASTTPRRSGAAG

SEQ ID NO: 119975 - protein, 20 aa, Artificial Sequence
  Description of Artificial Sequence: Synthetic peptide
  Seed: PRMCSLMQGSTLPRRSGAAG
PRMWSLIQASTVPRRSGAAG

SEQ ID NO: 119976 - protein, 20 aa, Artificial Sequence
  Description of Artificial Sequence: Synthetic peptide
  Seed: PRMCSLMQGSTLPRRSGAAG
PRMWSLIQGSTAPRRSGAAG

SEQ ID NO: 119977 - protein, 20 aa, Artificial Sequence
  Description of Artificial Sequence: Synthetic peptide
  Seed: PRMCSLMQGSTLPRRSGAAG
PRMWSLIQGSTIPRRSGAAG

SEQ ID NO: 119978 - protein, 20 aa, Artificial Sequence
  Description of Artificial Sequence: Synthetic peptide
  Seed: PRMCSLMQGSTLPRRSGAAG
PRMWSLIQGSTLPRRSGAAG

SEQ ID NO: 119979 - protein, 20 aa, Artificial Sequence
  Description of Artificial Sequence: Synthetic peptide
  Seed: PRMCSLMQGSTLPRRSGAAG
PRMWSLIQGSTMPRRSGAAG

SEQ ID NO: 119980 - protein, 20 aa, Artificial Sequence
  Description of Artificial Sequence: Synthetic peptide
  Seed: PRMCSLMQGSTLPRRSGAAG
PRMWSLIQGSTSPRRSGAAG

SEQ ID NO: 119981 - protein, 20 aa, Artificial Sequence
  Description of Artificial Sequence: Synthetic peptide
  Seed: PRMCSLMQGSTLPRRSGAAG
PRMWSLIQGSTTPRRSGAAG

SEQ ID NO: 119982 - protein, 20 aa, Artificial Sequence
  Description of Artificial Sequence: Synthetic peptide
  Seed: PRMCSLMQGSTLPRRSGAAG
PRMWSLIQGSTVPRRSGAAG

SEQ ID NO: 119983 - protein, 20 aa, Artificial Sequence
  Description of Artificial Sequence: Synthetic peptide
  Seed: PRMCSLMQGSTLPRRSGAAG
PRMWSLIQNSTVPRRSGAAG

SEQ ID NO: 119984 - protein, 20 aa, Artificial Sequence
  Description of Artificial Sequence: Synthetic peptide
  Seed: PRMCSLMQGSTLPRRSGAAG
PRMWSLIQPSTAPRRSGAAG

SEQ ID NO: 119985 - protein, 20 aa, Artificial Sequence
  Description of Artificial Sequence: Synthetic peptide
  Seed: PRMCSLMQGSTLPRRSGAAG
PRMWSLIQPSTIPRRSGAAG

SEQ ID NO: 119986 - protein, 20 aa, Artificial Sequence
  Description of Artificial Sequence: Synthetic peptide
  Seed: PRMCSLMQGSTLPRRSGAAG
PRMWSLIQPSTLPRRSGAAG

SEQ ID NO: 119987 - protein, 20 aa, Artificial Sequence
  Description of Artificial Sequence: Synthetic peptide
  Seed: PRMCSLMQGSTLPRRSGAAG
PRMWSLIQPSTVPRRSGAAG

SEQ ID NO: 119988 - protein, 20 aa, Artificial Sequence
  Description of Artificial Sequence: Synthetic peptide
  Seed: PRMCSLMQGSTLPRRSGAAG
PRMWSLIQSSTAPRRSGAAG

SEQ ID NO: 119989 - protein, 20 aa, Artificial Sequence
  Description of Artificial Sequence: Synthetic peptide
  Seed: PRMCSLMQGSTLPRRSGAAG
PRMWSLIQSSTIPRRSGAAG

SEQ ID NO: 119990 - protein, 20 aa, Artificial Sequence
  Description of Artificial Sequence: Synthetic peptide
  Seed: PRMCSLMQGSTLPRRSGAAG
PRMWSLIQSSTLPRRSGAAG

SEQ ID NO: 119991 - protein, 20 aa, Artificial Sequence
  Description of Artificial Sequence: Synthetic peptide
  Seed: PRMCSLMQGSTLPRRSGAAG
PRMWSLIQSSTTPRRSGAAG

SEQ ID NO: 119992 - protein, 20 aa, Artificial Sequence
  Description of Artificial Sequence: Synthetic peptide
  Seed: PRMCSLMQGSTLPRRSGAAG
PRMWSLIQSSTVPRRSGAAG

SEQ ID NO: 119993 - protein, 20 aa, Artificial Sequence
  Description of Artificial Sequence: Synthetic peptide
  Seed: PRMCSLMQGSTLPRRSGAAG
PRMWSLIQTSTAPRRSGAAG

SEQ ID NO: 119994 - protein, 20 aa, Artificial Sequence
  Description of Artificial Sequence: Synthetic peptide
  Seed: PRMCSLMQGSTLPRRSGAAG
PRMWSLIQTSTIPRRSGAAG

SEQ ID NO: 119995 - protein, 20 aa, Artificial Sequence
  Description of Artificial Sequence: Synthetic peptide
  Seed: PRMCSLMQGSTLPRRSGAAG
PRMWSLIQTSTLPRRSGAAG

SEQ ID NO: 119996 - protein, 20 aa, Artificial Sequence
  Description of Artificial Sequence: Synthetic peptide
  Seed: PRMCSLMQGSTLPRRSGAAG
PRMWSLIQTSTVPRRSGAAG

SEQ ID NO: 119997 - protein, 20 aa, Artificial Sequence
  Description of Artificial Sequence: Synthetic peptide
  Seed: PRMCSLMQGSTLPRRSGAAG
PRMWSLLQASTAPRRSGAAG

SEQ ID NO: 119998 - protein, 20 aa, Artificial Sequence
  Description of Artificial Sequence: Synthetic peptide
  Seed: PRMCSLMQGSTLPRRSGAAG
PRMWSLLQASTGPRRSGAAG

SEQ ID NO: 119999 - protein, 20 aa, Artificial Sequence
  Description of Artificial Sequence: Synthetic peptide
  Seed: PRMCSLMQGSTLPRRSGAAG
PRMWSLLQASTIPRRSGAAG

SEQ ID NO: 120000 - protein, 20 aa, Artificial Sequence
  Description of Artificial Sequence: Synthetic peptide
  Seed: PRMCSLMQGSTLPRRSGAAG
PRMWSLLQASTLPRRSGAAG

SEQ ID NO: 120001 - protein, 20 aa, Artificial Sequence
  Description of Artificial Sequence: Synthetic peptide
  Seed: PRMCSLMQGSTLPRRSGAAG
PRMWSLLQASTMPRRSGAAG

SEQ ID NO: 120002 - protein, 20 aa, Artificial Sequence
  Description of Artificial Sequence: Synthetic peptide
  Seed: PRMCSLMQGSTLPRRSGAAG
PRMWSLLQASTSPRRSGAAG

SEQ ID NO: 120003 - protein, 20 aa, Artificial Sequence
  Description of Artificial Sequence: Synthetic peptide
  Seed: PRMCSLMQGSTLPRRSGAAG
PRMWSLLQASTTPRRSGAAG

SEQ ID NO: 120004 - protein, 20 aa, Artificial Sequence
  Description of Artificial Sequence: Synthetic peptide
  Seed: PRMCSLMQGSTLPRRSGAAG
PRMWSLLQASTVPRRSGAAG

SEQ ID NO: 120005 - protein, 20 aa, Artificial Sequence
  Description of Artificial Sequence: Synthetic peptide
  Seed: PRMCSLMQGSTLPRRSGAAG
PRMWSLLQGSTAPRRSGAAG

SEQ ID NO: 120006 - protein, 20 aa, Artificial Sequence
  Description of Artificial Sequence: Synthetic peptide
  Seed: PRMCSLMQGSTLPRRSGAAG
PRMWSLLQGSTGPRRSGAAG

SEQ ID NO: 120007 - protein, 20 aa, Artificial Sequence
  Description of Artificial Sequence: Synthetic peptide
  Seed: PRMCSLMQGSTLPRRSGAAG
PRMWSLLQGSTIPRRSGAAG

SEQ ID NO: 120008 - protein, 20 aa, Artificial Sequence
  Description of Artificial Sequence: Synthetic peptide
  Seed: PRMCSLMQGSTLPRRSGAAG
PRMWSLLQGSTLPRRSGAAG

SEQ ID NO: 120009 - protein, 20 aa, Artificial Sequence
  Description of Artificial Sequence: Synthetic peptide
  Seed: PRMCSLMQGSTLPRRSGAAG
PRMWSLLQGSTMPRRSGAAG

SEQ ID NO: 120010 - protein, 20 aa, Artificial Sequence
  Description of Artificial Sequence: Synthetic peptide
  Seed: PRMCSLMQGSTLPRRSGAAG
PRMWSLLQGSTSPRRSGAAG

SEQ ID NO: 120011 - protein, 20 aa, Artificial Sequence
  Description of Artificial Sequence: Synthetic peptide
  Seed: PRMCSLMQGSTLPRRSGAAG
PRMWSLLQGSTTPRRSGAAG

SEQ ID NO: 120012 - protein, 20 aa, Artificial Sequence
  Description of Artificial Sequence: Synthetic peptide
  Seed: PRMCSLMQGSTLPRRSGAAG
PRMWSLLQGSTVPRRSGAAG

SEQ ID NO: 120013 - protein, 20 aa, Artificial Sequence
  Description of Artificial Sequence: Synthetic peptide
  Seed: PRMCSLMQGSTLPRRSGAAG
PRMWSLLQNSTAPRRSGAAG

SEQ ID NO: 120014 - protein, 20 aa, Artificial Sequence
  Description of Artificial Sequence: Synthetic peptide
  Seed: PRMCSLMQGSTLPRRSGAAG
PRMWSLLQNSTIPRRSGAAG

SEQ ID NO: 120015 - protein, 20 aa, Artificial Sequence
  Description of Artificial Sequence: Synthetic peptide
  Seed: PRMCSLMQGSTLPRRSGAAG
PRMWSLLQNSTLPRRSGAAG

SEQ ID NO: 120016 - protein, 20 aa, Artificial Sequence
  Description of Artificial Sequence: Synthetic peptide
  Seed: PRMCSLMQGSTLPRRSGAAG
PRMWSLLQNSTMPRRSGAAG

SEQ ID NO: 120017 - protein, 20 aa, Artificial Sequence
  Description of Artificial Sequence: Synthetic peptide
  Seed: PRMCSLMQGSTLPRRSGAAG
PRMWSLLQNSTVPRRSGAAG

SEQ ID NO: 120018 - protein, 20 aa, Artificial Sequence
  Description of Artificial Sequence: Synthetic peptide
  Seed: PRMCSLMQGSTLPRRSGAAG
PRMWSLLQPSTAPRRSGAAG

SEQ ID NO: 120019 - protein, 20 aa, Artificial Sequence
  Description of Artificial Sequence: Synthetic peptide
  Seed: PRMCSLMQGSTLPRRSGAAG
PRMWSLLQPSTIPRRSGAAG

SEQ ID NO: 120020 - protein, 20 aa, Artificial Sequence
  Description of Artificial Sequence: Synthetic peptide
  Seed: PRMCSLMQGSTLPRRSGAAG
PRMWSLLQPSTLPRRSGAAG

SEQ ID NO: 120021 - protein, 20 aa, Artificial Sequence
  Description of Artificial Sequence: Synthetic peptide
  Seed: PRMCSLMQGSTLPRRSGAAG
PRMWSLLQPSTMPRRSGAAG

SEQ ID NO: 120022 - protein, 20 aa, Artificial Sequence
  Description of Artificial Sequence: Synthetic peptide
  Seed: PRMCSLMQGSTLPRRSGAAG
PRMWSLLQPSTSPRRSGAAG

SEQ ID NO: 120023 - protein, 20 aa, Artificial Sequence
  Description of Artificial Sequence: Synthetic peptide
  Seed: PRMCSLMQGSTLPRRSGAAG
PRMWSLLQPSTTPRRSGAAG

SEQ ID NO: 120024 - protein, 20 aa, Artificial Sequence
  Description of Artificial Sequence: Synthetic peptide
  Seed: PRMCSLMQGSTLPRRSGAAG
PRMWSLLQPSTVPRRSGAAG

SEQ ID NO: 120025 - protein, 20 aa, Artificial Sequence
  Description of Artificial Sequence: Synthetic peptide
  Seed: PRMCSLMQGSTLPRRSGAAG
PRMWSLLQSSTAPRRSGAAG

SEQ ID NO: 120026 - protein, 20 aa, Artificial Sequence
  Description of Artificial Sequence: Synthetic peptide
  Seed: PRMCSLMQGSTLPRRSGAAG
PRMWSLLQSSTGPRRSGAAG

SEQ ID NO: 120027 - protein, 20 aa, Artificial Sequence
  Description of Artificial Sequence: Synthetic peptide
  Seed: PRMCSLMQGSTLPRRSGAAG
PRMWSLLQSSTIPRRSGAAG

SEQ ID NO: 120028 - protein, 20 aa, Artificial Sequence
  Description of Artificial Sequence: Synthetic peptide
  Seed: PRMCSLMQGSTLPRRSGAAG
PRMWSLLQSSTLPRRSGAAG

SEQ ID NO: 120029 - protein, 20 aa, Artificial Sequence
  Description of Artificial Sequence: Synthetic peptide
  Seed: PRMCSLMQGSTLPRRSGAAG
PRMWSLLQSSTMPRRSGAAG

SEQ ID NO: 120030 - protein, 20 aa, Artificial Sequence
  Description of Artificial Sequence: Synthetic peptide
  Seed: PRMCSLMQGSTLPRRSGAAG
PRMWSLLQSSTSPRRSGAAG

SEQ ID NO: 120031 - protein, 20 aa, Artificial Sequence
  Description of Artificial Sequence: Synthetic peptide
  Seed: PRMCSLMQGSTLPRRSGAAG
PRMWSLLQSSTTPRRSGAAG

SEQ ID NO: 120032 - protein, 20 aa, Artificial Sequence
  Description of Artificial Sequence: Synthetic peptide
  Seed: PRMCSLMQGSTLPRRSGAAG
PRMWSLLQSSTVPRRSGAAG

SEQ ID NO: 120033 - protein, 20 aa, Artificial Sequence
  Description of Artificial Sequence: Synthetic peptide
  Seed: PRMCSLMQGSTLPRRSGAAG
PRMWSLLQTSTAPRRSGAAG

SEQ ID NO: 120034 - protein, 20 aa, Artificial Sequence
  Description of Artificial Sequence: Synthetic peptide
  Seed: PRMCSLMQGSTLPRRSGAAG
PRMWSLLQTSTIPRRSGAAG

SEQ ID NO: 120035 - protein, 20 aa, Artificial Sequence
  Description of Artificial Sequence: Synthetic peptide
  Seed: PRMCSLMQGSTLPRRSGAAG
PRMWSLLQTSTLPRRSGAAG

SEQ ID NO: 120036 - protein, 20 aa, Artificial Sequence
  Description of Artificial Sequence: Synthetic peptide
  Seed: PRMCSLMQGSTLPRRSGAAG
PRMWSLLQTSTMPRRSGAAG

SEQ ID NO: 120037 - protein, 20 aa, Artificial Sequence
  Description of Artificial Sequence: Synthetic peptide
  Seed: PRMCSLMQGSTLPRRSGAAG
PRMWSLLQTSTTPRRSGAAG

SEQ ID NO: 120038 - protein, 20 aa, Artificial Sequence
  Description of Artificial Sequence: Synthetic peptide
  Seed: PRMCSLMQGSTLPRRSGAAG
PRMWSLLQTSTVPRRSGAAG

SEQ ID NO: 120039 - protein, 20 aa, Artificial Sequence
  Description of Artificial Sequence: Synthetic peptide
  Seed: PRMCSLMQGSTLPRRSGAAG
PRMWSLLQVSTAPRRSGAAG

SEQ ID NO: 120040 - protein, 20 aa, Artificial Sequence
  Description of Artificial Sequence: Synthetic peptide
  Seed: PRMCSLMQGSTLPRRSGAAG
PRMWSLLQVSTIPRRSGAAG

SEQ ID NO: 120041 - protein, 20 aa, Artificial Sequence
  Description of Artificial Sequence: Synthetic peptide
  Seed: PRMCSLMQGSTLPRRSGAAG
PRMWSLLQVSTLPRRSGAAG

SEQ ID NO: 120042 - protein, 20 aa, Artificial Sequence
  Description of Artificial Sequence: Synthetic peptide
  Seed: PRMCSLMQGSTLPRRSGAAG
PRMWSLLQVSTVPRRSGAAG

SEQ ID NO: 120043 - protein, 20 aa, Artificial Sequence
  Description of Artificial Sequence: Synthetic peptide
  Seed: PRMCSLMQGSTLPRRSGAAG
PRMWSLMQASTAPRRSGAAG

SEQ ID NO: 120044 - protein, 20 aa, Artificial Sequence
  Description of Artificial Sequence: Synthetic peptide
  Seed: PRMCSLMQGSTLPRRSGAAG
PRMWSLMQASTFPRRSGAAG

SEQ ID NO: 120045 - protein, 20 aa, Artificial Sequence
  Description of Artificial Sequence: Synthetic peptide
  Seed: PRMCSLMQGSTLPRRSGAAG
PRMWSLMQASTGPRRSGAAG

SEQ ID NO: 120046 - protein, 20 aa, Artificial Sequence
  Description of Artificial Sequence: Synthetic peptide
  Seed: PRMCSLMQGSTLPRRSGAAG
PRMWSLMQASTIPRRSGAAG

SEQ ID NO: 120047 - protein, 20 aa, Artificial Sequence
  Description of Artificial Sequence: Synthetic peptide
  Seed: PRMCSLMQGSTLPRRSGAAG
PRMWSLMQASTLPRRSGAAG

SEQ ID NO: 120048 - protein, 20 aa, Artificial Sequence
  Description of Artificial Sequence: Synthetic peptide
  Seed: PRMCSLMQGSTLPRRSGAAG
PRMWSLMQASTMPRRSGAAG

SEQ ID NO: 120049 - protein, 20 aa, Artificial Sequence
  Description of Artificial Sequence: Synthetic peptide
  Seed: PRMCSLMQGSTLPRRSGAAG
PRMWSLMQASTSPRRSGAAG

SEQ ID NO: 120050 - protein, 20 aa, Artificial Sequence
  Description of Artificial Sequence: Synthetic peptide
  Seed: PRMCSLMQGSTLPRRSGAAG
PRMWSLMQASTTPRRSGAAG

SEQ ID NO: 120051 - protein, 20 aa, Artificial Sequence
  Description of Artificial Sequence: Synthetic peptide
  Seed: PRMCSLMQGSTLPRRSGAAG
PRMWSLMQASTVPRRSGAAG

SEQ ID NO: 120052 - protein, 20 aa, Artificial Sequence
  Description of Artificial Sequence: Synthetic peptide
  Seed: PRMCSLMQGSTLPRRSGAAG
PRMWSLMQGSTAPRRSGAAG

SEQ ID NO: 120053 - protein, 20 aa, Artificial Sequence
  Description of Artificial Sequence: Synthetic peptide
  Seed: PRMCSLMQGSTLPRRSGAAG
PRMWSLMQGSTGPRRSGAAG

SEQ ID NO: 120054 - protein, 20 aa, Artificial Sequence
  Description of Artificial Sequence: Synthetic peptide
  Seed: PRMCSLMQGSTLPRRSGAAG
PRMWSLMQGSTIPRRSGAAG

SEQ ID NO: 120055 - protein, 20 aa, Artificial Sequence
  Description of Artificial Sequence: Synthetic peptide
  Seed: PRMCSLMQGSTLPRRSGAAG
PRMWSLMQGSTLPRRSGAAG

SEQ ID NO: 120056 - protein, 20 aa, Artificial Sequence
  Description of Artificial Sequence: Synthetic peptide
  Seed: PRMCSLMQGSTLPRRSGAAG
PRMWSLMQGSTMPRRSGAAG

SEQ ID NO: 120057 - protein, 20 aa, Artificial Sequence
  Description of Artificial Sequence: Synthetic peptide
  Seed: PRMCSLMQGSTLPRRSGAAG
PRMWSLMQGSTSPRRSGAAG

SEQ ID NO: 120058 - protein, 20 aa, Artificial Sequence
  Description of Artificial Sequence: Synthetic peptide
  Seed: PRMCSLMQGSTLPRRSGAAG
PRMWSLMQGSTTPRRSGAAG

SEQ ID NO: 120059 - protein, 20 aa, Artificial Sequence
  Description of Artificial Sequence: Synthetic peptide
  Seed: PRMCSLMQGSTLPRRSGAAG
PRMWSLMQGSTVPRRSGAAG

SEQ ID NO: 120060 - protein, 20 aa, Artificial Sequence
  Description of Artificial Sequence: Synthetic peptide
  Seed: PRMCSLMQGSTLPRRSGAAG
PRMWSLMQNSTAPRRSGAAG

SEQ ID NO: 120061 - protein, 20 aa, Artificial Sequence
  Description of Artificial Sequence: Synthetic peptide
  Seed: PRMCSLMQGSTLPRRSGAAG
PRMWSLMQNSTIPRRSGAAG

SEQ ID NO: 120062 - protein, 20 aa, Artificial Sequence
  Description of Artificial Sequence: Synthetic peptide
  Seed: PRMCSLMQGSTLPRRSGAAG
PRMWSLMQNSTLPRRSGAAG

SEQ ID NO: 120063 - protein, 20 aa, Artificial Sequence
  Description of Artificial Sequence: Synthetic peptide
  Seed: PRMCSLMQGSTLPRRSGAAG
PRMWSLMQNSTMPRRSGAAG

SEQ ID NO: 120064 - protein, 20 aa, Artificial Sequence
  Description of Artificial Sequence: Synthetic peptide
  Seed: PRMCSLMQGSTLPRRSGAAG
PRMWSLMQNSTVPRRSGAAG

SEQ ID NO: 120065 - protein, 20 aa, Artificial Sequence
  Description of Artificial Sequence: Synthetic peptide
  Seed: PRMCSLMQGSTLPRRSGAAG
PRMWSLMQPSTAPRRSGAAG

SEQ ID NO: 120066 - protein, 20 aa, Artificial Sequence
  Description of Artificial Sequence: Synthetic peptide
  Seed: PRMCSLMQGSTLPRRSGAAG
PRMWSLMQPSTIPRRSGAAG

SEQ ID NO: 120067 - protein, 20 aa, Artificial Sequence
  Description of Artificial Sequence: Synthetic peptide
  Seed: PRMCSLMQGSTLPRRSGAAG
PRMWSLMQPSTLPRRSGAAG

SEQ ID NO: 120068 - protein, 20 aa, Artificial Sequence
  Description of Artificial Sequence: Synthetic peptide
  Seed: PRMCSLMQGSTLPRRSGAAG
PRMWSLMQPSTMPRRSGAAG

SEQ ID NO: 120069 - protein, 20 aa, Artificial Sequence
  Description of Artificial Sequence: Synthetic peptide
  Seed: PRMCSLMQGSTLPRRSGAAG
PRMWSLMQPSTSPRRSGAAG

SEQ ID NO: 120070 - protein, 20 aa, Artificial Sequence
  Description of Artificial Sequence: Synthetic peptide
  Seed: PRMCSLMQGSTLPRRSGAAG
PRMWSLMQPSTTPRRSGAAG

SEQ ID NO: 120071 - protein, 20 aa, Artificial Sequence
  Description of Artificial Sequence: Synthetic peptide
  Seed: PRMCSLMQGSTLPRRSGAAG
PRMWSLMQPSTVPRRSGAAG

SEQ ID NO: 120072 - protein, 20 aa, Artificial Sequence
  Description of Artificial Sequence: Synthetic peptide
  Seed: PRMCSLMQGSTLPRRSGAAG
PRMWSLMQSSTAPRRSGAAG

SEQ ID NO: 120073 - protein, 20 aa, Artificial Sequence
  Description of Artificial Sequence: Synthetic peptide
  Seed: PRMCSLMQGSTLPRRSGAAG
PRMWSLMQSSTGPRRSGAAG

SEQ ID NO: 120074 - protein, 20 aa, Artificial Sequence
  Description of Artificial Sequence: Synthetic peptide
  Seed: PRMCSLMQGSTLPRRSGAAG
PRMWSLMQSSTIPRRSGAAG

SEQ ID NO: 120075 - protein, 20 aa, Artificial Sequence
  Description of Artificial Sequence: Synthetic peptide
  Seed: PRMCSLMQGSTLPRRSGAAG
PRMWSLMQSSTLPRRSGAAG

SEQ ID NO: 120076 - protein, 20 aa, Artificial Sequence
  Description of Artificial Sequence: Synthetic peptide
  Seed: PRMCSLMQGSTLPRRSGAAG
PRMWSLMQSSTMPRRSGAAG

SEQ ID NO: 120077 - protein, 20 aa, Artificial Sequence
  Description of Artificial Sequence: Synthetic peptide
  Seed: PRMCSLMQGSTLPRRSGAAG
PRMWSLMQSSTSPRRSGAAG

SEQ ID NO: 120078 - protein, 20 aa, Artificial Sequence
  Description of Artificial Sequence: Synthetic peptide
  Seed: PRMCSLMQGSTLPRRSGAAG
PRMWSLMQSSTTPRRSGAAG

SEQ ID NO: 120079 - protein, 20 aa, Artificial Sequence
  Description of Artificial Sequence: Synthetic peptide
  Seed: PRMCSLMQGSTLPRRSGAAG
PRMWSLMQSSTVPRRSGAAG

SEQ ID NO: 120080 - protein, 20 aa, Artificial Sequence
  Description of Artificial Sequence: Synthetic peptide
  Seed: PRMCSLMQGSTLPRRSGAAG
PRMWSLMQTSTAPRRSGAAG

SEQ ID NO: 120081 - protein, 20 aa, Artificial Sequence
  Description of Artificial Sequence: Synthetic peptide
  Seed: PRMCSLMQGSTLPRRSGAAG
PRMWSLMQTSTIPRRSGAAG

SEQ ID NO: 120082 - protein, 20 aa, Artificial Sequence
  Description of Artificial Sequence: Synthetic peptide
  Seed: PRMCSLMQGSTLPRRSGAAG
PRMWSLMQTSTLPRRSGAAG

SEQ ID NO: 120083 - protein, 20 aa, Artificial Sequence
  Description of Artificial Sequence: Synthetic peptide
  Seed: PRMCSLMQGSTLPRRSGAAG
PRMWSLMQTSTMPRRSGAAG

SEQ ID NO: 120084 - protein, 20 aa, Artificial Sequence
  Description of Artificial Sequence: Synthetic peptide
  Seed: PRMCSLMQGSTLPRRSGAAG
PRMWSLMQTSTTPRRSGAAG

SEQ ID NO: 120085 - protein, 20 aa, Artificial Sequence
  Description of Artificial Sequence: Synthetic peptide
  Seed: PRMCSLMQGSTLPRRSGAAG
PRMWSLMQTSTVPRRSGAAG

SEQ ID NO: 120086 - protein, 20 aa, Artificial Sequence
  Description of Artificial Sequence: Synthetic peptide
  Seed: PRMCSLMQGSTLPRRSGAAG
PRMWSLMQVSTAPRRSGAAG

SEQ ID NO: 120087 - protein, 20 aa, Artificial Sequence
  Description of Artificial Sequence: Synthetic peptide
  Seed: PRMCSLMQGSTLPRRSGAAG
PRMWSLMQVSTIPRRSGAAG

SEQ ID NO: 120088 - protein, 20 aa, Artificial Sequence
  Description of Artificial Sequence: Synthetic peptide
  Seed: PRMCSLMQGSTLPRRSGAAG
PRMWSLMQVSTLPRRSGAAG

SEQ ID NO: 120089 - protein, 20 aa, Artificial Sequence
  Description of Artificial Sequence: Synthetic peptide
  Seed: PRMCSLMQGSTLPRRSGAAG
PRMWSLMQVSTVPRRSGAAG

SEQ ID NO: 120090 - protein, 20 aa, Artificial Sequence
  Description of Artificial Sequence: Synthetic peptide
  Seed: PRMCSLMQGSTLPRRSGAAG
PRMWSLQQASTAPRRSGAAG

SEQ ID NO: 120091 - protein, 20 aa, Artificial Sequence
  Description of Artificial Sequence: Synthetic peptide
  Seed: PRMCSLMQGSTLPRRSGAAG
PRMWSLQQASTIPRRSGAAG

SEQ ID NO: 120092 - protein, 20 aa, Artificial Sequence
  Description of Artificial Sequence: Synthetic peptide
  Seed: PRMCSLMQGSTLPRRSGAAG
PRMWSLQQASTLPRRSGAAG

SEQ ID NO: 120093 - protein, 20 aa, Artificial Sequence
  Description of Artificial Sequence: Synthetic peptide
  Seed: PRMCSLMQGSTLPRRSGAAG
PRMWSLQQASTMPRRSGAAG

SEQ ID NO: 120094 - protein, 20 aa, Artificial Sequence
  Description of Artificial Sequence: Synthetic peptide
  Seed: PRMCSLMQGSTLPRRSGAAG
PRMWSLQQASTVPRRSGAAG

SEQ ID NO: 120095 - protein, 20 aa, Artificial Sequence
  Description of Artificial Sequence: Synthetic peptide
  Seed: PRMCSLMQGSTLPRRSGAAG
PRMWSLQQGSTAPRRSGAAG

SEQ ID NO: 120096 - protein, 20 aa, Artificial Sequence
  Description of Artificial Sequence: Synthetic peptide
  Seed: PRMCSLMQGSTLPRRSGAAG
PRMWSLQQGSTIPRRSGAAG

SEQ ID NO: 120097 - protein, 20 aa, Artificial Sequence
  Description of Artificial Sequence: Synthetic peptide
  Seed: PRMCSLMQGSTLPRRSGAAG
PRMWSLQQGSTLPRRSGAAG

SEQ ID NO: 120098 - protein, 20 aa, Artificial Sequence
  Description of Artificial Sequence: Synthetic peptide
  Seed: PRMCSLMQGSTLPRRSGAAG
PRMWSLQQGSTVPRRSGAAG

SEQ ID NO: 120099 - protein, 20 aa, Artificial Sequence
  Description of Artificial Sequence: Synthetic peptide
  Seed: PRMCSLMQGSTLPRRSGAAG
PRMWSLQQSSTIPRRSGAAG

SEQ ID NO: 120100 - protein, 20 aa, Artificial Sequence
  Description of Artificial Sequence: Synthetic peptide
  Seed: PRMCSLMQGSTLPRRSGAAG
PRMWSLQQSSTLPRRSGAAG

SEQ ID NO: 120101 - protein, 20 aa, Artificial Sequence
  Description of Artificial Sequence: Synthetic peptide
  Seed: PRMCSLMQGSTLPRRSGAAG
PRMWSLQQSSTVPRRSGAAG

SEQ ID NO: 120102 - protein, 20 aa, Artificial Sequence
  Description of Artificial Sequence: Synthetic peptide
  Seed: PRMCSLMQGSTLPRRSGAAG
PRMWSLSQASTIPRRSGAAG

SEQ ID NO: 120103 - protein, 20 aa, Artificial Sequence
  Description of Artificial Sequence: Synthetic peptide
  Seed: PRMCSLMQGSTLPRRSGAAG
PRMWSLSQASTLPRRSGAAG

SEQ ID NO: 120104 - protein, 20 aa, Artificial Sequence
  Description of Artificial Sequence: Synthetic peptide
  Seed: PRMCSLMQGSTLPRRSGAAG
PRMWSLSQASTVPRRSGAAG

SEQ ID NO: 120105 - protein, 20 aa, Artificial Sequence
  Description of Artificial Sequence: Synthetic peptide
  Seed: PRMCSLMQGSTLPRRSGAAG
PRMWSLVQASTAPRRSGAAG

SEQ ID NO: 120106 - protein, 20 aa, Artificial Sequence
  Description of Artificial Sequence: Synthetic peptide
  Seed: PRMCSLMQGSTLPRRSGAAG
PRMWSLVQASTIPRRSGAAG

SEQ ID NO: 120107 - protein, 20 aa, Artificial Sequence
  Description of Artificial Sequence: Synthetic peptide
  Seed: PRMCSLMQGSTLPRRSGAAG
PRMWSLVQASTLPRRSGAAG

SEQ ID NO: 120108 - protein, 20 aa, Artificial Sequence
  Description of Artificial Sequence: Synthetic peptide
  Seed: PRMCSLMQGSTLPRRSGAAG
PRMWSLVQASTVPRRSGAAG

SEQ ID NO: 120109 - protein, 20 aa, Artificial Sequence
  Description of Artificial Sequence: Synthetic peptide
  Seed: PRMCSLMQGSTLPRRSGAAG
PRMWSLVQGSTAPRRSGAAG

SEQ ID NO: 120110 - protein, 20 aa, Artificial Sequence
  Description of Artificial Sequence: Synthetic peptide
  Seed: PRMCSLMQGSTLPRRSGAAG
PRMWSLVQGSTIPRRSGAAG

SEQ ID NO: 120111 - protein, 20 aa, Artificial Sequence
  Description of Artificial Sequence: Synthetic peptide
  Seed: PRMCSLMQGSTLPRRSGAAG
PRMWSLVQGSTLPRRSGAAG

SEQ ID NO: 120112 - protein, 20 aa, Artificial Sequence
  Description of Artificial Sequence: Synthetic peptide
  Seed: PRMCSLMQGSTLPRRSGAAG
PRMWSLVQGSTVPRRSGAAG

SEQ ID NO: 120113 - protein, 20 aa, Artificial Sequence
  Description of Artificial Sequence: Synthetic peptide
  Seed: PRMCSLMQGSTLPRRSGAAG
PRMWSLVQSSTAPRRSGAAG

SEQ ID NO: 120114 - protein, 20 aa, Artificial Sequence
  Description of Artificial Sequence: Synthetic peptide
  Seed: PRMCSLMQGSTLPRRSGAAG
PRMWSLVQSSTIPRRSGAAG

SEQ ID NO: 120115 - protein, 20 aa, Artificial Sequence
  Description of Artificial Sequence: Synthetic peptide
  Seed: PRMCSLMQGSTLPRRSGAAG
PRMWSLVQSSTLPRRSGAAG

SEQ ID NO: 120116 - protein, 20 aa, Artificial Sequence
  Description of Artificial Sequence: Synthetic peptide
  Seed: PRMCSLMQGSTLPRRSGAAG
PRMWSLVQSSTVPRRSGAAG

SEQ ID NO: 120117 - protein, 20 aa, Artificial Sequence
  Description of Artificial Sequence: Synthetic peptide
  Seed: PRMCSLMQGSTLPRRSGAAG
PRMYSLAQASTAPRRSGAAG

SEQ ID NO: 120118 - protein, 20 aa, Artificial Sequence
  Description of Artificial Sequence: Synthetic peptide
  Seed: PRMCSLMQGSTLPRRSGAAG
PRMYSLAQASTFPRRSGAAG

SEQ ID NO: 120119 - protein, 20 aa, Artificial Sequence
  Description of Artificial Sequence: Synthetic peptide
  Seed: PRMCSLMQGSTLPRRSGAAG
PRMYSLAQASTGPRRSGAAG

SEQ ID NO: 120120 - protein, 20 aa, Artificial Sequence
  Description of Artificial Sequence: Synthetic peptide
  Seed: PRMCSLMQGSTLPRRSGAAG
PRMYSLAQASTIPRRSGAAG

SEQ ID NO: 120121 - protein, 20 aa, Artificial Sequence
  Description of Artificial Sequence: Synthetic peptide
  Seed: PRMCSLMQGSTLPRRSGAAG
PRMYSLAQASTLPRRSGAAG

SEQ ID NO: 120122 - protein, 20 aa, Artificial Sequence
  Description of Artificial Sequence: Synthetic peptide
  Seed: PRMCSLMQGSTLPRRSGAAG
PRMYSLAQASTMPRRSGAAG

SEQ ID NO: 120123 - protein, 20 aa, Artificial Sequence
  Description of Artificial Sequence: Synthetic peptide
  Seed: PRMCSLMQGSTLPRRSGAAG
PRMYSLAQASTSPRRSGAAG

SEQ ID NO: 120124 - protein, 20 aa, Artificial Sequence
  Description of Artificial Sequence: Synthetic peptide
  Seed: PRMCSLMQGSTLPRRSGAAG
PRMYSLAQASTTPRRSGAAG

SEQ ID NO: 120125 - protein, 20 aa, Artificial Sequence
  Description of Artificial Sequence: Synthetic peptide
  Seed: PRMCSLMQGSTLPRRSGAAG
PRMYSLAQASTVPRRSGAAG

SEQ ID NO: 120126 - protein, 20 aa, Artificial Sequence
  Description of Artificial Sequence: Synthetic peptide
  Seed: PRMCSLMQGSTLPRRSGAAG
PRMYSLAQGSTAPRRSGAAG

SEQ ID NO: 120127 - protein, 20 aa, Artificial Sequence
  Description of Artificial Sequence: Synthetic peptide
  Seed: PRMCSLMQGSTLPRRSGAAG
PRMYSLAQGSTIPRRSGAAG

SEQ ID NO: 120128 - protein, 20 aa, Artificial Sequence
  Description of Artificial Sequence: Synthetic peptide
  Seed: PRMCSLMQGSTLPRRSGAAG
PRMYSLAQGSTLPRRSGAAG

SEQ ID NO: 120129 - protein, 20 aa, Artificial Sequence
  Description of Artificial Sequence: Synthetic peptide
  Seed: PRMCSLMQGSTLPRRSGAAG
PRMYSLAQGSTMPRRSGAAG

SEQ ID NO: 120130 - protein, 20 aa, Artificial Sequence
  Description of Artificial Sequence: Synthetic peptide
  Seed: PRMCSLMQGSTLPRRSGAAG
PRMYSLAQGSTSPRRSGAAG

SEQ ID NO: 120131 - protein, 20 aa, Artificial Sequence
  Description of Artificial Sequence: Synthetic peptide
  Seed: PRMCSLMQGSTLPRRSGAAG
PRMYSLAQGSTTPRRSGAAG

SEQ ID NO: 120132 - protein, 20 aa, Artificial Sequence
  Description of Artificial Sequence: Synthetic peptide
  Seed: PRMCSLMQGSTLPRRSGAAG
PRMYSLAQGSTVPRRSGAAG

SEQ ID NO: 120133 - protein, 20 aa, Artificial Sequence
  Description of Artificial Sequence: Synthetic peptide
  Seed: PRMCSLMQGSTLPRRSGAAG
PRMYSLAQISTIPRRSGAAG

SEQ ID NO: 120134 - protein, 20 aa, Artificial Sequence
  Description of Artificial Sequence: Synthetic peptide
  Seed: PRMCSLMQGSTLPRRSGAAG
PRMYSLAQISTVPRRSGAAG

SEQ ID NO: 120135 - protein, 20 aa, Artificial Sequence
  Description of Artificial Sequence: Synthetic peptide
  Seed: PRMCSLMQGSTLPRRSGAAG
PRMYSLAQNSTAPRRSGAAG

SEQ ID NO: 120136 - protein, 20 aa, Artificial Sequence
  Description of Artificial Sequence: Synthetic peptide
  Seed: PRMCSLMQGSTLPRRSGAAG
PRMYSLAQNSTIPRRSGAAG

SEQ ID NO: 120137 - protein, 20 aa, Artificial Sequence
  Description of Artificial Sequence: Synthetic peptide
  Seed: PRMCSLMQGSTLPRRSGAAG
PRMYSLAQNSTLPRRSGAAG

SEQ ID NO: 120138 - protein, 20 aa, Artificial Sequence
  Description of Artificial Sequence: Synthetic peptide
  Seed: PRMCSLMQGSTLPRRSGAAG
PRMYSLAQNSTVPRRSGAAG

SEQ ID NO: 120139 - protein, 20 aa, Artificial Sequence
  Description of Artificial Sequence: Synthetic peptide
  Seed: PRMCSLMQGSTLPRRSGAAG
PRMYSLAQPSTAPRRSGAAG

SEQ ID NO: 120140 - protein, 20 aa, Artificial Sequence
  Description of Artificial Sequence: Synthetic peptide
  Seed: PRMCSLMQGSTLPRRSGAAG
PRMYSLAQPSTIPRRSGAAG

SEQ ID NO: 120141 - protein, 20 aa, Artificial Sequence
  Description of Artificial Sequence: Synthetic peptide
  Seed: PRMCSLMQGSTLPRRSGAAG
PRMYSLAQPSTLPRRSGAAG

SEQ ID NO: 120142 - protein, 20 aa, Artificial Sequence
  Description of Artificial Sequence: Synthetic peptide
  Seed: PRMCSLMQGSTLPRRSGAAG
PRMYSLAQPSTMPRRSGAAG

SEQ ID NO: 120143 - protein, 20 aa, Artificial Sequence
  Description of Artificial Sequence: Synthetic peptide
  Seed: PRMCSLMQGSTLPRRSGAAG
PRMYSLAQPSTSPRRSGAAG

SEQ ID NO: 120144 - protein, 20 aa, Artificial Sequence
  Description of Artificial Sequence: Synthetic peptide
  Seed: PRMCSLMQGSTLPRRSGAAG
PRMYSLAQPSTTPRRSGAAG

SEQ ID NO: 120145 - protein, 20 aa, Artificial Sequence
  Description of Artificial Sequence: Synthetic peptide
  Seed: PRMCSLMQGSTLPRRSGAAG
PRMYSLAQPSTVPRRSGAAG

SEQ ID NO: 120146 - protein, 20 aa, Artificial Sequence
  Description of Artificial Sequence: Synthetic peptide
  Seed: PRMCSLMQGSTLPRRSGAAG
PRMYSLAQSSTAPRRSGAAG

SEQ ID NO: 120147 - protein, 20 aa, Artificial Sequence
  Description of Artificial Sequence: Synthetic peptide
  Seed: PRMCSLMQGSTLPRRSGAAG
PRMYSLAQSSTIPRRSGAAG

SEQ ID NO: 120148 - protein, 20 aa, Artificial Sequence
  Description of Artificial Sequence: Synthetic peptide
  Seed: PRMCSLMQGSTLPRRSGAAG
PRMYSLAQSSTLPRRSGAAG

SEQ ID NO: 120149 - protein, 20 aa, Artificial Sequence
  Description of Artificial Sequence: Synthetic peptide
  Seed: PRMCSLMQGSTLPRRSGAAG
PRMYSLAQSSTMPRRSGAAG

SEQ ID NO: 120150 - protein, 20 aa, Artificial Sequence
  Description of Artificial Sequence: Synthetic peptide
  Seed: PRMCSLMQGSTLPRRSGAAG
PRMYSLAQSSTSPRRSGAAG

SEQ ID NO: 120151 - protein, 20 aa, Artificial Sequence
  Description of Artificial Sequence: Synthetic peptide
  Seed: PRMCSLMQGSTLPRRSGAAG
PRMYSLAQSSTTPRRSGAAG

SEQ ID NO: 120152 - protein, 20 aa, Artificial Sequence
  Description of Artificial Sequence: Synthetic peptide
  Seed: PRMCSLMQGSTLPRRSGAAG
PRMYSLAQSSTVPRRSGAAG

SEQ ID NO: 120153 - protein, 20 aa, Artificial Sequence
  Description of Artificial Sequence: Synthetic peptide
  Seed: PRMCSLMQGSTLPRRSGAAG
PRMYSLAQTSTAPRRSGAAG

SEQ ID NO: 120154 - protein, 20 aa, Artificial Sequence
  Description of Artificial Sequence: Synthetic peptide
  Seed: PRMCSLMQGSTLPRRSGAAG
PRMYSLAQTSTIPRRSGAAG

SEQ ID NO: 120155 - protein, 20 aa, Artificial Sequence
  Description of Artificial Sequence: Synthetic peptide
  Seed: PRMCSLMQGSTLPRRSGAAG
PRMYSLAQTSTLPRRSGAAG

SEQ ID NO: 120156 - protein, 20 aa, Artificial Sequence
  Description of Artificial Sequence: Synthetic peptide
  Seed: PRMCSLMQGSTLPRRSGAAG
PRMYSLAQTSTVPRRSGAAG

SEQ ID NO: 120157 - protein, 20 aa, Artificial Sequence
  Description of Artificial Sequence: Synthetic peptide
  Seed: PRMCSLMQGSTLPRRSGAAG
PRMYSLAQVSTAPRRSGAAG

SEQ ID NO: 120158 - protein, 20 aa, Artificial Sequence
  Description of Artificial Sequence: Synthetic peptide
  Seed: PRMCSLMQGSTLPRRSGAAG
PRMYSLAQVSTIPRRSGAAG

SEQ ID NO: 120159 - protein, 20 aa, Artificial Sequence
  Description of Artificial Sequence: Synthetic peptide
  Seed: PRMCSLMQGSTLPRRSGAAG
PRMYSLAQVSTLPRRSGAAG

SEQ ID NO: 120160 - protein, 20 aa, Artificial Sequence
  Description of Artificial Sequence: Synthetic peptide
  Seed: PRMCSLMQGSTLPRRSGAAG
PRMYSLAQVSTVPRRSGAAG

SEQ ID NO: 120161 - protein, 20 aa, Artificial Sequence
  Description of Artificial Sequence: Synthetic peptide
  Seed: PRMCSLMQGSTLPRRSGAAG
PRMYSLCQASTLPRRSGAAG

SEQ ID NO: 120162 - protein, 20 aa, Artificial Sequence
  Description of Artificial Sequence: Synthetic peptide
  Seed: PRMCSLMQGSTLPRRSGAAG
PRMYSLCQASTVPRRSGAAG

SEQ ID NO: 120163 - protein, 20 aa, Artificial Sequence
  Description of Artificial Sequence: Synthetic peptide
  Seed: PRMCSLMQGSTLPRRSGAAG
PRMYSLEQASTAPRRSGAAG

SEQ ID NO: 120164 - protein, 20 aa, Artificial Sequence
  Description of Artificial Sequence: Synthetic peptide
  Seed: PRMCSLMQGSTLPRRSGAAG
PRMYSLEQASTIPRRSGAAG

SEQ ID NO: 120165 - protein, 20 aa, Artificial Sequence
  Description of Artificial Sequence: Synthetic peptide
  Seed: PRMCSLMQGSTLPRRSGAAG
PRMYSLEQASTLPRRSGAAG

SEQ ID NO: 120166 - protein, 20 aa, Artificial Sequence
  Description of Artificial Sequence: Synthetic peptide
  Seed: PRMCSLMQGSTLPRRSGAAG
PRMYSLEQASTVPRRSGAAG

SEQ ID NO: 120167 - protein, 20 aa, Artificial Sequence
  Description of Artificial Sequence: Synthetic peptide
  Seed: PRMCSLMQGSTLPRRSGAAG
PRMYSLEQGSTAPRRSGAAG

SEQ ID NO: 120168 - protein, 20 aa, Artificial Sequence
  Description of Artificial Sequence: Synthetic peptide
  Seed: PRMCSLMQGSTLPRRSGAAG
PRMYSLEQGSTIPRRSGAAG

SEQ ID NO: 120169 - protein, 20 aa, Artificial Sequence
  Description of Artificial Sequence: Synthetic peptide
  Seed: PRMCSLMQGSTLPRRSGAAG
PRMYSLEQGSTLPRRSGAAG

SEQ ID NO: 120170 - protein, 20 aa, Artificial Sequence
  Description of Artificial Sequence: Synthetic peptide
  Seed: PRMCSLMQGSTLPRRSGAAG
PRMYSLEQGSTVPRRSGAAG

SEQ ID NO: 120171 - protein, 20 aa, Artificial Sequence
  Description of Artificial Sequence: Synthetic peptide
  Seed: PRMCSLMQGSTLPRRSGAAG
PRMYSLEQSSTIPRRSGAAG

SEQ ID NO: 120172 - protein, 20 aa, Artificial Sequence
  Description of Artificial Sequence: Synthetic peptide
  Seed: PRMCSLMQGSTLPRRSGAAG
PRMYSLEQSSTLPRRSGAAG

SEQ ID NO: 120173 - protein, 20 aa, Artificial Sequence
  Description of Artificial Sequence: Synthetic peptide
  Seed: PRMCSLMQGSTLPRRSGAAG
PRMYSLEQSSTVPRRSGAAG

SEQ ID NO: 120174 - protein, 20 aa, Artificial Sequence
  Description of Artificial Sequence: Synthetic peptide
  Seed: PRMCSLMQGSTLPRRSGAAG
PRMYSLFQASTAPRRSGAAG

SEQ ID NO: 120175 - protein, 20 aa, Artificial Sequence
  Description of Artificial Sequence: Synthetic peptide
  Seed: PRMCSLMQGSTLPRRSGAAG
PRMYSLFQASTIPRRSGAAG

SEQ ID NO: 120176 - protein, 20 aa, Artificial Sequence
  Description of Artificial Sequence: Synthetic peptide
  Seed: PRMCSLMQGSTLPRRSGAAG
PRMYSLFQASTLPRRSGAAG

SEQ ID NO: 120177 - protein, 20 aa, Artificial Sequence
  Description of Artificial Sequence: Synthetic peptide
  Seed: PRMCSLMQGSTLPRRSGAAG
PRMYSLFQASTSPRRSGAAG

SEQ ID NO: 120178 - protein, 20 aa, Artificial Sequence
  Description of Artificial Sequence: Synthetic peptide
  Seed: PRMCSLMQGSTLPRRSGAAG
PRMYSLFQASTVPRRSGAAG

SEQ ID NO: 120179 - protein, 20 aa, Artificial Sequence
  Description of Artificial Sequence: Synthetic peptide
  Seed: PRMCSLMQGSTLPRRSGAAG
PRMYSLFQGSTAPRRSGAAG

SEQ ID NO: 120180 - protein, 20 aa, Artificial Sequence
  Description of Artificial Sequence: Synthetic peptide
  Seed: PRMCSLMQGSTLPRRSGAAG
PRMYSLFQGSTIPRRSGAAG

SEQ ID NO: 120181 - protein, 20 aa, Artificial Sequence
  Description of Artificial Sequence: Synthetic peptide
  Seed: PRMCSLMQGSTLPRRSGAAG
PRMYSLFQGSTLPRRSGAAG

SEQ ID NO: 120182 - protein, 20 aa, Artificial Sequence
  Description of Artificial Sequence: Synthetic peptide
  Seed: PRMCSLMQGSTLPRRSGAAG
PRMYSLFQGSTVPRRSGAAG

SEQ ID NO: 120183 - protein, 20 aa, Artificial Sequence
  Description of Artificial Sequence: Synthetic peptide
  Seed: PRMCSLMQGSTLPRRSGAAG
PRMYSLFQPSTVPRRSGAAG

SEQ ID NO: 120184 - protein, 20 aa, Artificial Sequence
  Description of Artificial Sequence: Synthetic peptide
  Seed: PRMCSLMQGSTLPRRSGAAG
PRMYSLFQSSTAPRRSGAAG

SEQ ID NO: 120185 - protein, 20 aa, Artificial Sequence
  Description of Artificial Sequence: Synthetic peptide
  Seed: PRMCSLMQGSTLPRRSGAAG
PRMYSLFQSSTIPRRSGAAG

SEQ ID NO: 120186 - protein, 20 aa, Artificial Sequence
  Description of Artificial Sequence: Synthetic peptide
  Seed: PRMCSLMQGSTLPRRSGAAG
PRMYSLFQSSTLPRRSGAAG

SEQ ID NO: 120187 - protein, 20 aa, Artificial Sequence
  Description of Artificial Sequence: Synthetic peptide
  Seed: PRMCSLMQGSTLPRRSGAAG
PRMYSLFQSSTVPRRSGAAG

SEQ ID NO: 120188 - protein, 20 aa, Artificial Sequence
  Description of Artificial Sequence: Synthetic peptide
  Seed: PRMCSLMQGSTLPRRSGAAG
PRMYSLGQASTAPRRSGAAG

SEQ ID NO: 120189 - protein, 20 aa, Artificial Sequence
  Description of Artificial Sequence: Synthetic peptide
  Seed: PRMCSLMQGSTLPRRSGAAG
PRMYSLGQASTIPRRSGAAG

SEQ ID NO: 120190 - protein, 20 aa, Artificial Sequence
  Description of Artificial Sequence: Synthetic peptide
  Seed: PRMCSLMQGSTLPRRSGAAG
PRMYSLGQASTLPRRSGAAG

SEQ ID NO: 120191 - protein, 20 aa, Artificial Sequence
  Description of Artificial Sequence: Synthetic peptide
  Seed: PRMCSLMQGSTLPRRSGAAG
PRMYSLGQASTMPRRSGAAG

SEQ ID NO: 120192 - protein, 20 aa, Artificial Sequence
  Description of Artificial Sequence: Synthetic peptide
  Seed: PRMCSLMQGSTLPRRSGAAG
PRMYSLGQASTVPRRSGAAG

SEQ ID NO: 120193 - protein, 20 aa, Artificial Sequence
  Description of Artificial Sequence: Synthetic peptide
  Seed: PRMCSLMQGSTLPRRSGAAG
PRMYSLGQGSTIPRRSGAAG

SEQ ID NO: 120194 - protein, 20 aa, Artificial Sequence
  Description of Artificial Sequence: Synthetic peptide
  Seed: PRMCSLMQGSTLPRRSGAAG
PRMYSLGQGSTLPRRSGAAG

SEQ ID NO: 120195 - protein, 20 aa, Artificial Sequence
  Description of Artificial Sequence: Synthetic peptide
  Seed: PRMCSLMQGSTLPRRSGAAG
PRMYSLGQGSTVPRRSGAAG

SEQ ID NO: 120196 - protein, 20 aa, Artificial Sequence
  Description of Artificial Sequence: Synthetic peptide
  Seed: PRMCSLMQGSTLPRRSGAAG
PRMYSLGQSSTIPRRSGAAG

SEQ ID NO: 120197 - protein, 20 aa, Artificial Sequence
  Description of Artificial Sequence: Synthetic peptide
  Seed: PRMCSLMQGSTLPRRSGAAG
PRMYSLGQSSTLPRRSGAAG

SEQ ID NO: 120198 - protein, 20 aa, Artificial Sequence
  Description of Artificial Sequence: Synthetic peptide
  Seed: PRMCSLMQGSTLPRRSGAAG
PRMYSLGQSSTVPRRSGAAG

SEQ ID NO: 120199 - protein, 20 aa, Artificial Sequence
  Description of Artificial Sequence: Synthetic peptide
  Seed: PRMCSLMQGSTLPRRSGAAG
PRMYSLHQASTIPRRSGAAG

SEQ ID NO: 120200 - protein, 20 aa, Artificial Sequence
  Description of Artificial Sequence: Synthetic peptide
  Seed: PRMCSLMQGSTLPRRSGAAG
PRMYSLHQASTLPRRSGAAG

SEQ ID NO: 120201 - protein, 20 aa, Artificial Sequence
  Description of Artificial Sequence: Synthetic peptide
  Seed: PRMCSLMQGSTLPRRSGAAG
PRMYSLHQASTVPRRSGAAG

SEQ ID NO: 120202 - protein, 20 aa, Artificial Sequence
  Description of Artificial Sequence: Synthetic peptide
  Seed: PRMCSLMQGSTLPRRSGAAG
PRMYSLIQASTAPRRSGAAG

SEQ ID NO: 120203 - protein, 20 aa, Artificial Sequence
  Description of Artificial Sequence: Synthetic peptide
  Seed: PRMCSLMQGSTLPRRSGAAG
PRMYSLIQASTCPRRSGAAG

SEQ ID NO: 120204 - protein, 20 aa, Artificial Sequence
  Description of Artificial Sequence: Synthetic peptide
  Seed: PRMCSLMQGSTLPRRSGAAG
PRMYSLIQASTFPRRSGAAG

SEQ ID NO: 120205 - protein, 20 aa, Artificial Sequence
  Description of Artificial Sequence: Synthetic peptide
  Seed: PRMCSLMQGSTLPRRSGAAG
PRMYSLIQASTGPRRSGAAG

SEQ ID NO: 120206 - protein, 20 aa, Artificial Sequence
  Description of Artificial Sequence: Synthetic peptide
  Seed: PRMCSLMQGSTLPRRSGAAG
PRMYSLIQASTIPRRSGAAG

SEQ ID NO: 120207 - protein, 20 aa, Artificial Sequence
  Description of Artificial Sequence: Synthetic peptide
  Seed: PRMCSLMQGSTLPRRSGAAG
PRMYSLIQASTLPRRSGAAG

SEQ ID NO: 120208 - protein, 20 aa, Artificial Sequence
  Description of Artificial Sequence: Synthetic peptide
  Seed: PRMCSLMQGSTLPRRSGAAG
PRMYSLIQASTMPRRSGAAG

SEQ ID NO: 120209 - protein, 20 aa, Artificial Sequence
  Description of Artificial Sequence: Synthetic peptide
  Seed: PRMCSLMQGSTLPRRSGAAG
PRMYSLIQASTNPRRSGAAG

SEQ ID NO: 120210 - protein, 20 aa, Artificial Sequence
  Description of Artificial Sequence: Synthetic peptide
  Seed: PRMCSLMQGSTLPRRSGAAG
PRMYSLIQASTSPRRSGAAG

SEQ ID NO: 120211 - protein, 20 aa, Artificial Sequence
  Description of Artificial Sequence: Synthetic peptide
  Seed: PRMCSLMQGSTLPRRSGAAG
PRMYSLIQASTTPRRSGAAG

SEQ ID NO: 120212 - protein, 20 aa, Artificial Sequence
  Description of Artificial Sequence: Synthetic peptide
  Seed: PRMCSLMQGSTLPRRSGAAG
PRMYSLIQASTVPRRSGAAG

SEQ ID NO: 120213 - protein, 20 aa, Artificial Sequence
  Description of Artificial Sequence: Synthetic peptide
  Seed: PRMCSLMQGSTLPRRSGAAG
PRMYSLIQGSTAPRRSGAAG

SEQ ID NO: 120214 - protein, 20 aa, Artificial Sequence
  Description of Artificial Sequence: Synthetic peptide
  Seed: PRMCSLMQGSTLPRRSGAAG
PRMYSLIQGSTGPRRSGAAG

SEQ ID NO: 120215 - protein, 20 aa, Artificial Sequence
  Description of Artificial Sequence: Synthetic peptide
  Seed: PRMCSLMQGSTLPRRSGAAG
PRMYSLIQGSTIPRRSGAAG

SEQ ID NO: 120216 - protein, 20 aa, Artificial Sequence
  Description of Artificial Sequence: Synthetic peptide
  Seed: PRMCSLMQGSTLPRRSGAAG
PRMYSLIQGSTLPRRSGAAG

SEQ ID NO: 120217 - protein, 20 aa, Artificial Sequence
  Description of Artificial Sequence: Synthetic peptide
  Seed: PRMCSLMQGSTLPRRSGAAG
PRMYSLIQGSTMPRRSGAAG

SEQ ID NO: 120218 - protein, 20 aa, Artificial Sequence
  Description of Artificial Sequence: Synthetic peptide
  Seed: PRMCSLMQGSTLPRRSGAAG
PRMYSLIQGSTSPRRSGAAG

SEQ ID NO: 120219 - protein, 20 aa, Artificial Sequence
  Description of Artificial Sequence: Synthetic peptide
  Seed: PRMCSLMQGSTLPRRSGAAG
PRMYSLIQGSTTPRRSGAAG

SEQ ID NO: 120220 - protein, 20 aa, Artificial Sequence
  Description of Artificial Sequence: Synthetic peptide
  Seed: PRMCSLMQGSTLPRRSGAAG
PRMYSLIQGSTVPRRSGAAG

SEQ ID NO: 120221 - protein, 20 aa, Artificial Sequence
  Description of Artificial Sequence: Synthetic peptide
  Seed: PRMCSLMQGSTLPRRSGAAG
PRMYSLIQISTAPRRSGAAG

SEQ ID NO: 120222 - protein, 20 aa, Artificial Sequence
  Description of Artificial Sequence: Synthetic peptide
  Seed: PRMCSLMQGSTLPRRSGAAG
PRMYSLIQISTVPRRSGAAG

SEQ ID NO: 120223 - protein, 20 aa, Artificial Sequence
  Description of Artificial Sequence: Synthetic peptide
  Seed: PRMCSLMQGSTLPRRSGAAG
PRMYSLIQNSTAPRRSGAAG

SEQ ID NO: 120224 - protein, 20 aa, Artificial Sequence
  Description of Artificial Sequence: Synthetic peptide
  Seed: PRMCSLMQGSTLPRRSGAAG
PRMYSLIQNSTIPRRSGAAG

SEQ ID NO: 120225 - protein, 20 aa, Artificial Sequence
  Description of Artificial Sequence: Synthetic peptide
  Seed: PRMCSLMQGSTLPRRSGAAG
PRMYSLIQNSTLPRRSGAAG

SEQ ID NO: 120226 - protein, 20 aa, Artificial Sequence
  Description of Artificial Sequence: Synthetic peptide
  Seed: PRMCSLMQGSTLPRRSGAAG
PRMYSLIQNSTTPRRSGAAG

SEQ ID NO: 120227 - protein, 20 aa, Artificial Sequence
  Description of Artificial Sequence: Synthetic peptide
  Seed: PRMCSLMQGSTLPRRSGAAG
PRMYSLIQNSTVPRRSGAAG

SEQ ID NO: 120228 - protein, 20 aa, Artificial Sequence
  Description of Artificial Sequence: Synthetic peptide
  Seed: PRMCSLMQGSTLPRRSGAAG
PRMYSLIQPSTAPRRSGAAG

SEQ ID NO: 120229 - protein, 20 aa, Artificial Sequence
  Description of Artificial Sequence: Synthetic peptide
  Seed: PRMCSLMQGSTLPRRSGAAG
PRMYSLIQPSTIPRRSGAAG

SEQ ID NO: 120230 - protein, 20 aa, Artificial Sequence
  Description of Artificial Sequence: Synthetic peptide
  Seed: PRMCSLMQGSTLPRRSGAAG
PRMYSLIQPSTLPRRSGAAG

SEQ ID NO: 120231 - protein, 20 aa, Artificial Sequence
  Description of Artificial Sequence: Synthetic peptide
  Seed: PRMCSLMQGSTLPRRSGAAG
PRMYSLIQPSTMPRRSGAAG

SEQ ID NO: 120232 - protein, 20 aa, Artificial Sequence
  Description of Artificial Sequence: Synthetic peptide
  Seed: PRMCSLMQGSTLPRRSGAAG
PRMYSLIQPSTSPRRSGAAG

SEQ ID NO: 120233 - protein, 20 aa, Artificial Sequence
  Description of Artificial Sequence: Synthetic peptide
  Seed: PRMCSLMQGSTLPRRSGAAG
PRMYSLIQPSTTPRRSGAAG

SEQ ID NO: 120234 - protein, 20 aa, Artificial Sequence
  Description of Artificial Sequence: Synthetic peptide
  Seed: PRMCSLMQGSTLPRRSGAAG
PRMYSLIQPSTVPRRSGAAG

SEQ ID NO: 120235 - protein, 20 aa, Artificial Sequence
  Description of Artificial Sequence: Synthetic peptide
  Seed: PRMCSLMQGSTLPRRSGAAG
PRMYSLIQSSTAPRRSGAAG

SEQ ID NO: 120236 - protein, 20 aa, Artificial Sequence
  Description of Artificial Sequence: Synthetic peptide
  Seed: PRMCSLMQGSTLPRRSGAAG
PRMYSLIQSSTGPRRSGAAG

SEQ ID NO: 120237 - protein, 20 aa, Artificial Sequence
  Description of Artificial Sequence: Synthetic peptide
  Seed: PRMCSLMQGSTLPRRSGAAG
PRMYSLIQSSTIPRRSGAAG

SEQ ID NO: 120238 - protein, 20 aa, Artificial Sequence
  Description of Artificial Sequence: Synthetic peptide
  Seed: PRMCSLMQGSTLPRRSGAAG
PRMYSLIQSSTLPRRSGAAG

SEQ ID NO: 120239 - protein, 20 aa, Artificial Sequence
  Description of Artificial Sequence: Synthetic peptide
  Seed: PRMCSLMQGSTLPRRSGAAG
PRMYSLIQSSTMPRRSGAAG

SEQ ID NO: 120240 - protein, 20 aa, Artificial Sequence
  Description of Artificial Sequence: Synthetic peptide
  Seed: PRMCSLMQGSTLPRRSGAAG
PRMYSLIQSSTSPRRSGAAG

SEQ ID NO: 120241 - protein, 20 aa, Artificial Sequence
  Description of Artificial Sequence: Synthetic peptide
  Seed: PRMCSLMQGSTLPRRSGAAG
PRMYSLIQSSTTPRRSGAAG

SEQ ID NO: 120242 - protein, 20 aa, Artificial Sequence
  Description of Artificial Sequence: Synthetic peptide
  Seed: PRMCSLMQGSTLPRRSGAAG
PRMYSLIQSSTVPRRSGAAG

SEQ ID NO: 120243 - protein, 20 aa, Artificial Sequence
  Description of Artificial Sequence: Synthetic peptide
  Seed: PRMCSLMQGSTLPRRSGAAG
PRMYSLIQTSTAPRRSGAAG

SEQ ID NO: 120244 - protein, 20 aa, Artificial Sequence
  Description of Artificial Sequence: Synthetic peptide
  Seed: PRMCSLMQGSTLPRRSGAAG
PRMYSLIQTSTIPRRSGAAG

SEQ ID NO: 120245 - protein, 20 aa, Artificial Sequence
  Description of Artificial Sequence: Synthetic peptide
  Seed: PRMCSLMQGSTLPRRSGAAG
PRMYSLIQTSTLPRRSGAAG

SEQ ID NO: 120246 - protein, 20 aa, Artificial Sequence
  Description of Artificial Sequence: Synthetic peptide
  Seed: PRMCSLMQGSTLPRRSGAAG
PRMYSLIQTSTMPRRSGAAG

SEQ ID NO: 120247 - protein, 20 aa, Artificial Sequence
  Description of Artificial Sequence: Synthetic peptide
  Seed: PRMCSLMQGSTLPRRSGAAG
PRMYSLIQTSTTPRRSGAAG

SEQ ID NO: 120248 - protein, 20 aa, Artificial Sequence
  Description of Artificial Sequence: Synthetic peptide
  Seed: PRMCSLMQGSTLPRRSGAAG
PRMYSLIQTSTVPRRSGAAG

SEQ ID NO: 120249 - protein, 20 aa, Artificial Sequence
  Description of Artificial Sequence: Synthetic peptide
  Seed: PRMCSLMQGSTLPRRSGAAG
PRMYSLIQVSTAPRRSGAAG

SEQ ID NO: 120250 - protein, 20 aa, Artificial Sequence
  Description of Artificial Sequence: Synthetic peptide
  Seed: PRMCSLMQGSTLPRRSGAAG
PRMYSLIQVSTIPRRSGAAG

SEQ ID NO: 120251 - protein, 20 aa, Artificial Sequence
  Description of Artificial Sequence: Synthetic peptide
  Seed: PRMCSLMQGSTLPRRSGAAG
PRMYSLIQVSTLPRRSGAAG

SEQ ID NO: 120252 - protein, 20 aa, Artificial Sequence
  Description of Artificial Sequence: Synthetic peptide
  Seed: PRMCSLMQGSTLPRRSGAAG
PRMYSLIQVSTVPRRSGAAG

SEQ ID NO: 120253 - protein, 20 aa, Artificial Sequence
  Description of Artificial Sequence: Synthetic peptide
  Seed: PRMCSLMQGSTLPRRSGAAG
PRMYSLLQASTAPRRSGAAG

SEQ ID NO: 120254 - protein, 20 aa, Artificial Sequence
  Description of Artificial Sequence: Synthetic peptide
  Seed: PRMCSLMQGSTLPRRSGAAG
PRMYSLLQASTCPRRSGAAG

SEQ ID NO: 120255 - protein, 20 aa, Artificial Sequence
  Description of Artificial Sequence: Synthetic peptide
  Seed: PRMCSLMQGSTLPRRSGAAG
PRMYSLLQASTFPRRSGAAG

SEQ ID NO: 120256 - protein, 20 aa, Artificial Sequence
  Description of Artificial Sequence: Synthetic peptide
  Seed: PRMCSLMQGSTLPRRSGAAG
PRMYSLLQASTGPRRSGAAG

SEQ ID NO: 120257 - protein, 20 aa, Artificial Sequence
  Description of Artificial Sequence: Synthetic peptide
  Seed: PRMCSLMQGSTLPRRSGAAG
PRMYSLLQASTHPRRSGAAG

SEQ ID NO: 120258 - protein, 20 aa, Artificial Sequence
  Description of Artificial Sequence: Synthetic peptide
  Seed: PRMCSLMQGSTLPRRSGAAG
PRMYSLLQASTIPRRSGAAG

SEQ ID NO: 120259 - protein, 20 aa, Artificial Sequence
  Description of Artificial Sequence: Synthetic peptide
  Seed: PRMCSLMQGSTLPRRSGAAG
PRMYSLLQASTLPRRSGAAG

SEQ ID NO: 120260 - protein, 20 aa, Artificial Sequence
  Description of Artificial Sequence: Synthetic peptide
  Seed: PRMCSLMQGSTLPRRSGAAG
PRMYSLLQASTMPRRSGAAG

SEQ ID NO: 120261 - protein, 20 aa, Artificial Sequence
  Description of Artificial Sequence: Synthetic peptide
  Seed: PRMCSLMQGSTLPRRSGAAG
PRMYSLLQASTNPRRSGAAG

SEQ ID NO: 120262 - protein, 20 aa, Artificial Sequence
  Description of Artificial Sequence: Synthetic peptide
  Seed: PRMCSLMQGSTLPRRSGAAG
PRMYSLLQASTPPRRSGAAG

SEQ ID NO: 120263 - protein, 20 aa, Artificial Sequence
  Description of Artificial Sequence: Synthetic peptide
  Seed: PRMCSLMQGSTLPRRSGAAG
PRMYSLLQASTQPRRSGAAG

SEQ ID NO: 120264 - protein, 20 aa, Artificial Sequence
  Description of Artificial Sequence: Synthetic peptide
  Seed: PRMCSLMQGSTLPRRSGAAG
PRMYSLLQASTSPRRSGAAG

SEQ ID NO: 120265 - protein, 20 aa, Artificial Sequence
  Description of Artificial Sequence: Synthetic peptide
  Seed: PRMCSLMQGSTLPRRSGAAG
PRMYSLLQASTTPRRSGAAG

SEQ ID NO: 120266 - protein, 20 aa, Artificial Sequence
  Description of Artificial Sequence: Synthetic peptide
  Seed: PRMCSLMQGSTLPRRSGAAG
PRMYSLLQASTVPRRSGAAG

SEQ ID NO: 120267 - protein, 20 aa, Artificial Sequence
  Description of Artificial Sequence: Synthetic peptide
  Seed: PRMCSLMQGSTLPRRSGAAG
PRMYSLLQASTYPRRSGAAG

SEQ ID NO: 120268 - protein, 20 aa, Artificial Sequence
  Description of Artificial Sequence: Synthetic peptide
  Seed: PRMCSLMQGSTLPRRSGAAG
PRMYSLLQGSTAPRRSGAAG

SEQ ID NO: 120269 - protein, 20 aa, Artificial Sequence
  Description of Artificial Sequence: Synthetic peptide
  Seed: PRMCSLMQGSTLPRRSGAAG
PRMYSLLQGSTCPRRSGAAG

SEQ ID NO: 120270 - protein, 20 aa, Artificial Sequence
  Description of Artificial Sequence: Synthetic peptide
  Seed: PRMCSLMQGSTLPRRSGAAG
PRMYSLLQGSTFPRRSGAAG

SEQ ID NO: 120271 - protein, 20 aa, Artificial Sequence
  Description of Artificial Sequence: Synthetic peptide
  Seed: PRMCSLMQGSTLPRRSGAAG
PRMYSLLQGSTGPRRSGAAG

SEQ ID NO: 120272 - protein, 20 aa, Artificial Sequence
  Description of Artificial Sequence: Synthetic peptide
  Seed: PRMCSLMQGSTLPRRSGAAG
PRMYSLLQGSTIPRRSGAAG

SEQ ID NO: 120273 - protein, 20 aa, Artificial Sequence
  Description of Artificial Sequence: Synthetic peptide
  Seed: PRMCSLMQGSTLPRRSGAAG
PRMYSLLQGSTLPRRSGAAG

SEQ ID NO: 120274 - protein, 20 aa, Artificial Sequence
  Description of Artificial Sequence: Synthetic peptide
  Seed: PRMCSLMQGSTLPRRSGAAG
PRMYSLLQGSTMPRRSGAAG

SEQ ID NO: 120275 - protein, 20 aa, Artificial Sequence
  Description of Artificial Sequence: Synthetic peptide
  Seed: PRMCSLMQGSTLPRRSGAAG
PRMYSLLQGSTNPRRSGAAG

SEQ ID NO: 120276 - protein, 20 aa, Artificial Sequence
  Description of Artificial Sequence: Synthetic peptide
  Seed: PRMCSLMQGSTLPRRSGAAG
PRMYSLLQGSTSPRRSGAAG

SEQ ID NO: 120277 - protein, 20 aa, Artificial Sequence
  Description of Artificial Sequence: Synthetic peptide
  Seed: PRMCSLMQGSTLPRRSGAAG
PRMYSLLQGSTTPRRSGAAG

SEQ ID NO: 120278 - protein, 20 aa, Artificial Sequence
  Description of Artificial Sequence: Synthetic peptide
  Seed: PRMCSLMQGSTLPRRSGAAG
PRMYSLLQGSTVPRRSGAAG

SEQ ID NO: 120279 - protein, 20 aa, Artificial Sequence
  Description of Artificial Sequence: Synthetic peptide
  Seed: PRMCSLMQGSTLPRRSGAAG
PRMYSLLQHSTVPRRSGAAG

SEQ ID NO: 120280 - protein, 20 aa, Artificial Sequence
  Description of Artificial Sequence: Synthetic peptide
  Seed: PRMCSLMQGSTLPRRSGAAG
PRMYSLLQISTAPRRSGAAG

SEQ ID NO: 120281 - protein, 20 aa, Artificial Sequence
  Description of Artificial Sequence: Synthetic peptide
  Seed: PRMCSLMQGSTLPRRSGAAG
PRMYSLLQISTIPRRSGAAG

SEQ ID NO: 120282 - protein, 20 aa, Artificial Sequence
  Description of Artificial Sequence: Synthetic peptide
  Seed: PRMCSLMQGSTLPRRSGAAG
PRMYSLLQISTLPRRSGAAG

SEQ ID NO: 120283 - protein, 20 aa, Artificial Sequence
  Description of Artificial Sequence: Synthetic peptide
  Seed: PRMCSLMQGSTLPRRSGAAG
PRMYSLLQISTVPRRSGAAG

SEQ ID NO: 120284 - protein, 20 aa, Artificial Sequence
  Description of Artificial Sequence: Synthetic peptide
  Seed: PRMCSLMQGSTLPRRSGAAG
PRMYSLLQLSTAPRRSGAAG

SEQ ID NO: 120285 - protein, 20 aa, Artificial Sequence
  Description of Artificial Sequence: Synthetic peptide
  Seed: PRMCSLMQGSTLPRRSGAAG
PRMYSLLQMSTAPRRSGAAG

SEQ ID NO: 120286 - protein, 20 aa, Artificial Sequence
  Description of Artificial Sequence: Synthetic peptide
  Seed: PRMCSLMQGSTLPRRSGAAG
PRMYSLLQMSTIPRRSGAAG

SEQ ID NO: 120287 - protein, 20 aa, Artificial Sequence
  Description of Artificial Sequence: Synthetic peptide
  Seed: PRMCSLMQGSTLPRRSGAAG
PRMYSLLQMSTLPRRSGAAG

SEQ ID NO: 120288 - protein, 20 aa, Artificial Sequence
  Description of Artificial Sequence: Synthetic peptide
  Seed: PRMCSLMQGSTLPRRSGAAG
PRMYSLLQMSTVPRRSGAAG

SEQ ID NO: 120289 - protein, 20 aa, Artificial Sequence
  Description of Artificial Sequence: Synthetic peptide
  Seed: PRMCSLMQGSTLPRRSGAAG
PRMYSLLQNSTAPRRSGAAG

SEQ ID NO: 120290 - protein, 20 aa, Artificial Sequence
  Description of Artificial Sequence: Synthetic peptide
  Seed: PRMCSLMQGSTLPRRSGAAG
PRMYSLLQNSTGPRRSGAAG

SEQ ID NO: 120291 - protein, 20 aa, Artificial Sequence
  Description of Artificial Sequence: Synthetic peptide
  Seed: PRMCSLMQGSTLPRRSGAAG
PRMYSLLQNSTIPRRSGAAG

SEQ ID NO: 120292 - protein, 20 aa, Artificial Sequence
  Description of Artificial Sequence: Synthetic peptide
  Seed: PRMCSLMQGSTLPRRSGAAG
PRMYSLLQNSTLPRRSGAAG

SEQ ID NO: 120293 - protein, 20 aa, Artificial Sequence
  Description of Artificial Sequence: Synthetic peptide
  Seed: PRMCSLMQGSTLPRRSGAAG
PRMYSLLQNSTMPRRSGAAG

SEQ ID NO: 120294 - protein, 20 aa, Artificial Sequence
  Description of Artificial Sequence: Synthetic peptide
  Seed: PRMCSLMQGSTLPRRSGAAG
PRMYSLLQNSTSPRRSGAAG

SEQ ID NO: 120295 - protein, 20 aa, Artificial Sequence
  Description of Artificial Sequence: Synthetic peptide
  Seed: PRMCSLMQGSTLPRRSGAAG
PRMYSLLQNSTTPRRSGAAG

SEQ ID NO: 120296 - protein, 20 aa, Artificial Sequence
  Description of Artificial Sequence: Synthetic peptide
  Seed: PRMCSLMQGSTLPRRSGAAG
PRMYSLLQNSTVPRRSGAAG

SEQ ID NO: 120297 - protein, 20 aa, Artificial Sequence
  Description of Artificial Sequence: Synthetic peptide
  Seed: PRMCSLMQGSTLPRRSGAAG
PRMYSLLQPSTAPRRSGAAG

SEQ ID NO: 120298 - protein, 20 aa, Artificial Sequence
  Description of Artificial Sequence: Synthetic peptide
  Seed: PRMCSLMQGSTLPRRSGAAG
PRMYSLLQPSTCPRRSGAAG

SEQ ID NO: 120299 - protein, 20 aa, Artificial Sequence
  Description of Artificial Sequence: Synthetic peptide
  Seed: PRMCSLMQGSTLPRRSGAAG
PRMYSLLQPSTFPRRSGAAG

SEQ ID NO: 120300 - protein, 20 aa, Artificial Sequence
  Description of Artificial Sequence: Synthetic peptide
  Seed: PRMCSLMQGSTLPRRSGAAG
PRMYSLLQPSTGPRRSGAAG

SEQ ID NO: 120301 - protein, 20 aa, Artificial Sequence
  Description of Artificial Sequence: Synthetic peptide
  Seed: PRMCSLMQGSTLPRRSGAAG
PRMYSLLQPSTIPRRSGAAG

SEQ ID NO: 120302 - protein, 20 aa, Artificial Sequence
  Description of Artificial Sequence: Synthetic peptide
  Seed: PRMCSLMQGSTLPRRSGAAG
PRMYSLLQPSTLPRRSGAAG

SEQ ID NO: 120303 - protein, 20 aa, Artificial Sequence
  Description of Artificial Sequence: Synthetic peptide
  Seed: PRMCSLMQGSTLPRRSGAAG
PRMYSLLQPSTMPRRSGAAG

SEQ ID NO: 120304 - protein, 20 aa, Artificial Sequence
  Description of Artificial Sequence: Synthetic peptide
  Seed: PRMCSLMQGSTLPRRSGAAG
PRMYSLLQPSTSPRRSGAAG

SEQ ID NO: 120305 - protein, 20 aa, Artificial Sequence
  Description of Artificial Sequence: Synthetic peptide
  Seed: PRMCSLMQGSTLPRRSGAAG
PRMYSLLQPSTTPRRSGAAG

SEQ ID NO: 120306 - protein, 20 aa, Artificial Sequence
  Description of Artificial Sequence: Synthetic peptide
  Seed: PRMCSLMQGSTLPRRSGAAG
PRMYSLLQPSTVPRRSGAAG

SEQ ID NO: 120307 - protein, 20 aa, Artificial Sequence
  Description of Artificial Sequence: Synthetic peptide
  Seed: PRMCSLMQGSTLPRRSGAAG
PRMYSLLQSSTAPRRSGAAG

SEQ ID NO: 120308 - protein, 20 aa, Artificial Sequence
  Description of Artificial Sequence: Synthetic peptide
  Seed: PRMCSLMQGSTLPRRSGAAG
PRMYSLLQSSTCPRRSGAAG

SEQ ID NO: 120309 - protein, 20 aa, Artificial Sequence
  Description of Artificial Sequence: Synthetic peptide
  Seed: PRMCSLMQGSTLPRRSGAAG
PRMYSLLQSSTFPRRSGAAG

SEQ ID NO: 120310 - protein, 20 aa, Artificial Sequence
  Description of Artificial Sequence: Synthetic peptide
  Seed: PRMCSLMQGSTLPRRSGAAG
PRMYSLLQSSTGPRRSGAAG

SEQ ID NO: 120311 - protein, 20 aa, Artificial Sequence
  Description of Artificial Sequence: Synthetic peptide
  Seed: PRMCSLMQGSTLPRRSGAAG
PRMYSLLQSSTIPRRSGAAG

SEQ ID NO: 120312 - protein, 20 aa, Artificial Sequence
  Description of Artificial Sequence: Synthetic peptide
  Seed: PRMCSLMQGSTLPRRSGAAG
PRMYSLLQSSTLPRRSGAAG

SEQ ID NO: 120313 - protein, 20 aa, Artificial Sequence
  Description of Artificial Sequence: Synthetic peptide
  Seed: PRMCSLMQGSTLPRRSGAAG
PRMYSLLQSSTMPRRSGAAG

SEQ ID NO: 120314 - protein, 20 aa, Artificial Sequence
  Description of Artificial Sequence: Synthetic peptide
  Seed: PRMCSLMQGSTLPRRSGAAG
PRMYSLLQSSTNPRRSGAAG

SEQ ID NO: 120315 - protein, 20 aa, Artificial Sequence
  Description of Artificial Sequence: Synthetic peptide
  Seed: PRMCSLMQGSTLPRRSGAAG
PRMYSLLQSSTSPRRSGAAG

SEQ ID NO: 120316 - protein, 20 aa, Artificial Sequence
  Description of Artificial Sequence: Synthetic peptide
  Seed: PRMCSLMQGSTLPRRSGAAG
PRMYSLLQSSTTPRRSGAAG

SEQ ID NO: 120317 - protein, 20 aa, Artificial Sequence
  Description of Artificial Sequence: Synthetic peptide
  Seed: PRMCSLMQGSTLPRRSGAAG
PRMYSLLQSSTVPRRSGAAG

SEQ ID NO: 120318 - protein, 20 aa, Artificial Sequence
  Description of Artificial Sequence: Synthetic peptide
  Seed: PRMCSLMQGSTLPRRSGAAG
PRMYSLLQTSTAPRRSGAAG

SEQ ID NO: 120319 - protein, 20 aa, Artificial Sequence
  Description of Artificial Sequence: Synthetic peptide
  Seed: PRMCSLMQGSTLPRRSGAAG
PRMYSLLQTSTGPRRSGAAG

SEQ ID NO: 120320 - protein, 20 aa, Artificial Sequence
  Description of Artificial Sequence: Synthetic peptide
  Seed: PRMCSLMQGSTLPRRSGAAG
PRMYSLLQTSTIPRRSGAAG

SEQ ID NO: 120321 - protein, 20 aa, Artificial Sequence
  Description of Artificial Sequence: Synthetic peptide
  Seed: PRMCSLMQGSTLPRRSGAAG
PRMYSLLQTSTLPRRSGAAG

SEQ ID NO: 120322 - protein, 20 aa, Artificial Sequence
  Description of Artificial Sequence: Synthetic peptide
  Seed: PRMCSLMQGSTLPRRSGAAG
PRMYSLLQTSTMPRRSGAAG

SEQ ID NO: 120323 - protein, 20 aa, Artificial Sequence
  Description of Artificial Sequence: Synthetic peptide
  Seed: PRMCSLMQGSTLPRRSGAAG
PRMYSLLQTSTSPRRSGAAG

SEQ ID NO: 120324 - protein, 20 aa, Artificial Sequence
  Description of Artificial Sequence: Synthetic peptide
  Seed: PRMCSLMQGSTLPRRSGAAG
PRMYSLLQTSTTPRRSGAAG

SEQ ID NO: 120325 - protein, 20 aa, Artificial Sequence
  Description of Artificial Sequence: Synthetic peptide
  Seed: PRMCSLMQGSTLPRRSGAAG
PRMYSLLQTSTVPRRSGAAG

SEQ ID NO: 120326 - protein, 20 aa, Artificial Sequence
  Description of Artificial Sequence: Synthetic peptide
  Seed: PRMCSLMQGSTLPRRSGAAG
PRMYSLLQVSTAPRRSGAAG

SEQ ID NO: 120327 - protein, 20 aa, Artificial Sequence
  Description of Artificial Sequence: Synthetic peptide
  Seed: PRMCSLMQGSTLPRRSGAAG
PRMYSLLQVSTIPRRSGAAG

SEQ ID NO: 120328 - protein, 20 aa, Artificial Sequence
  Description of Artificial Sequence: Synthetic peptide
  Seed: PRMCSLMQGSTLPRRSGAAG
PRMYSLLQVSTLPRRSGAAG

SEQ ID NO: 120329 - protein, 20 aa, Artificial Sequence
  Description of Artificial Sequence: Synthetic peptide
  Seed: PRMCSLMQGSTLPRRSGAAG
PRMYSLLQVSTMPRRSGAAG

SEQ ID NO: 120330 - protein, 20 aa, Artificial Sequence
  Description of Artificial Sequence: Synthetic peptide
  Seed: PRMCSLMQGSTLPRRSGAAG
PRMYSLLQVSTSPRRSGAAG

SEQ ID NO: 120331 - protein, 20 aa, Artificial Sequence
  Description of Artificial Sequence: Synthetic peptide
  Seed: PRMCSLMQGSTLPRRSGAAG
PRMYSLLQVSTTPRRSGAAG

SEQ ID NO: 120332 - protein, 20 aa, Artificial Sequence
  Description of Artificial Sequence: Synthetic peptide
  Seed: PRMCSLMQGSTLPRRSGAAG
PRMYSLLQVSTVPRRSGAAG

SEQ ID NO: 120333 - protein, 20 aa, Artificial Sequence
  Description of Artificial Sequence: Synthetic peptide
  Seed: PRMCSLMQGSTLPRRSGAAG
PRMYSLMQASTAPRRSGAAG

SEQ ID NO: 120334 - protein, 20 aa, Artificial Sequence
  Description of Artificial Sequence: Synthetic peptide
  Seed: PRMCSLMQGSTLPRRSGAAG
PRMYSLMQASTCPRRSGAAG

SEQ ID NO: 120335 - protein, 20 aa, Artificial Sequence
  Description of Artificial Sequence: Synthetic peptide
  Seed: PRMCSLMQGSTLPRRSGAAG
PRMYSLMQASTFPRRSGAAG

SEQ ID NO: 120336 - protein, 20 aa, Artificial Sequence
  Description of Artificial Sequence: Synthetic peptide
  Seed: PRMCSLMQGSTLPRRSGAAG
PRMYSLMQASTGPRRSGAAG

SEQ ID NO: 120337 - protein, 20 aa, Artificial Sequence
  Description of Artificial Sequence: Synthetic peptide
  Seed: PRMCSLMQGSTLPRRSGAAG
PRMYSLMQASTHPRRSGAAG

SEQ ID NO: 120338 - protein, 20 aa, Artificial Sequence
  Description of Artificial Sequence: Synthetic peptide
  Seed: PRMCSLMQGSTLPRRSGAAG
PRMYSLMQASTIPRRSGAAG

SEQ ID NO: 120339 - protein, 20 aa, Artificial Sequence
  Description of Artificial Sequence: Synthetic peptide
  Seed: PRMCSLMQGSTLPRRSGAAG
PRMYSLMQASTLPRRSGAAG

SEQ ID NO: 120340 - protein, 20 aa, Artificial Sequence
  Description of Artificial Sequence: Synthetic peptide
  Seed: PRMCSLMQGSTLPRRSGAAG
PRMYSLMQASTMPRRSGAAG

SEQ ID NO: 120341 - protein, 20 aa, Artificial Sequence
  Description of Artificial Sequence: Synthetic peptide
  Seed: PRMCSLMQGSTLPRRSGAAG
PRMYSLMQASTNPRRSGAAG

SEQ ID NO: 120342 - protein, 20 aa, Artificial Sequence
  Description of Artificial Sequence: Synthetic peptide
  Seed: PRMCSLMQGSTLPRRSGAAG
PRMYSLMQASTPPRRSGAAG

SEQ ID NO: 120343 - protein, 20 aa, Artificial Sequence
  Description of Artificial Sequence: Synthetic peptide
  Seed: PRMCSLMQGSTLPRRSGAAG
PRMYSLMQASTQPRRSGAAG

SEQ ID NO: 120344 - protein, 20 aa, Artificial Sequence
  Description of Artificial Sequence: Synthetic peptide
  Seed: PRMCSLMQGSTLPRRSGAAG
PRMYSLMQASTSPRRSGAAG

SEQ ID NO: 120345 - protein, 20 aa, Artificial Sequence
  Description of Artificial Sequence: Synthetic peptide
  Seed: PRMCSLMQGSTLPRRSGAAG
PRMYSLMQASTTPRRSGAAG

SEQ ID NO: 120346 - protein, 20 aa, Artificial Sequence
  Description of Artificial Sequence: Synthetic peptide
  Seed: PRMCSLMQGSTLPRRSGAAG
PRMYSLMQASTVPRRSGAAG

SEQ ID NO: 120347 - protein, 20 aa, Artificial Sequence
  Description of Artificial Sequence: Synthetic peptide
  Seed: PRMCSLMQGSTLPRRSGAAG
PRMYSLMQASTYPRRSGAAG

SEQ ID NO: 120348 - protein, 20 aa, Artificial Sequence
  Description of Artificial Sequence: Synthetic peptide
  Seed: PRMCSLMQGSTLPRRSGAAG
PRMYSLMQGSTAPRRSGAAG

SEQ ID NO: 120349 - protein, 20 aa, Artificial Sequence
  Description of Artificial Sequence: Synthetic peptide
  Seed: PRMCSLMQGSTLPRRSGAAG
PRMYSLMQGSTCPRRSGAAG

SEQ ID NO: 120350 - protein, 20 aa, Artificial Sequence
  Description of Artificial Sequence: Synthetic peptide
  Seed: PRMCSLMQGSTLPRRSGAAG
PRMYSLMQGSTFPRRSGAAG

SEQ ID NO: 120351 - protein, 20 aa, Artificial Sequence
  Description of Artificial Sequence: Synthetic peptide
  Seed: PRMCSLMQGSTLPRRSGAAG
PRMYSLMQGSTGPRRSGAAG

SEQ ID NO: 120352 - protein, 20 aa, Artificial Sequence
  Description of Artificial Sequence: Synthetic peptide
  Seed: PRMCSLMQGSTLPRRSGAAG
PRMYSLMQGSTIPRRSGAAG

SEQ ID NO: 120353 - protein, 20 aa, Artificial Sequence
  Description of Artificial Sequence: Synthetic peptide
  Seed: PRMCSLMQGSTLPRRSGAAG
PRMYSLMQGSTLPRRSGAAG

SEQ ID NO: 120354 - protein, 20 aa, Artificial Sequence
  Description of Artificial Sequence: Synthetic peptide
  Seed: PRMCSLMQGSTLPRRSGAAG
PRMYSLMQGSTMPRRSGAAG

SEQ ID NO: 120355 - protein, 20 aa, Artificial Sequence
  Description of Artificial Sequence: Synthetic peptide
  Seed: PRMCSLMQGSTLPRRSGAAG
PRMYSLMQGSTNPRRSGAAG

SEQ ID NO: 120356 - protein, 20 aa, Artificial Sequence
  Description of Artificial Sequence: Synthetic peptide
  Seed: PRMCSLMQGSTLPRRSGAAG
PRMYSLMQGSTSPRRSGAAG

SEQ ID NO: 120357 - protein, 20 aa, Artificial Sequence
  Description of Artificial Sequence: Synthetic peptide
  Seed: PRMCSLMQGSTLPRRSGAAG
PRMYSLMQGSTTPRRSGAAG

SEQ ID NO: 120358 - protein, 20 aa, Artificial Sequence
  Description of Artificial Sequence: Synthetic peptide
  Seed: PRMCSLMQGSTLPRRSGAAG
PRMYSLMQGSTVPRRSGAAG

SEQ ID NO: 120359 - protein, 20 aa, Artificial Sequence
  Description of Artificial Sequence: Synthetic peptide
  Seed: PRMCSLMQGSTLPRRSGAAG
PRMYSLMQHSTIPRRSGAAG

SEQ ID NO: 120360 - protein, 20 aa, Artificial Sequence
  Description of Artificial Sequence: Synthetic peptide
  Seed: PRMCSLMQGSTLPRRSGAAG
PRMYSLMQHSTLPRRSGAAG

SEQ ID NO: 120361 - protein, 20 aa, Artificial Sequence
  Description of Artificial Sequence: Synthetic peptide
  Seed: PRMCSLMQGSTLPRRSGAAG
PRMYSLMQHSTVPRRSGAAG

SEQ ID NO: 120362 - protein, 20 aa, Artificial Sequence
  Description of Artificial Sequence: Synthetic peptide
  Seed: PRMCSLMQGSTLPRRSGAAG
PRMYSLMQISTAPRRSGAAG

SEQ ID NO: 120363 - protein, 20 aa, Artificial Sequence
  Description of Artificial Sequence: Synthetic peptide
  Seed: PRMCSLMQGSTLPRRSGAAG
PRMYSLMQISTIPRRSGAAG

SEQ ID NO: 120364 - protein, 20 aa, Artificial Sequence
  Description of Artificial Sequence: Synthetic peptide
  Seed: PRMCSLMQGSTLPRRSGAAG
PRMYSLMQISTLPRRSGAAG

SEQ ID NO: 120365 - protein, 20 aa, Artificial Sequence
  Description of Artificial Sequence: Synthetic peptide
  Seed: PRMCSLMQGSTLPRRSGAAG
PRMYSLMQISTMPRRSGAAG

SEQ ID NO: 120366 - protein, 20 aa, Artificial Sequence
  Description of Artificial Sequence: Synthetic peptide
  Seed: PRMCSLMQGSTLPRRSGAAG
PRMYSLMQISTTPRRSGAAG

SEQ ID NO: 120367 - protein, 20 aa, Artificial Sequence
  Description of Artificial Sequence: Synthetic peptide
  Seed: PRMCSLMQGSTLPRRSGAAG
PRMYSLMQISTVPRRSGAAG

SEQ ID NO: 120368 - protein, 20 aa, Artificial Sequence
  Description of Artificial Sequence: Synthetic peptide
  Seed: PRMCSLMQGSTLPRRSGAAG
PRMYSLMQLSTVPRRSGAAG

SEQ ID NO: 120369 - protein, 20 aa, Artificial Sequence
  Description of Artificial Sequence: Synthetic peptide
  Seed: PRMCSLMQGSTLPRRSGAAG
PRMYSLMQMSTAPRRSGAAG

SEQ ID NO: 120370 - protein, 20 aa, Artificial Sequence
  Description of Artificial Sequence: Synthetic peptide
  Seed: PRMCSLMQGSTLPRRSGAAG
PRMYSLMQMSTIPRRSGAAG

SEQ ID NO: 120371 - protein, 20 aa, Artificial Sequence
  Description of Artificial Sequence: Synthetic peptide
  Seed: PRMCSLMQGSTLPRRSGAAG
PRMYSLMQMSTLPRRSGAAG

SEQ ID NO: 120372 - protein, 20 aa, Artificial Sequence
  Description of Artificial Sequence: Synthetic peptide
  Seed: PRMCSLMQGSTLPRRSGAAG
PRMYSLMQMSTVPRRSGAAG

SEQ ID NO: 120373 - protein, 20 aa, Artificial Sequence
  Description of Artificial Sequence: Synthetic peptide
  Seed: PRMCSLMQGSTLPRRSGAAG
PRMYSLMQNSTAPRRSGAAG

SEQ ID NO: 120374 - protein, 20 aa, Artificial Sequence
  Description of Artificial Sequence: Synthetic peptide
  Seed: PRMCSLMQGSTLPRRSGAAG
PRMYSLMQNSTIPRRSGAAG

SEQ ID NO: 120375 - protein, 20 aa, Artificial Sequence
  Description of Artificial Sequence: Synthetic peptide
  Seed: PRMCSLMQGSTLPRRSGAAG
PRMYSLMQNSTLPRRSGAAG

SEQ ID NO: 120376 - protein, 20 aa, Artificial Sequence
  Description of Artificial Sequence: Synthetic peptide
  Seed: PRMCSLMQGSTLPRRSGAAG
PRMYSLMQNSTMPRRSGAAG

SEQ ID NO: 120377 - protein, 20 aa, Artificial Sequence
  Description of Artificial Sequence: Synthetic peptide
  Seed: PRMCSLMQGSTLPRRSGAAG
PRMYSLMQNSTSPRRSGAAG

SEQ ID NO: 120378 - protein, 20 aa, Artificial Sequence
  Description of Artificial Sequence: Synthetic peptide
  Seed: PRMCSLMQGSTLPRRSGAAG
PRMYSLMQNSTTPRRSGAAG

SEQ ID NO: 120379 - protein, 20 aa, Artificial Sequence
  Description of Artificial Sequence: Synthetic peptide
  Seed: PRMCSLMQGSTLPRRSGAAG
PRMYSLMQNSTVPRRSGAAG

SEQ ID NO: 120380 - protein, 20 aa, Artificial Sequence
  Description of Artificial Sequence: Synthetic peptide
  Seed: PRMCSLMQGSTLPRRSGAAG
PRMYSLMQPSTAPRRSGAAG

SEQ ID NO: 120381 - protein, 20 aa, Artificial Sequence
  Description of Artificial Sequence: Synthetic peptide
  Seed: PRMCSLMQGSTLPRRSGAAG
PRMYSLMQPSTFPRRSGAAG

SEQ ID NO: 120382 - protein, 20 aa, Artificial Sequence
  Description of Artificial Sequence: Synthetic peptide
  Seed: PRMCSLMQGSTLPRRSGAAG
PRMYSLMQPSTGPRRSGAAG

SEQ ID NO: 120383 - protein, 20 aa, Artificial Sequence
  Description of Artificial Sequence: Synthetic peptide
  Seed: PRMCSLMQGSTLPRRSGAAG
PRMYSLMQPSTIPRRSGAAG

SEQ ID NO: 120384 - protein, 20 aa, Artificial Sequence
  Description of Artificial Sequence: Synthetic peptide
  Seed: PRMCSLMQGSTLPRRSGAAG
PRMYSLMQPSTLPRRSGAAG

SEQ ID NO: 120385 - protein, 20 aa, Artificial Sequence
  Description of Artificial Sequence: Synthetic peptide
  Seed: PRMCSLMQGSTLPRRSGAAG
PRMYSLMQPSTMPRRSGAAG

SEQ ID NO: 120386 - protein, 20 aa, Artificial Sequence
  Description of Artificial Sequence: Synthetic peptide
  Seed: PRMCSLMQGSTLPRRSGAAG
PRMYSLMQPSTSPRRSGAAG

SEQ ID NO: 120387 - protein, 20 aa, Artificial Sequence
  Description of Artificial Sequence: Synthetic peptide
  Seed: PRMCSLMQGSTLPRRSGAAG
PRMYSLMQPSTTPRRSGAAG

SEQ ID NO: 120388 - protein, 20 aa, Artificial Sequence
  Description of Artificial Sequence: Synthetic peptide
  Seed: PRMCSLMQGSTLPRRSGAAG
PRMYSLMQPSTVPRRSGAAG

SEQ ID NO: 120389 - protein, 20 aa, Artificial Sequence
  Description of Artificial Sequence: Synthetic peptide
  Seed: PRMCSLMQGSTLPRRSGAAG
PRMYSLMQQSTLPRRSGAAG

SEQ ID NO: 120390 - protein, 20 aa, Artificial Sequence
  Description of Artificial Sequence: Synthetic peptide
  Seed: PRMCSLMQGSTLPRRSGAAG
PRMYSLMQQSTVPRRSGAAG

SEQ ID NO: 120391 - protein, 20 aa, Artificial Sequence
  Description of Artificial Sequence: Synthetic peptide
  Seed: PRMCSLMQGSTLPRRSGAAG
PRMYSLMQSSTAPRRSGAAG

SEQ ID NO: 120392 - protein, 20 aa, Artificial Sequence
  Description of Artificial Sequence: Synthetic peptide
  Seed: PRMCSLMQGSTLPRRSGAAG
PRMYSLMQSSTCPRRSGAAG

SEQ ID NO: 120393 - protein, 20 aa, Artificial Sequence
  Description of Artificial Sequence: Synthetic peptide
  Seed: PRMCSLMQGSTLPRRSGAAG
PRMYSLMQSSTFPRRSGAAG

SEQ ID NO: 120394 - protein, 20 aa, Artificial Sequence
  Description of Artificial Sequence: Synthetic peptide
  Seed: PRMCSLMQGSTLPRRSGAAG
PRMYSLMQSSTGPRRSGAAG

SEQ ID NO: 120395 - protein, 20 aa, Artificial Sequence
  Description of Artificial Sequence: Synthetic peptide
  Seed: PRMCSLMQGSTLPRRSGAAG
PRMYSLMQSSTIPRRSGAAG

SEQ ID NO: 120396 - protein, 20 aa, Artificial Sequence
  Description of Artificial Sequence: Synthetic peptide
  Seed: PRMCSLMQGSTLPRRSGAAG
PRMYSLMQSSTLPRRSGAAG

SEQ ID NO: 120397 - protein, 20 aa, Artificial Sequence
  Description of Artificial Sequence: Synthetic peptide
  Seed: PRMCSLMQGSTLPRRSGAAG
PRMYSLMQSSTMPRRSGAAG

SEQ ID NO: 120398 - protein, 20 aa, Artificial Sequence
  Description of Artificial Sequence: Synthetic peptide
  Seed: PRMCSLMQGSTLPRRSGAAG
PRMYSLMQSSTNPRRSGAAG

SEQ ID NO: 120399 - protein, 20 aa, Artificial Sequence
  Description of Artificial Sequence: Synthetic peptide
  Seed: PRMCSLMQGSTLPRRSGAAG
PRMYSLMQSSTSPRRSGAAG

SEQ ID NO: 120400 - protein, 20 aa, Artificial Sequence
  Description of Artificial Sequence: Synthetic peptide
  Seed: PRMCSLMQGSTLPRRSGAAG
PRMYSLMQSSTTPRRSGAAG

SEQ ID NO: 120401 - protein, 20 aa, Artificial Sequence
  Description of Artificial Sequence: Synthetic peptide
  Seed: PRMCSLMQGSTLPRRSGAAG
PRMYSLMQSSTVPRRSGAAG

SEQ ID NO: 120402 - protein, 20 aa, Artificial Sequence
  Description of Artificial Sequence: Synthetic peptide
  Seed: PRMCSLMQGSTLPRRSGAAG
PRMYSLMQTSTAPRRSGAAG

SEQ ID NO: 120403 - protein, 20 aa, Artificial Sequence
  Description of Artificial Sequence: Synthetic peptide
  Seed: PRMCSLMQGSTLPRRSGAAG
PRMYSLMQTSTIPRRSGAAG

SEQ ID NO: 120404 - protein, 20 aa, Artificial Sequence
  Description of Artificial Sequence: Synthetic peptide
  Seed: PRMCSLMQGSTLPRRSGAAG
PRMYSLMQTSTLPRRSGAAG

SEQ ID NO: 120405 - protein, 20 aa, Artificial Sequence
  Description of Artificial Sequence: Synthetic peptide
  Seed: PRMCSLMQGSTLPRRSGAAG
PRMYSLMQTSTMPRRSGAAG

SEQ ID NO: 120406 - protein, 20 aa, Artificial Sequence
  Description of Artificial Sequence: Synthetic peptide
  Seed: PRMCSLMQGSTLPRRSGAAG
PRMYSLMQTSTSPRRSGAAG

SEQ ID NO: 120407 - protein, 20 aa, Artificial Sequence
  Description of Artificial Sequence: Synthetic peptide
  Seed: PRMCSLMQGSTLPRRSGAAG
PRMYSLMQTSTTPRRSGAAG

SEQ ID NO: 120408 - protein, 20 aa, Artificial Sequence
  Description of Artificial Sequence: Synthetic peptide
  Seed: PRMCSLMQGSTLPRRSGAAG
PRMYSLMQTSTVPRRSGAAG

SEQ ID NO: 120409 - protein, 20 aa, Artificial Sequence
  Description of Artificial Sequence: Synthetic peptide
  Seed: PRMCSLMQGSTLPRRSGAAG
PRMYSLMQVSTAPRRSGAAG

SEQ ID NO: 120410 - protein, 20 aa, Artificial Sequence
  Description of Artificial Sequence: Synthetic peptide
  Seed: PRMCSLMQGSTLPRRSGAAG
PRMYSLMQVSTIPRRSGAAG

SEQ ID NO: 120411 - protein, 20 aa, Artificial Sequence
  Description of Artificial Sequence: Synthetic peptide
  Seed: PRMCSLMQGSTLPRRSGAAG
PRMYSLMQVSTLPRRSGAAG

SEQ ID NO: 120412 - protein, 20 aa, Artificial Sequence
  Description of Artificial Sequence: Synthetic peptide
  Seed: PRMCSLMQGSTLPRRSGAAG
PRMYSLMQVSTMPRRSGAAG

SEQ ID NO: 120413 - protein, 20 aa, Artificial Sequence
  Description of Artificial Sequence: Synthetic peptide
  Seed: PRMCSLMQGSTLPRRSGAAG
PRMYSLMQVSTSPRRSGAAG

SEQ ID NO: 120414 - protein, 20 aa, Artificial Sequence
  Description of Artificial Sequence: Synthetic peptide
  Seed: PRMCSLMQGSTLPRRSGAAG
PRMYSLMQVSTTPRRSGAAG

SEQ ID NO: 120415 - protein, 20 aa, Artificial Sequence
  Description of Artificial Sequence: Synthetic peptide
  Seed: PRMCSLMQGSTLPRRSGAAG
PRMYSLMQVSTVPRRSGAAG

SEQ ID NO: 120416 - protein, 20 aa, Artificial Sequence
  Description of Artificial Sequence: Synthetic peptide
  Seed: PRMCSLMQGSTLPRRSGAAG
PRMYSLNQASTAPRRSGAAG

SEQ ID NO: 120417 - protein, 20 aa, Artificial Sequence
  Description of Artificial Sequence: Synthetic peptide
  Seed: PRMCSLMQGSTLPRRSGAAG
PRMYSLNQASTIPRRSGAAG

SEQ ID NO: 120418 - protein, 20 aa, Artificial Sequence
  Description of Artificial Sequence: Synthetic peptide
  Seed: PRMCSLMQGSTLPRRSGAAG
PRMYSLNQASTLPRRSGAAG

SEQ ID NO: 120419 - protein, 20 aa, Artificial Sequence
  Description of Artificial Sequence: Synthetic peptide
  Seed: PRMCSLMQGSTLPRRSGAAG
PRMYSLNQASTVPRRSGAAG

SEQ ID NO: 120420 - protein, 20 aa, Artificial Sequence
  Description of Artificial Sequence: Synthetic peptide
  Seed: PRMCSLMQGSTLPRRSGAAG
PRMYSLQQASTAPRRSGAAG

SEQ ID NO: 120421 - protein, 20 aa, Artificial Sequence
  Description of Artificial Sequence: Synthetic peptide
  Seed: PRMCSLMQGSTLPRRSGAAG
PRMYSLQQASTGPRRSGAAG

SEQ ID NO: 120422 - protein, 20 aa, Artificial Sequence
  Description of Artificial Sequence: Synthetic peptide
  Seed: PRMCSLMQGSTLPRRSGAAG
PRMYSLQQASTIPRRSGAAG

SEQ ID NO: 120423 - protein, 20 aa, Artificial Sequence
  Description of Artificial Sequence: Synthetic peptide
  Seed: PRMCSLMQGSTLPRRSGAAG
PRMYSLQQASTLPRRSGAAG

SEQ ID NO: 120424 - protein, 20 aa, Artificial Sequence
  Description of Artificial Sequence: Synthetic peptide
  Seed: PRMCSLMQGSTLPRRSGAAG
PRMYSLQQASTMPRRSGAAG

SEQ ID NO: 120425 - protein, 20 aa, Artificial Sequence
  Description of Artificial Sequence: Synthetic peptide
  Seed: PRMCSLMQGSTLPRRSGAAG
PRMYSLQQASTSPRRSGAAG

SEQ ID NO: 120426 - protein, 20 aa, Artificial Sequence
  Description of Artificial Sequence: Synthetic peptide
  Seed: PRMCSLMQGSTLPRRSGAAG
PRMYSLQQASTTPRRSGAAG

SEQ ID NO: 120427 - protein, 20 aa, Artificial Sequence
  Description of Artificial Sequence: Synthetic peptide
  Seed: PRMCSLMQGSTLPRRSGAAG
PRMYSLQQASTVPRRSGAAG

SEQ ID NO: 120428 - protein, 20 aa, Artificial Sequence
  Description of Artificial Sequence: Synthetic peptide
  Seed: PRMCSLMQGSTLPRRSGAAG
PRMYSLQQGSTAPRRSGAAG

SEQ ID NO: 120429 - protein, 20 aa, Artificial Sequence
  Description of Artificial Sequence: Synthetic peptide
  Seed: PRMCSLMQGSTLPRRSGAAG
PRMYSLQQGSTIPRRSGAAG

SEQ ID NO: 120430 - protein, 20 aa, Artificial Sequence
  Description of Artificial Sequence: Synthetic peptide
  Seed: PRMCSLMQGSTLPRRSGAAG
PRMYSLQQGSTLPRRSGAAG

SEQ ID NO: 120431 - protein, 20 aa, Artificial Sequence
  Description of Artificial Sequence: Synthetic peptide
  Seed: PRMCSLMQGSTLPRRSGAAG
PRMYSLQQGSTMPRRSGAAG

SEQ ID NO: 120432 - protein, 20 aa, Artificial Sequence
  Description of Artificial Sequence: Synthetic peptide
  Seed: PRMCSLMQGSTLPRRSGAAG
PRMYSLQQGSTTPRRSGAAG

SEQ ID NO: 120433 - protein, 20 aa, Artificial Sequence
  Description of Artificial Sequence: Synthetic peptide
  Seed: PRMCSLMQGSTLPRRSGAAG
PRMYSLQQGSTVPRRSGAAG

SEQ ID NO: 120434 - protein, 20 aa, Artificial Sequence
  Description of Artificial Sequence: Synthetic peptide
  Seed: PRMCSLMQGSTLPRRSGAAG
PRMYSLQQNSTIPRRSGAAG

SEQ ID NO: 120435 - protein, 20 aa, Artificial Sequence
  Description of Artificial Sequence: Synthetic peptide
  Seed: PRMCSLMQGSTLPRRSGAAG
PRMYSLQQNSTLPRRSGAAG

SEQ ID NO: 120436 - protein, 20 aa, Artificial Sequence
  Description of Artificial Sequence: Synthetic peptide
  Seed: PRMCSLMQGSTLPRRSGAAG
PRMYSLQQNSTVPRRSGAAG

SEQ ID NO: 120437 - protein, 20 aa, Artificial Sequence
  Description of Artificial Sequence: Synthetic peptide
  Seed: PRMCSLMQGSTLPRRSGAAG
PRMYSLQQPSTAPRRSGAAG

SEQ ID NO: 120438 - protein, 20 aa, Artificial Sequence
  Description of Artificial Sequence: Synthetic peptide
  Seed: PRMCSLMQGSTLPRRSGAAG
PRMYSLQQPSTIPRRSGAAG

SEQ ID NO: 120439 - protein, 20 aa, Artificial Sequence
  Description of Artificial Sequence: Synthetic peptide
  Seed: PRMCSLMQGSTLPRRSGAAG
PRMYSLQQPSTLPRRSGAAG

SEQ ID NO: 120440 - protein, 20 aa, Artificial Sequence
  Description of Artificial Sequence: Synthetic peptide
  Seed: PRMCSLMQGSTLPRRSGAAG
PRMYSLQQPSTVPRRSGAAG

SEQ ID NO: 120441 - protein, 20 aa, Artificial Sequence
  Description of Artificial Sequence: Synthetic peptide
  Seed: PRMCSLMQGSTLPRRSGAAG
PRMYSLQQSSTAPRRSGAAG

SEQ ID NO: 120442 - protein, 20 aa, Artificial Sequence
  Description of Artificial Sequence: Synthetic peptide
  Seed: PRMCSLMQGSTLPRRSGAAG
PRMYSLQQSSTIPRRSGAAG

SEQ ID NO: 120443 - protein, 20 aa, Artificial Sequence
  Description of Artificial Sequence: Synthetic peptide
  Seed: PRMCSLMQGSTLPRRSGAAG
PRMYSLQQSSTLPRRSGAAG

SEQ ID NO: 120444 - protein, 20 aa, Artificial Sequence
  Description of Artificial Sequence: Synthetic peptide
  Seed: PRMCSLMQGSTLPRRSGAAG
PRMYSLQQSSTMPRRSGAAG

SEQ ID NO: 120445 - protein, 20 aa, Artificial Sequence
  Description of Artificial Sequence: Synthetic peptide
  Seed: PRMCSLMQGSTLPRRSGAAG
PRMYSLQQSSTTPRRSGAAG

SEQ ID NO: 120446 - protein, 20 aa, Artificial Sequence
  Description of Artificial Sequence: Synthetic peptide
  Seed: PRMCSLMQGSTLPRRSGAAG
PRMYSLQQSSTVPRRSGAAG

SEQ ID NO: 120447 - protein, 20 aa, Artificial Sequence
  Description of Artificial Sequence: Synthetic peptide
  Seed: PRMCSLMQGSTLPRRSGAAG
PRMYSLQQTSTAPRRSGAAG

SEQ ID NO: 120448 - protein, 20 aa, Artificial Sequence
  Description of Artificial Sequence: Synthetic peptide
  Seed: PRMCSLMQGSTLPRRSGAAG
PRMYSLQQTSTIPRRSGAAG

SEQ ID NO: 120449 - protein, 20 aa, Artificial Sequence
  Description of Artificial Sequence: Synthetic peptide
  Seed: PRMCSLMQGSTLPRRSGAAG
PRMYSLQQTSTLPRRSGAAG

SEQ ID NO: 120450 - protein, 20 aa, Artificial Sequence
  Description of Artificial Sequence: Synthetic peptide
  Seed: PRMCSLMQGSTLPRRSGAAG
PRMYSLQQTSTVPRRSGAAG

SEQ ID NO: 120451 - protein, 20 aa, Artificial Sequence
  Description of Artificial Sequence: Synthetic peptide
  Seed: PRMCSLMQGSTLPRRSGAAG
PRMYSLQQVSTVPRRSGAAG

SEQ ID NO: 120452 - protein, 20 aa, Artificial Sequence
  Description of Artificial Sequence: Synthetic peptide
  Seed: PRMCSLMQGSTLPRRSGAAG
PRMYSLSQASTAPRRSGAAG

SEQ ID NO: 120453 - protein, 20 aa, Artificial Sequence
  Description of Artificial Sequence: Synthetic peptide
  Seed: PRMCSLMQGSTLPRRSGAAG
PRMYSLSQASTIPRRSGAAG

SEQ ID NO: 120454 - protein, 20 aa, Artificial Sequence
  Description of Artificial Sequence: Synthetic peptide
  Seed: PRMCSLMQGSTLPRRSGAAG
PRMYSLSQASTLPRRSGAAG

SEQ ID NO: 120455 - protein, 20 aa, Artificial Sequence
  Description of Artificial Sequence: Synthetic peptide
  Seed: PRMCSLMQGSTLPRRSGAAG
PRMYSLSQASTMPRRSGAAG

SEQ ID NO: 120456 - protein, 20 aa, Artificial Sequence
  Description of Artificial Sequence: Synthetic peptide
  Seed: PRMCSLMQGSTLPRRSGAAG
PRMYSLSQASTTPRRSGAAG

SEQ ID NO: 120457 - protein, 20 aa, Artificial Sequence
  Description of Artificial Sequence: Synthetic peptide
  Seed: PRMCSLMQGSTLPRRSGAAG
PRMYSLSQASTVPRRSGAAG

SEQ ID NO: 120458 - protein, 20 aa, Artificial Sequence
  Description of Artificial Sequence: Synthetic peptide
  Seed: PRMCSLMQGSTLPRRSGAAG
PRMYSLSQGSTAPRRSGAAG

SEQ ID NO: 120459 - protein, 20 aa, Artificial Sequence
  Description of Artificial Sequence: Synthetic peptide
  Seed: PRMCSLMQGSTLPRRSGAAG
PRMYSLSQGSTIPRRSGAAG

SEQ ID NO: 120460 - protein, 20 aa, Artificial Sequence
  Description of Artificial Sequence: Synthetic peptide
  Seed: PRMCSLMQGSTLPRRSGAAG
PRMYSLSQGSTLPRRSGAAG

SEQ ID NO: 120461 - protein, 20 aa, Artificial Sequence
  Description of Artificial Sequence: Synthetic peptide
  Seed: PRMCSLMQGSTLPRRSGAAG
PRMYSLSQGSTVPRRSGAAG

SEQ ID NO: 120462 - protein, 20 aa, Artificial Sequence
  Description of Artificial Sequence: Synthetic peptide
  Seed: PRMCSLMQGSTLPRRSGAAG
PRMYSLSQPSTIPRRSGAAG

SEQ ID NO: 120463 - protein, 20 aa, Artificial Sequence
  Description of Artificial Sequence: Synthetic peptide
  Seed: PRMCSLMQGSTLPRRSGAAG
PRMYSLSQPSTLPRRSGAAG

SEQ ID NO: 120464 - protein, 20 aa, Artificial Sequence
  Description of Artificial Sequence: Synthetic peptide
  Seed: PRMCSLMQGSTLPRRSGAAG
PRMYSLSQPSTVPRRSGAAG

SEQ ID NO: 120465 - protein, 20 aa, Artificial Sequence
  Description of Artificial Sequence: Synthetic peptide
  Seed: PRMCSLMQGSTLPRRSGAAG
PRMYSLSQSSTAPRRSGAAG

SEQ ID NO: 120466 - protein, 20 aa, Artificial Sequence
  Description of Artificial Sequence: Synthetic peptide
  Seed: PRMCSLMQGSTLPRRSGAAG
PRMYSLSQSSTIPRRSGAAG

SEQ ID NO: 120467 - protein, 20 aa, Artificial Sequence
  Description of Artificial Sequence: Synthetic peptide
  Seed: PRMCSLMQGSTLPRRSGAAG
PRMYSLSQSSTLPRRSGAAG

SEQ ID NO: 120468 - protein, 20 aa, Artificial Sequence
  Description of Artificial Sequence: Synthetic peptide
  Seed: PRMCSLMQGSTLPRRSGAAG
PRMYSLSQSSTVPRRSGAAG

SEQ ID NO: 120469 - protein, 20 aa, Artificial Sequence
  Description of Artificial Sequence: Synthetic peptide
  Seed: PRMCSLMQGSTLPRRSGAAG
PRMYSLTQASTAPRRSGAAG

SEQ ID NO: 120470 - protein, 20 aa, Artificial Sequence
  Description of Artificial Sequence: Synthetic peptide
  Seed: PRMCSLMQGSTLPRRSGAAG
PRMYSLTQASTIPRRSGAAG

SEQ ID NO: 120471 - protein, 20 aa, Artificial Sequence
  Description of Artificial Sequence: Synthetic peptide
  Seed: PRMCSLMQGSTLPRRSGAAG
PRMYSLTQASTLPRRSGAAG

SEQ ID NO: 120472 - protein, 20 aa, Artificial Sequence
  Description of Artificial Sequence: Synthetic peptide
  Seed: PRMCSLMQGSTLPRRSGAAG
PRMYSLTQASTVPRRSGAAG

SEQ ID NO: 120473 - protein, 20 aa, Artificial Sequence
  Description of Artificial Sequence: Synthetic peptide
  Seed: PRMCSLMQGSTLPRRSGAAG
PRMYSLTQGSTIPRRSGAAG

SEQ ID NO: 120474 - protein, 20 aa, Artificial Sequence
  Description of Artificial Sequence: Synthetic peptide
  Seed: PRMCSLMQGSTLPRRSGAAG
PRMYSLTQGSTLPRRSGAAG

SEQ ID NO: 120475 - protein, 20 aa, Artificial Sequence
  Description of Artificial Sequence: Synthetic peptide
  Seed: PRMCSLMQGSTLPRRSGAAG
PRMYSLTQGSTVPRRSGAAG

SEQ ID NO: 120476 - protein, 20 aa, Artificial Sequence
  Description of Artificial Sequence: Synthetic peptide
  Seed: PRMCSLMQGSTLPRRSGAAG
PRMYSLTQSSTIPRRSGAAG

SEQ ID NO: 120477 - protein, 20 aa, Artificial Sequence
  Description of Artificial Sequence: Synthetic peptide
  Seed: PRMCSLMQGSTLPRRSGAAG
PRMYSLTQSSTVPRRSGAAG

SEQ ID NO: 120478 - protein, 20 aa, Artificial Sequence
  Description of Artificial Sequence: Synthetic peptide
  Seed: PRMCSLMQGSTLPRRSGAAG
PRMYSLVQASTAPRRSGAAG

SEQ ID NO: 120479 - protein, 20 aa, Artificial Sequence
  Description of Artificial Sequence: Synthetic peptide
  Seed: PRMCSLMQGSTLPRRSGAAG
PRMYSLVQASTGPRRSGAAG

SEQ ID NO: 120480 - protein, 20 aa, Artificial Sequence
  Description of Artificial Sequence: Synthetic peptide
  Seed: PRMCSLMQGSTLPRRSGAAG
PRMYSLVQASTIPRRSGAAG

SEQ ID NO: 120481 - protein, 20 aa, Artificial Sequence
  Description of Artificial Sequence: Synthetic peptide
  Seed: PRMCSLMQGSTLPRRSGAAG
PRMYSLVQASTLPRRSGAAG

SEQ ID NO: 120482 - protein, 20 aa, Artificial Sequence
  Description of Artificial Sequence: Synthetic peptide
  Seed: PRMCSLMQGSTLPRRSGAAG
PRMYSLVQASTMPRRSGAAG

SEQ ID NO: 120483 - protein, 20 aa, Artificial Sequence
  Description of Artificial Sequence: Synthetic peptide
  Seed: PRMCSLMQGSTLPRRSGAAG
PRMYSLVQASTSPRRSGAAG

SEQ ID NO: 120484 - protein, 20 aa, Artificial Sequence
  Description of Artificial Sequence: Synthetic peptide
  Seed: PRMCSLMQGSTLPRRSGAAG
PRMYSLVQASTTPRRSGAAG

SEQ ID NO: 120485 - protein, 20 aa, Artificial Sequence
  Description of Artificial Sequence: Synthetic peptide
  Seed: PRMCSLMQGSTLPRRSGAAG
PRMYSLVQASTVPRRSGAAG

SEQ ID NO: 120486 - protein, 20 aa, Artificial Sequence
  Description of Artificial Sequence: Synthetic peptide
  Seed: PRMCSLMQGSTLPRRSGAAG
PRMYSLVQGSTAPRRSGAAG

SEQ ID NO: 120487 - protein, 20 aa, Artificial Sequence
  Description of Artificial Sequence: Synthetic peptide
  Seed: PRMCSLMQGSTLPRRSGAAG
PRMYSLVQGSTIPRRSGAAG

SEQ ID NO: 120488 - protein, 20 aa, Artificial Sequence
  Description of Artificial Sequence: Synthetic peptide
  Seed: PRMCSLMQGSTLPRRSGAAG
PRMYSLVQGSTLPRRSGAAG

SEQ ID NO: 120489 - protein, 20 aa, Artificial Sequence
  Description of Artificial Sequence: Synthetic peptide
  Seed: PRMCSLMQGSTLPRRSGAAG
PRMYSLVQGSTMPRRSGAAG

SEQ ID NO: 120490 - protein, 20 aa, Artificial Sequence
  Description of Artificial Sequence: Synthetic peptide
  Seed: PRMCSLMQGSTLPRRSGAAG
PRMYSLVQGSTSPRRSGAAG

SEQ ID NO: 120491 - protein, 20 aa, Artificial Sequence
  Description of Artificial Sequence: Synthetic peptide
  Seed: PRMCSLMQGSTLPRRSGAAG
PRMYSLVQGSTTPRRSGAAG

SEQ ID NO: 120492 - protein, 20 aa, Artificial Sequence
  Description of Artificial Sequence: Synthetic peptide
  Seed: PRMCSLMQGSTLPRRSGAAG
PRMYSLVQGSTVPRRSGAAG

SEQ ID NO: 120493 - protein, 20 aa, Artificial Sequence
  Description of Artificial Sequence: Synthetic peptide
  Seed: PRMCSLMQGSTLPRRSGAAG
PRMYSLVQNSTAPRRSGAAG

SEQ ID NO: 120494 - protein, 20 aa, Artificial Sequence
  Description of Artificial Sequence: Synthetic peptide
  Seed: PRMCSLMQGSTLPRRSGAAG
PRMYSLVQNSTIPRRSGAAG

SEQ ID NO: 120495 - protein, 20 aa, Artificial Sequence
  Description of Artificial Sequence: Synthetic peptide
  Seed: PRMCSLMQGSTLPRRSGAAG
PRMYSLVQNSTLPRRSGAAG

SEQ ID NO: 120496 - protein, 20 aa, Artificial Sequence
  Description of Artificial Sequence: Synthetic peptide
  Seed: PRMCSLMQGSTLPRRSGAAG
PRMYSLVQNSTVPRRSGAAG

SEQ ID NO: 120497 - protein, 20 aa, Artificial Sequence
  Description of Artificial Sequence: Synthetic peptide
  Seed: PRMCSLMQGSTLPRRSGAAG
PRMYSLVQPSTAPRRSGAAG

SEQ ID NO: 120498 - protein, 20 aa, Artificial Sequence
  Description of Artificial Sequence: Synthetic peptide
  Seed: PRMCSLMQGSTLPRRSGAAG
PRMYSLVQPSTIPRRSGAAG

SEQ ID NO: 120499 - protein, 20 aa, Artificial Sequence
  Description of Artificial Sequence: Synthetic peptide
  Seed: PRMCSLMQGSTLPRRSGAAG
PRMYSLVQPSTLPRRSGAAG

SEQ ID NO: 120500 - protein, 20 aa, Artificial Sequence
  Description of Artificial Sequence: Synthetic peptide
  Seed: PRMCSLMQGSTLPRRSGAAG
PRMYSLVQPSTMPRRSGAAG

SEQ ID NO: 120501 - protein, 20 aa, Artificial Sequence
  Description of Artificial Sequence: Synthetic peptide
  Seed: PRMCSLMQGSTLPRRSGAAG
PRMYSLVQPSTVPRRSGAAG

SEQ ID NO: 120502 - protein, 20 aa, Artificial Sequence
  Description of Artificial Sequence: Synthetic peptide
  Seed: PRMCSLMQGSTLPRRSGAAG
PRMYSLVQSSTAPRRSGAAG

SEQ ID NO: 120503 - protein, 20 aa, Artificial Sequence
  Description of Artificial Sequence: Synthetic peptide
  Seed: PRMCSLMQGSTLPRRSGAAG
PRMYSLVQSSTIPRRSGAAG

SEQ ID NO: 120504 - protein, 20 aa, Artificial Sequence
  Description of Artificial Sequence: Synthetic peptide
  Seed: PRMCSLMQGSTLPRRSGAAG
PRMYSLVQSSTLPRRSGAAG

SEQ ID NO: 120505 - protein, 20 aa, Artificial Sequence
  Description of Artificial Sequence: Synthetic peptide
  Seed: PRMCSLMQGSTLPRRSGAAG
PRMYSLVQSSTMPRRSGAAG

SEQ ID NO: 120506 - protein, 20 aa, Artificial Sequence
  Description of Artificial Sequence: Synthetic peptide
  Seed: PRMCSLMQGSTLPRRSGAAG
PRMYSLVQSSTTPRRSGAAG

SEQ ID NO: 120507 - protein, 20 aa, Artificial Sequence
  Description of Artificial Sequence: Synthetic peptide
  Seed: PRMCSLMQGSTLPRRSGAAG
PRMYSLVQSSTVPRRSGAAG

SEQ ID NO: 120508 - protein, 20 aa, Artificial Sequence
  Description of Artificial Sequence: Synthetic peptide
  Seed: PRMCSLMQGSTLPRRSGAAG
PRMYSLVQTSTAPRRSGAAG

SEQ ID NO: 120509 - protein, 20 aa, Artificial Sequence
  Description of Artificial Sequence: Synthetic peptide
  Seed: PRMCSLMQGSTLPRRSGAAG
PRMYSLVQTSTIPRRSGAAG

SEQ ID NO: 120510 - protein, 20 aa, Artificial Sequence
  Description of Artificial Sequence: Synthetic peptide
  Seed: PRMCSLMQGSTLPRRSGAAG
PRMYSLVQTSTLPRRSGAAG

SEQ ID NO: 120511 - protein, 20 aa, Artificial Sequence
  Description of Artificial Sequence: Synthetic peptide
  Seed: PRMCSLMQGSTLPRRSGAAG
PRMYSLVQTSTVPRRSGAAG

SEQ ID NO: 120512 - protein, 20 aa, Artificial Sequence
  Description of Artificial Sequence: Synthetic peptide
  Seed: PRMCSLMQGSTLPRRSGAAG
PRMYSLVQVSTVPRRSGAAG

SEQ ID NO: 120513 - protein, 20 aa, Artificial Sequence
  Description of Artificial Sequence: Synthetic peptide
  Seed: PRMCSLMQGSTLPRRSGAAG
PRMCSLMQFSTIPRRSAAAG

SEQ ID NO: 120514 - protein, 20 aa, Artificial Sequence
  Description of Artificial Sequence: Synthetic peptide
  Seed: PRMCSLMQGSTLPRRSGAAG
PRMCSLMQFSTIPRRSSAAG

SEQ ID NO: 120515 - protein, 20 aa, Artificial Sequence
  Description of Artificial Sequence: Synthetic peptide
  Seed: PRMCSLMQGSTLPRRSGAAG
PRMCSLMQFSTLPRRSAAAG

SEQ ID NO: 120516 - protein, 20 aa, Artificial Sequence
  Description of Artificial Sequence: Synthetic peptide
  Seed: PRMCSLMQGSTLPRRSGAAG
PRMCSLMQFSTLPRRSSAAG

SEQ ID NO: 120517 - protein, 20 aa, Artificial Sequence
  Description of Artificial Sequence: Synthetic peptide
  Seed: PRMCSLMQGSTLPRRSGAAG
PRMCSLMQFSTMPRRSAAAG

SEQ ID NO: 120518 - protein, 20 aa, Artificial Sequence
  Description of Artificial Sequence: Synthetic peptide
  Seed: PRMCSLMQGSTLPRRSGAAG
PRMCSLMQFSTMPRRSSAAG

SEQ ID NO: 120519 - protein, 20 aa, Artificial Sequence
  Description of Artificial Sequence: Synthetic peptide
  Seed: PRMCSLMQGSTLPRRSGAAG
PRMCSLMQISTFPRRSAAAG

SEQ ID NO: 120520 - protein, 20 aa, Artificial Sequence
  Description of Artificial Sequence: Synthetic peptide
  Seed: PRMCSLMQGSTLPRRSGAAG
PRMCSLMQISTIPKRSAAAG

SEQ ID NO: 120521 - protein, 20 aa, Artificial Sequence
  Description of Artificial Sequence: Synthetic peptide
  Seed: PRMCSLMQGSTLPRRSGAAG
PRMCSLMQISTIPKRSSAAG

SEQ ID NO: 120522 - protein, 20 aa, Artificial Sequence
  Description of Artificial Sequence: Synthetic peptide
  Seed: PRMCSLMQGSTLPRRSGAAG
PRMCSLMQISTIPRRSAAAG

SEQ ID NO: 120523 - protein, 20 aa, Artificial Sequence
  Description of Artificial Sequence: Synthetic peptide
  Seed: PRMCSLMQGSTLPRRSGAAG
PRMCSLMQISTIPRRSQAAG

SEQ ID NO: 120524 - protein, 20 aa, Artificial Sequence
  Description of Artificial Sequence: Synthetic peptide
  Seed: PRMCSLMQGSTLPRRSGAAG
PRMCSLMQISTIPRRSSAAG

SEQ ID NO: 120525 - protein, 20 aa, Artificial Sequence
  Description of Artificial Sequence: Synthetic peptide
  Seed: PRMCSLMQGSTLPRRSGAAG
PRMCSLMQISTIPRRSTAAG

SEQ ID NO: 120526 - protein, 20 aa, Artificial Sequence
  Description of Artificial Sequence: Synthetic peptide
  Seed: PRMCSLMQGSTLPRRSGAAG
PRMCSLMQISTLPKRSAAAG

SEQ ID NO: 120527 - protein, 20 aa, Artificial Sequence
  Description of Artificial Sequence: Synthetic peptide
  Seed: PRMCSLMQGSTLPRRSGAAG
PRMCSLMQISTLPKRSSAAG

SEQ ID NO: 120528 - protein, 20 aa, Artificial Sequence
  Description of Artificial Sequence: Synthetic peptide
  Seed: PRMCSLMQGSTLPRRSGAAG
PRMCSLMQISTLPRRSAAAG

SEQ ID NO: 120529 - protein, 20 aa, Artificial Sequence
  Description of Artificial Sequence: Synthetic peptide
  Seed: PRMCSLMQGSTLPRRSGAAG
PRMCSLMQISTLPRRSHAAG

SEQ ID NO: 120530 - protein, 20 aa, Artificial Sequence
  Description of Artificial Sequence: Synthetic peptide
  Seed: PRMCSLMQGSTLPRRSGAAG
PRMCSLMQISTLPRRSQAAG

SEQ ID NO: 120531 - protein, 20 aa, Artificial Sequence
  Description of Artificial Sequence: Synthetic peptide
  Seed: PRMCSLMQGSTLPRRSGAAG
PRMCSLMQISTLPRRSSAAG

SEQ ID NO: 120532 - protein, 20 aa, Artificial Sequence
  Description of Artificial Sequence: Synthetic peptide
  Seed: PRMCSLMQGSTLPRRSGAAG
PRMCSLMQISTLPRRSTAAG

SEQ ID NO: 120533 - protein, 20 aa, Artificial Sequence
  Description of Artificial Sequence: Synthetic peptide
  Seed: PRMCSLMQGSTLPRRSGAAG
PRMCSLMQISTLPRRSVAAG

SEQ ID NO: 120534 - protein, 20 aa, Artificial Sequence
  Description of Artificial Sequence: Synthetic peptide
  Seed: PRMCSLMQGSTLPRRSGAAG
PRMCSLMQISTMPKRSAAAG

SEQ ID NO: 120535 - protein, 20 aa, Artificial Sequence
  Description of Artificial Sequence: Synthetic peptide
  Seed: PRMCSLMQGSTLPRRSGAAG
PRMCSLMQISTMPKRSGAAG

SEQ ID NO: 120536 - protein, 20 aa, Artificial Sequence
  Description of Artificial Sequence: Synthetic peptide
  Seed: PRMCSLMQGSTLPRRSGAAG
PRMCSLMQISTMPKRSQAAG

SEQ ID NO: 120537 - protein, 20 aa, Artificial Sequence
  Description of Artificial Sequence: Synthetic peptide
  Seed: PRMCSLMQGSTLPRRSGAAG
PRMCSLMQISTMPKRSSAAG

SEQ ID NO: 120538 - protein, 20 aa, Artificial Sequence
  Description of Artificial Sequence: Synthetic peptide
  Seed: PRMCSLMQGSTLPRRSGAAG
PRMCSLMQISTMPKRSTAAG

SEQ ID NO: 120539 - protein, 20 aa, Artificial Sequence
  Description of Artificial Sequence: Synthetic peptide
  Seed: PRMCSLMQGSTLPRRSGAAG
PRMCSLMQISTMPRRSAAAG

SEQ ID NO: 120540 - protein, 20 aa, Artificial Sequence
  Description of Artificial Sequence: Synthetic peptide
  Seed: PRMCSLMQGSTLPRRSGAAG
PRMCSLMQISTMPRRSHAAG

SEQ ID NO: 120541 - protein, 20 aa, Artificial Sequence
  Description of Artificial Sequence: Synthetic peptide
  Seed: PRMCSLMQGSTLPRRSGAAG
PRMCSLMQISTMPRRSIAAG

SEQ ID NO: 120542 - protein, 20 aa, Artificial Sequence
  Description of Artificial Sequence: Synthetic peptide
  Seed: PRMCSLMQGSTLPRRSGAAG
PRMCSLMQISTMPRRSKAAG

SEQ ID NO: 120543 - protein, 20 aa, Artificial Sequence
  Description of Artificial Sequence: Synthetic peptide
  Seed: PRMCSLMQGSTLPRRSGAAG
PRMCSLMQISTMPRRSLAAG

SEQ ID NO: 120544 - protein, 20 aa, Artificial Sequence
  Description of Artificial Sequence: Synthetic peptide
  Seed: PRMCSLMQGSTLPRRSGAAG
PRMCSLMQISTMPRRSMAAG

SEQ ID NO: 120545 - protein, 20 aa, Artificial Sequence
  Description of Artificial Sequence: Synthetic peptide
  Seed: PRMCSLMQGSTLPRRSGAAG
PRMCSLMQISTMPRRSQAAG

SEQ ID NO: 120546 - protein, 20 aa, Artificial Sequence
  Description of Artificial Sequence: Synthetic peptide
  Seed: PRMCSLMQGSTLPRRSGAAG
PRMCSLMQISTMPRRSRAAG

SEQ ID NO: 120547 - protein, 20 aa, Artificial Sequence
  Description of Artificial Sequence: Synthetic peptide
  Seed: PRMCSLMQGSTLPRRSGAAG
PRMCSLMQISTMPRRSSAAG

SEQ ID NO: 120548 - protein, 20 aa, Artificial Sequence
  Description of Artificial Sequence: Synthetic peptide
  Seed: PRMCSLMQGSTLPRRSGAAG
PRMCSLMQISTMPRRSTAAG

SEQ ID NO: 120549 - protein, 20 aa, Artificial Sequence
  Description of Artificial Sequence: Synthetic peptide
  Seed: PRMCSLMQGSTLPRRSGAAG
PRMCSLMQISTMPRRSVAAG

SEQ ID NO: 120550 - protein, 20 aa, Artificial Sequence
  Description of Artificial Sequence: Synthetic peptide
  Seed: PRMCSLMQGSTLPRRSGAAG
PRMCSLMQISTVPKRSAAAG

SEQ ID NO: 120551 - protein, 20 aa, Artificial Sequence
  Description of Artificial Sequence: Synthetic peptide
  Seed: PRMCSLMQGSTLPRRSGAAG
PRMCSLMQISTVPRRSAAAG

SEQ ID NO: 120552 - protein, 20 aa, Artificial Sequence
  Description of Artificial Sequence: Synthetic peptide
  Seed: PRMCSLMQGSTLPRRSGAAG
PRMCSLMQISTVPRRSSAAG

SEQ ID NO: 120553 - protein, 20 aa, Artificial Sequence
  Description of Artificial Sequence: Synthetic peptide
  Seed: PRMCSLMQGSTLPRRSGAAG
PRMCSLMQLSTIPKRSAAAG

SEQ ID NO: 120554 - protein, 20 aa, Artificial Sequence
  Description of Artificial Sequence: Synthetic peptide
  Seed: PRMCSLMQGSTLPRRSGAAG
PRMCSLMQLSTIPRRSAAAG

SEQ ID NO: 120555 - protein, 20 aa, Artificial Sequence
  Description of Artificial Sequence: Synthetic peptide
  Seed: PRMCSLMQGSTLPRRSGAAG
PRMCSLMQLSTIPRRSSAAG

SEQ ID NO: 120556 - protein, 20 aa, Artificial Sequence
  Description of Artificial Sequence: Synthetic peptide
  Seed: PRMCSLMQGSTLPRRSGAAG
PRMCSLMQLSTLPKRSAAAG

SEQ ID NO: 120557 - protein, 20 aa, Artificial Sequence
  Description of Artificial Sequence: Synthetic peptide
  Seed: PRMCSLMQGSTLPRRSGAAG
PRMCSLMQLSTLPRRSAAAG

SEQ ID NO: 120558 - protein, 20 aa, Artificial Sequence
  Description of Artificial Sequence: Synthetic peptide
  Seed: PRMCSLMQGSTLPRRSGAAG
PRMCSLMQLSTLPRRSQAAG

SEQ ID NO: 120559 - protein, 20 aa, Artificial Sequence
  Description of Artificial Sequence: Synthetic peptide
  Seed: PRMCSLMQGSTLPRRSGAAG
PRMCSLMQLSTLPRRSSAAG

SEQ ID NO: 120560 - protein, 20 aa, Artificial Sequence
  Description of Artificial Sequence: Synthetic peptide
  Seed: PRMCSLMQGSTLPRRSGAAG
PRMCSLMQLSTMPKRSAAAG

SEQ ID NO: 120561 - protein, 20 aa, Artificial Sequence
  Description of Artificial Sequence: Synthetic peptide
  Seed: PRMCSLMQGSTLPRRSGAAG
PRMCSLMQLSTMPKRSSAAG

SEQ ID NO: 120562 - protein, 20 aa, Artificial Sequence
  Description of Artificial Sequence: Synthetic peptide
  Seed: PRMCSLMQGSTLPRRSGAAG
PRMCSLMQLSTMPRRSAAAG

SEQ ID NO: 120563 - protein, 20 aa, Artificial Sequence
  Description of Artificial Sequence: Synthetic peptide
  Seed: PRMCSLMQGSTLPRRSGAAG
PRMCSLMQLSTMPRRSQAAG

SEQ ID NO: 120564 - protein, 20 aa, Artificial Sequence
  Description of Artificial Sequence: Synthetic peptide
  Seed: PRMCSLMQGSTLPRRSGAAG
PRMCSLMQLSTMPRRSSAAG

SEQ ID NO: 120565 - protein, 20 aa, Artificial Sequence
  Description of Artificial Sequence: Synthetic peptide
  Seed: PRMCSLMQGSTLPRRSGAAG
PRMCSLMQLSTMPRRSTAAG

SEQ ID NO: 120566 - protein, 20 aa, Artificial Sequence
  Description of Artificial Sequence: Synthetic peptide
  Seed: PRMCSLMQGSTLPRRSGAAG
PRMCSLMQLSTVPRRSAAAG

SEQ ID NO: 120567 - protein, 20 aa, Artificial Sequence
  Description of Artificial Sequence: Synthetic peptide
  Seed: PRMCSLMQGSTLPRRSGAAG
PRMCSLMQMSTLPRRSAAAG

SEQ ID NO: 120568 - protein, 20 aa, Artificial Sequence
  Description of Artificial Sequence: Synthetic peptide
  Seed: PRMCSLMQGSTLPRRSGAAG
PRMCSLMQMSTMPRRSAAAG

SEQ ID NO: 120569 - protein, 20 aa, Artificial Sequence
  Description of Artificial Sequence: Synthetic peptide
  Seed: PRMCSLMQGSTLPRRSGAAG
PRMCSLMQMSTMPRRSSAAG

SEQ ID NO: 120570 - protein, 20 aa, Artificial Sequence
  Description of Artificial Sequence: Synthetic peptide
  Seed: PRMCSLMQGSTLPRRSGAAG
PRMCSLMQVSTIPRRSAAAG

SEQ ID NO: 120571 - protein, 20 aa, Artificial Sequence
  Description of Artificial Sequence: Synthetic peptide
  Seed: PRMCSLMQGSTLPRRSGAAG
PRMCSLMQVSTLPRRSAAAG

SEQ ID NO: 120572 - protein, 20 aa, Artificial Sequence
  Description of Artificial Sequence: Synthetic peptide
  Seed: PRMCSLMQGSTLPRRSGAAG
PRMCSLMQVSTLPRRSSAAG

SEQ ID NO: 120573 - protein, 20 aa, Artificial Sequence
  Description of Artificial Sequence: Synthetic peptide
  Seed: PRMCSLMQGSTLPRRSGAAG
PRMCSLMQVSTMPRRSAAAG

SEQ ID NO: 120574 - protein, 20 aa, Artificial Sequence
  Description of Artificial Sequence: Synthetic peptide
  Seed: PRMCSLMQGSTLPRRSGAAG
PRMCSLMQVSTMPRRSSAAG

SEQ ID NO: 120575 - protein, 20 aa, Artificial Sequence
  Description of Artificial Sequence: Synthetic peptide
  Seed: PRMCSLMQGSTLPRRSGAAG
PRMCSLMFGSALARRAGAAG

SEQ ID NO: 120576 - protein, 20 aa, Artificial Sequence
  Description of Artificial Sequence: Synthetic peptide
  Seed: PRMCSLMQGSTLPRRSGAAG
PRMCSLMFGSALARRGGAAG

SEQ ID NO: 120577 - protein, 20 aa, Artificial Sequence
  Description of Artificial Sequence: Synthetic peptide
  Seed: PRMCSLMQGSTLPRRSGAAG
PRMCSLMFGSALARRIGAAG

SEQ ID NO: 120578 - protein, 20 aa, Artificial Sequence
  Description of Artificial Sequence: Synthetic peptide
  Seed: PRMCSLMQGSTLPRRSGAAG
PRMCSLMFGSALARRLGAAG

SEQ ID NO: 120579 - protein, 20 aa, Artificial Sequence
  Description of Artificial Sequence: Synthetic peptide
  Seed: PRMCSLMQGSTLPRRSGAAG
PRMCSLMFGSALARRMGAAG

SEQ ID NO: 120580 - protein, 20 aa, Artificial Sequence
  Description of Artificial Sequence: Synthetic peptide
  Seed: PRMCSLMQGSTLPRRSGAAG
PRMCSLMFGSALARRNGAAG

SEQ ID NO: 120581 - protein, 20 aa, Artificial Sequence
  Description of Artificial Sequence: Synthetic peptide
  Seed: PRMCSLMQGSTLPRRSGAAG
PRMCSLMFGSALARRSGAAG

SEQ ID NO: 120582 - protein, 20 aa, Artificial Sequence
  Description of Artificial Sequence: Synthetic peptide
  Seed: PRMCSLMQGSTLPRRSGAAG
PRMCSLMFGSALARRTGAAG

SEQ ID NO: 120583 - protein, 20 aa, Artificial Sequence
  Description of Artificial Sequence: Synthetic peptide
  Seed: PRMCSLMQGSTLPRRSGAAG
PRMCSLMFGSALARRVGAAG

SEQ ID NO: 120584 - protein, 20 aa, Artificial Sequence
  Description of Artificial Sequence: Synthetic peptide
  Seed: PRMCSLMQGSTLPRRSGAAG
PRMCSLMFGSALPRRAGAAG

SEQ ID NO: 120585 - protein, 20 aa, Artificial Sequence
  Description of Artificial Sequence: Synthetic peptide
  Seed: PRMCSLMQGSTLPRRSGAAG
PRMCSLMFGSALPRRIGAAG

SEQ ID NO: 120586 - protein, 20 aa, Artificial Sequence
  Description of Artificial Sequence: Synthetic peptide
  Seed: PRMCSLMQGSTLPRRSGAAG
PRMCSLMFGSALPRRNGAAG

SEQ ID NO: 120587 - protein, 20 aa, Artificial Sequence
  Description of Artificial Sequence: Synthetic peptide
  Seed: PRMCSLMQGSTLPRRSGAAG
PRMCSLMFGSALPRRSGAAG

SEQ ID NO: 120588 - protein, 20 aa, Artificial Sequence
  Description of Artificial Sequence: Synthetic peptide
  Seed: PRMCSLMQGSTLPRRSGAAG
PRMCSLMFGSALPRRVGAAG

SEQ ID NO: 120589 - protein, 20 aa, Artificial Sequence
  Description of Artificial Sequence: Synthetic peptide
  Seed: PRMCSLMQGSTLPRRSGAAG
PRMCSLMFGSALSRRAGAAG

SEQ ID NO: 120590 - protein, 20 aa, Artificial Sequence
  Description of Artificial Sequence: Synthetic peptide
  Seed: PRMCSLMQGSTLPRRSGAAG
PRMCSLMFGSALSRRIGAAG

SEQ ID NO: 120591 - protein, 20 aa, Artificial Sequence
  Description of Artificial Sequence: Synthetic peptide
  Seed: PRMCSLMQGSTLPRRSGAAG
PRMCSLMFGSALSRRLGAAG

SEQ ID NO: 120592 - protein, 20 aa, Artificial Sequence
  Description of Artificial Sequence: Synthetic peptide
  Seed: PRMCSLMQGSTLPRRSGAAG
PRMCSLMFGSALSRRNGAAG

SEQ ID NO: 120593 - protein, 20 aa, Artificial Sequence
  Description of Artificial Sequence: Synthetic peptide
  Seed: PRMCSLMQGSTLPRRSGAAG
PRMCSLMFGSALSRRSGAAG

SEQ ID NO: 120594 - protein, 20 aa, Artificial Sequence
  Description of Artificial Sequence: Synthetic peptide
  Seed: PRMCSLMQGSTLPRRSGAAG
PRMCSLMFGSALSRRVGAAG

SEQ ID NO: 120595 - protein, 20 aa, Artificial Sequence
  Description of Artificial Sequence: Synthetic peptide
  Seed: PRMCSLMQGSTLPRRSGAAG
PRMCSLMFGSALTRRAGAAG

SEQ ID NO: 120596 - protein, 20 aa, Artificial Sequence
  Description of Artificial Sequence: Synthetic peptide
  Seed: PRMCSLMQGSTLPRRSGAAG
PRMCSLMFGSALTRRIGAAG

SEQ ID NO: 120597 - protein, 20 aa, Artificial Sequence
  Description of Artificial Sequence: Synthetic peptide
  Seed: PRMCSLMQGSTLPRRSGAAG
PRMCSLMFGSALTRRLGAAG

SEQ ID NO: 120598 - protein, 20 aa, Artificial Sequence
  Description of Artificial Sequence: Synthetic peptide
  Seed: PRMCSLMQGSTLPRRSGAAG
PRMCSLMFGSALTRRNGAAG

SEQ ID NO: 120599 - protein, 20 aa, Artificial Sequence
  Description of Artificial Sequence: Synthetic peptide
  Seed: PRMCSLMQGSTLPRRSGAAG
PRMCSLMFGSALTRRSGAAG

SEQ ID NO: 120600 - protein, 20 aa, Artificial Sequence
  Description of Artificial Sequence: Synthetic peptide
  Seed: PRMCSLMQGSTLPRRSGAAG
PRMCSLMFGSALTRRVGAAG

SEQ ID NO: 120601 - protein, 20 aa, Artificial Sequence
  Description of Artificial Sequence: Synthetic peptide
  Seed: PRMCSLMQGSTLPRRSGAAG
PRMCSLMFGSALVRRAGAAG

SEQ ID NO: 120602 - protein, 20 aa, Artificial Sequence
  Description of Artificial Sequence: Synthetic peptide
  Seed: PRMCSLMQGSTLPRRSGAAG
PRMCSLMFGSALVRRNGAAG

SEQ ID NO: 120603 - protein, 20 aa, Artificial Sequence
  Description of Artificial Sequence: Synthetic peptide
  Seed: PRMCSLMQGSTLPRRSGAAG
PRMCSLMFGSALVRRSGAAG

SEQ ID NO: 120604 - protein, 20 aa, Artificial Sequence
  Description of Artificial Sequence: Synthetic peptide
  Seed: PRMCSLMQGSTLPRRSGAAG
PRMCSLMFGSALVRRVGAAG

SEQ ID NO: 120605 - protein, 20 aa, Artificial Sequence
  Description of Artificial Sequence: Synthetic peptide
  Seed: PRMCSLMQGSTLPRRSGAAG
PRMCSLMFGSILARRAGAAG

SEQ ID NO: 120606 - protein, 20 aa, Artificial Sequence
  Description of Artificial Sequence: Synthetic peptide
  Seed: PRMCSLMQGSTLPRRSGAAG
PRMCSLMFGSILARRGGAAG

SEQ ID NO: 120607 - protein, 20 aa, Artificial Sequence
  Description of Artificial Sequence: Synthetic peptide
  Seed: PRMCSLMQGSTLPRRSGAAG
PRMCSLMFGSILARRIGAAG

SEQ ID NO: 120608 - protein, 20 aa, Artificial Sequence
  Description of Artificial Sequence: Synthetic peptide
  Seed: PRMCSLMQGSTLPRRSGAAG
PRMCSLMFGSILARRLGAAG

SEQ ID NO: 120609 - protein, 20 aa, Artificial Sequence
  Description of Artificial Sequence: Synthetic peptide
  Seed: PRMCSLMQGSTLPRRSGAAG
PRMCSLMFGSILARRMGAAG

SEQ ID NO: 120610 - protein, 20 aa, Artificial Sequence
  Description of Artificial Sequence: Synthetic peptide
  Seed: PRMCSLMQGSTLPRRSGAAG
PRMCSLMFGSILARRNGAAG

SEQ ID NO: 120611 - protein, 20 aa, Artificial Sequence
  Description of Artificial Sequence: Synthetic peptide
  Seed: PRMCSLMQGSTLPRRSGAAG
PRMCSLMFGSILARRSGAAG

SEQ ID NO: 120612 - protein, 20 aa, Artificial Sequence
  Description of Artificial Sequence: Synthetic peptide
  Seed: PRMCSLMQGSTLPRRSGAAG
PRMCSLMFGSILARRTGAAG

SEQ ID NO: 120613 - protein, 20 aa, Artificial Sequence
  Description of Artificial Sequence: Synthetic peptide
  Seed: PRMCSLMQGSTLPRRSGAAG
PRMCSLMFGSILARRVGAAG

SEQ ID NO: 120614 - protein, 20 aa, Artificial Sequence
  Description of Artificial Sequence: Synthetic peptide
  Seed: PRMCSLMQGSTLPRRSGAAG
PRMCSLMFGSILGRRAGAAG

SEQ ID NO: 120615 - protein, 20 aa, Artificial Sequence
  Description of Artificial Sequence: Synthetic peptide
  Seed: PRMCSLMQGSTLPRRSGAAG
PRMCSLMFGSILPRRAGAAG

SEQ ID NO: 120616 - protein, 20 aa, Artificial Sequence
  Description of Artificial Sequence: Synthetic peptide
  Seed: PRMCSLMQGSTLPRRSGAAG
PRMCSLMFGSILPRRIGAAG

SEQ ID NO: 120617 - protein, 20 aa, Artificial Sequence
  Description of Artificial Sequence: Synthetic peptide
  Seed: PRMCSLMQGSTLPRRSGAAG
PRMCSLMFGSILPRRLGAAG

SEQ ID NO: 120618 - protein, 20 aa, Artificial Sequence
  Description of Artificial Sequence: Synthetic peptide
  Seed: PRMCSLMQGSTLPRRSGAAG
PRMCSLMFGSILPRRNGAAG

SEQ ID NO: 120619 - protein, 20 aa, Artificial Sequence
  Description of Artificial Sequence: Synthetic peptide
  Seed: PRMCSLMQGSTLPRRSGAAG
PRMCSLMFGSILPRRSGAAG

SEQ ID NO: 120620 - protein, 20 aa, Artificial Sequence
  Description of Artificial Sequence: Synthetic peptide
  Seed: PRMCSLMQGSTLPRRSGAAG
PRMCSLMFGSILPRRTGAAG

SEQ ID NO: 120621 - protein, 20 aa, Artificial Sequence
  Description of Artificial Sequence: Synthetic peptide
  Seed: PRMCSLMQGSTLPRRSGAAG
PRMCSLMFGSILPRRVGAAG

SEQ ID NO: 120622 - protein, 20 aa, Artificial Sequence
  Description of Artificial Sequence: Synthetic peptide
  Seed: PRMCSLMQGSTLPRRSGAAG
PRMCSLMFGSILSRRAGAAG

SEQ ID NO: 120623 - protein, 20 aa, Artificial Sequence
  Description of Artificial Sequence: Synthetic peptide
  Seed: PRMCSLMQGSTLPRRSGAAG
PRMCSLMFGSILSRRIGAAG

SEQ ID NO: 120624 - protein, 20 aa, Artificial Sequence
  Description of Artificial Sequence: Synthetic peptide
  Seed: PRMCSLMQGSTLPRRSGAAG
PRMCSLMFGSILSRRLGAAG

SEQ ID NO: 120625 - protein, 20 aa, Artificial Sequence
  Description of Artificial Sequence: Synthetic peptide
  Seed: PRMCSLMQGSTLPRRSGAAG
PRMCSLMFGSILSRRMGAAG

SEQ ID NO: 120626 - protein, 20 aa, Artificial Sequence
  Description of Artificial Sequence: Synthetic peptide
  Seed: PRMCSLMQGSTLPRRSGAAG
PRMCSLMFGSILSRRNGAAG

SEQ ID NO: 120627 - protein, 20 aa, Artificial Sequence
  Description of Artificial Sequence: Synthetic peptide
  Seed: PRMCSLMQGSTLPRRSGAAG
PRMCSLMFGSILSRRSGAAG

SEQ ID NO: 120628 - protein, 20 aa, Artificial Sequence
  Description of Artificial Sequence: Synthetic peptide
  Seed: PRMCSLMQGSTLPRRSGAAG
PRMCSLMFGSILSRRTGAAG

SEQ ID NO: 120629 - protein, 20 aa, Artificial Sequence
  Description of Artificial Sequence: Synthetic peptide
  Seed: PRMCSLMQGSTLPRRSGAAG
PRMCSLMFGSILSRRVGAAG

SEQ ID NO: 120630 - protein, 20 aa, Artificial Sequence
  Description of Artificial Sequence: Synthetic peptide
  Seed: PRMCSLMQGSTLPRRSGAAG
PRMCSLMFGSILTRRAGAAG

SEQ ID NO: 120631 - protein, 20 aa, Artificial Sequence
  Description of Artificial Sequence: Synthetic peptide
  Seed: PRMCSLMQGSTLPRRSGAAG
PRMCSLMFGSILTRRIGAAG

SEQ ID NO: 120632 - protein, 20 aa, Artificial Sequence
  Description of Artificial Sequence: Synthetic peptide
  Seed: PRMCSLMQGSTLPRRSGAAG
PRMCSLMFGSILTRRLGAAG

SEQ ID NO: 120633 - protein, 20 aa, Artificial Sequence
  Description of Artificial Sequence: Synthetic peptide
  Seed: PRMCSLMQGSTLPRRSGAAG
PRMCSLMFGSILTRRMGAAG

SEQ ID NO: 120634 - protein, 20 aa, Artificial Sequence
  Description of Artificial Sequence: Synthetic peptide
  Seed: PRMCSLMQGSTLPRRSGAAG
PRMCSLMFGSILTRRNGAAG

SEQ ID NO: 120635 - protein, 20 aa, Artificial Sequence
  Description of Artificial Sequence: Synthetic peptide
  Seed: PRMCSLMQGSTLPRRSGAAG
PRMCSLMFGSILTRRSGAAG

SEQ ID NO: 120636 - protein, 20 aa, Artificial Sequence
  Description of Artificial Sequence: Synthetic peptide
  Seed: PRMCSLMQGSTLPRRSGAAG
PRMCSLMFGSILTRRTGAAG

SEQ ID NO: 120637 - protein, 20 aa, Artificial Sequence
  Description of Artificial Sequence: Synthetic peptide
  Seed: PRMCSLMQGSTLPRRSGAAG
PRMCSLMFGSILTRRVGAAG

SEQ ID NO: 120638 - protein, 20 aa, Artificial Sequence
  Description of Artificial Sequence: Synthetic peptide
  Seed: PRMCSLMQGSTLPRRSGAAG
PRMCSLMFGSILVRRAGAAG

SEQ ID NO: 120639 - protein, 20 aa, Artificial Sequence
  Description of Artificial Sequence: Synthetic peptide
  Seed: PRMCSLMQGSTLPRRSGAAG
PRMCSLMFGSILVRRNGAAG

SEQ ID NO: 120640 - protein, 20 aa, Artificial Sequence
  Description of Artificial Sequence: Synthetic peptide
  Seed: PRMCSLMQGSTLPRRSGAAG
PRMCSLMFGSILVRRSGAAG

SEQ ID NO: 120641 - protein, 20 aa, Artificial Sequence
  Description of Artificial Sequence: Synthetic peptide
  Seed: PRMCSLMQGSTLPRRSGAAG
PRMCSLMFGSILVRRVGAAG

SEQ ID NO: 120642 - protein, 20 aa, Artificial Sequence
  Description of Artificial Sequence: Synthetic peptide
  Seed: PRMCSLMQGSTLPRRSGAAG
PRMCSLMFGSLLARRAGAAG

SEQ ID NO: 120643 - protein, 20 aa, Artificial Sequence
  Description of Artificial Sequence: Synthetic peptide
  Seed: PRMCSLMQGSTLPRRSGAAG
PRMCSLMFGSLLARRDGAAG

SEQ ID NO: 120644 - protein, 20 aa, Artificial Sequence
  Description of Artificial Sequence: Synthetic peptide
  Seed: PRMCSLMQGSTLPRRSGAAG
PRMCSLMFGSLLARRGGAAG

SEQ ID NO: 120645 - protein, 20 aa, Artificial Sequence
  Description of Artificial Sequence: Synthetic peptide
  Seed: PRMCSLMQGSTLPRRSGAAG
PRMCSLMFGSLLARRIGAAG

SEQ ID NO: 120646 - protein, 20 aa, Artificial Sequence
  Description of Artificial Sequence: Synthetic peptide
  Seed: PRMCSLMQGSTLPRRSGAAG
PRMCSLMFGSLLARRLGAAG

SEQ ID NO: 120647 - protein, 20 aa, Artificial Sequence
  Description of Artificial Sequence: Synthetic peptide
  Seed: PRMCSLMQGSTLPRRSGAAG
PRMCSLMFGSLLARRMGAAG

SEQ ID NO: 120648 - protein, 20 aa, Artificial Sequence
  Description of Artificial Sequence: Synthetic peptide
  Seed: PRMCSLMQGSTLPRRSGAAG
PRMCSLMFGSLLARRNGAAG

SEQ ID NO: 120649 - protein, 20 aa, Artificial Sequence
  Description of Artificial Sequence: Synthetic peptide
  Seed: PRMCSLMQGSTLPRRSGAAG
PRMCSLMFGSLLARRSGAAG

SEQ ID NO: 120650 - protein, 20 aa, Artificial Sequence
  Description of Artificial Sequence: Synthetic peptide
  Seed: PRMCSLMQGSTLPRRSGAAG
PRMCSLMFGSLLARRTGAAG

SEQ ID NO: 120651 - protein, 20 aa, Artificial Sequence
  Description of Artificial Sequence: Synthetic peptide
  Seed: PRMCSLMQGSTLPRRSGAAG
PRMCSLMFGSLLARRVGAAG

SEQ ID NO: 120652 - protein, 20 aa, Artificial Sequence
  Description of Artificial Sequence: Synthetic peptide
  Seed: PRMCSLMQGSTLPRRSGAAG
PRMCSLMFGSLLGRRAGAAG

SEQ ID NO: 120653 - protein, 20 aa, Artificial Sequence
  Description of Artificial Sequence: Synthetic peptide
  Seed: PRMCSLMQGSTLPRRSGAAG
PRMCSLMFGSLLGRRVGAAG

SEQ ID NO: 120654 - protein, 20 aa, Artificial Sequence
  Description of Artificial Sequence: Synthetic peptide
  Seed: PRMCSLMQGSTLPRRSGAAG
PRMCSLMFGSLLIRRAGAAG

SEQ ID NO: 120655 - protein, 20 aa, Artificial Sequence
  Description of Artificial Sequence: Synthetic peptide
  Seed: PRMCSLMQGSTLPRRSGAAG
PRMCSLMFGSLLNRRAGAAG

SEQ ID NO: 120656 - protein, 20 aa, Artificial Sequence
  Description of Artificial Sequence: Synthetic peptide
  Seed: PRMCSLMQGSTLPRRSGAAG
PRMCSLMFGSLLPRRAGAAG

SEQ ID NO: 120657 - protein, 20 aa, Artificial Sequence
  Description of Artificial Sequence: Synthetic peptide
  Seed: PRMCSLMQGSTLPRRSGAAG
PRMCSLMFGSLLPRRIGAAG

SEQ ID NO: 120658 - protein, 20 aa, Artificial Sequence
  Description of Artificial Sequence: Synthetic peptide
  Seed: PRMCSLMQGSTLPRRSGAAG
PRMCSLMFGSLLPRRLGAAG

SEQ ID NO: 120659 - protein, 20 aa, Artificial Sequence
  Description of Artificial Sequence: Synthetic peptide
  Seed: PRMCSLMQGSTLPRRSGAAG
PRMCSLMFGSLLPRRMGAAG

SEQ ID NO: 120660 - protein, 20 aa, Artificial Sequence
  Description of Artificial Sequence: Synthetic peptide
  Seed: PRMCSLMQGSTLPRRSGAAG
PRMCSLMFGSLLPRRNGAAG

SEQ ID NO: 120661 - protein, 20 aa, Artificial Sequence
  Description of Artificial Sequence: Synthetic peptide
  Seed: PRMCSLMQGSTLPRRSGAAG
PRMCSLMFGSLLPRRSGAAG

SEQ ID NO: 120662 - protein, 20 aa, Artificial Sequence
  Description of Artificial Sequence: Synthetic peptide
  Seed: PRMCSLMQGSTLPRRSGAAG
PRMCSLMFGSLLPRRTGAAG

SEQ ID NO: 120663 - protein, 20 aa, Artificial Sequence
  Description of Artificial Sequence: Synthetic peptide
  Seed: PRMCSLMQGSTLPRRSGAAG
PRMCSLMFGSLLPRRVGAAG

SEQ ID NO: 120664 - protein, 20 aa, Artificial Sequence
  Description of Artificial Sequence: Synthetic peptide
  Seed: PRMCSLMQGSTLPRRSGAAG
PRMCSLMFGSLLSRRAGAAG

SEQ ID NO: 120665 - protein, 20 aa, Artificial Sequence
  Description of Artificial Sequence: Synthetic peptide
  Seed: PRMCSLMQGSTLPRRSGAAG
PRMCSLMFGSLLSRRIGAAG

SEQ ID NO: 120666 - protein, 20 aa, Artificial Sequence
  Description of Artificial Sequence: Synthetic peptide
  Seed: PRMCSLMQGSTLPRRSGAAG
PRMCSLMFGSLLSRRLGAAG

SEQ ID NO: 120667 - protein, 20 aa, Artificial Sequence
  Description of Artificial Sequence: Synthetic peptide
  Seed: PRMCSLMQGSTLPRRSGAAG
PRMCSLMFGSLLSRRMGAAG

SEQ ID NO: 120668 - protein, 20 aa, Artificial Sequence
  Description of Artificial Sequence: Synthetic peptide
  Seed: PRMCSLMQGSTLPRRSGAAG
PRMCSLMFGSLLSRRNGAAG

SEQ ID NO: 120669 - protein, 20 aa, Artificial Sequence
  Description of Artificial Sequence: Synthetic peptide
  Seed: PRMCSLMQGSTLPRRSGAAG
PRMCSLMFGSLLSRRSGAAG

SEQ ID NO: 120670 - protein, 20 aa, Artificial Sequence
  Description of Artificial Sequence: Synthetic peptide
  Seed: PRMCSLMQGSTLPRRSGAAG
PRMCSLMFGSLLSRRTGAAG

SEQ ID NO: 120671 - protein, 20 aa, Artificial Sequence
  Description of Artificial Sequence: Synthetic peptide
  Seed: PRMCSLMQGSTLPRRSGAAG
PRMCSLMFGSLLSRRVGAAG

SEQ ID NO: 120672 - protein, 20 aa, Artificial Sequence
  Description of Artificial Sequence: Synthetic peptide
  Seed: PRMCSLMQGSTLPRRSGAAG
PRMCSLMFGSLLTRRAGAAG

SEQ ID NO: 120673 - protein, 20 aa, Artificial Sequence
  Description of Artificial Sequence: Synthetic peptide
  Seed: PRMCSLMQGSTLPRRSGAAG
PRMCSLMFGSLLTRRIGAAG

SEQ ID NO: 120674 - protein, 20 aa, Artificial Sequence
  Description of Artificial Sequence: Synthetic peptide
  Seed: PRMCSLMQGSTLPRRSGAAG
PRMCSLMFGSLLTRRLGAAG

SEQ ID NO: 120675 - protein, 20 aa, Artificial Sequence
  Description of Artificial Sequence: Synthetic peptide
  Seed: PRMCSLMQGSTLPRRSGAAG
PRMCSLMFGSLLTRRMGAAG

SEQ ID NO: 120676 - protein, 20 aa, Artificial Sequence
  Description of Artificial Sequence: Synthetic peptide
  Seed: PRMCSLMQGSTLPRRSGAAG
PRMCSLMFGSLLTRRNGAAG

SEQ ID NO: 120677 - protein, 20 aa, Artificial Sequence
  Description of Artificial Sequence: Synthetic peptide
  Seed: PRMCSLMQGSTLPRRSGAAG
PRMCSLMFGSLLTRRSGAAG

SEQ ID NO: 120678 - protein, 20 aa, Artificial Sequence
  Description of Artificial Sequence: Synthetic peptide
  Seed: PRMCSLMQGSTLPRRSGAAG
PRMCSLMFGSLLTRRTGAAG

SEQ ID NO: 120679 - protein, 20 aa, Artificial Sequence
  Description of Artificial Sequence: Synthetic peptide
  Seed: PRMCSLMQGSTLPRRSGAAG
PRMCSLMFGSLLTRRVGAAG

SEQ ID NO: 120680 - protein, 20 aa, Artificial Sequence
  Description of Artificial Sequence: Synthetic peptide
  Seed: PRMCSLMQGSTLPRRSGAAG
PRMCSLMFGSLLVRRAGAAG

SEQ ID NO: 120681 - protein, 20 aa, Artificial Sequence
  Description of Artificial Sequence: Synthetic peptide
  Seed: PRMCSLMQGSTLPRRSGAAG
PRMCSLMFGSLLVRRIGAAG

SEQ ID NO: 120682 - protein, 20 aa, Artificial Sequence
  Description of Artificial Sequence: Synthetic peptide
  Seed: PRMCSLMQGSTLPRRSGAAG
PRMCSLMFGSLLVRRNGAAG

SEQ ID NO: 120683 - protein, 20 aa, Artificial Sequence
  Description of Artificial Sequence: Synthetic peptide
  Seed: PRMCSLMQGSTLPRRSGAAG
PRMCSLMFGSLLVRRSGAAG

SEQ ID NO: 120684 - protein, 20 aa, Artificial Sequence
  Description of Artificial Sequence: Synthetic peptide
  Seed: PRMCSLMQGSTLPRRSGAAG
PRMCSLMFGSLLVRRTGAAG

SEQ ID NO: 120685 - protein, 20 aa, Artificial Sequence
  Description of Artificial Sequence: Synthetic peptide
  Seed: PRMCSLMQGSTLPRRSGAAG
PRMCSLMFGSLLVRRVGAAG

SEQ ID NO: 120686 - protein, 20 aa, Artificial Sequence
  Description of Artificial Sequence: Synthetic peptide
  Seed: PRMCSLMQGSTLPRRSGAAG
PRMCSLMFGSMLARRAGAAG

SEQ ID NO: 120687 - protein, 20 aa, Artificial Sequence
  Description of Artificial Sequence: Synthetic peptide
  Seed: PRMCSLMQGSTLPRRSGAAG
PRMCSLMFGSMLARRDGAAG

SEQ ID NO: 120688 - protein, 20 aa, Artificial Sequence
  Description of Artificial Sequence: Synthetic peptide
  Seed: PRMCSLMQGSTLPRRSGAAG
PRMCSLMFGSMLARREGAAG

SEQ ID NO: 120689 - protein, 20 aa, Artificial Sequence
  Description of Artificial Sequence: Synthetic peptide
  Seed: PRMCSLMQGSTLPRRSGAAG
PRMCSLMFGSMLARRGGAAG

SEQ ID NO: 120690 - protein, 20 aa, Artificial Sequence
  Description of Artificial Sequence: Synthetic peptide
  Seed: PRMCSLMQGSTLPRRSGAAG
PRMCSLMFGSMLARRHGAAG

SEQ ID NO: 120691 - protein, 20 aa, Artificial Sequence
  Description of Artificial Sequence: Synthetic peptide
  Seed: PRMCSLMQGSTLPRRSGAAG
PRMCSLMFGSMLARRIGAAG

SEQ ID NO: 120692 - protein, 20 aa, Artificial Sequence
  Description of Artificial Sequence: Synthetic peptide
  Seed: PRMCSLMQGSTLPRRSGAAG
PRMCSLMFGSMLARRLGAAG

SEQ ID NO: 120693 - protein, 20 aa, Artificial Sequence
  Description of Artificial Sequence: Synthetic peptide
  Seed: PRMCSLMQGSTLPRRSGAAG
PRMCSLMFGSMLARRMGAAG

SEQ ID NO: 120694 - protein, 20 aa, Artificial Sequence
  Description of Artificial Sequence: Synthetic peptide
  Seed: PRMCSLMQGSTLPRRSGAAG
PRMCSLMFGSMLARRNGAAG

SEQ ID NO: 120695 - protein, 20 aa, Artificial Sequence
  Description of Artificial Sequence: Synthetic peptide
  Seed: PRMCSLMQGSTLPRRSGAAG
PRMCSLMFGSMLARRPGAAG

SEQ ID NO: 120696 - protein, 20 aa, Artificial Sequence
  Description of Artificial Sequence: Synthetic peptide
  Seed: PRMCSLMQGSTLPRRSGAAG
PRMCSLMFGSMLARRQGAAG

SEQ ID NO: 120697 - protein, 20 aa, Artificial Sequence
  Description of Artificial Sequence: Synthetic peptide
  Seed: PRMCSLMQGSTLPRRSGAAG
PRMCSLMFGSMLARRSGAAG

SEQ ID NO: 120698 - protein, 20 aa, Artificial Sequence
  Description of Artificial Sequence: Synthetic peptide
  Seed: PRMCSLMQGSTLPRRSGAAG
PRMCSLMFGSMLARRTGAAG

SEQ ID NO: 120699 - protein, 20 aa, Artificial Sequence
  Description of Artificial Sequence: Synthetic peptide
  Seed: PRMCSLMQGSTLPRRSGAAG
PRMCSLMFGSMLARRVGAAG

SEQ ID NO: 120700 - protein, 20 aa, Artificial Sequence
  Description of Artificial Sequence: Synthetic peptide
  Seed: PRMCSLMQGSTLPRRSGAAG
PRMCSLMFGSMLGRRAGAAG

SEQ ID NO: 120701 - protein, 20 aa, Artificial Sequence
  Description of Artificial Sequence: Synthetic peptide
  Seed: PRMCSLMQGSTLPRRSGAAG
PRMCSLMFGSMLGRRIGAAG

SEQ ID NO: 120702 - protein, 20 aa, Artificial Sequence
  Description of Artificial Sequence: Synthetic peptide
  Seed: PRMCSLMQGSTLPRRSGAAG
PRMCSLMFGSMLGRRLGAAG

SEQ ID NO: 120703 - protein, 20 aa, Artificial Sequence
  Description of Artificial Sequence: Synthetic peptide
  Seed: PRMCSLMQGSTLPRRSGAAG
PRMCSLMFGSMLGRRNGAAG

SEQ ID NO: 120704 - protein, 20 aa, Artificial Sequence
  Description of Artificial Sequence: Synthetic peptide
  Seed: PRMCSLMQGSTLPRRSGAAG
PRMCSLMFGSMLGRRSGAAG

SEQ ID NO: 120705 - protein, 20 aa, Artificial Sequence
  Description of Artificial Sequence: Synthetic peptide
  Seed: PRMCSLMQGSTLPRRSGAAG
PRMCSLMFGSMLGRRVGAAG

SEQ ID NO: 120706 - protein, 20 aa, Artificial Sequence
  Description of Artificial Sequence: Synthetic peptide
  Seed: PRMCSLMQGSTLPRRSGAAG
PRMCSLMFGSMLIRRAGAAG

SEQ ID NO: 120707 - protein, 20 aa, Artificial Sequence
  Description of Artificial Sequence: Synthetic peptide
  Seed: PRMCSLMQGSTLPRRSGAAG
PRMCSLMFGSMLIRRNGAAG

SEQ ID NO: 120708 - protein, 20 aa, Artificial Sequence
  Description of Artificial Sequence: Synthetic peptide
  Seed: PRMCSLMQGSTLPRRSGAAG
PRMCSLMFGSMLIRRSGAAG

SEQ ID NO: 120709 - protein, 20 aa, Artificial Sequence
  Description of Artificial Sequence: Synthetic peptide
  Seed: PRMCSLMQGSTLPRRSGAAG
PRMCSLMFGSMLIRRVGAAG

SEQ ID NO: 120710 - protein, 20 aa, Artificial Sequence
  Description of Artificial Sequence: Synthetic peptide
  Seed: PRMCSLMQGSTLPRRSGAAG
PRMCSLMFGSMLNRRAGAAG

SEQ ID NO: 120711 - protein, 20 aa, Artificial Sequence
  Description of Artificial Sequence: Synthetic peptide
  Seed: PRMCSLMQGSTLPRRSGAAG
PRMCSLMFGSMLNRRNGAAG

SEQ ID NO: 120712 - protein, 20 aa, Artificial Sequence
  Description of Artificial Sequence: Synthetic peptide
  Seed: PRMCSLMQGSTLPRRSGAAG
PRMCSLMFGSMLNRRVGAAG

SEQ ID NO: 120713 - protein, 20 aa, Artificial Sequence
  Description of Artificial Sequence: Synthetic peptide
  Seed: PRMCSLMQGSTLPRRSGAAG
PRMCSLMFGSMLPRRAGAAG

SEQ ID NO: 120714 - protein, 20 aa, Artificial Sequence
  Description of Artificial Sequence: Synthetic peptide
  Seed: PRMCSLMQGSTLPRRSGAAG
PRMCSLMFGSMLPRRIGAAG

SEQ ID NO: 120715 - protein, 20 aa, Artificial Sequence
  Description of Artificial Sequence: Synthetic peptide
  Seed: PRMCSLMQGSTLPRRSGAAG
PRMCSLMFGSMLPRRLGAAG

SEQ ID NO: 120716 - protein, 20 aa, Artificial Sequence
  Description of Artificial Sequence: Synthetic peptide
  Seed: PRMCSLMQGSTLPRRSGAAG
PRMCSLMFGSMLPRRMGAAG

SEQ ID NO: 120717 - protein, 20 aa, Artificial Sequence
  Description of Artificial Sequence: Synthetic peptide
  Seed: PRMCSLMQGSTLPRRSGAAG
PRMCSLMFGSMLPRRNGAAG

SEQ ID NO: 120718 - protein, 20 aa, Artificial Sequence
  Description of Artificial Sequence: Synthetic peptide
  Seed: PRMCSLMQGSTLPRRSGAAG
PRMCSLMFGSMLPRRSGAAG

SEQ ID NO: 120719 - protein, 20 aa, Artificial Sequence
  Description of Artificial Sequence: Synthetic peptide
  Seed: PRMCSLMQGSTLPRRSGAAG
PRMCSLMFGSMLPRRTGAAG

SEQ ID NO: 120720 - protein, 20 aa, Artificial Sequence
  Description of Artificial Sequence: Synthetic peptide
  Seed: PRMCSLMQGSTLPRRSGAAG
PRMCSLMFGSMLPRRVGAAG

SEQ ID NO: 120721 - protein, 20 aa, Artificial Sequence
  Description of Artificial Sequence: Synthetic peptide
  Seed: PRMCSLMQGSTLPRRSGAAG
PRMCSLMFGSMLSRRAGAAG

SEQ ID NO: 120722 - protein, 20 aa, Artificial Sequence
  Description of Artificial Sequence: Synthetic peptide
  Seed: PRMCSLMQGSTLPRRSGAAG
PRMCSLMFGSMLSRRGGAAG

SEQ ID NO: 120723 - protein, 20 aa, Artificial Sequence
  Description of Artificial Sequence: Synthetic peptide
  Seed: PRMCSLMQGSTLPRRSGAAG
PRMCSLMFGSMLSRRIGAAG

SEQ ID NO: 120724 - protein, 20 aa, Artificial Sequence
  Description of Artificial Sequence: Synthetic peptide
  Seed: PRMCSLMQGSTLPRRSGAAG
PRMCSLMFGSMLSRRLGAAG

SEQ ID NO: 120725 - protein, 20 aa, Artificial Sequence
  Description of Artificial Sequence: Synthetic peptide
  Seed: PRMCSLMQGSTLPRRSGAAG
PRMCSLMFGSMLSRRMGAAG

SEQ ID NO: 120726 - protein, 20 aa, Artificial Sequence
  Description of Artificial Sequence: Synthetic peptide
  Seed: PRMCSLMQGSTLPRRSGAAG
PRMCSLMFGSMLSRRNGAAG

SEQ ID NO: 120727 - protein, 20 aa, Artificial Sequence
  Description of Artificial Sequence: Synthetic peptide
  Seed: PRMCSLMQGSTLPRRSGAAG
PRMCSLMFGSMLSRRSGAAG

SEQ ID NO: 120728 - protein, 20 aa, Artificial Sequence
  Description of Artificial Sequence: Synthetic peptide
  Seed: PRMCSLMQGSTLPRRSGAAG
PRMCSLMFGSMLSRRTGAAG

SEQ ID NO: 120729 - protein, 20 aa, Artificial Sequence
  Description of Artificial Sequence: Synthetic peptide
  Seed: PRMCSLMQGSTLPRRSGAAG
PRMCSLMFGSMLSRRVGAAG

SEQ ID NO: 120730 - protein, 20 aa, Artificial Sequence
  Description of Artificial Sequence: Synthetic peptide
  Seed: PRMCSLMQGSTLPRRSGAAG
PRMCSLMFGSMLTRRAGAAG

SEQ ID NO: 120731 - protein, 20 aa, Artificial Sequence
  Description of Artificial Sequence: Synthetic peptide
  Seed: PRMCSLMQGSTLPRRSGAAG
PRMCSLMFGSMLTRRIGAAG

SEQ ID NO: 120732 - protein, 20 aa, Artificial Sequence
  Description of Artificial Sequence: Synthetic peptide
  Seed: PRMCSLMQGSTLPRRSGAAG
PRMCSLMFGSMLTRRLGAAG

SEQ ID NO: 120733 - protein, 20 aa, Artificial Sequence
  Description of Artificial Sequence: Synthetic peptide
  Seed: PRMCSLMQGSTLPRRSGAAG
PRMCSLMFGSMLTRRMGAAG

SEQ ID NO: 120734 - protein, 20 aa, Artificial Sequence
  Description of Artificial Sequence: Synthetic peptide
  Seed: PRMCSLMQGSTLPRRSGAAG
PRMCSLMFGSMLTRRNGAAG

SEQ ID NO: 120735 - protein, 20 aa, Artificial Sequence
  Description of Artificial Sequence: Synthetic peptide
  Seed: PRMCSLMQGSTLPRRSGAAG
PRMCSLMFGSMLTRRSGAAG

SEQ ID NO: 120736 - protein, 20 aa, Artificial Sequence
  Description of Artificial Sequence: Synthetic peptide
  Seed: PRMCSLMQGSTLPRRSGAAG
PRMCSLMFGSMLTRRTGAAG

SEQ ID NO: 120737 - protein, 20 aa, Artificial Sequence
  Description of Artificial Sequence: Synthetic peptide
  Seed: PRMCSLMQGSTLPRRSGAAG
PRMCSLMFGSMLTRRVGAAG

SEQ ID NO: 120738 - protein, 20 aa, Artificial Sequence
  Description of Artificial Sequence: Synthetic peptide
  Seed: PRMCSLMQGSTLPRRSGAAG
PRMCSLMFGSMLVRRAGAAG

SEQ ID NO: 120739 - protein, 20 aa, Artificial Sequence
  Description of Artificial Sequence: Synthetic peptide
  Seed: PRMCSLMQGSTLPRRSGAAG
PRMCSLMFGSMLVRRIGAAG

SEQ ID NO: 120740 - protein, 20 aa, Artificial Sequence
  Description of Artificial Sequence: Synthetic peptide
  Seed: PRMCSLMQGSTLPRRSGAAG
PRMCSLMFGSMLVRRLGAAG

SEQ ID NO: 120741 - protein, 20 aa, Artificial Sequence
  Description of Artificial Sequence: Synthetic peptide
  Seed: PRMCSLMQGSTLPRRSGAAG
PRMCSLMFGSMLVRRMGAAG

SEQ ID NO: 120742 - protein, 20 aa, Artificial Sequence
  Description of Artificial Sequence: Synthetic peptide
  Seed: PRMCSLMQGSTLPRRSGAAG
PRMCSLMFGSMLVRRNGAAG

SEQ ID NO: 120743 - protein, 20 aa, Artificial Sequence
  Description of Artificial Sequence: Synthetic peptide
  Seed: PRMCSLMQGSTLPRRSGAAG
PRMCSLMFGSMLVRRSGAAG

SEQ ID NO: 120744 - protein, 20 aa, Artificial Sequence
  Description of Artificial Sequence: Synthetic peptide
  Seed: PRMCSLMQGSTLPRRSGAAG
PRMCSLMFGSMLVRRTGAAG

SEQ ID NO: 120745 - protein, 20 aa, Artificial Sequence
  Description of Artificial Sequence: Synthetic peptide
  Seed: PRMCSLMQGSTLPRRSGAAG
PRMCSLMFGSMLVRRVGAAG

SEQ ID NO: 120746 - protein, 20 aa, Artificial Sequence
  Description of Artificial Sequence: Synthetic peptide
  Seed: PRMCSLMQGSTLPRRSGAAG
PRMCSLMFGSQLARRAGAAG

SEQ ID NO: 120747 - protein, 20 aa, Artificial Sequence
  Description of Artificial Sequence: Synthetic peptide
  Seed: PRMCSLMQGSTLPRRSGAAG
PRMCSLMFGSVLARRAGAAG

SEQ ID NO: 120748 - protein, 20 aa, Artificial Sequence
  Description of Artificial Sequence: Synthetic peptide
  Seed: PRMCSLMQGSTLPRRSGAAG
PRMCSLMFGSVLARRIGAAG

SEQ ID NO: 120749 - protein, 20 aa, Artificial Sequence
  Description of Artificial Sequence: Synthetic peptide
  Seed: PRMCSLMQGSTLPRRSGAAG
PRMCSLMFGSVLARRNGAAG

SEQ ID NO: 120750 - protein, 20 aa, Artificial Sequence
  Description of Artificial Sequence: Synthetic peptide
  Seed: PRMCSLMQGSTLPRRSGAAG
PRMCSLMFGSVLARRSGAAG

SEQ ID NO: 120751 - protein, 20 aa, Artificial Sequence
  Description of Artificial Sequence: Synthetic peptide
  Seed: PRMCSLMQGSTLPRRSGAAG
PRMCSLMFGSVLARRVGAAG

SEQ ID NO: 120752 - protein, 20 aa, Artificial Sequence
  Description of Artificial Sequence: Synthetic peptide
  Seed: PRMCSLMQGSTLPRRSGAAG
PRMCSLMFGSVLPRRAGAAG

SEQ ID NO: 120753 - protein, 20 aa, Artificial Sequence
  Description of Artificial Sequence: Synthetic peptide
  Seed: PRMCSLMQGSTLPRRSGAAG
PRMCSLMFGSVLPRRNGAAG

SEQ ID NO: 120754 - protein, 20 aa, Artificial Sequence
  Description of Artificial Sequence: Synthetic peptide
  Seed: PRMCSLMQGSTLPRRSGAAG
PRMCSLMFGSVLPRRVGAAG

SEQ ID NO: 120755 - protein, 20 aa, Artificial Sequence
  Description of Artificial Sequence: Synthetic peptide
  Seed: PRMCSLMQGSTLPRRSGAAG
PRMCSLMFGSVLSRRAGAAG

SEQ ID NO: 120756 - protein, 20 aa, Artificial Sequence
  Description of Artificial Sequence: Synthetic peptide
  Seed: PRMCSLMQGSTLPRRSGAAG
PRMCSLMFGSVLSRRNGAAG

SEQ ID NO: 120757 - protein, 20 aa, Artificial Sequence
  Description of Artificial Sequence: Synthetic peptide
  Seed: PRMCSLMQGSTLPRRSGAAG
PRMCSLMFGSVLSRRSGAAG

SEQ ID NO: 120758 - protein, 20 aa, Artificial Sequence
  Description of Artificial Sequence: Synthetic peptide
  Seed: PRMCSLMQGSTLPRRSGAAG
PRMCSLMFGSVLSRRVGAAG

SEQ ID NO: 120759 - protein, 20 aa, Artificial Sequence
  Description of Artificial Sequence: Synthetic peptide
  Seed: PRMCSLMQGSTLPRRSGAAG
PRMCSLMFGSVLTRRAGAAG

SEQ ID NO: 120760 - protein, 20 aa, Artificial Sequence
  Description of Artificial Sequence: Synthetic peptide
  Seed: PRMCSLMQGSTLPRRSGAAG
PRMCSLMFGSVLTRRNGAAG

SEQ ID NO: 120761 - protein, 20 aa, Artificial Sequence
  Description of Artificial Sequence: Synthetic peptide
  Seed: PRMCSLMQGSTLPRRSGAAG
PRMCSLMFGSVLTRRSGAAG

SEQ ID NO: 120762 - protein, 20 aa, Artificial Sequence
  Description of Artificial Sequence: Synthetic peptide
  Seed: PRMCSLMQGSTLPRRSGAAG
PRMCSLMFGSVLTRRVGAAG

SEQ ID NO: 120763 - protein, 20 aa, Artificial Sequence
  Description of Artificial Sequence: Synthetic peptide
  Seed: PRMCSLMQGSTLPRRSGAAG
PRMCSLMIGSMLARRAGAAG

SEQ ID NO: 120764 - protein, 20 aa, Artificial Sequence
  Description of Artificial Sequence: Synthetic peptide
  Seed: PRMCSLMQGSTLPRRSGAAG
PRMCSLMLGSMLARRAGAAG

SEQ ID NO: 120765 - protein, 20 aa, Artificial Sequence
  Description of Artificial Sequence: Synthetic peptide
  Seed: PRMCSLMQGSTLPRRSGAAG
PRMCSLMWGSMLARRAGAAG

SEQ ID NO: 120766 - protein, 20 aa, Artificial Sequence
  Description of Artificial Sequence: Synthetic peptide
  Seed: PRMCSLMQGSTLPRRSGAAG
PRMCSLMYGSALARRAGAAG

SEQ ID NO: 120767 - protein, 20 aa, Artificial Sequence
  Description of Artificial Sequence: Synthetic peptide
  Seed: PRMCSLMQGSTLPRRSGAAG
PRMCSLMYGSALARRIGAAG

SEQ ID NO: 120768 - protein, 20 aa, Artificial Sequence
  Description of Artificial Sequence: Synthetic peptide
  Seed: PRMCSLMQGSTLPRRSGAAG
PRMCSLMYGSALARRLGAAG

SEQ ID NO: 120769 - protein, 20 aa, Artificial Sequence
  Description of Artificial Sequence: Synthetic peptide
  Seed: PRMCSLMQGSTLPRRSGAAG
PRMCSLMYGSALARRMGAAG

SEQ ID NO: 120770 - protein, 20 aa, Artificial Sequence
  Description of Artificial Sequence: Synthetic peptide
  Seed: PRMCSLMQGSTLPRRSGAAG
PRMCSLMYGSALARRNGAAG

SEQ ID NO: 120771 - protein, 20 aa, Artificial Sequence
  Description of Artificial Sequence: Synthetic peptide
  Seed: PRMCSLMQGSTLPRRSGAAG
PRMCSLMYGSALARRSGAAG

SEQ ID NO: 120772 - protein, 20 aa, Artificial Sequence
  Description of Artificial Sequence: Synthetic peptide
  Seed: PRMCSLMQGSTLPRRSGAAG
PRMCSLMYGSALARRVGAAG

SEQ ID NO: 120773 - protein, 20 aa, Artificial Sequence
  Description of Artificial Sequence: Synthetic peptide
  Seed: PRMCSLMQGSTLPRRSGAAG
PRMCSLMYGSALPRRAGAAG

SEQ ID NO: 120774 - protein, 20 aa, Artificial Sequence
  Description of Artificial Sequence: Synthetic peptide
  Seed: PRMCSLMQGSTLPRRSGAAG
PRMCSLMYGSALSRRAGAAG

SEQ ID NO: 120775 - protein, 20 aa, Artificial Sequence
  Description of Artificial Sequence: Synthetic peptide
  Seed: PRMCSLMQGSTLPRRSGAAG
PRMCSLMYGSALSRRIGAAG

SEQ ID NO: 120776 - protein, 20 aa, Artificial Sequence
  Description of Artificial Sequence: Synthetic peptide
  Seed: PRMCSLMQGSTLPRRSGAAG
PRMCSLMYGSALSRRVGAAG

SEQ ID NO: 120777 - protein, 20 aa, Artificial Sequence
  Description of Artificial Sequence: Synthetic peptide
  Seed: PRMCSLMQGSTLPRRSGAAG
PRMCSLMYGSALTRRAGAAG

SEQ ID NO: 120778 - protein, 20 aa, Artificial Sequence
  Description of Artificial Sequence: Synthetic peptide
  Seed: PRMCSLMQGSTLPRRSGAAG
PRMCSLMYGSALTRRIGAAG

SEQ ID NO: 120779 - protein, 20 aa, Artificial Sequence
  Description of Artificial Sequence: Synthetic peptide
  Seed: PRMCSLMQGSTLPRRSGAAG
PRMCSLMYGSALTRRVGAAG

SEQ ID NO: 120780 - protein, 20 aa, Artificial Sequence
  Description of Artificial Sequence: Synthetic peptide
  Seed: PRMCSLMQGSTLPRRSGAAG
PRMCSLMYGSALVRRAGAAG

SEQ ID NO: 120781 - protein, 20 aa, Artificial Sequence
  Description of Artificial Sequence: Synthetic peptide
  Seed: PRMCSLMQGSTLPRRSGAAG
PRMCSLMYGSILARRAGAAG

SEQ ID NO: 120782 - protein, 20 aa, Artificial Sequence
  Description of Artificial Sequence: Synthetic peptide
  Seed: PRMCSLMQGSTLPRRSGAAG
PRMCSLMYGSILARRIGAAG

SEQ ID NO: 120783 - protein, 20 aa, Artificial Sequence
  Description of Artificial Sequence: Synthetic peptide
  Seed: PRMCSLMQGSTLPRRSGAAG
PRMCSLMYGSILARRLGAAG

SEQ ID NO: 120784 - protein, 20 aa, Artificial Sequence
  Description of Artificial Sequence: Synthetic peptide
  Seed: PRMCSLMQGSTLPRRSGAAG
PRMCSLMYGSILARRMGAAG

SEQ ID NO: 120785 - protein, 20 aa, Artificial Sequence
  Description of Artificial Sequence: Synthetic peptide
  Seed: PRMCSLMQGSTLPRRSGAAG
PRMCSLMYGSILARRNGAAG

SEQ ID NO: 120786 - protein, 20 aa, Artificial Sequence
  Description of Artificial Sequence: Synthetic peptide
  Seed: PRMCSLMQGSTLPRRSGAAG
PRMCSLMYGSILARRSGAAG

SEQ ID NO: 120787 - protein, 20 aa, Artificial Sequence
  Description of Artificial Sequence: Synthetic peptide
  Seed: PRMCSLMQGSTLPRRSGAAG
PRMCSLMYGSILARRTGAAG

SEQ ID NO: 120788 - protein, 20 aa, Artificial Sequence
  Description of Artificial Sequence: Synthetic peptide
  Seed: PRMCSLMQGSTLPRRSGAAG
PRMCSLMYGSILARRVGAAG

SEQ ID NO: 120789 - protein, 20 aa, Artificial Sequence
  Description of Artificial Sequence: Synthetic peptide
  Seed: PRMCSLMQGSTLPRRSGAAG
PRMCSLMYGSILPRRAGAAG

SEQ ID NO: 120790 - protein, 20 aa, Artificial Sequence
  Description of Artificial Sequence: Synthetic peptide
  Seed: PRMCSLMQGSTLPRRSGAAG
PRMCSLMYGSILPRRIGAAG

SEQ ID NO: 120791 - protein, 20 aa, Artificial Sequence
  Description of Artificial Sequence: Synthetic peptide
  Seed: PRMCSLMQGSTLPRRSGAAG
PRMCSLMYGSILPRRNGAAG

SEQ ID NO: 120792 - protein, 20 aa, Artificial Sequence
  Description of Artificial Sequence: Synthetic peptide
  Seed: PRMCSLMQGSTLPRRSGAAG
PRMCSLMYGSILPRRSGAAG

SEQ ID NO: 120793 - protein, 20 aa, Artificial Sequence
  Description of Artificial Sequence: Synthetic peptide
  Seed: PRMCSLMQGSTLPRRSGAAG
PRMCSLMYGSILPRRVGAAG

SEQ ID NO: 120794 - protein, 20 aa, Artificial Sequence
  Description of Artificial Sequence: Synthetic peptide
  Seed: PRMCSLMQGSTLPRRSGAAG
PRMCSLMYGSILSRRAGAAG

SEQ ID NO: 120795 - protein, 20 aa, Artificial Sequence
  Description of Artificial Sequence: Synthetic peptide
  Seed: PRMCSLMQGSTLPRRSGAAG
PRMCSLMYGSILSRRIGAAG

SEQ ID NO: 120796 - protein, 20 aa, Artificial Sequence
  Description of Artificial Sequence: Synthetic peptide
  Seed: PRMCSLMQGSTLPRRSGAAG
PRMCSLMYGSILSRRLGAAG

SEQ ID NO: 120797 - protein, 20 aa, Artificial Sequence
  Description of Artificial Sequence: Synthetic peptide
  Seed: PRMCSLMQGSTLPRRSGAAG
PRMCSLMYGSILSRRNGAAG

SEQ ID NO: 120798 - protein, 20 aa, Artificial Sequence
  Description of Artificial Sequence: Synthetic peptide
  Seed: PRMCSLMQGSTLPRRSGAAG
PRMCSLMYGSILSRRSGAAG

SEQ ID NO: 120799 - protein, 20 aa, Artificial Sequence
  Description of Artificial Sequence: Synthetic peptide
  Seed: PRMCSLMQGSTLPRRSGAAG
PRMCSLMYGSILSRRTGAAG

SEQ ID NO: 120800 - protein, 20 aa, Artificial Sequence
  Description of Artificial Sequence: Synthetic peptide
  Seed: PRMCSLMQGSTLPRRSGAAG
PRMCSLMYGSILSRRVGAAG

SEQ ID NO: 120801 - protein, 20 aa, Artificial Sequence
  Description of Artificial Sequence: Synthetic peptide
  Seed: PRMCSLMQGSTLPRRSGAAG
PRMCSLMYGSILTRRAGAAG

SEQ ID NO: 120802 - protein, 20 aa, Artificial Sequence
  Description of Artificial Sequence: Synthetic peptide
  Seed: PRMCSLMQGSTLPRRSGAAG
PRMCSLMYGSILTRRIGAAG

SEQ ID NO: 120803 - protein, 20 aa, Artificial Sequence
  Description of Artificial Sequence: Synthetic peptide
  Seed: PRMCSLMQGSTLPRRSGAAG
PRMCSLMYGSILTRRLGAAG

SEQ ID NO: 120804 - protein, 20 aa, Artificial Sequence
  Description of Artificial Sequence: Synthetic peptide
  Seed: PRMCSLMQGSTLPRRSGAAG
PRMCSLMYGSILTRRNGAAG

SEQ ID NO: 120805 - protein, 20 aa, Artificial Sequence
  Description of Artificial Sequence: Synthetic peptide
  Seed: PRMCSLMQGSTLPRRSGAAG
PRMCSLMYGSILTRRSGAAG

SEQ ID NO: 120806 - protein, 20 aa, Artificial Sequence
  Description of Artificial Sequence: Synthetic peptide
  Seed: PRMCSLMQGSTLPRRSGAAG
PRMCSLMYGSILTRRTGAAG

SEQ ID NO: 120807 - protein, 20 aa, Artificial Sequence
  Description of Artificial Sequence: Synthetic peptide
  Seed: PRMCSLMQGSTLPRRSGAAG
PRMCSLMYGSILTRRVGAAG

SEQ ID NO: 120808 - protein, 20 aa, Artificial Sequence
  Description of Artificial Sequence: Synthetic peptide
  Seed: PRMCSLMQGSTLPRRSGAAG
PRMCSLMYGSILVRRAGAAG

SEQ ID NO: 120809 - protein, 20 aa, Artificial Sequence
  Description of Artificial Sequence: Synthetic peptide
  Seed: PRMCSLMQGSTLPRRSGAAG
PRMCSLMYGSILVRRNGAAG

SEQ ID NO: 120810 - protein, 20 aa, Artificial Sequence
  Description of Artificial Sequence: Synthetic peptide
  Seed: PRMCSLMQGSTLPRRSGAAG
PRMCSLMYGSILVRRSGAAG

SEQ ID NO: 120811 - protein, 20 aa, Artificial Sequence
  Description of Artificial Sequence: Synthetic peptide
  Seed: PRMCSLMQGSTLPRRSGAAG
PRMCSLMYGSILVRRVGAAG

SEQ ID NO: 120812 - protein, 20 aa, Artificial Sequence
  Description of Artificial Sequence: Synthetic peptide
  Seed: PRMCSLMQGSTLPRRSGAAG
PRMCSLMYGSLLARRAGAAG

SEQ ID NO: 120813 - protein, 20 aa, Artificial Sequence
  Description of Artificial Sequence: Synthetic peptide
  Seed: PRMCSLMQGSTLPRRSGAAG
PRMCSLMYGSLLARRIGAAG

SEQ ID NO: 120814 - protein, 20 aa, Artificial Sequence
  Description of Artificial Sequence: Synthetic peptide
  Seed: PRMCSLMQGSTLPRRSGAAG
PRMCSLMYGSLLARRLGAAG

SEQ ID NO: 120815 - protein, 20 aa, Artificial Sequence
  Description of Artificial Sequence: Synthetic peptide
  Seed: PRMCSLMQGSTLPRRSGAAG
PRMCSLMYGSLLARRMGAAG

SEQ ID NO: 120816 - protein, 20 aa, Artificial Sequence
  Description of Artificial Sequence: Synthetic peptide
  Seed: PRMCSLMQGSTLPRRSGAAG
PRMCSLMYGSLLARRNGAAG

SEQ ID NO: 120817 - protein, 20 aa, Artificial Sequence
  Description of Artificial Sequence: Synthetic peptide
  Seed: PRMCSLMQGSTLPRRSGAAG
PRMCSLMYGSLLARRSGAAG

SEQ ID NO: 120818 - protein, 20 aa, Artificial Sequence
  Description of Artificial Sequence: Synthetic peptide
  Seed: PRMCSLMQGSTLPRRSGAAG
PRMCSLMYGSLLARRTGAAG

SEQ ID NO: 120819 - protein, 20 aa, Artificial Sequence
  Description of Artificial Sequence: Synthetic peptide
  Seed: PRMCSLMQGSTLPRRSGAAG
PRMCSLMYGSLLARRVGAAG

SEQ ID NO: 120820 - protein, 20 aa, Artificial Sequence
  Description of Artificial Sequence: Synthetic peptide
  Seed: PRMCSLMQGSTLPRRSGAAG
PRMCSLMYGSLLGRRAGAAG

SEQ ID NO: 120821 - protein, 20 aa, Artificial Sequence
  Description of Artificial Sequence: Synthetic peptide
  Seed: PRMCSLMQGSTLPRRSGAAG
PRMCSLMYGSLLGRRVGAAG

SEQ ID NO: 120822 - protein, 20 aa, Artificial Sequence
  Description of Artificial Sequence: Synthetic peptide
  Seed: PRMCSLMQGSTLPRRSGAAG
PRMCSLMYGSLLIRRAGAAG

SEQ ID NO: 120823 - protein, 20 aa, Artificial Sequence
  Description of Artificial Sequence: Synthetic peptide
  Seed: PRMCSLMQGSTLPRRSGAAG
PRMCSLMYGSLLPRRAGAAG

SEQ ID NO: 120824 - protein, 20 aa, Artificial Sequence
  Description of Artificial Sequence: Synthetic peptide
  Seed: PRMCSLMQGSTLPRRSGAAG
PRMCSLMYGSLLPRRIGAAG

SEQ ID NO: 120825 - protein, 20 aa, Artificial Sequence
  Description of Artificial Sequence: Synthetic peptide
  Seed: PRMCSLMQGSTLPRRSGAAG
PRMCSLMYGSLLPRRLGAAG

SEQ ID NO: 120826 - protein, 20 aa, Artificial Sequence
  Description of Artificial Sequence: Synthetic peptide
  Seed: PRMCSLMQGSTLPRRSGAAG
PRMCSLMYGSLLPRRMGAAG

SEQ ID NO: 120827 - protein, 20 aa, Artificial Sequence
  Description of Artificial Sequence: Synthetic peptide
  Seed: PRMCSLMQGSTLPRRSGAAG
PRMCSLMYGSLLPRRNGAAG

SEQ ID NO: 120828 - protein, 20 aa, Artificial Sequence
  Description of Artificial Sequence: Synthetic peptide
  Seed: PRMCSLMQGSTLPRRSGAAG
PRMCSLMYGSLLPRRSGAAG

SEQ ID NO: 120829 - protein, 20 aa, Artificial Sequence
  Description of Artificial Sequence: Synthetic peptide
  Seed: PRMCSLMQGSTLPRRSGAAG
PRMCSLMYGSLLPRRVGAAG

SEQ ID NO: 120830 - protein, 20 aa, Artificial Sequence
  Description of Artificial Sequence: Synthetic peptide
  Seed: PRMCSLMQGSTLPRRSGAAG
PRMCSLMYGSLLSRRAGAAG

SEQ ID NO: 120831 - protein, 20 aa, Artificial Sequence
  Description of Artificial Sequence: Synthetic peptide
  Seed: PRMCSLMQGSTLPRRSGAAG
PRMCSLMYGSLLSRRIGAAG

SEQ ID NO: 120832 - protein, 20 aa, Artificial Sequence
  Description of Artificial Sequence: Synthetic peptide
  Seed: PRMCSLMQGSTLPRRSGAAG
PRMCSLMYGSLLSRRLGAAG

SEQ ID NO: 120833 - protein, 20 aa, Artificial Sequence
  Description of Artificial Sequence: Synthetic peptide
  Seed: PRMCSLMQGSTLPRRSGAAG
PRMCSLMYGSLLSRRMGAAG

SEQ ID NO: 120834 - protein, 20 aa, Artificial Sequence
  Description of Artificial Sequence: Synthetic peptide
  Seed: PRMCSLMQGSTLPRRSGAAG
PRMCSLMYGSLLSRRNGAAG

SEQ ID NO: 120835 - protein, 20 aa, Artificial Sequence
  Description of Artificial Sequence: Synthetic peptide
  Seed: PRMCSLMQGSTLPRRSGAAG
PRMCSLMYGSLLSRRSGAAG

SEQ ID NO: 120836 - protein, 20 aa, Artificial Sequence
  Description of Artificial Sequence: Synthetic peptide
  Seed: PRMCSLMQGSTLPRRSGAAG
PRMCSLMYGSLLSRRTGAAG

SEQ ID NO: 120837 - protein, 20 aa, Artificial Sequence
  Description of Artificial Sequence: Synthetic peptide
  Seed: PRMCSLMQGSTLPRRSGAAG
PRMCSLMYGSLLSRRVGAAG

SEQ ID NO: 120838 - protein, 20 aa, Artificial Sequence
  Description of Artificial Sequence: Synthetic peptide
  Seed: PRMCSLMQGSTLPRRSGAAG
PRMCSLMYGSLLTRRAGAAG

SEQ ID NO: 120839 - protein, 20 aa, Artificial Sequence
  Description of Artificial Sequence: Synthetic peptide
  Seed: PRMCSLMQGSTLPRRSGAAG
PRMCSLMYGSLLTRRIGAAG

SEQ ID NO: 120840 - protein, 20 aa, Artificial Sequence
  Description of Artificial Sequence: Synthetic peptide
  Seed: PRMCSLMQGSTLPRRSGAAG
PRMCSLMYGSLLTRRLGAAG

SEQ ID NO: 120841 - protein, 20 aa, Artificial Sequence
  Description of Artificial Sequence: Synthetic peptide
  Seed: PRMCSLMQGSTLPRRSGAAG
PRMCSLMYGSLLTRRMGAAG

SEQ ID NO: 120842 - protein, 20 aa, Artificial Sequence
  Description of Artificial Sequence: Synthetic peptide
  Seed: PRMCSLMQGSTLPRRSGAAG
PRMCSLMYGSLLTRRNGAAG

SEQ ID NO: 120843 - protein, 20 aa, Artificial Sequence
  Description of Artificial Sequence: Synthetic peptide
  Seed: PRMCSLMQGSTLPRRSGAAG
PRMCSLMYGSLLTRRSGAAG

SEQ ID NO: 120844 - protein, 20 aa, Artificial Sequence
  Description of Artificial Sequence: Synthetic peptide
  Seed: PRMCSLMQGSTLPRRSGAAG
PRMCSLMYGSLLTRRTGAAG

SEQ ID NO: 120845 - protein, 20 aa, Artificial Sequence
  Description of Artificial Sequence: Synthetic peptide
  Seed: PRMCSLMQGSTLPRRSGAAG
PRMCSLMYGSLLTRRVGAAG

SEQ ID NO: 120846 - protein, 20 aa, Artificial Sequence
  Description of Artificial Sequence: Synthetic peptide
  Seed: PRMCSLMQGSTLPRRSGAAG
PRMCSLMYGSLLVRRAGAAG

SEQ ID NO: 120847 - protein, 20 aa, Artificial Sequence
  Description of Artificial Sequence: Synthetic peptide
  Seed: PRMCSLMQGSTLPRRSGAAG
PRMCSLMYGSLLVRRIGAAG

SEQ ID NO: 120848 - protein, 20 aa, Artificial Sequence
  Description of Artificial Sequence: Synthetic peptide
  Seed: PRMCSLMQGSTLPRRSGAAG
PRMCSLMYGSLLVRRNGAAG

SEQ ID NO: 120849 - protein, 20 aa, Artificial Sequence
  Description of Artificial Sequence: Synthetic peptide
  Seed: PRMCSLMQGSTLPRRSGAAG
PRMCSLMYGSLLVRRSGAAG

SEQ ID NO: 120850 - protein, 20 aa, Artificial Sequence
  Description of Artificial Sequence: Synthetic peptide
  Seed: PRMCSLMQGSTLPRRSGAAG
PRMCSLMYGSLLVRRVGAAG

SEQ ID NO: 120851 - protein, 20 aa, Artificial Sequence
  Description of Artificial Sequence: Synthetic peptide
  Seed: PRMCSLMQGSTLPRRSGAAG
PRMCSLMYGSMLARRAGAAG

SEQ ID NO: 120852 - protein, 20 aa, Artificial Sequence
  Description of Artificial Sequence: Synthetic peptide
  Seed: PRMCSLMQGSTLPRRSGAAG
PRMCSLMYGSMLARRGGAAG

SEQ ID NO: 120853 - protein, 20 aa, Artificial Sequence
  Description of Artificial Sequence: Synthetic peptide
  Seed: PRMCSLMQGSTLPRRSGAAG
PRMCSLMYGSMLARRIGAAG

SEQ ID NO: 120854 - protein, 20 aa, Artificial Sequence
  Description of Artificial Sequence: Synthetic peptide
  Seed: PRMCSLMQGSTLPRRSGAAG
PRMCSLMYGSMLARRLGAAG

SEQ ID NO: 120855 - protein, 20 aa, Artificial Sequence
  Description of Artificial Sequence: Synthetic peptide
  Seed: PRMCSLMQGSTLPRRSGAAG
PRMCSLMYGSMLARRMGAAG

SEQ ID NO: 120856 - protein, 20 aa, Artificial Sequence
  Description of Artificial Sequence: Synthetic peptide
  Seed: PRMCSLMQGSTLPRRSGAAG
PRMCSLMYGSMLARRNGAAG

SEQ ID NO: 120857 - protein, 20 aa, Artificial Sequence
  Description of Artificial Sequence: Synthetic peptide
  Seed: PRMCSLMQGSTLPRRSGAAG
PRMCSLMYGSMLARRSGAAG

SEQ ID NO: 120858 - protein, 20 aa, Artificial Sequence
  Description of Artificial Sequence: Synthetic peptide
  Seed: PRMCSLMQGSTLPRRSGAAG
PRMCSLMYGSMLARRTGAAG

SEQ ID NO: 120859 - protein, 20 aa, Artificial Sequence
  Description of Artificial Sequence: Synthetic peptide
  Seed: PRMCSLMQGSTLPRRSGAAG
PRMCSLMYGSMLARRVGAAG

SEQ ID NO: 120860 - protein, 20 aa, Artificial Sequence
  Description of Artificial Sequence: Synthetic peptide
  Seed: PRMCSLMQGSTLPRRSGAAG
PRMCSLMYGSMLGRRAGAAG

SEQ ID NO: 120861 - protein, 20 aa, Artificial Sequence
  Description of Artificial Sequence: Synthetic peptide
  Seed: PRMCSLMQGSTLPRRSGAAG
PRMCSLMYGSMLGRRIGAAG

SEQ ID NO: 120862 - protein, 20 aa, Artificial Sequence
  Description of Artificial Sequence: Synthetic peptide
  Seed: PRMCSLMQGSTLPRRSGAAG
PRMCSLMYGSMLGRRVGAAG

SEQ ID NO: 120863 - protein, 20 aa, Artificial Sequence
  Description of Artificial Sequence: Synthetic peptide
  Seed: PRMCSLMQGSTLPRRSGAAG
PRMCSLMYGSMLIRRAGAAG

SEQ ID NO: 120864 - protein, 20 aa, Artificial Sequence
  Description of Artificial Sequence: Synthetic peptide
  Seed: PRMCSLMQGSTLPRRSGAAG
PRMCSLMYGSMLIRRNGAAG

SEQ ID NO: 120865 - protein, 20 aa, Artificial Sequence
  Description of Artificial Sequence: Synthetic peptide
  Seed: PRMCSLMQGSTLPRRSGAAG
PRMCSLMYGSMLIRRVGAAG

SEQ ID NO: 120866 - protein, 20 aa, Artificial Sequence
  Description of Artificial Sequence: Synthetic peptide
  Seed: PRMCSLMQGSTLPRRSGAAG
PRMCSLMYGSMLPRRAGAAG

SEQ ID NO: 120867 - protein, 20 aa, Artificial Sequence
  Description of Artificial Sequence: Synthetic peptide
  Seed: PRMCSLMQGSTLPRRSGAAG
PRMCSLMYGSMLPRRIGAAG

SEQ ID NO: 120868 - protein, 20 aa, Artificial Sequence
  Description of Artificial Sequence: Synthetic peptide
  Seed: PRMCSLMQGSTLPRRSGAAG
PRMCSLMYGSMLPRRLGAAG

SEQ ID NO: 120869 - protein, 20 aa, Artificial Sequence
  Description of Artificial Sequence: Synthetic peptide
  Seed: PRMCSLMQGSTLPRRSGAAG
PRMCSLMYGSMLPRRMGAAG

SEQ ID NO: 120870 - protein, 20 aa, Artificial Sequence
  Description of Artificial Sequence: Synthetic peptide
  Seed: PRMCSLMQGSTLPRRSGAAG
PRMCSLMYGSMLPRRNGAAG

SEQ ID NO: 120871 - protein, 20 aa, Artificial Sequence
  Description of Artificial Sequence: Synthetic peptide
  Seed: PRMCSLMQGSTLPRRSGAAG
PRMCSLMYGSMLPRRSGAAG

SEQ ID NO: 120872 - protein, 20 aa, Artificial Sequence
  Description of Artificial Sequence: Synthetic peptide
  Seed: PRMCSLMQGSTLPRRSGAAG
PRMCSLMYGSMLPRRTGAAG

SEQ ID NO: 120873 - protein, 20 aa, Artificial Sequence
  Description of Artificial Sequence: Synthetic peptide
  Seed: PRMCSLMQGSTLPRRSGAAG
PRMCSLMYGSMLPRRVGAAG

SEQ ID NO: 120874 - protein, 20 aa, Artificial Sequence
  Description of Artificial Sequence: Synthetic peptide
  Seed: PRMCSLMQGSTLPRRSGAAG
PRMCSLMYGSMLSRRAGAAG

SEQ ID NO: 120875 - protein, 20 aa, Artificial Sequence
  Description of Artificial Sequence: Synthetic peptide
  Seed: PRMCSLMQGSTLPRRSGAAG
PRMCSLMYGSMLSRRIGAAG

SEQ ID NO: 120876 - protein, 20 aa, Artificial Sequence
  Description of Artificial Sequence: Synthetic peptide
  Seed: PRMCSLMQGSTLPRRSGAAG
PRMCSLMYGSMLSRRLGAAG

SEQ ID NO: 120877 - protein, 20 aa, Artificial Sequence
  Description of Artificial Sequence: Synthetic peptide
  Seed: PRMCSLMQGSTLPRRSGAAG
PRMCSLMYGSMLSRRMGAAG

SEQ ID NO: 120878 - protein, 20 aa, Artificial Sequence
  Description of Artificial Sequence: Synthetic peptide
  Seed: PRMCSLMQGSTLPRRSGAAG
PRMCSLMYGSMLSRRNGAAG

SEQ ID NO: 120879 - protein, 20 aa, Artificial Sequence
  Description of Artificial Sequence: Synthetic peptide
  Seed: PRMCSLMQGSTLPRRSGAAG
PRMCSLMYGSMLSRRSGAAG

SEQ ID NO: 120880 - protein, 20 aa, Artificial Sequence
  Description of Artificial Sequence: Synthetic peptide
  Seed: PRMCSLMQGSTLPRRSGAAG
PRMCSLMYGSMLSRRTGAAG

SEQ ID NO: 120881 - protein, 20 aa, Artificial Sequence
  Description of Artificial Sequence: Synthetic peptide
  Seed: PRMCSLMQGSTLPRRSGAAG
PRMCSLMYGSMLSRRVGAAG

SEQ ID NO: 120882 - protein, 20 aa, Artificial Sequence
  Description of Artificial Sequence: Synthetic peptide
  Seed: PRMCSLMQGSTLPRRSGAAG
PRMCSLMYGSMLTRRAGAAG

SEQ ID NO: 120883 - protein, 20 aa, Artificial Sequence
  Description of Artificial Sequence: Synthetic peptide
  Seed: PRMCSLMQGSTLPRRSGAAG
PRMCSLMYGSMLTRRIGAAG

SEQ ID NO: 120884 - protein, 20 aa, Artificial Sequence
  Description of Artificial Sequence: Synthetic peptide
  Seed: PRMCSLMQGSTLPRRSGAAG
PRMCSLMYGSMLTRRLGAAG

SEQ ID NO: 120885 - protein, 20 aa, Artificial Sequence
  Description of Artificial Sequence: Synthetic peptide
  Seed: PRMCSLMQGSTLPRRSGAAG
PRMCSLMYGSMLTRRMGAAG

SEQ ID NO: 120886 - protein, 20 aa, Artificial Sequence
  Description of Artificial Sequence: Synthetic peptide
  Seed: PRMCSLMQGSTLPRRSGAAG
PRMCSLMYGSMLTRRNGAAG

SEQ ID NO: 120887 - protein, 20 aa, Artificial Sequence
  Description of Artificial Sequence: Synthetic peptide
  Seed: PRMCSLMQGSTLPRRSGAAG
PRMCSLMYGSMLTRRSGAAG

SEQ ID NO: 120888 - protein, 20 aa, Artificial Sequence
  Description of Artificial Sequence: Synthetic peptide
  Seed: PRMCSLMQGSTLPRRSGAAG
PRMCSLMYGSMLTRRTGAAG

SEQ ID NO: 120889 - protein, 20 aa, Artificial Sequence
  Description of Artificial Sequence: Synthetic peptide
  Seed: PRMCSLMQGSTLPRRSGAAG
PRMCSLMYGSMLTRRVGAAG

SEQ ID NO: 120890 - protein, 20 aa, Artificial Sequence
  Description of Artificial Sequence: Synthetic peptide
  Seed: PRMCSLMQGSTLPRRSGAAG
PRMCSLMYGSMLVRRAGAAG

SEQ ID NO: 120891 - protein, 20 aa, Artificial Sequence
  Description of Artificial Sequence: Synthetic peptide
  Seed: PRMCSLMQGSTLPRRSGAAG
PRMCSLMYGSMLVRRIGAAG

SEQ ID NO: 120892 - protein, 20 aa, Artificial Sequence
  Description of Artificial Sequence: Synthetic peptide
  Seed: PRMCSLMQGSTLPRRSGAAG
PRMCSLMYGSMLVRRLGAAG

SEQ ID NO: 120893 - protein, 20 aa, Artificial Sequence
  Description of Artificial Sequence: Synthetic peptide
  Seed: PRMCSLMQGSTLPRRSGAAG
PRMCSLMYGSMLVRRMGAAG

SEQ ID NO: 120894 - protein, 20 aa, Artificial Sequence
  Description of Artificial Sequence: Synthetic peptide
  Seed: PRMCSLMQGSTLPRRSGAAG
PRMCSLMYGSMLVRRNGAAG

SEQ ID NO: 120895 - protein, 20 aa, Artificial Sequence
  Description of Artificial Sequence: Synthetic peptide
  Seed: PRMCSLMQGSTLPRRSGAAG
PRMCSLMYGSMLVRRSGAAG

SEQ ID NO: 120896 - protein, 20 aa, Artificial Sequence
  Description of Artificial Sequence: Synthetic peptide
  Seed: PRMCSLMQGSTLPRRSGAAG
PRMCSLMYGSMLVRRTGAAG

SEQ ID NO: 120897 - protein, 20 aa, Artificial Sequence
  Description of Artificial Sequence: Synthetic peptide
  Seed: PRMCSLMQGSTLPRRSGAAG
PRMCSLMYGSMLVRRVGAAG

SEQ ID NO: 120898 - protein, 20 aa, Artificial Sequence
  Description of Artificial Sequence: Synthetic peptide
  Seed: PRMCSLMQGSTLPRRSGAAG
PRMCSLMYGSVLARRAGAAG

SEQ ID NO: 120899 - protein, 20 aa, Artificial Sequence
  Description of Artificial Sequence: Synthetic peptide
  Seed: PRMCSLMQGSTLPRRSGAAG
PRMCSLMYGSVLARRIGAAG

SEQ ID NO: 120900 - protein, 20 aa, Artificial Sequence
  Description of Artificial Sequence: Synthetic peptide
  Seed: PRMCSLMQGSTLPRRSGAAG
PRMCSLMYGSVLARRNGAAG

SEQ ID NO: 120901 - protein, 20 aa, Artificial Sequence
  Description of Artificial Sequence: Synthetic peptide
  Seed: PRMCSLMQGSTLPRRSGAAG
PRMCSLMYGSVLARRSGAAG

SEQ ID NO: 120902 - protein, 20 aa, Artificial Sequence
  Description of Artificial Sequence: Synthetic peptide
  Seed: PRMCSLMQGSTLPRRSGAAG
PRMCSLMYGSVLARRVGAAG

SEQ ID NO: 120903 - protein, 20 aa, Artificial Sequence
  Description of Artificial Sequence: Synthetic peptide
  Seed: PRMCSLMQGSTLPRRSGAAG
PRMCSLMYGSVLPRRAGAAG

SEQ ID NO: 120904 - protein, 20 aa, Artificial Sequence
  Description of Artificial Sequence: Synthetic peptide
  Seed: PRMCSLMQGSTLPRRSGAAG
PRMCSLMYGSVLSRRAGAAG

SEQ ID NO: 120905 - protein, 20 aa, Artificial Sequence
  Description of Artificial Sequence: Synthetic peptide
  Seed: PRMCSLMQGSTLPRRSGAAG
PRMCSLMYGSVLTRRAGAAG

SEQ ID NO: 120906 - protein, 21 aa, Artificial Sequence
  Description of Artificial Sequence: Synthetic peptide
  Seed: PRMCSLMQGSTLPRRSGAAGA
PRMFSLAQASTAPRRSGAAGA

SEQ ID NO: 120907 - protein, 21 aa, Artificial Sequence
  Description of Artificial Sequence: Synthetic peptide
  Seed: PRMCSLMQGSTLPRRSGAAGA
PRMFSLAQASTGPRRSGAAGA

SEQ ID NO: 120908 - protein, 21 aa, Artificial Sequence
  Description of Artificial Sequence: Synthetic peptide
  Seed: PRMCSLMQGSTLPRRSGAAGA
PRMFSLAQASTIPRRSGAAGA

SEQ ID NO: 120909 - protein, 21 aa, Artificial Sequence
  Description of Artificial Sequence: Synthetic peptide
  Seed: PRMCSLMQGSTLPRRSGAAGA
PRMFSLAQASTLPRRSGAAGA

SEQ ID NO: 120910 - protein, 21 aa, Artificial Sequence
  Description of Artificial Sequence: Synthetic peptide
  Seed: PRMCSLMQGSTLPRRSGAAGA
PRMFSLAQASTMPRRSGAAGA

SEQ ID NO: 120911 - protein, 21 aa, Artificial Sequence
  Description of Artificial Sequence: Synthetic peptide
  Seed: PRMCSLMQGSTLPRRSGAAGA
PRMFSLAQASTSPRRSGAAGA

SEQ ID NO: 120912 - protein, 21 aa, Artificial Sequence
  Description of Artificial Sequence: Synthetic peptide
  Seed: PRMCSLMQGSTLPRRSGAAGA
PRMFSLAQASTTPRRSGAAGA

SEQ ID NO: 120913 - protein, 21 aa, Artificial Sequence
  Description of Artificial Sequence: Synthetic peptide
  Seed: PRMCSLMQGSTLPRRSGAAGA
PRMFSLAQASTVPRRSGAAGA

SEQ ID NO: 120914 - protein, 21 aa, Artificial Sequence
  Description of Artificial Sequence: Synthetic peptide
  Seed: PRMCSLMQGSTLPRRSGAAGA
PRMFSLAQGSTAPRRSGAAGA

SEQ ID NO: 120915 - protein, 21 aa, Artificial Sequence
  Description of Artificial Sequence: Synthetic peptide
  Seed: PRMCSLMQGSTLPRRSGAAGA
PRMFSLAQGSTIPRRSGAAGA

SEQ ID NO: 120916 - protein, 21 aa, Artificial Sequence
  Description of Artificial Sequence: Synthetic peptide
  Seed: PRMCSLMQGSTLPRRSGAAGA
PRMFSLAQGSTLPRRSGAAGA

SEQ ID NO: 120917 - protein, 21 aa, Artificial Sequence
  Description of Artificial Sequence: Synthetic peptide
  Seed: PRMCSLMQGSTLPRRSGAAGA
PRMFSLAQGSTMPRRSGAAGA

SEQ ID NO: 120918 - protein, 21 aa, Artificial Sequence
  Description of Artificial Sequence: Synthetic peptide
  Seed: PRMCSLMQGSTLPRRSGAAGA
PRMFSLAQGSTVPRRSGAAGA

SEQ ID NO: 120919 - protein, 21 aa, Artificial Sequence
  Description of Artificial Sequence: Synthetic peptide
  Seed: PRMCSLMQGSTLPRRSGAAGA
PRMFSLAQNSTVPRRSGAAGA

SEQ ID NO: 120920 - protein, 21 aa, Artificial Sequence
  Description of Artificial Sequence: Synthetic peptide
  Seed: PRMCSLMQGSTLPRRSGAAGA
PRMFSLAQPSTAPRRSGAAGA

SEQ ID NO: 120921 - protein, 21 aa, Artificial Sequence
  Description of Artificial Sequence: Synthetic peptide
  Seed: PRMCSLMQGSTLPRRSGAAGA
PRMFSLAQPSTIPRRSGAAGA

SEQ ID NO: 120922 - protein, 21 aa, Artificial Sequence
  Description of Artificial Sequence: Synthetic peptide
  Seed: PRMCSLMQGSTLPRRSGAAGA
PRMFSLAQPSTLPRRSGAAGA

SEQ ID NO: 120923 - protein, 21 aa, Artificial Sequence
  Description of Artificial Sequence: Synthetic peptide
  Seed: PRMCSLMQGSTLPRRSGAAGA
PRMFSLAQPSTVPRRSGAAGA

SEQ ID NO: 120924 - protein, 21 aa, Artificial Sequence
  Description of Artificial Sequence: Synthetic peptide
  Seed: PRMCSLMQGSTLPRRSGAAGA
PRMFSLAQSSTAPRRSGAAGA

SEQ ID NO: 120925 - protein, 21 aa, Artificial Sequence
  Description of Artificial Sequence: Synthetic peptide
  Seed: PRMCSLMQGSTLPRRSGAAGA
PRMFSLAQSSTIPRRSGAAGA

SEQ ID NO: 120926 - protein, 21 aa, Artificial Sequence
  Description of Artificial Sequence: Synthetic peptide
  Seed: PRMCSLMQGSTLPRRSGAAGA
PRMFSLAQSSTLPRRSGAAGA

SEQ ID NO: 120927 - protein, 21 aa, Artificial Sequence
  Description of Artificial Sequence: Synthetic peptide
  Seed: PRMCSLMQGSTLPRRSGAAGA
PRMFSLAQSSTMPRRSGAAGA

SEQ ID NO: 120928 - protein, 21 aa, Artificial Sequence
  Description of Artificial Sequence: Synthetic peptide
  Seed: PRMCSLMQGSTLPRRSGAAGA
PRMFSLAQSSTVPRRSGAAGA

SEQ ID NO: 120929 - protein, 21 aa, Artificial Sequence
  Description of Artificial Sequence: Synthetic peptide
  Seed: PRMCSLMQGSTLPRRSGAAGA
PRMFSLAQTSTIPRRSGAAGA

SEQ ID NO: 120930 - protein, 21 aa, Artificial Sequence
  Description of Artificial Sequence: Synthetic peptide
  Seed: PRMCSLMQGSTLPRRSGAAGA
PRMFSLAQTSTVPRRSGAAGA

SEQ ID NO: 120931 - protein, 21 aa, Artificial Sequence
  Description of Artificial Sequence: Synthetic peptide
  Seed: PRMCSLMQGSTLPRRSGAAGA
PRMFSLEQASTAPRRSGAAGA

SEQ ID NO: 120932 - protein, 21 aa, Artificial Sequence
  Description of Artificial Sequence: Synthetic peptide
  Seed: PRMCSLMQGSTLPRRSGAAGA
PRMFSLEQASTIPRRSGAAGA

SEQ ID NO: 120933 - protein, 21 aa, Artificial Sequence
  Description of Artificial Sequence: Synthetic peptide
  Seed: PRMCSLMQGSTLPRRSGAAGA
PRMFSLEQASTLPRRSGAAGA

SEQ ID NO: 120934 - protein, 21 aa, Artificial Sequence
  Description of Artificial Sequence: Synthetic peptide
  Seed: PRMCSLMQGSTLPRRSGAAGA
PRMFSLEQASTVPRRSGAAGA

SEQ ID NO: 120935 - protein, 21 aa, Artificial Sequence
  Description of Artificial Sequence: Synthetic peptide
  Seed: PRMCSLMQGSTLPRRSGAAGA
PRMFSLFQASTAPRRSGAAGA

SEQ ID NO: 120936 - protein, 21 aa, Artificial Sequence
  Description of Artificial Sequence: Synthetic peptide
  Seed: PRMCSLMQGSTLPRRSGAAGA
PRMFSLFQASTIPRRSGAAGA

SEQ ID NO: 120937 - protein, 21 aa, Artificial Sequence
  Description of Artificial Sequence: Synthetic peptide
  Seed: PRMCSLMQGSTLPRRSGAAGA
PRMFSLFQASTLPRRSGAAGA

SEQ ID NO: 120938 - protein, 21 aa, Artificial Sequence
  Description of Artificial Sequence: Synthetic peptide
  Seed: PRMCSLMQGSTLPRRSGAAGA
PRMFSLFQASTVPRRSGAAGA

SEQ ID NO: 120939 - protein, 21 aa, Artificial Sequence
  Description of Artificial Sequence: Synthetic peptide
  Seed: PRMCSLMQGSTLPRRSGAAGA
PRMFSLGQASTIPRRSGAAGA

SEQ ID NO: 120940 - protein, 21 aa, Artificial Sequence
  Description of Artificial Sequence: Synthetic peptide
  Seed: PRMCSLMQGSTLPRRSGAAGA
PRMFSLGQASTLPRRSGAAGA

SEQ ID NO: 120941 - protein, 21 aa, Artificial Sequence
  Description of Artificial Sequence: Synthetic peptide
  Seed: PRMCSLMQGSTLPRRSGAAGA
PRMFSLGQASTVPRRSGAAGA

SEQ ID NO: 120942 - protein, 21 aa, Artificial Sequence
  Description of Artificial Sequence: Synthetic peptide
  Seed: PRMCSLMQGSTLPRRSGAAGA
PRMFSLIQASTAPRRSGAAGA

SEQ ID NO: 120943 - protein, 21 aa, Artificial Sequence
  Description of Artificial Sequence: Synthetic peptide
  Seed: PRMCSLMQGSTLPRRSGAAGA
PRMFSLIQASTCPRRSGAAGA

SEQ ID NO: 120944 - protein, 21 aa, Artificial Sequence
  Description of Artificial Sequence: Synthetic peptide
  Seed: PRMCSLMQGSTLPRRSGAAGA
PRMFSLIQASTGPRRSGAAGA

SEQ ID NO: 120945 - protein, 21 aa, Artificial Sequence
  Description of Artificial Sequence: Synthetic peptide
  Seed: PRMCSLMQGSTLPRRSGAAGA
PRMFSLIQASTIPRRSGAAGA

SEQ ID NO: 120946 - protein, 21 aa, Artificial Sequence
  Description of Artificial Sequence: Synthetic peptide
  Seed: PRMCSLMQGSTLPRRSGAAGA
PRMFSLIQASTLPRRSGAAGA

SEQ ID NO: 120947 - protein, 21 aa, Artificial Sequence
  Description of Artificial Sequence: Synthetic peptide
  Seed: PRMCSLMQGSTLPRRSGAAGA
PRMFSLIQASTMPRRSGAAGA

SEQ ID NO: 120948 - protein, 21 aa, Artificial Sequence
  Description of Artificial Sequence: Synthetic peptide
  Seed: PRMCSLMQGSTLPRRSGAAGA
PRMFSLIQASTSPRRSGAAGA

SEQ ID NO: 120949 - protein, 21 aa, Artificial Sequence
  Description of Artificial Sequence: Synthetic peptide
  Seed: PRMCSLMQGSTLPRRSGAAGA
PRMFSLIQASTTPRRSGAAGA

SEQ ID NO: 120950 - protein, 21 aa, Artificial Sequence
  Description of Artificial Sequence: Synthetic peptide
  Seed: PRMCSLMQGSTLPRRSGAAGA
PRMFSLIQASTVPRRSGAAGA

SEQ ID NO: 120951 - protein, 21 aa, Artificial Sequence
  Description of Artificial Sequence: Synthetic peptide
  Seed: PRMCSLMQGSTLPRRSGAAGA
PRMFSLIQGSTAPRRSGAAGA

SEQ ID NO: 120952 - protein, 21 aa, Artificial Sequence
  Description of Artificial Sequence: Synthetic peptide
  Seed: PRMCSLMQGSTLPRRSGAAGA
PRMFSLIQGSTGPRRSGAAGA

SEQ ID NO: 120953 - protein, 21 aa, Artificial Sequence
  Description of Artificial Sequence: Synthetic peptide
  Seed: PRMCSLMQGSTLPRRSGAAGA
PRMFSLIQGSTIPRRSGAAGA

SEQ ID NO: 120954 - protein, 21 aa, Artificial Sequence
  Description of Artificial Sequence: Synthetic peptide
  Seed: PRMCSLMQGSTLPRRSGAAGA
PRMFSLIQGSTLPRRSGAAGA

SEQ ID NO: 120955 - protein, 21 aa, Artificial Sequence
  Description of Artificial Sequence: Synthetic peptide
  Seed: PRMCSLMQGSTLPRRSGAAGA
PRMFSLIQGSTMPRRSGAAGA

SEQ ID NO: 120956 - protein, 21 aa, Artificial Sequence
  Description of Artificial Sequence: Synthetic peptide
  Seed: PRMCSLMQGSTLPRRSGAAGA
PRMFSLIQGSTSPRRSGAAGA

SEQ ID NO: 120957 - protein, 21 aa, Artificial Sequence
  Description of Artificial Sequence: Synthetic peptide
  Seed: PRMCSLMQGSTLPRRSGAAGA
PRMFSLIQGSTTPRRSGAAGA

SEQ ID NO: 120958 - protein, 21 aa, Artificial Sequence
  Description of Artificial Sequence: Synthetic peptide
  Seed: PRMCSLMQGSTLPRRSGAAGA
PRMFSLIQGSTVPRRSGAAGA

SEQ ID NO: 120959 - protein, 21 aa, Artificial Sequence
  Description of Artificial Sequence: Synthetic peptide
  Seed: PRMCSLMQGSTLPRRSGAAGA
PRMFSLIQNSTAPRRSGAAGA

SEQ ID NO: 120960 - protein, 21 aa, Artificial Sequence
  Description of Artificial Sequence: Synthetic peptide
  Seed: PRMCSLMQGSTLPRRSGAAGA
PRMFSLIQNSTIPRRSGAAGA

SEQ ID NO: 120961 - protein, 21 aa, Artificial Sequence
  Description of Artificial Sequence: Synthetic peptide
  Seed: PRMCSLMQGSTLPRRSGAAGA
PRMFSLIQNSTLPRRSGAAGA

SEQ ID NO: 120962 - protein, 21 aa, Artificial Sequence
  Description of Artificial Sequence: Synthetic peptide
  Seed: PRMCSLMQGSTLPRRSGAAGA
PRMFSLIQNSTVPRRSGAAGA

SEQ ID NO: 120963 - protein, 21 aa, Artificial Sequence
  Description of Artificial Sequence: Synthetic peptide
  Seed: PRMCSLMQGSTLPRRSGAAGA
PRMFSLIQPSTAPRRSGAAGA

SEQ ID NO: 120964 - protein, 21 aa, Artificial Sequence
  Description of Artificial Sequence: Synthetic peptide
  Seed: PRMCSLMQGSTLPRRSGAAGA
PRMFSLIQPSTIPRRSGAAGA

SEQ ID NO: 120965 - protein, 21 aa, Artificial Sequence
  Description of Artificial Sequence: Synthetic peptide
  Seed: PRMCSLMQGSTLPRRSGAAGA
PRMFSLIQPSTLPRRSGAAGA

SEQ ID NO: 120966 - protein, 21 aa, Artificial Sequence
  Description of Artificial Sequence: Synthetic peptide
  Seed: PRMCSLMQGSTLPRRSGAAGA
PRMFSLIQPSTMPRRSGAAGA

SEQ ID NO: 120967 - protein, 21 aa, Artificial Sequence
  Description of Artificial Sequence: Synthetic peptide
  Seed: PRMCSLMQGSTLPRRSGAAGA
PRMFSLIQPSTSPRRSGAAGA

SEQ ID NO: 120968 - protein, 21 aa, Artificial Sequence
  Description of Artificial Sequence: Synthetic peptide
  Seed: PRMCSLMQGSTLPRRSGAAGA
PRMFSLIQPSTTPRRSGAAGA

SEQ ID NO: 120969 - protein, 21 aa, Artificial Sequence
  Description of Artificial Sequence: Synthetic peptide
  Seed: PRMCSLMQGSTLPRRSGAAGA
PRMFSLIQPSTVPRRSGAAGA

SEQ ID NO: 120970 - protein, 21 aa, Artificial Sequence
  Description of Artificial Sequence: Synthetic peptide
  Seed: PRMCSLMQGSTLPRRSGAAGA
PRMFSLIQSSTAPRRSGAAGA

SEQ ID NO: 120971 - protein, 21 aa, Artificial Sequence
  Description of Artificial Sequence: Synthetic peptide
  Seed: PRMCSLMQGSTLPRRSGAAGA
PRMFSLIQSSTIPRRSGAAGA

SEQ ID NO: 120972 - protein, 21 aa, Artificial Sequence
  Description of Artificial Sequence: Synthetic peptide
  Seed: PRMCSLMQGSTLPRRSGAAGA
PRMFSLIQSSTLPRRSGAAGA

SEQ ID NO: 120973 - protein, 21 aa, Artificial Sequence
  Description of Artificial Sequence: Synthetic peptide
  Seed: PRMCSLMQGSTLPRRSGAAGA
PRMFSLIQSSTMPRRSGAAGA

SEQ ID NO: 120974 - protein, 21 aa, Artificial Sequence
  Description of Artificial Sequence: Synthetic peptide
  Seed: PRMCSLMQGSTLPRRSGAAGA
PRMFSLIQSSTSPRRSGAAGA

SEQ ID NO: 120975 - protein, 21 aa, Artificial Sequence
  Description of Artificial Sequence: Synthetic peptide
  Seed: PRMCSLMQGSTLPRRSGAAGA
PRMFSLIQSSTTPRRSGAAGA

SEQ ID NO: 120976 - protein, 21 aa, Artificial Sequence
  Description of Artificial Sequence: Synthetic peptide
  Seed: PRMCSLMQGSTLPRRSGAAGA
PRMFSLIQSSTVPRRSGAAGA

SEQ ID NO: 120977 - protein, 21 aa, Artificial Sequence
  Description of Artificial Sequence: Synthetic peptide
  Seed: PRMCSLMQGSTLPRRSGAAGA
PRMFSLIQTSTAPRRSGAAGA

SEQ ID NO: 120978 - protein, 21 aa, Artificial Sequence
  Description of Artificial Sequence: Synthetic peptide
  Seed: PRMCSLMQGSTLPRRSGAAGA
PRMFSLIQTSTIPRRSGAAGA

SEQ ID NO: 120979 - protein, 21 aa, Artificial Sequence
  Description of Artificial Sequence: Synthetic peptide
  Seed: PRMCSLMQGSTLPRRSGAAGA
PRMFSLIQTSTLPRRSGAAGA

SEQ ID NO: 120980 - protein, 21 aa, Artificial Sequence
  Description of Artificial Sequence: Synthetic peptide
  Seed: PRMCSLMQGSTLPRRSGAAGA
PRMFSLIQTSTVPRRSGAAGA

SEQ ID NO: 120981 - protein, 21 aa, Artificial Sequence
  Description of Artificial Sequence: Synthetic peptide
  Seed: PRMCSLMQGSTLPRRSGAAGA
PRMFSLLQASTAPRRSGAAGA

SEQ ID NO: 120982 - protein, 21 aa, Artificial Sequence
  Description of Artificial Sequence: Synthetic peptide
  Seed: PRMCSLMQGSTLPRRSGAAGA
PRMFSLLQASTCPRRSGAAGA

SEQ ID NO: 120983 - protein, 21 aa, Artificial Sequence
  Description of Artificial Sequence: Synthetic peptide
  Seed: PRMCSLMQGSTLPRRSGAAGA
PRMFSLLQASTFPRRSGAAGA

SEQ ID NO: 120984 - protein, 21 aa, Artificial Sequence
  Description of Artificial Sequence: Synthetic peptide
  Seed: PRMCSLMQGSTLPRRSGAAGA
PRMFSLLQASTGPRRSGAAGA

SEQ ID NO: 120985 - protein, 21 aa, Artificial Sequence
  Description of Artificial Sequence: Synthetic peptide
  Seed: PRMCSLMQGSTLPRRSGAAGA
PRMFSLLQASTIPRRSGAAGA

SEQ ID NO: 120986 - protein, 21 aa, Artificial Sequence
  Description of Artificial Sequence: Synthetic peptide
  Seed: PRMCSLMQGSTLPRRSGAAGA
PRMFSLLQASTLPRRSGAAGA

SEQ ID NO: 120987 - protein, 21 aa, Artificial Sequence
  Description of Artificial Sequence: Synthetic peptide
  Seed: PRMCSLMQGSTLPRRSGAAGA
PRMFSLLQASTMPRRSGAAGA

SEQ ID NO: 120988 - protein, 21 aa, Artificial Sequence
  Description of Artificial Sequence: Synthetic peptide
  Seed: PRMCSLMQGSTLPRRSGAAGA
PRMFSLLQASTNPRRSGAAGA

SEQ ID NO: 120989 - protein, 21 aa, Artificial Sequence
  Description of Artificial Sequence: Synthetic peptide
  Seed: PRMCSLMQGSTLPRRSGAAGA
PRMFSLLQASTSPRRSGAAGA

SEQ ID NO: 120990 - protein, 21 aa, Artificial Sequence
  Description of Artificial Sequence: Synthetic peptide
  Seed: PRMCSLMQGSTLPRRSGAAGA
PRMFSLLQASTTPRRSGAAGA

SEQ ID NO: 120991 - protein, 21 aa, Artificial Sequence
  Description of Artificial Sequence: Synthetic peptide
  Seed: PRMCSLMQGSTLPRRSGAAGA
PRMFSLLQASTVPRRSGAAGA

SEQ ID NO: 120992 - protein, 21 aa, Artificial Sequence
  Description of Artificial Sequence: Synthetic peptide
  Seed: PRMCSLMQGSTLPRRSGAAGA
PRMFSLLQGSTAPRRSGAAGA

SEQ ID NO: 120993 - protein, 21 aa, Artificial Sequence
  Description of Artificial Sequence: Synthetic peptide
  Seed: PRMCSLMQGSTLPRRSGAAGA
PRMFSLLQGSTCPRRSGAAGA

SEQ ID NO: 120994 - protein, 21 aa, Artificial Sequence
  Description of Artificial Sequence: Synthetic peptide
  Seed: PRMCSLMQGSTLPRRSGAAGA
PRMFSLLQGSTFPRRSGAAGA

SEQ ID NO: 120995 - protein, 21 aa, Artificial Sequence
  Description of Artificial Sequence: Synthetic peptide
  Seed: PRMCSLMQGSTLPRRSGAAGA
PRMFSLLQGSTGPRRSGAAGA

SEQ ID NO: 120996 - protein, 21 aa, Artificial Sequence
  Description of Artificial Sequence: Synthetic peptide
  Seed: PRMCSLMQGSTLPRRSGAAGA
PRMFSLLQGSTIPRRSGAAGA

SEQ ID NO: 120997 - protein, 21 aa, Artificial Sequence
  Description of Artificial Sequence: Synthetic peptide
  Seed: PRMCSLMQGSTLPRRSGAAGA
PRMFSLLQGSTLPRRSGAAGA

SEQ ID NO: 120998 - protein, 21 aa, Artificial Sequence
  Description of Artificial Sequence: Synthetic peptide
  Seed: PRMCSLMQGSTLPRRSGAAGA
PRMFSLLQGSTMPRRSGAAGA

SEQ ID NO: 120999 - protein, 21 aa, Artificial Sequence
  Description of Artificial Sequence: Synthetic peptide
  Seed: PRMCSLMQGSTLPRRSGAAGA
PRMFSLLQGSTNPRRSGAAGA

SEQ ID NO: 121000 - protein, 21 aa, Artificial Sequence
  Description of Artificial Sequence: Synthetic peptide
  Seed: PRMCSLMQGSTLPRRSGAAGA
PRMFSLLQGSTSPRRSGAAGA

SEQ ID NO: 121001 - protein, 21 aa, Artificial Sequence
  Description of Artificial Sequence: Synthetic peptide
  Seed: PRMCSLMQGSTLPRRSGAAGA
PRMFSLLQGSTTPRRSGAAGA

SEQ ID NO: 121002 - protein, 21 aa, Artificial Sequence
  Description of Artificial Sequence: Synthetic peptide
  Seed: PRMCSLMQGSTLPRRSGAAGA
PRMFSLLQGSTVPRRSGAAGA

SEQ ID NO: 121003 - protein, 21 aa, Artificial Sequence
  Description of Artificial Sequence: Synthetic peptide
  Seed: PRMCSLMQGSTLPRRSGAAGA
PRMFSLLQISTAPRRSGAAGA

SEQ ID NO: 121004 - protein, 21 aa, Artificial Sequence
  Description of Artificial Sequence: Synthetic peptide
  Seed: PRMCSLMQGSTLPRRSGAAGA
PRMFSLLQISTVPRRSGAAGA

SEQ ID NO: 121005 - protein, 21 aa, Artificial Sequence
  Description of Artificial Sequence: Synthetic peptide
  Seed: PRMCSLMQGSTLPRRSGAAGA
PRMFSLLQNSTAPRRSGAAGA

SEQ ID NO: 121006 - protein, 21 aa, Artificial Sequence
  Description of Artificial Sequence: Synthetic peptide
  Seed: PRMCSLMQGSTLPRRSGAAGA
PRMFSLLQNSTIPRRSGAAGA

SEQ ID NO: 121007 - protein, 21 aa, Artificial Sequence
  Description of Artificial Sequence: Synthetic peptide
  Seed: PRMCSLMQGSTLPRRSGAAGA
PRMFSLLQNSTLPRRSGAAGA

SEQ ID NO: 121008 - protein, 21 aa, Artificial Sequence
  Description of Artificial Sequence: Synthetic peptide
  Seed: PRMCSLMQGSTLPRRSGAAGA
PRMFSLLQNSTMPRRSGAAGA

SEQ ID NO: 121009 - protein, 21 aa, Artificial Sequence
  Description of Artificial Sequence: Synthetic peptide
  Seed: PRMCSLMQGSTLPRRSGAAGA
PRMFSLLQNSTSPRRSGAAGA

SEQ ID NO: 121010 - protein, 21 aa, Artificial Sequence
  Description of Artificial Sequence: Synthetic peptide
  Seed: PRMCSLMQGSTLPRRSGAAGA
PRMFSLLQNSTTPRRSGAAGA

SEQ ID NO: 121011 - protein, 21 aa, Artificial Sequence
  Description of Artificial Sequence: Synthetic peptide
  Seed: PRMCSLMQGSTLPRRSGAAGA
PRMFSLLQNSTVPRRSGAAGA

SEQ ID NO: 121012 - protein, 21 aa, Artificial Sequence
  Description of Artificial Sequence: Synthetic peptide
  Seed: PRMCSLMQGSTLPRRSGAAGA
PRMFSLLQPSTAPRRSGAAGA

SEQ ID NO: 121013 - protein, 21 aa, Artificial Sequence
  Description of Artificial Sequence: Synthetic peptide
  Seed: PRMCSLMQGSTLPRRSGAAGA
PRMFSLLQPSTGPRRSGAAGA

SEQ ID NO: 121014 - protein, 21 aa, Artificial Sequence
  Description of Artificial Sequence: Synthetic peptide
  Seed: PRMCSLMQGSTLPRRSGAAGA
PRMFSLLQPSTIPRRSGAAGA

SEQ ID NO: 121015 - protein, 21 aa, Artificial Sequence
  Description of Artificial Sequence: Synthetic peptide
  Seed: PRMCSLMQGSTLPRRSGAAGA
PRMFSLLQPSTLPRRSGAAGA

SEQ ID NO: 121016 - protein, 21 aa, Artificial Sequence
  Description of Artificial Sequence: Synthetic peptide
  Seed: PRMCSLMQGSTLPRRSGAAGA
PRMFSLLQPSTMPRRSGAAGA

SEQ ID NO: 121017 - protein, 21 aa, Artificial Sequence
  Description of Artificial Sequence: Synthetic peptide
  Seed: PRMCSLMQGSTLPRRSGAAGA
PRMFSLLQPSTSPRRSGAAGA

SEQ ID NO: 121018 - protein, 21 aa, Artificial Sequence
  Description of Artificial Sequence: Synthetic peptide
  Seed: PRMCSLMQGSTLPRRSGAAGA
PRMFSLLQPSTTPRRSGAAGA

SEQ ID NO: 121019 - protein, 21 aa, Artificial Sequence
  Description of Artificial Sequence: Synthetic peptide
  Seed: PRMCSLMQGSTLPRRSGAAGA
PRMFSLLQPSTVPRRSGAAGA

SEQ ID NO: 121020 - protein, 21 aa, Artificial Sequence
  Description of Artificial Sequence: Synthetic peptide
  Seed: PRMCSLMQGSTLPRRSGAAGA
PRMFSLLQSSTAPRRSGAAGA

SEQ ID NO: 121021 - protein, 21 aa, Artificial Sequence
  Description of Artificial Sequence: Synthetic peptide
  Seed: PRMCSLMQGSTLPRRSGAAGA
PRMFSLLQSSTCPRRSGAAGA

SEQ ID NO: 121022 - protein, 21 aa, Artificial Sequence
  Description of Artificial Sequence: Synthetic peptide
  Seed: PRMCSLMQGSTLPRRSGAAGA
PRMFSLLQSSTGPRRSGAAGA

SEQ ID NO: 121023 - protein, 21 aa, Artificial Sequence
  Description of Artificial Sequence: Synthetic peptide
  Seed: PRMCSLMQGSTLPRRSGAAGA
PRMFSLLQSSTIPRRSGAAGA

SEQ ID NO: 121024 - protein, 21 aa, Artificial Sequence
  Description of Artificial Sequence: Synthetic peptide
  Seed: PRMCSLMQGSTLPRRSGAAGA
PRMFSLLQSSTLPRRSGAAGA

SEQ ID NO: 121025 - protein, 21 aa, Artificial Sequence
  Description of Artificial Sequence: Synthetic peptide
  Seed: PRMCSLMQGSTLPRRSGAAGA
PRMFSLLQSSTMPRRSGAAGA

SEQ ID NO: 121026 - protein, 21 aa, Artificial Sequence
  Description of Artificial Sequence: Synthetic peptide
  Seed: PRMCSLMQGSTLPRRSGAAGA
PRMFSLLQSSTSPRRSGAAGA

SEQ ID NO: 121027 - protein, 21 aa, Artificial Sequence
  Description of Artificial Sequence: Synthetic peptide
  Seed: PRMCSLMQGSTLPRRSGAAGA
PRMFSLLQSSTTPRRSGAAGA

SEQ ID NO: 121028 - protein, 21 aa, Artificial Sequence
  Description of Artificial Sequence: Synthetic peptide
  Seed: PRMCSLMQGSTLPRRSGAAGA
PRMFSLLQSSTVPRRSGAAGA

SEQ ID NO: 121029 - protein, 21 aa, Artificial Sequence
  Description of Artificial Sequence: Synthetic peptide
  Seed: PRMCSLMQGSTLPRRSGAAGA
PRMFSLLQTSTAPRRSGAAGA

SEQ ID NO: 121030 - protein, 21 aa, Artificial Sequence
  Description of Artificial Sequence: Synthetic peptide
  Seed: PRMCSLMQGSTLPRRSGAAGA
PRMFSLLQTSTIPRRSGAAGA

SEQ ID NO: 121031 - protein, 21 aa, Artificial Sequence
  Description of Artificial Sequence: Synthetic peptide
  Seed: PRMCSLMQGSTLPRRSGAAGA
PRMFSLLQTSTLPRRSGAAGA

SEQ ID NO: 121032 - protein, 21 aa, Artificial Sequence
  Description of Artificial Sequence: Synthetic peptide
  Seed: PRMCSLMQGSTLPRRSGAAGA
PRMFSLLQTSTMPRRSGAAGA

SEQ ID NO: 121033 - protein, 21 aa, Artificial Sequence
  Description of Artificial Sequence: Synthetic peptide
  Seed: PRMCSLMQGSTLPRRSGAAGA
PRMFSLLQTSTSPRRSGAAGA

SEQ ID NO: 121034 - protein, 21 aa, Artificial Sequence
  Description of Artificial Sequence: Synthetic peptide
  Seed: PRMCSLMQGSTLPRRSGAAGA
PRMFSLLQTSTTPRRSGAAGA

SEQ ID NO: 121035 - protein, 21 aa, Artificial Sequence
  Description of Artificial Sequence: Synthetic peptide
  Seed: PRMCSLMQGSTLPRRSGAAGA
PRMFSLLQTSTVPRRSGAAGA

SEQ ID NO: 121036 - protein, 21 aa, Artificial Sequence
  Description of Artificial Sequence: Synthetic peptide
  Seed: PRMCSLMQGSTLPRRSGAAGA
PRMFSLLQVSTAPRRSGAAGA

SEQ ID NO: 121037 - protein, 21 aa, Artificial Sequence
  Description of Artificial Sequence: Synthetic peptide
  Seed: PRMCSLMQGSTLPRRSGAAGA
PRMFSLLQVSTIPRRSGAAGA

SEQ ID NO: 121038 - protein, 21 aa, Artificial Sequence
  Description of Artificial Sequence: Synthetic peptide
  Seed: PRMCSLMQGSTLPRRSGAAGA
PRMFSLLQVSTLPRRSGAAGA

SEQ ID NO: 121039 - protein, 21 aa, Artificial Sequence
  Description of Artificial Sequence: Synthetic peptide
  Seed: PRMCSLMQGSTLPRRSGAAGA
PRMFSLLQVSTTPRRSGAAGA

SEQ ID NO: 121040 - protein, 21 aa, Artificial Sequence
  Description of Artificial Sequence: Synthetic peptide
  Seed: PRMCSLMQGSTLPRRSGAAGA
PRMFSLLQVSTVPRRSGAAGA

SEQ ID NO: 121041 - protein, 21 aa, Artificial Sequence
  Description of Artificial Sequence: Synthetic peptide
  Seed: PRMCSLMQGSTLPRRSGAAGA
PRMFSLMQASTAPRRSGAAGA

SEQ ID NO: 121042 - protein, 21 aa, Artificial Sequence
  Description of Artificial Sequence: Synthetic peptide
  Seed: PRMCSLMQGSTLPRRSGAAGA
PRMFSLMQASTCPRRSGAAGA

SEQ ID NO: 121043 - protein, 21 aa, Artificial Sequence
  Description of Artificial Sequence: Synthetic peptide
  Seed: PRMCSLMQGSTLPRRSGAAGA
PRMFSLMQASTFPRRSGAAGA

SEQ ID NO: 121044 - protein, 21 aa, Artificial Sequence
  Description of Artificial Sequence: Synthetic peptide
  Seed: PRMCSLMQGSTLPRRSGAAGA
PRMFSLMQASTGPRRSGAAGA

SEQ ID NO: 121045 - protein, 21 aa, Artificial Sequence
  Description of Artificial Sequence: Synthetic peptide
  Seed: PRMCSLMQGSTLPRRSGAAGA
PRMFSLMQASTHPRRSGAAGA

SEQ ID NO: 121046 - protein, 21 aa, Artificial Sequence
  Description of Artificial Sequence: Synthetic peptide
  Seed: PRMCSLMQGSTLPRRSGAAGA
PRMFSLMQASTIPRRSGAAGA

SEQ ID NO: 121047 - protein, 21 aa, Artificial Sequence
  Description of Artificial Sequence: Synthetic peptide
  Seed: PRMCSLMQGSTLPRRSGAAGA
PRMFSLMQASTLPRRSGAAGA

SEQ ID NO: 121048 - protein, 21 aa, Artificial Sequence
  Description of Artificial Sequence: Synthetic peptide
  Seed: PRMCSLMQGSTLPRRSGAAGA
PRMFSLMQASTMPRRSGAAGA

SEQ ID NO: 121049 - protein, 21 aa, Artificial Sequence
  Description of Artificial Sequence: Synthetic peptide
  Seed: PRMCSLMQGSTLPRRSGAAGA
PRMFSLMQASTNPRRSGAAGA

SEQ ID NO: 121050 - protein, 21 aa, Artificial Sequence
  Description of Artificial Sequence: Synthetic peptide
  Seed: PRMCSLMQGSTLPRRSGAAGA
PRMFSLMQASTSPRRSGAAGA

SEQ ID NO: 121051 - protein, 21 aa, Artificial Sequence
  Description of Artificial Sequence: Synthetic peptide
  Seed: PRMCSLMQGSTLPRRSGAAGA
PRMFSLMQASTTPRRSGAAGA

SEQ ID NO: 121052 - protein, 21 aa, Artificial Sequence
  Description of Artificial Sequence: Synthetic peptide
  Seed: PRMCSLMQGSTLPRRSGAAGA
PRMFSLMQASTVPRRSGAAGA

SEQ ID NO: 121053 - protein, 21 aa, Artificial Sequence
  Description of Artificial Sequence: Synthetic peptide
  Seed: PRMCSLMQGSTLPRRSGAAGA
PRMFSLMQGSTAPRRSGAAGA

SEQ ID NO: 121054 - protein, 21 aa, Artificial Sequence
  Description of Artificial Sequence: Synthetic peptide
  Seed: PRMCSLMQGSTLPRRSGAAGA
PRMFSLMQGSTCPRRSGAAGA

SEQ ID NO: 121055 - protein, 21 aa, Artificial Sequence
  Description of Artificial Sequence: Synthetic peptide
  Seed: PRMCSLMQGSTLPRRSGAAGA
PRMFSLMQGSTFPRRSGAAGA

SEQ ID NO: 121056 - protein, 21 aa, Artificial Sequence
  Description of Artificial Sequence: Synthetic peptide
  Seed: PRMCSLMQGSTLPRRSGAAGA
PRMFSLMQGSTGPRRSGAAGA

SEQ ID NO: 121057 - protein, 21 aa, Artificial Sequence
  Description of Artificial Sequence: Synthetic peptide
  Seed: PRMCSLMQGSTLPRRSGAAGA
PRMFSLMQGSTIPRRSGAAGA

SEQ ID NO: 121058 - protein, 21 aa, Artificial Sequence
  Description of Artificial Sequence: Synthetic peptide
  Seed: PRMCSLMQGSTLPRRSGAAGA
PRMFSLMQGSTLPRRSGAAGA

SEQ ID NO: 121059 - protein, 21 aa, Artificial Sequence
  Description of Artificial Sequence: Synthetic peptide
  Seed: PRMCSLMQGSTLPRRSGAAGA
PRMFSLMQGSTMPRRSGAAGA

SEQ ID NO: 121060 - protein, 21 aa, Artificial Sequence
  Description of Artificial Sequence: Synthetic peptide
  Seed: PRMCSLMQGSTLPRRSGAAGA
PRMFSLMQGSTNPRRSGAAGA

SEQ ID NO: 121061 - protein, 21 aa, Artificial Sequence
  Description of Artificial Sequence: Synthetic peptide
  Seed: PRMCSLMQGSTLPRRSGAAGA
PRMFSLMQGSTSPRRSGAAGA

SEQ ID NO: 121062 - protein, 21 aa, Artificial Sequence
  Description of Artificial Sequence: Synthetic peptide
  Seed: PRMCSLMQGSTLPRRSGAAGA
PRMFSLMQGSTTPRRSGAAGA

SEQ ID NO: 121063 - protein, 21 aa, Artificial Sequence
  Description of Artificial Sequence: Synthetic peptide
  Seed: PRMCSLMQGSTLPRRSGAAGA
PRMFSLMQGSTVPRRSGAAGA

SEQ ID NO: 121064 - protein, 21 aa, Artificial Sequence
  Description of Artificial Sequence: Synthetic peptide
  Seed: PRMCSLMQGSTLPRRSGAAGA
PRMFSLMQISTAPRRSGAAGA

SEQ ID NO: 121065 - protein, 21 aa, Artificial Sequence
  Description of Artificial Sequence: Synthetic peptide
  Seed: PRMCSLMQGSTLPRRSGAAGA
PRMFSLMQISTVPRRSGAAGA

SEQ ID NO: 121066 - protein, 21 aa, Artificial Sequence
  Description of Artificial Sequence: Synthetic peptide
  Seed: PRMCSLMQGSTLPRRSGAAGA
PRMFSLMQNSTAPRRSGAAGA

SEQ ID NO: 121067 - protein, 21 aa, Artificial Sequence
  Description of Artificial Sequence: Synthetic peptide
  Seed: PRMCSLMQGSTLPRRSGAAGA
PRMFSLMQNSTIPRRSGAAGA

SEQ ID NO: 121068 - protein, 21 aa, Artificial Sequence
  Description of Artificial Sequence: Synthetic peptide
  Seed: PRMCSLMQGSTLPRRSGAAGA
PRMFSLMQNSTLPRRSGAAGA

SEQ ID NO: 121069 - protein, 21 aa, Artificial Sequence
  Description of Artificial Sequence: Synthetic peptide
  Seed: PRMCSLMQGSTLPRRSGAAGA
PRMFSLMQNSTMPRRSGAAGA

SEQ ID NO: 121070 - protein, 21 aa, Artificial Sequence
  Description of Artificial Sequence: Synthetic peptide
  Seed: PRMCSLMQGSTLPRRSGAAGA
PRMFSLMQNSTSPRRSGAAGA

SEQ ID NO: 121071 - protein, 21 aa, Artificial Sequence
  Description of Artificial Sequence: Synthetic peptide
  Seed: PRMCSLMQGSTLPRRSGAAGA
PRMFSLMQNSTTPRRSGAAGA

SEQ ID NO: 121072 - protein, 21 aa, Artificial Sequence
  Description of Artificial Sequence: Synthetic peptide
  Seed: PRMCSLMQGSTLPRRSGAAGA
PRMFSLMQNSTVPRRSGAAGA

SEQ ID NO: 121073 - protein, 21 aa, Artificial Sequence
  Description of Artificial Sequence: Synthetic peptide
  Seed: PRMCSLMQGSTLPRRSGAAGA
PRMFSLMQPSTAPRRSGAAGA

SEQ ID NO: 121074 - protein, 21 aa, Artificial Sequence
  Description of Artificial Sequence: Synthetic peptide
  Seed: PRMCSLMQGSTLPRRSGAAGA
PRMFSLMQPSTGPRRSGAAGA

SEQ ID NO: 121075 - protein, 21 aa, Artificial Sequence
  Description of Artificial Sequence: Synthetic peptide
  Seed: PRMCSLMQGSTLPRRSGAAGA
PRMFSLMQPSTIPRRSGAAGA

SEQ ID NO: 121076 - protein, 21 aa, Artificial Sequence
  Description of Artificial Sequence: Synthetic peptide
  Seed: PRMCSLMQGSTLPRRSGAAGA
PRMFSLMQPSTLPRRSGAAGA

SEQ ID NO: 121077 - protein, 21 aa, Artificial Sequence
  Description of Artificial Sequence: Synthetic peptide
  Seed: PRMCSLMQGSTLPRRSGAAGA
PRMFSLMQPSTMPRRSGAAGA

SEQ ID NO: 121078 - protein, 21 aa, Artificial Sequence
  Description of Artificial Sequence: Synthetic peptide
  Seed: PRMCSLMQGSTLPRRSGAAGA
PRMFSLMQPSTSPRRSGAAGA

SEQ ID NO: 121079 - protein, 21 aa, Artificial Sequence
  Description of Artificial Sequence: Synthetic peptide
  Seed: PRMCSLMQGSTLPRRSGAAGA
PRMFSLMQPSTTPRRSGAAGA

SEQ ID NO: 121080 - protein, 21 aa, Artificial Sequence
  Description of Artificial Sequence: Synthetic peptide
  Seed: PRMCSLMQGSTLPRRSGAAGA
PRMFSLMQPSTVPRRSGAAGA

SEQ ID NO: 121081 - protein, 21 aa, Artificial Sequence
  Description of Artificial Sequence: Synthetic peptide
  Seed: PRMCSLMQGSTLPRRSGAAGA
PRMFSLMQSSTAPRRSGAAGA

SEQ ID NO: 121082 - protein, 21 aa, Artificial Sequence
  Description of Artificial Sequence: Synthetic peptide
  Seed: PRMCSLMQGSTLPRRSGAAGA
PRMFSLMQSSTCPRRSGAAGA

SEQ ID NO: 121083 - protein, 21 aa, Artificial Sequence
  Description of Artificial Sequence: Synthetic peptide
  Seed: PRMCSLMQGSTLPRRSGAAGA
PRMFSLMQSSTGPRRSGAAGA

SEQ ID NO: 121084 - protein, 21 aa, Artificial Sequence
  Description of Artificial Sequence: Synthetic peptide
  Seed: PRMCSLMQGSTLPRRSGAAGA
PRMFSLMQSSTIPRRSGAAGA

SEQ ID NO: 121085 - protein, 21 aa, Artificial Sequence
  Description of Artificial Sequence: Synthetic peptide
  Seed: PRMCSLMQGSTLPRRSGAAGA
PRMFSLMQSSTLPRRSGAAGA

SEQ ID NO: 121086 - protein, 21 aa, Artificial Sequence
  Description of Artificial Sequence: Synthetic peptide
  Seed: PRMCSLMQGSTLPRRSGAAGA
PRMFSLMQSSTMPRRSGAAGA

SEQ ID NO: 121087 - protein, 21 aa, Artificial Sequence
  Description of Artificial Sequence: Synthetic peptide
  Seed: PRMCSLMQGSTLPRRSGAAGA
PRMFSLMQSSTSPRRSGAAGA

SEQ ID NO: 121088 - protein, 21 aa, Artificial Sequence
  Description of Artificial Sequence: Synthetic peptide
  Seed: PRMCSLMQGSTLPRRSGAAGA
PRMFSLMQSSTTPRRSGAAGA

SEQ ID NO: 121089 - protein, 21 aa, Artificial Sequence
  Description of Artificial Sequence: Synthetic peptide
  Seed: PRMCSLMQGSTLPRRSGAAGA
PRMFSLMQSSTVPRRSGAAGA

SEQ ID NO: 121090 - protein, 21 aa, Artificial Sequence
  Description of Artificial Sequence: Synthetic peptide
  Seed: PRMCSLMQGSTLPRRSGAAGA
PRMFSLMQTSTAPRRSGAAGA

SEQ ID NO: 121091 - protein, 21 aa, Artificial Sequence
  Description of Artificial Sequence: Synthetic peptide
  Seed: PRMCSLMQGSTLPRRSGAAGA
PRMFSLMQTSTIPRRSGAAGA

SEQ ID NO: 121092 - protein, 21 aa, Artificial Sequence
  Description of Artificial Sequence: Synthetic peptide
  Seed: PRMCSLMQGSTLPRRSGAAGA
PRMFSLMQTSTLPRRSGAAGA

SEQ ID NO: 121093 - protein, 21 aa, Artificial Sequence
  Description of Artificial Sequence: Synthetic peptide
  Seed: PRMCSLMQGSTLPRRSGAAGA
PRMFSLMQTSTMPRRSGAAGA

SEQ ID NO: 121094 - protein, 21 aa, Artificial Sequence
  Description of Artificial Sequence: Synthetic peptide
  Seed: PRMCSLMQGSTLPRRSGAAGA
PRMFSLMQTSTSPRRSGAAGA

SEQ ID NO: 121095 - protein, 21 aa, Artificial Sequence
  Description of Artificial Sequence: Synthetic peptide
  Seed: PRMCSLMQGSTLPRRSGAAGA
PRMFSLMQTSTTPRRSGAAGA

SEQ ID NO: 121096 - protein, 21 aa, Artificial Sequence
  Description of Artificial Sequence: Synthetic peptide
  Seed: PRMCSLMQGSTLPRRSGAAGA
PRMFSLMQTSTVPRRSGAAGA

SEQ ID NO: 121097 - protein, 21 aa, Artificial Sequence
  Description of Artificial Sequence: Synthetic peptide
  Seed: PRMCSLMQGSTLPRRSGAAGA
PRMFSLMQVSTAPRRSGAAGA

SEQ ID NO: 121098 - protein, 21 aa, Artificial Sequence
  Description of Artificial Sequence: Synthetic peptide
  Seed: PRMCSLMQGSTLPRRSGAAGA
PRMFSLMQVSTIPRRSGAAGA

SEQ ID NO: 121099 - protein, 21 aa, Artificial Sequence
  Description of Artificial Sequence: Synthetic peptide
  Seed: PRMCSLMQGSTLPRRSGAAGA
PRMFSLMQVSTLPRRSGAAGA

SEQ ID NO: 121100 - protein, 21 aa, Artificial Sequence
  Description of Artificial Sequence: Synthetic peptide
  Seed: PRMCSLMQGSTLPRRSGAAGA
PRMFSLMQVSTMPRRSGAAGA

SEQ ID NO: 121101 - protein, 21 aa, Artificial Sequence
  Description of Artificial Sequence: Synthetic peptide
  Seed: PRMCSLMQGSTLPRRSGAAGA
PRMFSLMQVSTSPRRSGAAGA

SEQ ID NO: 121102 - protein, 21 aa, Artificial Sequence
  Description of Artificial Sequence: Synthetic peptide
  Seed: PRMCSLMQGSTLPRRSGAAGA
PRMFSLMQVSTTPRRSGAAGA

SEQ ID NO: 121103 - protein, 21 aa, Artificial Sequence
  Description of Artificial Sequence: Synthetic peptide
  Seed: PRMCSLMQGSTLPRRSGAAGA
PRMFSLMQVSTVPRRSGAAGA

SEQ ID NO: 121104 - protein, 21 aa, Artificial Sequence
  Description of Artificial Sequence: Synthetic peptide
  Seed: PRMCSLMQGSTLPRRSGAAGA
PRMFSLNQASTIPRRSGAAGA

SEQ ID NO: 121105 - protein, 21 aa, Artificial Sequence
  Description of Artificial Sequence: Synthetic peptide
  Seed: PRMCSLMQGSTLPRRSGAAGA
PRMFSLNQASTLPRRSGAAGA

SEQ ID NO: 121106 - protein, 21 aa, Artificial Sequence
  Description of Artificial Sequence: Synthetic peptide
  Seed: PRMCSLMQGSTLPRRSGAAGA
PRMFSLNQASTVPRRSGAAGA

SEQ ID NO: 121107 - protein, 21 aa, Artificial Sequence
  Description of Artificial Sequence: Synthetic peptide
  Seed: PRMCSLMQGSTLPRRSGAAGA
PRMFSLQQASTAPRRSGAAGA

SEQ ID NO: 121108 - protein, 21 aa, Artificial Sequence
  Description of Artificial Sequence: Synthetic peptide
  Seed: PRMCSLMQGSTLPRRSGAAGA
PRMFSLQQASTIPRRSGAAGA

SEQ ID NO: 121109 - protein, 21 aa, Artificial Sequence
  Description of Artificial Sequence: Synthetic peptide
  Seed: PRMCSLMQGSTLPRRSGAAGA
PRMFSLQQASTLPRRSGAAGA

SEQ ID NO: 121110 - protein, 21 aa, Artificial Sequence
  Description of Artificial Sequence: Synthetic peptide
  Seed: PRMCSLMQGSTLPRRSGAAGA
PRMFSLQQASTMPRRSGAAGA

SEQ ID NO: 121111 - protein, 21 aa, Artificial Sequence
  Description of Artificial Sequence: Synthetic peptide
  Seed: PRMCSLMQGSTLPRRSGAAGA
PRMFSLQQASTSPRRSGAAGA

SEQ ID NO: 121112 - protein, 21 aa, Artificial Sequence
  Description of Artificial Sequence: Synthetic peptide
  Seed: PRMCSLMQGSTLPRRSGAAGA
PRMFSLQQASTTPRRSGAAGA

SEQ ID NO: 121113 - protein, 21 aa, Artificial Sequence
  Description of Artificial Sequence: Synthetic peptide
  Seed: PRMCSLMQGSTLPRRSGAAGA
PRMFSLQQASTVPRRSGAAGA

SEQ ID NO: 121114 - protein, 21 aa, Artificial Sequence
  Description of Artificial Sequence: Synthetic peptide
  Seed: PRMCSLMQGSTLPRRSGAAGA
PRMFSLQQGSTAPRRSGAAGA

SEQ ID NO: 121115 - protein, 21 aa, Artificial Sequence
  Description of Artificial Sequence: Synthetic peptide
  Seed: PRMCSLMQGSTLPRRSGAAGA
PRMFSLQQGSTIPRRSGAAGA

SEQ ID NO: 121116 - protein, 21 aa, Artificial Sequence
  Description of Artificial Sequence: Synthetic peptide
  Seed: PRMCSLMQGSTLPRRSGAAGA
PRMFSLQQGSTLPRRSGAAGA

SEQ ID NO: 121117 - protein, 21 aa, Artificial Sequence
  Description of Artificial Sequence: Synthetic peptide
  Seed: PRMCSLMQGSTLPRRSGAAGA
PRMFSLQQGSTVPRRSGAAGA

SEQ ID NO: 121118 - protein, 21 aa, Artificial Sequence
  Description of Artificial Sequence: Synthetic peptide
  Seed: PRMCSLMQGSTLPRRSGAAGA
PRMFSLQQPSTIPRRSGAAGA

SEQ ID NO: 121119 - protein, 21 aa, Artificial Sequence
  Description of Artificial Sequence: Synthetic peptide
  Seed: PRMCSLMQGSTLPRRSGAAGA
PRMFSLQQPSTLPRRSGAAGA

SEQ ID NO: 121120 - protein, 21 aa, Artificial Sequence
  Description of Artificial Sequence: Synthetic peptide
  Seed: PRMCSLMQGSTLPRRSGAAGA
PRMFSLQQPSTVPRRSGAAGA

SEQ ID NO: 121121 - protein, 21 aa, Artificial Sequence
  Description of Artificial Sequence: Synthetic peptide
  Seed: PRMCSLMQGSTLPRRSGAAGA
PRMFSLQQSSTAPRRSGAAGA

SEQ ID NO: 121122 - protein, 21 aa, Artificial Sequence
  Description of Artificial Sequence: Synthetic peptide
  Seed: PRMCSLMQGSTLPRRSGAAGA
PRMFSLQQSSTIPRRSGAAGA

SEQ ID NO: 121123 - protein, 21 aa, Artificial Sequence
  Description of Artificial Sequence: Synthetic peptide
  Seed: PRMCSLMQGSTLPRRSGAAGA
PRMFSLQQSSTLPRRSGAAGA

SEQ ID NO: 121124 - protein, 21 aa, Artificial Sequence
  Description of Artificial Sequence: Synthetic peptide
  Seed: PRMCSLMQGSTLPRRSGAAGA
PRMFSLQQSSTVPRRSGAAGA

SEQ ID NO: 121125 - protein, 21 aa, Artificial Sequence
  Description of Artificial Sequence: Synthetic peptide
  Seed: PRMCSLMQGSTLPRRSGAAGA
PRMFSLSQASTAPRRSGAAGA

SEQ ID NO: 121126 - protein, 21 aa, Artificial Sequence
  Description of Artificial Sequence: Synthetic peptide
  Seed: PRMCSLMQGSTLPRRSGAAGA
PRMFSLSQASTIPRRSGAAGA

SEQ ID NO: 121127 - protein, 21 aa, Artificial Sequence
  Description of Artificial Sequence: Synthetic peptide
  Seed: PRMCSLMQGSTLPRRSGAAGA
PRMFSLSQASTLPRRSGAAGA

SEQ ID NO: 121128 - protein, 21 aa, Artificial Sequence
  Description of Artificial Sequence: Synthetic peptide
  Seed: PRMCSLMQGSTLPRRSGAAGA
PRMFSLSQASTVPRRSGAAGA

SEQ ID NO: 121129 - protein, 21 aa, Artificial Sequence
  Description of Artificial Sequence: Synthetic peptide
  Seed: PRMCSLMQGSTLPRRSGAAGA
PRMFSLTQASTIPRRSGAAGA

SEQ ID NO: 121130 - protein, 21 aa, Artificial Sequence
  Description of Artificial Sequence: Synthetic peptide
  Seed: PRMCSLMQGSTLPRRSGAAGA
PRMFSLTQASTLPRRSGAAGA

SEQ ID NO: 121131 - protein, 21 aa, Artificial Sequence
  Description of Artificial Sequence: Synthetic peptide
  Seed: PRMCSLMQGSTLPRRSGAAGA
PRMFSLTQASTVPRRSGAAGA

SEQ ID NO: 121132 - protein, 21 aa, Artificial Sequence
  Description of Artificial Sequence: Synthetic peptide
  Seed: PRMCSLMQGSTLPRRSGAAGA
PRMFSLVQASTAPRRSGAAGA

SEQ ID NO: 121133 - protein, 21 aa, Artificial Sequence
  Description of Artificial Sequence: Synthetic peptide
  Seed: PRMCSLMQGSTLPRRSGAAGA
PRMFSLVQASTIPRRSGAAGA

SEQ ID NO: 121134 - protein, 21 aa, Artificial Sequence
  Description of Artificial Sequence: Synthetic peptide
  Seed: PRMCSLMQGSTLPRRSGAAGA
PRMFSLVQASTLPRRSGAAGA

SEQ ID NO: 121135 - protein, 21 aa, Artificial Sequence
  Description of Artificial Sequence: Synthetic peptide
  Seed: PRMCSLMQGSTLPRRSGAAGA
PRMFSLVQASTMPRRSGAAGA

SEQ ID NO: 121136 - protein, 21 aa, Artificial Sequence
  Description of Artificial Sequence: Synthetic peptide
  Seed: PRMCSLMQGSTLPRRSGAAGA
PRMFSLVQASTSPRRSGAAGA

SEQ ID NO: 121137 - protein, 21 aa, Artificial Sequence
  Description of Artificial Sequence: Synthetic peptide
  Seed: PRMCSLMQGSTLPRRSGAAGA
PRMFSLVQASTTPRRSGAAGA

SEQ ID NO: 121138 - protein, 21 aa, Artificial Sequence
  Description of Artificial Sequence: Synthetic peptide
  Seed: PRMCSLMQGSTLPRRSGAAGA
PRMFSLVQASTVPRRSGAAGA

SEQ ID NO: 121139 - protein, 21 aa, Artificial Sequence
  Description of Artificial Sequence: Synthetic peptide
  Seed: PRMCSLMQGSTLPRRSGAAGA
PRMFSLVQGSTAPRRSGAAGA

SEQ ID NO: 121140 - protein, 21 aa, Artificial Sequence
  Description of Artificial Sequence: Synthetic peptide
  Seed: PRMCSLMQGSTLPRRSGAAGA
PRMFSLVQGSTIPRRSGAAGA

SEQ ID NO: 121141 - protein, 21 aa, Artificial Sequence
  Description of Artificial Sequence: Synthetic peptide
  Seed: PRMCSLMQGSTLPRRSGAAGA
PRMFSLVQGSTLPRRSGAAGA

SEQ ID NO: 121142 - protein, 21 aa, Artificial Sequence
  Description of Artificial Sequence: Synthetic peptide
  Seed: PRMCSLMQGSTLPRRSGAAGA
PRMFSLVQGSTMPRRSGAAGA

SEQ ID NO: 121143 - protein, 21 aa, Artificial Sequence
  Description of Artificial Sequence: Synthetic peptide
  Seed: PRMCSLMQGSTLPRRSGAAGA
PRMFSLVQGSTVPRRSGAAGA

SEQ ID NO: 121144 - protein, 21 aa, Artificial Sequence
  Description of Artificial Sequence: Synthetic peptide
  Seed: PRMCSLMQGSTLPRRSGAAGA
PRMFSLVQPSTAPRRSGAAGA

SEQ ID NO: 121145 - protein, 21 aa, Artificial Sequence
  Description of Artificial Sequence: Synthetic peptide
  Seed: PRMCSLMQGSTLPRRSGAAGA
PRMFSLVQPSTIPRRSGAAGA

SEQ ID NO: 121146 - protein, 21 aa, Artificial Sequence
  Description of Artificial Sequence: Synthetic peptide
  Seed: PRMCSLMQGSTLPRRSGAAGA
PRMFSLVQPSTLPRRSGAAGA

SEQ ID NO: 121147 - protein, 21 aa, Artificial Sequence
  Description of Artificial Sequence: Synthetic peptide
  Seed: PRMCSLMQGSTLPRRSGAAGA
PRMFSLVQPSTVPRRSGAAGA

SEQ ID NO: 121148 - protein, 21 aa, Artificial Sequence
  Description of Artificial Sequence: Synthetic peptide
  Seed: PRMCSLMQGSTLPRRSGAAGA
PRMFSLVQSSTAPRRSGAAGA

SEQ ID NO: 121149 - protein, 21 aa, Artificial Sequence
  Description of Artificial Sequence: Synthetic peptide
  Seed: PRMCSLMQGSTLPRRSGAAGA
PRMFSLVQSSTIPRRSGAAGA

SEQ ID NO: 121150 - protein, 21 aa, Artificial Sequence
  Description of Artificial Sequence: Synthetic peptide
  Seed: PRMCSLMQGSTLPRRSGAAGA
PRMFSLVQSSTLPRRSGAAGA

SEQ ID NO: 121151 - protein, 21 aa, Artificial Sequence
  Description of Artificial Sequence: Synthetic peptide
  Seed: PRMCSLMQGSTLPRRSGAAGA
PRMFSLVQSSTVPRRSGAAGA

SEQ ID NO: 121152 - protein, 21 aa, Artificial Sequence
  Description of Artificial Sequence: Synthetic peptide
  Seed: PRMCSLMQGSTLPRRSGAAGA
PRMISLAQASTIPRRSGAAGA

SEQ ID NO: 121153 - protein, 21 aa, Artificial Sequence
  Description of Artificial Sequence: Synthetic peptide
  Seed: PRMCSLMQGSTLPRRSGAAGA
PRMISLAQASTLPRRSGAAGA

SEQ ID NO: 121154 - protein, 21 aa, Artificial Sequence
  Description of Artificial Sequence: Synthetic peptide
  Seed: PRMCSLMQGSTLPRRSGAAGA
PRMISLAQASTVPRRSGAAGA

SEQ ID NO: 121155 - protein, 21 aa, Artificial Sequence
  Description of Artificial Sequence: Synthetic peptide
  Seed: PRMCSLMQGSTLPRRSGAAGA
PRMISLIQASTAPRRSGAAGA

SEQ ID NO: 121156 - protein, 21 aa, Artificial Sequence
  Description of Artificial Sequence: Synthetic peptide
  Seed: PRMCSLMQGSTLPRRSGAAGA
PRMISLIQASTIPRRSGAAGA

SEQ ID NO: 121157 - protein, 21 aa, Artificial Sequence
  Description of Artificial Sequence: Synthetic peptide
  Seed: PRMCSLMQGSTLPRRSGAAGA
PRMISLIQASTLPRRSGAAGA

SEQ ID NO: 121158 - protein, 21 aa, Artificial Sequence
  Description of Artificial Sequence: Synthetic peptide
  Seed: PRMCSLMQGSTLPRRSGAAGA
PRMISLIQASTVPRRSGAAGA

SEQ ID NO: 121159 - protein, 21 aa, Artificial Sequence
  Description of Artificial Sequence: Synthetic peptide
  Seed: PRMCSLMQGSTLPRRSGAAGA
PRMISLIQGSTAPRRSGAAGA

SEQ ID NO: 121160 - protein, 21 aa, Artificial Sequence
  Description of Artificial Sequence: Synthetic peptide
  Seed: PRMCSLMQGSTLPRRSGAAGA
PRMISLIQGSTIPRRSGAAGA

SEQ ID NO: 121161 - protein, 21 aa, Artificial Sequence
  Description of Artificial Sequence: Synthetic peptide
  Seed: PRMCSLMQGSTLPRRSGAAGA
PRMISLIQGSTLPRRSGAAGA

SEQ ID NO: 121162 - protein, 21 aa, Artificial Sequence
  Description of Artificial Sequence: Synthetic peptide
  Seed: PRMCSLMQGSTLPRRSGAAGA
PRMISLIQGSTVPRRSGAAGA

SEQ ID NO: 121163 - protein, 21 aa, Artificial Sequence
  Description of Artificial Sequence: Synthetic peptide
  Seed: PRMCSLMQGSTLPRRSGAAGA
PRMISLLQASTAPRRSGAAGA

SEQ ID NO: 121164 - protein, 21 aa, Artificial Sequence
  Description of Artificial Sequence: Synthetic peptide
  Seed: PRMCSLMQGSTLPRRSGAAGA
PRMISLLQASTIPRRSGAAGA

SEQ ID NO: 121165 - protein, 21 aa, Artificial Sequence
  Description of Artificial Sequence: Synthetic peptide
  Seed: PRMCSLMQGSTLPRRSGAAGA
PRMISLLQASTLPRRSGAAGA

SEQ ID NO: 121166 - protein, 21 aa, Artificial Sequence
  Description of Artificial Sequence: Synthetic peptide
  Seed: PRMCSLMQGSTLPRRSGAAGA
PRMISLLQASTMPRRSGAAGA

SEQ ID NO: 121167 - protein, 21 aa, Artificial Sequence
  Description of Artificial Sequence: Synthetic peptide
  Seed: PRMCSLMQGSTLPRRSGAAGA
PRMISLLQASTSPRRSGAAGA

SEQ ID NO: 121168 - protein, 21 aa, Artificial Sequence
  Description of Artificial Sequence: Synthetic peptide
  Seed: PRMCSLMQGSTLPRRSGAAGA
PRMISLLQASTTPRRSGAAGA

SEQ ID NO: 121169 - protein, 21 aa, Artificial Sequence
  Description of Artificial Sequence: Synthetic peptide
  Seed: PRMCSLMQGSTLPRRSGAAGA
PRMISLLQASTVPRRSGAAGA

SEQ ID NO: 121170 - protein, 21 aa, Artificial Sequence
  Description of Artificial Sequence: Synthetic peptide
  Seed: PRMCSLMQGSTLPRRSGAAGA
PRMISLLQGSTAPRRSGAAGA

SEQ ID NO: 121171 - protein, 21 aa, Artificial Sequence
  Description of Artificial Sequence: Synthetic peptide
  Seed: PRMCSLMQGSTLPRRSGAAGA
PRMISLLQGSTIPRRSGAAGA

SEQ ID NO: 121172 - protein, 21 aa, Artificial Sequence
  Description of Artificial Sequence: Synthetic peptide
  Seed: PRMCSLMQGSTLPRRSGAAGA
PRMISLLQGSTLPRRSGAAGA

SEQ ID NO: 121173 - protein, 21 aa, Artificial Sequence
  Description of Artificial Sequence: Synthetic peptide
  Seed: PRMCSLMQGSTLPRRSGAAGA
PRMISLLQGSTMPRRSGAAGA

SEQ ID NO: 121174 - protein, 21 aa, Artificial Sequence
  Description of Artificial Sequence: Synthetic peptide
  Seed: PRMCSLMQGSTLPRRSGAAGA
PRMISLLQGSTSPRRSGAAGA

SEQ ID NO: 121175 - protein, 21 aa, Artificial Sequence
  Description of Artificial Sequence: Synthetic peptide
  Seed: PRMCSLMQGSTLPRRSGAAGA
PRMISLLQGSTTPRRSGAAGA

SEQ ID NO: 121176 - protein, 21 aa, Artificial Sequence
  Description of Artificial Sequence: Synthetic peptide
  Seed: PRMCSLMQGSTLPRRSGAAGA
PRMISLLQGSTVPRRSGAAGA

SEQ ID NO: 121177 - protein, 21 aa, Artificial Sequence
  Description of Artificial Sequence: Synthetic peptide
  Seed: PRMCSLMQGSTLPRRSGAAGA
PRMISLLQNSTVPRRSGAAGA

SEQ ID NO: 121178 - protein, 21 aa, Artificial Sequence
  Description of Artificial Sequence: Synthetic peptide
  Seed: PRMCSLMQGSTLPRRSGAAGA
PRMISLLQPSTAPRRSGAAGA

SEQ ID NO: 121179 - protein, 21 aa, Artificial Sequence
  Description of Artificial Sequence: Synthetic peptide
  Seed: PRMCSLMQGSTLPRRSGAAGA
PRMISLLQPSTIPRRSGAAGA

SEQ ID NO: 121180 - protein, 21 aa, Artificial Sequence
  Description of Artificial Sequence: Synthetic peptide
  Seed: PRMCSLMQGSTLPRRSGAAGA
PRMISLLQPSTLPRRSGAAGA

SEQ ID NO: 121181 - protein, 21 aa, Artificial Sequence
  Description of Artificial Sequence: Synthetic peptide
  Seed: PRMCSLMQGSTLPRRSGAAGA
PRMISLLQPSTVPRRSGAAGA

SEQ ID NO: 121182 - protein, 21 aa, Artificial Sequence
  Description of Artificial Sequence: Synthetic peptide
  Seed: PRMCSLMQGSTLPRRSGAAGA
PRMISLLQSSTAPRRSGAAGA

SEQ ID NO: 121183 - protein, 21 aa, Artificial Sequence
  Description of Artificial Sequence: Synthetic peptide
  Seed: PRMCSLMQGSTLPRRSGAAGA
PRMISLLQSSTIPRRSGAAGA

SEQ ID NO: 121184 - protein, 21 aa, Artificial Sequence
  Description of Artificial Sequence: Synthetic peptide
  Seed: PRMCSLMQGSTLPRRSGAAGA
PRMISLLQSSTLPRRSGAAGA

SEQ ID NO: 121185 - protein, 21 aa, Artificial Sequence
  Description of Artificial Sequence: Synthetic peptide
  Seed: PRMCSLMQGSTLPRRSGAAGA
PRMISLLQSSTTPRRSGAAGA

SEQ ID NO: 121186 - protein, 21 aa, Artificial Sequence
  Description of Artificial Sequence: Synthetic peptide
  Seed: PRMCSLMQGSTLPRRSGAAGA
PRMISLLQSSTVPRRSGAAGA

SEQ ID NO: 121187 - protein, 21 aa, Artificial Sequence
  Description of Artificial Sequence: Synthetic peptide
  Seed: PRMCSLMQGSTLPRRSGAAGA
PRMISLLQTSTVPRRSGAAGA

SEQ ID NO: 121188 - protein, 21 aa, Artificial Sequence
  Description of Artificial Sequence: Synthetic peptide
  Seed: PRMCSLMQGSTLPRRSGAAGA
PRMISLMQASTAPRRSGAAGA

SEQ ID NO: 121189 - protein, 21 aa, Artificial Sequence
  Description of Artificial Sequence: Synthetic peptide
  Seed: PRMCSLMQGSTLPRRSGAAGA
PRMISLMQASTIPRRSGAAGA

SEQ ID NO: 121190 - protein, 21 aa, Artificial Sequence
  Description of Artificial Sequence: Synthetic peptide
  Seed: PRMCSLMQGSTLPRRSGAAGA
PRMISLMQASTLPRRSGAAGA

SEQ ID NO: 121191 - protein, 21 aa, Artificial Sequence
  Description of Artificial Sequence: Synthetic peptide
  Seed: PRMCSLMQGSTLPRRSGAAGA
PRMISLMQASTMPRRSGAAGA

SEQ ID NO: 121192 - protein, 21 aa, Artificial Sequence
  Description of Artificial Sequence: Synthetic peptide
  Seed: PRMCSLMQGSTLPRRSGAAGA
PRMISLMQASTSPRRSGAAGA

SEQ ID NO: 121193 - protein, 21 aa, Artificial Sequence
  Description of Artificial Sequence: Synthetic peptide
  Seed: PRMCSLMQGSTLPRRSGAAGA
PRMISLMQASTTPRRSGAAGA

SEQ ID NO: 121194 - protein, 21 aa, Artificial Sequence
  Description of Artificial Sequence: Synthetic peptide
  Seed: PRMCSLMQGSTLPRRSGAAGA
PRMISLMQASTVPRRSGAAGA

SEQ ID NO: 121195 - protein, 21 aa, Artificial Sequence
  Description of Artificial Sequence: Synthetic peptide
  Seed: PRMCSLMQGSTLPRRSGAAGA
PRMISLMQGSTAPRRSGAAGA

SEQ ID NO: 121196 - protein, 21 aa, Artificial Sequence
  Description of Artificial Sequence: Synthetic peptide
  Seed: PRMCSLMQGSTLPRRSGAAGA
PRMISLMQGSTIPRRSGAAGA

SEQ ID NO: 121197 - protein, 21 aa, Artificial Sequence
  Description of Artificial Sequence: Synthetic peptide
  Seed: PRMCSLMQGSTLPRRSGAAGA
PRMISLMQGSTLPRRSGAAGA

SEQ ID NO: 121198 - protein, 21 aa, Artificial Sequence
  Description of Artificial Sequence: Synthetic peptide
  Seed: PRMCSLMQGSTLPRRSGAAGA
PRMISLMQGSTMPRRSGAAGA

SEQ ID NO: 121199 - protein, 21 aa, Artificial Sequence
  Description of Artificial Sequence: Synthetic peptide
  Seed: PRMCSLMQGSTLPRRSGAAGA
PRMISLMQGSTSPRRSGAAGA

SEQ ID NO: 121200 - protein, 21 aa, Artificial Sequence
  Description of Artificial Sequence: Synthetic peptide
  Seed: PRMCSLMQGSTLPRRSGAAGA
PRMISLMQGSTTPRRSGAAGA

SEQ ID NO: 121201 - protein, 21 aa, Artificial Sequence
  Description of Artificial Sequence: Synthetic peptide
  Seed: PRMCSLMQGSTLPRRSGAAGA
PRMISLMQGSTVPRRSGAAGA

SEQ ID NO: 121202 - protein, 21 aa, Artificial Sequence
  Description of Artificial Sequence: Synthetic peptide
  Seed: PRMCSLMQGSTLPRRSGAAGA
PRMISLMQNSTVPRRSGAAGA

SEQ ID NO: 121203 - protein, 21 aa, Artificial Sequence
  Description of Artificial Sequence: Synthetic peptide
  Seed: PRMCSLMQGSTLPRRSGAAGA
PRMISLMQPSTAPRRSGAAGA

SEQ ID NO: 121204 - protein, 21 aa, Artificial Sequence
  Description of Artificial Sequence: Synthetic peptide
  Seed: PRMCSLMQGSTLPRRSGAAGA
PRMISLMQPSTIPRRSGAAGA

SEQ ID NO: 121205 - protein, 21 aa, Artificial Sequence
  Description of Artificial Sequence: Synthetic peptide
  Seed: PRMCSLMQGSTLPRRSGAAGA
PRMISLMQPSTLPRRSGAAGA

SEQ ID NO: 121206 - protein, 21 aa, Artificial Sequence
  Description of Artificial Sequence: Synthetic peptide
  Seed: PRMCSLMQGSTLPRRSGAAGA
PRMISLMQPSTVPRRSGAAGA

SEQ ID NO: 121207 - protein, 21 aa, Artificial Sequence
  Description of Artificial Sequence: Synthetic peptide
  Seed: PRMCSLMQGSTLPRRSGAAGA
PRMISLMQSSTAPRRSGAAGA

SEQ ID NO: 121208 - protein, 21 aa, Artificial Sequence
  Description of Artificial Sequence: Synthetic peptide
  Seed: PRMCSLMQGSTLPRRSGAAGA
PRMISLMQSSTIPRRSGAAGA

SEQ ID NO: 121209 - protein, 21 aa, Artificial Sequence
  Description of Artificial Sequence: Synthetic peptide
  Seed: PRMCSLMQGSTLPRRSGAAGA
PRMISLMQSSTLPRRSGAAGA

SEQ ID NO: 121210 - protein, 21 aa, Artificial Sequence
  Description of Artificial Sequence: Synthetic peptide
  Seed: PRMCSLMQGSTLPRRSGAAGA
PRMISLMQSSTVPRRSGAAGA

SEQ ID NO: 121211 - protein, 21 aa, Artificial Sequence
  Description of Artificial Sequence: Synthetic peptide
  Seed: PRMCSLMQGSTLPRRSGAAGA
PRMISLMQTSTVPRRSGAAGA

SEQ ID NO: 121212 - protein, 21 aa, Artificial Sequence
  Description of Artificial Sequence: Synthetic peptide
  Seed: PRMCSLMQGSTLPRRSGAAGA
PRMISLQQASTLPRRSGAAGA

SEQ ID NO: 121213 - protein, 21 aa, Artificial Sequence
  Description of Artificial Sequence: Synthetic peptide
  Seed: PRMCSLMQGSTLPRRSGAAGA
PRMISLQQASTVPRRSGAAGA

SEQ ID NO: 121214 - protein, 21 aa, Artificial Sequence
  Description of Artificial Sequence: Synthetic peptide
  Seed: PRMCSLMQGSTLPRRSGAAGA
PRMLSLIQASTVPRRSGAAGA

SEQ ID NO: 121215 - protein, 21 aa, Artificial Sequence
  Description of Artificial Sequence: Synthetic peptide
  Seed: PRMCSLMQGSTLPRRSGAAGA
PRMLSLLQASTAPRRSGAAGA

SEQ ID NO: 121216 - protein, 21 aa, Artificial Sequence
  Description of Artificial Sequence: Synthetic peptide
  Seed: PRMCSLMQGSTLPRRSGAAGA
PRMLSLLQASTIPRRSGAAGA

SEQ ID NO: 121217 - protein, 21 aa, Artificial Sequence
  Description of Artificial Sequence: Synthetic peptide
  Seed: PRMCSLMQGSTLPRRSGAAGA
PRMLSLLQASTLPRRSGAAGA

SEQ ID NO: 121218 - protein, 21 aa, Artificial Sequence
  Description of Artificial Sequence: Synthetic peptide
  Seed: PRMCSLMQGSTLPRRSGAAGA
PRMLSLLQASTMPRRSGAAGA

SEQ ID NO: 121219 - protein, 21 aa, Artificial Sequence
  Description of Artificial Sequence: Synthetic peptide
  Seed: PRMCSLMQGSTLPRRSGAAGA
PRMLSLLQASTSPRRSGAAGA

SEQ ID NO: 121220 - protein, 21 aa, Artificial Sequence
  Description of Artificial Sequence: Synthetic peptide
  Seed: PRMCSLMQGSTLPRRSGAAGA
PRMLSLLQASTTPRRSGAAGA

SEQ ID NO: 121221 - protein, 21 aa, Artificial Sequence
  Description of Artificial Sequence: Synthetic peptide
  Seed: PRMCSLMQGSTLPRRSGAAGA
PRMLSLLQASTVPRRSGAAGA

SEQ ID NO: 121222 - protein, 21 aa, Artificial Sequence
  Description of Artificial Sequence: Synthetic peptide
  Seed: PRMCSLMQGSTLPRRSGAAGA
PRMLSLLQGSTAPRRSGAAGA

SEQ ID NO: 121223 - protein, 21 aa, Artificial Sequence
  Description of Artificial Sequence: Synthetic peptide
  Seed: PRMCSLMQGSTLPRRSGAAGA
PRMLSLLQGSTIPRRSGAAGA

SEQ ID NO: 121224 - protein, 21 aa, Artificial Sequence
  Description of Artificial Sequence: Synthetic peptide
  Seed: PRMCSLMQGSTLPRRSGAAGA
PRMLSLLQGSTLPRRSGAAGA

SEQ ID NO: 121225 - protein, 21 aa, Artificial Sequence
  Description of Artificial Sequence: Synthetic peptide
  Seed: PRMCSLMQGSTLPRRSGAAGA
PRMLSLLQGSTMPRRSGAAGA

SEQ ID NO: 121226 - protein, 21 aa, Artificial Sequence
  Description of Artificial Sequence: Synthetic peptide
  Seed: PRMCSLMQGSTLPRRSGAAGA
PRMLSLLQGSTTPRRSGAAGA

SEQ ID NO: 121227 - protein, 21 aa, Artificial Sequence
  Description of Artificial Sequence: Synthetic peptide
  Seed: PRMCSLMQGSTLPRRSGAAGA
PRMLSLLQGSTVPRRSGAAGA

SEQ ID NO: 121228 - protein, 21 aa, Artificial Sequence
  Description of Artificial Sequence: Synthetic peptide
  Seed: PRMCSLMQGSTLPRRSGAAGA
PRMLSLLQPSTAPRRSGAAGA

SEQ ID NO: 121229 - protein, 21 aa, Artificial Sequence
  Description of Artificial Sequence: Synthetic peptide
  Seed: PRMCSLMQGSTLPRRSGAAGA
PRMLSLLQPSTIPRRSGAAGA

SEQ ID NO: 121230 - protein, 21 aa, Artificial Sequence
  Description of Artificial Sequence: Synthetic peptide
  Seed: PRMCSLMQGSTLPRRSGAAGA
PRMLSLLQPSTLPRRSGAAGA

SEQ ID NO: 121231 - protein, 21 aa, Artificial Sequence
  Description of Artificial Sequence: Synthetic peptide
  Seed: PRMCSLMQGSTLPRRSGAAGA
PRMLSLLQPSTVPRRSGAAGA

SEQ ID NO: 121232 - protein, 21 aa, Artificial Sequence
  Description of Artificial Sequence: Synthetic peptide
  Seed: PRMCSLMQGSTLPRRSGAAGA
PRMLSLLQSSTAPRRSGAAGA

SEQ ID NO: 121233 - protein, 21 aa, Artificial Sequence
  Description of Artificial Sequence: Synthetic peptide
  Seed: PRMCSLMQGSTLPRRSGAAGA
PRMLSLLQSSTIPRRSGAAGA

SEQ ID NO: 121234 - protein, 21 aa, Artificial Sequence
  Description of Artificial Sequence: Synthetic peptide
  Seed: PRMCSLMQGSTLPRRSGAAGA
PRMLSLLQSSTLPRRSGAAGA

SEQ ID NO: 121235 - protein, 21 aa, Artificial Sequence
  Description of Artificial Sequence: Synthetic peptide
  Seed: PRMCSLMQGSTLPRRSGAAGA
PRMLSLLQSSTVPRRSGAAGA

SEQ ID NO: 121236 - protein, 21 aa, Artificial Sequence
  Description of Artificial Sequence: Synthetic peptide
  Seed: PRMCSLMQGSTLPRRSGAAGA
PRMLSLMQASTAPRRSGAAGA

SEQ ID NO: 121237 - protein, 21 aa, Artificial Sequence
  Description of Artificial Sequence: Synthetic peptide
  Seed: PRMCSLMQGSTLPRRSGAAGA
PRMLSLMQASTIPRRSGAAGA

SEQ ID NO: 121238 - protein, 21 aa, Artificial Sequence
  Description of Artificial Sequence: Synthetic peptide
  Seed: PRMCSLMQGSTLPRRSGAAGA
PRMLSLMQASTLPRRSGAAGA

SEQ ID NO: 121239 - protein, 21 aa, Artificial Sequence
  Description of Artificial Sequence: Synthetic peptide
  Seed: PRMCSLMQGSTLPRRSGAAGA
PRMLSLMQASTMPRRSGAAGA

SEQ ID NO: 121240 - protein, 21 aa, Artificial Sequence
  Description of Artificial Sequence: Synthetic peptide
  Seed: PRMCSLMQGSTLPRRSGAAGA
PRMLSLMQASTSPRRSGAAGA

SEQ ID NO: 121241 - protein, 21 aa, Artificial Sequence
  Description of Artificial Sequence: Synthetic peptide
  Seed: PRMCSLMQGSTLPRRSGAAGA
PRMLSLMQASTTPRRSGAAGA

SEQ ID NO: 121242 - protein, 21 aa, Artificial Sequence
  Description of Artificial Sequence: Synthetic peptide
  Seed: PRMCSLMQGSTLPRRSGAAGA
PRMLSLMQASTVPRRSGAAGA

SEQ ID NO: 121243 - protein, 21 aa, Artificial Sequence
  Description of Artificial Sequence: Synthetic peptide
  Seed: PRMCSLMQGSTLPRRSGAAGA
PRMLSLMQGSTAPRRSGAAGA

SEQ ID NO: 121244 - protein, 21 aa, Artificial Sequence
  Description of Artificial Sequence: Synthetic peptide
  Seed: PRMCSLMQGSTLPRRSGAAGA
PRMLSLMQGSTIPRRSGAAGA

SEQ ID NO: 121245 - protein, 21 aa, Artificial Sequence
  Description of Artificial Sequence: Synthetic peptide
  Seed: PRMCSLMQGSTLPRRSGAAGA
PRMLSLMQGSTLPRRSGAAGA

SEQ ID NO: 121246 - protein, 21 aa, Artificial Sequence
  Description of Artificial Sequence: Synthetic peptide
  Seed: PRMCSLMQGSTLPRRSGAAGA
PRMLSLMQGSTMPRRSGAAGA

SEQ ID NO: 121247 - protein, 21 aa, Artificial Sequence
  Description of Artificial Sequence: Synthetic peptide
  Seed: PRMCSLMQGSTLPRRSGAAGA
PRMLSLMQGSTVPRRSGAAGA

SEQ ID NO: 121248 - protein, 21 aa, Artificial Sequence
  Description of Artificial Sequence: Synthetic peptide
  Seed: PRMCSLMQGSTLPRRSGAAGA
PRMLSLMQPSTIPRRSGAAGA

SEQ ID NO: 121249 - protein, 21 aa, Artificial Sequence
  Description of Artificial Sequence: Synthetic peptide
  Seed: PRMCSLMQGSTLPRRSGAAGA
PRMLSLMQPSTLPRRSGAAGA

SEQ ID NO: 121250 - protein, 21 aa, Artificial Sequence
  Description of Artificial Sequence: Synthetic peptide
  Seed: PRMCSLMQGSTLPRRSGAAGA
PRMLSLMQPSTVPRRSGAAGA

SEQ ID NO: 121251 - protein, 21 aa, Artificial Sequence
  Description of Artificial Sequence: Synthetic peptide
  Seed: PRMCSLMQGSTLPRRSGAAGA
PRMLSLMQSSTAPRRSGAAGA

SEQ ID NO: 121252 - protein, 21 aa, Artificial Sequence
  Description of Artificial Sequence: Synthetic peptide
  Seed: PRMCSLMQGSTLPRRSGAAGA
PRMLSLMQSSTIPRRSGAAGA

SEQ ID NO: 121253 - protein, 21 aa, Artificial Sequence
  Description of Artificial Sequence: Synthetic peptide
  Seed: PRMCSLMQGSTLPRRSGAAGA
PRMLSLMQSSTLPRRSGAAGA

SEQ ID NO: 121254 - protein, 21 aa, Artificial Sequence
  Description of Artificial Sequence: Synthetic peptide
  Seed: PRMCSLMQGSTLPRRSGAAGA
PRMLSLMQSSTVPRRSGAAGA

SEQ ID NO: 121255 - protein, 21 aa, Artificial Sequence
  Description of Artificial Sequence: Synthetic peptide
  Seed: PRMCSLMQGSTLPRRSGAAGA
PRMMSLLQASTAPRRSGAAGA

SEQ ID NO: 121256 - protein, 21 aa, Artificial Sequence
  Description of Artificial Sequence: Synthetic peptide
  Seed: PRMCSLMQGSTLPRRSGAAGA
PRMMSLLQASTIPRRSGAAGA

SEQ ID NO: 121257 - protein, 21 aa, Artificial Sequence
  Description of Artificial Sequence: Synthetic peptide
  Seed: PRMCSLMQGSTLPRRSGAAGA
PRMMSLLQASTLPRRSGAAGA

SEQ ID NO: 121258 - protein, 21 aa, Artificial Sequence
  Description of Artificial Sequence: Synthetic peptide
  Seed: PRMCSLMQGSTLPRRSGAAGA
PRMMSLLQASTVPRRSGAAGA

SEQ ID NO: 121259 - protein, 21 aa, Artificial Sequence
  Description of Artificial Sequence: Synthetic peptide
  Seed: PRMCSLMQGSTLPRRSGAAGA
PRMMSLLQGSTAPRRSGAAGA

SEQ ID NO: 121260 - protein, 21 aa, Artificial Sequence
  Description of Artificial Sequence: Synthetic peptide
  Seed: PRMCSLMQGSTLPRRSGAAGA
PRMMSLLQGSTIPRRSGAAGA

SEQ ID NO: 121261 - protein, 21 aa, Artificial Sequence
  Description of Artificial Sequence: Synthetic peptide
  Seed: PRMCSLMQGSTLPRRSGAAGA
PRMMSLLQGSTLPRRSGAAGA

SEQ ID NO: 121262 - protein, 21 aa, Artificial Sequence
  Description of Artificial Sequence: Synthetic peptide
  Seed: PRMCSLMQGSTLPRRSGAAGA
PRMMSLLQGSTVPRRSGAAGA

SEQ ID NO: 121263 - protein, 21 aa, Artificial Sequence
  Description of Artificial Sequence: Synthetic peptide
  Seed: PRMCSLMQGSTLPRRSGAAGA
PRMMSLLQSSTVPRRSGAAGA

SEQ ID NO: 121264 - protein, 21 aa, Artificial Sequence
  Description of Artificial Sequence: Synthetic peptide
  Seed: PRMCSLMQGSTLPRRSGAAGA
PRMMSLMQASTAPRRSGAAGA

SEQ ID NO: 121265 - protein, 21 aa, Artificial Sequence
  Description of Artificial Sequence: Synthetic peptide
  Seed: PRMCSLMQGSTLPRRSGAAGA
PRMMSLMQASTIPRRSGAAGA

SEQ ID NO: 121266 - protein, 21 aa, Artificial Sequence
  Description of Artificial Sequence: Synthetic peptide
  Seed: PRMCSLMQGSTLPRRSGAAGA
PRMMSLMQASTLPRRSGAAGA

SEQ ID NO: 121267 - protein, 21 aa, Artificial Sequence
  Description of Artificial Sequence: Synthetic peptide
  Seed: PRMCSLMQGSTLPRRSGAAGA
PRMMSLMQASTVPRRSGAAGA

SEQ ID NO: 121268 - protein, 21 aa, Artificial Sequence
  Description of Artificial Sequence: Synthetic peptide
  Seed: PRMCSLMQGSTLPRRSGAAGA
PRMMSLMQGSTAPRRSGAAGA

SEQ ID NO: 121269 - protein, 21 aa, Artificial Sequence
  Description of Artificial Sequence: Synthetic peptide
  Seed: PRMCSLMQGSTLPRRSGAAGA
PRMMSLMQGSTIPRRSGAAGA

SEQ ID NO: 121270 - protein, 21 aa, Artificial Sequence
  Description of Artificial Sequence: Synthetic peptide
  Seed: PRMCSLMQGSTLPRRSGAAGA
PRMMSLMQGSTLPRRSGAAGA

SEQ ID NO: 121271 - protein, 21 aa, Artificial Sequence
  Description of Artificial Sequence: Synthetic peptide
  Seed: PRMCSLMQGSTLPRRSGAAGA
PRMMSLMQGSTVPRRSGAAGA

SEQ ID NO: 121272 - protein, 21 aa, Artificial Sequence
  Description of Artificial Sequence: Synthetic peptide
  Seed: PRMCSLMQGSTLPRRSGAAGA
PRMVSLLQASTAPRRSGAAGA

SEQ ID NO: 121273 - protein, 21 aa, Artificial Sequence
  Description of Artificial Sequence: Synthetic peptide
  Seed: PRMCSLMQGSTLPRRSGAAGA
PRMVSLLQASTIPRRSGAAGA

SEQ ID NO: 121274 - protein, 21 aa, Artificial Sequence
  Description of Artificial Sequence: Synthetic peptide
  Seed: PRMCSLMQGSTLPRRSGAAGA
PRMVSLLQASTLPRRSGAAGA

SEQ ID NO: 121275 - protein, 21 aa, Artificial Sequence
  Description of Artificial Sequence: Synthetic peptide
  Seed: PRMCSLMQGSTLPRRSGAAGA
PRMVSLLQASTVPRRSGAAGA

SEQ ID NO: 121276 - protein, 21 aa, Artificial Sequence
  Description of Artificial Sequence: Synthetic peptide
  Seed: PRMCSLMQGSTLPRRSGAAGA
PRMVSLLQGSTAPRRSGAAGA

SEQ ID NO: 121277 - protein, 21 aa, Artificial Sequence
  Description of Artificial Sequence: Synthetic peptide
  Seed: PRMCSLMQGSTLPRRSGAAGA
PRMVSLLQGSTIPRRSGAAGA

SEQ ID NO: 121278 - protein, 21 aa, Artificial Sequence
  Description of Artificial Sequence: Synthetic peptide
  Seed: PRMCSLMQGSTLPRRSGAAGA
PRMVSLLQGSTLPRRSGAAGA

SEQ ID NO: 121279 - protein, 21 aa, Artificial Sequence
  Description of Artificial Sequence: Synthetic peptide
  Seed: PRMCSLMQGSTLPRRSGAAGA
PRMVSLLQGSTVPRRSGAAGA

SEQ ID NO: 121280 - protein, 21 aa, Artificial Sequence
  Description of Artificial Sequence: Synthetic peptide
  Seed: PRMCSLMQGSTLPRRSGAAGA
PRMVSLLQSSTVPRRSGAAGA

SEQ ID NO: 121281 - protein, 21 aa, Artificial Sequence
  Description of Artificial Sequence: Synthetic peptide
  Seed: PRMCSLMQGSTLPRRSGAAGA
PRMVSLMQASTAPRRSGAAGA

SEQ ID NO: 121282 - protein, 21 aa, Artificial Sequence
  Description of Artificial Sequence: Synthetic peptide
  Seed: PRMCSLMQGSTLPRRSGAAGA
PRMVSLMQASTIPRRSGAAGA

SEQ ID NO: 121283 - protein, 21 aa, Artificial Sequence
  Description of Artificial Sequence: Synthetic peptide
  Seed: PRMCSLMQGSTLPRRSGAAGA
PRMVSLMQASTLPRRSGAAGA

SEQ ID NO: 121284 - protein, 21 aa, Artificial Sequence
  Description of Artificial Sequence: Synthetic peptide
  Seed: PRMCSLMQGSTLPRRSGAAGA
PRMVSLMQASTVPRRSGAAGA

SEQ ID NO: 121285 - protein, 21 aa, Artificial Sequence
  Description of Artificial Sequence: Synthetic peptide
  Seed: PRMCSLMQGSTLPRRSGAAGA
PRMVSLMQGSTAPRRSGAAGA

SEQ ID NO: 121286 - protein, 21 aa, Artificial Sequence
  Description of Artificial Sequence: Synthetic peptide
  Seed: PRMCSLMQGSTLPRRSGAAGA
PRMVSLMQGSTIPRRSGAAGA

SEQ ID NO: 121287 - protein, 21 aa, Artificial Sequence
  Description of Artificial Sequence: Synthetic peptide
  Seed: PRMCSLMQGSTLPRRSGAAGA
PRMVSLMQGSTLPRRSGAAGA

SEQ ID NO: 121288 - protein, 21 aa, Artificial Sequence
  Description of Artificial Sequence: Synthetic peptide
  Seed: PRMCSLMQGSTLPRRSGAAGA
PRMVSLMQGSTVPRRSGAAGA

SEQ ID NO: 121289 - protein, 21 aa, Artificial Sequence
  Description of Artificial Sequence: Synthetic peptide
  Seed: PRMCSLMQGSTLPRRSGAAGA
PRMVSLMQSSTVPRRSGAAGA

SEQ ID NO: 121290 - protein, 21 aa, Artificial Sequence
  Description of Artificial Sequence: Synthetic peptide
  Seed: PRMCSLMQGSTLPRRSGAAGA
PRMWSLAQASTAPRRSGAAGA

SEQ ID NO: 121291 - protein, 21 aa, Artificial Sequence
  Description of Artificial Sequence: Synthetic peptide
  Seed: PRMCSLMQGSTLPRRSGAAGA
PRMWSLAQASTIPRRSGAAGA

SEQ ID NO: 121292 - protein, 21 aa, Artificial Sequence
  Description of Artificial Sequence: Synthetic peptide
  Seed: PRMCSLMQGSTLPRRSGAAGA
PRMWSLAQASTLPRRSGAAGA

SEQ ID NO: 121293 - protein, 21 aa, Artificial Sequence
  Description of Artificial Sequence: Synthetic peptide
  Seed: PRMCSLMQGSTLPRRSGAAGA
PRMWSLAQASTVPRRSGAAGA

SEQ ID NO: 121294 - protein, 21 aa, Artificial Sequence
  Description of Artificial Sequence: Synthetic peptide
  Seed: PRMCSLMQGSTLPRRSGAAGA
PRMWSLAQGSTVPRRSGAAGA

SEQ ID NO: 121295 - protein, 21 aa, Artificial Sequence
  Description of Artificial Sequence: Synthetic peptide
  Seed: PRMCSLMQGSTLPRRSGAAGA
PRMWSLIQASTAPRRSGAAGA

SEQ ID NO: 121296 - protein, 21 aa, Artificial Sequence
  Description of Artificial Sequence: Synthetic peptide
  Seed: PRMCSLMQGSTLPRRSGAAGA
PRMWSLIQASTIPRRSGAAGA

SEQ ID NO: 121297 - protein, 21 aa, Artificial Sequence
  Description of Artificial Sequence: Synthetic peptide
  Seed: PRMCSLMQGSTLPRRSGAAGA
PRMWSLIQASTLPRRSGAAGA

SEQ ID NO: 121298 - protein, 21 aa, Artificial Sequence
  Description of Artificial Sequence: Synthetic peptide
  Seed: PRMCSLMQGSTLPRRSGAAGA
PRMWSLIQASTVPRRSGAAGA

SEQ ID NO: 121299 - protein, 21 aa, Artificial Sequence
  Description of Artificial Sequence: Synthetic peptide
  Seed: PRMCSLMQGSTLPRRSGAAGA
PRMWSLIQGSTAPRRSGAAGA

SEQ ID NO: 121300 - protein, 21 aa, Artificial Sequence
  Description of Artificial Sequence: Synthetic peptide
  Seed: PRMCSLMQGSTLPRRSGAAGA
PRMWSLIQGSTIPRRSGAAGA

SEQ ID NO: 121301 - protein, 21 aa, Artificial Sequence
  Description of Artificial Sequence: Synthetic peptide
  Seed: PRMCSLMQGSTLPRRSGAAGA
PRMWSLIQGSTLPRRSGAAGA

SEQ ID NO: 121302 - protein, 21 aa, Artificial Sequence
  Description of Artificial Sequence: Synthetic peptide
  Seed: PRMCSLMQGSTLPRRSGAAGA
PRMWSLIQGSTVPRRSGAAGA

SEQ ID NO: 121303 - protein, 21 aa, Artificial Sequence
  Description of Artificial Sequence: Synthetic peptide
  Seed: PRMCSLMQGSTLPRRSGAAGA
PRMWSLIQPSTVPRRSGAAGA

SEQ ID NO: 121304 - protein, 21 aa, Artificial Sequence
  Description of Artificial Sequence: Synthetic peptide
  Seed: PRMCSLMQGSTLPRRSGAAGA
PRMWSLIQSSTAPRRSGAAGA

SEQ ID NO: 121305 - protein, 21 aa, Artificial Sequence
  Description of Artificial Sequence: Synthetic peptide
  Seed: PRMCSLMQGSTLPRRSGAAGA
PRMWSLIQSSTLPRRSGAAGA

SEQ ID NO: 121306 - protein, 21 aa, Artificial Sequence
  Description of Artificial Sequence: Synthetic peptide
  Seed: PRMCSLMQGSTLPRRSGAAGA
PRMWSLIQSSTVPRRSGAAGA

SEQ ID NO: 121307 - protein, 21 aa, Artificial Sequence
  Description of Artificial Sequence: Synthetic peptide
  Seed: PRMCSLMQGSTLPRRSGAAGA
PRMWSLLQASTAPRRSGAAGA

SEQ ID NO: 121308 - protein, 21 aa, Artificial Sequence
  Description of Artificial Sequence: Synthetic peptide
  Seed: PRMCSLMQGSTLPRRSGAAGA
PRMWSLLQASTGPRRSGAAGA

SEQ ID NO: 121309 - protein, 21 aa, Artificial Sequence
  Description of Artificial Sequence: Synthetic peptide
  Seed: PRMCSLMQGSTLPRRSGAAGA
PRMWSLLQASTIPRRSGAAGA

SEQ ID NO: 121310 - protein, 21 aa, Artificial Sequence
  Description of Artificial Sequence: Synthetic peptide
  Seed: PRMCSLMQGSTLPRRSGAAGA
PRMWSLLQASTLPRRSGAAGA

SEQ ID NO: 121311 - protein, 21 aa, Artificial Sequence
  Description of Artificial Sequence: Synthetic peptide
  Seed: PRMCSLMQGSTLPRRSGAAGA
PRMWSLLQASTMPRRSGAAGA

SEQ ID NO: 121312 - protein, 21 aa, Artificial Sequence
  Description of Artificial Sequence: Synthetic peptide
  Seed: PRMCSLMQGSTLPRRSGAAGA
PRMWSLLQASTSPRRSGAAGA

SEQ ID NO: 121313 - protein, 21 aa, Artificial Sequence
  Description of Artificial Sequence: Synthetic peptide
  Seed: PRMCSLMQGSTLPRRSGAAGA
PRMWSLLQASTTPRRSGAAGA

SEQ ID NO: 121314 - protein, 21 aa, Artificial Sequence
  Description of Artificial Sequence: Synthetic peptide
  Seed: PRMCSLMQGSTLPRRSGAAGA
PRMWSLLQASTVPRRSGAAGA

SEQ ID NO: 121315 - protein, 21 aa, Artificial Sequence
  Description of Artificial Sequence: Synthetic peptide
  Seed: PRMCSLMQGSTLPRRSGAAGA
PRMWSLLQGSTAPRRSGAAGA

SEQ ID NO: 121316 - protein, 21 aa, Artificial Sequence
  Description of Artificial Sequence: Synthetic peptide
  Seed: PRMCSLMQGSTLPRRSGAAGA
PRMWSLLQGSTIPRRSGAAGA

SEQ ID NO: 121317 - protein, 21 aa, Artificial Sequence
  Description of Artificial Sequence: Synthetic peptide
  Seed: PRMCSLMQGSTLPRRSGAAGA
PRMWSLLQGSTLPRRSGAAGA

SEQ ID NO: 121318 - protein, 21 aa, Artificial Sequence
  Description of Artificial Sequence: Synthetic peptide
  Seed: PRMCSLMQGSTLPRRSGAAGA
PRMWSLLQGSTMPRRSGAAGA

SEQ ID NO: 121319 - protein, 21 aa, Artificial Sequence
  Description of Artificial Sequence: Synthetic peptide
  Seed: PRMCSLMQGSTLPRRSGAAGA
PRMWSLLQGSTSPRRSGAAGA

SEQ ID NO: 121320 - protein, 21 aa, Artificial Sequence
  Description of Artificial Sequence: Synthetic peptide
  Seed: PRMCSLMQGSTLPRRSGAAGA
PRMWSLLQGSTTPRRSGAAGA

SEQ ID NO: 121321 - protein, 21 aa, Artificial Sequence
  Description of Artificial Sequence: Synthetic peptide
  Seed: PRMCSLMQGSTLPRRSGAAGA
PRMWSLLQGSTVPRRSGAAGA

SEQ ID NO: 121322 - protein, 21 aa, Artificial Sequence
  Description of Artificial Sequence: Synthetic peptide
  Seed: PRMCSLMQGSTLPRRSGAAGA
PRMWSLLQNSTIPRRSGAAGA

SEQ ID NO: 121323 - protein, 21 aa, Artificial Sequence
  Description of Artificial Sequence: Synthetic peptide
  Seed: PRMCSLMQGSTLPRRSGAAGA
PRMWSLLQNSTLPRRSGAAGA

SEQ ID NO: 121324 - protein, 21 aa, Artificial Sequence
  Description of Artificial Sequence: Synthetic peptide
  Seed: PRMCSLMQGSTLPRRSGAAGA
PRMWSLLQNSTVPRRSGAAGA

SEQ ID NO: 121325 - protein, 21 aa, Artificial Sequence
  Description of Artificial Sequence: Synthetic peptide
  Seed: PRMCSLMQGSTLPRRSGAAGA
PRMWSLLQPSTAPRRSGAAGA

SEQ ID NO: 121326 - protein, 21 aa, Artificial Sequence
  Description of Artificial Sequence: Synthetic peptide
  Seed: PRMCSLMQGSTLPRRSGAAGA
PRMWSLLQPSTIPRRSGAAGA

SEQ ID NO: 121327 - protein, 21 aa, Artificial Sequence
  Description of Artificial Sequence: Synthetic peptide
  Seed: PRMCSLMQGSTLPRRSGAAGA
PRMWSLLQPSTLPRRSGAAGA

SEQ ID NO: 121328 - protein, 21 aa, Artificial Sequence
  Description of Artificial Sequence: Synthetic peptide
  Seed: PRMCSLMQGSTLPRRSGAAGA
PRMWSLLQPSTVPRRSGAAGA

SEQ ID NO: 121329 - protein, 21 aa, Artificial Sequence
  Description of Artificial Sequence: Synthetic peptide
  Seed: PRMCSLMQGSTLPRRSGAAGA
PRMWSLLQSSTAPRRSGAAGA

SEQ ID NO: 121330 - protein, 21 aa, Artificial Sequence
  Description of Artificial Sequence: Synthetic peptide
  Seed: PRMCSLMQGSTLPRRSGAAGA
PRMWSLLQSSTIPRRSGAAGA

SEQ ID NO: 121331 - protein, 21 aa, Artificial Sequence
  Description of Artificial Sequence: Synthetic peptide
  Seed: PRMCSLMQGSTLPRRSGAAGA
PRMWSLLQSSTLPRRSGAAGA

SEQ ID NO: 121332 - protein, 21 aa, Artificial Sequence
  Description of Artificial Sequence: Synthetic peptide
  Seed: PRMCSLMQGSTLPRRSGAAGA
PRMWSLLQSSTMPRRSGAAGA

SEQ ID NO: 121333 - protein, 21 aa, Artificial Sequence
  Description of Artificial Sequence: Synthetic peptide
  Seed: PRMCSLMQGSTLPRRSGAAGA
PRMWSLLQSSTTPRRSGAAGA

SEQ ID NO: 121334 - protein, 21 aa, Artificial Sequence
  Description of Artificial Sequence: Synthetic peptide
  Seed: PRMCSLMQGSTLPRRSGAAGA
PRMWSLLQSSTVPRRSGAAGA

SEQ ID NO: 121335 - protein, 21 aa, Artificial Sequence
  Description of Artificial Sequence: Synthetic peptide
  Seed: PRMCSLMQGSTLPRRSGAAGA
PRMWSLLQTSTAPRRSGAAGA

SEQ ID NO: 121336 - protein, 21 aa, Artificial Sequence
  Description of Artificial Sequence: Synthetic peptide
  Seed: PRMCSLMQGSTLPRRSGAAGA
PRMWSLLQTSTIPRRSGAAGA

SEQ ID NO: 121337 - protein, 21 aa, Artificial Sequence
  Description of Artificial Sequence: Synthetic peptide
  Seed: PRMCSLMQGSTLPRRSGAAGA
PRMWSLLQTSTLPRRSGAAGA

SEQ ID NO: 121338 - protein, 21 aa, Artificial Sequence
  Description of Artificial Sequence: Synthetic peptide
  Seed: PRMCSLMQGSTLPRRSGAAGA
PRMWSLLQTSTVPRRSGAAGA

SEQ ID NO: 121339 - protein, 21 aa, Artificial Sequence
  Description of Artificial Sequence: Synthetic peptide
  Seed: PRMCSLMQGSTLPRRSGAAGA
PRMWSLMQASTAPRRSGAAGA

SEQ ID NO: 121340 - protein, 21 aa, Artificial Sequence
  Description of Artificial Sequence: Synthetic peptide
  Seed: PRMCSLMQGSTLPRRSGAAGA
PRMWSLMQASTIPRRSGAAGA

SEQ ID NO: 121341 - protein, 21 aa, Artificial Sequence
  Description of Artificial Sequence: Synthetic peptide
  Seed: PRMCSLMQGSTLPRRSGAAGA
PRMWSLMQASTLPRRSGAAGA

SEQ ID NO: 121342 - protein, 21 aa, Artificial Sequence
  Description of Artificial Sequence: Synthetic peptide
  Seed: PRMCSLMQGSTLPRRSGAAGA
PRMWSLMQASTMPRRSGAAGA

SEQ ID NO: 121343 - protein, 21 aa, Artificial Sequence
  Description of Artificial Sequence: Synthetic peptide
  Seed: PRMCSLMQGSTLPRRSGAAGA
PRMWSLMQASTSPRRSGAAGA

SEQ ID NO: 121344 - protein, 21 aa, Artificial Sequence
  Description of Artificial Sequence: Synthetic peptide
  Seed: PRMCSLMQGSTLPRRSGAAGA
PRMWSLMQASTTPRRSGAAGA

SEQ ID NO: 121345 - protein, 21 aa, Artificial Sequence
  Description of Artificial Sequence: Synthetic peptide
  Seed: PRMCSLMQGSTLPRRSGAAGA
PRMWSLMQASTVPRRSGAAGA

SEQ ID NO: 121346 - protein, 21 aa, Artificial Sequence
  Description of Artificial Sequence: Synthetic peptide
  Seed: PRMCSLMQGSTLPRRSGAAGA
PRMWSLMQGSTAPRRSGAAGA

SEQ ID NO: 121347 - protein, 21 aa, Artificial Sequence
  Description of Artificial Sequence: Synthetic peptide
  Seed: PRMCSLMQGSTLPRRSGAAGA
PRMWSLMQGSTIPRRSGAAGA

SEQ ID NO: 121348 - protein, 21 aa, Artificial Sequence
  Description of Artificial Sequence: Synthetic peptide
  Seed: PRMCSLMQGSTLPRRSGAAGA
PRMWSLMQGSTLPRRSGAAGA

SEQ ID NO: 121349 - protein, 21 aa, Artificial Sequence
  Description of Artificial Sequence: Synthetic peptide
  Seed: PRMCSLMQGSTLPRRSGAAGA
PRMWSLMQGSTMPRRSGAAGA

SEQ ID NO: 121350 - protein, 21 aa, Artificial Sequence
  Description of Artificial Sequence: Synthetic peptide
  Seed: PRMCSLMQGSTLPRRSGAAGA
PRMWSLMQGSTSPRRSGAAGA

SEQ ID NO: 121351 - protein, 21 aa, Artificial Sequence
  Description of Artificial Sequence: Synthetic peptide
  Seed: PRMCSLMQGSTLPRRSGAAGA
PRMWSLMQGSTTPRRSGAAGA

SEQ ID NO: 121352 - protein, 21 aa, Artificial Sequence
  Description of Artificial Sequence: Synthetic peptide
  Seed: PRMCSLMQGSTLPRRSGAAGA
PRMWSLMQGSTVPRRSGAAGA

SEQ ID NO: 121353 - protein, 21 aa, Artificial Sequence
  Description of Artificial Sequence: Synthetic peptide
  Seed: PRMCSLMQGSTLPRRSGAAGA
PRMWSLMQNSTIPRRSGAAGA

SEQ ID NO: 121354 - protein, 21 aa, Artificial Sequence
  Description of Artificial Sequence: Synthetic peptide
  Seed: PRMCSLMQGSTLPRRSGAAGA
PRMWSLMQNSTLPRRSGAAGA

SEQ ID NO: 121355 - protein, 21 aa, Artificial Sequence
  Description of Artificial Sequence: Synthetic peptide
  Seed: PRMCSLMQGSTLPRRSGAAGA
PRMWSLMQNSTVPRRSGAAGA

SEQ ID NO: 121356 - protein, 21 aa, Artificial Sequence
  Description of Artificial Sequence: Synthetic peptide
  Seed: PRMCSLMQGSTLPRRSGAAGA
PRMWSLMQPSTAPRRSGAAGA

SEQ ID NO: 121357 - protein, 21 aa, Artificial Sequence
  Description of Artificial Sequence: Synthetic peptide
  Seed: PRMCSLMQGSTLPRRSGAAGA
PRMWSLMQPSTIPRRSGAAGA

SEQ ID NO: 121358 - protein, 21 aa, Artificial Sequence
  Description of Artificial Sequence: Synthetic peptide
  Seed: PRMCSLMQGSTLPRRSGAAGA
PRMWSLMQPSTLPRRSGAAGA

SEQ ID NO: 121359 - protein, 21 aa, Artificial Sequence
  Description of Artificial Sequence: Synthetic peptide
  Seed: PRMCSLMQGSTLPRRSGAAGA
PRMWSLMQPSTVPRRSGAAGA

SEQ ID NO: 121360 - protein, 21 aa, Artificial Sequence
  Description of Artificial Sequence: Synthetic peptide
  Seed: PRMCSLMQGSTLPRRSGAAGA
PRMWSLMQSSTAPRRSGAAGA

SEQ ID NO: 121361 - protein, 21 aa, Artificial Sequence
  Description of Artificial Sequence: Synthetic peptide
  Seed: PRMCSLMQGSTLPRRSGAAGA
PRMWSLMQSSTIPRRSGAAGA

SEQ ID NO: 121362 - protein, 21 aa, Artificial Sequence
  Description of Artificial Sequence: Synthetic peptide
  Seed: PRMCSLMQGSTLPRRSGAAGA
PRMWSLMQSSTLPRRSGAAGA

SEQ ID NO: 121363 - protein, 21 aa, Artificial Sequence
  Description of Artificial Sequence: Synthetic peptide
  Seed: PRMCSLMQGSTLPRRSGAAGA
PRMWSLMQSSTMPRRSGAAGA

SEQ ID NO: 121364 - protein, 21 aa, Artificial Sequence
  Description of Artificial Sequence: Synthetic peptide
  Seed: PRMCSLMQGSTLPRRSGAAGA
PRMWSLMQSSTTPRRSGAAGA

SEQ ID NO: 121365 - protein, 21 aa, Artificial Sequence
  Description of Artificial Sequence: Synthetic peptide
  Seed: PRMCSLMQGSTLPRRSGAAGA
PRMWSLMQSSTVPRRSGAAGA

SEQ ID NO: 121366 - protein, 21 aa, Artificial Sequence
  Description of Artificial Sequence: Synthetic peptide
  Seed: PRMCSLMQGSTLPRRSGAAGA
PRMWSLMQTSTAPRRSGAAGA

SEQ ID NO: 121367 - protein, 21 aa, Artificial Sequence
  Description of Artificial Sequence: Synthetic peptide
  Seed: PRMCSLMQGSTLPRRSGAAGA
PRMWSLMQTSTIPRRSGAAGA

SEQ ID NO: 121368 - protein, 21 aa, Artificial Sequence
  Description of Artificial Sequence: Synthetic peptide
  Seed: PRMCSLMQGSTLPRRSGAAGA
PRMWSLMQTSTLPRRSGAAGA

SEQ ID NO: 121369 - protein, 21 aa, Artificial Sequence
  Description of Artificial Sequence: Synthetic peptide
  Seed: PRMCSLMQGSTLPRRSGAAGA
PRMWSLMQTSTVPRRSGAAGA

SEQ ID NO: 121370 - protein, 21 aa, Artificial Sequence
  Description of Artificial Sequence: Synthetic peptide
  Seed: PRMCSLMQGSTLPRRSGAAGA
PRMWSLQQASTIPRRSGAAGA

SEQ ID NO: 121371 - protein, 21 aa, Artificial Sequence
  Description of Artificial Sequence: Synthetic peptide
  Seed: PRMCSLMQGSTLPRRSGAAGA
PRMWSLQQASTLPRRSGAAGA

SEQ ID NO: 121372 - protein, 21 aa, Artificial Sequence
  Description of Artificial Sequence: Synthetic peptide
  Seed: PRMCSLMQGSTLPRRSGAAGA
PRMWSLQQASTVPRRSGAAGA

SEQ ID NO: 121373 - protein, 21 aa, Artificial Sequence
  Description of Artificial Sequence: Synthetic peptide
  Seed: PRMCSLMQGSTLPRRSGAAGA
PRMWSLVQASTLPRRSGAAGA

SEQ ID NO: 121374 - protein, 21 aa, Artificial Sequence
  Description of Artificial Sequence: Synthetic peptide
  Seed: PRMCSLMQGSTLPRRSGAAGA
PRMWSLVQASTVPRRSGAAGA

SEQ ID NO: 121375 - protein, 21 aa, Artificial Sequence
  Description of Artificial Sequence: Synthetic peptide
  Seed: PRMCSLMQGSTLPRRSGAAGA
PRMYSLAQASTAPRRSGAAGA

SEQ ID NO: 121376 - protein, 21 aa, Artificial Sequence
  Description of Artificial Sequence: Synthetic peptide
  Seed: PRMCSLMQGSTLPRRSGAAGA
PRMYSLAQASTIPRRSGAAGA

SEQ ID NO: 121377 - protein, 21 aa, Artificial Sequence
  Description of Artificial Sequence: Synthetic peptide
  Seed: PRMCSLMQGSTLPRRSGAAGA
PRMYSLAQASTLPRRSGAAGA

SEQ ID NO: 121378 - protein, 21 aa, Artificial Sequence
  Description of Artificial Sequence: Synthetic peptide
  Seed: PRMCSLMQGSTLPRRSGAAGA
PRMYSLAQASTMPRRSGAAGA

SEQ ID NO: 121379 - protein, 21 aa, Artificial Sequence
  Description of Artificial Sequence: Synthetic peptide
  Seed: PRMCSLMQGSTLPRRSGAAGA
PRMYSLAQASTSPRRSGAAGA

SEQ ID NO: 121380 - protein, 21 aa, Artificial Sequence
  Description of Artificial Sequence: Synthetic peptide
  Seed: PRMCSLMQGSTLPRRSGAAGA
PRMYSLAQASTTPRRSGAAGA

SEQ ID NO: 121381 - protein, 21 aa, Artificial Sequence
  Description of Artificial Sequence: Synthetic peptide
  Seed: PRMCSLMQGSTLPRRSGAAGA
PRMYSLAQASTVPRRSGAAGA

SEQ ID NO: 121382 - protein, 21 aa, Artificial Sequence
  Description of Artificial Sequence: Synthetic peptide
  Seed: PRMCSLMQGSTLPRRSGAAGA
PRMYSLAQGSTAPRRSGAAGA

SEQ ID NO: 121383 - protein, 21 aa, Artificial Sequence
  Description of Artificial Sequence: Synthetic peptide
  Seed: PRMCSLMQGSTLPRRSGAAGA
PRMYSLAQGSTIPRRSGAAGA

SEQ ID NO: 121384 - protein, 21 aa, Artificial Sequence
  Description of Artificial Sequence: Synthetic peptide
  Seed: PRMCSLMQGSTLPRRSGAAGA
PRMYSLAQGSTLPRRSGAAGA

SEQ ID NO: 121385 - protein, 21 aa, Artificial Sequence
  Description of Artificial Sequence: Synthetic peptide
  Seed: PRMCSLMQGSTLPRRSGAAGA
PRMYSLAQGSTMPRRSGAAGA

SEQ ID NO: 121386 - protein, 21 aa, Artificial Sequence
  Description of Artificial Sequence: Synthetic peptide
  Seed: PRMCSLMQGSTLPRRSGAAGA
PRMYSLAQGSTVPRRSGAAGA

SEQ ID NO: 121387 - protein, 21 aa, Artificial Sequence
  Description of Artificial Sequence: Synthetic peptide
  Seed: PRMCSLMQGSTLPRRSGAAGA
PRMYSLAQPSTAPRRSGAAGA

SEQ ID NO: 121388 - protein, 21 aa, Artificial Sequence
  Description of Artificial Sequence: Synthetic peptide
  Seed: PRMCSLMQGSTLPRRSGAAGA
PRMYSLAQPSTIPRRSGAAGA

SEQ ID NO: 121389 - protein, 21 aa, Artificial Sequence
  Description of Artificial Sequence: Synthetic peptide
  Seed: PRMCSLMQGSTLPRRSGAAGA
PRMYSLAQPSTLPRRSGAAGA

SEQ ID NO: 121390 - protein, 21 aa, Artificial Sequence
  Description of Artificial Sequence: Synthetic peptide
  Seed: PRMCSLMQGSTLPRRSGAAGA
PRMYSLAQPSTVPRRSGAAGA

SEQ ID NO: 121391 - protein, 21 aa, Artificial Sequence
  Description of Artificial Sequence: Synthetic peptide
  Seed: PRMCSLMQGSTLPRRSGAAGA
PRMYSLAQSSTAPRRSGAAGA

SEQ ID NO: 121392 - protein, 21 aa, Artificial Sequence
  Description of Artificial Sequence: Synthetic peptide
  Seed: PRMCSLMQGSTLPRRSGAAGA
PRMYSLAQSSTIPRRSGAAGA

SEQ ID NO: 121393 - protein, 21 aa, Artificial Sequence
  Description of Artificial Sequence: Synthetic peptide
  Seed: PRMCSLMQGSTLPRRSGAAGA
PRMYSLAQSSTLPRRSGAAGA

SEQ ID NO: 121394 - protein, 21 aa, Artificial Sequence
  Description of Artificial Sequence: Synthetic peptide
  Seed: PRMCSLMQGSTLPRRSGAAGA
PRMYSLAQSSTVPRRSGAAGA

SEQ ID NO: 121395 - protein, 21 aa, Artificial Sequence
  Description of Artificial Sequence: Synthetic peptide
  Seed: PRMCSLMQGSTLPRRSGAAGA
PRMYSLEQASTLPRRSGAAGA

SEQ ID NO: 121396 - protein, 21 aa, Artificial Sequence
  Description of Artificial Sequence: Synthetic peptide
  Seed: PRMCSLMQGSTLPRRSGAAGA
PRMYSLEQASTVPRRSGAAGA

SEQ ID NO: 121397 - protein, 21 aa, Artificial Sequence
  Description of Artificial Sequence: Synthetic peptide
  Seed: PRMCSLMQGSTLPRRSGAAGA
PRMYSLFQASTAPRRSGAAGA

SEQ ID NO: 121398 - protein, 21 aa, Artificial Sequence
  Description of Artificial Sequence: Synthetic peptide
  Seed: PRMCSLMQGSTLPRRSGAAGA
PRMYSLFQASTVPRRSGAAGA

SEQ ID NO: 121399 - protein, 21 aa, Artificial Sequence
  Description of Artificial Sequence: Synthetic peptide
  Seed: PRMCSLMQGSTLPRRSGAAGA
PRMYSLGQASTIPRRSGAAGA

SEQ ID NO: 121400 - protein, 21 aa, Artificial Sequence
  Description of Artificial Sequence: Synthetic peptide
  Seed: PRMCSLMQGSTLPRRSGAAGA
PRMYSLGQASTLPRRSGAAGA

SEQ ID NO: 121401 - protein, 21 aa, Artificial Sequence
  Description of Artificial Sequence: Synthetic peptide
  Seed: PRMCSLMQGSTLPRRSGAAGA
PRMYSLIQASTAPRRSGAAGA

SEQ ID NO: 121402 - protein, 21 aa, Artificial Sequence
  Description of Artificial Sequence: Synthetic peptide
  Seed: PRMCSLMQGSTLPRRSGAAGA
PRMYSLIQASTGPRRSGAAGA

SEQ ID NO: 121403 - protein, 21 aa, Artificial Sequence
  Description of Artificial Sequence: Synthetic peptide
  Seed: PRMCSLMQGSTLPRRSGAAGA
PRMYSLIQASTIPRRSGAAGA

SEQ ID NO: 121404 - protein, 21 aa, Artificial Sequence
  Description of Artificial Sequence: Synthetic peptide
  Seed: PRMCSLMQGSTLPRRSGAAGA
PRMYSLIQASTLPRRSGAAGA

SEQ ID NO: 121405 - protein, 21 aa, Artificial Sequence
  Description of Artificial Sequence: Synthetic peptide
  Seed: PRMCSLMQGSTLPRRSGAAGA
PRMYSLIQASTMPRRSGAAGA

SEQ ID NO: 121406 - protein, 21 aa, Artificial Sequence
  Description of Artificial Sequence: Synthetic peptide
  Seed: PRMCSLMQGSTLPRRSGAAGA
PRMYSLIQASTSPRRSGAAGA

SEQ ID NO: 121407 - protein, 21 aa, Artificial Sequence
  Description of Artificial Sequence: Synthetic peptide
  Seed: PRMCSLMQGSTLPRRSGAAGA
PRMYSLIQASTTPRRSGAAGA

SEQ ID NO: 121408 - protein, 21 aa, Artificial Sequence
  Description of Artificial Sequence: Synthetic peptide
  Seed: PRMCSLMQGSTLPRRSGAAGA
PRMYSLIQASTVPRRSGAAGA

SEQ ID NO: 121409 - protein, 21 aa, Artificial Sequence
  Description of Artificial Sequence: Synthetic peptide
  Seed: PRMCSLMQGSTLPRRSGAAGA
PRMYSLIQGSTAPRRSGAAGA

SEQ ID NO: 121410 - protein, 21 aa, Artificial Sequence
  Description of Artificial Sequence: Synthetic peptide
  Seed: PRMCSLMQGSTLPRRSGAAGA
PRMYSLIQGSTIPRRSGAAGA

SEQ ID NO: 121411 - protein, 21 aa, Artificial Sequence
  Description of Artificial Sequence: Synthetic peptide
  Seed: PRMCSLMQGSTLPRRSGAAGA
PRMYSLIQGSTLPRRSGAAGA

SEQ ID NO: 121412 - protein, 21 aa, Artificial Sequence
  Description of Artificial Sequence: Synthetic peptide
  Seed: PRMCSLMQGSTLPRRSGAAGA
PRMYSLIQGSTMPRRSGAAGA

SEQ ID NO: 121413 - protein, 21 aa, Artificial Sequence
  Description of Artificial Sequence: Synthetic peptide
  Seed: PRMCSLMQGSTLPRRSGAAGA
PRMYSLIQGSTSPRRSGAAGA

SEQ ID NO: 121414 - protein, 21 aa, Artificial Sequence
  Description of Artificial Sequence: Synthetic peptide
  Seed: PRMCSLMQGSTLPRRSGAAGA
PRMYSLIQGSTTPRRSGAAGA

SEQ ID NO: 121415 - protein, 21 aa, Artificial Sequence
  Description of Artificial Sequence: Synthetic peptide
  Seed: PRMCSLMQGSTLPRRSGAAGA
PRMYSLIQGSTVPRRSGAAGA

SEQ ID NO: 121416 - protein, 21 aa, Artificial Sequence
  Description of Artificial Sequence: Synthetic peptide
  Seed: PRMCSLMQGSTLPRRSGAAGA
PRMYSLIQNSTIPRRSGAAGA

SEQ ID NO: 121417 - protein, 21 aa, Artificial Sequence
  Description of Artificial Sequence: Synthetic peptide
  Seed: PRMCSLMQGSTLPRRSGAAGA
PRMYSLIQNSTLPRRSGAAGA

SEQ ID NO: 121418 - protein, 21 aa, Artificial Sequence
  Description of Artificial Sequence: Synthetic peptide
  Seed: PRMCSLMQGSTLPRRSGAAGA
PRMYSLIQNSTVPRRSGAAGA

SEQ ID NO: 121419 - protein, 21 aa, Artificial Sequence
  Description of Artificial Sequence: Synthetic peptide
  Seed: PRMCSLMQGSTLPRRSGAAGA
PRMYSLIQPSTAPRRSGAAGA

SEQ ID NO: 121420 - protein, 21 aa, Artificial Sequence
  Description of Artificial Sequence: Synthetic peptide
  Seed: PRMCSLMQGSTLPRRSGAAGA
PRMYSLIQPSTIPRRSGAAGA

SEQ ID NO: 121421 - protein, 21 aa, Artificial Sequence
  Description of Artificial Sequence: Synthetic peptide
  Seed: PRMCSLMQGSTLPRRSGAAGA
PRMYSLIQPSTLPRRSGAAGA

SEQ ID NO: 121422 - protein, 21 aa, Artificial Sequence
  Description of Artificial Sequence: Synthetic peptide
  Seed: PRMCSLMQGSTLPRRSGAAGA
PRMYSLIQPSTMPRRSGAAGA

SEQ ID NO: 121423 - protein, 21 aa, Artificial Sequence
  Description of Artificial Sequence: Synthetic peptide
  Seed: PRMCSLMQGSTLPRRSGAAGA
PRMYSLIQPSTVPRRSGAAGA

SEQ ID NO: 121424 - protein, 21 aa, Artificial Sequence
  Description of Artificial Sequence: Synthetic peptide
  Seed: PRMCSLMQGSTLPRRSGAAGA
PRMYSLIQSSTAPRRSGAAGA

SEQ ID NO: 121425 - protein, 21 aa, Artificial Sequence
  Description of Artificial Sequence: Synthetic peptide
  Seed: PRMCSLMQGSTLPRRSGAAGA
PRMYSLIQSSTIPRRSGAAGA

SEQ ID NO: 121426 - protein, 21 aa, Artificial Sequence
  Description of Artificial Sequence: Synthetic peptide
  Seed: PRMCSLMQGSTLPRRSGAAGA
PRMYSLIQSSTLPRRSGAAGA

SEQ ID NO: 121427 - protein, 21 aa, Artificial Sequence
  Description of Artificial Sequence: Synthetic peptide
  Seed: PRMCSLMQGSTLPRRSGAAGA
PRMYSLIQSSTMPRRSGAAGA

SEQ ID NO: 121428 - protein, 21 aa, Artificial Sequence
  Description of Artificial Sequence: Synthetic peptide
  Seed: PRMCSLMQGSTLPRRSGAAGA
PRMYSLIQSSTTPRRSGAAGA

SEQ ID NO: 121429 - protein, 21 aa, Artificial Sequence
  Description of Artificial Sequence: Synthetic peptide
  Seed: PRMCSLMQGSTLPRRSGAAGA
PRMYSLIQSSTVPRRSGAAGA

SEQ ID NO: 121430 - protein, 21 aa, Artificial Sequence
  Description of Artificial Sequence: Synthetic peptide
  Seed: PRMCSLMQGSTLPRRSGAAGA
PRMYSLIQTSTAPRRSGAAGA

SEQ ID NO: 121431 - protein, 21 aa, Artificial Sequence
  Description of Artificial Sequence: Synthetic peptide
  Seed: PRMCSLMQGSTLPRRSGAAGA
PRMYSLIQTSTIPRRSGAAGA

SEQ ID NO: 121432 - protein, 21 aa, Artificial Sequence
  Description of Artificial Sequence: Synthetic peptide
  Seed: PRMCSLMQGSTLPRRSGAAGA
PRMYSLIQTSTLPRRSGAAGA

SEQ ID NO: 121433 - protein, 21 aa, Artificial Sequence
  Description of Artificial Sequence: Synthetic peptide
  Seed: PRMCSLMQGSTLPRRSGAAGA
PRMYSLIQTSTVPRRSGAAGA

SEQ ID NO: 121434 - protein, 21 aa, Artificial Sequence
  Description of Artificial Sequence: Synthetic peptide
  Seed: PRMCSLMQGSTLPRRSGAAGA
PRMYSLLQASTAPRRSGAAGA

SEQ ID NO: 121435 - protein, 21 aa, Artificial Sequence
  Description of Artificial Sequence: Synthetic peptide
  Seed: PRMCSLMQGSTLPRRSGAAGA
PRMYSLLQASTCPRRSGAAGA

SEQ ID NO: 121436 - protein, 21 aa, Artificial Sequence
  Description of Artificial Sequence: Synthetic peptide
  Seed: PRMCSLMQGSTLPRRSGAAGA
PRMYSLLQASTFPRRSGAAGA

SEQ ID NO: 121437 - protein, 21 aa, Artificial Sequence
  Description of Artificial Sequence: Synthetic peptide
  Seed: PRMCSLMQGSTLPRRSGAAGA
PRMYSLLQASTGPRRSGAAGA

SEQ ID NO: 121438 - protein, 21 aa, Artificial Sequence
  Description of Artificial Sequence: Synthetic peptide
  Seed: PRMCSLMQGSTLPRRSGAAGA
PRMYSLLQASTIPRRSGAAGA

SEQ ID NO: 121439 - protein, 21 aa, Artificial Sequence
  Description of Artificial Sequence: Synthetic peptide
  Seed: PRMCSLMQGSTLPRRSGAAGA
PRMYSLLQASTLPRRSGAAGA

SEQ ID NO: 121440 - protein, 21 aa, Artificial Sequence
  Description of Artificial Sequence: Synthetic peptide
  Seed: PRMCSLMQGSTLPRRSGAAGA
PRMYSLLQASTMPRRSGAAGA

SEQ ID NO: 121441 - protein, 21 aa, Artificial Sequence
  Description of Artificial Sequence: Synthetic peptide
  Seed: PRMCSLMQGSTLPRRSGAAGA
PRMYSLLQASTNPRRSGAAGA

SEQ ID NO: 121442 - protein, 21 aa, Artificial Sequence
  Description of Artificial Sequence: Synthetic peptide
  Seed: PRMCSLMQGSTLPRRSGAAGA
PRMYSLLQASTSPRRSGAAGA

SEQ ID NO: 121443 - protein, 21 aa, Artificial Sequence
  Description of Artificial Sequence: Synthetic peptide
  Seed: PRMCSLMQGSTLPRRSGAAGA
PRMYSLLQASTTPRRSGAAGA

SEQ ID NO: 121444 - protein, 21 aa, Artificial Sequence
  Description of Artificial Sequence: Synthetic peptide
  Seed: PRMCSLMQGSTLPRRSGAAGA
PRMYSLLQASTVPRRSGAAGA

SEQ ID NO: 121445 - protein, 21 aa, Artificial Sequence
  Description of Artificial Sequence: Synthetic peptide
  Seed: PRMCSLMQGSTLPRRSGAAGA
PRMYSLLQGSTAPRRSGAAGA

SEQ ID NO: 121446 - protein, 21 aa, Artificial Sequence
  Description of Artificial Sequence: Synthetic peptide
  Seed: PRMCSLMQGSTLPRRSGAAGA
PRMYSLLQGSTGPRRSGAAGA

SEQ ID NO: 121447 - protein, 21 aa, Artificial Sequence
  Description of Artificial Sequence: Synthetic peptide
  Seed: PRMCSLMQGSTLPRRSGAAGA
PRMYSLLQGSTIPRRSGAAGA

SEQ ID NO: 121448 - protein, 21 aa, Artificial Sequence
  Description of Artificial Sequence: Synthetic peptide
  Seed: PRMCSLMQGSTLPRRSGAAGA
PRMYSLLQGSTLPRRSGAAGA

SEQ ID NO: 121449 - protein, 21 aa, Artificial Sequence
  Description of Artificial Sequence: Synthetic peptide
  Seed: PRMCSLMQGSTLPRRSGAAGA
PRMYSLLQGSTMPRRSGAAGA

SEQ ID NO: 121450 - protein, 21 aa, Artificial Sequence
  Description of Artificial Sequence: Synthetic peptide
  Seed: PRMCSLMQGSTLPRRSGAAGA
PRMYSLLQGSTSPRRSGAAGA

SEQ ID NO: 121451 - protein, 21 aa, Artificial Sequence
  Description of Artificial Sequence: Synthetic peptide
  Seed: PRMCSLMQGSTLPRRSGAAGA
PRMYSLLQGSTTPRRSGAAGA

SEQ ID NO: 121452 - protein, 21 aa, Artificial Sequence
  Description of Artificial Sequence: Synthetic peptide
  Seed: PRMCSLMQGSTLPRRSGAAGA
PRMYSLLQGSTVPRRSGAAGA

SEQ ID NO: 121453 - protein, 21 aa, Artificial Sequence
  Description of Artificial Sequence: Synthetic peptide
  Seed: PRMCSLMQGSTLPRRSGAAGA
PRMYSLLQNSTAPRRSGAAGA

SEQ ID NO: 121454 - protein, 21 aa, Artificial Sequence
  Description of Artificial Sequence: Synthetic peptide
  Seed: PRMCSLMQGSTLPRRSGAAGA
PRMYSLLQNSTIPRRSGAAGA

SEQ ID NO: 121455 - protein, 21 aa, Artificial Sequence
  Description of Artificial Sequence: Synthetic peptide
  Seed: PRMCSLMQGSTLPRRSGAAGA
PRMYSLLQNSTLPRRSGAAGA

SEQ ID NO: 121456 - protein, 21 aa, Artificial Sequence
  Description of Artificial Sequence: Synthetic peptide
  Seed: PRMCSLMQGSTLPRRSGAAGA
PRMYSLLQNSTMPRRSGAAGA

SEQ ID NO: 121457 - protein, 21 aa, Artificial Sequence
  Description of Artificial Sequence: Synthetic peptide
  Seed: PRMCSLMQGSTLPRRSGAAGA
PRMYSLLQNSTTPRRSGAAGA

SEQ ID NO: 121458 - protein, 21 aa, Artificial Sequence
  Description of Artificial Sequence: Synthetic peptide
  Seed: PRMCSLMQGSTLPRRSGAAGA
PRMYSLLQNSTVPRRSGAAGA

SEQ ID NO: 121459 - protein, 21 aa, Artificial Sequence
  Description of Artificial Sequence: Synthetic peptide
  Seed: PRMCSLMQGSTLPRRSGAAGA
PRMYSLLQPSTAPRRSGAAGA

SEQ ID NO: 121460 - protein, 21 aa, Artificial Sequence
  Description of Artificial Sequence: Synthetic peptide
  Seed: PRMCSLMQGSTLPRRSGAAGA
PRMYSLLQPSTIPRRSGAAGA

SEQ ID NO: 121461 - protein, 21 aa, Artificial Sequence
  Description of Artificial Sequence: Synthetic peptide
  Seed: PRMCSLMQGSTLPRRSGAAGA
PRMYSLLQPSTLPRRSGAAGA

SEQ ID NO: 121462 - protein, 21 aa, Artificial Sequence
  Description of Artificial Sequence: Synthetic peptide
  Seed: PRMCSLMQGSTLPRRSGAAGA
PRMYSLLQPSTMPRRSGAAGA

SEQ ID NO: 121463 - protein, 21 aa, Artificial Sequence
  Description of Artificial Sequence: Synthetic peptide
  Seed: PRMCSLMQGSTLPRRSGAAGA
PRMYSLLQPSTSPRRSGAAGA

SEQ ID NO: 121464 - protein, 21 aa, Artificial Sequence
  Description of Artificial Sequence: Synthetic peptide
  Seed: PRMCSLMQGSTLPRRSGAAGA
PRMYSLLQPSTTPRRSGAAGA

SEQ ID NO: 121465 - protein, 21 aa, Artificial Sequence
  Description of Artificial Sequence: Synthetic peptide
  Seed: PRMCSLMQGSTLPRRSGAAGA
PRMYSLLQPSTVPRRSGAAGA

SEQ ID NO: 121466 - protein, 21 aa, Artificial Sequence
  Description of Artificial Sequence: Synthetic peptide
  Seed: PRMCSLMQGSTLPRRSGAAGA
PRMYSLLQSSTAPRRSGAAGA

SEQ ID NO: 121467 - protein, 21 aa, Artificial Sequence
  Description of Artificial Sequence: Synthetic peptide
  Seed: PRMCSLMQGSTLPRRSGAAGA
PRMYSLLQSSTGPRRSGAAGA

SEQ ID NO: 121468 - protein, 21 aa, Artificial Sequence
  Description of Artificial Sequence: Synthetic peptide
  Seed: PRMCSLMQGSTLPRRSGAAGA
PRMYSLLQSSTIPRRSGAAGA

SEQ ID NO: 121469 - protein, 21 aa, Artificial Sequence
  Description of Artificial Sequence: Synthetic peptide
  Seed: PRMCSLMQGSTLPRRSGAAGA
PRMYSLLQSSTLPRRSGAAGA

SEQ ID NO: 121470 - protein, 21 aa, Artificial Sequence
  Description of Artificial Sequence: Synthetic peptide
  Seed: PRMCSLMQGSTLPRRSGAAGA
PRMYSLLQSSTMPRRSGAAGA

SEQ ID NO: 121471 - protein, 21 aa, Artificial Sequence
  Description of Artificial Sequence: Synthetic peptide
  Seed: PRMCSLMQGSTLPRRSGAAGA
PRMYSLLQSSTSPRRSGAAGA

SEQ ID NO: 121472 - protein, 21 aa, Artificial Sequence
  Description of Artificial Sequence: Synthetic peptide
  Seed: PRMCSLMQGSTLPRRSGAAGA
PRMYSLLQSSTTPRRSGAAGA

SEQ ID NO: 121473 - protein, 21 aa, Artificial Sequence
  Description of Artificial Sequence: Synthetic peptide
  Seed: PRMCSLMQGSTLPRRSGAAGA
PRMYSLLQSSTVPRRSGAAGA

SEQ ID NO: 121474 - protein, 21 aa, Artificial Sequence
  Description of Artificial Sequence: Synthetic peptide
  Seed: PRMCSLMQGSTLPRRSGAAGA
PRMYSLLQTSTAPRRSGAAGA

SEQ ID NO: 121475 - protein, 21 aa, Artificial Sequence
  Description of Artificial Sequence: Synthetic peptide
  Seed: PRMCSLMQGSTLPRRSGAAGA
PRMYSLLQTSTIPRRSGAAGA

SEQ ID NO: 121476 - protein, 21 aa, Artificial Sequence
  Description of Artificial Sequence: Synthetic peptide
  Seed: PRMCSLMQGSTLPRRSGAAGA
PRMYSLLQTSTLPRRSGAAGA

SEQ ID NO: 121477 - protein, 21 aa, Artificial Sequence
  Description of Artificial Sequence: Synthetic peptide
  Seed: PRMCSLMQGSTLPRRSGAAGA
PRMYSLLQTSTMPRRSGAAGA

SEQ ID NO: 121478 - protein, 21 aa, Artificial Sequence
  Description of Artificial Sequence: Synthetic peptide
  Seed: PRMCSLMQGSTLPRRSGAAGA
PRMYSLLQTSTTPRRSGAAGA

SEQ ID NO: 121479 - protein, 21 aa, Artificial Sequence
  Description of Artificial Sequence: Synthetic peptide
  Seed: PRMCSLMQGSTLPRRSGAAGA
PRMYSLLQTSTVPRRSGAAGA

SEQ ID NO: 121480 - protein, 21 aa, Artificial Sequence
  Description of Artificial Sequence: Synthetic peptide
  Seed: PRMCSLMQGSTLPRRSGAAGA
PRMYSLLQVSTAPRRSGAAGA

SEQ ID NO: 121481 - protein, 21 aa, Artificial Sequence
  Description of Artificial Sequence: Synthetic peptide
  Seed: PRMCSLMQGSTLPRRSGAAGA
PRMYSLLQVSTIPRRSGAAGA

SEQ ID NO: 121482 - protein, 21 aa, Artificial Sequence
  Description of Artificial Sequence: Synthetic peptide
  Seed: PRMCSLMQGSTLPRRSGAAGA
PRMYSLLQVSTLPRRSGAAGA

SEQ ID NO: 121483 - protein, 21 aa, Artificial Sequence
  Description of Artificial Sequence: Synthetic peptide
  Seed: PRMCSLMQGSTLPRRSGAAGA
PRMYSLLQVSTVPRRSGAAGA

SEQ ID NO: 121484 - protein, 21 aa, Artificial Sequence
  Description of Artificial Sequence: Synthetic peptide
  Seed: PRMCSLMQGSTLPRRSGAAGA
PRMYSLMQASTAPRRSGAAGA

SEQ ID NO: 121485 - protein, 21 aa, Artificial Sequence
  Description of Artificial Sequence: Synthetic peptide
  Seed: PRMCSLMQGSTLPRRSGAAGA
PRMYSLMQASTCPRRSGAAGA

SEQ ID NO: 121486 - protein, 21 aa, Artificial Sequence
  Description of Artificial Sequence: Synthetic peptide
  Seed: PRMCSLMQGSTLPRRSGAAGA
PRMYSLMQASTFPRRSGAAGA

SEQ ID NO: 121487 - protein, 21 aa, Artificial Sequence
  Description of Artificial Sequence: Synthetic peptide
  Seed: PRMCSLMQGSTLPRRSGAAGA
PRMYSLMQASTGPRRSGAAGA

SEQ ID NO: 121488 - protein, 21 aa, Artificial Sequence
  Description of Artificial Sequence: Synthetic peptide
  Seed: PRMCSLMQGSTLPRRSGAAGA
PRMYSLMQASTIPRRSGAAGA

SEQ ID NO: 121489 - protein, 21 aa, Artificial Sequence
  Description of Artificial Sequence: Synthetic peptide
  Seed: PRMCSLMQGSTLPRRSGAAGA
PRMYSLMQASTLPRRSGAAGA

SEQ ID NO: 121490 - protein, 21 aa, Artificial Sequence
  Description of Artificial Sequence: Synthetic peptide
  Seed: PRMCSLMQGSTLPRRSGAAGA
PRMYSLMQASTMPRRSGAAGA

SEQ ID NO: 121491 - protein, 21 aa, Artificial Sequence
  Description of Artificial Sequence: Synthetic peptide
  Seed: PRMCSLMQGSTLPRRSGAAGA
PRMYSLMQASTSPRRSGAAGA

SEQ ID NO: 121492 - protein, 21 aa, Artificial Sequence
  Description of Artificial Sequence: Synthetic peptide
  Seed: PRMCSLMQGSTLPRRSGAAGA
PRMYSLMQASTTPRRSGAAGA

SEQ ID NO: 121493 - protein, 21 aa, Artificial Sequence
  Description of Artificial Sequence: Synthetic peptide
  Seed: PRMCSLMQGSTLPRRSGAAGA
PRMYSLMQASTVPRRSGAAGA

SEQ ID NO: 121494 - protein, 21 aa, Artificial Sequence
  Description of Artificial Sequence: Synthetic peptide
  Seed: PRMCSLMQGSTLPRRSGAAGA
PRMYSLMQGSTAPRRSGAAGA

SEQ ID NO: 121495 - protein, 21 aa, Artificial Sequence
  Description of Artificial Sequence: Synthetic peptide
  Seed: PRMCSLMQGSTLPRRSGAAGA
PRMYSLMQGSTGPRRSGAAGA

SEQ ID NO: 121496 - protein, 21 aa, Artificial Sequence
  Description of Artificial Sequence: Synthetic peptide
  Seed: PRMCSLMQGSTLPRRSGAAGA
PRMYSLMQGSTIPRRSGAAGA

SEQ ID NO: 121497 - protein, 21 aa, Artificial Sequence
  Description of Artificial Sequence: Synthetic peptide
  Seed: PRMCSLMQGSTLPRRSGAAGA
PRMYSLMQGSTLPRRSGAAGA

SEQ ID NO: 121498 - protein, 21 aa, Artificial Sequence
  Description of Artificial Sequence: Synthetic peptide
  Seed: PRMCSLMQGSTLPRRSGAAGA
PRMYSLMQGSTMPRRSGAAGA

SEQ ID NO: 121499 - protein, 21 aa, Artificial Sequence
  Description of Artificial Sequence: Synthetic peptide
  Seed: PRMCSLMQGSTLPRRSGAAGA
PRMYSLMQGSTSPRRSGAAGA

SEQ ID NO: 121500 - protein, 21 aa, Artificial Sequence
  Description of Artificial Sequence: Synthetic peptide
  Seed: PRMCSLMQGSTLPRRSGAAGA
PRMYSLMQGSTTPRRSGAAGA

SEQ ID NO: 121501 - protein, 21 aa, Artificial Sequence
  Description of Artificial Sequence: Synthetic peptide
  Seed: PRMCSLMQGSTLPRRSGAAGA
PRMYSLMQGSTVPRRSGAAGA

SEQ ID NO: 121502 - protein, 21 aa, Artificial Sequence
  Description of Artificial Sequence: Synthetic peptide
  Seed: PRMCSLMQGSTLPRRSGAAGA
PRMYSLMQNSTAPRRSGAAGA

SEQ ID NO: 121503 - protein, 21 aa, Artificial Sequence
  Description of Artificial Sequence: Synthetic peptide
  Seed: PRMCSLMQGSTLPRRSGAAGA
PRMYSLMQNSTIPRRSGAAGA

SEQ ID NO: 121504 - protein, 21 aa, Artificial Sequence
  Description of Artificial Sequence: Synthetic peptide
  Seed: PRMCSLMQGSTLPRRSGAAGA
PRMYSLMQNSTLPRRSGAAGA

SEQ ID NO: 121505 - protein, 21 aa, Artificial Sequence
  Description of Artificial Sequence: Synthetic peptide
  Seed: PRMCSLMQGSTLPRRSGAAGA
PRMYSLMQNSTMPRRSGAAGA

SEQ ID NO: 121506 - protein, 21 aa, Artificial Sequence
  Description of Artificial Sequence: Synthetic peptide
  Seed: PRMCSLMQGSTLPRRSGAAGA
PRMYSLMQNSTTPRRSGAAGA

SEQ ID NO: 121507 - protein, 21 aa, Artificial Sequence
  Description of Artificial Sequence: Synthetic peptide
  Seed: PRMCSLMQGSTLPRRSGAAGA
PRMYSLMQNSTVPRRSGAAGA

SEQ ID NO: 121508 - protein, 21 aa, Artificial Sequence
  Description of Artificial Sequence: Synthetic peptide
  Seed: PRMCSLMQGSTLPRRSGAAGA
PRMYSLMQPSTAPRRSGAAGA

SEQ ID NO: 121509 - protein, 21 aa, Artificial Sequence
  Description of Artificial Sequence: Synthetic peptide
  Seed: PRMCSLMQGSTLPRRSGAAGA
PRMYSLMQPSTIPRRSGAAGA

SEQ ID NO: 121510 - protein, 21 aa, Artificial Sequence
  Description of Artificial Sequence: Synthetic peptide
  Seed: PRMCSLMQGSTLPRRSGAAGA
PRMYSLMQPSTLPRRSGAAGA

SEQ ID NO: 121511 - protein, 21 aa, Artificial Sequence
  Description of Artificial Sequence: Synthetic peptide
  Seed: PRMCSLMQGSTLPRRSGAAGA
PRMYSLMQPSTMPRRSGAAGA

SEQ ID NO: 121512 - protein, 21 aa, Artificial Sequence
  Description of Artificial Sequence: Synthetic peptide
  Seed: PRMCSLMQGSTLPRRSGAAGA
PRMYSLMQPSTSPRRSGAAGA

SEQ ID NO: 121513 - protein, 21 aa, Artificial Sequence
  Description of Artificial Sequence: Synthetic peptide
  Seed: PRMCSLMQGSTLPRRSGAAGA
PRMYSLMQPSTTPRRSGAAGA

SEQ ID NO: 121514 - protein, 21 aa, Artificial Sequence
  Description of Artificial Sequence: Synthetic peptide
  Seed: PRMCSLMQGSTLPRRSGAAGA
PRMYSLMQPSTVPRRSGAAGA

SEQ ID NO: 121515 - protein, 21 aa, Artificial Sequence
  Description of Artificial Sequence: Synthetic peptide
  Seed: PRMCSLMQGSTLPRRSGAAGA
PRMYSLMQSSTAPRRSGAAGA

SEQ ID NO: 121516 - protein, 21 aa, Artificial Sequence
  Description of Artificial Sequence: Synthetic peptide
  Seed: PRMCSLMQGSTLPRRSGAAGA
PRMYSLMQSSTGPRRSGAAGA

SEQ ID NO: 121517 - protein, 21 aa, Artificial Sequence
  Description of Artificial Sequence: Synthetic peptide
  Seed: PRMCSLMQGSTLPRRSGAAGA
PRMYSLMQSSTIPRRSGAAGA

SEQ ID NO: 121518 - protein, 21 aa, Artificial Sequence
  Description of Artificial Sequence: Synthetic peptide
  Seed: PRMCSLMQGSTLPRRSGAAGA
PRMYSLMQSSTLPRRSGAAGA

SEQ ID NO: 121519 - protein, 21 aa, Artificial Sequence
  Description of Artificial Sequence: Synthetic peptide
  Seed: PRMCSLMQGSTLPRRSGAAGA
PRMYSLMQSSTMPRRSGAAGA

SEQ ID NO: 121520 - protein, 21 aa, Artificial Sequence
  Description of Artificial Sequence: Synthetic peptide
  Seed: PRMCSLMQGSTLPRRSGAAGA
PRMYSLMQSSTSPRRSGAAGA

SEQ ID NO: 121521 - protein, 21 aa, Artificial Sequence
  Description of Artificial Sequence: Synthetic peptide
  Seed: PRMCSLMQGSTLPRRSGAAGA
PRMYSLMQSSTTPRRSGAAGA

SEQ ID NO: 121522 - protein, 21 aa, Artificial Sequence
  Description of Artificial Sequence: Synthetic peptide
  Seed: PRMCSLMQGSTLPRRSGAAGA
PRMYSLMQSSTVPRRSGAAGA

SEQ ID NO: 121523 - protein, 21 aa, Artificial Sequence
  Description of Artificial Sequence: Synthetic peptide
  Seed: PRMCSLMQGSTLPRRSGAAGA
PRMYSLMQTSTAPRRSGAAGA

SEQ ID NO: 121524 - protein, 21 aa, Artificial Sequence
  Description of Artificial Sequence: Synthetic peptide
  Seed: PRMCSLMQGSTLPRRSGAAGA
PRMYSLMQTSTIPRRSGAAGA

SEQ ID NO: 121525 - protein, 21 aa, Artificial Sequence
  Description of Artificial Sequence: Synthetic peptide
  Seed: PRMCSLMQGSTLPRRSGAAGA
PRMYSLMQTSTLPRRSGAAGA

SEQ ID NO: 121526 - protein, 21 aa, Artificial Sequence
  Description of Artificial Sequence: Synthetic peptide
  Seed: PRMCSLMQGSTLPRRSGAAGA
PRMYSLMQTSTMPRRSGAAGA

SEQ ID NO: 121527 - protein, 21 aa, Artificial Sequence
  Description of Artificial Sequence: Synthetic peptide
  Seed: PRMCSLMQGSTLPRRSGAAGA
PRMYSLMQTSTTPRRSGAAGA

SEQ ID NO: 121528 - protein, 21 aa, Artificial Sequence
  Description of Artificial Sequence: Synthetic peptide
  Seed: PRMCSLMQGSTLPRRSGAAGA
PRMYSLMQTSTVPRRSGAAGA

SEQ ID NO: 121529 - protein, 21 aa, Artificial Sequence
  Description of Artificial Sequence: Synthetic peptide
  Seed: PRMCSLMQGSTLPRRSGAAGA
PRMYSLMQVSTAPRRSGAAGA

SEQ ID NO: 121530 - protein, 21 aa, Artificial Sequence
  Description of Artificial Sequence: Synthetic peptide
  Seed: PRMCSLMQGSTLPRRSGAAGA
PRMYSLMQVSTIPRRSGAAGA

SEQ ID NO: 121531 - protein, 21 aa, Artificial Sequence
  Description of Artificial Sequence: Synthetic peptide
  Seed: PRMCSLMQGSTLPRRSGAAGA
PRMYSLMQVSTLPRRSGAAGA

SEQ ID NO: 121532 - protein, 21 aa, Artificial Sequence
  Description of Artificial Sequence: Synthetic peptide
  Seed: PRMCSLMQGSTLPRRSGAAGA
PRMYSLMQVSTVPRRSGAAGA

SEQ ID NO: 121533 - protein, 21 aa, Artificial Sequence
  Description of Artificial Sequence: Synthetic peptide
  Seed: PRMCSLMQGSTLPRRSGAAGA
PRMYSLQQASTAPRRSGAAGA

SEQ ID NO: 121534 - protein, 21 aa, Artificial Sequence
  Description of Artificial Sequence: Synthetic peptide
  Seed: PRMCSLMQGSTLPRRSGAAGA
PRMYSLQQASTIPRRSGAAGA

SEQ ID NO: 121535 - protein, 21 aa, Artificial Sequence
  Description of Artificial Sequence: Synthetic peptide
  Seed: PRMCSLMQGSTLPRRSGAAGA
PRMYSLQQASTLPRRSGAAGA

SEQ ID NO: 121536 - protein, 21 aa, Artificial Sequence
  Description of Artificial Sequence: Synthetic peptide
  Seed: PRMCSLMQGSTLPRRSGAAGA
PRMYSLQQASTMPRRSGAAGA

SEQ ID NO: 121537 - protein, 21 aa, Artificial Sequence
  Description of Artificial Sequence: Synthetic peptide
  Seed: PRMCSLMQGSTLPRRSGAAGA
PRMYSLQQASTVPRRSGAAGA

SEQ ID NO: 121538 - protein, 21 aa, Artificial Sequence
  Description of Artificial Sequence: Synthetic peptide
  Seed: PRMCSLMQGSTLPRRSGAAGA
PRMYSLQQGSTAPRRSGAAGA

SEQ ID NO: 121539 - protein, 21 aa, Artificial Sequence
  Description of Artificial Sequence: Synthetic peptide
  Seed: PRMCSLMQGSTLPRRSGAAGA
PRMYSLQQGSTIPRRSGAAGA

SEQ ID NO: 121540 - protein, 21 aa, Artificial Sequence
  Description of Artificial Sequence: Synthetic peptide
  Seed: PRMCSLMQGSTLPRRSGAAGA
PRMYSLQQGSTLPRRSGAAGA

SEQ ID NO: 121541 - protein, 21 aa, Artificial Sequence
  Description of Artificial Sequence: Synthetic peptide
  Seed: PRMCSLMQGSTLPRRSGAAGA
PRMYSLQQGSTVPRRSGAAGA

SEQ ID NO: 121542 - protein, 21 aa, Artificial Sequence
  Description of Artificial Sequence: Synthetic peptide
  Seed: PRMCSLMQGSTLPRRSGAAGA
PRMYSLQQSSTIPRRSGAAGA

SEQ ID NO: 121543 - protein, 21 aa, Artificial Sequence
  Description of Artificial Sequence: Synthetic peptide
  Seed: PRMCSLMQGSTLPRRSGAAGA
PRMYSLQQSSTLPRRSGAAGA

SEQ ID NO: 121544 - protein, 21 aa, Artificial Sequence
  Description of Artificial Sequence: Synthetic peptide
  Seed: PRMCSLMQGSTLPRRSGAAGA
PRMYSLQQSSTVPRRSGAAGA

SEQ ID NO: 121545 - protein, 21 aa, Artificial Sequence
  Description of Artificial Sequence: Synthetic peptide
  Seed: PRMCSLMQGSTLPRRSGAAGA
PRMYSLSQASTIPRRSGAAGA

SEQ ID NO: 121546 - protein, 21 aa, Artificial Sequence
  Description of Artificial Sequence: Synthetic peptide
  Seed: PRMCSLMQGSTLPRRSGAAGA
PRMYSLSQASTLPRRSGAAGA

SEQ ID NO: 121547 - protein, 21 aa, Artificial Sequence
  Description of Artificial Sequence: Synthetic peptide
  Seed: PRMCSLMQGSTLPRRSGAAGA
PRMYSLSQASTVPRRSGAAGA

SEQ ID NO: 121548 - protein, 21 aa, Artificial Sequence
  Description of Artificial Sequence: Synthetic peptide
  Seed: PRMCSLMQGSTLPRRSGAAGA
PRMYSLTQASTVPRRSGAAGA

SEQ ID NO: 121549 - protein, 21 aa, Artificial Sequence
  Description of Artificial Sequence: Synthetic peptide
  Seed: PRMCSLMQGSTLPRRSGAAGA
PRMYSLVQASTAPRRSGAAGA

SEQ ID NO: 121550 - protein, 21 aa, Artificial Sequence
  Description of Artificial Sequence: Synthetic peptide
  Seed: PRMCSLMQGSTLPRRSGAAGA
PRMYSLVQASTIPRRSGAAGA

SEQ ID NO: 121551 - protein, 21 aa, Artificial Sequence
  Description of Artificial Sequence: Synthetic peptide
  Seed: PRMCSLMQGSTLPRRSGAAGA
PRMYSLVQASTLPRRSGAAGA

SEQ ID NO: 121552 - protein, 21 aa, Artificial Sequence
  Description of Artificial Sequence: Synthetic peptide
  Seed: PRMCSLMQGSTLPRRSGAAGA
PRMYSLVQASTMPRRSGAAGA

SEQ ID NO: 121553 - protein, 21 aa, Artificial Sequence
  Description of Artificial Sequence: Synthetic peptide
  Seed: PRMCSLMQGSTLPRRSGAAGA
PRMYSLVQASTTPRRSGAAGA

SEQ ID NO: 121554 - protein, 21 aa, Artificial Sequence
  Description of Artificial Sequence: Synthetic peptide
  Seed: PRMCSLMQGSTLPRRSGAAGA
PRMYSLVQASTVPRRSGAAGA

SEQ ID NO: 121555 - protein, 21 aa, Artificial Sequence
  Description of Artificial Sequence: Synthetic peptide
  Seed: PRMCSLMQGSTLPRRSGAAGA
PRMYSLVQGSTAPRRSGAAGA

SEQ ID NO: 121556 - protein, 21 aa, Artificial Sequence
  Description of Artificial Sequence: Synthetic peptide
  Seed: PRMCSLMQGSTLPRRSGAAGA
PRMYSLVQGSTIPRRSGAAGA

SEQ ID NO: 121557 - protein, 21 aa, Artificial Sequence
  Description of Artificial Sequence: Synthetic peptide
  Seed: PRMCSLMQGSTLPRRSGAAGA
PRMYSLVQGSTLPRRSGAAGA

SEQ ID NO: 121558 - protein, 21 aa, Artificial Sequence
  Description of Artificial Sequence: Synthetic peptide
  Seed: PRMCSLMQGSTLPRRSGAAGA
PRMYSLVQGSTVPRRSGAAGA

SEQ ID NO: 121559 - protein, 21 aa, Artificial Sequence
  Description of Artificial Sequence: Synthetic peptide
  Seed: PRMCSLMQGSTLPRRSGAAGA
PRMYSLVQPSTAPRRSGAAGA

SEQ ID NO: 121560 - protein, 21 aa, Artificial Sequence
  Description of Artificial Sequence: Synthetic peptide
  Seed: PRMCSLMQGSTLPRRSGAAGA
PRMYSLVQPSTIPRRSGAAGA

SEQ ID NO: 121561 - protein, 21 aa, Artificial Sequence
  Description of Artificial Sequence: Synthetic peptide
  Seed: PRMCSLMQGSTLPRRSGAAGA
PRMYSLVQPSTLPRRSGAAGA

SEQ ID NO: 121562 - protein, 21 aa, Artificial Sequence
  Description of Artificial Sequence: Synthetic peptide
  Seed: PRMCSLMQGSTLPRRSGAAGA
PRMYSLVQPSTVPRRSGAAGA

SEQ ID NO: 121563 - protein, 21 aa, Artificial Sequence
  Description of Artificial Sequence: Synthetic peptide
  Seed: PRMCSLMQGSTLPRRSGAAGA
PRMYSLVQSSTAPRRSGAAGA

SEQ ID NO: 121564 - protein, 21 aa, Artificial Sequence
  Description of Artificial Sequence: Synthetic peptide
  Seed: PRMCSLMQGSTLPRRSGAAGA
PRMYSLVQSSTIPRRSGAAGA

SEQ ID NO: 121565 - protein, 21 aa, Artificial Sequence
  Description of Artificial Sequence: Synthetic peptide
  Seed: PRMCSLMQGSTLPRRSGAAGA
PRMYSLVQSSTLPRRSGAAGA

SEQ ID NO: 121566 - protein, 21 aa, Artificial Sequence
  Description of Artificial Sequence: Synthetic peptide
  Seed: PRMCSLMQGSTLPRRSGAAGA
PRMYSLVQSSTVPRRSGAAGA

SEQ ID NO: 121567 - protein, 21 aa, Artificial Sequence
  Description of Artificial Sequence: Synthetic peptide
  Seed: PRMCSLMQGSTLPRRSGAAGA
PRMCSLMFGSALARRAGAAGA

SEQ ID NO: 121568 - protein, 21 aa, Artificial Sequence
  Description of Artificial Sequence: Synthetic peptide
  Seed: PRMCSLMQGSTLPRRSGAAGA
PRMCSLMFGSILARRAGAAGA

SEQ ID NO: 121569 - protein, 21 aa, Artificial Sequence
  Description of Artificial Sequence: Synthetic peptide
  Seed: PRMCSLMQGSTLPRRSGAAGA
PRMCSLMFGSILARRNGAAGA

SEQ ID NO: 121570 - protein, 21 aa, Artificial Sequence
  Description of Artificial Sequence: Synthetic peptide
  Seed: PRMCSLMQGSTLPRRSGAAGA
PRMCSLMFGSILARRSGAAGA

SEQ ID NO: 121571 - protein, 21 aa, Artificial Sequence
  Description of Artificial Sequence: Synthetic peptide
  Seed: PRMCSLMQGSTLPRRSGAAGA
PRMCSLMFGSILARRVGAAGA

SEQ ID NO: 121572 - protein, 21 aa, Artificial Sequence
  Description of Artificial Sequence: Synthetic peptide
  Seed: PRMCSLMQGSTLPRRSGAAGA
PRMCSLMFGSILPRRAGAAGA

SEQ ID NO: 121573 - protein, 21 aa, Artificial Sequence
  Description of Artificial Sequence: Synthetic peptide
  Seed: PRMCSLMQGSTLPRRSGAAGA
PRMCSLMFGSILSRRAGAAGA

SEQ ID NO: 121574 - protein, 21 aa, Artificial Sequence
  Description of Artificial Sequence: Synthetic peptide
  Seed: PRMCSLMQGSTLPRRSGAAGA
PRMCSLMFGSILTRRAGAAGA

SEQ ID NO: 121575 - protein, 21 aa, Artificial Sequence
  Description of Artificial Sequence: Synthetic peptide
  Seed: PRMCSLMQGSTLPRRSGAAGA
PRMCSLMFGSILTRRNGAAGA

SEQ ID NO: 121576 - protein, 21 aa, Artificial Sequence
  Description of Artificial Sequence: Synthetic peptide
  Seed: PRMCSLMQGSTLPRRSGAAGA
PRMCSLMFGSLLARRAGAAGA

SEQ ID NO: 121577 - protein, 21 aa, Artificial Sequence
  Description of Artificial Sequence: Synthetic peptide
  Seed: PRMCSLMQGSTLPRRSGAAGA
PRMCSLMFGSLLARRIGAAGA

SEQ ID NO: 121578 - protein, 21 aa, Artificial Sequence
  Description of Artificial Sequence: Synthetic peptide
  Seed: PRMCSLMQGSTLPRRSGAAGA
PRMCSLMFGSLLARRLGAAGA

SEQ ID NO: 121579 - protein, 21 aa, Artificial Sequence
  Description of Artificial Sequence: Synthetic peptide
  Seed: PRMCSLMQGSTLPRRSGAAGA
PRMCSLMFGSLLARRNGAAGA

SEQ ID NO: 121580 - protein, 21 aa, Artificial Sequence
  Description of Artificial Sequence: Synthetic peptide
  Seed: PRMCSLMQGSTLPRRSGAAGA
PRMCSLMFGSLLARRSGAAGA

SEQ ID NO: 121581 - protein, 21 aa, Artificial Sequence
  Description of Artificial Sequence: Synthetic peptide
  Seed: PRMCSLMQGSTLPRRSGAAGA
PRMCSLMFGSLLARRTGAAGA

SEQ ID NO: 121582 - protein, 21 aa, Artificial Sequence
  Description of Artificial Sequence: Synthetic peptide
  Seed: PRMCSLMQGSTLPRRSGAAGA
PRMCSLMFGSLLARRVGAAGA

SEQ ID NO: 121583 - protein, 21 aa, Artificial Sequence
  Description of Artificial Sequence: Synthetic peptide
  Seed: PRMCSLMQGSTLPRRSGAAGA
PRMCSLMFGSLLPRRAGAAGA

SEQ ID NO: 121584 - protein, 21 aa, Artificial Sequence
  Description of Artificial Sequence: Synthetic peptide
  Seed: PRMCSLMQGSTLPRRSGAAGA
PRMCSLMFGSLLPRRVGAAGA

SEQ ID NO: 121585 - protein, 21 aa, Artificial Sequence
  Description of Artificial Sequence: Synthetic peptide
  Seed: PRMCSLMQGSTLPRRSGAAGA
PRMCSLMFGSLLSRRAGAAGA

SEQ ID NO: 121586 - protein, 21 aa, Artificial Sequence
  Description of Artificial Sequence: Synthetic peptide
  Seed: PRMCSLMQGSTLPRRSGAAGA
PRMCSLMFGSLLSRRNGAAGA

SEQ ID NO: 121587 - protein, 21 aa, Artificial Sequence
  Description of Artificial Sequence: Synthetic peptide
  Seed: PRMCSLMQGSTLPRRSGAAGA
PRMCSLMFGSLLSRRSGAAGA

SEQ ID NO: 121588 - protein, 21 aa, Artificial Sequence
  Description of Artificial Sequence: Synthetic peptide
  Seed: PRMCSLMQGSTLPRRSGAAGA
PRMCSLMFGSLLSRRVGAAGA

SEQ ID NO: 121589 - protein, 21 aa, Artificial Sequence
  Description of Artificial Sequence: Synthetic peptide
  Seed: PRMCSLMQGSTLPRRSGAAGA
PRMCSLMFGSLLTRRAGAAGA

SEQ ID NO: 121590 - protein, 21 aa, Artificial Sequence
  Description of Artificial Sequence: Synthetic peptide
  Seed: PRMCSLMQGSTLPRRSGAAGA
PRMCSLMFGSLLTRRNGAAGA

SEQ ID NO: 121591 - protein, 21 aa, Artificial Sequence
  Description of Artificial Sequence: Synthetic peptide
  Seed: PRMCSLMQGSTLPRRSGAAGA
PRMCSLMFGSLLTRRVGAAGA

SEQ ID NO: 121592 - protein, 21 aa, Artificial Sequence
  Description of Artificial Sequence: Synthetic peptide
  Seed: PRMCSLMQGSTLPRRSGAAGA
PRMCSLMFGSLLVRRAGAAGA

SEQ ID NO: 121593 - protein, 21 aa, Artificial Sequence
  Description of Artificial Sequence: Synthetic peptide
  Seed: PRMCSLMQGSTLPRRSGAAGA
PRMCSLMFGSMLARRAGAAGA

SEQ ID NO: 121594 - protein, 21 aa, Artificial Sequence
  Description of Artificial Sequence: Synthetic peptide
  Seed: PRMCSLMQGSTLPRRSGAAGA
PRMCSLMFGSMLARRIGAAGA

SEQ ID NO: 121595 - protein, 21 aa, Artificial Sequence
  Description of Artificial Sequence: Synthetic peptide
  Seed: PRMCSLMQGSTLPRRSGAAGA
PRMCSLMFGSMLARRLGAAGA

SEQ ID NO: 121596 - protein, 21 aa, Artificial Sequence
  Description of Artificial Sequence: Synthetic peptide
  Seed: PRMCSLMQGSTLPRRSGAAGA
PRMCSLMFGSMLARRMGAAGA

SEQ ID NO: 121597 - protein, 21 aa, Artificial Sequence
  Description of Artificial Sequence: Synthetic peptide
  Seed: PRMCSLMQGSTLPRRSGAAGA
PRMCSLMFGSMLARRNGAAGA

SEQ ID NO: 121598 - protein, 21 aa, Artificial Sequence
  Description of Artificial Sequence: Synthetic peptide
  Seed: PRMCSLMQGSTLPRRSGAAGA
PRMCSLMFGSMLARRSGAAGA

SEQ ID NO: 121599 - protein, 21 aa, Artificial Sequence
  Description of Artificial Sequence: Synthetic peptide
  Seed: PRMCSLMQGSTLPRRSGAAGA
PRMCSLMFGSMLARRTGAAGA

SEQ ID NO: 121600 - protein, 21 aa, Artificial Sequence
  Description of Artificial Sequence: Synthetic peptide
  Seed: PRMCSLMQGSTLPRRSGAAGA
PRMCSLMFGSMLARRVGAAGA

SEQ ID NO: 121601 - protein, 21 aa, Artificial Sequence
  Description of Artificial Sequence: Synthetic peptide
  Seed: PRMCSLMQGSTLPRRSGAAGA
PRMCSLMFGSMLPRRAGAAGA

SEQ ID NO: 121602 - protein, 21 aa, Artificial Sequence
  Description of Artificial Sequence: Synthetic peptide
  Seed: PRMCSLMQGSTLPRRSGAAGA
PRMCSLMFGSMLPRRIGAAGA

SEQ ID NO: 121603 - protein, 21 aa, Artificial Sequence
  Description of Artificial Sequence: Synthetic peptide
  Seed: PRMCSLMQGSTLPRRSGAAGA
PRMCSLMFGSMLPRRLGAAGA

SEQ ID NO: 121604 - protein, 21 aa, Artificial Sequence
  Description of Artificial Sequence: Synthetic peptide
  Seed: PRMCSLMQGSTLPRRSGAAGA
PRMCSLMFGSMLPRRNGAAGA

SEQ ID NO: 121605 - protein, 21 aa, Artificial Sequence
  Description of Artificial Sequence: Synthetic peptide
  Seed: PRMCSLMQGSTLPRRSGAAGA
PRMCSLMFGSMLPRRSGAAGA

SEQ ID NO: 121606 - protein, 21 aa, Artificial Sequence
  Description of Artificial Sequence: Synthetic peptide
  Seed: PRMCSLMQGSTLPRRSGAAGA
PRMCSLMFGSMLPRRVGAAGA

SEQ ID NO: 121607 - protein, 21 aa, Artificial Sequence
  Description of Artificial Sequence: Synthetic peptide
  Seed: PRMCSLMQGSTLPRRSGAAGA
PRMCSLMFGSMLSRRAGAAGA

SEQ ID NO: 121608 - protein, 21 aa, Artificial Sequence
  Description of Artificial Sequence: Synthetic peptide
  Seed: PRMCSLMQGSTLPRRSGAAGA
PRMCSLMFGSMLSRRIGAAGA

SEQ ID NO: 121609 - protein, 21 aa, Artificial Sequence
  Description of Artificial Sequence: Synthetic peptide
  Seed: PRMCSLMQGSTLPRRSGAAGA
PRMCSLMFGSMLSRRLGAAGA

SEQ ID NO: 121610 - protein, 21 aa, Artificial Sequence
  Description of Artificial Sequence: Synthetic peptide
  Seed: PRMCSLMQGSTLPRRSGAAGA
PRMCSLMFGSMLSRRNGAAGA

SEQ ID NO: 121611 - protein, 21 aa, Artificial Sequence
  Description of Artificial Sequence: Synthetic peptide
  Seed: PRMCSLMQGSTLPRRSGAAGA
PRMCSLMFGSMLSRRSGAAGA

SEQ ID NO: 121612 - protein, 21 aa, Artificial Sequence
  Description of Artificial Sequence: Synthetic peptide
  Seed: PRMCSLMQGSTLPRRSGAAGA
PRMCSLMFGSMLSRRTGAAGA

SEQ ID NO: 121613 - protein, 21 aa, Artificial Sequence
  Description of Artificial Sequence: Synthetic peptide
  Seed: PRMCSLMQGSTLPRRSGAAGA
PRMCSLMFGSMLSRRVGAAGA

SEQ ID NO: 121614 - protein, 21 aa, Artificial Sequence
  Description of Artificial Sequence: Synthetic peptide
  Seed: PRMCSLMQGSTLPRRSGAAGA
PRMCSLMFGSMLTRRAGAAGA

SEQ ID NO: 121615 - protein, 21 aa, Artificial Sequence
  Description of Artificial Sequence: Synthetic peptide
  Seed: PRMCSLMQGSTLPRRSGAAGA
PRMCSLMFGSMLTRRIGAAGA

SEQ ID NO: 121616 - protein, 21 aa, Artificial Sequence
  Description of Artificial Sequence: Synthetic peptide
  Seed: PRMCSLMQGSTLPRRSGAAGA
PRMCSLMFGSMLTRRLGAAGA

SEQ ID NO: 121617 - protein, 21 aa, Artificial Sequence
  Description of Artificial Sequence: Synthetic peptide
  Seed: PRMCSLMQGSTLPRRSGAAGA
PRMCSLMFGSMLTRRNGAAGA

SEQ ID NO: 121618 - protein, 21 aa, Artificial Sequence
  Description of Artificial Sequence: Synthetic peptide
  Seed: PRMCSLMQGSTLPRRSGAAGA
PRMCSLMFGSMLTRRSGAAGA

SEQ ID NO: 121619 - protein, 21 aa, Artificial Sequence
  Description of Artificial Sequence: Synthetic peptide
  Seed: PRMCSLMQGSTLPRRSGAAGA
PRMCSLMFGSMLTRRTGAAGA

SEQ ID NO: 121620 - protein, 21 aa, Artificial Sequence
  Description of Artificial Sequence: Synthetic peptide
  Seed: PRMCSLMQGSTLPRRSGAAGA
PRMCSLMFGSMLTRRVGAAGA

SEQ ID NO: 121621 - protein, 21 aa, Artificial Sequence
  Description of Artificial Sequence: Synthetic peptide
  Seed: PRMCSLMQGSTLPRRSGAAGA
PRMCSLMFGSMLVRRAGAAGA

SEQ ID NO: 121622 - protein, 21 aa, Artificial Sequence
  Description of Artificial Sequence: Synthetic peptide
  Seed: PRMCSLMQGSTLPRRSGAAGA
PRMCSLMFGSMLVRRNGAAGA

SEQ ID NO: 121623 - protein, 21 aa, Artificial Sequence
  Description of Artificial Sequence: Synthetic peptide
  Seed: PRMCSLMQGSTLPRRSGAAGA
PRMCSLMFGSMLVRRSGAAGA

SEQ ID NO: 121624 - protein, 21 aa, Artificial Sequence
  Description of Artificial Sequence: Synthetic peptide
  Seed: PRMCSLMQGSTLPRRSGAAGA
PRMCSLMYGSILARRAGAAGA

SEQ ID NO: 121625 - protein, 21 aa, Artificial Sequence
  Description of Artificial Sequence: Synthetic peptide
  Seed: PRMCSLMQGSTLPRRSGAAGA
PRMCSLMYGSLLARRAGAAGA

SEQ ID NO: 121626 - protein, 21 aa, Artificial Sequence
  Description of Artificial Sequence: Synthetic peptide
  Seed: PRMCSLMQGSTLPRRSGAAGA
PRMCSLMYGSLLARRIGAAGA

SEQ ID NO: 121627 - protein, 21 aa, Artificial Sequence
  Description of Artificial Sequence: Synthetic peptide
  Seed: PRMCSLMQGSTLPRRSGAAGA
PRMCSLMYGSLLARRNGAAGA

SEQ ID NO: 121628 - protein, 21 aa, Artificial Sequence
  Description of Artificial Sequence: Synthetic peptide
  Seed: PRMCSLMQGSTLPRRSGAAGA
PRMCSLMYGSLLARRSGAAGA

SEQ ID NO: 121629 - protein, 21 aa, Artificial Sequence
  Description of Artificial Sequence: Synthetic peptide
  Seed: PRMCSLMQGSTLPRRSGAAGA
PRMCSLMYGSLLARRVGAAGA

SEQ ID NO: 121630 - protein, 21 aa, Artificial Sequence
  Description of Artificial Sequence: Synthetic peptide
  Seed: PRMCSLMQGSTLPRRSGAAGA
PRMCSLMYGSLLPRRAGAAGA

SEQ ID NO: 121631 - protein, 21 aa, Artificial Sequence
  Description of Artificial Sequence: Synthetic peptide
  Seed: PRMCSLMQGSTLPRRSGAAGA
PRMCSLMYGSLLSRRAGAAGA

SEQ ID NO: 121632 - protein, 21 aa, Artificial Sequence
  Description of Artificial Sequence: Synthetic peptide
  Seed: PRMCSLMQGSTLPRRSGAAGA
PRMCSLMYGSLLSRRVGAAGA

SEQ ID NO: 121633 - protein, 21 aa, Artificial Sequence
  Description of Artificial Sequence: Synthetic peptide
  Seed: PRMCSLMQGSTLPRRSGAAGA
PRMCSLMYGSLLTRRAGAAGA

SEQ ID NO: 121634 - protein, 21 aa, Artificial Sequence
  Description of Artificial Sequence: Synthetic peptide
  Seed: PRMCSLMQGSTLPRRSGAAGA
PRMCSLMYGSLLTRRVGAAGA

SEQ ID NO: 121635 - protein, 21 aa, Artificial Sequence
  Description of Artificial Sequence: Synthetic peptide
  Seed: PRMCSLMQGSTLPRRSGAAGA
PRMCSLMYGSMLARRAGAAGA

SEQ ID NO: 121636 - protein, 21 aa, Artificial Sequence
  Description of Artificial Sequence: Synthetic peptide
  Seed: PRMCSLMQGSTLPRRSGAAGA
PRMCSLMYGSMLARRIGAAGA

SEQ ID NO: 121637 - protein, 21 aa, Artificial Sequence
  Description of Artificial Sequence: Synthetic peptide
  Seed: PRMCSLMQGSTLPRRSGAAGA
PRMCSLMYGSMLARRLGAAGA

SEQ ID NO: 121638 - protein, 21 aa, Artificial Sequence
  Description of Artificial Sequence: Synthetic peptide
  Seed: PRMCSLMQGSTLPRRSGAAGA
PRMCSLMYGSMLARRMGAAGA

SEQ ID NO: 121639 - protein, 21 aa, Artificial Sequence
  Description of Artificial Sequence: Synthetic peptide
  Seed: PRMCSLMQGSTLPRRSGAAGA
PRMCSLMYGSMLARRNGAAGA

SEQ ID NO: 121640 - protein, 21 aa, Artificial Sequence
  Description of Artificial Sequence: Synthetic peptide
  Seed: PRMCSLMQGSTLPRRSGAAGA
PRMCSLMYGSMLARRSGAAGA

SEQ ID NO: 121641 - protein, 21 aa, Artificial Sequence
  Description of Artificial Sequence: Synthetic peptide
  Seed: PRMCSLMQGSTLPRRSGAAGA
PRMCSLMYGSMLARRTGAAGA

SEQ ID NO: 121642 - protein, 21 aa, Artificial Sequence
  Description of Artificial Sequence: Synthetic peptide
  Seed: PRMCSLMQGSTLPRRSGAAGA
PRMCSLMYGSMLARRVGAAGA

SEQ ID NO: 121643 - protein, 21 aa, Artificial Sequence
  Description of Artificial Sequence: Synthetic peptide
  Seed: PRMCSLMQGSTLPRRSGAAGA
PRMCSLMYGSMLPRRAGAAGA

SEQ ID NO: 121644 - protein, 21 aa, Artificial Sequence
  Description of Artificial Sequence: Synthetic peptide
  Seed: PRMCSLMQGSTLPRRSGAAGA
PRMCSLMYGSMLPRRIGAAGA

SEQ ID NO: 121645 - protein, 21 aa, Artificial Sequence
  Description of Artificial Sequence: Synthetic peptide
  Seed: PRMCSLMQGSTLPRRSGAAGA
PRMCSLMYGSMLPRRVGAAGA

SEQ ID NO: 121646 - protein, 21 aa, Artificial Sequence
  Description of Artificial Sequence: Synthetic peptide
  Seed: PRMCSLMQGSTLPRRSGAAGA
PRMCSLMYGSMLSRRAGAAGA

SEQ ID NO: 121647 - protein, 21 aa, Artificial Sequence
  Description of Artificial Sequence: Synthetic peptide
  Seed: PRMCSLMQGSTLPRRSGAAGA
PRMCSLMYGSMLSRRIGAAGA

SEQ ID NO: 121648 - protein, 21 aa, Artificial Sequence
  Description of Artificial Sequence: Synthetic peptide
  Seed: PRMCSLMQGSTLPRRSGAAGA
PRMCSLMYGSMLSRRNGAAGA

SEQ ID NO: 121649 - protein, 21 aa, Artificial Sequence
  Description of Artificial Sequence: Synthetic peptide
  Seed: PRMCSLMQGSTLPRRSGAAGA
PRMCSLMYGSMLSRRVGAAGA

SEQ ID NO: 121650 - protein, 21 aa, Artificial Sequence
  Description of Artificial Sequence: Synthetic peptide
  Seed: PRMCSLMQGSTLPRRSGAAGA
PRMCSLMYGSMLTRRAGAAGA

SEQ ID NO: 121651 - protein, 21 aa, Artificial Sequence
  Description of Artificial Sequence: Synthetic peptide
  Seed: PRMCSLMQGSTLPRRSGAAGA
PRMCSLMYGSMLTRRIGAAGA

SEQ ID NO: 121652 - protein, 21 aa, Artificial Sequence
  Description of Artificial Sequence: Synthetic peptide
  Seed: PRMCSLMQGSTLPRRSGAAGA
PRMCSLMYGSMLTRRNGAAGA

SEQ ID NO: 121653 - protein, 21 aa, Artificial Sequence
  Description of Artificial Sequence: Synthetic peptide
  Seed: PRMCSLMQGSTLPRRSGAAGA
PRMCSLMYGSMLTRRVGAAGA

SEQ ID NO: 121654 - protein, 21 aa, Artificial Sequence
  Description of Artificial Sequence: Synthetic peptide
  Seed: PRMCSLMQGSTLPRRSGAAGA
PRMCSLMYGSMLVRRAGAAGA

SEQ ID NO: 121655 - protein, 21 aa, Artificial Sequence
  Description of Artificial Sequence: Synthetic peptide
  Seed: PRMCSLMQGSTLPRRSGAAGA
PRMCSLMYGSMLVRRNGAAGA

SEQ ID NO: 121656 - protein, 13 aa, Artificial Sequence
  Description of Artificial Sequence: Synthetic peptide
  Seed: RMCSLMQGSTLPR
RMFSLAQASTIPR

SEQ ID NO: 121657 - protein, 13 aa, Artificial Sequence
  Description of Artificial Sequence: Synthetic peptide
  Seed: RMCSLMQGSTLPR
RMFSLAQASTLPR

SEQ ID NO: 121658 - protein, 13 aa, Artificial Sequence
  Description of Artificial Sequence: Synthetic peptide
  Seed: RMCSLMQGSTLPR
RMFSLAQASTVPR

SEQ ID NO: 121659 - protein, 13 aa, Artificial Sequence
  Description of Artificial Sequence: Synthetic peptide
  Seed: RMCSLMQGSTLPR
RMFSLAQGSTLPR

SEQ ID NO: 121660 - protein, 13 aa, Artificial Sequence
  Description of Artificial Sequence: Synthetic peptide
  Seed: RMCSLMQGSTLPR
RMFSLIQASTAPR

SEQ ID NO: 121661 - protein, 13 aa, Artificial Sequence
  Description of Artificial Sequence: Synthetic peptide
  Seed: RMCSLMQGSTLPR
RMFSLIQASTIPR

SEQ ID NO: 121662 - protein, 13 aa, Artificial Sequence
  Description of Artificial Sequence: Synthetic peptide
  Seed: RMCSLMQGSTLPR
RMFSLIQASTLPR

SEQ ID NO: 121663 - protein, 13 aa, Artificial Sequence
  Description of Artificial Sequence: Synthetic peptide
  Seed: RMCSLMQGSTLPR
RMFSLIQASTVPR

SEQ ID NO: 121664 - protein, 13 aa, Artificial Sequence
  Description of Artificial Sequence: Synthetic peptide
  Seed: RMCSLMQGSTLPR
RMFSLIQGSTAPR

SEQ ID NO: 121665 - protein, 13 aa, Artificial Sequence
  Description of Artificial Sequence: Synthetic peptide
  Seed: RMCSLMQGSTLPR
RMFSLIQGSTIPR

SEQ ID NO: 121666 - protein, 13 aa, Artificial Sequence
  Description of Artificial Sequence: Synthetic peptide
  Seed: RMCSLMQGSTLPR
RMFSLIQGSTLPR

SEQ ID NO: 121667 - protein, 13 aa, Artificial Sequence
  Description of Artificial Sequence: Synthetic peptide
  Seed: RMCSLMQGSTLPR
RMFSLIQGSTVPR

SEQ ID NO: 121668 - protein, 13 aa, Artificial Sequence
  Description of Artificial Sequence: Synthetic peptide
  Seed: RMCSLMQGSTLPR
RMFSLIQPSTLPR

SEQ ID NO: 121669 - protein, 13 aa, Artificial Sequence
  Description of Artificial Sequence: Synthetic peptide
  Seed: RMCSLMQGSTLPR
RMFSLIQPSTVPR

SEQ ID NO: 121670 - protein, 13 aa, Artificial Sequence
  Description of Artificial Sequence: Synthetic peptide
  Seed: RMCSLMQGSTLPR
RMFSLIQSSTAPR

SEQ ID NO: 121671 - protein, 13 aa, Artificial Sequence
  Description of Artificial Sequence: Synthetic peptide
  Seed: RMCSLMQGSTLPR
RMFSLIQSSTIPR

SEQ ID NO: 121672 - protein, 13 aa, Artificial Sequence
  Description of Artificial Sequence: Synthetic peptide
  Seed: RMCSLMQGSTLPR
RMFSLIQSSTLPR

SEQ ID NO: 121673 - protein, 13 aa, Artificial Sequence
  Description of Artificial Sequence: Synthetic peptide
  Seed: RMCSLMQGSTLPR
RMFSLIQSSTVPR

SEQ ID NO: 121674 - protein, 13 aa, Artificial Sequence
  Description of Artificial Sequence: Synthetic peptide
  Seed: RMCSLMQGSTLPR
RMFSLLQASTAPR

SEQ ID NO: 121675 - protein, 13 aa, Artificial Sequence
  Description of Artificial Sequence: Synthetic peptide
  Seed: RMCSLMQGSTLPR
RMFSLLQASTIPR

SEQ ID NO: 121676 - protein, 13 aa, Artificial Sequence
  Description of Artificial Sequence: Synthetic peptide
  Seed: RMCSLMQGSTLPR
RMFSLLQASTLPR

SEQ ID NO: 121677 - protein, 13 aa, Artificial Sequence
  Description of Artificial Sequence: Synthetic peptide
  Seed: RMCSLMQGSTLPR
RMFSLLQASTMPR

SEQ ID NO: 121678 - protein, 13 aa, Artificial Sequence
  Description of Artificial Sequence: Synthetic peptide
  Seed: RMCSLMQGSTLPR
RMFSLLQASTSPR

SEQ ID NO: 121679 - protein, 13 aa, Artificial Sequence
  Description of Artificial Sequence: Synthetic peptide
  Seed: RMCSLMQGSTLPR
RMFSLLQASTTPR

SEQ ID NO: 121680 - protein, 13 aa, Artificial Sequence
  Description of Artificial Sequence: Synthetic peptide
  Seed: RMCSLMQGSTLPR
RMFSLLQASTVPR

SEQ ID NO: 121681 - protein, 13 aa, Artificial Sequence
  Description of Artificial Sequence: Synthetic peptide
  Seed: RMCSLMQGSTLPR
RMFSLLQGSTAPR

SEQ ID NO: 121682 - protein, 13 aa, Artificial Sequence
  Description of Artificial Sequence: Synthetic peptide
  Seed: RMCSLMQGSTLPR
RMFSLLQGSTIPR

SEQ ID NO: 121683 - protein, 13 aa, Artificial Sequence
  Description of Artificial Sequence: Synthetic peptide
  Seed: RMCSLMQGSTLPR
RMFSLLQGSTLPR

SEQ ID NO: 121684 - protein, 13 aa, Artificial Sequence
  Description of Artificial Sequence: Synthetic peptide
  Seed: RMCSLMQGSTLPR
RMFSLLQGSTMPR

SEQ ID NO: 121685 - protein, 13 aa, Artificial Sequence
  Description of Artificial Sequence: Synthetic peptide
  Seed: RMCSLMQGSTLPR
RMFSLLQGSTSPR

SEQ ID NO: 121686 - protein, 13 aa, Artificial Sequence
  Description of Artificial Sequence: Synthetic peptide
  Seed: RMCSLMQGSTLPR
RMFSLLQGSTTPR

SEQ ID NO: 121687 - protein, 13 aa, Artificial Sequence
  Description of Artificial Sequence: Synthetic peptide
  Seed: RMCSLMQGSTLPR
RMFSLLQGSTVPR

SEQ ID NO: 121688 - protein, 13 aa, Artificial Sequence
  Description of Artificial Sequence: Synthetic peptide
  Seed: RMCSLMQGSTLPR
RMFSLLQNSTAPR

SEQ ID NO: 121689 - protein, 13 aa, Artificial Sequence
  Description of Artificial Sequence: Synthetic peptide
  Seed: RMCSLMQGSTLPR
RMFSLLQNSTIPR

SEQ ID NO: 121690 - protein, 13 aa, Artificial Sequence
  Description of Artificial Sequence: Synthetic peptide
  Seed: RMCSLMQGSTLPR
RMFSLLQNSTLPR

SEQ ID NO: 121691 - protein, 13 aa, Artificial Sequence
  Description of Artificial Sequence: Synthetic peptide
  Seed: RMCSLMQGSTLPR
RMFSLLQNSTVPR

SEQ ID NO: 121692 - protein, 13 aa, Artificial Sequence
  Description of Artificial Sequence: Synthetic peptide
  Seed: RMCSLMQGSTLPR
RMFSLLQPSTAPR

SEQ ID NO: 121693 - protein, 13 aa, Artificial Sequence
  Description of Artificial Sequence: Synthetic peptide
  Seed: RMCSLMQGSTLPR
RMFSLLQPSTIPR

SEQ ID NO: 121694 - protein, 13 aa, Artificial Sequence
  Description of Artificial Sequence: Synthetic peptide
  Seed: RMCSLMQGSTLPR
RMFSLLQPSTLPR

SEQ ID NO: 121695 - protein, 13 aa, Artificial Sequence
  Description of Artificial Sequence: Synthetic peptide
  Seed: RMCSLMQGSTLPR
RMFSLLQPSTVPR

SEQ ID NO: 121696 - protein, 13 aa, Artificial Sequence
  Description of Artificial Sequence: Synthetic peptide
  Seed: RMCSLMQGSTLPR
RMFSLLQSSTAPR

SEQ ID NO: 121697 - protein, 13 aa, Artificial Sequence
  Description of Artificial Sequence: Synthetic peptide
  Seed: RMCSLMQGSTLPR
RMFSLLQSSTIPR

SEQ ID NO: 121698 - protein, 13 aa, Artificial Sequence
  Description of Artificial Sequence: Synthetic peptide
  Seed: RMCSLMQGSTLPR
RMFSLLQSSTLPR

SEQ ID NO: 121699 - protein, 13 aa, Artificial Sequence
  Description of Artificial Sequence: Synthetic peptide
  Seed: RMCSLMQGSTLPR
RMFSLLQSSTMPR

SEQ ID NO: 121700 - protein, 13 aa, Artificial Sequence
  Description of Artificial Sequence: Synthetic peptide
  Seed: RMCSLMQGSTLPR
RMFSLLQSSTSPR

SEQ ID NO: 121701 - protein, 13 aa, Artificial Sequence
  Description of Artificial Sequence: Synthetic peptide
  Seed: RMCSLMQGSTLPR
RMFSLLQSSTTPR

SEQ ID NO: 121702 - protein, 13 aa, Artificial Sequence
  Description of Artificial Sequence: Synthetic peptide
  Seed: RMCSLMQGSTLPR
RMFSLLQSSTVPR

SEQ ID NO: 121703 - protein, 13 aa, Artificial Sequence
  Description of Artificial Sequence: Synthetic peptide
  Seed: RMCSLMQGSTLPR
RMFSLLQTSTAPR

SEQ ID NO: 121704 - protein, 13 aa, Artificial Sequence
  Description of Artificial Sequence: Synthetic peptide
  Seed: RMCSLMQGSTLPR
RMFSLLQTSTIPR

SEQ ID NO: 121705 - protein, 13 aa, Artificial Sequence
  Description of Artificial Sequence: Synthetic peptide
  Seed: RMCSLMQGSTLPR
RMFSLLQTSTLPR

SEQ ID NO: 121706 - protein, 13 aa, Artificial Sequence
  Description of Artificial Sequence: Synthetic peptide
  Seed: RMCSLMQGSTLPR
RMFSLLQTSTVPR

SEQ ID NO: 121707 - protein, 13 aa, Artificial Sequence
  Description of Artificial Sequence: Synthetic peptide
  Seed: RMCSLMQGSTLPR
RMFSLMQASTAPR

SEQ ID NO: 121708 - protein, 13 aa, Artificial Sequence
  Description of Artificial Sequence: Synthetic peptide
  Seed: RMCSLMQGSTLPR
RMFSLMQASTIPR

SEQ ID NO: 121709 - protein, 13 aa, Artificial Sequence
  Description of Artificial Sequence: Synthetic peptide
  Seed: RMCSLMQGSTLPR
RMFSLMQASTLPR

SEQ ID NO: 121710 - protein, 13 aa, Artificial Sequence
  Description of Artificial Sequence: Synthetic peptide
  Seed: RMCSLMQGSTLPR
RMFSLMQASTMPR

SEQ ID NO: 121711 - protein, 13 aa, Artificial Sequence
  Description of Artificial Sequence: Synthetic peptide
  Seed: RMCSLMQGSTLPR
RMFSLMQASTSPR

SEQ ID NO: 121712 - protein, 13 aa, Artificial Sequence
  Description of Artificial Sequence: Synthetic peptide
  Seed: RMCSLMQGSTLPR
RMFSLMQASTTPR

SEQ ID NO: 121713 - protein, 13 aa, Artificial Sequence
  Description of Artificial Sequence: Synthetic peptide
  Seed: RMCSLMQGSTLPR
RMFSLMQASTVPR

SEQ ID NO: 121714 - protein, 13 aa, Artificial Sequence
  Description of Artificial Sequence: Synthetic peptide
  Seed: RMCSLMQGSTLPR
RMFSLMQGSTAPR

SEQ ID NO: 121715 - protein, 13 aa, Artificial Sequence
  Description of Artificial Sequence: Synthetic peptide
  Seed: RMCSLMQGSTLPR
RMFSLMQGSTIPR

SEQ ID NO: 121716 - protein, 13 aa, Artificial Sequence
  Description of Artificial Sequence: Synthetic peptide
  Seed: RMCSLMQGSTLPR
RMFSLMQGSTLPR

SEQ ID NO: 121717 - protein, 13 aa, Artificial Sequence
  Description of Artificial Sequence: Synthetic peptide
  Seed: RMCSLMQGSTLPR
RMFSLMQGSTMPR

SEQ ID NO: 121718 - protein, 13 aa, Artificial Sequence
  Description of Artificial Sequence: Synthetic peptide
  Seed: RMCSLMQGSTLPR
RMFSLMQGSTSPR

SEQ ID NO: 121719 - protein, 13 aa, Artificial Sequence
  Description of Artificial Sequence: Synthetic peptide
  Seed: RMCSLMQGSTLPR
RMFSLMQGSTTPR

SEQ ID NO: 121720 - protein, 13 aa, Artificial Sequence
  Description of Artificial Sequence: Synthetic peptide
  Seed: RMCSLMQGSTLPR
RMFSLMQGSTVPR

SEQ ID NO: 121721 - protein, 13 aa, Artificial Sequence
  Description of Artificial Sequence: Synthetic peptide
  Seed: RMCSLMQGSTLPR
RMFSLMQNSTAPR

SEQ ID NO: 121722 - protein, 13 aa, Artificial Sequence
  Description of Artificial Sequence: Synthetic peptide
  Seed: RMCSLMQGSTLPR
RMFSLMQNSTIPR

SEQ ID NO: 121723 - protein, 13 aa, Artificial Sequence
  Description of Artificial Sequence: Synthetic peptide
  Seed: RMCSLMQGSTLPR
RMFSLMQNSTLPR

SEQ ID NO: 121724 - protein, 13 aa, Artificial Sequence
  Description of Artificial Sequence: Synthetic peptide
  Seed: RMCSLMQGSTLPR
RMFSLMQNSTVPR

SEQ ID NO: 121725 - protein, 13 aa, Artificial Sequence
  Description of Artificial Sequence: Synthetic peptide
  Seed: RMCSLMQGSTLPR
RMFSLMQPSTAPR

SEQ ID NO: 121726 - protein, 13 aa, Artificial Sequence
  Description of Artificial Sequence: Synthetic peptide
  Seed: RMCSLMQGSTLPR
RMFSLMQPSTIPR

SEQ ID NO: 121727 - protein, 13 aa, Artificial Sequence
  Description of Artificial Sequence: Synthetic peptide
  Seed: RMCSLMQGSTLPR
RMFSLMQPSTLPR

SEQ ID NO: 121728 - protein, 13 aa, Artificial Sequence
  Description of Artificial Sequence: Synthetic peptide
  Seed: RMCSLMQGSTLPR
RMFSLMQPSTVPR

SEQ ID NO: 121729 - protein, 13 aa, Artificial Sequence
  Description of Artificial Sequence: Synthetic peptide
  Seed: RMCSLMQGSTLPR
RMFSLMQSSTAPR

SEQ ID NO: 121730 - protein, 13 aa, Artificial Sequence
  Description of Artificial Sequence: Synthetic peptide
  Seed: RMCSLMQGSTLPR
RMFSLMQSSTIPR

SEQ ID NO: 121731 - protein, 13 aa, Artificial Sequence
  Description of Artificial Sequence: Synthetic peptide
  Seed: RMCSLMQGSTLPR
RMFSLMQSSTLPR

SEQ ID NO: 121732 - protein, 13 aa, Artificial Sequence
  Description of Artificial Sequence: Synthetic peptide
  Seed: RMCSLMQGSTLPR
RMFSLMQSSTMPR

SEQ ID NO: 121733 - protein, 13 aa, Artificial Sequence
  Description of Artificial Sequence: Synthetic peptide
  Seed: RMCSLMQGSTLPR
RMFSLMQSSTTPR

SEQ ID NO: 121734 - protein, 13 aa, Artificial Sequence
  Description of Artificial Sequence: Synthetic peptide
  Seed: RMCSLMQGSTLPR
RMFSLMQSSTVPR

SEQ ID NO: 121735 - protein, 13 aa, Artificial Sequence
  Description of Artificial Sequence: Synthetic peptide
  Seed: RMCSLMQGSTLPR
RMFSLMQTSTIPR

SEQ ID NO: 121736 - protein, 13 aa, Artificial Sequence
  Description of Artificial Sequence: Synthetic peptide
  Seed: RMCSLMQGSTLPR
RMFSLMQTSTLPR

SEQ ID NO: 121737 - protein, 13 aa, Artificial Sequence
  Description of Artificial Sequence: Synthetic peptide
  Seed: RMCSLMQGSTLPR
RMFSLMQTSTVPR

SEQ ID NO: 121738 - protein, 13 aa, Artificial Sequence
  Description of Artificial Sequence: Synthetic peptide
  Seed: RMCSLMQGSTLPR
RMFSLQQASTIPR

SEQ ID NO: 121739 - protein, 13 aa, Artificial Sequence
  Description of Artificial Sequence: Synthetic peptide
  Seed: RMCSLMQGSTLPR
RMFSLQQASTLPR

SEQ ID NO: 121740 - protein, 13 aa, Artificial Sequence
  Description of Artificial Sequence: Synthetic peptide
  Seed: RMCSLMQGSTLPR
RMFSLQQASTVPR

SEQ ID NO: 121741 - protein, 13 aa, Artificial Sequence
  Description of Artificial Sequence: Synthetic peptide
  Seed: RMCSLMQGSTLPR
RMFSLVQASTLPR

SEQ ID NO: 121742 - protein, 13 aa, Artificial Sequence
  Description of Artificial Sequence: Synthetic peptide
  Seed: RMCSLMQGSTLPR
RMFSLVQASTVPR

SEQ ID NO: 121743 - protein, 13 aa, Artificial Sequence
  Description of Artificial Sequence: Synthetic peptide
  Seed: RMCSLMQGSTLPR
RMISLLQASTLPR

SEQ ID NO: 121744 - protein, 13 aa, Artificial Sequence
  Description of Artificial Sequence: Synthetic peptide
  Seed: RMCSLMQGSTLPR
RMISLLQASTVPR

SEQ ID NO: 121745 - protein, 13 aa, Artificial Sequence
  Description of Artificial Sequence: Synthetic peptide
  Seed: RMCSLMQGSTLPR
RMISLLQGSTLPR

SEQ ID NO: 121746 - protein, 13 aa, Artificial Sequence
  Description of Artificial Sequence: Synthetic peptide
  Seed: RMCSLMQGSTLPR
RMISLMQASTLPR

SEQ ID NO: 121747 - protein, 13 aa, Artificial Sequence
  Description of Artificial Sequence: Synthetic peptide
  Seed: RMCSLMQGSTLPR
RMWSLLQASTLPR

SEQ ID NO: 121748 - protein, 13 aa, Artificial Sequence
  Description of Artificial Sequence: Synthetic peptide
  Seed: RMCSLMQGSTLPR
RMWSLLQASTVPR

SEQ ID NO: 121749 - protein, 13 aa, Artificial Sequence
  Description of Artificial Sequence: Synthetic peptide
  Seed: RMCSLMQGSTLPR
RMWSLLQGSTAPR

SEQ ID NO: 121750 - protein, 13 aa, Artificial Sequence
  Description of Artificial Sequence: Synthetic peptide
  Seed: RMCSLMQGSTLPR
RMWSLLQGSTIPR

SEQ ID NO: 121751 - protein, 13 aa, Artificial Sequence
  Description of Artificial Sequence: Synthetic peptide
  Seed: RMCSLMQGSTLPR
RMWSLLQGSTLPR

SEQ ID NO: 121752 - protein, 13 aa, Artificial Sequence
  Description of Artificial Sequence: Synthetic peptide
  Seed: RMCSLMQGSTLPR
RMWSLLQGSTVPR

SEQ ID NO: 121753 - protein, 13 aa, Artificial Sequence
  Description of Artificial Sequence: Synthetic peptide
  Seed: RMCSLMQGSTLPR
RMWSLMQASTLPR

SEQ ID NO: 121754 - protein, 13 aa, Artificial Sequence
  Description of Artificial Sequence: Synthetic peptide
  Seed: RMCSLMQGSTLPR
RMWSLMQASTVPR

SEQ ID NO: 121755 - protein, 13 aa, Artificial Sequence
  Description of Artificial Sequence: Synthetic peptide
  Seed: RMCSLMQGSTLPR
RMWSLMQGSTIPR

SEQ ID NO: 121756 - protein, 13 aa, Artificial Sequence
  Description of Artificial Sequence: Synthetic peptide
  Seed: RMCSLMQGSTLPR
RMWSLMQGSTLPR

SEQ ID NO: 121757 - protein, 13 aa, Artificial Sequence
  Description of Artificial Sequence: Synthetic peptide
  Seed: RMCSLMQGSTLPR
RMWSLMQGSTVPR

SEQ ID NO: 121758 - protein, 13 aa, Artificial Sequence
  Description of Artificial Sequence: Synthetic peptide
  Seed: RMCSLMQGSTLPR
RMYSLIQASTIPR

SEQ ID NO: 121759 - protein, 13 aa, Artificial Sequence
  Description of Artificial Sequence: Synthetic peptide
  Seed: RMCSLMQGSTLPR
RMYSLIQASTLPR

SEQ ID NO: 121760 - protein, 13 aa, Artificial Sequence
  Description of Artificial Sequence: Synthetic peptide
  Seed: RMCSLMQGSTLPR
RMYSLIQASTVPR

SEQ ID NO: 121761 - protein, 13 aa, Artificial Sequence
  Description of Artificial Sequence: Synthetic peptide
  Seed: RMCSLMQGSTLPR
RMYSLIQGSTLPR

SEQ ID NO: 121762 - protein, 13 aa, Artificial Sequence
  Description of Artificial Sequence: Synthetic peptide
  Seed: RMCSLMQGSTLPR
RMYSLIQGSTVPR

SEQ ID NO: 121763 - protein, 13 aa, Artificial Sequence
  Description of Artificial Sequence: Synthetic peptide
  Seed: RMCSLMQGSTLPR
RMYSLLQASTAPR

SEQ ID NO: 121764 - protein, 13 aa, Artificial Sequence
  Description of Artificial Sequence: Synthetic peptide
  Seed: RMCSLMQGSTLPR
RMYSLLQASTIPR

SEQ ID NO: 121765 - protein, 13 aa, Artificial Sequence
  Description of Artificial Sequence: Synthetic peptide
  Seed: RMCSLMQGSTLPR
RMYSLLQASTLPR

SEQ ID NO: 121766 - protein, 13 aa, Artificial Sequence
  Description of Artificial Sequence: Synthetic peptide
  Seed: RMCSLMQGSTLPR
RMYSLLQASTTPR

SEQ ID NO: 121767 - protein, 13 aa, Artificial Sequence
  Description of Artificial Sequence: Synthetic peptide
  Seed: RMCSLMQGSTLPR
RMYSLLQASTVPR

SEQ ID NO: 121768 - protein, 13 aa, Artificial Sequence
  Description of Artificial Sequence: Synthetic peptide
  Seed: RMCSLMQGSTLPR
RMYSLLQGSTAPR

SEQ ID NO: 121769 - protein, 13 aa, Artificial Sequence
  Description of Artificial Sequence: Synthetic peptide
  Seed: RMCSLMQGSTLPR
RMYSLLQGSTIPR

SEQ ID NO: 121770 - protein, 13 aa, Artificial Sequence
  Description of Artificial Sequence: Synthetic peptide
  Seed: RMCSLMQGSTLPR
RMYSLLQGSTLPR

SEQ ID NO: 121771 - protein, 13 aa, Artificial Sequence
  Description of Artificial Sequence: Synthetic peptide
  Seed: RMCSLMQGSTLPR
RMYSLLQGSTVPR

SEQ ID NO: 121772 - protein, 13 aa, Artificial Sequence
  Description of Artificial Sequence: Synthetic peptide
  Seed: RMCSLMQGSTLPR
RMYSLLQPSTIPR

SEQ ID NO: 121773 - protein, 13 aa, Artificial Sequence
  Description of Artificial Sequence: Synthetic peptide
  Seed: RMCSLMQGSTLPR
RMYSLLQPSTLPR

SEQ ID NO: 121774 - protein, 13 aa, Artificial Sequence
  Description of Artificial Sequence: Synthetic peptide
  Seed: RMCSLMQGSTLPR
RMYSLLQPSTVPR

SEQ ID NO: 121775 - protein, 13 aa, Artificial Sequence
  Description of Artificial Sequence: Synthetic peptide
  Seed: RMCSLMQGSTLPR
RMYSLLQSSTAPR

SEQ ID NO: 121776 - protein, 13 aa, Artificial Sequence
  Description of Artificial Sequence: Synthetic peptide
  Seed: RMCSLMQGSTLPR
RMYSLLQSSTIPR

SEQ ID NO: 121777 - protein, 13 aa, Artificial Sequence
  Description of Artificial Sequence: Synthetic peptide
  Seed: RMCSLMQGSTLPR
RMYSLLQSSTLPR

SEQ ID NO: 121778 - protein, 13 aa, Artificial Sequence
  Description of Artificial Sequence: Synthetic peptide
  Seed: RMCSLMQGSTLPR
RMYSLLQSSTVPR

SEQ ID NO: 121779 - protein, 13 aa, Artificial Sequence
  Description of Artificial Sequence: Synthetic peptide
  Seed: RMCSLMQGSTLPR
RMYSLMQASTAPR

SEQ ID NO: 121780 - protein, 13 aa, Artificial Sequence
  Description of Artificial Sequence: Synthetic peptide
  Seed: RMCSLMQGSTLPR
RMYSLMQASTIPR

SEQ ID NO: 121781 - protein, 13 aa, Artificial Sequence
  Description of Artificial Sequence: Synthetic peptide
  Seed: RMCSLMQGSTLPR
RMYSLMQASTLPR

SEQ ID NO: 121782 - protein, 13 aa, Artificial Sequence
  Description of Artificial Sequence: Synthetic peptide
  Seed: RMCSLMQGSTLPR
RMYSLMQASTMPR

SEQ ID NO: 121783 - protein, 13 aa, Artificial Sequence
  Description of Artificial Sequence: Synthetic peptide
  Seed: RMCSLMQGSTLPR
RMYSLMQASTVPR

SEQ ID NO: 121784 - protein, 13 aa, Artificial Sequence
  Description of Artificial Sequence: Synthetic peptide
  Seed: RMCSLMQGSTLPR
RMYSLMQGSTAPR

SEQ ID NO: 121785 - protein, 13 aa, Artificial Sequence
  Description of Artificial Sequence: Synthetic peptide
  Seed: RMCSLMQGSTLPR
RMYSLMQGSTIPR

SEQ ID NO: 121786 - protein, 13 aa, Artificial Sequence
  Description of Artificial Sequence: Synthetic peptide
  Seed: RMCSLMQGSTLPR
RMYSLMQGSTLPR

SEQ ID NO: 121787 - protein, 13 aa, Artificial Sequence
  Description of Artificial Sequence: Synthetic peptide
  Seed: RMCSLMQGSTLPR
RMYSLMQGSTVPR

SEQ ID NO: 121788 - protein, 13 aa, Artificial Sequence
  Description of Artificial Sequence: Synthetic peptide
  Seed: RMCSLMQGSTLPR
RMYSLMQPSTLPR

SEQ ID NO: 121789 - protein, 13 aa, Artificial Sequence
  Description of Artificial Sequence: Synthetic peptide
  Seed: RMCSLMQGSTLPR
RMYSLMQPSTVPR

SEQ ID NO: 121790 - protein, 13 aa, Artificial Sequence
  Description of Artificial Sequence: Synthetic peptide
  Seed: RMCSLMQGSTLPR
RMYSLMQSSTAPR

SEQ ID NO: 121791 - protein, 13 aa, Artificial Sequence
  Description of Artificial Sequence: Synthetic peptide
  Seed: RMCSLMQGSTLPR
RMYSLMQSSTIPR

SEQ ID NO: 121792 - protein, 13 aa, Artificial Sequence
  Description of Artificial Sequence: Synthetic peptide
  Seed: RMCSLMQGSTLPR
RMYSLMQSSTLPR

SEQ ID NO: 121793 - protein, 13 aa, Artificial Sequence
  Description of Artificial Sequence: Synthetic peptide
  Seed: RMCSLMQGSTLPR
RMYSLMQSSTVPR

SEQ ID NO: 121794 - protein, 14 aa, Artificial Sequence
  Description of Artificial Sequence: Synthetic peptide
  Seed: RMCSLMQGSTLPRR
RMFSLAQASTAPRR

SEQ ID NO: 121795 - protein, 14 aa, Artificial Sequence
  Description of Artificial Sequence: Synthetic peptide
  Seed: RMCSLMQGSTLPRR
RMFSLAQASTFPRR

SEQ ID NO: 121796 - protein, 14 aa, Artificial Sequence
  Description of Artificial Sequence: Synthetic peptide
  Seed: RMCSLMQGSTLPRR
RMFSLAQASTGPRR

SEQ ID NO: 121797 - protein, 14 aa, Artificial Sequence
  Description of Artificial Sequence: Synthetic peptide
  Seed: RMCSLMQGSTLPRR
RMFSLAQASTHPRR

SEQ ID NO: 121798 - protein, 14 aa, Artificial Sequence
  Description of Artificial Sequence: Synthetic peptide
  Seed: RMCSLMQGSTLPRR
RMFSLAQASTIPRR

SEQ ID NO: 121799 - protein, 14 aa, Artificial Sequence
  Description of Artificial Sequence: Synthetic peptide
  Seed: RMCSLMQGSTLPRR
RMFSLAQASTLPRR

SEQ ID NO: 121800 - protein, 14 aa, Artificial Sequence
  Description of Artificial Sequence: Synthetic peptide
  Seed: RMCSLMQGSTLPRR
RMFSLAQASTMPRR

SEQ ID NO: 121801 - protein, 14 aa, Artificial Sequence
  Description of Artificial Sequence: Synthetic peptide
  Seed: RMCSLMQGSTLPRR
RMFSLAQASTNPRR

SEQ ID NO: 121802 - protein, 14 aa, Artificial Sequence
  Description of Artificial Sequence: Synthetic peptide
  Seed: RMCSLMQGSTLPRR
RMFSLAQASTQPRR

SEQ ID NO: 121803 - protein, 14 aa, Artificial Sequence
  Description of Artificial Sequence: Synthetic peptide
  Seed: RMCSLMQGSTLPRR
RMFSLAQASTSPRR

SEQ ID NO: 121804 - protein, 14 aa, Artificial Sequence
  Description of Artificial Sequence: Synthetic peptide
  Seed: RMCSLMQGSTLPRR
RMFSLAQASTTPRR

SEQ ID NO: 121805 - protein, 14 aa, Artificial Sequence
  Description of Artificial Sequence: Synthetic peptide
  Seed: RMCSLMQGSTLPRR
RMFSLAQASTVPRR

SEQ ID NO: 121806 - protein, 14 aa, Artificial Sequence
  Description of Artificial Sequence: Synthetic peptide
  Seed: RMCSLMQGSTLPRR
RMFSLAQGSTAPRR

SEQ ID NO: 121807 - protein, 14 aa, Artificial Sequence
  Description of Artificial Sequence: Synthetic peptide
  Seed: RMCSLMQGSTLPRR
RMFSLAQGSTIPRR

SEQ ID NO: 121808 - protein, 14 aa, Artificial Sequence
  Description of Artificial Sequence: Synthetic peptide
  Seed: RMCSLMQGSTLPRR
RMFSLAQGSTLPRR

SEQ ID NO: 121809 - protein, 14 aa, Artificial Sequence
  Description of Artificial Sequence: Synthetic peptide
  Seed: RMCSLMQGSTLPRR
RMFSLAQGSTMPRR

SEQ ID NO: 121810 - protein, 14 aa, Artificial Sequence
  Description of Artificial Sequence: Synthetic peptide
  Seed: RMCSLMQGSTLPRR
RMFSLAQGSTSPRR

SEQ ID NO: 121811 - protein, 14 aa, Artificial Sequence
  Description of Artificial Sequence: Synthetic peptide
  Seed: RMCSLMQGSTLPRR
RMFSLAQGSTTPRR

SEQ ID NO: 121812 - protein, 14 aa, Artificial Sequence
  Description of Artificial Sequence: Synthetic peptide
  Seed: RMCSLMQGSTLPRR
RMFSLAQGSTVPRR

SEQ ID NO: 121813 - protein, 14 aa, Artificial Sequence
  Description of Artificial Sequence: Synthetic peptide
  Seed: RMCSLMQGSTLPRR
RMFSLAQISTAPRR

SEQ ID NO: 121814 - protein, 14 aa, Artificial Sequence
  Description of Artificial Sequence: Synthetic peptide
  Seed: RMCSLMQGSTLPRR
RMFSLAQISTNPRR

SEQ ID NO: 121815 - protein, 14 aa, Artificial Sequence
  Description of Artificial Sequence: Synthetic peptide
  Seed: RMCSLMQGSTLPRR
RMFSLAQISTSPRR

SEQ ID NO: 121816 - protein, 14 aa, Artificial Sequence
  Description of Artificial Sequence: Synthetic peptide
  Seed: RMCSLMQGSTLPRR
RMFSLAQISTTPRR

SEQ ID NO: 121817 - protein, 14 aa, Artificial Sequence
  Description of Artificial Sequence: Synthetic peptide
  Seed: RMCSLMQGSTLPRR
RMFSLAQISTVPRR

SEQ ID NO: 121818 - protein, 14 aa, Artificial Sequence
  Description of Artificial Sequence: Synthetic peptide
  Seed: RMCSLMQGSTLPRR
RMFSLAQNSTAPRR

SEQ ID NO: 121819 - protein, 14 aa, Artificial Sequence
  Description of Artificial Sequence: Synthetic peptide
  Seed: RMCSLMQGSTLPRR
RMFSLAQNSTIPRR

SEQ ID NO: 121820 - protein, 14 aa, Artificial Sequence
  Description of Artificial Sequence: Synthetic peptide
  Seed: RMCSLMQGSTLPRR
RMFSLAQNSTLPRR

SEQ ID NO: 121821 - protein, 14 aa, Artificial Sequence
  Description of Artificial Sequence: Synthetic peptide
  Seed: RMCSLMQGSTLPRR
RMFSLAQNSTSPRR

SEQ ID NO: 121822 - protein, 14 aa, Artificial Sequence
  Description of Artificial Sequence: Synthetic peptide
  Seed: RMCSLMQGSTLPRR
RMFSLAQNSTVPRR

SEQ ID NO: 121823 - protein, 14 aa, Artificial Sequence
  Description of Artificial Sequence: Synthetic peptide
  Seed: RMCSLMQGSTLPRR
RMFSLAQPSTAPRR

SEQ ID NO: 121824 - protein, 14 aa, Artificial Sequence
  Description of Artificial Sequence: Synthetic peptide
  Seed: RMCSLMQGSTLPRR
RMFSLAQPSTIPRR

SEQ ID NO: 121825 - protein, 14 aa, Artificial Sequence
  Description of Artificial Sequence: Synthetic peptide
  Seed: RMCSLMQGSTLPRR
RMFSLAQPSTLPRR

SEQ ID NO: 121826 - protein, 14 aa, Artificial Sequence
  Description of Artificial Sequence: Synthetic peptide
  Seed: RMCSLMQGSTLPRR
RMFSLAQPSTMPRR

SEQ ID NO: 121827 - protein, 14 aa, Artificial Sequence
  Description of Artificial Sequence: Synthetic peptide
  Seed: RMCSLMQGSTLPRR
RMFSLAQPSTNPRR

SEQ ID NO: 121828 - protein, 14 aa, Artificial Sequence
  Description of Artificial Sequence: Synthetic peptide
  Seed: RMCSLMQGSTLPRR
RMFSLAQPSTSPRR

SEQ ID NO: 121829 - protein, 14 aa, Artificial Sequence
  Description of Artificial Sequence: Synthetic peptide
  Seed: RMCSLMQGSTLPRR
RMFSLAQPSTTPRR

SEQ ID NO: 121830 - protein, 14 aa, Artificial Sequence
  Description of Artificial Sequence: Synthetic peptide
  Seed: RMCSLMQGSTLPRR
RMFSLAQPSTVPRR

SEQ ID NO: 121831 - protein, 14 aa, Artificial Sequence
  Description of Artificial Sequence: Synthetic peptide
  Seed: RMCSLMQGSTLPRR
RMFSLAQSSTAPRR

SEQ ID NO: 121832 - protein, 14 aa, Artificial Sequence
  Description of Artificial Sequence: Synthetic peptide
  Seed: RMCSLMQGSTLPRR
RMFSLAQSSTIPRR

SEQ ID NO: 121833 - protein, 14 aa, Artificial Sequence
  Description of Artificial Sequence: Synthetic peptide
  Seed: RMCSLMQGSTLPRR
RMFSLAQSSTLPRR

SEQ ID NO: 121834 - protein, 14 aa, Artificial Sequence
  Description of Artificial Sequence: Synthetic peptide
  Seed: RMCSLMQGSTLPRR
RMFSLAQSSTMPRR

SEQ ID NO: 121835 - protein, 14 aa, Artificial Sequence
  Description of Artificial Sequence: Synthetic peptide
  Seed: RMCSLMQGSTLPRR
RMFSLAQSSTNPRR

SEQ ID NO: 121836 - protein, 14 aa, Artificial Sequence
  Description of Artificial Sequence: Synthetic peptide
  Seed: RMCSLMQGSTLPRR
RMFSLAQSSTSPRR

SEQ ID NO: 121837 - protein, 14 aa, Artificial Sequence
  Description of Artificial Sequence: Synthetic peptide
  Seed: RMCSLMQGSTLPRR
RMFSLAQSSTTPRR

SEQ ID NO: 121838 - protein, 14 aa, Artificial Sequence
  Description of Artificial Sequence: Synthetic peptide
  Seed: RMCSLMQGSTLPRR
RMFSLAQSSTVPRR

SEQ ID NO: 121839 - protein, 14 aa, Artificial Sequence
  Description of Artificial Sequence: Synthetic peptide
  Seed: RMCSLMQGSTLPRR
RMFSLAQTSTAPRR

SEQ ID NO: 121840 - protein, 14 aa, Artificial Sequence
  Description of Artificial Sequence: Synthetic peptide
  Seed: RMCSLMQGSTLPRR
RMFSLAQTSTIPRR

SEQ ID NO: 121841 - protein, 14 aa, Artificial Sequence
  Description of Artificial Sequence: Synthetic peptide
  Seed: RMCSLMQGSTLPRR
RMFSLAQTSTLPRR

SEQ ID NO: 121842 - protein, 14 aa, Artificial Sequence
  Description of Artificial Sequence: Synthetic peptide
  Seed: RMCSLMQGSTLPRR
RMFSLAQTSTMPRR

SEQ ID NO: 121843 - protein, 14 aa, Artificial Sequence
  Description of Artificial Sequence: Synthetic peptide
  Seed: RMCSLMQGSTLPRR
RMFSLAQTSTNPRR

SEQ ID NO: 121844 - protein, 14 aa, Artificial Sequence
  Description of Artificial Sequence: Synthetic peptide
  Seed: RMCSLMQGSTLPRR
RMFSLAQTSTSPRR

SEQ ID NO: 121845 - protein, 14 aa, Artificial Sequence
  Description of Artificial Sequence: Synthetic peptide
  Seed: RMCSLMQGSTLPRR
RMFSLAQTSTTPRR

SEQ ID NO: 121846 - protein, 14 aa, Artificial Sequence
  Description of Artificial Sequence: Synthetic peptide
  Seed: RMCSLMQGSTLPRR
RMFSLAQTSTVPRR

SEQ ID NO: 121847 - protein, 14 aa, Artificial Sequence
  Description of Artificial Sequence: Synthetic peptide
  Seed: RMCSLMQGSTLPRR
RMFSLAQVSTAPRR

SEQ ID NO: 121848 - protein, 14 aa, Artificial Sequence
  Description of Artificial Sequence: Synthetic peptide
  Seed: RMCSLMQGSTLPRR
RMFSLAQVSTIPRR

SEQ ID NO: 121849 - protein, 14 aa, Artificial Sequence
  Description of Artificial Sequence: Synthetic peptide
  Seed: RMCSLMQGSTLPRR
RMFSLAQVSTLPRR

SEQ ID NO: 121850 - protein, 14 aa, Artificial Sequence
  Description of Artificial Sequence: Synthetic peptide
  Seed: RMCSLMQGSTLPRR
RMFSLAQVSTMPRR

SEQ ID NO: 121851 - protein, 14 aa, Artificial Sequence
  Description of Artificial Sequence: Synthetic peptide
  Seed: RMCSLMQGSTLPRR
RMFSLAQVSTNPRR

SEQ ID NO: 121852 - protein, 14 aa, Artificial Sequence
  Description of Artificial Sequence: Synthetic peptide
  Seed: RMCSLMQGSTLPRR
RMFSLAQVSTSPRR

SEQ ID NO: 121853 - protein, 14 aa, Artificial Sequence
  Description of Artificial Sequence: Synthetic peptide
  Seed: RMCSLMQGSTLPRR
RMFSLAQVSTTPRR

SEQ ID NO: 121854 - protein, 14 aa, Artificial Sequence
  Description of Artificial Sequence: Synthetic peptide
  Seed: RMCSLMQGSTLPRR
RMFSLAQVSTVPRR

SEQ ID NO: 121855 - protein, 14 aa, Artificial Sequence
  Description of Artificial Sequence: Synthetic peptide
  Seed: RMCSLMQGSTLPRR
RMFSLCQASTLPRR

SEQ ID NO: 121856 - protein, 14 aa, Artificial Sequence
  Description of Artificial Sequence: Synthetic peptide
  Seed: RMCSLMQGSTLPRR
RMFSLEQASTAPRR

SEQ ID NO: 121857 - protein, 14 aa, Artificial Sequence
  Description of Artificial Sequence: Synthetic peptide
  Seed: RMCSLMQGSTLPRR
RMFSLEQASTIPRR

SEQ ID NO: 121858 - protein, 14 aa, Artificial Sequence
  Description of Artificial Sequence: Synthetic peptide
  Seed: RMCSLMQGSTLPRR
RMFSLEQASTLPRR

SEQ ID NO: 121859 - protein, 14 aa, Artificial Sequence
  Description of Artificial Sequence: Synthetic peptide
  Seed: RMCSLMQGSTLPRR
RMFSLEQASTVPRR

SEQ ID NO: 121860 - protein, 14 aa, Artificial Sequence
  Description of Artificial Sequence: Synthetic peptide
  Seed: RMCSLMQGSTLPRR
RMFSLEQGSTAPRR

SEQ ID NO: 121861 - protein, 14 aa, Artificial Sequence
  Description of Artificial Sequence: Synthetic peptide
  Seed: RMCSLMQGSTLPRR
RMFSLEQGSTIPRR

SEQ ID NO: 121862 - protein, 14 aa, Artificial Sequence
  Description of Artificial Sequence: Synthetic peptide
  Seed: RMCSLMQGSTLPRR
RMFSLEQGSTLPRR

SEQ ID NO: 121863 - protein, 14 aa, Artificial Sequence
  Description of Artificial Sequence: Synthetic peptide
  Seed: RMCSLMQGSTLPRR
RMFSLEQGSTVPRR

SEQ ID NO: 121864 - protein, 14 aa, Artificial Sequence
  Description of Artificial Sequence: Synthetic peptide
  Seed: RMCSLMQGSTLPRR
RMFSLEQSSTLPRR

SEQ ID NO: 121865 - protein, 14 aa, Artificial Sequence
  Description of Artificial Sequence: Synthetic peptide
  Seed: RMCSLMQGSTLPRR
RMFSLEQSSTVPRR

SEQ ID NO: 121866 - protein, 14 aa, Artificial Sequence
  Description of Artificial Sequence: Synthetic peptide
  Seed: RMCSLMQGSTLPRR
RMFSLFQASTAPRR

SEQ ID NO: 121867 - protein, 14 aa, Artificial Sequence
  Description of Artificial Sequence: Synthetic peptide
  Seed: RMCSLMQGSTLPRR
RMFSLFQASTIPRR

SEQ ID NO: 121868 - protein, 14 aa, Artificial Sequence
  Description of Artificial Sequence: Synthetic peptide
  Seed: RMCSLMQGSTLPRR
RMFSLFQASTLPRR

SEQ ID NO: 121869 - protein, 14 aa, Artificial Sequence
  Description of Artificial Sequence: Synthetic peptide
  Seed: RMCSLMQGSTLPRR
RMFSLFQASTNPRR

SEQ ID NO: 121870 - protein, 14 aa, Artificial Sequence
  Description of Artificial Sequence: Synthetic peptide
  Seed: RMCSLMQGSTLPRR
RMFSLFQASTSPRR

SEQ ID NO: 121871 - protein, 14 aa, Artificial Sequence
  Description of Artificial Sequence: Synthetic peptide
  Seed: RMCSLMQGSTLPRR
RMFSLFQASTVPRR

SEQ ID NO: 121872 - protein, 14 aa, Artificial Sequence
  Description of Artificial Sequence: Synthetic peptide
  Seed: RMCSLMQGSTLPRR
RMFSLFQGSTAPRR

SEQ ID NO: 121873 - protein, 14 aa, Artificial Sequence
  Description of Artificial Sequence: Synthetic peptide
  Seed: RMCSLMQGSTLPRR
RMFSLFQGSTLPRR

SEQ ID NO: 121874 - protein, 14 aa, Artificial Sequence
  Description of Artificial Sequence: Synthetic peptide
  Seed: RMCSLMQGSTLPRR
RMFSLFQGSTVPRR

SEQ ID NO: 121875 - protein, 14 aa, Artificial Sequence
  Description of Artificial Sequence: Synthetic peptide
  Seed: RMCSLMQGSTLPRR
RMFSLFQPSTAPRR

SEQ ID NO: 121876 - protein, 14 aa, Artificial Sequence
  Description of Artificial Sequence: Synthetic peptide
  Seed: RMCSLMQGSTLPRR
RMFSLFQPSTSPRR

SEQ ID NO: 121877 - protein, 14 aa, Artificial Sequence
  Description of Artificial Sequence: Synthetic peptide
  Seed: RMCSLMQGSTLPRR
RMFSLFQSSTAPRR

SEQ ID NO: 121878 - protein, 14 aa, Artificial Sequence
  Description of Artificial Sequence: Synthetic peptide
  Seed: RMCSLMQGSTLPRR
RMFSLFQSSTVPRR

SEQ ID NO: 121879 - protein, 14 aa, Artificial Sequence
  Description of Artificial Sequence: Synthetic peptide
  Seed: RMCSLMQGSTLPRR
RMFSLGQASTIPRR

SEQ ID NO: 121880 - protein, 14 aa, Artificial Sequence
  Description of Artificial Sequence: Synthetic peptide
  Seed: RMCSLMQGSTLPRR
RMFSLGQASTLPRR

SEQ ID NO: 121881 - protein, 14 aa, Artificial Sequence
  Description of Artificial Sequence: Synthetic peptide
  Seed: RMCSLMQGSTLPRR
RMFSLGQASTVPRR

SEQ ID NO: 121882 - protein, 14 aa, Artificial Sequence
  Description of Artificial Sequence: Synthetic peptide
  Seed: RMCSLMQGSTLPRR
RMFSLGQGSTLPRR

SEQ ID NO: 121883 - protein, 14 aa, Artificial Sequence
  Description of Artificial Sequence: Synthetic peptide
  Seed: RMCSLMQGSTLPRR
RMFSLGQSSTLPRR

SEQ ID NO: 121884 - protein, 14 aa, Artificial Sequence
  Description of Artificial Sequence: Synthetic peptide
  Seed: RMCSLMQGSTLPRR
RMFSLHQASTLPRR

SEQ ID NO: 121885 - protein, 14 aa, Artificial Sequence
  Description of Artificial Sequence: Synthetic peptide
  Seed: RMCSLMQGSTLPRR
RMFSLIQASTAPRR

SEQ ID NO: 121886 - protein, 14 aa, Artificial Sequence
  Description of Artificial Sequence: Synthetic peptide
  Seed: RMCSLMQGSTLPRR
RMFSLIQASTCPRR

SEQ ID NO: 121887 - protein, 14 aa, Artificial Sequence
  Description of Artificial Sequence: Synthetic peptide
  Seed: RMCSLMQGSTLPRR
RMFSLIQASTFPRR

SEQ ID NO: 121888 - protein, 14 aa, Artificial Sequence
  Description of Artificial Sequence: Synthetic peptide
  Seed: RMCSLMQGSTLPRR
RMFSLIQASTGPRR

SEQ ID NO: 121889 - protein, 14 aa, Artificial Sequence
  Description of Artificial Sequence: Synthetic peptide
  Seed: RMCSLMQGSTLPRR
RMFSLIQASTHPRR

SEQ ID NO: 121890 - protein, 14 aa, Artificial Sequence
  Description of Artificial Sequence: Synthetic peptide
  Seed: RMCSLMQGSTLPRR
RMFSLIQASTIPRR

SEQ ID NO: 121891 - protein, 14 aa, Artificial Sequence
  Description of Artificial Sequence: Synthetic peptide
  Seed: RMCSLMQGSTLPRR
RMFSLIQASTLPRR

SEQ ID NO: 121892 - protein, 14 aa, Artificial Sequence
  Description of Artificial Sequence: Synthetic peptide
  Seed: RMCSLMQGSTLPRR
RMFSLIQASTMPRR

SEQ ID NO: 121893 - protein, 14 aa, Artificial Sequence
  Description of Artificial Sequence: Synthetic peptide
  Seed: RMCSLMQGSTLPRR
RMFSLIQASTNPRR

SEQ ID NO: 121894 - protein, 14 aa, Artificial Sequence
  Description of Artificial Sequence: Synthetic peptide
  Seed: RMCSLMQGSTLPRR
RMFSLIQASTPPRR

SEQ ID NO: 121895 - protein, 14 aa, Artificial Sequence
  Description of Artificial Sequence: Synthetic peptide
  Seed: RMCSLMQGSTLPRR
RMFSLIQASTQPRR

SEQ ID NO: 121896 - protein, 14 aa, Artificial Sequence
  Description of Artificial Sequence: Synthetic peptide
  Seed: RMCSLMQGSTLPRR
RMFSLIQASTSPRR

SEQ ID NO: 121897 - protein, 14 aa, Artificial Sequence
  Description of Artificial Sequence: Synthetic peptide
  Seed: RMCSLMQGSTLPRR
RMFSLIQASTTPRR

SEQ ID NO: 121898 - protein, 14 aa, Artificial Sequence
  Description of Artificial Sequence: Synthetic peptide
  Seed: RMCSLMQGSTLPRR
RMFSLIQASTVPRR

SEQ ID NO: 121899 - protein, 14 aa, Artificial Sequence
  Description of Artificial Sequence: Synthetic peptide
  Seed: RMCSLMQGSTLPRR
RMFSLIQGSTAPRR

SEQ ID NO: 121900 - protein, 14 aa, Artificial Sequence
  Description of Artificial Sequence: Synthetic peptide
  Seed: RMCSLMQGSTLPRR
RMFSLIQGSTGPRR

SEQ ID NO: 121901 - protein, 14 aa, Artificial Sequence
  Description of Artificial Sequence: Synthetic peptide
  Seed: RMCSLMQGSTLPRR
RMFSLIQGSTIPRR

SEQ ID NO: 121902 - protein, 14 aa, Artificial Sequence
  Description of Artificial Sequence: Synthetic peptide
  Seed: RMCSLMQGSTLPRR
RMFSLIQGSTLPRR

SEQ ID NO: 121903 - protein, 14 aa, Artificial Sequence
  Description of Artificial Sequence: Synthetic peptide
  Seed: RMCSLMQGSTLPRR
RMFSLIQGSTMPRR

SEQ ID NO: 121904 - protein, 14 aa, Artificial Sequence
  Description of Artificial Sequence: Synthetic peptide
  Seed: RMCSLMQGSTLPRR
RMFSLIQGSTNPRR

SEQ ID NO: 121905 - protein, 14 aa, Artificial Sequence
  Description of Artificial Sequence: Synthetic peptide
  Seed: RMCSLMQGSTLPRR
RMFSLIQGSTSPRR

SEQ ID NO: 121906 - protein, 14 aa, Artificial Sequence
  Description of Artificial Sequence: Synthetic peptide
  Seed: RMCSLMQGSTLPRR
RMFSLIQGSTTPRR

SEQ ID NO: 121907 - protein, 14 aa, Artificial Sequence
  Description of Artificial Sequence: Synthetic peptide
  Seed: RMCSLMQGSTLPRR
RMFSLIQGSTVPRR

SEQ ID NO: 121908 - protein, 14 aa, Artificial Sequence
  Description of Artificial Sequence: Synthetic peptide
  Seed: RMCSLMQGSTLPRR
RMFSLIQISTAPRR

SEQ ID NO: 121909 - protein, 14 aa, Artificial Sequence
  Description of Artificial Sequence: Synthetic peptide
  Seed: RMCSLMQGSTLPRR
RMFSLIQISTGPRR

SEQ ID NO: 121910 - protein, 14 aa, Artificial Sequence
  Description of Artificial Sequence: Synthetic peptide
  Seed: RMCSLMQGSTLPRR
RMFSLIQISTIPRR

SEQ ID NO: 121911 - protein, 14 aa, Artificial Sequence
  Description of Artificial Sequence: Synthetic peptide
  Seed: RMCSLMQGSTLPRR
RMFSLIQISTLPRR

SEQ ID NO: 121912 - protein, 14 aa, Artificial Sequence
  Description of Artificial Sequence: Synthetic peptide
  Seed: RMCSLMQGSTLPRR
RMFSLIQISTMPRR

SEQ ID NO: 121913 - protein, 14 aa, Artificial Sequence
  Description of Artificial Sequence: Synthetic peptide
  Seed: RMCSLMQGSTLPRR
RMFSLIQISTNPRR

SEQ ID NO: 121914 - protein, 14 aa, Artificial Sequence
  Description of Artificial Sequence: Synthetic peptide
  Seed: RMCSLMQGSTLPRR
RMFSLIQISTSPRR

SEQ ID NO: 121915 - protein, 14 aa, Artificial Sequence
  Description of Artificial Sequence: Synthetic peptide
  Seed: RMCSLMQGSTLPRR
RMFSLIQISTTPRR

SEQ ID NO: 121916 - protein, 14 aa, Artificial Sequence
  Description of Artificial Sequence: Synthetic peptide
  Seed: RMCSLMQGSTLPRR
RMFSLIQISTVPRR

SEQ ID NO: 121917 - protein, 14 aa, Artificial Sequence
  Description of Artificial Sequence: Synthetic peptide
  Seed: RMCSLMQGSTLPRR
RMFSLIQLSTAPRR

SEQ ID NO: 121918 - protein, 14 aa, Artificial Sequence
  Description of Artificial Sequence: Synthetic peptide
  Seed: RMCSLMQGSTLPRR
RMFSLIQMSTAPRR

SEQ ID NO: 121919 - protein, 14 aa, Artificial Sequence
  Description of Artificial Sequence: Synthetic peptide
  Seed: RMCSLMQGSTLPRR
RMFSLIQNSTAPRR

SEQ ID NO: 121920 - protein, 14 aa, Artificial Sequence
  Description of Artificial Sequence: Synthetic peptide
  Seed: RMCSLMQGSTLPRR
RMFSLIQNSTIPRR

SEQ ID NO: 121921 - protein, 14 aa, Artificial Sequence
  Description of Artificial Sequence: Synthetic peptide
  Seed: RMCSLMQGSTLPRR
RMFSLIQNSTLPRR

SEQ ID NO: 121922 - protein, 14 aa, Artificial Sequence
  Description of Artificial Sequence: Synthetic peptide
  Seed: RMCSLMQGSTLPRR
RMFSLIQNSTMPRR

SEQ ID NO: 121923 - protein, 14 aa, Artificial Sequence
  Description of Artificial Sequence: Synthetic peptide
  Seed: RMCSLMQGSTLPRR
RMFSLIQNSTNPRR

SEQ ID NO: 121924 - protein, 14 aa, Artificial Sequence
  Description of Artificial Sequence: Synthetic peptide
  Seed: RMCSLMQGSTLPRR
RMFSLIQNSTSPRR

SEQ ID NO: 121925 - protein, 14 aa, Artificial Sequence
  Description of Artificial Sequence: Synthetic peptide
  Seed: RMCSLMQGSTLPRR
RMFSLIQNSTTPRR

SEQ ID NO: 121926 - protein, 14 aa, Artificial Sequence
  Description of Artificial Sequence: Synthetic peptide
  Seed: RMCSLMQGSTLPRR
RMFSLIQNSTVPRR

SEQ ID NO: 121927 - protein, 14 aa, Artificial Sequence
  Description of Artificial Sequence: Synthetic peptide
  Seed: RMCSLMQGSTLPRR
RMFSLIQPSTAPRR

SEQ ID NO: 121928 - protein, 14 aa, Artificial Sequence
  Description of Artificial Sequence: Synthetic peptide
  Seed: RMCSLMQGSTLPRR
RMFSLIQPSTGPRR

SEQ ID NO: 121929 - protein, 14 aa, Artificial Sequence
  Description of Artificial Sequence: Synthetic peptide
  Seed: RMCSLMQGSTLPRR
RMFSLIQPSTHPRR

SEQ ID NO: 121930 - protein, 14 aa, Artificial Sequence
  Description of Artificial Sequence: Synthetic peptide
  Seed: RMCSLMQGSTLPRR
RMFSLIQPSTIPRR

SEQ ID NO: 121931 - protein, 14 aa, Artificial Sequence
  Description of Artificial Sequence: Synthetic peptide
  Seed: RMCSLMQGSTLPRR
RMFSLIQPSTLPRR

SEQ ID NO: 121932 - protein, 14 aa, Artificial Sequence
  Description of Artificial Sequence: Synthetic peptide
  Seed: RMCSLMQGSTLPRR
RMFSLIQPSTMPRR

SEQ ID NO: 121933 - protein, 14 aa, Artificial Sequence
  Description of Artificial Sequence: Synthetic peptide
  Seed: RMCSLMQGSTLPRR
RMFSLIQPSTNPRR

SEQ ID NO: 121934 - protein, 14 aa, Artificial Sequence
  Description of Artificial Sequence: Synthetic peptide
  Seed: RMCSLMQGSTLPRR
RMFSLIQPSTQPRR

SEQ ID NO: 121935 - protein, 14 aa, Artificial Sequence
  Description of Artificial Sequence: Synthetic peptide
  Seed: RMCSLMQGSTLPRR
RMFSLIQPSTSPRR

SEQ ID NO: 121936 - protein, 14 aa, Artificial Sequence
  Description of Artificial Sequence: Synthetic peptide
  Seed: RMCSLMQGSTLPRR
RMFSLIQPSTTPRR

SEQ ID NO: 121937 - protein, 14 aa, Artificial Sequence
  Description of Artificial Sequence: Synthetic peptide
  Seed: RMCSLMQGSTLPRR
RMFSLIQPSTVPRR

SEQ ID NO: 121938 - protein, 14 aa, Artificial Sequence
  Description of Artificial Sequence: Synthetic peptide
  Seed: RMCSLMQGSTLPRR
RMFSLIQSSTAPRR

SEQ ID NO: 121939 - protein, 14 aa, Artificial Sequence
  Description of Artificial Sequence: Synthetic peptide
  Seed: RMCSLMQGSTLPRR
RMFSLIQSSTGPRR

SEQ ID NO: 121940 - protein, 14 aa, Artificial Sequence
  Description of Artificial Sequence: Synthetic peptide
  Seed: RMCSLMQGSTLPRR
RMFSLIQSSTHPRR

SEQ ID NO: 121941 - protein, 14 aa, Artificial Sequence
  Description of Artificial Sequence: Synthetic peptide
  Seed: RMCSLMQGSTLPRR
RMFSLIQSSTIPRR

SEQ ID NO: 121942 - protein, 14 aa, Artificial Sequence
  Description of Artificial Sequence: Synthetic peptide
  Seed: RMCSLMQGSTLPRR
RMFSLIQSSTLPRR

SEQ ID NO: 121943 - protein, 14 aa, Artificial Sequence
  Description of Artificial Sequence: Synthetic peptide
  Seed: RMCSLMQGSTLPRR
RMFSLIQSSTMPRR

SEQ ID NO: 121944 - protein, 14 aa, Artificial Sequence
  Description of Artificial Sequence: Synthetic peptide
  Seed: RMCSLMQGSTLPRR
RMFSLIQSSTNPRR

SEQ ID NO: 121945 - protein, 14 aa, Artificial Sequence
  Description of Artificial Sequence: Synthetic peptide
  Seed: RMCSLMQGSTLPRR
RMFSLIQSSTSPRR

SEQ ID NO: 121946 - protein, 14 aa, Artificial Sequence
  Description of Artificial Sequence: Synthetic peptide
  Seed: RMCSLMQGSTLPRR
RMFSLIQSSTTPRR

SEQ ID NO: 121947 - protein, 14 aa, Artificial Sequence
  Description of Artificial Sequence: Synthetic peptide
  Seed: RMCSLMQGSTLPRR
RMFSLIQSSTVPRR

SEQ ID NO: 121948 - protein, 14 aa, Artificial Sequence
  Description of Artificial Sequence: Synthetic peptide
  Seed: RMCSLMQGSTLPRR
RMFSLIQTSTAPRR

SEQ ID NO: 121949 - protein, 14 aa, Artificial Sequence
  Description of Artificial Sequence: Synthetic peptide
  Seed: RMCSLMQGSTLPRR
RMFSLIQTSTGPRR

SEQ ID NO: 121950 - protein, 14 aa, Artificial Sequence
  Description of Artificial Sequence: Synthetic peptide
  Seed: RMCSLMQGSTLPRR
RMFSLIQTSTHPRR

SEQ ID NO: 121951 - protein, 14 aa, Artificial Sequence
  Description of Artificial Sequence: Synthetic peptide
  Seed: RMCSLMQGSTLPRR
RMFSLIQTSTIPRR

SEQ ID NO: 121952 - protein, 14 aa, Artificial Sequence
  Description of Artificial Sequence: Synthetic peptide
  Seed: RMCSLMQGSTLPRR
RMFSLIQTSTLPRR

SEQ ID NO: 121953 - protein, 14 aa, Artificial Sequence
  Description of Artificial Sequence: Synthetic peptide
  Seed: RMCSLMQGSTLPRR
RMFSLIQTSTMPRR

SEQ ID NO: 121954 - protein, 14 aa, Artificial Sequence
  Description of Artificial Sequence: Synthetic peptide
  Seed: RMCSLMQGSTLPRR
RMFSLIQTSTNPRR

SEQ ID NO: 121955 - protein, 14 aa, Artificial Sequence
  Description of Artificial Sequence: Synthetic peptide
  Seed: RMCSLMQGSTLPRR
RMFSLIQTSTSPRR

SEQ ID NO: 121956 - protein, 14 aa, Artificial Sequence
  Description of Artificial Sequence: Synthetic peptide
  Seed: RMCSLMQGSTLPRR
RMFSLIQTSTTPRR

SEQ ID NO: 121957 - protein, 14 aa, Artificial Sequence
  Description of Artificial Sequence: Synthetic peptide
  Seed: RMCSLMQGSTLPRR
RMFSLIQTSTVPRR

SEQ ID NO: 121958 - protein, 14 aa, Artificial Sequence
  Description of Artificial Sequence: Synthetic peptide
  Seed: RMCSLMQGSTLPRR
RMFSLIQVSTAPRR

SEQ ID NO: 121959 - protein, 14 aa, Artificial Sequence
  Description of Artificial Sequence: Synthetic peptide
  Seed: RMCSLMQGSTLPRR
RMFSLIQVSTGPRR

SEQ ID NO: 121960 - protein, 14 aa, Artificial Sequence
  Description of Artificial Sequence: Synthetic peptide
  Seed: RMCSLMQGSTLPRR
RMFSLIQVSTHPRR

SEQ ID NO: 121961 - protein, 14 aa, Artificial Sequence
  Description of Artificial Sequence: Synthetic peptide
  Seed: RMCSLMQGSTLPRR
RMFSLIQVSTIPRR

SEQ ID NO: 121962 - protein, 14 aa, Artificial Sequence
  Description of Artificial Sequence: Synthetic peptide
  Seed: RMCSLMQGSTLPRR
RMFSLIQVSTLPRR

SEQ ID NO: 121963 - protein, 14 aa, Artificial Sequence
  Description of Artificial Sequence: Synthetic peptide
  Seed: RMCSLMQGSTLPRR
RMFSLIQVSTMPRR

SEQ ID NO: 121964 - protein, 14 aa, Artificial Sequence
  Description of Artificial Sequence: Synthetic peptide
  Seed: RMCSLMQGSTLPRR
RMFSLIQVSTNPRR

SEQ ID NO: 121965 - protein, 14 aa, Artificial Sequence
  Description of Artificial Sequence: Synthetic peptide
  Seed: RMCSLMQGSTLPRR
RMFSLIQVSTSPRR

SEQ ID NO: 121966 - protein, 14 aa, Artificial Sequence
  Description of Artificial Sequence: Synthetic peptide
  Seed: RMCSLMQGSTLPRR
RMFSLIQVSTTPRR

SEQ ID NO: 121967 - protein, 14 aa, Artificial Sequence
  Description of Artificial Sequence: Synthetic peptide
  Seed: RMCSLMQGSTLPRR
RMFSLIQVSTVPRR

SEQ ID NO: 121968 - protein, 14 aa, Artificial Sequence
  Description of Artificial Sequence: Synthetic peptide
  Seed: RMCSLMQGSTLPRR
RMFSLLQASTAPRR

SEQ ID NO: 121969 - protein, 14 aa, Artificial Sequence
  Description of Artificial Sequence: Synthetic peptide
  Seed: RMCSLMQGSTLPRR
RMFSLLQASTCPRR

SEQ ID NO: 121970 - protein, 14 aa, Artificial Sequence
  Description of Artificial Sequence: Synthetic peptide
  Seed: RMCSLMQGSTLPRR
RMFSLLQASTDPRR

SEQ ID NO: 121971 - protein, 14 aa, Artificial Sequence
  Description of Artificial Sequence: Synthetic peptide
  Seed: RMCSLMQGSTLPRR
RMFSLLQASTEPRR

SEQ ID NO: 121972 - protein, 14 aa, Artificial Sequence
  Description of Artificial Sequence: Synthetic peptide
  Seed: RMCSLMQGSTLPRR
RMFSLLQASTFPRR

SEQ ID NO: 121973 - protein, 14 aa, Artificial Sequence
  Description of Artificial Sequence: Synthetic peptide
  Seed: RMCSLMQGSTLPRR
RMFSLLQASTGPRR

SEQ ID NO: 121974 - protein, 14 aa, Artificial Sequence
  Description of Artificial Sequence: Synthetic peptide
  Seed: RMCSLMQGSTLPRR
RMFSLLQASTHPRR

SEQ ID NO: 121975 - protein, 14 aa, Artificial Sequence
  Description of Artificial Sequence: Synthetic peptide
  Seed: RMCSLMQGSTLPRR
RMFSLLQASTIPRR

SEQ ID NO: 121976 - protein, 14 aa, Artificial Sequence
  Description of Artificial Sequence: Synthetic peptide
  Seed: RMCSLMQGSTLPRR
RMFSLLQASTLPRR

SEQ ID NO: 121977 - protein, 14 aa, Artificial Sequence
  Description of Artificial Sequence: Synthetic peptide
  Seed: RMCSLMQGSTLPRR
RMFSLLQASTMPRR

SEQ ID NO: 121978 - protein, 14 aa, Artificial Sequence
  Description of Artificial Sequence: Synthetic peptide
  Seed: RMCSLMQGSTLPRR
RMFSLLQASTNPRR

SEQ ID NO: 121979 - protein, 14 aa, Artificial Sequence
  Description of Artificial Sequence: Synthetic peptide
  Seed: RMCSLMQGSTLPRR
RMFSLLQASTPPRR

SEQ ID NO: 121980 - protein, 14 aa, Artificial Sequence
  Description of Artificial Sequence: Synthetic peptide
  Seed: RMCSLMQGSTLPRR
RMFSLLQASTQPRR

SEQ ID NO: 121981 - protein, 14 aa, Artificial Sequence
  Description of Artificial Sequence: Synthetic peptide
  Seed: RMCSLMQGSTLPRR
RMFSLLQASTSPRR

SEQ ID NO: 121982 - protein, 14 aa, Artificial Sequence
  Description of Artificial Sequence: Synthetic peptide
  Seed: RMCSLMQGSTLPRR
RMFSLLQASTTPRR

SEQ ID NO: 121983 - protein, 14 aa, Artificial Sequence
  Description of Artificial Sequence: Synthetic peptide
  Seed: RMCSLMQGSTLPRR
RMFSLLQASTVPRR

SEQ ID NO: 121984 - protein, 14 aa, Artificial Sequence
  Description of Artificial Sequence: Synthetic peptide
  Seed: RMCSLMQGSTLPRR
RMFSLLQGSTAPRR

SEQ ID NO: 121985 - protein, 14 aa, Artificial Sequence
  Description of Artificial Sequence: Synthetic peptide
  Seed: RMCSLMQGSTLPRR
RMFSLLQGSTCPRR

SEQ ID NO: 121986 - protein, 14 aa, Artificial Sequence
  Description of Artificial Sequence: Synthetic peptide
  Seed: RMCSLMQGSTLPRR
RMFSLLQGSTFPRR

SEQ ID NO: 121987 - protein, 14 aa, Artificial Sequence
  Description of Artificial Sequence: Synthetic peptide
  Seed: RMCSLMQGSTLPRR
RMFSLLQGSTGPRR

SEQ ID NO: 121988 - protein, 14 aa, Artificial Sequence
  Description of Artificial Sequence: Synthetic peptide
  Seed: RMCSLMQGSTLPRR
RMFSLLQGSTHPRR

SEQ ID NO: 121989 - protein, 14 aa, Artificial Sequence
  Description of Artificial Sequence: Synthetic peptide
  Seed: RMCSLMQGSTLPRR
RMFSLLQGSTIPRR

SEQ ID NO: 121990 - protein, 14 aa, Artificial Sequence
  Description of Artificial Sequence: Synthetic peptide
  Seed: RMCSLMQGSTLPRR
RMFSLLQGSTLPRR

SEQ ID NO: 121991 - protein, 14 aa, Artificial Sequence
  Description of Artificial Sequence: Synthetic peptide
  Seed: RMCSLMQGSTLPRR
RMFSLLQGSTMPRR

SEQ ID NO: 121992 - protein, 14 aa, Artificial Sequence
  Description of Artificial Sequence: Synthetic peptide
  Seed: RMCSLMQGSTLPRR
RMFSLLQGSTNPRR

SEQ ID NO: 121993 - protein, 14 aa, Artificial Sequence
  Description of Artificial Sequence: Synthetic peptide
  Seed: RMCSLMQGSTLPRR
RMFSLLQGSTPPRR

SEQ ID NO: 121994 - protein, 14 aa, Artificial Sequence
  Description of Artificial Sequence: Synthetic peptide
  Seed: RMCSLMQGSTLPRR
RMFSLLQGSTSPRR

SEQ ID NO: 121995 - protein, 14 aa, Artificial Sequence
  Description of Artificial Sequence: Synthetic peptide
  Seed: RMCSLMQGSTLPRR
RMFSLLQGSTTPRR

SEQ ID NO: 121996 - protein, 14 aa, Artificial Sequence
  Description of Artificial Sequence: Synthetic peptide
  Seed: RMCSLMQGSTLPRR
RMFSLLQGSTVPRR

SEQ ID NO: 121997 - protein, 14 aa, Artificial Sequence
  Description of Artificial Sequence: Synthetic peptide
  Seed: RMCSLMQGSTLPRR
RMFSLLQISTAPRR

SEQ ID NO: 121998 - protein, 14 aa, Artificial Sequence
  Description of Artificial Sequence: Synthetic peptide
  Seed: RMCSLMQGSTLPRR
RMFSLLQISTGPRR

SEQ ID NO: 121999 - protein, 14 aa, Artificial Sequence
  Description of Artificial Sequence: Synthetic peptide
  Seed: RMCSLMQGSTLPRR
RMFSLLQISTHPRR

SEQ ID NO: 122000 - protein, 14 aa, Artificial Sequence
  Description of Artificial Sequence: Synthetic peptide
  Seed: RMCSLMQGSTLPRR
RMFSLLQISTIPRR

SEQ ID NO: 122001 - protein, 14 aa, Artificial Sequence
  Description of Artificial Sequence: Synthetic peptide
  Seed: RMCSLMQGSTLPRR
RMFSLLQISTLPRR

SEQ ID NO: 122002 - protein, 14 aa, Artificial Sequence
  Description of Artificial Sequence: Synthetic peptide
  Seed: RMCSLMQGSTLPRR
RMFSLLQISTMPRR

SEQ ID NO: 122003 - protein, 14 aa, Artificial Sequence
  Description of Artificial Sequence: Synthetic peptide
  Seed: RMCSLMQGSTLPRR
RMFSLLQISTNPRR

SEQ ID NO: 122004 - protein, 14 aa, Artificial Sequence
  Description of Artificial Sequence: Synthetic peptide
  Seed: RMCSLMQGSTLPRR
RMFSLLQISTSPRR

SEQ ID NO: 122005 - protein, 14 aa, Artificial Sequence
  Description of Artificial Sequence: Synthetic peptide
  Seed: RMCSLMQGSTLPRR
RMFSLLQISTTPRR

SEQ ID NO: 122006 - protein, 14 aa, Artificial Sequence
  Description of Artificial Sequence: Synthetic peptide
  Seed: RMCSLMQGSTLPRR
RMFSLLQISTVPRR

SEQ ID NO: 122007 - protein, 14 aa, Artificial Sequence
  Description of Artificial Sequence: Synthetic peptide
  Seed: RMCSLMQGSTLPRR
RMFSLLQLSTAPRR

SEQ ID NO: 122008 - protein, 14 aa, Artificial Sequence
  Description of Artificial Sequence: Synthetic peptide
  Seed: RMCSLMQGSTLPRR
RMFSLLQLSTNPRR

SEQ ID NO: 122009 - protein, 14 aa, Artificial Sequence
  Description of Artificial Sequence: Synthetic peptide
  Seed: RMCSLMQGSTLPRR
RMFSLLQLSTSPRR

SEQ ID NO: 122010 - protein, 14 aa, Artificial Sequence
  Description of Artificial Sequence: Synthetic peptide
  Seed: RMCSLMQGSTLPRR
RMFSLLQLSTTPRR

SEQ ID NO: 122011 - protein, 14 aa, Artificial Sequence
  Description of Artificial Sequence: Synthetic peptide
  Seed: RMCSLMQGSTLPRR
RMFSLLQMSTAPRR

SEQ ID NO: 122012 - protein, 14 aa, Artificial Sequence
  Description of Artificial Sequence: Synthetic peptide
  Seed: RMCSLMQGSTLPRR
RMFSLLQMSTNPRR

SEQ ID NO: 122013 - protein, 14 aa, Artificial Sequence
  Description of Artificial Sequence: Synthetic peptide
  Seed: RMCSLMQGSTLPRR
RMFSLLQMSTSPRR

SEQ ID NO: 122014 - protein, 14 aa, Artificial Sequence
  Description of Artificial Sequence: Synthetic peptide
  Seed: RMCSLMQGSTLPRR
RMFSLLQNSTAPRR

SEQ ID NO: 122015 - protein, 14 aa, Artificial Sequence
  Description of Artificial Sequence: Synthetic peptide
  Seed: RMCSLMQGSTLPRR
RMFSLLQNSTGPRR

SEQ ID NO: 122016 - protein, 14 aa, Artificial Sequence
  Description of Artificial Sequence: Synthetic peptide
  Seed: RMCSLMQGSTLPRR
RMFSLLQNSTIPRR

SEQ ID NO: 122017 - protein, 14 aa, Artificial Sequence
  Description of Artificial Sequence: Synthetic peptide
  Seed: RMCSLMQGSTLPRR
RMFSLLQNSTLPRR

SEQ ID NO: 122018 - protein, 14 aa, Artificial Sequence
  Description of Artificial Sequence: Synthetic peptide
  Seed: RMCSLMQGSTLPRR
RMFSLLQNSTMPRR

SEQ ID NO: 122019 - protein, 14 aa, Artificial Sequence
  Description of Artificial Sequence: Synthetic peptide
  Seed: RMCSLMQGSTLPRR
RMFSLLQNSTNPRR

SEQ ID NO: 122020 - protein, 14 aa, Artificial Sequence
  Description of Artificial Sequence: Synthetic peptide
  Seed: RMCSLMQGSTLPRR
RMFSLLQNSTSPRR

SEQ ID NO: 122021 - protein, 14 aa, Artificial Sequence
  Description of Artificial Sequence: Synthetic peptide
  Seed: RMCSLMQGSTLPRR
RMFSLLQNSTTPRR

SEQ ID NO: 122022 - protein, 14 aa, Artificial Sequence
  Description of Artificial Sequence: Synthetic peptide
  Seed: RMCSLMQGSTLPRR
RMFSLLQNSTVPRR

SEQ ID NO: 122023 - protein, 14 aa, Artificial Sequence
  Description of Artificial Sequence: Synthetic peptide
  Seed: RMCSLMQGSTLPRR
RMFSLLQPSTAPRR

SEQ ID NO: 122024 - protein, 14 aa, Artificial Sequence
  Description of Artificial Sequence: Synthetic peptide
  Seed: RMCSLMQGSTLPRR
RMFSLLQPSTCPRR

SEQ ID NO: 122025 - protein, 14 aa, Artificial Sequence
  Description of Artificial Sequence: Synthetic peptide
  Seed: RMCSLMQGSTLPRR
RMFSLLQPSTFPRR

SEQ ID NO: 122026 - protein, 14 aa, Artificial Sequence
  Description of Artificial Sequence: Synthetic peptide
  Seed: RMCSLMQGSTLPRR
RMFSLLQPSTGPRR

SEQ ID NO: 122027 - protein, 14 aa, Artificial Sequence
  Description of Artificial Sequence: Synthetic peptide
  Seed: RMCSLMQGSTLPRR
RMFSLLQPSTHPRR

SEQ ID NO: 122028 - protein, 14 aa, Artificial Sequence
  Description of Artificial Sequence: Synthetic peptide
  Seed: RMCSLMQGSTLPRR
RMFSLLQPSTIPRR

SEQ ID NO: 122029 - protein, 14 aa, Artificial Sequence
  Description of Artificial Sequence: Synthetic peptide
  Seed: RMCSLMQGSTLPRR
RMFSLLQPSTLPRR

SEQ ID NO: 122030 - protein, 14 aa, Artificial Sequence
  Description of Artificial Sequence: Synthetic peptide
  Seed: RMCSLMQGSTLPRR
RMFSLLQPSTMPRR

SEQ ID NO: 122031 - protein, 14 aa, Artificial Sequence
  Description of Artificial Sequence: Synthetic peptide
  Seed: RMCSLMQGSTLPRR
RMFSLLQPSTNPRR

SEQ ID NO: 122032 - protein, 14 aa, Artificial Sequence
  Description of Artificial Sequence: Synthetic peptide
  Seed: RMCSLMQGSTLPRR
RMFSLLQPSTPPRR

SEQ ID NO: 122033 - protein, 14 aa, Artificial Sequence
  Description of Artificial Sequence: Synthetic peptide
  Seed: RMCSLMQGSTLPRR
RMFSLLQPSTQPRR

SEQ ID NO: 122034 - protein, 14 aa, Artificial Sequence
  Description of Artificial Sequence: Synthetic peptide
  Seed: RMCSLMQGSTLPRR
RMFSLLQPSTSPRR

SEQ ID NO: 122035 - protein, 14 aa, Artificial Sequence
  Description of Artificial Sequence: Synthetic peptide
  Seed: RMCSLMQGSTLPRR
RMFSLLQPSTTPRR

SEQ ID NO: 122036 - protein, 14 aa, Artificial Sequence
  Description of Artificial Sequence: Synthetic peptide
  Seed: RMCSLMQGSTLPRR
RMFSLLQPSTVPRR

SEQ ID NO: 122037 - protein, 14 aa, Artificial Sequence
  Description of Artificial Sequence: Synthetic peptide
  Seed: RMCSLMQGSTLPRR
RMFSLLQSSTAPRR

SEQ ID NO: 122038 - protein, 14 aa, Artificial Sequence
  Description of Artificial Sequence: Synthetic peptide
  Seed: RMCSLMQGSTLPRR
RMFSLLQSSTCPRR

SEQ ID NO: 122039 - protein, 14 aa, Artificial Sequence
  Description of Artificial Sequence: Synthetic peptide
  Seed: RMCSLMQGSTLPRR
RMFSLLQSSTFPRR

SEQ ID NO: 122040 - protein, 14 aa, Artificial Sequence
  Description of Artificial Sequence: Synthetic peptide
  Seed: RMCSLMQGSTLPRR
RMFSLLQSSTGPRR

SEQ ID NO: 122041 - protein, 14 aa, Artificial Sequence
  Description of Artificial Sequence: Synthetic peptide
  Seed: RMCSLMQGSTLPRR
RMFSLLQSSTHPRR

SEQ ID NO: 122042 - protein, 14 aa, Artificial Sequence
  Description of Artificial Sequence: Synthetic peptide
  Seed: RMCSLMQGSTLPRR
RMFSLLQSSTIPRR

SEQ ID NO: 122043 - protein, 14 aa, Artificial Sequence
  Description of Artificial Sequence: Synthetic peptide
  Seed: RMCSLMQGSTLPRR
RMFSLLQSSTLPRR

SEQ ID NO: 122044 - protein, 14 aa, Artificial Sequence
  Description of Artificial Sequence: Synthetic peptide
  Seed: RMCSLMQGSTLPRR
RMFSLLQSSTMPRR

SEQ ID NO: 122045 - protein, 14 aa, Artificial Sequence
  Description of Artificial Sequence: Synthetic peptide
  Seed: RMCSLMQGSTLPRR
RMFSLLQSSTNPRR

SEQ ID NO: 122046 - protein, 14 aa, Artificial Sequence
  Description of Artificial Sequence: Synthetic peptide
  Seed: RMCSLMQGSTLPRR
RMFSLLQSSTQPRR

SEQ ID NO: 122047 - protein, 14 aa, Artificial Sequence
  Description of Artificial Sequence: Synthetic peptide
  Seed: RMCSLMQGSTLPRR
RMFSLLQSSTSPRR

SEQ ID NO: 122048 - protein, 14 aa, Artificial Sequence
  Description of Artificial Sequence: Synthetic peptide
  Seed: RMCSLMQGSTLPRR
RMFSLLQSSTTPRR

SEQ ID NO: 122049 - protein, 14 aa, Artificial Sequence
  Description of Artificial Sequence: Synthetic peptide
  Seed: RMCSLMQGSTLPRR
RMFSLLQSSTVPRR

SEQ ID NO: 122050 - protein, 14 aa, Artificial Sequence
  Description of Artificial Sequence: Synthetic peptide
  Seed: RMCSLMQGSTLPRR
RMFSLLQTSTAPRR

SEQ ID NO: 122051 - protein, 14 aa, Artificial Sequence
  Description of Artificial Sequence: Synthetic peptide
  Seed: RMCSLMQGSTLPRR
RMFSLLQTSTGPRR

SEQ ID NO: 122052 - protein, 14 aa, Artificial Sequence
  Description of Artificial Sequence: Synthetic peptide
  Seed: RMCSLMQGSTLPRR
RMFSLLQTSTHPRR

SEQ ID NO: 122053 - protein, 14 aa, Artificial Sequence
  Description of Artificial Sequence: Synthetic peptide
  Seed: RMCSLMQGSTLPRR
RMFSLLQTSTIPRR

SEQ ID NO: 122054 - protein, 14 aa, Artificial Sequence
  Description of Artificial Sequence: Synthetic peptide
  Seed: RMCSLMQGSTLPRR
RMFSLLQTSTLPRR

SEQ ID NO: 122055 - protein, 14 aa, Artificial Sequence
  Description of Artificial Sequence: Synthetic peptide
  Seed: RMCSLMQGSTLPRR
RMFSLLQTSTMPRR

SEQ ID NO: 122056 - protein, 14 aa, Artificial Sequence
  Description of Artificial Sequence: Synthetic peptide
  Seed: RMCSLMQGSTLPRR
RMFSLLQTSTNPRR

SEQ ID NO: 122057 - protein, 14 aa, Artificial Sequence
  Description of Artificial Sequence: Synthetic peptide
  Seed: RMCSLMQGSTLPRR
RMFSLLQTSTQPRR

SEQ ID NO: 122058 - protein, 14 aa, Artificial Sequence
  Description of Artificial Sequence: Synthetic peptide
  Seed: RMCSLMQGSTLPRR
RMFSLLQTSTSPRR

SEQ ID NO: 122059 - protein, 14 aa, Artificial Sequence
  Description of Artificial Sequence: Synthetic peptide
  Seed: RMCSLMQGSTLPRR
RMFSLLQTSTTPRR

SEQ ID NO: 122060 - protein, 14 aa, Artificial Sequence
  Description of Artificial Sequence: Synthetic peptide
  Seed: RMCSLMQGSTLPRR
RMFSLLQTSTVPRR

SEQ ID NO: 122061 - protein, 14 aa, Artificial Sequence
  Description of Artificial Sequence: Synthetic peptide
  Seed: RMCSLMQGSTLPRR
RMFSLLQVSTAPRR

SEQ ID NO: 122062 - protein, 14 aa, Artificial Sequence
  Description of Artificial Sequence: Synthetic peptide
  Seed: RMCSLMQGSTLPRR
RMFSLLQVSTGPRR

SEQ ID NO: 122063 - protein, 14 aa, Artificial Sequence
  Description of Artificial Sequence: Synthetic peptide
  Seed: RMCSLMQGSTLPRR
RMFSLLQVSTHPRR

SEQ ID NO: 122064 - protein, 14 aa, Artificial Sequence
  Description of Artificial Sequence: Synthetic peptide
  Seed: RMCSLMQGSTLPRR
RMFSLLQVSTIPRR

SEQ ID NO: 122065 - protein, 14 aa, Artificial Sequence
  Description of Artificial Sequence: Synthetic peptide
  Seed: RMCSLMQGSTLPRR
RMFSLLQVSTLPRR

SEQ ID NO: 122066 - protein, 14 aa, Artificial Sequence
  Description of Artificial Sequence: Synthetic peptide
  Seed: RMCSLMQGSTLPRR
RMFSLLQVSTMPRR

SEQ ID NO: 122067 - protein, 14 aa, Artificial Sequence
  Description of Artificial Sequence: Synthetic peptide
  Seed: RMCSLMQGSTLPRR
RMFSLLQVSTNPRR

SEQ ID NO: 122068 - protein, 14 aa, Artificial Sequence
  Description of Artificial Sequence: Synthetic peptide
  Seed: RMCSLMQGSTLPRR
RMFSLLQVSTPPRR

SEQ ID NO: 122069 - protein, 14 aa, Artificial Sequence
  Description of Artificial Sequence: Synthetic peptide
  Seed: RMCSLMQGSTLPRR
RMFSLLQVSTQPRR

SEQ ID NO: 122070 - protein, 14 aa, Artificial Sequence
  Description of Artificial Sequence: Synthetic peptide
  Seed: RMCSLMQGSTLPRR
RMFSLLQVSTSPRR

SEQ ID NO: 122071 - protein, 14 aa, Artificial Sequence
  Description of Artificial Sequence: Synthetic peptide
  Seed: RMCSLMQGSTLPRR
RMFSLLQVSTTPRR

SEQ ID NO: 122072 - protein, 14 aa, Artificial Sequence
  Description of Artificial Sequence: Synthetic peptide
  Seed: RMCSLMQGSTLPRR
RMFSLLQVSTVPRR

SEQ ID NO: 122073 - protein, 14 aa, Artificial Sequence
  Description of Artificial Sequence: Synthetic peptide
  Seed: RMCSLMQGSTLPRR
RMFSLMQASTAPRR

SEQ ID NO: 122074 - protein, 14 aa, Artificial Sequence
  Description of Artificial Sequence: Synthetic peptide
  Seed: RMCSLMQGSTLPRR
RMFSLMQASTCPRR

SEQ ID NO: 122075 - protein, 14 aa, Artificial Sequence
  Description of Artificial Sequence: Synthetic peptide
  Seed: RMCSLMQGSTLPRR
RMFSLMQASTDPRR

SEQ ID NO: 122076 - protein, 14 aa, Artificial Sequence
  Description of Artificial Sequence: Synthetic peptide
  Seed: RMCSLMQGSTLPRR
RMFSLMQASTEPRR

SEQ ID NO: 122077 - protein, 14 aa, Artificial Sequence
  Description of Artificial Sequence: Synthetic peptide
  Seed: RMCSLMQGSTLPRR
RMFSLMQASTFPRR

SEQ ID NO: 122078 - protein, 14 aa, Artificial Sequence
  Description of Artificial Sequence: Synthetic peptide
  Seed: RMCSLMQGSTLPRR
RMFSLMQASTGPRR

SEQ ID NO: 122079 - protein, 14 aa, Artificial Sequence
  Description of Artificial Sequence: Synthetic peptide
  Seed: RMCSLMQGSTLPRR
RMFSLMQASTHPRR

SEQ ID NO: 122080 - protein, 14 aa, Artificial Sequence
  Description of Artificial Sequence: Synthetic peptide
  Seed: RMCSLMQGSTLPRR
RMFSLMQASTIPRR

SEQ ID NO: 122081 - protein, 14 aa, Artificial Sequence
  Description of Artificial Sequence: Synthetic peptide
  Seed: RMCSLMQGSTLPRR
RMFSLMQASTLPRR

SEQ ID NO: 122082 - protein, 14 aa, Artificial Sequence
  Description of Artificial Sequence: Synthetic peptide
  Seed: RMCSLMQGSTLPRR
RMFSLMQASTMPRR

SEQ ID NO: 122083 - protein, 14 aa, Artificial Sequence
  Description of Artificial Sequence: Synthetic peptide
  Seed: RMCSLMQGSTLPRR
RMFSLMQASTNPRR

SEQ ID NO: 122084 - protein, 14 aa, Artificial Sequence
  Description of Artificial Sequence: Synthetic peptide
  Seed: RMCSLMQGSTLPRR
RMFSLMQASTPPRR

SEQ ID NO: 122085 - protein, 14 aa, Artificial Sequence
  Description of Artificial Sequence: Synthetic peptide
  Seed: RMCSLMQGSTLPRR
RMFSLMQASTQPRR

SEQ ID NO: 122086 - protein, 14 aa, Artificial Sequence
  Description of Artificial Sequence: Synthetic peptide
  Seed: RMCSLMQGSTLPRR
RMFSLMQASTSPRR

SEQ ID NO: 122087 - protein, 14 aa, Artificial Sequence
  Description of Artificial Sequence: Synthetic peptide
  Seed: RMCSLMQGSTLPRR
RMFSLMQASTTPRR

SEQ ID NO: 122088 - protein, 14 aa, Artificial Sequence
  Description of Artificial Sequence: Synthetic peptide
  Seed: RMCSLMQGSTLPRR
RMFSLMQASTVPRR

SEQ ID NO: 122089 - protein, 14 aa, Artificial Sequence
  Description of Artificial Sequence: Synthetic peptide
  Seed: RMCSLMQGSTLPRR
RMFSLMQASTYPRR

SEQ ID NO: 122090 - protein, 14 aa, Artificial Sequence
  Description of Artificial Sequence: Synthetic peptide
  Seed: RMCSLMQGSTLPRR
RMFSLMQGSTAPRR

SEQ ID NO: 122091 - protein, 14 aa, Artificial Sequence
  Description of Artificial Sequence: Synthetic peptide
  Seed: RMCSLMQGSTLPRR
RMFSLMQGSTCPRR

SEQ ID NO: 122092 - protein, 14 aa, Artificial Sequence
  Description of Artificial Sequence: Synthetic peptide
  Seed: RMCSLMQGSTLPRR
RMFSLMQGSTFPRR

SEQ ID NO: 122093 - protein, 14 aa, Artificial Sequence
  Description of Artificial Sequence: Synthetic peptide
  Seed: RMCSLMQGSTLPRR
RMFSLMQGSTGPRR

SEQ ID NO: 122094 - protein, 14 aa, Artificial Sequence
  Description of Artificial Sequence: Synthetic peptide
  Seed: RMCSLMQGSTLPRR
RMFSLMQGSTIPRR

SEQ ID NO: 122095 - protein, 14 aa, Artificial Sequence
  Description of Artificial Sequence: Synthetic peptide
  Seed: RMCSLMQGSTLPRR
RMFSLMQGSTLPRR

SEQ ID NO: 122096 - protein, 14 aa, Artificial Sequence
  Description of Artificial Sequence: Synthetic peptide
  Seed: RMCSLMQGSTLPRR
RMFSLMQGSTMPRR

SEQ ID NO: 122097 - protein, 14 aa, Artificial Sequence
  Description of Artificial Sequence: Synthetic peptide
  Seed: RMCSLMQGSTLPRR
RMFSLMQGSTNPRR

SEQ ID NO: 122098 - protein, 14 aa, Artificial Sequence
  Description of Artificial Sequence: Synthetic peptide
  Seed: RMCSLMQGSTLPRR
RMFSLMQGSTSPRR

SEQ ID NO: 122099 - protein, 14 aa, Artificial Sequence
  Description of Artificial Sequence: Synthetic peptide
  Seed: RMCSLMQGSTLPRR
RMFSLMQGSTTPRR

SEQ ID NO: 122100 - protein, 14 aa, Artificial Sequence
  Description of Artificial Sequence: Synthetic peptide
  Seed: RMCSLMQGSTLPRR
RMFSLMQGSTVPRR

SEQ ID NO: 122101 - protein, 14 aa, Artificial Sequence
  Description of Artificial Sequence: Synthetic peptide
  Seed: RMCSLMQGSTLPRR
RMFSLMQHSTLPRR

SEQ ID NO: 122102 - protein, 14 aa, Artificial Sequence
  Description of Artificial Sequence: Synthetic peptide
  Seed: RMCSLMQGSTLPRR
RMFSLMQHSTVPRR

SEQ ID NO: 122103 - protein, 14 aa, Artificial Sequence
  Description of Artificial Sequence: Synthetic peptide
  Seed: RMCSLMQGSTLPRR
RMFSLMQISTAPRR

SEQ ID NO: 122104 - protein, 14 aa, Artificial Sequence
  Description of Artificial Sequence: Synthetic peptide
  Seed: RMCSLMQGSTLPRR
RMFSLMQISTGPRR

SEQ ID NO: 122105 - protein, 14 aa, Artificial Sequence
  Description of Artificial Sequence: Synthetic peptide
  Seed: RMCSLMQGSTLPRR
RMFSLMQISTHPRR

SEQ ID NO: 122106 - protein, 14 aa, Artificial Sequence
  Description of Artificial Sequence: Synthetic peptide
  Seed: RMCSLMQGSTLPRR
RMFSLMQISTIPRR

SEQ ID NO: 122107 - protein, 14 aa, Artificial Sequence
  Description of Artificial Sequence: Synthetic peptide
  Seed: RMCSLMQGSTLPRR
RMFSLMQISTLPRR

SEQ ID NO: 122108 - protein, 14 aa, Artificial Sequence
  Description of Artificial Sequence: Synthetic peptide
  Seed: RMCSLMQGSTLPRR
RMFSLMQISTMPRR

SEQ ID NO: 122109 - protein, 14 aa, Artificial Sequence
  Description of Artificial Sequence: Synthetic peptide
  Seed: RMCSLMQGSTLPRR
RMFSLMQISTNPRR

SEQ ID NO: 122110 - protein, 14 aa, Artificial Sequence
  Description of Artificial Sequence: Synthetic peptide
  Seed: RMCSLMQGSTLPRR
RMFSLMQISTQPRR

SEQ ID NO: 122111 - protein, 14 aa, Artificial Sequence
  Description of Artificial Sequence: Synthetic peptide
  Seed: RMCSLMQGSTLPRR
RMFSLMQISTSPRR

SEQ ID NO: 122112 - protein, 14 aa, Artificial Sequence
  Description of Artificial Sequence: Synthetic peptide
  Seed: RMCSLMQGSTLPRR
RMFSLMQISTTPRR

SEQ ID NO: 122113 - protein, 14 aa, Artificial Sequence
  Description of Artificial Sequence: Synthetic peptide
  Seed: RMCSLMQGSTLPRR
RMFSLMQISTVPRR

SEQ ID NO: 122114 - protein, 14 aa, Artificial Sequence
  Description of Artificial Sequence: Synthetic peptide
  Seed: RMCSLMQGSTLPRR
RMFSLMQLSTAPRR

SEQ ID NO: 122115 - protein, 14 aa, Artificial Sequence
  Description of Artificial Sequence: Synthetic peptide
  Seed: RMCSLMQGSTLPRR
RMFSLMQLSTMPRR

SEQ ID NO: 122116 - protein, 14 aa, Artificial Sequence
  Description of Artificial Sequence: Synthetic peptide
  Seed: RMCSLMQGSTLPRR
RMFSLMQLSTNPRR

SEQ ID NO: 122117 - protein, 14 aa, Artificial Sequence
  Description of Artificial Sequence: Synthetic peptide
  Seed: RMCSLMQGSTLPRR
RMFSLMQLSTSPRR

SEQ ID NO: 122118 - protein, 14 aa, Artificial Sequence
  Description of Artificial Sequence: Synthetic peptide
  Seed: RMCSLMQGSTLPRR
RMFSLMQLSTTPRR

SEQ ID NO: 122119 - protein, 14 aa, Artificial Sequence
  Description of Artificial Sequence: Synthetic peptide
  Seed: RMCSLMQGSTLPRR
RMFSLMQLSTVPRR

SEQ ID NO: 122120 - protein, 14 aa, Artificial Sequence
  Description of Artificial Sequence: Synthetic peptide
  Seed: RMCSLMQGSTLPRR
RMFSLMQMSTAPRR

SEQ ID NO: 122121 - protein, 14 aa, Artificial Sequence
  Description of Artificial Sequence: Synthetic peptide
  Seed: RMCSLMQGSTLPRR
RMFSLMQMSTNPRR

SEQ ID NO: 122122 - protein, 14 aa, Artificial Sequence
  Description of Artificial Sequence: Synthetic peptide
  Seed: RMCSLMQGSTLPRR
RMFSLMQMSTSPRR

SEQ ID NO: 122123 - protein, 14 aa, Artificial Sequence
  Description of Artificial Sequence: Synthetic peptide
  Seed: RMCSLMQGSTLPRR
RMFSLMQMSTTPRR

SEQ ID NO: 122124 - protein, 14 aa, Artificial Sequence
  Description of Artificial Sequence: Synthetic peptide
  Seed: RMCSLMQGSTLPRR
RMFSLMQMSTVPRR

SEQ ID NO: 122125 - protein, 14 aa, Artificial Sequence
  Description of Artificial Sequence: Synthetic peptide
  Seed: RMCSLMQGSTLPRR
RMFSLMQNSTAPRR

SEQ ID NO: 122126 - protein, 14 aa, Artificial Sequence
  Description of Artificial Sequence: Synthetic peptide
  Seed: RMCSLMQGSTLPRR
RMFSLMQNSTGPRR

SEQ ID NO: 122127 - protein, 14 aa, Artificial Sequence
  Description of Artificial Sequence: Synthetic peptide
  Seed: RMCSLMQGSTLPRR
RMFSLMQNSTIPRR

SEQ ID NO: 122128 - protein, 14 aa, Artificial Sequence
  Description of Artificial Sequence: Synthetic peptide
  Seed: RMCSLMQGSTLPRR
RMFSLMQNSTLPRR

SEQ ID NO: 122129 - protein, 14 aa, Artificial Sequence
  Description of Artificial Sequence: Synthetic peptide
  Seed: RMCSLMQGSTLPRR
RMFSLMQNSTMPRR

SEQ ID NO: 122130 - protein, 14 aa, Artificial Sequence
  Description of Artificial Sequence: Synthetic peptide
  Seed: RMCSLMQGSTLPRR
RMFSLMQNSTNPRR

SEQ ID NO: 122131 - protein, 14 aa, Artificial Sequence
  Description of Artificial Sequence: Synthetic peptide
  Seed: RMCSLMQGSTLPRR
RMFSLMQNSTSPRR

SEQ ID NO: 122132 - protein, 14 aa, Artificial Sequence
  Description of Artificial Sequence: Synthetic peptide
  Seed: RMCSLMQGSTLPRR
RMFSLMQNSTTPRR

SEQ ID NO: 122133 - protein, 14 aa, Artificial Sequence
  Description of Artificial Sequence: Synthetic peptide
  Seed: RMCSLMQGSTLPRR
RMFSLMQNSTVPRR

SEQ ID NO: 122134 - protein, 14 aa, Artificial Sequence
  Description of Artificial Sequence: Synthetic peptide
  Seed: RMCSLMQGSTLPRR
RMFSLMQPSTAPRR

SEQ ID NO: 122135 - protein, 14 aa, Artificial Sequence
  Description of Artificial Sequence: Synthetic peptide
  Seed: RMCSLMQGSTLPRR
RMFSLMQPSTFPRR

SEQ ID NO: 122136 - protein, 14 aa, Artificial Sequence
  Description of Artificial Sequence: Synthetic peptide
  Seed: RMCSLMQGSTLPRR
RMFSLMQPSTGPRR

SEQ ID NO: 122137 - protein, 14 aa, Artificial Sequence
  Description of Artificial Sequence: Synthetic peptide
  Seed: RMCSLMQGSTLPRR
RMFSLMQPSTHPRR

SEQ ID NO: 122138 - protein, 14 aa, Artificial Sequence
  Description of Artificial Sequence: Synthetic peptide
  Seed: RMCSLMQGSTLPRR
RMFSLMQPSTIPRR

SEQ ID NO: 122139 - protein, 14 aa, Artificial Sequence
  Description of Artificial Sequence: Synthetic peptide
  Seed: RMCSLMQGSTLPRR
RMFSLMQPSTLPRR

SEQ ID NO: 122140 - protein, 14 aa, Artificial Sequence
  Description of Artificial Sequence: Synthetic peptide
  Seed: RMCSLMQGSTLPRR
RMFSLMQPSTMPRR

SEQ ID NO: 122141 - protein, 14 aa, Artificial Sequence
  Description of Artificial Sequence: Synthetic peptide
  Seed: RMCSLMQGSTLPRR
RMFSLMQPSTNPRR

SEQ ID NO: 122142 - protein, 14 aa, Artificial Sequence
  Description of Artificial Sequence: Synthetic peptide
  Seed: RMCSLMQGSTLPRR
RMFSLMQPSTPPRR

SEQ ID NO: 122143 - protein, 14 aa, Artificial Sequence
  Description of Artificial Sequence: Synthetic peptide
  Seed: RMCSLMQGSTLPRR
RMFSLMQPSTQPRR

SEQ ID NO: 122144 - protein, 14 aa, Artificial Sequence
  Description of Artificial Sequence: Synthetic peptide
  Seed: RMCSLMQGSTLPRR
RMFSLMQPSTSPRR

SEQ ID NO: 122145 - protein, 14 aa, Artificial Sequence
  Description of Artificial Sequence: Synthetic peptide
  Seed: RMCSLMQGSTLPRR
RMFSLMQPSTTPRR

SEQ ID NO: 122146 - protein, 14 aa, Artificial Sequence
  Description of Artificial Sequence: Synthetic peptide
  Seed: RMCSLMQGSTLPRR
RMFSLMQPSTVPRR

SEQ ID NO: 122147 - protein, 14 aa, Artificial Sequence
  Description of Artificial Sequence: Synthetic peptide
  Seed: RMCSLMQGSTLPRR
RMFSLMQSSTAPRR

SEQ ID NO: 122148 - protein, 14 aa, Artificial Sequence
  Description of Artificial Sequence: Synthetic peptide
  Seed: RMCSLMQGSTLPRR
RMFSLMQSSTCPRR

SEQ ID NO: 122149 - protein, 14 aa, Artificial Sequence
  Description of Artificial Sequence: Synthetic peptide
  Seed: RMCSLMQGSTLPRR
RMFSLMQSSTFPRR

SEQ ID NO: 122150 - protein, 14 aa, Artificial Sequence
  Description of Artificial Sequence: Synthetic peptide
  Seed: RMCSLMQGSTLPRR
RMFSLMQSSTGPRR

SEQ ID NO: 122151 - protein, 14 aa, Artificial Sequence
  Description of Artificial Sequence: Synthetic peptide
  Seed: RMCSLMQGSTLPRR
RMFSLMQSSTHPRR

SEQ ID NO: 122152 - protein, 14 aa, Artificial Sequence
  Description of Artificial Sequence: Synthetic peptide
  Seed: RMCSLMQGSTLPRR
RMFSLMQSSTIPRR

SEQ ID NO: 122153 - protein, 14 aa, Artificial Sequence
  Description of Artificial Sequence: Synthetic peptide
  Seed: RMCSLMQGSTLPRR
RMFSLMQSSTLPRR

SEQ ID NO: 122154 - protein, 14 aa, Artificial Sequence
  Description of Artificial Sequence: Synthetic peptide
  Seed: RMCSLMQGSTLPRR
RMFSLMQSSTMPRR

SEQ ID NO: 122155 - protein, 14 aa, Artificial Sequence
  Description of Artificial Sequence: Synthetic peptide
  Seed: RMCSLMQGSTLPRR
RMFSLMQSSTNPRR

SEQ ID NO: 122156 - protein, 14 aa, Artificial Sequence
  Description of Artificial Sequence: Synthetic peptide
  Seed: RMCSLMQGSTLPRR
RMFSLMQSSTPPRR

SEQ ID NO: 122157 - protein, 14 aa, Artificial Sequence
  Description of Artificial Sequence: Synthetic peptide
  Seed: RMCSLMQGSTLPRR
RMFSLMQSSTQPRR

SEQ ID NO: 122158 - protein, 14 aa, Artificial Sequence
  Description of Artificial Sequence: Synthetic peptide
  Seed: RMCSLMQGSTLPRR
RMFSLMQSSTSPRR

SEQ ID NO: 122159 - protein, 14 aa, Artificial Sequence
  Description of Artificial Sequence: Synthetic peptide
  Seed: RMCSLMQGSTLPRR
RMFSLMQSSTTPRR

SEQ ID NO: 122160 - protein, 14 aa, Artificial Sequence
  Description of Artificial Sequence: Synthetic peptide
  Seed: RMCSLMQGSTLPRR
RMFSLMQSSTVPRR

SEQ ID NO: 122161 - protein, 14 aa, Artificial Sequence
  Description of Artificial Sequence: Synthetic peptide
  Seed: RMCSLMQGSTLPRR
RMFSLMQTSTAPRR

SEQ ID NO: 122162 - protein, 14 aa, Artificial Sequence
  Description of Artificial Sequence: Synthetic peptide
  Seed: RMCSLMQGSTLPRR
RMFSLMQTSTGPRR

SEQ ID NO: 122163 - protein, 14 aa, Artificial Sequence
  Description of Artificial Sequence: Synthetic peptide
  Seed: RMCSLMQGSTLPRR
RMFSLMQTSTHPRR

SEQ ID NO: 122164 - protein, 14 aa, Artificial Sequence
  Description of Artificial Sequence: Synthetic peptide
  Seed: RMCSLMQGSTLPRR
RMFSLMQTSTIPRR

SEQ ID NO: 122165 - protein, 14 aa, Artificial Sequence
  Description of Artificial Sequence: Synthetic peptide
  Seed: RMCSLMQGSTLPRR
RMFSLMQTSTLPRR

SEQ ID NO: 122166 - protein, 14 aa, Artificial Sequence
  Description of Artificial Sequence: Synthetic peptide
  Seed: RMCSLMQGSTLPRR
RMFSLMQTSTMPRR

SEQ ID NO: 122167 - protein, 14 aa, Artificial Sequence
  Description of Artificial Sequence: Synthetic peptide
  Seed: RMCSLMQGSTLPRR
RMFSLMQTSTNPRR

SEQ ID NO: 122168 - protein, 14 aa, Artificial Sequence
  Description of Artificial Sequence: Synthetic peptide
  Seed: RMCSLMQGSTLPRR
RMFSLMQTSTQPRR

SEQ ID NO: 122169 - protein, 14 aa, Artificial Sequence
  Description of Artificial Sequence: Synthetic peptide
  Seed: RMCSLMQGSTLPRR
RMFSLMQTSTSPRR

SEQ ID NO: 122170 - protein, 14 aa, Artificial Sequence
  Description of Artificial Sequence: Synthetic peptide
  Seed: RMCSLMQGSTLPRR
RMFSLMQTSTTPRR

SEQ ID NO: 122171 - protein, 14 aa, Artificial Sequence
  Description of Artificial Sequence: Synthetic peptide
  Seed: RMCSLMQGSTLPRR
RMFSLMQTSTVPRR

SEQ ID NO: 122172 - protein, 14 aa, Artificial Sequence
  Description of Artificial Sequence: Synthetic peptide
  Seed: RMCSLMQGSTLPRR
RMFSLMQVSTAPRR

SEQ ID NO: 122173 - protein, 14 aa, Artificial Sequence
  Description of Artificial Sequence: Synthetic peptide
  Seed: RMCSLMQGSTLPRR
RMFSLMQVSTGPRR

SEQ ID NO: 122174 - protein, 14 aa, Artificial Sequence
  Description of Artificial Sequence: Synthetic peptide
  Seed: RMCSLMQGSTLPRR
RMFSLMQVSTHPRR

SEQ ID NO: 122175 - protein, 14 aa, Artificial Sequence
  Description of Artificial Sequence: Synthetic peptide
  Seed: RMCSLMQGSTLPRR
RMFSLMQVSTIPRR

SEQ ID NO: 122176 - protein, 14 aa, Artificial Sequence
  Description of Artificial Sequence: Synthetic peptide
  Seed: RMCSLMQGSTLPRR
RMFSLMQVSTLPRR

SEQ ID NO: 122177 - protein, 14 aa, Artificial Sequence
  Description of Artificial Sequence: Synthetic peptide
  Seed: RMCSLMQGSTLPRR
RMFSLMQVSTMPRR

SEQ ID NO: 122178 - protein, 14 aa, Artificial Sequence
  Description of Artificial Sequence: Synthetic peptide
  Seed: RMCSLMQGSTLPRR
RMFSLMQVSTNPRR

SEQ ID NO: 122179 - protein, 14 aa, Artificial Sequence
  Description of Artificial Sequence: Synthetic peptide
  Seed: RMCSLMQGSTLPRR
RMFSLMQVSTPPRR

SEQ ID NO: 122180 - protein, 14 aa, Artificial Sequence
  Description of Artificial Sequence: Synthetic peptide
  Seed: RMCSLMQGSTLPRR
RMFSLMQVSTQPRR

SEQ ID NO: 122181 - protein, 14 aa, Artificial Sequence
  Description of Artificial Sequence: Synthetic peptide
  Seed: RMCSLMQGSTLPRR
RMFSLMQVSTSPRR

SEQ ID NO: 122182 - protein, 14 aa, Artificial Sequence
  Description of Artificial Sequence: Synthetic peptide
  Seed: RMCSLMQGSTLPRR
RMFSLMQVSTTPRR

SEQ ID NO: 122183 - protein, 14 aa, Artificial Sequence
  Description of Artificial Sequence: Synthetic peptide
  Seed: RMCSLMQGSTLPRR
RMFSLMQVSTVPRR

SEQ ID NO: 122184 - protein, 14 aa, Artificial Sequence
  Description of Artificial Sequence: Synthetic peptide
  Seed: RMCSLMQGSTLPRR
RMFSLNQASTIPRR

SEQ ID NO: 122185 - protein, 14 aa, Artificial Sequence
  Description of Artificial Sequence: Synthetic peptide
  Seed: RMCSLMQGSTLPRR
RMFSLNQASTLPRR

SEQ ID NO: 122186 - protein, 14 aa, Artificial Sequence
  Description of Artificial Sequence: Synthetic peptide
  Seed: RMCSLMQGSTLPRR
RMFSLNQASTVPRR

SEQ ID NO: 122187 - protein, 14 aa, Artificial Sequence
  Description of Artificial Sequence: Synthetic peptide
  Seed: RMCSLMQGSTLPRR
RMFSLQQASTAPRR

SEQ ID NO: 122188 - protein, 14 aa, Artificial Sequence
  Description of Artificial Sequence: Synthetic peptide
  Seed: RMCSLMQGSTLPRR
RMFSLQQASTIPRR

SEQ ID NO: 122189 - protein, 14 aa, Artificial Sequence
  Description of Artificial Sequence: Synthetic peptide
  Seed: RMCSLMQGSTLPRR
RMFSLQQASTLPRR

SEQ ID NO: 122190 - protein, 14 aa, Artificial Sequence
  Description of Artificial Sequence: Synthetic peptide
  Seed: RMCSLMQGSTLPRR
RMFSLQQASTMPRR

SEQ ID NO: 122191 - protein, 14 aa, Artificial Sequence
  Description of Artificial Sequence: Synthetic peptide
  Seed: RMCSLMQGSTLPRR
RMFSLQQASTNPRR

SEQ ID NO: 122192 - protein, 14 aa, Artificial Sequence
  Description of Artificial Sequence: Synthetic peptide
  Seed: RMCSLMQGSTLPRR
RMFSLQQASTSPRR

SEQ ID NO: 122193 - protein, 14 aa, Artificial Sequence
  Description of Artificial Sequence: Synthetic peptide
  Seed: RMCSLMQGSTLPRR
RMFSLQQASTTPRR

SEQ ID NO: 122194 - protein, 14 aa, Artificial Sequence
  Description of Artificial Sequence: Synthetic peptide
  Seed: RMCSLMQGSTLPRR
RMFSLQQASTVPRR

SEQ ID NO: 122195 - protein, 14 aa, Artificial Sequence
  Description of Artificial Sequence: Synthetic peptide
  Seed: RMCSLMQGSTLPRR
RMFSLQQGSTAPRR

SEQ ID NO: 122196 - protein, 14 aa, Artificial Sequence
  Description of Artificial Sequence: Synthetic peptide
  Seed: RMCSLMQGSTLPRR
RMFSLQQGSTIPRR

SEQ ID NO: 122197 - protein, 14 aa, Artificial Sequence
  Description of Artificial Sequence: Synthetic peptide
  Seed: RMCSLMQGSTLPRR
RMFSLQQGSTLPRR

SEQ ID NO: 122198 - protein, 14 aa, Artificial Sequence
  Description of Artificial Sequence: Synthetic peptide
  Seed: RMCSLMQGSTLPRR
RMFSLQQGSTMPRR

SEQ ID NO: 122199 - protein, 14 aa, Artificial Sequence
  Description of Artificial Sequence: Synthetic peptide
  Seed: RMCSLMQGSTLPRR
RMFSLQQGSTTPRR

SEQ ID NO: 122200 - protein, 14 aa, Artificial Sequence
  Description of Artificial Sequence: Synthetic peptide
  Seed: RMCSLMQGSTLPRR
RMFSLQQGSTVPRR

SEQ ID NO: 122201 - protein, 14 aa, Artificial Sequence
  Description of Artificial Sequence: Synthetic peptide
  Seed: RMCSLMQGSTLPRR
RMFSLQQISTAPRR

SEQ ID NO: 122202 - protein, 14 aa, Artificial Sequence
  Description of Artificial Sequence: Synthetic peptide
  Seed: RMCSLMQGSTLPRR
RMFSLQQNSTIPRR

SEQ ID NO: 122203 - protein, 14 aa, Artificial Sequence
  Description of Artificial Sequence: Synthetic peptide
  Seed: RMCSLMQGSTLPRR
RMFSLQQNSTLPRR

SEQ ID NO: 122204 - protein, 14 aa, Artificial Sequence
  Description of Artificial Sequence: Synthetic peptide
  Seed: RMCSLMQGSTLPRR
RMFSLQQNSTVPRR

SEQ ID NO: 122205 - protein, 14 aa, Artificial Sequence
  Description of Artificial Sequence: Synthetic peptide
  Seed: RMCSLMQGSTLPRR
RMFSLQQPSTAPRR

SEQ ID NO: 122206 - protein, 14 aa, Artificial Sequence
  Description of Artificial Sequence: Synthetic peptide
  Seed: RMCSLMQGSTLPRR
RMFSLQQPSTIPRR

SEQ ID NO: 122207 - protein, 14 aa, Artificial Sequence
  Description of Artificial Sequence: Synthetic peptide
  Seed: RMCSLMQGSTLPRR
RMFSLQQPSTLPRR

SEQ ID NO: 122208 - protein, 14 aa, Artificial Sequence
  Description of Artificial Sequence: Synthetic peptide
  Seed: RMCSLMQGSTLPRR
RMFSLQQPSTVPRR

SEQ ID NO: 122209 - protein, 14 aa, Artificial Sequence
  Description of Artificial Sequence: Synthetic peptide
  Seed: RMCSLMQGSTLPRR
RMFSLQQSSTAPRR

SEQ ID NO: 122210 - protein, 14 aa, Artificial Sequence
  Description of Artificial Sequence: Synthetic peptide
  Seed: RMCSLMQGSTLPRR
RMFSLQQSSTIPRR

SEQ ID NO: 122211 - protein, 14 aa, Artificial Sequence
  Description of Artificial Sequence: Synthetic peptide
  Seed: RMCSLMQGSTLPRR
RMFSLQQSSTLPRR

SEQ ID NO: 122212 - protein, 14 aa, Artificial Sequence
  Description of Artificial Sequence: Synthetic peptide
  Seed: RMCSLMQGSTLPRR
RMFSLQQSSTMPRR

SEQ ID NO: 122213 - protein, 14 aa, Artificial Sequence
  Description of Artificial Sequence: Synthetic peptide
  Seed: RMCSLMQGSTLPRR
RMFSLQQSSTSPRR

SEQ ID NO: 122214 - protein, 14 aa, Artificial Sequence
  Description of Artificial Sequence: Synthetic peptide
  Seed: RMCSLMQGSTLPRR
RMFSLQQSSTTPRR

SEQ ID NO: 122215 - protein, 14 aa, Artificial Sequence
  Description of Artificial Sequence: Synthetic peptide
  Seed: RMCSLMQGSTLPRR
RMFSLQQSSTVPRR

SEQ ID NO: 122216 - protein, 14 aa, Artificial Sequence
  Description of Artificial Sequence: Synthetic peptide
  Seed: RMCSLMQGSTLPRR
RMFSLQQTSTAPRR

SEQ ID NO: 122217 - protein, 14 aa, Artificial Sequence
  Description of Artificial Sequence: Synthetic peptide
  Seed: RMCSLMQGSTLPRR
RMFSLQQTSTLPRR

SEQ ID NO: 122218 - protein, 14 aa, Artificial Sequence
  Description of Artificial Sequence: Synthetic peptide
  Seed: RMCSLMQGSTLPRR
RMFSLQQTSTVPRR

SEQ ID NO: 122219 - protein, 14 aa, Artificial Sequence
  Description of Artificial Sequence: Synthetic peptide
  Seed: RMCSLMQGSTLPRR
RMFSLQQVSTAPRR

SEQ ID NO: 122220 - protein, 14 aa, Artificial Sequence
  Description of Artificial Sequence: Synthetic peptide
  Seed: RMCSLMQGSTLPRR
RMFSLQQVSTNPRR

SEQ ID NO: 122221 - protein, 14 aa, Artificial Sequence
  Description of Artificial Sequence: Synthetic peptide
  Seed: RMCSLMQGSTLPRR
RMFSLQQVSTSPRR

SEQ ID NO: 122222 - protein, 14 aa, Artificial Sequence
  Description of Artificial Sequence: Synthetic peptide
  Seed: RMCSLMQGSTLPRR
RMFSLSQASTAPRR

SEQ ID NO: 122223 - protein, 14 aa, Artificial Sequence
  Description of Artificial Sequence: Synthetic peptide
  Seed: RMCSLMQGSTLPRR
RMFSLSQASTIPRR

SEQ ID NO: 122224 - protein, 14 aa, Artificial Sequence
  Description of Artificial Sequence: Synthetic peptide
  Seed: RMCSLMQGSTLPRR
RMFSLSQASTLPRR

SEQ ID NO: 122225 - protein, 14 aa, Artificial Sequence
  Description of Artificial Sequence: Synthetic peptide
  Seed: RMCSLMQGSTLPRR
RMFSLSQASTMPRR

SEQ ID NO: 122226 - protein, 14 aa, Artificial Sequence
  Description of Artificial Sequence: Synthetic peptide
  Seed: RMCSLMQGSTLPRR
RMFSLSQASTVPRR

SEQ ID NO: 122227 - protein, 14 aa, Artificial Sequence
  Description of Artificial Sequence: Synthetic peptide
  Seed: RMCSLMQGSTLPRR
RMFSLSQGSTIPRR

SEQ ID NO: 122228 - protein, 14 aa, Artificial Sequence
  Description of Artificial Sequence: Synthetic peptide
  Seed: RMCSLMQGSTLPRR
RMFSLSQGSTLPRR

SEQ ID NO: 122229 - protein, 14 aa, Artificial Sequence
  Description of Artificial Sequence: Synthetic peptide
  Seed: RMCSLMQGSTLPRR
RMFSLSQGSTVPRR

SEQ ID NO: 122230 - protein, 14 aa, Artificial Sequence
  Description of Artificial Sequence: Synthetic peptide
  Seed: RMCSLMQGSTLPRR
RMFSLSQPSTLPRR

SEQ ID NO: 122231 - protein, 14 aa, Artificial Sequence
  Description of Artificial Sequence: Synthetic peptide
  Seed: RMCSLMQGSTLPRR
RMFSLSQSSTIPRR

SEQ ID NO: 122232 - protein, 14 aa, Artificial Sequence
  Description of Artificial Sequence: Synthetic peptide
  Seed: RMCSLMQGSTLPRR
RMFSLSQSSTLPRR

SEQ ID NO: 122233 - protein, 14 aa, Artificial Sequence
  Description of Artificial Sequence: Synthetic peptide
  Seed: RMCSLMQGSTLPRR
RMFSLSQSSTVPRR

SEQ ID NO: 122234 - protein, 14 aa, Artificial Sequence
  Description of Artificial Sequence: Synthetic peptide
  Seed: RMCSLMQGSTLPRR
RMFSLTQASTAPRR

SEQ ID NO: 122235 - protein, 14 aa, Artificial Sequence
  Description of Artificial Sequence: Synthetic peptide
  Seed: RMCSLMQGSTLPRR
RMFSLTQASTIPRR

SEQ ID NO: 122236 - protein, 14 aa, Artificial Sequence
  Description of Artificial Sequence: Synthetic peptide
  Seed: RMCSLMQGSTLPRR
RMFSLTQASTLPRR

SEQ ID NO: 122237 - protein, 14 aa, Artificial Sequence
  Description of Artificial Sequence: Synthetic peptide
  Seed: RMCSLMQGSTLPRR
RMFSLTQASTVPRR

SEQ ID NO: 122238 - protein, 14 aa, Artificial Sequence
  Description of Artificial Sequence: Synthetic peptide
  Seed: RMCSLMQGSTLPRR
RMFSLVQASTAPRR

SEQ ID NO: 122239 - protein, 14 aa, Artificial Sequence
  Description of Artificial Sequence: Synthetic peptide
  Seed: RMCSLMQGSTLPRR
RMFSLVQASTGPRR

SEQ ID NO: 122240 - protein, 14 aa, Artificial Sequence
  Description of Artificial Sequence: Synthetic peptide
  Seed: RMCSLMQGSTLPRR
RMFSLVQASTIPRR

SEQ ID NO: 122241 - protein, 14 aa, Artificial Sequence
  Description of Artificial Sequence: Synthetic peptide
  Seed: RMCSLMQGSTLPRR
RMFSLVQASTLPRR

SEQ ID NO: 122242 - protein, 14 aa, Artificial Sequence
  Description of Artificial Sequence: Synthetic peptide
  Seed: RMCSLMQGSTLPRR
RMFSLVQASTMPRR

SEQ ID NO: 122243 - protein, 14 aa, Artificial Sequence
  Description of Artificial Sequence: Synthetic peptide
  Seed: RMCSLMQGSTLPRR
RMFSLVQASTNPRR

SEQ ID NO: 122244 - protein, 14 aa, Artificial Sequence
  Description of Artificial Sequence: Synthetic peptide
  Seed: RMCSLMQGSTLPRR
RMFSLVQASTSPRR

SEQ ID NO: 122245 - protein, 14 aa, Artificial Sequence
  Description of Artificial Sequence: Synthetic peptide
  Seed: RMCSLMQGSTLPRR
RMFSLVQASTTPRR

SEQ ID NO: 122246 - protein, 14 aa, Artificial Sequence
  Description of Artificial Sequence: Synthetic peptide
  Seed: RMCSLMQGSTLPRR
RMFSLVQASTVPRR

SEQ ID NO: 122247 - protein, 14 aa, Artificial Sequence
  Description of Artificial Sequence: Synthetic peptide
  Seed: RMCSLMQGSTLPRR
RMFSLVQGSTAPRR

SEQ ID NO: 122248 - protein, 14 aa, Artificial Sequence
  Description of Artificial Sequence: Synthetic peptide
  Seed: RMCSLMQGSTLPRR
RMFSLVQGSTIPRR

SEQ ID NO: 122249 - protein, 14 aa, Artificial Sequence
  Description of Artificial Sequence: Synthetic peptide
  Seed: RMCSLMQGSTLPRR
RMFSLVQGSTLPRR

SEQ ID NO: 122250 - protein, 14 aa, Artificial Sequence
  Description of Artificial Sequence: Synthetic peptide
  Seed: RMCSLMQGSTLPRR
RMFSLVQGSTMPRR

SEQ ID NO: 122251 - protein, 14 aa, Artificial Sequence
  Description of Artificial Sequence: Synthetic peptide
  Seed: RMCSLMQGSTLPRR
RMFSLVQGSTSPRR

SEQ ID NO: 122252 - protein, 14 aa, Artificial Sequence
  Description of Artificial Sequence: Synthetic peptide
  Seed: RMCSLMQGSTLPRR
RMFSLVQGSTTPRR

SEQ ID NO: 122253 - protein, 14 aa, Artificial Sequence
  Description of Artificial Sequence: Synthetic peptide
  Seed: RMCSLMQGSTLPRR
RMFSLVQGSTVPRR

SEQ ID NO: 122254 - protein, 14 aa, Artificial Sequence
  Description of Artificial Sequence: Synthetic peptide
  Seed: RMCSLMQGSTLPRR
RMFSLVQISTAPRR

SEQ ID NO: 122255 - protein, 14 aa, Artificial Sequence
  Description of Artificial Sequence: Synthetic peptide
  Seed: RMCSLMQGSTLPRR
RMFSLVQISTNPRR

SEQ ID NO: 122256 - protein, 14 aa, Artificial Sequence
  Description of Artificial Sequence: Synthetic peptide
  Seed: RMCSLMQGSTLPRR
RMFSLVQISTSPRR

SEQ ID NO: 122257 - protein, 14 aa, Artificial Sequence
  Description of Artificial Sequence: Synthetic peptide
  Seed: RMCSLMQGSTLPRR
RMFSLVQNSTAPRR

SEQ ID NO: 122258 - protein, 14 aa, Artificial Sequence
  Description of Artificial Sequence: Synthetic peptide
  Seed: RMCSLMQGSTLPRR
RMFSLVQNSTIPRR

SEQ ID NO: 122259 - protein, 14 aa, Artificial Sequence
  Description of Artificial Sequence: Synthetic peptide
  Seed: RMCSLMQGSTLPRR
RMFSLVQNSTLPRR

SEQ ID NO: 122260 - protein, 14 aa, Artificial Sequence
  Description of Artificial Sequence: Synthetic peptide
  Seed: RMCSLMQGSTLPRR
RMFSLVQNSTVPRR

SEQ ID NO: 122261 - protein, 14 aa, Artificial Sequence
  Description of Artificial Sequence: Synthetic peptide
  Seed: RMCSLMQGSTLPRR
RMFSLVQPSTAPRR

SEQ ID NO: 122262 - protein, 14 aa, Artificial Sequence
  Description of Artificial Sequence: Synthetic peptide
  Seed: RMCSLMQGSTLPRR
RMFSLVQPSTIPRR

SEQ ID NO: 122263 - protein, 14 aa, Artificial Sequence
  Description of Artificial Sequence: Synthetic peptide
  Seed: RMCSLMQGSTLPRR
RMFSLVQPSTLPRR

SEQ ID NO: 122264 - protein, 14 aa, Artificial Sequence
  Description of Artificial Sequence: Synthetic peptide
  Seed: RMCSLMQGSTLPRR
RMFSLVQPSTMPRR

SEQ ID NO: 122265 - protein, 14 aa, Artificial Sequence
  Description of Artificial Sequence: Synthetic peptide
  Seed: RMCSLMQGSTLPRR
RMFSLVQPSTNPRR

SEQ ID NO: 122266 - protein, 14 aa, Artificial Sequence
  Description of Artificial Sequence: Synthetic peptide
  Seed: RMCSLMQGSTLPRR
RMFSLVQPSTSPRR

SEQ ID NO: 122267 - protein, 14 aa, Artificial Sequence
  Description of Artificial Sequence: Synthetic peptide
  Seed: RMCSLMQGSTLPRR
RMFSLVQPSTTPRR

SEQ ID NO: 122268 - protein, 14 aa, Artificial Sequence
  Description of Artificial Sequence: Synthetic peptide
  Seed: RMCSLMQGSTLPRR
RMFSLVQPSTVPRR

SEQ ID NO: 122269 - protein, 14 aa, Artificial Sequence
  Description of Artificial Sequence: Synthetic peptide
  Seed: RMCSLMQGSTLPRR
RMFSLVQSSTAPRR

SEQ ID NO: 122270 - protein, 14 aa, Artificial Sequence
  Description of Artificial Sequence: Synthetic peptide
  Seed: RMCSLMQGSTLPRR
RMFSLVQSSTIPRR

SEQ ID NO: 122271 - protein, 14 aa, Artificial Sequence
  Description of Artificial Sequence: Synthetic peptide
  Seed: RMCSLMQGSTLPRR
RMFSLVQSSTLPRR

SEQ ID NO: 122272 - protein, 14 aa, Artificial Sequence
  Description of Artificial Sequence: Synthetic peptide
  Seed: RMCSLMQGSTLPRR
RMFSLVQSSTMPRR

SEQ ID NO: 122273 - protein, 14 aa, Artificial Sequence
  Description of Artificial Sequence: Synthetic peptide
  Seed: RMCSLMQGSTLPRR
RMFSLVQSSTNPRR

SEQ ID NO: 122274 - protein, 14 aa, Artificial Sequence
  Description of Artificial Sequence: Synthetic peptide
  Seed: RMCSLMQGSTLPRR
RMFSLVQSSTSPRR

SEQ ID NO: 122275 - protein, 14 aa, Artificial Sequence
  Description of Artificial Sequence: Synthetic peptide
  Seed: RMCSLMQGSTLPRR
RMFSLVQSSTTPRR

SEQ ID NO: 122276 - protein, 14 aa, Artificial Sequence
  Description of Artificial Sequence: Synthetic peptide
  Seed: RMCSLMQGSTLPRR
RMFSLVQSSTVPRR

SEQ ID NO: 122277 - protein, 14 aa, Artificial Sequence
  Description of Artificial Sequence: Synthetic peptide
  Seed: RMCSLMQGSTLPRR
RMFSLVQTSTAPRR

SEQ ID NO: 122278 - protein, 14 aa, Artificial Sequence
  Description of Artificial Sequence: Synthetic peptide
  Seed: RMCSLMQGSTLPRR
RMFSLVQTSTIPRR

SEQ ID NO: 122279 - protein, 14 aa, Artificial Sequence
  Description of Artificial Sequence: Synthetic peptide
  Seed: RMCSLMQGSTLPRR
RMFSLVQTSTLPRR

SEQ ID NO: 122280 - protein, 14 aa, Artificial Sequence
  Description of Artificial Sequence: Synthetic peptide
  Seed: RMCSLMQGSTLPRR
RMFSLVQTSTNPRR

SEQ ID NO: 122281 - protein, 14 aa, Artificial Sequence
  Description of Artificial Sequence: Synthetic peptide
  Seed: RMCSLMQGSTLPRR
RMFSLVQTSTSPRR

SEQ ID NO: 122282 - protein, 14 aa, Artificial Sequence
  Description of Artificial Sequence: Synthetic peptide
  Seed: RMCSLMQGSTLPRR
RMFSLVQTSTTPRR

SEQ ID NO: 122283 - protein, 14 aa, Artificial Sequence
  Description of Artificial Sequence: Synthetic peptide
  Seed: RMCSLMQGSTLPRR
RMFSLVQTSTVPRR

SEQ ID NO: 122284 - protein, 14 aa, Artificial Sequence
  Description of Artificial Sequence: Synthetic peptide
  Seed: RMCSLMQGSTLPRR
RMFSLVQVSTAPRR

SEQ ID NO: 122285 - protein, 14 aa, Artificial Sequence
  Description of Artificial Sequence: Synthetic peptide
  Seed: RMCSLMQGSTLPRR
RMFSLVQVSTNPRR

SEQ ID NO: 122286 - protein, 14 aa, Artificial Sequence
  Description of Artificial Sequence: Synthetic peptide
  Seed: RMCSLMQGSTLPRR
RMFSLVQVSTSPRR

SEQ ID NO: 122287 - protein, 14 aa, Artificial Sequence
  Description of Artificial Sequence: Synthetic peptide
  Seed: RMCSLMQGSTLPRR
RMFSLVQVSTTPRR

SEQ ID NO: 122288 - protein, 14 aa, Artificial Sequence
  Description of Artificial Sequence: Synthetic peptide
  Seed: RMCSLMQGSTLPRR
RMFSLVQVSTVPRR

SEQ ID NO: 122289 - protein, 14 aa, Artificial Sequence
  Description of Artificial Sequence: Synthetic peptide
  Seed: RMCSLMQGSTLPRR
RMISLAQASTIPRR

SEQ ID NO: 122290 - protein, 14 aa, Artificial Sequence
  Description of Artificial Sequence: Synthetic peptide
  Seed: RMCSLMQGSTLPRR
RMISLAQASTLPRR

SEQ ID NO: 122291 - protein, 14 aa, Artificial Sequence
  Description of Artificial Sequence: Synthetic peptide
  Seed: RMCSLMQGSTLPRR
RMISLAQASTVPRR

SEQ ID NO: 122292 - protein, 14 aa, Artificial Sequence
  Description of Artificial Sequence: Synthetic peptide
  Seed: RMCSLMQGSTLPRR
RMISLAQGSTLPRR

SEQ ID NO: 122293 - protein, 14 aa, Artificial Sequence
  Description of Artificial Sequence: Synthetic peptide
  Seed: RMCSLMQGSTLPRR
RMISLIQASTAPRR

SEQ ID NO: 122294 - protein, 14 aa, Artificial Sequence
  Description of Artificial Sequence: Synthetic peptide
  Seed: RMCSLMQGSTLPRR
RMISLIQASTIPRR

SEQ ID NO: 122295 - protein, 14 aa, Artificial Sequence
  Description of Artificial Sequence: Synthetic peptide
  Seed: RMCSLMQGSTLPRR
RMISLIQASTLPRR

SEQ ID NO: 122296 - protein, 14 aa, Artificial Sequence
  Description of Artificial Sequence: Synthetic peptide
  Seed: RMCSLMQGSTLPRR
RMISLIQASTVPRR

SEQ ID NO: 122297 - protein, 14 aa, Artificial Sequence
  Description of Artificial Sequence: Synthetic peptide
  Seed: RMCSLMQGSTLPRR
RMISLIQGSTAPRR

SEQ ID NO: 122298 - protein, 14 aa, Artificial Sequence
  Description of Artificial Sequence: Synthetic peptide
  Seed: RMCSLMQGSTLPRR
RMISLIQGSTIPRR

SEQ ID NO: 122299 - protein, 14 aa, Artificial Sequence
  Description of Artificial Sequence: Synthetic peptide
  Seed: RMCSLMQGSTLPRR
RMISLIQGSTLPRR

SEQ ID NO: 122300 - protein, 14 aa, Artificial Sequence
  Description of Artificial Sequence: Synthetic peptide
  Seed: RMCSLMQGSTLPRR
RMISLIQGSTVPRR

SEQ ID NO: 122301 - protein, 14 aa, Artificial Sequence
  Description of Artificial Sequence: Synthetic peptide
  Seed: RMCSLMQGSTLPRR
RMISLIQSSTIPRR

SEQ ID NO: 122302 - protein, 14 aa, Artificial Sequence
  Description of Artificial Sequence: Synthetic peptide
  Seed: RMCSLMQGSTLPRR
RMISLIQSSTLPRR

SEQ ID NO: 122303 - protein, 14 aa, Artificial Sequence
  Description of Artificial Sequence: Synthetic peptide
  Seed: RMCSLMQGSTLPRR
RMISLIQSSTVPRR

SEQ ID NO: 122304 - protein, 14 aa, Artificial Sequence
  Description of Artificial Sequence: Synthetic peptide
  Seed: RMCSLMQGSTLPRR
RMISLLQASTAPRR

SEQ ID NO: 122305 - protein, 14 aa, Artificial Sequence
  Description of Artificial Sequence: Synthetic peptide
  Seed: RMCSLMQGSTLPRR
RMISLLQASTIPRR

SEQ ID NO: 122306 - protein, 14 aa, Artificial Sequence
  Description of Artificial Sequence: Synthetic peptide
  Seed: RMCSLMQGSTLPRR
RMISLLQASTLPRR

SEQ ID NO: 122307 - protein, 14 aa, Artificial Sequence
  Description of Artificial Sequence: Synthetic peptide
  Seed: RMCSLMQGSTLPRR
RMISLLQASTMPRR

SEQ ID NO: 122308 - protein, 14 aa, Artificial Sequence
  Description of Artificial Sequence: Synthetic peptide
  Seed: RMCSLMQGSTLPRR
RMISLLQASTSPRR

SEQ ID NO: 122309 - protein, 14 aa, Artificial Sequence
  Description of Artificial Sequence: Synthetic peptide
  Seed: RMCSLMQGSTLPRR
RMISLLQASTTPRR

SEQ ID NO: 122310 - protein, 14 aa, Artificial Sequence
  Description of Artificial Sequence: Synthetic peptide
  Seed: RMCSLMQGSTLPRR
RMISLLQASTVPRR

SEQ ID NO: 122311 - protein, 14 aa, Artificial Sequence
  Description of Artificial Sequence: Synthetic peptide
  Seed: RMCSLMQGSTLPRR
RMISLLQGSTAPRR

SEQ ID NO: 122312 - protein, 14 aa, Artificial Sequence
  Description of Artificial Sequence: Synthetic peptide
  Seed: RMCSLMQGSTLPRR
RMISLLQGSTIPRR

SEQ ID NO: 122313 - protein, 14 aa, Artificial Sequence
  Description of Artificial Sequence: Synthetic peptide
  Seed: RMCSLMQGSTLPRR
RMISLLQGSTLPRR

SEQ ID NO: 122314 - protein, 14 aa, Artificial Sequence
  Description of Artificial Sequence: Synthetic peptide
  Seed: RMCSLMQGSTLPRR
RMISLLQGSTMPRR

SEQ ID NO: 122315 - protein, 14 aa, Artificial Sequence
  Description of Artificial Sequence: Synthetic peptide
  Seed: RMCSLMQGSTLPRR
RMISLLQGSTSPRR

SEQ ID NO: 122316 - protein, 14 aa, Artificial Sequence
  Description of Artificial Sequence: Synthetic peptide
  Seed: RMCSLMQGSTLPRR
RMISLLQGSTTPRR

SEQ ID NO: 122317 - protein, 14 aa, Artificial Sequence
  Description of Artificial Sequence: Synthetic peptide
  Seed: RMCSLMQGSTLPRR
RMISLLQGSTVPRR

SEQ ID NO: 122318 - protein, 14 aa, Artificial Sequence
  Description of Artificial Sequence: Synthetic peptide
  Seed: RMCSLMQGSTLPRR
RMISLLQNSTIPRR

SEQ ID NO: 122319 - protein, 14 aa, Artificial Sequence
  Description of Artificial Sequence: Synthetic peptide
  Seed: RMCSLMQGSTLPRR
RMISLLQNSTLPRR

SEQ ID NO: 122320 - protein, 14 aa, Artificial Sequence
  Description of Artificial Sequence: Synthetic peptide
  Seed: RMCSLMQGSTLPRR
RMISLLQNSTVPRR

SEQ ID NO: 122321 - protein, 14 aa, Artificial Sequence
  Description of Artificial Sequence: Synthetic peptide
  Seed: RMCSLMQGSTLPRR
RMISLLQPSTAPRR

SEQ ID NO: 122322 - protein, 14 aa, Artificial Sequence
  Description of Artificial Sequence: Synthetic peptide
  Seed: RMCSLMQGSTLPRR
RMISLLQPSTIPRR

SEQ ID NO: 122323 - protein, 14 aa, Artificial Sequence
  Description of Artificial Sequence: Synthetic peptide
  Seed: RMCSLMQGSTLPRR
RMISLLQPSTLPRR

SEQ ID NO: 122324 - protein, 14 aa, Artificial Sequence
  Description of Artificial Sequence: Synthetic peptide
  Seed: RMCSLMQGSTLPRR
RMISLLQPSTMPRR

SEQ ID NO: 122325 - protein, 14 aa, Artificial Sequence
  Description of Artificial Sequence: Synthetic peptide
  Seed: RMCSLMQGSTLPRR
RMISLLQPSTVPRR

SEQ ID NO: 122326 - protein, 14 aa, Artificial Sequence
  Description of Artificial Sequence: Synthetic peptide
  Seed: RMCSLMQGSTLPRR
RMISLLQSSTAPRR

SEQ ID NO: 122327 - protein, 14 aa, Artificial Sequence
  Description of Artificial Sequence: Synthetic peptide
  Seed: RMCSLMQGSTLPRR
RMISLLQSSTIPRR

SEQ ID NO: 122328 - protein, 14 aa, Artificial Sequence
  Description of Artificial Sequence: Synthetic peptide
  Seed: RMCSLMQGSTLPRR
RMISLLQSSTLPRR

SEQ ID NO: 122329 - protein, 14 aa, Artificial Sequence
  Description of Artificial Sequence: Synthetic peptide
  Seed: RMCSLMQGSTLPRR
RMISLLQSSTMPRR

SEQ ID NO: 122330 - protein, 14 aa, Artificial Sequence
  Description of Artificial Sequence: Synthetic peptide
  Seed: RMCSLMQGSTLPRR
RMISLLQSSTSPRR

SEQ ID NO: 122331 - protein, 14 aa, Artificial Sequence
  Description of Artificial Sequence: Synthetic peptide
  Seed: RMCSLMQGSTLPRR
RMISLLQSSTTPRR

SEQ ID NO: 122332 - protein, 14 aa, Artificial Sequence
  Description of Artificial Sequence: Synthetic peptide
  Seed: RMCSLMQGSTLPRR
RMISLLQSSTVPRR

SEQ ID NO: 122333 - protein, 14 aa, Artificial Sequence
  Description of Artificial Sequence: Synthetic peptide
  Seed: RMCSLMQGSTLPRR
RMISLLQTSTIPRR

SEQ ID NO: 122334 - protein, 14 aa, Artificial Sequence
  Description of Artificial Sequence: Synthetic peptide
  Seed: RMCSLMQGSTLPRR
RMISLLQTSTLPRR

SEQ ID NO: 122335 - protein, 14 aa, Artificial Sequence
  Description of Artificial Sequence: Synthetic peptide
  Seed: RMCSLMQGSTLPRR
RMISLLQTSTVPRR

SEQ ID NO: 122336 - protein, 14 aa, Artificial Sequence
  Description of Artificial Sequence: Synthetic peptide
  Seed: RMCSLMQGSTLPRR
RMISLMQASTAPRR

SEQ ID NO: 122337 - protein, 14 aa, Artificial Sequence
  Description of Artificial Sequence: Synthetic peptide
  Seed: RMCSLMQGSTLPRR
RMISLMQASTIPRR

SEQ ID NO: 122338 - protein, 14 aa, Artificial Sequence
  Description of Artificial Sequence: Synthetic peptide
  Seed: RMCSLMQGSTLPRR
RMISLMQASTLPRR

SEQ ID NO: 122339 - protein, 14 aa, Artificial Sequence
  Description of Artificial Sequence: Synthetic peptide
  Seed: RMCSLMQGSTLPRR
RMISLMQASTMPRR

SEQ ID NO: 122340 - protein, 14 aa, Artificial Sequence
  Description of Artificial Sequence: Synthetic peptide
  Seed: RMCSLMQGSTLPRR
RMISLMQASTSPRR

SEQ ID NO: 122341 - protein, 14 aa, Artificial Sequence
  Description of Artificial Sequence: Synthetic peptide
  Seed: RMCSLMQGSTLPRR
RMISLMQASTTPRR

SEQ ID NO: 122342 - protein, 14 aa, Artificial Sequence
  Description of Artificial Sequence: Synthetic peptide
  Seed: RMCSLMQGSTLPRR
RMISLMQASTVPRR

SEQ ID NO: 122343 - protein, 14 aa, Artificial Sequence
  Description of Artificial Sequence: Synthetic peptide
  Seed: RMCSLMQGSTLPRR
RMISLMQGSTAPRR

SEQ ID NO: 122344 - protein, 14 aa, Artificial Sequence
  Description of Artificial Sequence: Synthetic peptide
  Seed: RMCSLMQGSTLPRR
RMISLMQGSTIPRR

SEQ ID NO: 122345 - protein, 14 aa, Artificial Sequence
  Description of Artificial Sequence: Synthetic peptide
  Seed: RMCSLMQGSTLPRR
RMISLMQGSTLPRR

SEQ ID NO: 122346 - protein, 14 aa, Artificial Sequence
  Description of Artificial Sequence: Synthetic peptide
  Seed: RMCSLMQGSTLPRR
RMISLMQGSTMPRR

SEQ ID NO: 122347 - protein, 14 aa, Artificial Sequence
  Description of Artificial Sequence: Synthetic peptide
  Seed: RMCSLMQGSTLPRR
RMISLMQGSTSPRR

SEQ ID NO: 122348 - protein, 14 aa, Artificial Sequence
  Description of Artificial Sequence: Synthetic peptide
  Seed: RMCSLMQGSTLPRR
RMISLMQGSTTPRR

SEQ ID NO: 122349 - protein, 14 aa, Artificial Sequence
  Description of Artificial Sequence: Synthetic peptide
  Seed: RMCSLMQGSTLPRR
RMISLMQGSTVPRR

SEQ ID NO: 122350 - protein, 14 aa, Artificial Sequence
  Description of Artificial Sequence: Synthetic peptide
  Seed: RMCSLMQGSTLPRR
RMISLMQNSTIPRR

SEQ ID NO: 122351 - protein, 14 aa, Artificial Sequence
  Description of Artificial Sequence: Synthetic peptide
  Seed: RMCSLMQGSTLPRR
RMISLMQNSTLPRR

SEQ ID NO: 122352 - protein, 14 aa, Artificial Sequence
  Description of Artificial Sequence: Synthetic peptide
  Seed: RMCSLMQGSTLPRR
RMISLMQNSTVPRR

SEQ ID NO: 122353 - protein, 14 aa, Artificial Sequence
  Description of Artificial Sequence: Synthetic peptide
  Seed: RMCSLMQGSTLPRR
RMISLMQPSTAPRR

SEQ ID NO: 122354 - protein, 14 aa, Artificial Sequence
  Description of Artificial Sequence: Synthetic peptide
  Seed: RMCSLMQGSTLPRR
RMISLMQPSTIPRR

SEQ ID NO: 122355 - protein, 14 aa, Artificial Sequence
  Description of Artificial Sequence: Synthetic peptide
  Seed: RMCSLMQGSTLPRR
RMISLMQPSTLPRR

SEQ ID NO: 122356 - protein, 14 aa, Artificial Sequence
  Description of Artificial Sequence: Synthetic peptide
  Seed: RMCSLMQGSTLPRR
RMISLMQPSTMPRR

SEQ ID NO: 122357 - protein, 14 aa, Artificial Sequence
  Description of Artificial Sequence: Synthetic peptide
  Seed: RMCSLMQGSTLPRR
RMISLMQPSTVPRR

SEQ ID NO: 122358 - protein, 14 aa, Artificial Sequence
  Description of Artificial Sequence: Synthetic peptide
  Seed: RMCSLMQGSTLPRR
RMISLMQSSTAPRR

SEQ ID NO: 122359 - protein, 14 aa, Artificial Sequence
  Description of Artificial Sequence: Synthetic peptide
  Seed: RMCSLMQGSTLPRR
RMISLMQSSTIPRR

SEQ ID NO: 122360 - protein, 14 aa, Artificial Sequence
  Description of Artificial Sequence: Synthetic peptide
  Seed: RMCSLMQGSTLPRR
RMISLMQSSTLPRR

SEQ ID NO: 122361 - protein, 14 aa, Artificial Sequence
  Description of Artificial Sequence: Synthetic peptide
  Seed: RMCSLMQGSTLPRR
RMISLMQSSTMPRR

SEQ ID NO: 122362 - protein, 14 aa, Artificial Sequence
  Description of Artificial Sequence: Synthetic peptide
  Seed: RMCSLMQGSTLPRR
RMISLMQSSTTPRR

SEQ ID NO: 122363 - protein, 14 aa, Artificial Sequence
  Description of Artificial Sequence: Synthetic peptide
  Seed: RMCSLMQGSTLPRR
RMISLMQSSTVPRR

SEQ ID NO: 122364 - protein, 14 aa, Artificial Sequence
  Description of Artificial Sequence: Synthetic peptide
  Seed: RMCSLMQGSTLPRR
RMISLMQTSTIPRR

SEQ ID NO: 122365 - protein, 14 aa, Artificial Sequence
  Description of Artificial Sequence: Synthetic peptide
  Seed: RMCSLMQGSTLPRR
RMISLMQTSTLPRR

SEQ ID NO: 122366 - protein, 14 aa, Artificial Sequence
  Description of Artificial Sequence: Synthetic peptide
  Seed: RMCSLMQGSTLPRR
RMISLMQTSTVPRR

SEQ ID NO: 122367 - protein, 14 aa, Artificial Sequence
  Description of Artificial Sequence: Synthetic peptide
  Seed: RMCSLMQGSTLPRR
RMISLMQVSTAPRR

SEQ ID NO: 122368 - protein, 14 aa, Artificial Sequence
  Description of Artificial Sequence: Synthetic peptide
  Seed: RMCSLMQGSTLPRR
RMISLQQASTIPRR

SEQ ID NO: 122369 - protein, 14 aa, Artificial Sequence
  Description of Artificial Sequence: Synthetic peptide
  Seed: RMCSLMQGSTLPRR
RMISLQQASTLPRR

SEQ ID NO: 122370 - protein, 14 aa, Artificial Sequence
  Description of Artificial Sequence: Synthetic peptide
  Seed: RMCSLMQGSTLPRR
RMISLQQASTVPRR

SEQ ID NO: 122371 - protein, 14 aa, Artificial Sequence
  Description of Artificial Sequence: Synthetic peptide
  Seed: RMCSLMQGSTLPRR
RMLSLAQASTLPRR

SEQ ID NO: 122372 - protein, 14 aa, Artificial Sequence
  Description of Artificial Sequence: Synthetic peptide
  Seed: RMCSLMQGSTLPRR
RMLSLIQASTAPRR

SEQ ID NO: 122373 - protein, 14 aa, Artificial Sequence
  Description of Artificial Sequence: Synthetic peptide
  Seed: RMCSLMQGSTLPRR
RMLSLIQASTIPRR

SEQ ID NO: 122374 - protein, 14 aa, Artificial Sequence
  Description of Artificial Sequence: Synthetic peptide
  Seed: RMCSLMQGSTLPRR
RMLSLIQASTLPRR

SEQ ID NO: 122375 - protein, 14 aa, Artificial Sequence
  Description of Artificial Sequence: Synthetic peptide
  Seed: RMCSLMQGSTLPRR
RMLSLIQASTVPRR

SEQ ID NO: 122376 - protein, 14 aa, Artificial Sequence
  Description of Artificial Sequence: Synthetic peptide
  Seed: RMCSLMQGSTLPRR
RMLSLIQGSTAPRR

SEQ ID NO: 122377 - protein, 14 aa, Artificial Sequence
  Description of Artificial Sequence: Synthetic peptide
  Seed: RMCSLMQGSTLPRR
RMLSLIQGSTIPRR

SEQ ID NO: 122378 - protein, 14 aa, Artificial Sequence
  Description of Artificial Sequence: Synthetic peptide
  Seed: RMCSLMQGSTLPRR
RMLSLIQGSTLPRR

SEQ ID NO: 122379 - protein, 14 aa, Artificial Sequence
  Description of Artificial Sequence: Synthetic peptide
  Seed: RMCSLMQGSTLPRR
RMLSLIQGSTVPRR

SEQ ID NO: 122380 - protein, 14 aa, Artificial Sequence
  Description of Artificial Sequence: Synthetic peptide
  Seed: RMCSLMQGSTLPRR
RMLSLLQASTAPRR

SEQ ID NO: 122381 - protein, 14 aa, Artificial Sequence
  Description of Artificial Sequence: Synthetic peptide
  Seed: RMCSLMQGSTLPRR
RMLSLLQASTIPRR

SEQ ID NO: 122382 - protein, 14 aa, Artificial Sequence
  Description of Artificial Sequence: Synthetic peptide
  Seed: RMCSLMQGSTLPRR
RMLSLLQASTLPRR

SEQ ID NO: 122383 - protein, 14 aa, Artificial Sequence
  Description of Artificial Sequence: Synthetic peptide
  Seed: RMCSLMQGSTLPRR
RMLSLLQASTMPRR

SEQ ID NO: 122384 - protein, 14 aa, Artificial Sequence
  Description of Artificial Sequence: Synthetic peptide
  Seed: RMCSLMQGSTLPRR
RMLSLLQASTNPRR

SEQ ID NO: 122385 - protein, 14 aa, Artificial Sequence
  Description of Artificial Sequence: Synthetic peptide
  Seed: RMCSLMQGSTLPRR
RMLSLLQASTSPRR

SEQ ID NO: 122386 - protein, 14 aa, Artificial Sequence
  Description of Artificial Sequence: Synthetic peptide
  Seed: RMCSLMQGSTLPRR
RMLSLLQASTTPRR

SEQ ID NO: 122387 - protein, 14 aa, Artificial Sequence
  Description of Artificial Sequence: Synthetic peptide
  Seed: RMCSLMQGSTLPRR
RMLSLLQASTVPRR

SEQ ID NO: 122388 - protein, 14 aa, Artificial Sequence
  Description of Artificial Sequence: Synthetic peptide
  Seed: RMCSLMQGSTLPRR
RMLSLLQGSTAPRR

SEQ ID NO: 122389 - protein, 14 aa, Artificial Sequence
  Description of Artificial Sequence: Synthetic peptide
  Seed: RMCSLMQGSTLPRR
RMLSLLQGSTIPRR

SEQ ID NO: 122390 - protein, 14 aa, Artificial Sequence
  Description of Artificial Sequence: Synthetic peptide
  Seed: RMCSLMQGSTLPRR
RMLSLLQGSTLPRR

SEQ ID NO: 122391 - protein, 14 aa, Artificial Sequence
  Description of Artificial Sequence: Synthetic peptide
  Seed: RMCSLMQGSTLPRR
RMLSLLQGSTMPRR

SEQ ID NO: 122392 - protein, 14 aa, Artificial Sequence
  Description of Artificial Sequence: Synthetic peptide
  Seed: RMCSLMQGSTLPRR
RMLSLLQGSTSPRR

SEQ ID NO: 122393 - protein, 14 aa, Artificial Sequence
  Description of Artificial Sequence: Synthetic peptide
  Seed: RMCSLMQGSTLPRR
RMLSLLQGSTTPRR

SEQ ID NO: 122394 - protein, 14 aa, Artificial Sequence
  Description of Artificial Sequence: Synthetic peptide
  Seed: RMCSLMQGSTLPRR
RMLSLLQGSTVPRR

SEQ ID NO: 122395 - protein, 14 aa, Artificial Sequence
  Description of Artificial Sequence: Synthetic peptide
  Seed: RMCSLMQGSTLPRR
RMLSLLQNSTVPRR

SEQ ID NO: 122396 - protein, 14 aa, Artificial Sequence
  Description of Artificial Sequence: Synthetic peptide
  Seed: RMCSLMQGSTLPRR
RMLSLLQPSTAPRR

SEQ ID NO: 122397 - protein, 14 aa, Artificial Sequence
  Description of Artificial Sequence: Synthetic peptide
  Seed: RMCSLMQGSTLPRR
RMLSLLQPSTIPRR

SEQ ID NO: 122398 - protein, 14 aa, Artificial Sequence
  Description of Artificial Sequence: Synthetic peptide
  Seed: RMCSLMQGSTLPRR
RMLSLLQPSTLPRR

SEQ ID NO: 122399 - protein, 14 aa, Artificial Sequence
  Description of Artificial Sequence: Synthetic peptide
  Seed: RMCSLMQGSTLPRR
RMLSLLQPSTVPRR

SEQ ID NO: 122400 - protein, 14 aa, Artificial Sequence
  Description of Artificial Sequence: Synthetic peptide
  Seed: RMCSLMQGSTLPRR
RMLSLLQSSTAPRR

SEQ ID NO: 122401 - protein, 14 aa, Artificial Sequence
  Description of Artificial Sequence: Synthetic peptide
  Seed: RMCSLMQGSTLPRR
RMLSLLQSSTIPRR

SEQ ID NO: 122402 - protein, 14 aa, Artificial Sequence
  Description of Artificial Sequence: Synthetic peptide
  Seed: RMCSLMQGSTLPRR
RMLSLLQSSTLPRR

SEQ ID NO: 122403 - protein, 14 aa, Artificial Sequence
  Description of Artificial Sequence: Synthetic peptide
  Seed: RMCSLMQGSTLPRR
RMLSLLQSSTMPRR

SEQ ID NO: 122404 - protein, 14 aa, Artificial Sequence
  Description of Artificial Sequence: Synthetic peptide
  Seed: RMCSLMQGSTLPRR
RMLSLLQSSTTPRR

SEQ ID NO: 122405 - protein, 14 aa, Artificial Sequence
  Description of Artificial Sequence: Synthetic peptide
  Seed: RMCSLMQGSTLPRR
RMLSLLQSSTVPRR

SEQ ID NO: 122406 - protein, 14 aa, Artificial Sequence
  Description of Artificial Sequence: Synthetic peptide
  Seed: RMCSLMQGSTLPRR
RMLSLLQTSTVPRR

SEQ ID NO: 122407 - protein, 14 aa, Artificial Sequence
  Description of Artificial Sequence: Synthetic peptide
  Seed: RMCSLMQGSTLPRR
RMLSLLQVSTAPRR

SEQ ID NO: 122408 - protein, 14 aa, Artificial Sequence
  Description of Artificial Sequence: Synthetic peptide
  Seed: RMCSLMQGSTLPRR
RMLSLMQASTAPRR

SEQ ID NO: 122409 - protein, 14 aa, Artificial Sequence
  Description of Artificial Sequence: Synthetic peptide
  Seed: RMCSLMQGSTLPRR
RMLSLMQASTIPRR

SEQ ID NO: 122410 - protein, 14 aa, Artificial Sequence
  Description of Artificial Sequence: Synthetic peptide
  Seed: RMCSLMQGSTLPRR
RMLSLMQASTLPRR

SEQ ID NO: 122411 - protein, 14 aa, Artificial Sequence
  Description of Artificial Sequence: Synthetic peptide
  Seed: RMCSLMQGSTLPRR
RMLSLMQASTMPRR

SEQ ID NO: 122412 - protein, 14 aa, Artificial Sequence
  Description of Artificial Sequence: Synthetic peptide
  Seed: RMCSLMQGSTLPRR
RMLSLMQASTNPRR

SEQ ID NO: 122413 - protein, 14 aa, Artificial Sequence
  Description of Artificial Sequence: Synthetic peptide
  Seed: RMCSLMQGSTLPRR
RMLSLMQASTSPRR

SEQ ID NO: 122414 - protein, 14 aa, Artificial Sequence
  Description of Artificial Sequence: Synthetic peptide
  Seed: RMCSLMQGSTLPRR
RMLSLMQASTTPRR

SEQ ID NO: 122415 - protein, 14 aa, Artificial Sequence
  Description of Artificial Sequence: Synthetic peptide
  Seed: RMCSLMQGSTLPRR
RMLSLMQASTVPRR

SEQ ID NO: 122416 - protein, 14 aa, Artificial Sequence
  Description of Artificial Sequence: Synthetic peptide
  Seed: RMCSLMQGSTLPRR
RMLSLMQGSTAPRR

SEQ ID NO: 122417 - protein, 14 aa, Artificial Sequence
  Description of Artificial Sequence: Synthetic peptide
  Seed: RMCSLMQGSTLPRR
RMLSLMQGSTIPRR

SEQ ID NO: 122418 - protein, 14 aa, Artificial Sequence
  Description of Artificial Sequence: Synthetic peptide
  Seed: RMCSLMQGSTLPRR
RMLSLMQGSTLPRR

SEQ ID NO: 122419 - protein, 14 aa, Artificial Sequence
  Description of Artificial Sequence: Synthetic peptide
  Seed: RMCSLMQGSTLPRR
RMLSLMQGSTMPRR

SEQ ID NO: 122420 - protein, 14 aa, Artificial Sequence
  Description of Artificial Sequence: Synthetic peptide
  Seed: RMCSLMQGSTLPRR
RMLSLMQGSTSPRR

SEQ ID NO: 122421 - protein, 14 aa, Artificial Sequence
  Description of Artificial Sequence: Synthetic peptide
  Seed: RMCSLMQGSTLPRR
RMLSLMQGSTTPRR

SEQ ID NO: 122422 - protein, 14 aa, Artificial Sequence
  Description of Artificial Sequence: Synthetic peptide
  Seed: RMCSLMQGSTLPRR
RMLSLMQGSTVPRR

SEQ ID NO: 122423 - protein, 14 aa, Artificial Sequence
  Description of Artificial Sequence: Synthetic peptide
  Seed: RMCSLMQGSTLPRR
RMLSLMQPSTAPRR

SEQ ID NO: 122424 - protein, 14 aa, Artificial Sequence
  Description of Artificial Sequence: Synthetic peptide
  Seed: RMCSLMQGSTLPRR
RMLSLMQPSTIPRR

SEQ ID NO: 122425 - protein, 14 aa, Artificial Sequence
  Description of Artificial Sequence: Synthetic peptide
  Seed: RMCSLMQGSTLPRR
RMLSLMQPSTLPRR

SEQ ID NO: 122426 - protein, 14 aa, Artificial Sequence
  Description of Artificial Sequence: Synthetic peptide
  Seed: RMCSLMQGSTLPRR
RMLSLMQPSTVPRR

SEQ ID NO: 122427 - protein, 14 aa, Artificial Sequence
  Description of Artificial Sequence: Synthetic peptide
  Seed: RMCSLMQGSTLPRR
RMLSLMQSSTAPRR

SEQ ID NO: 122428 - protein, 14 aa, Artificial Sequence
  Description of Artificial Sequence: Synthetic peptide
  Seed: RMCSLMQGSTLPRR
RMLSLMQSSTIPRR

SEQ ID NO: 122429 - protein, 14 aa, Artificial Sequence
  Description of Artificial Sequence: Synthetic peptide
  Seed: RMCSLMQGSTLPRR
RMLSLMQSSTLPRR

SEQ ID NO: 122430 - protein, 14 aa, Artificial Sequence
  Description of Artificial Sequence: Synthetic peptide
  Seed: RMCSLMQGSTLPRR
RMLSLMQSSTMPRR

SEQ ID NO: 122431 - protein, 14 aa, Artificial Sequence
  Description of Artificial Sequence: Synthetic peptide
  Seed: RMCSLMQGSTLPRR
RMLSLMQSSTTPRR

SEQ ID NO: 122432 - protein, 14 aa, Artificial Sequence
  Description of Artificial Sequence: Synthetic peptide
  Seed: RMCSLMQGSTLPRR
RMLSLMQSSTVPRR

SEQ ID NO: 122433 - protein, 14 aa, Artificial Sequence
  Description of Artificial Sequence: Synthetic peptide
  Seed: RMCSLMQGSTLPRR
RMLSLMQTSTVPRR

SEQ ID NO: 122434 - protein, 14 aa, Artificial Sequence
  Description of Artificial Sequence: Synthetic peptide
  Seed: RMCSLMQGSTLPRR
RMLSLMQVSTAPRR

SEQ ID NO: 122435 - protein, 14 aa, Artificial Sequence
  Description of Artificial Sequence: Synthetic peptide
  Seed: RMCSLMQGSTLPRR
RMLSLQQASTLPRR

SEQ ID NO: 122436 - protein, 14 aa, Artificial Sequence
  Description of Artificial Sequence: Synthetic peptide
  Seed: RMCSLMQGSTLPRR
RMMSLLQASTAPRR

SEQ ID NO: 122437 - protein, 14 aa, Artificial Sequence
  Description of Artificial Sequence: Synthetic peptide
  Seed: RMCSLMQGSTLPRR
RMMSLLQASTIPRR

SEQ ID NO: 122438 - protein, 14 aa, Artificial Sequence
  Description of Artificial Sequence: Synthetic peptide
  Seed: RMCSLMQGSTLPRR
RMMSLLQASTLPRR

SEQ ID NO: 122439 - protein, 14 aa, Artificial Sequence
  Description of Artificial Sequence: Synthetic peptide
  Seed: RMCSLMQGSTLPRR
RMMSLLQASTVPRR

SEQ ID NO: 122440 - protein, 14 aa, Artificial Sequence
  Description of Artificial Sequence: Synthetic peptide
  Seed: RMCSLMQGSTLPRR
RMMSLLQGSTAPRR

SEQ ID NO: 122441 - protein, 14 aa, Artificial Sequence
  Description of Artificial Sequence: Synthetic peptide
  Seed: RMCSLMQGSTLPRR
RMMSLLQGSTIPRR

SEQ ID NO: 122442 - protein, 14 aa, Artificial Sequence
  Description of Artificial Sequence: Synthetic peptide
  Seed: RMCSLMQGSTLPRR
RMMSLLQGSTLPRR

SEQ ID NO: 122443 - protein, 14 aa, Artificial Sequence
  Description of Artificial Sequence: Synthetic peptide
  Seed: RMCSLMQGSTLPRR
RMMSLLQGSTVPRR

SEQ ID NO: 122444 - protein, 14 aa, Artificial Sequence
  Description of Artificial Sequence: Synthetic peptide
  Seed: RMCSLMQGSTLPRR
RMMSLLQSSTAPRR

SEQ ID NO: 122445 - protein, 14 aa, Artificial Sequence
  Description of Artificial Sequence: Synthetic peptide
  Seed: RMCSLMQGSTLPRR
RMMSLLQSSTIPRR

SEQ ID NO: 122446 - protein, 14 aa, Artificial Sequence
  Description of Artificial Sequence: Synthetic peptide
  Seed: RMCSLMQGSTLPRR
RMMSLLQSSTLPRR

SEQ ID NO: 122447 - protein, 14 aa, Artificial Sequence
  Description of Artificial Sequence: Synthetic peptide
  Seed: RMCSLMQGSTLPRR
RMMSLLQSSTVPRR

SEQ ID NO: 122448 - protein, 14 aa, Artificial Sequence
  Description of Artificial Sequence: Synthetic peptide
  Seed: RMCSLMQGSTLPRR
RMMSLMQASTAPRR

SEQ ID NO: 122449 - protein, 14 aa, Artificial Sequence
  Description of Artificial Sequence: Synthetic peptide
  Seed: RMCSLMQGSTLPRR
RMMSLMQASTIPRR

SEQ ID NO: 122450 - protein, 14 aa, Artificial Sequence
  Description of Artificial Sequence: Synthetic peptide
  Seed: RMCSLMQGSTLPRR
RMMSLMQASTLPRR

SEQ ID NO: 122451 - protein, 14 aa, Artificial Sequence
  Description of Artificial Sequence: Synthetic peptide
  Seed: RMCSLMQGSTLPRR
RMMSLMQASTVPRR

SEQ ID NO: 122452 - protein, 14 aa, Artificial Sequence
  Description of Artificial Sequence: Synthetic peptide
  Seed: RMCSLMQGSTLPRR
RMMSLMQGSTAPRR

SEQ ID NO: 122453 - protein, 14 aa, Artificial Sequence
  Description of Artificial Sequence: Synthetic peptide
  Seed: RMCSLMQGSTLPRR
RMMSLMQGSTIPRR

SEQ ID NO: 122454 - protein, 14 aa, Artificial Sequence
  Description of Artificial Sequence: Synthetic peptide
  Seed: RMCSLMQGSTLPRR
RMMSLMQGSTLPRR

SEQ ID NO: 122455 - protein, 14 aa, Artificial Sequence
  Description of Artificial Sequence: Synthetic peptide
  Seed: RMCSLMQGSTLPRR
RMMSLMQGSTVPRR

SEQ ID NO: 122456 - protein, 14 aa, Artificial Sequence
  Description of Artificial Sequence: Synthetic peptide
  Seed: RMCSLMQGSTLPRR
RMMSLMQSSTIPRR

SEQ ID NO: 122457 - protein, 14 aa, Artificial Sequence
  Description of Artificial Sequence: Synthetic peptide
  Seed: RMCSLMQGSTLPRR
RMMSLMQSSTLPRR

SEQ ID NO: 122458 - protein, 14 aa, Artificial Sequence
  Description of Artificial Sequence: Synthetic peptide
  Seed: RMCSLMQGSTLPRR
RMMSLMQSSTVPRR

SEQ ID NO: 122459 - protein, 14 aa, Artificial Sequence
  Description of Artificial Sequence: Synthetic peptide
  Seed: RMCSLMQGSTLPRR
RMVSLLQASTAPRR

SEQ ID NO: 122460 - protein, 14 aa, Artificial Sequence
  Description of Artificial Sequence: Synthetic peptide
  Seed: RMCSLMQGSTLPRR
RMVSLLQASTIPRR

SEQ ID NO: 122461 - protein, 14 aa, Artificial Sequence
  Description of Artificial Sequence: Synthetic peptide
  Seed: RMCSLMQGSTLPRR
RMVSLLQASTLPRR

SEQ ID NO: 122462 - protein, 14 aa, Artificial Sequence
  Description of Artificial Sequence: Synthetic peptide
  Seed: RMCSLMQGSTLPRR
RMVSLLQASTVPRR

SEQ ID NO: 122463 - protein, 14 aa, Artificial Sequence
  Description of Artificial Sequence: Synthetic peptide
  Seed: RMCSLMQGSTLPRR
RMVSLLQGSTAPRR

SEQ ID NO: 122464 - protein, 14 aa, Artificial Sequence
  Description of Artificial Sequence: Synthetic peptide
  Seed: RMCSLMQGSTLPRR
RMVSLLQGSTIPRR

SEQ ID NO: 122465 - protein, 14 aa, Artificial Sequence
  Description of Artificial Sequence: Synthetic peptide
  Seed: RMCSLMQGSTLPRR
RMVSLLQGSTLPRR

SEQ ID NO: 122466 - protein, 14 aa, Artificial Sequence
  Description of Artificial Sequence: Synthetic peptide
  Seed: RMCSLMQGSTLPRR
RMVSLLQGSTVPRR

SEQ ID NO: 122467 - protein, 14 aa, Artificial Sequence
  Description of Artificial Sequence: Synthetic peptide
  Seed: RMCSLMQGSTLPRR
RMVSLLQSSTIPRR

SEQ ID NO: 122468 - protein, 14 aa, Artificial Sequence
  Description of Artificial Sequence: Synthetic peptide
  Seed: RMCSLMQGSTLPRR
RMVSLLQSSTLPRR

SEQ ID NO: 122469 - protein, 14 aa, Artificial Sequence
  Description of Artificial Sequence: Synthetic peptide
  Seed: RMCSLMQGSTLPRR
RMVSLLQSSTVPRR

SEQ ID NO: 122470 - protein, 14 aa, Artificial Sequence
  Description of Artificial Sequence: Synthetic peptide
  Seed: RMCSLMQGSTLPRR
RMVSLMQASTAPRR

SEQ ID NO: 122471 - protein, 14 aa, Artificial Sequence
  Description of Artificial Sequence: Synthetic peptide
  Seed: RMCSLMQGSTLPRR
RMVSLMQASTIPRR

SEQ ID NO: 122472 - protein, 14 aa, Artificial Sequence
  Description of Artificial Sequence: Synthetic peptide
  Seed: RMCSLMQGSTLPRR
RMVSLMQASTLPRR

SEQ ID NO: 122473 - protein, 14 aa, Artificial Sequence
  Description of Artificial Sequence: Synthetic peptide
  Seed: RMCSLMQGSTLPRR
RMVSLMQASTVPRR

SEQ ID NO: 122474 - protein, 14 aa, Artificial Sequence
  Description of Artificial Sequence: Synthetic peptide
  Seed: RMCSLMQGSTLPRR
RMVSLMQGSTAPRR

SEQ ID NO: 122475 - protein, 14 aa, Artificial Sequence
  Description of Artificial Sequence: Synthetic peptide
  Seed: RMCSLMQGSTLPRR
RMVSLMQGSTIPRR

SEQ ID NO: 122476 - protein, 14 aa, Artificial Sequence
  Description of Artificial Sequence: Synthetic peptide
  Seed: RMCSLMQGSTLPRR
RMVSLMQGSTLPRR

SEQ ID NO: 122477 - protein, 14 aa, Artificial Sequence
  Description of Artificial Sequence: Synthetic peptide
  Seed: RMCSLMQGSTLPRR
RMVSLMQGSTVPRR

SEQ ID NO: 122478 - protein, 14 aa, Artificial Sequence
  Description of Artificial Sequence: Synthetic peptide
  Seed: RMCSLMQGSTLPRR
RMVSLMQSSTIPRR

SEQ ID NO: 122479 - protein, 14 aa, Artificial Sequence
  Description of Artificial Sequence: Synthetic peptide
  Seed: RMCSLMQGSTLPRR
RMVSLMQSSTLPRR

SEQ ID NO: 122480 - protein, 14 aa, Artificial Sequence
  Description of Artificial Sequence: Synthetic peptide
  Seed: RMCSLMQGSTLPRR
RMVSLMQSSTVPRR

SEQ ID NO: 122481 - protein, 14 aa, Artificial Sequence
  Description of Artificial Sequence: Synthetic peptide
  Seed: RMCSLMQGSTLPRR
RMWSLAQASTAPRR

SEQ ID NO: 122482 - protein, 14 aa, Artificial Sequence
  Description of Artificial Sequence: Synthetic peptide
  Seed: RMCSLMQGSTLPRR
RMWSLAQASTIPRR

SEQ ID NO: 122483 - protein, 14 aa, Artificial Sequence
  Description of Artificial Sequence: Synthetic peptide
  Seed: RMCSLMQGSTLPRR
RMWSLAQASTLPRR

SEQ ID NO: 122484 - protein, 14 aa, Artificial Sequence
  Description of Artificial Sequence: Synthetic peptide
  Seed: RMCSLMQGSTLPRR
RMWSLAQASTVPRR

SEQ ID NO: 122485 - protein, 14 aa, Artificial Sequence
  Description of Artificial Sequence: Synthetic peptide
  Seed: RMCSLMQGSTLPRR
RMWSLAQGSTAPRR

SEQ ID NO: 122486 - protein, 14 aa, Artificial Sequence
  Description of Artificial Sequence: Synthetic peptide
  Seed: RMCSLMQGSTLPRR
RMWSLAQGSTIPRR

SEQ ID NO: 122487 - protein, 14 aa, Artificial Sequence
  Description of Artificial Sequence: Synthetic peptide
  Seed: RMCSLMQGSTLPRR
RMWSLAQGSTLPRR

SEQ ID NO: 122488 - protein, 14 aa, Artificial Sequence
  Description of Artificial Sequence: Synthetic peptide
  Seed: RMCSLMQGSTLPRR
RMWSLAQGSTVPRR

SEQ ID NO: 122489 - protein, 14 aa, Artificial Sequence
  Description of Artificial Sequence: Synthetic peptide
  Seed: RMCSLMQGSTLPRR
RMWSLAQSSTIPRR

SEQ ID NO: 122490 - protein, 14 aa, Artificial Sequence
  Description of Artificial Sequence: Synthetic peptide
  Seed: RMCSLMQGSTLPRR
RMWSLAQSSTLPRR

SEQ ID NO: 122491 - protein, 14 aa, Artificial Sequence
  Description of Artificial Sequence: Synthetic peptide
  Seed: RMCSLMQGSTLPRR
RMWSLAQSSTVPRR

SEQ ID NO: 122492 - protein, 14 aa, Artificial Sequence
  Description of Artificial Sequence: Synthetic peptide
  Seed: RMCSLMQGSTLPRR
RMWSLIQASTAPRR

SEQ ID NO: 122493 - protein, 14 aa, Artificial Sequence
  Description of Artificial Sequence: Synthetic peptide
  Seed: RMCSLMQGSTLPRR
RMWSLIQASTIPRR

SEQ ID NO: 122494 - protein, 14 aa, Artificial Sequence
  Description of Artificial Sequence: Synthetic peptide
  Seed: RMCSLMQGSTLPRR
RMWSLIQASTLPRR

SEQ ID NO: 122495 - protein, 14 aa, Artificial Sequence
  Description of Artificial Sequence: Synthetic peptide
  Seed: RMCSLMQGSTLPRR
RMWSLIQASTMPRR

SEQ ID NO: 122496 - protein, 14 aa, Artificial Sequence
  Description of Artificial Sequence: Synthetic peptide
  Seed: RMCSLMQGSTLPRR
RMWSLIQASTNPRR

SEQ ID NO: 122497 - protein, 14 aa, Artificial Sequence
  Description of Artificial Sequence: Synthetic peptide
  Seed: RMCSLMQGSTLPRR
RMWSLIQASTSPRR

SEQ ID NO: 122498 - protein, 14 aa, Artificial Sequence
  Description of Artificial Sequence: Synthetic peptide
  Seed: RMCSLMQGSTLPRR
RMWSLIQASTTPRR

SEQ ID NO: 122499 - protein, 14 aa, Artificial Sequence
  Description of Artificial Sequence: Synthetic peptide
  Seed: RMCSLMQGSTLPRR
RMWSLIQASTVPRR

SEQ ID NO: 122500 - protein, 14 aa, Artificial Sequence
  Description of Artificial Sequence: Synthetic peptide
  Seed: RMCSLMQGSTLPRR
RMWSLIQGSTAPRR

SEQ ID NO: 122501 - protein, 14 aa, Artificial Sequence
  Description of Artificial Sequence: Synthetic peptide
  Seed: RMCSLMQGSTLPRR
RMWSLIQGSTIPRR

SEQ ID NO: 122502 - protein, 14 aa, Artificial Sequence
  Description of Artificial Sequence: Synthetic peptide
  Seed: RMCSLMQGSTLPRR
RMWSLIQGSTLPRR

SEQ ID NO: 122503 - protein, 14 aa, Artificial Sequence
  Description of Artificial Sequence: Synthetic peptide
  Seed: RMCSLMQGSTLPRR
RMWSLIQGSTTPRR

SEQ ID NO: 122504 - protein, 14 aa, Artificial Sequence
  Description of Artificial Sequence: Synthetic peptide
  Seed: RMCSLMQGSTLPRR
RMWSLIQGSTVPRR

SEQ ID NO: 122505 - protein, 14 aa, Artificial Sequence
  Description of Artificial Sequence: Synthetic peptide
  Seed: RMCSLMQGSTLPRR
RMWSLIQPSTAPRR

SEQ ID NO: 122506 - protein, 14 aa, Artificial Sequence
  Description of Artificial Sequence: Synthetic peptide
  Seed: RMCSLMQGSTLPRR
RMWSLIQPSTLPRR

SEQ ID NO: 122507 - protein, 14 aa, Artificial Sequence
  Description of Artificial Sequence: Synthetic peptide
  Seed: RMCSLMQGSTLPRR
RMWSLIQPSTSPRR

SEQ ID NO: 122508 - protein, 14 aa, Artificial Sequence
  Description of Artificial Sequence: Synthetic peptide
  Seed: RMCSLMQGSTLPRR
RMWSLIQPSTVPRR

SEQ ID NO: 122509 - protein, 14 aa, Artificial Sequence
  Description of Artificial Sequence: Synthetic peptide
  Seed: RMCSLMQGSTLPRR
RMWSLIQSSTAPRR

SEQ ID NO: 122510 - protein, 14 aa, Artificial Sequence
  Description of Artificial Sequence: Synthetic peptide
  Seed: RMCSLMQGSTLPRR
RMWSLIQSSTIPRR

SEQ ID NO: 122511 - protein, 14 aa, Artificial Sequence
  Description of Artificial Sequence: Synthetic peptide
  Seed: RMCSLMQGSTLPRR
RMWSLIQSSTLPRR

SEQ ID NO: 122512 - protein, 14 aa, Artificial Sequence
  Description of Artificial Sequence: Synthetic peptide
  Seed: RMCSLMQGSTLPRR
RMWSLIQSSTSPRR

SEQ ID NO: 122513 - protein, 14 aa, Artificial Sequence
  Description of Artificial Sequence: Synthetic peptide
  Seed: RMCSLMQGSTLPRR
RMWSLIQSSTVPRR

SEQ ID NO: 122514 - protein, 14 aa, Artificial Sequence
  Description of Artificial Sequence: Synthetic peptide
  Seed: RMCSLMQGSTLPRR
RMWSLIQTSTAPRR

SEQ ID NO: 122515 - protein, 14 aa, Artificial Sequence
  Description of Artificial Sequence: Synthetic peptide
  Seed: RMCSLMQGSTLPRR
RMWSLIQTSTSPRR

SEQ ID NO: 122516 - protein, 14 aa, Artificial Sequence
  Description of Artificial Sequence: Synthetic peptide
  Seed: RMCSLMQGSTLPRR
RMWSLIQVSTAPRR

SEQ ID NO: 122517 - protein, 14 aa, Artificial Sequence
  Description of Artificial Sequence: Synthetic peptide
  Seed: RMCSLMQGSTLPRR
RMWSLIQVSTSPRR

SEQ ID NO: 122518 - protein, 14 aa, Artificial Sequence
  Description of Artificial Sequence: Synthetic peptide
  Seed: RMCSLMQGSTLPRR
RMWSLLQASTAPRR

SEQ ID NO: 122519 - protein, 14 aa, Artificial Sequence
  Description of Artificial Sequence: Synthetic peptide
  Seed: RMCSLMQGSTLPRR
RMWSLLQASTIPRR

SEQ ID NO: 122520 - protein, 14 aa, Artificial Sequence
  Description of Artificial Sequence: Synthetic peptide
  Seed: RMCSLMQGSTLPRR
RMWSLLQASTLPRR

SEQ ID NO: 122521 - protein, 14 aa, Artificial Sequence
  Description of Artificial Sequence: Synthetic peptide
  Seed: RMCSLMQGSTLPRR
RMWSLLQASTMPRR

SEQ ID NO: 122522 - protein, 14 aa, Artificial Sequence
  Description of Artificial Sequence: Synthetic peptide
  Seed: RMCSLMQGSTLPRR
RMWSLLQASTNPRR

SEQ ID NO: 122523 - protein, 14 aa, Artificial Sequence
  Description of Artificial Sequence: Synthetic peptide
  Seed: RMCSLMQGSTLPRR
RMWSLLQASTSPRR

SEQ ID NO: 122524 - protein, 14 aa, Artificial Sequence
  Description of Artificial Sequence: Synthetic peptide
  Seed: RMCSLMQGSTLPRR
RMWSLLQASTTPRR

SEQ ID NO: 122525 - protein, 14 aa, Artificial Sequence
  Description of Artificial Sequence: Synthetic peptide
  Seed: RMCSLMQGSTLPRR
RMWSLLQASTVPRR

SEQ ID NO: 122526 - protein, 14 aa, Artificial Sequence
  Description of Artificial Sequence: Synthetic peptide
  Seed: RMCSLMQGSTLPRR
RMWSLLQGSTAPRR

SEQ ID NO: 122527 - protein, 14 aa, Artificial Sequence
  Description of Artificial Sequence: Synthetic peptide
  Seed: RMCSLMQGSTLPRR
RMWSLLQGSTGPRR

SEQ ID NO: 122528 - protein, 14 aa, Artificial Sequence
  Description of Artificial Sequence: Synthetic peptide
  Seed: RMCSLMQGSTLPRR
RMWSLLQGSTIPRR

SEQ ID NO: 122529 - protein, 14 aa, Artificial Sequence
  Description of Artificial Sequence: Synthetic peptide
  Seed: RMCSLMQGSTLPRR
RMWSLLQGSTLPRR

SEQ ID NO: 122530 - protein, 14 aa, Artificial Sequence
  Description of Artificial Sequence: Synthetic peptide
  Seed: RMCSLMQGSTLPRR
RMWSLLQGSTMPRR

SEQ ID NO: 122531 - protein, 14 aa, Artificial Sequence
  Description of Artificial Sequence: Synthetic peptide
  Seed: RMCSLMQGSTLPRR
RMWSLLQGSTSPRR

SEQ ID NO: 122532 - protein, 14 aa, Artificial Sequence
  Description of Artificial Sequence: Synthetic peptide
  Seed: RMCSLMQGSTLPRR
RMWSLLQGSTTPRR

SEQ ID NO: 122533 - protein, 14 aa, Artificial Sequence
  Description of Artificial Sequence: Synthetic peptide
  Seed: RMCSLMQGSTLPRR
RMWSLLQGSTVPRR

SEQ ID NO: 122534 - protein, 14 aa, Artificial Sequence
  Description of Artificial Sequence: Synthetic peptide
  Seed: RMCSLMQGSTLPRR
RMWSLLQISTAPRR

SEQ ID NO: 122535 - protein, 14 aa, Artificial Sequence
  Description of Artificial Sequence: Synthetic peptide
  Seed: RMCSLMQGSTLPRR
RMWSLLQISTSPRR

SEQ ID NO: 122536 - protein, 14 aa, Artificial Sequence
  Description of Artificial Sequence: Synthetic peptide
  Seed: RMCSLMQGSTLPRR
RMWSLLQNSTAPRR

SEQ ID NO: 122537 - protein, 14 aa, Artificial Sequence
  Description of Artificial Sequence: Synthetic peptide
  Seed: RMCSLMQGSTLPRR
RMWSLLQNSTIPRR

SEQ ID NO: 122538 - protein, 14 aa, Artificial Sequence
  Description of Artificial Sequence: Synthetic peptide
  Seed: RMCSLMQGSTLPRR
RMWSLLQNSTLPRR

SEQ ID NO: 122539 - protein, 14 aa, Artificial Sequence
  Description of Artificial Sequence: Synthetic peptide
  Seed: RMCSLMQGSTLPRR
RMWSLLQNSTVPRR

SEQ ID NO: 122540 - protein, 14 aa, Artificial Sequence
  Description of Artificial Sequence: Synthetic peptide
  Seed: RMCSLMQGSTLPRR
RMWSLLQPSTAPRR

SEQ ID NO: 122541 - protein, 14 aa, Artificial Sequence
  Description of Artificial Sequence: Synthetic peptide
  Seed: RMCSLMQGSTLPRR
RMWSLLQPSTIPRR

SEQ ID NO: 122542 - protein, 14 aa, Artificial Sequence
  Description of Artificial Sequence: Synthetic peptide
  Seed: RMCSLMQGSTLPRR
RMWSLLQPSTLPRR

SEQ ID NO: 122543 - protein, 14 aa, Artificial Sequence
  Description of Artificial Sequence: Synthetic peptide
  Seed: RMCSLMQGSTLPRR
RMWSLLQPSTMPRR

SEQ ID NO: 122544 - protein, 14 aa, Artificial Sequence
  Description of Artificial Sequence: Synthetic peptide
  Seed: RMCSLMQGSTLPRR
RMWSLLQPSTNPRR

SEQ ID NO: 122545 - protein, 14 aa, Artificial Sequence
  Description of Artificial Sequence: Synthetic peptide
  Seed: RMCSLMQGSTLPRR
RMWSLLQPSTSPRR

SEQ ID NO: 122546 - protein, 14 aa, Artificial Sequence
  Description of Artificial Sequence: Synthetic peptide
  Seed: RMCSLMQGSTLPRR
RMWSLLQPSTTPRR

SEQ ID NO: 122547 - protein, 14 aa, Artificial Sequence
  Description of Artificial Sequence: Synthetic peptide
  Seed: RMCSLMQGSTLPRR
RMWSLLQPSTVPRR

SEQ ID NO: 122548 - protein, 14 aa, Artificial Sequence
  Description of Artificial Sequence: Synthetic peptide
  Seed: RMCSLMQGSTLPRR
RMWSLLQSSTAPRR

SEQ ID NO: 122549 - protein, 14 aa, Artificial Sequence
  Description of Artificial Sequence: Synthetic peptide
  Seed: RMCSLMQGSTLPRR
RMWSLLQSSTIPRR

SEQ ID NO: 122550 - protein, 14 aa, Artificial Sequence
  Description of Artificial Sequence: Synthetic peptide
  Seed: RMCSLMQGSTLPRR
RMWSLLQSSTLPRR

SEQ ID NO: 122551 - protein, 14 aa, Artificial Sequence
  Description of Artificial Sequence: Synthetic peptide
  Seed: RMCSLMQGSTLPRR
RMWSLLQSSTMPRR

SEQ ID NO: 122552 - protein, 14 aa, Artificial Sequence
  Description of Artificial Sequence: Synthetic peptide
  Seed: RMCSLMQGSTLPRR
RMWSLLQSSTNPRR

SEQ ID NO: 122553 - protein, 14 aa, Artificial Sequence
  Description of Artificial Sequence: Synthetic peptide
  Seed: RMCSLMQGSTLPRR
RMWSLLQSSTSPRR

SEQ ID NO: 122554 - protein, 14 aa, Artificial Sequence
  Description of Artificial Sequence: Synthetic peptide
  Seed: RMCSLMQGSTLPRR
RMWSLLQSSTTPRR

SEQ ID NO: 122555 - protein, 14 aa, Artificial Sequence
  Description of Artificial Sequence: Synthetic peptide
  Seed: RMCSLMQGSTLPRR
RMWSLLQSSTVPRR

SEQ ID NO: 122556 - protein, 14 aa, Artificial Sequence
  Description of Artificial Sequence: Synthetic peptide
  Seed: RMCSLMQGSTLPRR
RMWSLLQTSTAPRR

SEQ ID NO: 122557 - protein, 14 aa, Artificial Sequence
  Description of Artificial Sequence: Synthetic peptide
  Seed: RMCSLMQGSTLPRR
RMWSLLQTSTIPRR

SEQ ID NO: 122558 - protein, 14 aa, Artificial Sequence
  Description of Artificial Sequence: Synthetic peptide
  Seed: RMCSLMQGSTLPRR
RMWSLLQTSTLPRR

SEQ ID NO: 122559 - protein, 14 aa, Artificial Sequence
  Description of Artificial Sequence: Synthetic peptide
  Seed: RMCSLMQGSTLPRR
RMWSLLQTSTNPRR

SEQ ID NO: 122560 - protein, 14 aa, Artificial Sequence
  Description of Artificial Sequence: Synthetic peptide
  Seed: RMCSLMQGSTLPRR
RMWSLLQTSTSPRR

SEQ ID NO: 122561 - protein, 14 aa, Artificial Sequence
  Description of Artificial Sequence: Synthetic peptide
  Seed: RMCSLMQGSTLPRR
RMWSLLQTSTTPRR

SEQ ID NO: 122562 - protein, 14 aa, Artificial Sequence
  Description of Artificial Sequence: Synthetic peptide
  Seed: RMCSLMQGSTLPRR
RMWSLLQTSTVPRR

SEQ ID NO: 122563 - protein, 14 aa, Artificial Sequence
  Description of Artificial Sequence: Synthetic peptide
  Seed: RMCSLMQGSTLPRR
RMWSLLQVSTAPRR

SEQ ID NO: 122564 - protein, 14 aa, Artificial Sequence
  Description of Artificial Sequence: Synthetic peptide
  Seed: RMCSLMQGSTLPRR
RMWSLLQVSTNPRR

SEQ ID NO: 122565 - protein, 14 aa, Artificial Sequence
  Description of Artificial Sequence: Synthetic peptide
  Seed: RMCSLMQGSTLPRR
RMWSLLQVSTSPRR

SEQ ID NO: 122566 - protein, 14 aa, Artificial Sequence
  Description of Artificial Sequence: Synthetic peptide
  Seed: RMCSLMQGSTLPRR
RMWSLLQVSTTPRR

SEQ ID NO: 122567 - protein, 14 aa, Artificial Sequence
  Description of Artificial Sequence: Synthetic peptide
  Seed: RMCSLMQGSTLPRR
RMWSLMQASTAPRR

SEQ ID NO: 122568 - protein, 14 aa, Artificial Sequence
  Description of Artificial Sequence: Synthetic peptide
  Seed: RMCSLMQGSTLPRR
RMWSLMQASTIPRR

SEQ ID NO: 122569 - protein, 14 aa, Artificial Sequence
  Description of Artificial Sequence: Synthetic peptide
  Seed: RMCSLMQGSTLPRR
RMWSLMQASTLPRR

SEQ ID NO: 122570 - protein, 14 aa, Artificial Sequence
  Description of Artificial Sequence: Synthetic peptide
  Seed: RMCSLMQGSTLPRR
RMWSLMQASTMPRR

SEQ ID NO: 122571 - protein, 14 aa, Artificial Sequence
  Description of Artificial Sequence: Synthetic peptide
  Seed: RMCSLMQGSTLPRR
RMWSLMQASTNPRR

SEQ ID NO: 122572 - protein, 14 aa, Artificial Sequence
  Description of Artificial Sequence: Synthetic peptide
  Seed: RMCSLMQGSTLPRR
RMWSLMQASTSPRR

SEQ ID NO: 122573 - protein, 14 aa, Artificial Sequence
  Description of Artificial Sequence: Synthetic peptide
  Seed: RMCSLMQGSTLPRR
RMWSLMQASTTPRR

SEQ ID NO: 122574 - protein, 14 aa, Artificial Sequence
  Description of Artificial Sequence: Synthetic peptide
  Seed: RMCSLMQGSTLPRR
RMWSLMQASTVPRR

SEQ ID NO: 122575 - protein, 14 aa, Artificial Sequence
  Description of Artificial Sequence: Synthetic peptide
  Seed: RMCSLMQGSTLPRR
RMWSLMQGSTAPRR

SEQ ID NO: 122576 - protein, 14 aa, Artificial Sequence
  Description of Artificial Sequence: Synthetic peptide
  Seed: RMCSLMQGSTLPRR
RMWSLMQGSTIPRR

SEQ ID NO: 122577 - protein, 14 aa, Artificial Sequence
  Description of Artificial Sequence: Synthetic peptide
  Seed: RMCSLMQGSTLPRR
RMWSLMQGSTLPRR

SEQ ID NO: 122578 - protein, 14 aa, Artificial Sequence
  Description of Artificial Sequence: Synthetic peptide
  Seed: RMCSLMQGSTLPRR
RMWSLMQGSTMPRR

SEQ ID NO: 122579 - protein, 14 aa, Artificial Sequence
  Description of Artificial Sequence: Synthetic peptide
  Seed: RMCSLMQGSTLPRR
RMWSLMQGSTSPRR

SEQ ID NO: 122580 - protein, 14 aa, Artificial Sequence
  Description of Artificial Sequence: Synthetic peptide
  Seed: RMCSLMQGSTLPRR
RMWSLMQGSTTPRR

SEQ ID NO: 122581 - protein, 14 aa, Artificial Sequence
  Description of Artificial Sequence: Synthetic peptide
  Seed: RMCSLMQGSTLPRR
RMWSLMQGSTVPRR

SEQ ID NO: 122582 - protein, 14 aa, Artificial Sequence
  Description of Artificial Sequence: Synthetic peptide
  Seed: RMCSLMQGSTLPRR
RMWSLMQISTAPRR

SEQ ID NO: 122583 - protein, 14 aa, Artificial Sequence
  Description of Artificial Sequence: Synthetic peptide
  Seed: RMCSLMQGSTLPRR
RMWSLMQISTNPRR

SEQ ID NO: 122584 - protein, 14 aa, Artificial Sequence
  Description of Artificial Sequence: Synthetic peptide
  Seed: RMCSLMQGSTLPRR
RMWSLMQISTSPRR

SEQ ID NO: 122585 - protein, 14 aa, Artificial Sequence
  Description of Artificial Sequence: Synthetic peptide
  Seed: RMCSLMQGSTLPRR
RMWSLMQNSTAPRR

SEQ ID NO: 122586 - protein, 14 aa, Artificial Sequence
  Description of Artificial Sequence: Synthetic peptide
  Seed: RMCSLMQGSTLPRR
RMWSLMQNSTIPRR

SEQ ID NO: 122587 - protein, 14 aa, Artificial Sequence
  Description of Artificial Sequence: Synthetic peptide
  Seed: RMCSLMQGSTLPRR
RMWSLMQNSTLPRR

SEQ ID NO: 122588 - protein, 14 aa, Artificial Sequence
  Description of Artificial Sequence: Synthetic peptide
  Seed: RMCSLMQGSTLPRR
RMWSLMQNSTVPRR

SEQ ID NO: 122589 - protein, 14 aa, Artificial Sequence
  Description of Artificial Sequence: Synthetic peptide
  Seed: RMCSLMQGSTLPRR
RMWSLMQPSTAPRR

SEQ ID NO: 122590 - protein, 14 aa, Artificial Sequence
  Description of Artificial Sequence: Synthetic peptide
  Seed: RMCSLMQGSTLPRR
RMWSLMQPSTIPRR

SEQ ID NO: 122591 - protein, 14 aa, Artificial Sequence
  Description of Artificial Sequence: Synthetic peptide
  Seed: RMCSLMQGSTLPRR
RMWSLMQPSTLPRR

SEQ ID NO: 122592 - protein, 14 aa, Artificial Sequence
  Description of Artificial Sequence: Synthetic peptide
  Seed: RMCSLMQGSTLPRR
RMWSLMQPSTMPRR

SEQ ID NO: 122593 - protein, 14 aa, Artificial Sequence
  Description of Artificial Sequence: Synthetic peptide
  Seed: RMCSLMQGSTLPRR
RMWSLMQPSTNPRR

SEQ ID NO: 122594 - protein, 14 aa, Artificial Sequence
  Description of Artificial Sequence: Synthetic peptide
  Seed: RMCSLMQGSTLPRR
RMWSLMQPSTSPRR

SEQ ID NO: 122595 - protein, 14 aa, Artificial Sequence
  Description of Artificial Sequence: Synthetic peptide
  Seed: RMCSLMQGSTLPRR
RMWSLMQPSTVPRR

SEQ ID NO: 122596 - protein, 14 aa, Artificial Sequence
  Description of Artificial Sequence: Synthetic peptide
  Seed: RMCSLMQGSTLPRR
RMWSLMQSSTAPRR

SEQ ID NO: 122597 - protein, 14 aa, Artificial Sequence
  Description of Artificial Sequence: Synthetic peptide
  Seed: RMCSLMQGSTLPRR
RMWSLMQSSTIPRR

SEQ ID NO: 122598 - protein, 14 aa, Artificial Sequence
  Description of Artificial Sequence: Synthetic peptide
  Seed: RMCSLMQGSTLPRR
RMWSLMQSSTLPRR

SEQ ID NO: 122599 - protein, 14 aa, Artificial Sequence
  Description of Artificial Sequence: Synthetic peptide
  Seed: RMCSLMQGSTLPRR
RMWSLMQSSTMPRR

SEQ ID NO: 122600 - protein, 14 aa, Artificial Sequence
  Description of Artificial Sequence: Synthetic peptide
  Seed: RMCSLMQGSTLPRR
RMWSLMQSSTNPRR

SEQ ID NO: 122601 - protein, 14 aa, Artificial Sequence
  Description of Artificial Sequence: Synthetic peptide
  Seed: RMCSLMQGSTLPRR
RMWSLMQSSTSPRR

SEQ ID NO: 122602 - protein, 14 aa, Artificial Sequence
  Description of Artificial Sequence: Synthetic peptide
  Seed: RMCSLMQGSTLPRR
RMWSLMQSSTTPRR

SEQ ID NO: 122603 - protein, 14 aa, Artificial Sequence
  Description of Artificial Sequence: Synthetic peptide
  Seed: RMCSLMQGSTLPRR
RMWSLMQSSTVPRR

SEQ ID NO: 122604 - protein, 14 aa, Artificial Sequence
  Description of Artificial Sequence: Synthetic peptide
  Seed: RMCSLMQGSTLPRR
RMWSLMQTSTAPRR

SEQ ID NO: 122605 - protein, 14 aa, Artificial Sequence
  Description of Artificial Sequence: Synthetic peptide
  Seed: RMCSLMQGSTLPRR
RMWSLMQTSTIPRR

SEQ ID NO: 122606 - protein, 14 aa, Artificial Sequence
  Description of Artificial Sequence: Synthetic peptide
  Seed: RMCSLMQGSTLPRR
RMWSLMQTSTLPRR

SEQ ID NO: 122607 - protein, 14 aa, Artificial Sequence
  Description of Artificial Sequence: Synthetic peptide
  Seed: RMCSLMQGSTLPRR
RMWSLMQTSTNPRR

SEQ ID NO: 122608 - protein, 14 aa, Artificial Sequence
  Description of Artificial Sequence: Synthetic peptide
  Seed: RMCSLMQGSTLPRR
RMWSLMQTSTSPRR

SEQ ID NO: 122609 - protein, 14 aa, Artificial Sequence
  Description of Artificial Sequence: Synthetic peptide
  Seed: RMCSLMQGSTLPRR
RMWSLMQTSTTPRR

SEQ ID NO: 122610 - protein, 14 aa, Artificial Sequence
  Description of Artificial Sequence: Synthetic peptide
  Seed: RMCSLMQGSTLPRR
RMWSLMQTSTVPRR

SEQ ID NO: 122611 - protein, 14 aa, Artificial Sequence
  Description of Artificial Sequence: Synthetic peptide
  Seed: RMCSLMQGSTLPRR
RMWSLMQVSTAPRR

SEQ ID NO: 122612 - protein, 14 aa, Artificial Sequence
  Description of Artificial Sequence: Synthetic peptide
  Seed: RMCSLMQGSTLPRR
RMWSLMQVSTNPRR

SEQ ID NO: 122613 - protein, 14 aa, Artificial Sequence
  Description of Artificial Sequence: Synthetic peptide
  Seed: RMCSLMQGSTLPRR
RMWSLMQVSTSPRR

SEQ ID NO: 122614 - protein, 14 aa, Artificial Sequence
  Description of Artificial Sequence: Synthetic peptide
  Seed: RMCSLMQGSTLPRR
RMWSLMQVSTTPRR

SEQ ID NO: 122615 - protein, 14 aa, Artificial Sequence
  Description of Artificial Sequence: Synthetic peptide
  Seed: RMCSLMQGSTLPRR
RMWSLQQASTIPRR

SEQ ID NO: 122616 - protein, 14 aa, Artificial Sequence
  Description of Artificial Sequence: Synthetic peptide
  Seed: RMCSLMQGSTLPRR
RMWSLQQASTLPRR

SEQ ID NO: 122617 - protein, 14 aa, Artificial Sequence
  Description of Artificial Sequence: Synthetic peptide
  Seed: RMCSLMQGSTLPRR
RMWSLQQASTVPRR

SEQ ID NO: 122618 - protein, 14 aa, Artificial Sequence
  Description of Artificial Sequence: Synthetic peptide
  Seed: RMCSLMQGSTLPRR
RMWSLQQGSTLPRR

SEQ ID NO: 122619 - protein, 14 aa, Artificial Sequence
  Description of Artificial Sequence: Synthetic peptide
  Seed: RMCSLMQGSTLPRR
RMWSLQQGSTVPRR

SEQ ID NO: 122620 - protein, 14 aa, Artificial Sequence
  Description of Artificial Sequence: Synthetic peptide
  Seed: RMCSLMQGSTLPRR
RMWSLQQSSTLPRR

SEQ ID NO: 122621 - protein, 14 aa, Artificial Sequence
  Description of Artificial Sequence: Synthetic peptide
  Seed: RMCSLMQGSTLPRR
RMWSLQQSSTVPRR

SEQ ID NO: 122622 - protein, 14 aa, Artificial Sequence
  Description of Artificial Sequence: Synthetic peptide
  Seed: RMCSLMQGSTLPRR
RMWSLVQASTAPRR

SEQ ID NO: 122623 - protein, 14 aa, Artificial Sequence
  Description of Artificial Sequence: Synthetic peptide
  Seed: RMCSLMQGSTLPRR
RMWSLVQASTIPRR

SEQ ID NO: 122624 - protein, 14 aa, Artificial Sequence
  Description of Artificial Sequence: Synthetic peptide
  Seed: RMCSLMQGSTLPRR
RMWSLVQASTLPRR

SEQ ID NO: 122625 - protein, 14 aa, Artificial Sequence
  Description of Artificial Sequence: Synthetic peptide
  Seed: RMCSLMQGSTLPRR
RMWSLVQASTVPRR

SEQ ID NO: 122626 - protein, 14 aa, Artificial Sequence
  Description of Artificial Sequence: Synthetic peptide
  Seed: RMCSLMQGSTLPRR
RMWSLVQGSTLPRR

SEQ ID NO: 122627 - protein, 14 aa, Artificial Sequence
  Description of Artificial Sequence: Synthetic peptide
  Seed: RMCSLMQGSTLPRR
RMWSLVQGSTVPRR

SEQ ID NO: 122628 - protein, 14 aa, Artificial Sequence
  Description of Artificial Sequence: Synthetic peptide
  Seed: RMCSLMQGSTLPRR
RMYSLAQASTAPRR

SEQ ID NO: 122629 - protein, 14 aa, Artificial Sequence
  Description of Artificial Sequence: Synthetic peptide
  Seed: RMCSLMQGSTLPRR
RMYSLAQASTIPRR

SEQ ID NO: 122630 - protein, 14 aa, Artificial Sequence
  Description of Artificial Sequence: Synthetic peptide
  Seed: RMCSLMQGSTLPRR
RMYSLAQASTLPRR

SEQ ID NO: 122631 - protein, 14 aa, Artificial Sequence
  Description of Artificial Sequence: Synthetic peptide
  Seed: RMCSLMQGSTLPRR
RMYSLAQASTMPRR

SEQ ID NO: 122632 - protein, 14 aa, Artificial Sequence
  Description of Artificial Sequence: Synthetic peptide
  Seed: RMCSLMQGSTLPRR
RMYSLAQASTNPRR

SEQ ID NO: 122633 - protein, 14 aa, Artificial Sequence
  Description of Artificial Sequence: Synthetic peptide
  Seed: RMCSLMQGSTLPRR
RMYSLAQASTSPRR

SEQ ID NO: 122634 - protein, 14 aa, Artificial Sequence
  Description of Artificial Sequence: Synthetic peptide
  Seed: RMCSLMQGSTLPRR
RMYSLAQASTTPRR

SEQ ID NO: 122635 - protein, 14 aa, Artificial Sequence
  Description of Artificial Sequence: Synthetic peptide
  Seed: RMCSLMQGSTLPRR
RMYSLAQASTVPRR

SEQ ID NO: 122636 - protein, 14 aa, Artificial Sequence
  Description of Artificial Sequence: Synthetic peptide
  Seed: RMCSLMQGSTLPRR
RMYSLAQGSTAPRR

SEQ ID NO: 122637 - protein, 14 aa, Artificial Sequence
  Description of Artificial Sequence: Synthetic peptide
  Seed: RMCSLMQGSTLPRR
RMYSLAQGSTIPRR

SEQ ID NO: 122638 - protein, 14 aa, Artificial Sequence
  Description of Artificial Sequence: Synthetic peptide
  Seed: RMCSLMQGSTLPRR
RMYSLAQGSTLPRR

SEQ ID NO: 122639 - protein, 14 aa, Artificial Sequence
  Description of Artificial Sequence: Synthetic peptide
  Seed: RMCSLMQGSTLPRR
RMYSLAQGSTMPRR

SEQ ID NO: 122640 - protein, 14 aa, Artificial Sequence
  Description of Artificial Sequence: Synthetic peptide
  Seed: RMCSLMQGSTLPRR
RMYSLAQGSTVPRR

SEQ ID NO: 122641 - protein, 14 aa, Artificial Sequence
  Description of Artificial Sequence: Synthetic peptide
  Seed: RMCSLMQGSTLPRR
RMYSLAQISTAPRR

SEQ ID NO: 122642 - protein, 14 aa, Artificial Sequence
  Description of Artificial Sequence: Synthetic peptide
  Seed: RMCSLMQGSTLPRR
RMYSLAQISTNPRR

SEQ ID NO: 122643 - protein, 14 aa, Artificial Sequence
  Description of Artificial Sequence: Synthetic peptide
  Seed: RMCSLMQGSTLPRR
RMYSLAQISTSPRR

SEQ ID NO: 122644 - protein, 14 aa, Artificial Sequence
  Description of Artificial Sequence: Synthetic peptide
  Seed: RMCSLMQGSTLPRR
RMYSLAQNSTIPRR

SEQ ID NO: 122645 - protein, 14 aa, Artificial Sequence
  Description of Artificial Sequence: Synthetic peptide
  Seed: RMCSLMQGSTLPRR
RMYSLAQNSTLPRR

SEQ ID NO: 122646 - protein, 14 aa, Artificial Sequence
  Description of Artificial Sequence: Synthetic peptide
  Seed: RMCSLMQGSTLPRR
RMYSLAQNSTVPRR

SEQ ID NO: 122647 - protein, 14 aa, Artificial Sequence
  Description of Artificial Sequence: Synthetic peptide
  Seed: RMCSLMQGSTLPRR
RMYSLAQPSTAPRR

SEQ ID NO: 122648 - protein, 14 aa, Artificial Sequence
  Description of Artificial Sequence: Synthetic peptide
  Seed: RMCSLMQGSTLPRR
RMYSLAQPSTIPRR

SEQ ID NO: 122649 - protein, 14 aa, Artificial Sequence
  Description of Artificial Sequence: Synthetic peptide
  Seed: RMCSLMQGSTLPRR
RMYSLAQPSTLPRR

SEQ ID NO: 122650 - protein, 14 aa, Artificial Sequence
  Description of Artificial Sequence: Synthetic peptide
  Seed: RMCSLMQGSTLPRR
RMYSLAQPSTSPRR

SEQ ID NO: 122651 - protein, 14 aa, Artificial Sequence
  Description of Artificial Sequence: Synthetic peptide
  Seed: RMCSLMQGSTLPRR
RMYSLAQPSTVPRR

SEQ ID NO: 122652 - protein, 14 aa, Artificial Sequence
  Description of Artificial Sequence: Synthetic peptide
  Seed: RMCSLMQGSTLPRR
RMYSLAQSSTAPRR

SEQ ID NO: 122653 - protein, 14 aa, Artificial Sequence
  Description of Artificial Sequence: Synthetic peptide
  Seed: RMCSLMQGSTLPRR
RMYSLAQSSTIPRR

SEQ ID NO: 122654 - protein, 14 aa, Artificial Sequence
  Description of Artificial Sequence: Synthetic peptide
  Seed: RMCSLMQGSTLPRR
RMYSLAQSSTLPRR

SEQ ID NO: 122655 - protein, 14 aa, Artificial Sequence
  Description of Artificial Sequence: Synthetic peptide
  Seed: RMCSLMQGSTLPRR
RMYSLAQSSTMPRR

SEQ ID NO: 122656 - protein, 14 aa, Artificial Sequence
  Description of Artificial Sequence: Synthetic peptide
  Seed: RMCSLMQGSTLPRR
RMYSLAQSSTSPRR

SEQ ID NO: 122657 - protein, 14 aa, Artificial Sequence
  Description of Artificial Sequence: Synthetic peptide
  Seed: RMCSLMQGSTLPRR
RMYSLAQSSTVPRR

SEQ ID NO: 122658 - protein, 14 aa, Artificial Sequence
  Description of Artificial Sequence: Synthetic peptide
  Seed: RMCSLMQGSTLPRR
RMYSLAQTSTAPRR

SEQ ID NO: 122659 - protein, 14 aa, Artificial Sequence
  Description of Artificial Sequence: Synthetic peptide
  Seed: RMCSLMQGSTLPRR
RMYSLAQTSTIPRR

SEQ ID NO: 122660 - protein, 14 aa, Artificial Sequence
  Description of Artificial Sequence: Synthetic peptide
  Seed: RMCSLMQGSTLPRR
RMYSLAQTSTLPRR

SEQ ID NO: 122661 - protein, 14 aa, Artificial Sequence
  Description of Artificial Sequence: Synthetic peptide
  Seed: RMCSLMQGSTLPRR
RMYSLAQTSTVPRR

SEQ ID NO: 122662 - protein, 14 aa, Artificial Sequence
  Description of Artificial Sequence: Synthetic peptide
  Seed: RMCSLMQGSTLPRR
RMYSLAQVSTAPRR

SEQ ID NO: 122663 - protein, 14 aa, Artificial Sequence
  Description of Artificial Sequence: Synthetic peptide
  Seed: RMCSLMQGSTLPRR
RMYSLAQVSTNPRR

SEQ ID NO: 122664 - protein, 14 aa, Artificial Sequence
  Description of Artificial Sequence: Synthetic peptide
  Seed: RMCSLMQGSTLPRR
RMYSLAQVSTSPRR

SEQ ID NO: 122665 - protein, 14 aa, Artificial Sequence
  Description of Artificial Sequence: Synthetic peptide
  Seed: RMCSLMQGSTLPRR
RMYSLEQASTLPRR

SEQ ID NO: 122666 - protein, 14 aa, Artificial Sequence
  Description of Artificial Sequence: Synthetic peptide
  Seed: RMCSLMQGSTLPRR
RMYSLFQASTAPRR

SEQ ID NO: 122667 - protein, 14 aa, Artificial Sequence
  Description of Artificial Sequence: Synthetic peptide
  Seed: RMCSLMQGSTLPRR
RMYSLFQASTIPRR

SEQ ID NO: 122668 - protein, 14 aa, Artificial Sequence
  Description of Artificial Sequence: Synthetic peptide
  Seed: RMCSLMQGSTLPRR
RMYSLFQASTLPRR

SEQ ID NO: 122669 - protein, 14 aa, Artificial Sequence
  Description of Artificial Sequence: Synthetic peptide
  Seed: RMCSLMQGSTLPRR
RMYSLFQASTVPRR

SEQ ID NO: 122670 - protein, 14 aa, Artificial Sequence
  Description of Artificial Sequence: Synthetic peptide
  Seed: RMCSLMQGSTLPRR
RMYSLGQASTLPRR

SEQ ID NO: 122671 - protein, 14 aa, Artificial Sequence
  Description of Artificial Sequence: Synthetic peptide
  Seed: RMCSLMQGSTLPRR
RMYSLIQASTAPRR

SEQ ID NO: 122672 - protein, 14 aa, Artificial Sequence
  Description of Artificial Sequence: Synthetic peptide
  Seed: RMCSLMQGSTLPRR
RMYSLIQASTGPRR

SEQ ID NO: 122673 - protein, 14 aa, Artificial Sequence
  Description of Artificial Sequence: Synthetic peptide
  Seed: RMCSLMQGSTLPRR
RMYSLIQASTIPRR

SEQ ID NO: 122674 - protein, 14 aa, Artificial Sequence
  Description of Artificial Sequence: Synthetic peptide
  Seed: RMCSLMQGSTLPRR
RMYSLIQASTLPRR

SEQ ID NO: 122675 - protein, 14 aa, Artificial Sequence
  Description of Artificial Sequence: Synthetic peptide
  Seed: RMCSLMQGSTLPRR
RMYSLIQASTMPRR

SEQ ID NO: 122676 - protein, 14 aa, Artificial Sequence
  Description of Artificial Sequence: Synthetic peptide
  Seed: RMCSLMQGSTLPRR
RMYSLIQASTNPRR

SEQ ID NO: 122677 - protein, 14 aa, Artificial Sequence
  Description of Artificial Sequence: Synthetic peptide
  Seed: RMCSLMQGSTLPRR
RMYSLIQASTSPRR

SEQ ID NO: 122678 - protein, 14 aa, Artificial Sequence
  Description of Artificial Sequence: Synthetic peptide
  Seed: RMCSLMQGSTLPRR
RMYSLIQASTTPRR

SEQ ID NO: 122679 - protein, 14 aa, Artificial Sequence
  Description of Artificial Sequence: Synthetic peptide
  Seed: RMCSLMQGSTLPRR
RMYSLIQASTVPRR

SEQ ID NO: 122680 - protein, 14 aa, Artificial Sequence
  Description of Artificial Sequence: Synthetic peptide
  Seed: RMCSLMQGSTLPRR
RMYSLIQGSTAPRR

SEQ ID NO: 122681 - protein, 14 aa, Artificial Sequence
  Description of Artificial Sequence: Synthetic peptide
  Seed: RMCSLMQGSTLPRR
RMYSLIQGSTIPRR

SEQ ID NO: 122682 - protein, 14 aa, Artificial Sequence
  Description of Artificial Sequence: Synthetic peptide
  Seed: RMCSLMQGSTLPRR
RMYSLIQGSTLPRR

SEQ ID NO: 122683 - protein, 14 aa, Artificial Sequence
  Description of Artificial Sequence: Synthetic peptide
  Seed: RMCSLMQGSTLPRR
RMYSLIQGSTMPRR

SEQ ID NO: 122684 - protein, 14 aa, Artificial Sequence
  Description of Artificial Sequence: Synthetic peptide
  Seed: RMCSLMQGSTLPRR
RMYSLIQGSTNPRR

SEQ ID NO: 122685 - protein, 14 aa, Artificial Sequence
  Description of Artificial Sequence: Synthetic peptide
  Seed: RMCSLMQGSTLPRR
RMYSLIQGSTSPRR

SEQ ID NO: 122686 - protein, 14 aa, Artificial Sequence
  Description of Artificial Sequence: Synthetic peptide
  Seed: RMCSLMQGSTLPRR
RMYSLIQGSTTPRR

SEQ ID NO: 122687 - protein, 14 aa, Artificial Sequence
  Description of Artificial Sequence: Synthetic peptide
  Seed: RMCSLMQGSTLPRR
RMYSLIQGSTVPRR

SEQ ID NO: 122688 - protein, 14 aa, Artificial Sequence
  Description of Artificial Sequence: Synthetic peptide
  Seed: RMCSLMQGSTLPRR
RMYSLIQISTAPRR

SEQ ID NO: 122689 - protein, 14 aa, Artificial Sequence
  Description of Artificial Sequence: Synthetic peptide
  Seed: RMCSLMQGSTLPRR
RMYSLIQISTNPRR

SEQ ID NO: 122690 - protein, 14 aa, Artificial Sequence
  Description of Artificial Sequence: Synthetic peptide
  Seed: RMCSLMQGSTLPRR
RMYSLIQISTSPRR

SEQ ID NO: 122691 - protein, 14 aa, Artificial Sequence
  Description of Artificial Sequence: Synthetic peptide
  Seed: RMCSLMQGSTLPRR
RMYSLIQISTTPRR

SEQ ID NO: 122692 - protein, 14 aa, Artificial Sequence
  Description of Artificial Sequence: Synthetic peptide
  Seed: RMCSLMQGSTLPRR
RMYSLIQISTVPRR

SEQ ID NO: 122693 - protein, 14 aa, Artificial Sequence
  Description of Artificial Sequence: Synthetic peptide
  Seed: RMCSLMQGSTLPRR
RMYSLIQNSTAPRR

SEQ ID NO: 122694 - protein, 14 aa, Artificial Sequence
  Description of Artificial Sequence: Synthetic peptide
  Seed: RMCSLMQGSTLPRR
RMYSLIQNSTIPRR

SEQ ID NO: 122695 - protein, 14 aa, Artificial Sequence
  Description of Artificial Sequence: Synthetic peptide
  Seed: RMCSLMQGSTLPRR
RMYSLIQNSTLPRR

SEQ ID NO: 122696 - protein, 14 aa, Artificial Sequence
  Description of Artificial Sequence: Synthetic peptide
  Seed: RMCSLMQGSTLPRR
RMYSLIQNSTSPRR

SEQ ID NO: 122697 - protein, 14 aa, Artificial Sequence
  Description of Artificial Sequence: Synthetic peptide
  Seed: RMCSLMQGSTLPRR
RMYSLIQNSTVPRR

SEQ ID NO: 122698 - protein, 14 aa, Artificial Sequence
  Description of Artificial Sequence: Synthetic peptide
  Seed: RMCSLMQGSTLPRR
RMYSLIQPSTAPRR

SEQ ID NO: 122699 - protein, 14 aa, Artificial Sequence
  Description of Artificial Sequence: Synthetic peptide
  Seed: RMCSLMQGSTLPRR
RMYSLIQPSTIPRR

SEQ ID NO: 122700 - protein, 14 aa, Artificial Sequence
  Description of Artificial Sequence: Synthetic peptide
  Seed: RMCSLMQGSTLPRR
RMYSLIQPSTLPRR

SEQ ID NO: 122701 - protein, 14 aa, Artificial Sequence
  Description of Artificial Sequence: Synthetic peptide
  Seed: RMCSLMQGSTLPRR
RMYSLIQPSTMPRR

SEQ ID NO: 122702 - protein, 14 aa, Artificial Sequence
  Description of Artificial Sequence: Synthetic peptide
  Seed: RMCSLMQGSTLPRR
RMYSLIQPSTNPRR

SEQ ID NO: 122703 - protein, 14 aa, Artificial Sequence
  Description of Artificial Sequence: Synthetic peptide
  Seed: RMCSLMQGSTLPRR
RMYSLIQPSTSPRR

SEQ ID NO: 122704 - protein, 14 aa, Artificial Sequence
  Description of Artificial Sequence: Synthetic peptide
  Seed: RMCSLMQGSTLPRR
RMYSLIQPSTTPRR

SEQ ID NO: 122705 - protein, 14 aa, Artificial Sequence
  Description of Artificial Sequence: Synthetic peptide
  Seed: RMCSLMQGSTLPRR
RMYSLIQPSTVPRR

SEQ ID NO: 122706 - protein, 14 aa, Artificial Sequence
  Description of Artificial Sequence: Synthetic peptide
  Seed: RMCSLMQGSTLPRR
RMYSLIQSSTAPRR

SEQ ID NO: 122707 - protein, 14 aa, Artificial Sequence
  Description of Artificial Sequence: Synthetic peptide
  Seed: RMCSLMQGSTLPRR
RMYSLIQSSTIPRR

SEQ ID NO: 122708 - protein, 14 aa, Artificial Sequence
  Description of Artificial Sequence: Synthetic peptide
  Seed: RMCSLMQGSTLPRR
RMYSLIQSSTLPRR

SEQ ID NO: 122709 - protein, 14 aa, Artificial Sequence
  Description of Artificial Sequence: Synthetic peptide
  Seed: RMCSLMQGSTLPRR
RMYSLIQSSTMPRR

SEQ ID NO: 122710 - protein, 14 aa, Artificial Sequence
  Description of Artificial Sequence: Synthetic peptide
  Seed: RMCSLMQGSTLPRR
RMYSLIQSSTNPRR

SEQ ID NO: 122711 - protein, 14 aa, Artificial Sequence
  Description of Artificial Sequence: Synthetic peptide
  Seed: RMCSLMQGSTLPRR
RMYSLIQSSTSPRR

SEQ ID NO: 122712 - protein, 14 aa, Artificial Sequence
  Description of Artificial Sequence: Synthetic peptide
  Seed: RMCSLMQGSTLPRR
RMYSLIQSSTTPRR

SEQ ID NO: 122713 - protein, 14 aa, Artificial Sequence
  Description of Artificial Sequence: Synthetic peptide
  Seed: RMCSLMQGSTLPRR
RMYSLIQSSTVPRR

SEQ ID NO: 122714 - protein, 14 aa, Artificial Sequence
  Description of Artificial Sequence: Synthetic peptide
  Seed: RMCSLMQGSTLPRR
RMYSLIQTSTAPRR

SEQ ID NO: 122715 - protein, 14 aa, Artificial Sequence
  Description of Artificial Sequence: Synthetic peptide
  Seed: RMCSLMQGSTLPRR
RMYSLIQTSTIPRR

SEQ ID NO: 122716 - protein, 14 aa, Artificial Sequence
  Description of Artificial Sequence: Synthetic peptide
  Seed: RMCSLMQGSTLPRR
RMYSLIQTSTLPRR

SEQ ID NO: 122717 - protein, 14 aa, Artificial Sequence
  Description of Artificial Sequence: Synthetic peptide
  Seed: RMCSLMQGSTLPRR
RMYSLIQTSTMPRR

SEQ ID NO: 122718 - protein, 14 aa, Artificial Sequence
  Description of Artificial Sequence: Synthetic peptide
  Seed: RMCSLMQGSTLPRR
RMYSLIQTSTNPRR

SEQ ID NO: 122719 - protein, 14 aa, Artificial Sequence
  Description of Artificial Sequence: Synthetic peptide
  Seed: RMCSLMQGSTLPRR
RMYSLIQTSTSPRR

SEQ ID NO: 122720 - protein, 14 aa, Artificial Sequence
  Description of Artificial Sequence: Synthetic peptide
  Seed: RMCSLMQGSTLPRR
RMYSLIQTSTTPRR

SEQ ID NO: 122721 - protein, 14 aa, Artificial Sequence
  Description of Artificial Sequence: Synthetic peptide
  Seed: RMCSLMQGSTLPRR
RMYSLIQTSTVPRR

SEQ ID NO: 122722 - protein, 14 aa, Artificial Sequence
  Description of Artificial Sequence: Synthetic peptide
  Seed: RMCSLMQGSTLPRR
RMYSLIQVSTAPRR

SEQ ID NO: 122723 - protein, 14 aa, Artificial Sequence
  Description of Artificial Sequence: Synthetic peptide
  Seed: RMCSLMQGSTLPRR
RMYSLIQVSTIPRR

SEQ ID NO: 122724 - protein, 14 aa, Artificial Sequence
  Description of Artificial Sequence: Synthetic peptide
  Seed: RMCSLMQGSTLPRR
RMYSLIQVSTLPRR

SEQ ID NO: 122725 - protein, 14 aa, Artificial Sequence
  Description of Artificial Sequence: Synthetic peptide
  Seed: RMCSLMQGSTLPRR
RMYSLIQVSTMPRR

SEQ ID NO: 122726 - protein, 14 aa, Artificial Sequence
  Description of Artificial Sequence: Synthetic peptide
  Seed: RMCSLMQGSTLPRR
RMYSLIQVSTNPRR

SEQ ID NO: 122727 - protein, 14 aa, Artificial Sequence
  Description of Artificial Sequence: Synthetic peptide
  Seed: RMCSLMQGSTLPRR
RMYSLIQVSTSPRR

SEQ ID NO: 122728 - protein, 14 aa, Artificial Sequence
  Description of Artificial Sequence: Synthetic peptide
  Seed: RMCSLMQGSTLPRR
RMYSLIQVSTTPRR

SEQ ID NO: 122729 - protein, 14 aa, Artificial Sequence
  Description of Artificial Sequence: Synthetic peptide
  Seed: RMCSLMQGSTLPRR
RMYSLIQVSTVPRR

SEQ ID NO: 122730 - protein, 14 aa, Artificial Sequence
  Description of Artificial Sequence: Synthetic peptide
  Seed: RMCSLMQGSTLPRR
RMYSLLQASTAPRR

SEQ ID NO: 122731 - protein, 14 aa, Artificial Sequence
  Description of Artificial Sequence: Synthetic peptide
  Seed: RMCSLMQGSTLPRR
RMYSLLQASTCPRR

SEQ ID NO: 122732 - protein, 14 aa, Artificial Sequence
  Description of Artificial Sequence: Synthetic peptide
  Seed: RMCSLMQGSTLPRR
RMYSLLQASTFPRR

SEQ ID NO: 122733 - protein, 14 aa, Artificial Sequence
  Description of Artificial Sequence: Synthetic peptide
  Seed: RMCSLMQGSTLPRR
RMYSLLQASTGPRR

SEQ ID NO: 122734 - protein, 14 aa, Artificial Sequence
  Description of Artificial Sequence: Synthetic peptide
  Seed: RMCSLMQGSTLPRR
RMYSLLQASTHPRR

SEQ ID NO: 122735 - protein, 14 aa, Artificial Sequence
  Description of Artificial Sequence: Synthetic peptide
  Seed: RMCSLMQGSTLPRR
RMYSLLQASTIPRR

SEQ ID NO: 122736 - protein, 14 aa, Artificial Sequence
  Description of Artificial Sequence: Synthetic peptide
  Seed: RMCSLMQGSTLPRR
RMYSLLQASTLPRR

SEQ ID NO: 122737 - protein, 14 aa, Artificial Sequence
  Description of Artificial Sequence: Synthetic peptide
  Seed: RMCSLMQGSTLPRR
RMYSLLQASTMPRR

SEQ ID NO: 122738 - protein, 14 aa, Artificial Sequence
  Description of Artificial Sequence: Synthetic peptide
  Seed: RMCSLMQGSTLPRR
RMYSLLQASTNPRR

SEQ ID NO: 122739 - protein, 14 aa, Artificial Sequence
  Description of Artificial Sequence: Synthetic peptide
  Seed: RMCSLMQGSTLPRR
RMYSLLQASTPPRR

SEQ ID NO: 122740 - protein, 14 aa, Artificial Sequence
  Description of Artificial Sequence: Synthetic peptide
  Seed: RMCSLMQGSTLPRR
RMYSLLQASTQPRR

SEQ ID NO: 122741 - protein, 14 aa, Artificial Sequence
  Description of Artificial Sequence: Synthetic peptide
  Seed: RMCSLMQGSTLPRR
RMYSLLQASTSPRR

SEQ ID NO: 122742 - protein, 14 aa, Artificial Sequence
  Description of Artificial Sequence: Synthetic peptide
  Seed: RMCSLMQGSTLPRR
RMYSLLQASTTPRR

SEQ ID NO: 122743 - protein, 14 aa, Artificial Sequence
  Description of Artificial Sequence: Synthetic peptide
  Seed: RMCSLMQGSTLPRR
RMYSLLQASTVPRR

SEQ ID NO: 122744 - protein, 14 aa, Artificial Sequence
  Description of Artificial Sequence: Synthetic peptide
  Seed: RMCSLMQGSTLPRR
RMYSLLQGSTAPRR

SEQ ID NO: 122745 - protein, 14 aa, Artificial Sequence
  Description of Artificial Sequence: Synthetic peptide
  Seed: RMCSLMQGSTLPRR
RMYSLLQGSTCPRR

SEQ ID NO: 122746 - protein, 14 aa, Artificial Sequence
  Description of Artificial Sequence: Synthetic peptide
  Seed: RMCSLMQGSTLPRR
RMYSLLQGSTFPRR

SEQ ID NO: 122747 - protein, 14 aa, Artificial Sequence
  Description of Artificial Sequence: Synthetic peptide
  Seed: RMCSLMQGSTLPRR
RMYSLLQGSTGPRR

SEQ ID NO: 122748 - protein, 14 aa, Artificial Sequence
  Description of Artificial Sequence: Synthetic peptide
  Seed: RMCSLMQGSTLPRR
RMYSLLQGSTIPRR

SEQ ID NO: 122749 - protein, 14 aa, Artificial Sequence
  Description of Artificial Sequence: Synthetic peptide
  Seed: RMCSLMQGSTLPRR
RMYSLLQGSTLPRR

SEQ ID NO: 122750 - protein, 14 aa, Artificial Sequence
  Description of Artificial Sequence: Synthetic peptide
  Seed: RMCSLMQGSTLPRR
RMYSLLQGSTMPRR

SEQ ID NO: 122751 - protein, 14 aa, Artificial Sequence
  Description of Artificial Sequence: Synthetic peptide
  Seed: RMCSLMQGSTLPRR
RMYSLLQGSTNPRR

SEQ ID NO: 122752 - protein, 14 aa, Artificial Sequence
  Description of Artificial Sequence: Synthetic peptide
  Seed: RMCSLMQGSTLPRR
RMYSLLQGSTSPRR

SEQ ID NO: 122753 - protein, 14 aa, Artificial Sequence
  Description of Artificial Sequence: Synthetic peptide
  Seed: RMCSLMQGSTLPRR
RMYSLLQGSTTPRR

SEQ ID NO: 122754 - protein, 14 aa, Artificial Sequence
  Description of Artificial Sequence: Synthetic peptide
  Seed: RMCSLMQGSTLPRR
RMYSLLQGSTVPRR

SEQ ID NO: 122755 - protein, 14 aa, Artificial Sequence
  Description of Artificial Sequence: Synthetic peptide
  Seed: RMCSLMQGSTLPRR
RMYSLLQISTAPRR

SEQ ID NO: 122756 - protein, 14 aa, Artificial Sequence
  Description of Artificial Sequence: Synthetic peptide
  Seed: RMCSLMQGSTLPRR
RMYSLLQISTIPRR

SEQ ID NO: 122757 - protein, 14 aa, Artificial Sequence
  Description of Artificial Sequence: Synthetic peptide
  Seed: RMCSLMQGSTLPRR
RMYSLLQISTLPRR

SEQ ID NO: 122758 - protein, 14 aa, Artificial Sequence
  Description of Artificial Sequence: Synthetic peptide
  Seed: RMCSLMQGSTLPRR
RMYSLLQISTMPRR

SEQ ID NO: 122759 - protein, 14 aa, Artificial Sequence
  Description of Artificial Sequence: Synthetic peptide
  Seed: RMCSLMQGSTLPRR
RMYSLLQISTNPRR

SEQ ID NO: 122760 - protein, 14 aa, Artificial Sequence
  Description of Artificial Sequence: Synthetic peptide
  Seed: RMCSLMQGSTLPRR
RMYSLLQISTSPRR

SEQ ID NO: 122761 - protein, 14 aa, Artificial Sequence
  Description of Artificial Sequence: Synthetic peptide
  Seed: RMCSLMQGSTLPRR
RMYSLLQISTTPRR

SEQ ID NO: 122762 - protein, 14 aa, Artificial Sequence
  Description of Artificial Sequence: Synthetic peptide
  Seed: RMCSLMQGSTLPRR
RMYSLLQISTVPRR

SEQ ID NO: 122763 - protein, 14 aa, Artificial Sequence
  Description of Artificial Sequence: Synthetic peptide
  Seed: RMCSLMQGSTLPRR
RMYSLLQLSTAPRR

SEQ ID NO: 122764 - protein, 14 aa, Artificial Sequence
  Description of Artificial Sequence: Synthetic peptide
  Seed: RMCSLMQGSTLPRR
RMYSLLQMSTAPRR

SEQ ID NO: 122765 - protein, 14 aa, Artificial Sequence
  Description of Artificial Sequence: Synthetic peptide
  Seed: RMCSLMQGSTLPRR
RMYSLLQNSTAPRR

SEQ ID NO: 122766 - protein, 14 aa, Artificial Sequence
  Description of Artificial Sequence: Synthetic peptide
  Seed: RMCSLMQGSTLPRR
RMYSLLQNSTIPRR

SEQ ID NO: 122767 - protein, 14 aa, Artificial Sequence
  Description of Artificial Sequence: Synthetic peptide
  Seed: RMCSLMQGSTLPRR
RMYSLLQNSTLPRR

SEQ ID NO: 122768 - protein, 14 aa, Artificial Sequence
  Description of Artificial Sequence: Synthetic peptide
  Seed: RMCSLMQGSTLPRR
RMYSLLQNSTMPRR

SEQ ID NO: 122769 - protein, 14 aa, Artificial Sequence
  Description of Artificial Sequence: Synthetic peptide
  Seed: RMCSLMQGSTLPRR
RMYSLLQNSTNPRR

SEQ ID NO: 122770 - protein, 14 aa, Artificial Sequence
  Description of Artificial Sequence: Synthetic peptide
  Seed: RMCSLMQGSTLPRR
RMYSLLQNSTSPRR

SEQ ID NO: 122771 - protein, 14 aa, Artificial Sequence
  Description of Artificial Sequence: Synthetic peptide
  Seed: RMCSLMQGSTLPRR
RMYSLLQNSTTPRR

SEQ ID NO: 122772 - protein, 14 aa, Artificial Sequence
  Description of Artificial Sequence: Synthetic peptide
  Seed: RMCSLMQGSTLPRR
RMYSLLQNSTVPRR

SEQ ID NO: 122773 - protein, 14 aa, Artificial Sequence
  Description of Artificial Sequence: Synthetic peptide
  Seed: RMCSLMQGSTLPRR
RMYSLLQPSTAPRR

SEQ ID NO: 122774 - protein, 14 aa, Artificial Sequence
  Description of Artificial Sequence: Synthetic peptide
  Seed: RMCSLMQGSTLPRR
RMYSLLQPSTGPRR

SEQ ID NO: 122775 - protein, 14 aa, Artificial Sequence
  Description of Artificial Sequence: Synthetic peptide
  Seed: RMCSLMQGSTLPRR
RMYSLLQPSTIPRR

SEQ ID NO: 122776 - protein, 14 aa, Artificial Sequence
  Description of Artificial Sequence: Synthetic peptide
  Seed: RMCSLMQGSTLPRR
RMYSLLQPSTLPRR

SEQ ID NO: 122777 - protein, 14 aa, Artificial Sequence
  Description of Artificial Sequence: Synthetic peptide
  Seed: RMCSLMQGSTLPRR
RMYSLLQPSTMPRR

SEQ ID NO: 122778 - protein, 14 aa, Artificial Sequence
  Description of Artificial Sequence: Synthetic peptide
  Seed: RMCSLMQGSTLPRR
RMYSLLQPSTNPRR

SEQ ID NO: 122779 - protein, 14 aa, Artificial Sequence
  Description of Artificial Sequence: Synthetic peptide
  Seed: RMCSLMQGSTLPRR
RMYSLLQPSTSPRR

SEQ ID NO: 122780 - protein, 14 aa, Artificial Sequence
  Description of Artificial Sequence: Synthetic peptide
  Seed: RMCSLMQGSTLPRR
RMYSLLQPSTTPRR

SEQ ID NO: 122781 - protein, 14 aa, Artificial Sequence
  Description of Artificial Sequence: Synthetic peptide
  Seed: RMCSLMQGSTLPRR
RMYSLLQPSTVPRR

SEQ ID NO: 122782 - protein, 14 aa, Artificial Sequence
  Description of Artificial Sequence: Synthetic peptide
  Seed: RMCSLMQGSTLPRR
RMYSLLQSSTAPRR

SEQ ID NO: 122783 - protein, 14 aa, Artificial Sequence
  Description of Artificial Sequence: Synthetic peptide
  Seed: RMCSLMQGSTLPRR
RMYSLLQSSTCPRR

SEQ ID NO: 122784 - protein, 14 aa, Artificial Sequence
  Description of Artificial Sequence: Synthetic peptide
  Seed: RMCSLMQGSTLPRR
RMYSLLQSSTGPRR

SEQ ID NO: 122785 - protein, 14 aa, Artificial Sequence
  Description of Artificial Sequence: Synthetic peptide
  Seed: RMCSLMQGSTLPRR
RMYSLLQSSTIPRR

SEQ ID NO: 122786 - protein, 14 aa, Artificial Sequence
  Description of Artificial Sequence: Synthetic peptide
  Seed: RMCSLMQGSTLPRR
RMYSLLQSSTLPRR

SEQ ID NO: 122787 - protein, 14 aa, Artificial Sequence
  Description of Artificial Sequence: Synthetic peptide
  Seed: RMCSLMQGSTLPRR
RMYSLLQSSTMPRR

SEQ ID NO: 122788 - protein, 14 aa, Artificial Sequence
  Description of Artificial Sequence: Synthetic peptide
  Seed: RMCSLMQGSTLPRR
RMYSLLQSSTNPRR

SEQ ID NO: 122789 - protein, 14 aa, Artificial Sequence
  Description of Artificial Sequence: Synthetic peptide
  Seed: RMCSLMQGSTLPRR
RMYSLLQSSTSPRR

SEQ ID NO: 122790 - protein, 14 aa, Artificial Sequence
  Description of Artificial Sequence: Synthetic peptide
  Seed: RMCSLMQGSTLPRR
RMYSLLQSSTTPRR

SEQ ID NO: 122791 - protein, 14 aa, Artificial Sequence
  Description of Artificial Sequence: Synthetic peptide
  Seed: RMCSLMQGSTLPRR
RMYSLLQSSTVPRR

SEQ ID NO: 122792 - protein, 14 aa, Artificial Sequence
  Description of Artificial Sequence: Synthetic peptide
  Seed: RMCSLMQGSTLPRR
RMYSLLQTSTAPRR

SEQ ID NO: 122793 - protein, 14 aa, Artificial Sequence
  Description of Artificial Sequence: Synthetic peptide
  Seed: RMCSLMQGSTLPRR
RMYSLLQTSTIPRR

SEQ ID NO: 122794 - protein, 14 aa, Artificial Sequence
  Description of Artificial Sequence: Synthetic peptide
  Seed: RMCSLMQGSTLPRR
RMYSLLQTSTLPRR

SEQ ID NO: 122795 - protein, 14 aa, Artificial Sequence
  Description of Artificial Sequence: Synthetic peptide
  Seed: RMCSLMQGSTLPRR
RMYSLLQTSTMPRR

SEQ ID NO: 122796 - protein, 14 aa, Artificial Sequence
  Description of Artificial Sequence: Synthetic peptide
  Seed: RMCSLMQGSTLPRR
RMYSLLQTSTNPRR

SEQ ID NO: 122797 - protein, 14 aa, Artificial Sequence
  Description of Artificial Sequence: Synthetic peptide
  Seed: RMCSLMQGSTLPRR
RMYSLLQTSTSPRR

SEQ ID NO: 122798 - protein, 14 aa, Artificial Sequence
  Description of Artificial Sequence: Synthetic peptide
  Seed: RMCSLMQGSTLPRR
RMYSLLQTSTTPRR

SEQ ID NO: 122799 - protein, 14 aa, Artificial Sequence
  Description of Artificial Sequence: Synthetic peptide
  Seed: RMCSLMQGSTLPRR
RMYSLLQTSTVPRR

SEQ ID NO: 122800 - protein, 14 aa, Artificial Sequence
  Description of Artificial Sequence: Synthetic peptide
  Seed: RMCSLMQGSTLPRR
RMYSLLQVSTAPRR

SEQ ID NO: 122801 - protein, 14 aa, Artificial Sequence
  Description of Artificial Sequence: Synthetic peptide
  Seed: RMCSLMQGSTLPRR
RMYSLLQVSTGPRR

SEQ ID NO: 122802 - protein, 14 aa, Artificial Sequence
  Description of Artificial Sequence: Synthetic peptide
  Seed: RMCSLMQGSTLPRR
RMYSLLQVSTHPRR

SEQ ID NO: 122803 - protein, 14 aa, Artificial Sequence
  Description of Artificial Sequence: Synthetic peptide
  Seed: RMCSLMQGSTLPRR
RMYSLLQVSTIPRR

SEQ ID NO: 122804 - protein, 14 aa, Artificial Sequence
  Description of Artificial Sequence: Synthetic peptide
  Seed: RMCSLMQGSTLPRR
RMYSLLQVSTLPRR

SEQ ID NO: 122805 - protein, 14 aa, Artificial Sequence
  Description of Artificial Sequence: Synthetic peptide
  Seed: RMCSLMQGSTLPRR
RMYSLLQVSTMPRR

SEQ ID NO: 122806 - protein, 14 aa, Artificial Sequence
  Description of Artificial Sequence: Synthetic peptide
  Seed: RMCSLMQGSTLPRR
RMYSLLQVSTNPRR

SEQ ID NO: 122807 - protein, 14 aa, Artificial Sequence
  Description of Artificial Sequence: Synthetic peptide
  Seed: RMCSLMQGSTLPRR
RMYSLLQVSTSPRR

SEQ ID NO: 122808 - protein, 14 aa, Artificial Sequence
  Description of Artificial Sequence: Synthetic peptide
  Seed: RMCSLMQGSTLPRR
RMYSLLQVSTTPRR

SEQ ID NO: 122809 - protein, 14 aa, Artificial Sequence
  Description of Artificial Sequence: Synthetic peptide
  Seed: RMCSLMQGSTLPRR
RMYSLLQVSTVPRR

SEQ ID NO: 122810 - protein, 14 aa, Artificial Sequence
  Description of Artificial Sequence: Synthetic peptide
  Seed: RMCSLMQGSTLPRR
RMYSLMQASTAPRR

SEQ ID NO: 122811 - protein, 14 aa, Artificial Sequence
  Description of Artificial Sequence: Synthetic peptide
  Seed: RMCSLMQGSTLPRR
RMYSLMQASTCPRR

SEQ ID NO: 122812 - protein, 14 aa, Artificial Sequence
  Description of Artificial Sequence: Synthetic peptide
  Seed: RMCSLMQGSTLPRR
RMYSLMQASTFPRR

SEQ ID NO: 122813 - protein, 14 aa, Artificial Sequence
  Description of Artificial Sequence: Synthetic peptide
  Seed: RMCSLMQGSTLPRR
RMYSLMQASTGPRR

SEQ ID NO: 122814 - protein, 14 aa, Artificial Sequence
  Description of Artificial Sequence: Synthetic peptide
  Seed: RMCSLMQGSTLPRR
RMYSLMQASTHPRR

SEQ ID NO: 122815 - protein, 14 aa, Artificial Sequence
  Description of Artificial Sequence: Synthetic peptide
  Seed: RMCSLMQGSTLPRR
RMYSLMQASTIPRR

SEQ ID NO: 122816 - protein, 14 aa, Artificial Sequence
  Description of Artificial Sequence: Synthetic peptide
  Seed: RMCSLMQGSTLPRR
RMYSLMQASTLPRR

SEQ ID NO: 122817 - protein, 14 aa, Artificial Sequence
  Description of Artificial Sequence: Synthetic peptide
  Seed: RMCSLMQGSTLPRR
RMYSLMQASTMPRR

SEQ ID NO: 122818 - protein, 14 aa, Artificial Sequence
  Description of Artificial Sequence: Synthetic peptide
  Seed: RMCSLMQGSTLPRR
RMYSLMQASTNPRR

SEQ ID NO: 122819 - protein, 14 aa, Artificial Sequence
  Description of Artificial Sequence: Synthetic peptide
  Seed: RMCSLMQGSTLPRR
RMYSLMQASTQPRR

SEQ ID NO: 122820 - protein, 14 aa, Artificial Sequence
  Description of Artificial Sequence: Synthetic peptide
  Seed: RMCSLMQGSTLPRR
RMYSLMQASTSPRR

SEQ ID NO: 122821 - protein, 14 aa, Artificial Sequence
  Description of Artificial Sequence: Synthetic peptide
  Seed: RMCSLMQGSTLPRR
RMYSLMQASTTPRR

SEQ ID NO: 122822 - protein, 14 aa, Artificial Sequence
  Description of Artificial Sequence: Synthetic peptide
  Seed: RMCSLMQGSTLPRR
RMYSLMQASTVPRR

SEQ ID NO: 122823 - protein, 14 aa, Artificial Sequence
  Description of Artificial Sequence: Synthetic peptide
  Seed: RMCSLMQGSTLPRR
RMYSLMQGSTAPRR

SEQ ID NO: 122824 - protein, 14 aa, Artificial Sequence
  Description of Artificial Sequence: Synthetic peptide
  Seed: RMCSLMQGSTLPRR
RMYSLMQGSTFPRR

SEQ ID NO: 122825 - protein, 14 aa, Artificial Sequence
  Description of Artificial Sequence: Synthetic peptide
  Seed: RMCSLMQGSTLPRR
RMYSLMQGSTGPRR

SEQ ID NO: 122826 - protein, 14 aa, Artificial Sequence
  Description of Artificial Sequence: Synthetic peptide
  Seed: RMCSLMQGSTLPRR
RMYSLMQGSTIPRR

SEQ ID NO: 122827 - protein, 14 aa, Artificial Sequence
  Description of Artificial Sequence: Synthetic peptide
  Seed: RMCSLMQGSTLPRR
RMYSLMQGSTLPRR

SEQ ID NO: 122828 - protein, 14 aa, Artificial Sequence
  Description of Artificial Sequence: Synthetic peptide
  Seed: RMCSLMQGSTLPRR
RMYSLMQGSTMPRR

SEQ ID NO: 122829 - protein, 14 aa, Artificial Sequence
  Description of Artificial Sequence: Synthetic peptide
  Seed: RMCSLMQGSTLPRR
RMYSLMQGSTNPRR

SEQ ID NO: 122830 - protein, 14 aa, Artificial Sequence
  Description of Artificial Sequence: Synthetic peptide
  Seed: RMCSLMQGSTLPRR
RMYSLMQGSTSPRR

SEQ ID NO: 122831 - protein, 14 aa, Artificial Sequence
  Description of Artificial Sequence: Synthetic peptide
  Seed: RMCSLMQGSTLPRR
RMYSLMQGSTTPRR

SEQ ID NO: 122832 - protein, 14 aa, Artificial Sequence
  Description of Artificial Sequence: Synthetic peptide
  Seed: RMCSLMQGSTLPRR
RMYSLMQGSTVPRR

SEQ ID NO: 122833 - protein, 14 aa, Artificial Sequence
  Description of Artificial Sequence: Synthetic peptide
  Seed: RMCSLMQGSTLPRR
RMYSLMQISTAPRR

SEQ ID NO: 122834 - protein, 14 aa, Artificial Sequence
  Description of Artificial Sequence: Synthetic peptide
  Seed: RMCSLMQGSTLPRR
RMYSLMQISTIPRR

SEQ ID NO: 122835 - protein, 14 aa, Artificial Sequence
  Description of Artificial Sequence: Synthetic peptide
  Seed: RMCSLMQGSTLPRR
RMYSLMQISTLPRR

SEQ ID NO: 122836 - protein, 14 aa, Artificial Sequence
  Description of Artificial Sequence: Synthetic peptide
  Seed: RMCSLMQGSTLPRR
RMYSLMQISTMPRR

SEQ ID NO: 122837 - protein, 14 aa, Artificial Sequence
  Description of Artificial Sequence: Synthetic peptide
  Seed: RMCSLMQGSTLPRR
RMYSLMQISTNPRR

SEQ ID NO: 122838 - protein, 14 aa, Artificial Sequence
  Description of Artificial Sequence: Synthetic peptide
  Seed: RMCSLMQGSTLPRR
RMYSLMQISTSPRR

SEQ ID NO: 122839 - protein, 14 aa, Artificial Sequence
  Description of Artificial Sequence: Synthetic peptide
  Seed: RMCSLMQGSTLPRR
RMYSLMQISTTPRR

SEQ ID NO: 122840 - protein, 14 aa, Artificial Sequence
  Description of Artificial Sequence: Synthetic peptide
  Seed: RMCSLMQGSTLPRR
RMYSLMQISTVPRR

SEQ ID NO: 122841 - protein, 14 aa, Artificial Sequence
  Description of Artificial Sequence: Synthetic peptide
  Seed: RMCSLMQGSTLPRR
RMYSLMQLSTAPRR

SEQ ID NO: 122842 - protein, 14 aa, Artificial Sequence
  Description of Artificial Sequence: Synthetic peptide
  Seed: RMCSLMQGSTLPRR
RMYSLMQLSTSPRR

SEQ ID NO: 122843 - protein, 14 aa, Artificial Sequence
  Description of Artificial Sequence: Synthetic peptide
  Seed: RMCSLMQGSTLPRR
RMYSLMQMSTAPRR

SEQ ID NO: 122844 - protein, 14 aa, Artificial Sequence
  Description of Artificial Sequence: Synthetic peptide
  Seed: RMCSLMQGSTLPRR
RMYSLMQNSTAPRR

SEQ ID NO: 122845 - protein, 14 aa, Artificial Sequence
  Description of Artificial Sequence: Synthetic peptide
  Seed: RMCSLMQGSTLPRR
RMYSLMQNSTIPRR

SEQ ID NO: 122846 - protein, 14 aa, Artificial Sequence
  Description of Artificial Sequence: Synthetic peptide
  Seed: RMCSLMQGSTLPRR
RMYSLMQNSTLPRR

SEQ ID NO: 122847 - protein, 14 aa, Artificial Sequence
  Description of Artificial Sequence: Synthetic peptide
  Seed: RMCSLMQGSTLPRR
RMYSLMQNSTMPRR

SEQ ID NO: 122848 - protein, 14 aa, Artificial Sequence
  Description of Artificial Sequence: Synthetic peptide
  Seed: RMCSLMQGSTLPRR
RMYSLMQNSTNPRR

SEQ ID NO: 122849 - protein, 14 aa, Artificial Sequence
  Description of Artificial Sequence: Synthetic peptide
  Seed: RMCSLMQGSTLPRR
RMYSLMQNSTSPRR

SEQ ID NO: 122850 - protein, 14 aa, Artificial Sequence
  Description of Artificial Sequence: Synthetic peptide
  Seed: RMCSLMQGSTLPRR
RMYSLMQNSTTPRR

SEQ ID NO: 122851 - protein, 14 aa, Artificial Sequence
  Description of Artificial Sequence: Synthetic peptide
  Seed: RMCSLMQGSTLPRR
RMYSLMQNSTVPRR

SEQ ID NO: 122852 - protein, 14 aa, Artificial Sequence
  Description of Artificial Sequence: Synthetic peptide
  Seed: RMCSLMQGSTLPRR
RMYSLMQPSTAPRR

SEQ ID NO: 122853 - protein, 14 aa, Artificial Sequence
  Description of Artificial Sequence: Synthetic peptide
  Seed: RMCSLMQGSTLPRR
RMYSLMQPSTIPRR

SEQ ID NO: 122854 - protein, 14 aa, Artificial Sequence
  Description of Artificial Sequence: Synthetic peptide
  Seed: RMCSLMQGSTLPRR
RMYSLMQPSTLPRR

SEQ ID NO: 122855 - protein, 14 aa, Artificial Sequence
  Description of Artificial Sequence: Synthetic peptide
  Seed: RMCSLMQGSTLPRR
RMYSLMQPSTMPRR

SEQ ID NO: 122856 - protein, 14 aa, Artificial Sequence
  Description of Artificial Sequence: Synthetic peptide
  Seed: RMCSLMQGSTLPRR
RMYSLMQPSTNPRR

SEQ ID NO: 122857 - protein, 14 aa, Artificial Sequence
  Description of Artificial Sequence: Synthetic peptide
  Seed: RMCSLMQGSTLPRR
RMYSLMQPSTSPRR

SEQ ID NO: 122858 - protein, 14 aa, Artificial Sequence
  Description of Artificial Sequence: Synthetic peptide
  Seed: RMCSLMQGSTLPRR
RMYSLMQPSTTPRR

SEQ ID NO: 122859 - protein, 14 aa, Artificial Sequence
  Description of Artificial Sequence: Synthetic peptide
  Seed: RMCSLMQGSTLPRR
RMYSLMQPSTVPRR

SEQ ID NO: 122860 - protein, 14 aa, Artificial Sequence
  Description of Artificial Sequence: Synthetic peptide
  Seed: RMCSLMQGSTLPRR
RMYSLMQSSTAPRR

SEQ ID NO: 122861 - protein, 14 aa, Artificial Sequence
  Description of Artificial Sequence: Synthetic peptide
  Seed: RMCSLMQGSTLPRR
RMYSLMQSSTGPRR

SEQ ID NO: 122862 - protein, 14 aa, Artificial Sequence
  Description of Artificial Sequence: Synthetic peptide
  Seed: RMCSLMQGSTLPRR
RMYSLMQSSTIPRR

SEQ ID NO: 122863 - protein, 14 aa, Artificial Sequence
  Description of Artificial Sequence: Synthetic peptide
  Seed: RMCSLMQGSTLPRR
RMYSLMQSSTLPRR

SEQ ID NO: 122864 - protein, 14 aa, Artificial Sequence
  Description of Artificial Sequence: Synthetic peptide
  Seed: RMCSLMQGSTLPRR
RMYSLMQSSTMPRR

SEQ ID NO: 122865 - protein, 14 aa, Artificial Sequence
  Description of Artificial Sequence: Synthetic peptide
  Seed: RMCSLMQGSTLPRR
RMYSLMQSSTNPRR

SEQ ID NO: 122866 - protein, 14 aa, Artificial Sequence
  Description of Artificial Sequence: Synthetic peptide
  Seed: RMCSLMQGSTLPRR
RMYSLMQSSTSPRR

SEQ ID NO: 122867 - protein, 14 aa, Artificial Sequence
  Description of Artificial Sequence: Synthetic peptide
  Seed: RMCSLMQGSTLPRR
RMYSLMQSSTTPRR

SEQ ID NO: 122868 - protein, 14 aa, Artificial Sequence
  Description of Artificial Sequence: Synthetic peptide
  Seed: RMCSLMQGSTLPRR
RMYSLMQSSTVPRR

SEQ ID NO: 122869 - protein, 14 aa, Artificial Sequence
  Description of Artificial Sequence: Synthetic peptide
  Seed: RMCSLMQGSTLPRR
RMYSLMQTSTAPRR

SEQ ID NO: 122870 - protein, 14 aa, Artificial Sequence
  Description of Artificial Sequence: Synthetic peptide
  Seed: RMCSLMQGSTLPRR
RMYSLMQTSTIPRR

SEQ ID NO: 122871 - protein, 14 aa, Artificial Sequence
  Description of Artificial Sequence: Synthetic peptide
  Seed: RMCSLMQGSTLPRR
RMYSLMQTSTLPRR

SEQ ID NO: 122872 - protein, 14 aa, Artificial Sequence
  Description of Artificial Sequence: Synthetic peptide
  Seed: RMCSLMQGSTLPRR
RMYSLMQTSTMPRR

SEQ ID NO: 122873 - protein, 14 aa, Artificial Sequence
  Description of Artificial Sequence: Synthetic peptide
  Seed: RMCSLMQGSTLPRR
RMYSLMQTSTNPRR

SEQ ID NO: 122874 - protein, 14 aa, Artificial Sequence
  Description of Artificial Sequence: Synthetic peptide
  Seed: RMCSLMQGSTLPRR
RMYSLMQTSTSPRR

SEQ ID NO: 122875 - protein, 14 aa, Artificial Sequence
  Description of Artificial Sequence: Synthetic peptide
  Seed: RMCSLMQGSTLPRR
RMYSLMQTSTTPRR

SEQ ID NO: 122876 - protein, 14 aa, Artificial Sequence
  Description of Artificial Sequence: Synthetic peptide
  Seed: RMCSLMQGSTLPRR
RMYSLMQTSTVPRR

SEQ ID NO: 122877 - protein, 14 aa, Artificial Sequence
  Description of Artificial Sequence: Synthetic peptide
  Seed: RMCSLMQGSTLPRR
RMYSLMQVSTAPRR

SEQ ID NO: 122878 - protein, 14 aa, Artificial Sequence
  Description of Artificial Sequence: Synthetic peptide
  Seed: RMCSLMQGSTLPRR
RMYSLMQVSTGPRR

SEQ ID NO: 122879 - protein, 14 aa, Artificial Sequence
  Description of Artificial Sequence: Synthetic peptide
  Seed: RMCSLMQGSTLPRR
RMYSLMQVSTHPRR

SEQ ID NO: 122880 - protein, 14 aa, Artificial Sequence
  Description of Artificial Sequence: Synthetic peptide
  Seed: RMCSLMQGSTLPRR
RMYSLMQVSTIPRR

SEQ ID NO: 122881 - protein, 14 aa, Artificial Sequence
  Description of Artificial Sequence: Synthetic peptide
  Seed: RMCSLMQGSTLPRR
RMYSLMQVSTLPRR

SEQ ID NO: 122882 - protein, 14 aa, Artificial Sequence
  Description of Artificial Sequence: Synthetic peptide
  Seed: RMCSLMQGSTLPRR
RMYSLMQVSTMPRR

SEQ ID NO: 122883 - protein, 14 aa, Artificial Sequence
  Description of Artificial Sequence: Synthetic peptide
  Seed: RMCSLMQGSTLPRR
RMYSLMQVSTNPRR

SEQ ID NO: 122884 - protein, 14 aa, Artificial Sequence
  Description of Artificial Sequence: Synthetic peptide
  Seed: RMCSLMQGSTLPRR
RMYSLMQVSTSPRR

SEQ ID NO: 122885 - protein, 14 aa, Artificial Sequence
  Description of Artificial Sequence: Synthetic peptide
  Seed: RMCSLMQGSTLPRR
RMYSLMQVSTTPRR

SEQ ID NO: 122886 - protein, 14 aa, Artificial Sequence
  Description of Artificial Sequence: Synthetic peptide
  Seed: RMCSLMQGSTLPRR
RMYSLMQVSTVPRR

SEQ ID NO: 122887 - protein, 14 aa, Artificial Sequence
  Description of Artificial Sequence: Synthetic peptide
  Seed: RMCSLMQGSTLPRR
RMYSLQQASTAPRR

SEQ ID NO: 122888 - protein, 14 aa, Artificial Sequence
  Description of Artificial Sequence: Synthetic peptide
  Seed: RMCSLMQGSTLPRR
RMYSLQQASTIPRR

SEQ ID NO: 122889 - protein, 14 aa, Artificial Sequence
  Description of Artificial Sequence: Synthetic peptide
  Seed: RMCSLMQGSTLPRR
RMYSLQQASTLPRR

SEQ ID NO: 122890 - protein, 14 aa, Artificial Sequence
  Description of Artificial Sequence: Synthetic peptide
  Seed: RMCSLMQGSTLPRR
RMYSLQQASTMPRR

SEQ ID NO: 122891 - protein, 14 aa, Artificial Sequence
  Description of Artificial Sequence: Synthetic peptide
  Seed: RMCSLMQGSTLPRR
RMYSLQQASTVPRR

SEQ ID NO: 122892 - protein, 14 aa, Artificial Sequence
  Description of Artificial Sequence: Synthetic peptide
  Seed: RMCSLMQGSTLPRR
RMYSLQQGSTAPRR

SEQ ID NO: 122893 - protein, 14 aa, Artificial Sequence
  Description of Artificial Sequence: Synthetic peptide
  Seed: RMCSLMQGSTLPRR
RMYSLQQGSTIPRR

SEQ ID NO: 122894 - protein, 14 aa, Artificial Sequence
  Description of Artificial Sequence: Synthetic peptide
  Seed: RMCSLMQGSTLPRR
RMYSLQQGSTLPRR

SEQ ID NO: 122895 - protein, 14 aa, Artificial Sequence
  Description of Artificial Sequence: Synthetic peptide
  Seed: RMCSLMQGSTLPRR
RMYSLQQGSTVPRR

SEQ ID NO: 122896 - protein, 14 aa, Artificial Sequence
  Description of Artificial Sequence: Synthetic peptide
  Seed: RMCSLMQGSTLPRR
RMYSLQQPSTLPRR

SEQ ID NO: 122897 - protein, 14 aa, Artificial Sequence
  Description of Artificial Sequence: Synthetic peptide
  Seed: RMCSLMQGSTLPRR
RMYSLQQPSTVPRR

SEQ ID NO: 122898 - protein, 14 aa, Artificial Sequence
  Description of Artificial Sequence: Synthetic peptide
  Seed: RMCSLMQGSTLPRR
RMYSLQQSSTAPRR

SEQ ID NO: 122899 - protein, 14 aa, Artificial Sequence
  Description of Artificial Sequence: Synthetic peptide
  Seed: RMCSLMQGSTLPRR
RMYSLQQSSTIPRR

SEQ ID NO: 122900 - protein, 14 aa, Artificial Sequence
  Description of Artificial Sequence: Synthetic peptide
  Seed: RMCSLMQGSTLPRR
RMYSLQQSSTLPRR

SEQ ID NO: 122901 - protein, 14 aa, Artificial Sequence
  Description of Artificial Sequence: Synthetic peptide
  Seed: RMCSLMQGSTLPRR
RMYSLQQSSTVPRR

SEQ ID NO: 122902 - protein, 14 aa, Artificial Sequence
  Description of Artificial Sequence: Synthetic peptide
  Seed: RMCSLMQGSTLPRR
RMYSLSQASTIPRR

SEQ ID NO: 122903 - protein, 14 aa, Artificial Sequence
  Description of Artificial Sequence: Synthetic peptide
  Seed: RMCSLMQGSTLPRR
RMYSLSQASTLPRR

SEQ ID NO: 122904 - protein, 14 aa, Artificial Sequence
  Description of Artificial Sequence: Synthetic peptide
  Seed: RMCSLMQGSTLPRR
RMYSLSQASTVPRR

SEQ ID NO: 122905 - protein, 14 aa, Artificial Sequence
  Description of Artificial Sequence: Synthetic peptide
  Seed: RMCSLMQGSTLPRR
RMYSLSQGSTLPRR

SEQ ID NO: 122906 - protein, 14 aa, Artificial Sequence
  Description of Artificial Sequence: Synthetic peptide
  Seed: RMCSLMQGSTLPRR
RMYSLSQSSTLPRR

SEQ ID NO: 122907 - protein, 14 aa, Artificial Sequence
  Description of Artificial Sequence: Synthetic peptide
  Seed: RMCSLMQGSTLPRR
RMYSLVQASTAPRR

SEQ ID NO: 122908 - protein, 14 aa, Artificial Sequence
  Description of Artificial Sequence: Synthetic peptide
  Seed: RMCSLMQGSTLPRR
RMYSLVQASTIPRR

SEQ ID NO: 122909 - protein, 14 aa, Artificial Sequence
  Description of Artificial Sequence: Synthetic peptide
  Seed: RMCSLMQGSTLPRR
RMYSLVQASTLPRR

SEQ ID NO: 122910 - protein, 14 aa, Artificial Sequence
  Description of Artificial Sequence: Synthetic peptide
  Seed: RMCSLMQGSTLPRR
RMYSLVQASTMPRR

SEQ ID NO: 122911 - protein, 14 aa, Artificial Sequence
  Description of Artificial Sequence: Synthetic peptide
  Seed: RMCSLMQGSTLPRR
RMYSLVQASTNPRR

SEQ ID NO: 122912 - protein, 14 aa, Artificial Sequence
  Description of Artificial Sequence: Synthetic peptide
  Seed: RMCSLMQGSTLPRR
RMYSLVQASTSPRR

SEQ ID NO: 122913 - protein, 14 aa, Artificial Sequence
  Description of Artificial Sequence: Synthetic peptide
  Seed: RMCSLMQGSTLPRR
RMYSLVQASTTPRR

SEQ ID NO: 122914 - protein, 14 aa, Artificial Sequence
  Description of Artificial Sequence: Synthetic peptide
  Seed: RMCSLMQGSTLPRR
RMYSLVQASTVPRR

SEQ ID NO: 122915 - protein, 14 aa, Artificial Sequence
  Description of Artificial Sequence: Synthetic peptide
  Seed: RMCSLMQGSTLPRR
RMYSLVQGSTAPRR

SEQ ID NO: 122916 - protein, 14 aa, Artificial Sequence
  Description of Artificial Sequence: Synthetic peptide
  Seed: RMCSLMQGSTLPRR
RMYSLVQGSTIPRR

SEQ ID NO: 122917 - protein, 14 aa, Artificial Sequence
  Description of Artificial Sequence: Synthetic peptide
  Seed: RMCSLMQGSTLPRR
RMYSLVQGSTLPRR

SEQ ID NO: 122918 - protein, 14 aa, Artificial Sequence
  Description of Artificial Sequence: Synthetic peptide
  Seed: RMCSLMQGSTLPRR
RMYSLVQGSTMPRR

SEQ ID NO: 122919 - protein, 14 aa, Artificial Sequence
  Description of Artificial Sequence: Synthetic peptide
  Seed: RMCSLMQGSTLPRR
RMYSLVQGSTVPRR

SEQ ID NO: 122920 - protein, 14 aa, Artificial Sequence
  Description of Artificial Sequence: Synthetic peptide
  Seed: RMCSLMQGSTLPRR
RMYSLVQISTAPRR

SEQ ID NO: 122921 - protein, 14 aa, Artificial Sequence
  Description of Artificial Sequence: Synthetic peptide
  Seed: RMCSLMQGSTLPRR
RMYSLVQPSTAPRR

SEQ ID NO: 122922 - protein, 14 aa, Artificial Sequence
  Description of Artificial Sequence: Synthetic peptide
  Seed: RMCSLMQGSTLPRR
RMYSLVQPSTIPRR

SEQ ID NO: 122923 - protein, 14 aa, Artificial Sequence
  Description of Artificial Sequence: Synthetic peptide
  Seed: RMCSLMQGSTLPRR
RMYSLVQPSTLPRR

SEQ ID NO: 122924 - protein, 14 aa, Artificial Sequence
  Description of Artificial Sequence: Synthetic peptide
  Seed: RMCSLMQGSTLPRR
RMYSLVQPSTNPRR

SEQ ID NO: 122925 - protein, 14 aa, Artificial Sequence
  Description of Artificial Sequence: Synthetic peptide
  Seed: RMCSLMQGSTLPRR
RMYSLVQPSTSPRR

SEQ ID NO: 122926 - protein, 14 aa, Artificial Sequence
  Description of Artificial Sequence: Synthetic peptide
  Seed: RMCSLMQGSTLPRR
RMYSLVQPSTVPRR

SEQ ID NO: 122927 - protein, 14 aa, Artificial Sequence
  Description of Artificial Sequence: Synthetic peptide
  Seed: RMCSLMQGSTLPRR
RMYSLVQSSTAPRR

SEQ ID NO: 122928 - protein, 14 aa, Artificial Sequence
  Description of Artificial Sequence: Synthetic peptide
  Seed: RMCSLMQGSTLPRR
RMYSLVQSSTIPRR

SEQ ID NO: 122929 - protein, 14 aa, Artificial Sequence
  Description of Artificial Sequence: Synthetic peptide
  Seed: RMCSLMQGSTLPRR
RMYSLVQSSTLPRR

SEQ ID NO: 122930 - protein, 14 aa, Artificial Sequence
  Description of Artificial Sequence: Synthetic peptide
  Seed: RMCSLMQGSTLPRR
RMYSLVQSSTSPRR

SEQ ID NO: 122931 - protein, 14 aa, Artificial Sequence
  Description of Artificial Sequence: Synthetic peptide
  Seed: RMCSLMQGSTLPRR
RMYSLVQSSTVPRR

SEQ ID NO: 122932 - protein, 14 aa, Artificial Sequence
  Description of Artificial Sequence: Synthetic peptide
  Seed: RMCSLMQGSTLPRR
RMYSLVQTSTAPRR

SEQ ID NO: 122933 - protein, 14 aa, Artificial Sequence
  Description of Artificial Sequence: Synthetic peptide
  Seed: RMCSLMQGSTLPRR
RMYSLVQVSTAPRR

SEQ ID NO: 122934 - protein, 14 aa, Artificial Sequence
  Description of Artificial Sequence: Synthetic peptide
  Seed: RMCSLMQGSTLPRR
RMYSLVQVSTSPRR

SEQ ID NO: 122935 - protein, 15 aa, Artificial Sequence
  Description of Artificial Sequence: Synthetic peptide
  Seed: RMCSLMQGSTLPRRS
RMASLLQASTLPRRS

SEQ ID NO: 122936 - protein, 15 aa, Artificial Sequence
  Description of Artificial Sequence: Synthetic peptide
  Seed: RMCSLMQGSTLPRRS
RMCSLIQASTIPRRS

SEQ ID NO: 122937 - protein, 15 aa, Artificial Sequence
  Description of Artificial Sequence: Synthetic peptide
  Seed: RMCSLMQGSTLPRRS
RMCSLIQASTLPRRS

SEQ ID NO: 122938 - protein, 15 aa, Artificial Sequence
  Description of Artificial Sequence: Synthetic peptide
  Seed: RMCSLMQGSTLPRRS
RMCSLIQASTVPRRS

SEQ ID NO: 122939 - protein, 15 aa, Artificial Sequence
  Description of Artificial Sequence: Synthetic peptide
  Seed: RMCSLMQGSTLPRRS
RMCSLLQASTAPRRS

SEQ ID NO: 122940 - protein, 15 aa, Artificial Sequence
  Description of Artificial Sequence: Synthetic peptide
  Seed: RMCSLMQGSTLPRRS
RMCSLLQASTIPRRS

SEQ ID NO: 122941 - protein, 15 aa, Artificial Sequence
  Description of Artificial Sequence: Synthetic peptide
  Seed: RMCSLMQGSTLPRRS
RMCSLLQASTLPRRS

SEQ ID NO: 122942 - protein, 15 aa, Artificial Sequence
  Description of Artificial Sequence: Synthetic peptide
  Seed: RMCSLMQGSTLPRRS
RMCSLLQASTMPRRS

SEQ ID NO: 122943 - protein, 15 aa, Artificial Sequence
  Description of Artificial Sequence: Synthetic peptide
  Seed: RMCSLMQGSTLPRRS
RMCSLLQASTTPRRS

SEQ ID NO: 122944 - protein, 15 aa, Artificial Sequence
  Description of Artificial Sequence: Synthetic peptide
  Seed: RMCSLMQGSTLPRRS
RMCSLLQASTVPRRS

SEQ ID NO: 122945 - protein, 15 aa, Artificial Sequence
  Description of Artificial Sequence: Synthetic peptide
  Seed: RMCSLMQGSTLPRRS
RMCSLLQGSTAPRRS

SEQ ID NO: 122946 - protein, 15 aa, Artificial Sequence
  Description of Artificial Sequence: Synthetic peptide
  Seed: RMCSLMQGSTLPRRS
RMCSLLQGSTIPRRS

SEQ ID NO: 122947 - protein, 15 aa, Artificial Sequence
  Description of Artificial Sequence: Synthetic peptide
  Seed: RMCSLMQGSTLPRRS
RMCSLLQGSTLPRRS

SEQ ID NO: 122948 - protein, 15 aa, Artificial Sequence
  Description of Artificial Sequence: Synthetic peptide
  Seed: RMCSLMQGSTLPRRS
RMCSLLQGSTVPRRS

SEQ ID NO: 122949 - protein, 15 aa, Artificial Sequence
  Description of Artificial Sequence: Synthetic peptide
  Seed: RMCSLMQGSTLPRRS
RMCSLLQPSTIPRRS

SEQ ID NO: 122950 - protein, 15 aa, Artificial Sequence
  Description of Artificial Sequence: Synthetic peptide
  Seed: RMCSLMQGSTLPRRS
RMCSLLQPSTLPRRS

SEQ ID NO: 122951 - protein, 15 aa, Artificial Sequence
  Description of Artificial Sequence: Synthetic peptide
  Seed: RMCSLMQGSTLPRRS
RMCSLLQPSTVPRRS

SEQ ID NO: 122952 - protein, 15 aa, Artificial Sequence
  Description of Artificial Sequence: Synthetic peptide
  Seed: RMCSLMQGSTLPRRS
RMCSLLQSSTAPRRS

SEQ ID NO: 122953 - protein, 15 aa, Artificial Sequence
  Description of Artificial Sequence: Synthetic peptide
  Seed: RMCSLMQGSTLPRRS
RMCSLLQSSTIPRRS

SEQ ID NO: 122954 - protein, 15 aa, Artificial Sequence
  Description of Artificial Sequence: Synthetic peptide
  Seed: RMCSLMQGSTLPRRS
RMCSLLQSSTLPRRS

SEQ ID NO: 122955 - protein, 15 aa, Artificial Sequence
  Description of Artificial Sequence: Synthetic peptide
  Seed: RMCSLMQGSTLPRRS
RMCSLLQSSTVPRRS

SEQ ID NO: 122956 - protein, 15 aa, Artificial Sequence
  Description of Artificial Sequence: Synthetic peptide
  Seed: RMCSLMQGSTLPRRS
RMCSLMQASTAPRRS

SEQ ID NO: 122957 - protein, 15 aa, Artificial Sequence
  Description of Artificial Sequence: Synthetic peptide
  Seed: RMCSLMQGSTLPRRS
RMCSLMQASTIPRRS

SEQ ID NO: 122958 - protein, 15 aa, Artificial Sequence
  Description of Artificial Sequence: Synthetic peptide
  Seed: RMCSLMQGSTLPRRS
RMCSLMQASTLPRRS

SEQ ID NO: 122959 - protein, 15 aa, Artificial Sequence
  Description of Artificial Sequence: Synthetic peptide
  Seed: RMCSLMQGSTLPRRS
RMCSLMQASTMPRRS

SEQ ID NO: 122960 - protein, 15 aa, Artificial Sequence
  Description of Artificial Sequence: Synthetic peptide
  Seed: RMCSLMQGSTLPRRS
RMCSLMQASTVPRRS

SEQ ID NO: 122961 - protein, 15 aa, Artificial Sequence
  Description of Artificial Sequence: Synthetic peptide
  Seed: RMCSLMQGSTLPRRS
RMCSLMQGSTAPRRS

SEQ ID NO: 122962 - protein, 15 aa, Artificial Sequence
  Description of Artificial Sequence: Synthetic peptide
  Seed: RMCSLMQGSTLPRRS
RMCSLMQGSTIPRRS

SEQ ID NO: 122963 - protein, 15 aa, Artificial Sequence
  Description of Artificial Sequence: Synthetic peptide
  Seed: RMCSLMQGSTLPRRS
RMCSLMQGSTVPRRS

SEQ ID NO: 122964 - protein, 15 aa, Artificial Sequence
  Description of Artificial Sequence: Synthetic peptide
  Seed: RMCSLMQGSTLPRRS
RMCSLMQPSTIPRRS

SEQ ID NO: 122965 - protein, 15 aa, Artificial Sequence
  Description of Artificial Sequence: Synthetic peptide
  Seed: RMCSLMQGSTLPRRS
RMCSLMQPSTVPRRS

SEQ ID NO: 122966 - protein, 15 aa, Artificial Sequence
  Description of Artificial Sequence: Synthetic peptide
  Seed: RMCSLMQGSTLPRRS
RMCSLMQSSTIPRRS

SEQ ID NO: 122967 - protein, 15 aa, Artificial Sequence
  Description of Artificial Sequence: Synthetic peptide
  Seed: RMCSLMQGSTLPRRS
RMCSLMQSSTLPRRS

SEQ ID NO: 122968 - protein, 15 aa, Artificial Sequence
  Description of Artificial Sequence: Synthetic peptide
  Seed: RMCSLMQGSTLPRRS
RMCSLMQSSTVPRRS

SEQ ID NO: 122969 - protein, 15 aa, Artificial Sequence
  Description of Artificial Sequence: Synthetic peptide
  Seed: RMCSLMQGSTLPRRS
RMFSLAQASTAPRRS

SEQ ID NO: 122970 - protein, 15 aa, Artificial Sequence
  Description of Artificial Sequence: Synthetic peptide
  Seed: RMCSLMQGSTLPRRS
RMFSLAQASTCPRRS

SEQ ID NO: 122971 - protein, 15 aa, Artificial Sequence
  Description of Artificial Sequence: Synthetic peptide
  Seed: RMCSLMQGSTLPRRS
RMFSLAQASTDPRRS

SEQ ID NO: 122972 - protein, 15 aa, Artificial Sequence
  Description of Artificial Sequence: Synthetic peptide
  Seed: RMCSLMQGSTLPRRS
RMFSLAQASTEPRRS

SEQ ID NO: 122973 - protein, 15 aa, Artificial Sequence
  Description of Artificial Sequence: Synthetic peptide
  Seed: RMCSLMQGSTLPRRS
RMFSLAQASTFPRRS

SEQ ID NO: 122974 - protein, 15 aa, Artificial Sequence
  Description of Artificial Sequence: Synthetic peptide
  Seed: RMCSLMQGSTLPRRS
RMFSLAQASTGPRRS

SEQ ID NO: 122975 - protein, 15 aa, Artificial Sequence
  Description of Artificial Sequence: Synthetic peptide
  Seed: RMCSLMQGSTLPRRS
RMFSLAQASTHPRRS

SEQ ID NO: 122976 - protein, 15 aa, Artificial Sequence
  Description of Artificial Sequence: Synthetic peptide
  Seed: RMCSLMQGSTLPRRS
RMFSLAQASTIPRRS

SEQ ID NO: 122977 - protein, 15 aa, Artificial Sequence
  Description of Artificial Sequence: Synthetic peptide
  Seed: RMCSLMQGSTLPRRS
RMFSLAQASTKPRRS

SEQ ID NO: 122978 - protein, 15 aa, Artificial Sequence
  Description of Artificial Sequence: Synthetic peptide
  Seed: RMCSLMQGSTLPRRS
RMFSLAQASTLPRRS

SEQ ID NO: 122979 - protein, 15 aa, Artificial Sequence
  Description of Artificial Sequence: Synthetic peptide
  Seed: RMCSLMQGSTLPRRS
RMFSLAQASTMPRRS

SEQ ID NO: 122980 - protein, 15 aa, Artificial Sequence
  Description of Artificial Sequence: Synthetic peptide
  Seed: RMCSLMQGSTLPRRS
RMFSLAQASTNPRRS

SEQ ID NO: 122981 - protein, 15 aa, Artificial Sequence
  Description of Artificial Sequence: Synthetic peptide
  Seed: RMCSLMQGSTLPRRS
RMFSLAQASTPPRRS

SEQ ID NO: 122982 - protein, 15 aa, Artificial Sequence
  Description of Artificial Sequence: Synthetic peptide
  Seed: RMCSLMQGSTLPRRS
RMFSLAQASTQPRRS

SEQ ID NO: 122983 - protein, 15 aa, Artificial Sequence
  Description of Artificial Sequence: Synthetic peptide
  Seed: RMCSLMQGSTLPRRS
RMFSLAQASTRPRRS

SEQ ID NO: 122984 - protein, 15 aa, Artificial Sequence
  Description of Artificial Sequence: Synthetic peptide
  Seed: RMCSLMQGSTLPRRS
RMFSLAQASTSPRRS

SEQ ID NO: 122985 - protein, 15 aa, Artificial Sequence
  Description of Artificial Sequence: Synthetic peptide
  Seed: RMCSLMQGSTLPRRS
RMFSLAQASTTPRRS

SEQ ID NO: 122986 - protein, 15 aa, Artificial Sequence
  Description of Artificial Sequence: Synthetic peptide
  Seed: RMCSLMQGSTLPRRS
RMFSLAQASTVPRRS

SEQ ID NO: 122987 - protein, 15 aa, Artificial Sequence
  Description of Artificial Sequence: Synthetic peptide
  Seed: RMCSLMQGSTLPRRS
RMFSLAQASTWPRRS

SEQ ID NO: 122988 - protein, 15 aa, Artificial Sequence
  Description of Artificial Sequence: Synthetic peptide
  Seed: RMCSLMQGSTLPRRS
RMFSLAQASTYPRRS

SEQ ID NO: 122989 - protein, 15 aa, Artificial Sequence
  Description of Artificial Sequence: Synthetic peptide
  Seed: RMCSLMQGSTLPRRS
RMFSLAQCSTIPRRS

SEQ ID NO: 122990 - protein, 15 aa, Artificial Sequence
  Description of Artificial Sequence: Synthetic peptide
  Seed: RMCSLMQGSTLPRRS
RMFSLAQCSTLPRRS

SEQ ID NO: 122991 - protein, 15 aa, Artificial Sequence
  Description of Artificial Sequence: Synthetic peptide
  Seed: RMCSLMQGSTLPRRS
RMFSLAQCSTVPRRS

SEQ ID NO: 122992 - protein, 15 aa, Artificial Sequence
  Description of Artificial Sequence: Synthetic peptide
  Seed: RMCSLMQGSTLPRRS
RMFSLAQGSTAPRRS

SEQ ID NO: 122993 - protein, 15 aa, Artificial Sequence
  Description of Artificial Sequence: Synthetic peptide
  Seed: RMCSLMQGSTLPRRS
RMFSLAQGSTCPRRS

SEQ ID NO: 122994 - protein, 15 aa, Artificial Sequence
  Description of Artificial Sequence: Synthetic peptide
  Seed: RMCSLMQGSTLPRRS
RMFSLAQGSTFPRRS

SEQ ID NO: 122995 - protein, 15 aa, Artificial Sequence
  Description of Artificial Sequence: Synthetic peptide
  Seed: RMCSLMQGSTLPRRS
RMFSLAQGSTGPRRS

SEQ ID NO: 122996 - protein, 15 aa, Artificial Sequence
  Description of Artificial Sequence: Synthetic peptide
  Seed: RMCSLMQGSTLPRRS
RMFSLAQGSTHPRRS

SEQ ID NO: 122997 - protein, 15 aa, Artificial Sequence
  Description of Artificial Sequence: Synthetic peptide
  Seed: RMCSLMQGSTLPRRS
RMFSLAQGSTIPRRS

SEQ ID NO: 122998 - protein, 15 aa, Artificial Sequence
  Description of Artificial Sequence: Synthetic peptide
  Seed: RMCSLMQGSTLPRRS
RMFSLAQGSTLPRRS

SEQ ID NO: 122999 - protein, 15 aa, Artificial Sequence
  Description of Artificial Sequence: Synthetic peptide
  Seed: RMCSLMQGSTLPRRS
RMFSLAQGSTMPRRS

SEQ ID NO: 123000 - protein, 15 aa, Artificial Sequence
  Description of Artificial Sequence: Synthetic peptide
  Seed: RMCSLMQGSTLPRRS
RMFSLAQGSTNPRRS

SEQ ID NO: 123001 - protein, 15 aa, Artificial Sequence
  Description of Artificial Sequence: Synthetic peptide
  Seed: RMCSLMQGSTLPRRS
RMFSLAQGSTQPRRS

SEQ ID NO: 123002 - protein, 15 aa, Artificial Sequence
  Description of Artificial Sequence: Synthetic peptide
  Seed: RMCSLMQGSTLPRRS
RMFSLAQGSTSPRRS

SEQ ID NO: 123003 - protein, 15 aa, Artificial Sequence
  Description of Artificial Sequence: Synthetic peptide
  Seed: RMCSLMQGSTLPRRS
RMFSLAQGSTTPRRS

SEQ ID NO: 123004 - protein, 15 aa, Artificial Sequence
  Description of Artificial Sequence: Synthetic peptide
  Seed: RMCSLMQGSTLPRRS
RMFSLAQGSTVPRRS

SEQ ID NO: 123005 - protein, 15 aa, Artificial Sequence
  Description of Artificial Sequence: Synthetic peptide
  Seed: RMCSLMQGSTLPRRS
RMFSLAQGSTWPRRS

SEQ ID NO: 123006 - protein, 15 aa, Artificial Sequence
  Description of Artificial Sequence: Synthetic peptide
  Seed: RMCSLMQGSTLPRRS
RMFSLAQGSTYPRRS

SEQ ID NO: 123007 - protein, 15 aa, Artificial Sequence
  Description of Artificial Sequence: Synthetic peptide
  Seed: RMCSLMQGSTLPRRS
RMFSLAQHSTAPRRS

SEQ ID NO: 123008 - protein, 15 aa, Artificial Sequence
  Description of Artificial Sequence: Synthetic peptide
  Seed: RMCSLMQGSTLPRRS
RMFSLAQHSTIPRRS

SEQ ID NO: 123009 - protein, 15 aa, Artificial Sequence
  Description of Artificial Sequence: Synthetic peptide
  Seed: RMCSLMQGSTLPRRS
RMFSLAQHSTLPRRS

SEQ ID NO: 123010 - protein, 15 aa, Artificial Sequence
  Description of Artificial Sequence: Synthetic peptide
  Seed: RMCSLMQGSTLPRRS
RMFSLAQHSTVPRRS

SEQ ID NO: 123011 - protein, 15 aa, Artificial Sequence
  Description of Artificial Sequence: Synthetic peptide
  Seed: RMCSLMQGSTLPRRS
RMFSLAQISTAPRRS

SEQ ID NO: 123012 - protein, 15 aa, Artificial Sequence
  Description of Artificial Sequence: Synthetic peptide
  Seed: RMCSLMQGSTLPRRS
RMFSLAQISTGPRRS

SEQ ID NO: 123013 - protein, 15 aa, Artificial Sequence
  Description of Artificial Sequence: Synthetic peptide
  Seed: RMCSLMQGSTLPRRS
RMFSLAQISTHPRRS

SEQ ID NO: 123014 - protein, 15 aa, Artificial Sequence
  Description of Artificial Sequence: Synthetic peptide
  Seed: RMCSLMQGSTLPRRS
RMFSLAQISTIPRRS

SEQ ID NO: 123015 - protein, 15 aa, Artificial Sequence
  Description of Artificial Sequence: Synthetic peptide
  Seed: RMCSLMQGSTLPRRS
RMFSLAQISTLPRRS

SEQ ID NO: 123016 - protein, 15 aa, Artificial Sequence
  Description of Artificial Sequence: Synthetic peptide
  Seed: RMCSLMQGSTLPRRS
RMFSLAQISTMPRRS

SEQ ID NO: 123017 - protein, 15 aa, Artificial Sequence
  Description of Artificial Sequence: Synthetic peptide
  Seed: RMCSLMQGSTLPRRS
RMFSLAQISTNPRRS

SEQ ID NO: 123018 - protein, 15 aa, Artificial Sequence
  Description of Artificial Sequence: Synthetic peptide
  Seed: RMCSLMQGSTLPRRS
RMFSLAQISTQPRRS

SEQ ID NO: 123019 - protein, 15 aa, Artificial Sequence
  Description of Artificial Sequence: Synthetic peptide
  Seed: RMCSLMQGSTLPRRS
RMFSLAQISTSPRRS

SEQ ID NO: 123020 - protein, 15 aa, Artificial Sequence
  Description of Artificial Sequence: Synthetic peptide
  Seed: RMCSLMQGSTLPRRS
RMFSLAQISTTPRRS

SEQ ID NO: 123021 - protein, 15 aa, Artificial Sequence
  Description of Artificial Sequence: Synthetic peptide
  Seed: RMCSLMQGSTLPRRS
RMFSLAQISTVPRRS

SEQ ID NO: 123022 - protein, 15 aa, Artificial Sequence
  Description of Artificial Sequence: Synthetic peptide
  Seed: RMCSLMQGSTLPRRS
RMFSLAQLSTAPRRS

SEQ ID NO: 123023 - protein, 15 aa, Artificial Sequence
  Description of Artificial Sequence: Synthetic peptide
  Seed: RMCSLMQGSTLPRRS
RMFSLAQLSTIPRRS

SEQ ID NO: 123024 - protein, 15 aa, Artificial Sequence
  Description of Artificial Sequence: Synthetic peptide
  Seed: RMCSLMQGSTLPRRS
RMFSLAQLSTLPRRS

SEQ ID NO: 123025 - protein, 15 aa, Artificial Sequence
  Description of Artificial Sequence: Synthetic peptide
  Seed: RMCSLMQGSTLPRRS
RMFSLAQLSTMPRRS

SEQ ID NO: 123026 - protein, 15 aa, Artificial Sequence
  Description of Artificial Sequence: Synthetic peptide
  Seed: RMCSLMQGSTLPRRS
RMFSLAQLSTNPRRS

SEQ ID NO: 123027 - protein, 15 aa, Artificial Sequence
  Description of Artificial Sequence: Synthetic peptide
  Seed: RMCSLMQGSTLPRRS
RMFSLAQLSTSPRRS

SEQ ID NO: 123028 - protein, 15 aa, Artificial Sequence
  Description of Artificial Sequence: Synthetic peptide
  Seed: RMCSLMQGSTLPRRS
RMFSLAQLSTTPRRS

SEQ ID NO: 123029 - protein, 15 aa, Artificial Sequence
  Description of Artificial Sequence: Synthetic peptide
  Seed: RMCSLMQGSTLPRRS
RMFSLAQLSTVPRRS

SEQ ID NO: 123030 - protein, 15 aa, Artificial Sequence
  Description of Artificial Sequence: Synthetic peptide
  Seed: RMCSLMQGSTLPRRS
RMFSLAQMSTAPRRS

SEQ ID NO: 123031 - protein, 15 aa, Artificial Sequence
  Description of Artificial Sequence: Synthetic peptide
  Seed: RMCSLMQGSTLPRRS
RMFSLAQMSTIPRRS

SEQ ID NO: 123032 - protein, 15 aa, Artificial Sequence
  Description of Artificial Sequence: Synthetic peptide
  Seed: RMCSLMQGSTLPRRS
RMFSLAQMSTLPRRS

SEQ ID NO: 123033 - protein, 15 aa, Artificial Sequence
  Description of Artificial Sequence: Synthetic peptide
  Seed: RMCSLMQGSTLPRRS
RMFSLAQMSTMPRRS

SEQ ID NO: 123034 - protein, 15 aa, Artificial Sequence
  Description of Artificial Sequence: Synthetic peptide
  Seed: RMCSLMQGSTLPRRS
RMFSLAQMSTNPRRS

SEQ ID NO: 123035 - protein, 15 aa, Artificial Sequence
  Description of Artificial Sequence: Synthetic peptide
  Seed: RMCSLMQGSTLPRRS
RMFSLAQMSTSPRRS

SEQ ID NO: 123036 - protein, 15 aa, Artificial Sequence
  Description of Artificial Sequence: Synthetic peptide
  Seed: RMCSLMQGSTLPRRS
RMFSLAQMSTTPRRS

SEQ ID NO: 123037 - protein, 15 aa, Artificial Sequence
  Description of Artificial Sequence: Synthetic peptide
  Seed: RMCSLMQGSTLPRRS
RMFSLAQMSTVPRRS

SEQ ID NO: 123038 - protein, 15 aa, Artificial Sequence
  Description of Artificial Sequence: Synthetic peptide
  Seed: RMCSLMQGSTLPRRS
RMFSLAQNSTAPRRS

SEQ ID NO: 123039 - protein, 15 aa, Artificial Sequence
  Description of Artificial Sequence: Synthetic peptide
  Seed: RMCSLMQGSTLPRRS
RMFSLAQNSTCPRRS

SEQ ID NO: 123040 - protein, 15 aa, Artificial Sequence
  Description of Artificial Sequence: Synthetic peptide
  Seed: RMCSLMQGSTLPRRS
RMFSLAQNSTFPRRS

SEQ ID NO: 123041 - protein, 15 aa, Artificial Sequence
  Description of Artificial Sequence: Synthetic peptide
  Seed: RMCSLMQGSTLPRRS
RMFSLAQNSTGPRRS

SEQ ID NO: 123042 - protein, 15 aa, Artificial Sequence
  Description of Artificial Sequence: Synthetic peptide
  Seed: RMCSLMQGSTLPRRS
RMFSLAQNSTIPRRS

SEQ ID NO: 123043 - protein, 15 aa, Artificial Sequence
  Description of Artificial Sequence: Synthetic peptide
  Seed: RMCSLMQGSTLPRRS
RMFSLAQNSTLPRRS

SEQ ID NO: 123044 - protein, 15 aa, Artificial Sequence
  Description of Artificial Sequence: Synthetic peptide
  Seed: RMCSLMQGSTLPRRS
RMFSLAQNSTMPRRS

SEQ ID NO: 123045 - protein, 15 aa, Artificial Sequence
  Description of Artificial Sequence: Synthetic peptide
  Seed: RMCSLMQGSTLPRRS
RMFSLAQNSTNPRRS

SEQ ID NO: 123046 - protein, 15 aa, Artificial Sequence
  Description of Artificial Sequence: Synthetic peptide
  Seed: RMCSLMQGSTLPRRS
RMFSLAQNSTQPRRS

SEQ ID NO: 123047 - protein, 15 aa, Artificial Sequence
  Description of Artificial Sequence: Synthetic peptide
  Seed: RMCSLMQGSTLPRRS
RMFSLAQNSTSPRRS

SEQ ID NO: 123048 - protein, 15 aa, Artificial Sequence
  Description of Artificial Sequence: Synthetic peptide
  Seed: RMCSLMQGSTLPRRS
RMFSLAQNSTTPRRS

SEQ ID NO: 123049 - protein, 15 aa, Artificial Sequence
  Description of Artificial Sequence: Synthetic peptide
  Seed: RMCSLMQGSTLPRRS
RMFSLAQNSTVPRRS

SEQ ID NO: 123050 - protein, 15 aa, Artificial Sequence
  Description of Artificial Sequence: Synthetic peptide
  Seed: RMCSLMQGSTLPRRS
RMFSLAQPSTAPRRS

SEQ ID NO: 123051 - protein, 15 aa, Artificial Sequence
  Description of Artificial Sequence: Synthetic peptide
  Seed: RMCSLMQGSTLPRRS
RMFSLAQPSTCPRRS

SEQ ID NO: 123052 - protein, 15 aa, Artificial Sequence
  Description of Artificial Sequence: Synthetic peptide
  Seed: RMCSLMQGSTLPRRS
RMFSLAQPSTDPRRS

SEQ ID NO: 123053 - protein, 15 aa, Artificial Sequence
  Description of Artificial Sequence: Synthetic peptide
  Seed: RMCSLMQGSTLPRRS
RMFSLAQPSTEPRRS

SEQ ID NO: 123054 - protein, 15 aa, Artificial Sequence
  Description of Artificial Sequence: Synthetic peptide
  Seed: RMCSLMQGSTLPRRS
RMFSLAQPSTFPRRS

SEQ ID NO: 123055 - protein, 15 aa, Artificial Sequence
  Description of Artificial Sequence: Synthetic peptide
  Seed: RMCSLMQGSTLPRRS
RMFSLAQPSTGPRRS

SEQ ID NO: 123056 - protein, 15 aa, Artificial Sequence
  Description of Artificial Sequence: Synthetic peptide
  Seed: RMCSLMQGSTLPRRS
RMFSLAQPSTHPRRS

SEQ ID NO: 123057 - protein, 15 aa, Artificial Sequence
  Description of Artificial Sequence: Synthetic peptide
  Seed: RMCSLMQGSTLPRRS
RMFSLAQPSTIPRRS

SEQ ID NO: 123058 - protein, 15 aa, Artificial Sequence
  Description of Artificial Sequence: Synthetic peptide
  Seed: RMCSLMQGSTLPRRS
RMFSLAQPSTLPRRS

SEQ ID NO: 123059 - protein, 15 aa, Artificial Sequence
  Description of Artificial Sequence: Synthetic peptide
  Seed: RMCSLMQGSTLPRRS
RMFSLAQPSTMPRRS

SEQ ID NO: 123060 - protein, 15 aa, Artificial Sequence
  Description of Artificial Sequence: Synthetic peptide
  Seed: RMCSLMQGSTLPRRS
RMFSLAQPSTNPRRS

SEQ ID NO: 123061 - protein, 15 aa, Artificial Sequence
  Description of Artificial Sequence: Synthetic peptide
  Seed: RMCSLMQGSTLPRRS
RMFSLAQPSTPPRRS

SEQ ID NO: 123062 - protein, 15 aa, Artificial Sequence
  Description of Artificial Sequence: Synthetic peptide
  Seed: RMCSLMQGSTLPRRS
RMFSLAQPSTQPRRS

SEQ ID NO: 123063 - protein, 15 aa, Artificial Sequence
  Description of Artificial Sequence: Synthetic peptide
  Seed: RMCSLMQGSTLPRRS
RMFSLAQPSTSPRRS

SEQ ID NO: 123064 - protein, 15 aa, Artificial Sequence
  Description of Artificial Sequence: Synthetic peptide
  Seed: RMCSLMQGSTLPRRS
RMFSLAQPSTTPRRS

SEQ ID NO: 123065 - protein, 15 aa, Artificial Sequence
  Description of Artificial Sequence: Synthetic peptide
  Seed: RMCSLMQGSTLPRRS
RMFSLAQPSTVPRRS

SEQ ID NO: 123066 - protein, 15 aa, Artificial Sequence
  Description of Artificial Sequence: Synthetic peptide
  Seed: RMCSLMQGSTLPRRS
RMFSLAQPSTWPRRS

SEQ ID NO: 123067 - protein, 15 aa, Artificial Sequence
  Description of Artificial Sequence: Synthetic peptide
  Seed: RMCSLMQGSTLPRRS
RMFSLAQPSTYPRRS

SEQ ID NO: 123068 - protein, 15 aa, Artificial Sequence
  Description of Artificial Sequence: Synthetic peptide
  Seed: RMCSLMQGSTLPRRS
RMFSLAQQSTIPRRS

SEQ ID NO: 123069 - protein, 15 aa, Artificial Sequence
  Description of Artificial Sequence: Synthetic peptide
  Seed: RMCSLMQGSTLPRRS
RMFSLAQQSTLPRRS

SEQ ID NO: 123070 - protein, 15 aa, Artificial Sequence
  Description of Artificial Sequence: Synthetic peptide
  Seed: RMCSLMQGSTLPRRS
RMFSLAQQSTVPRRS

SEQ ID NO: 123071 - protein, 15 aa, Artificial Sequence
  Description of Artificial Sequence: Synthetic peptide
  Seed: RMCSLMQGSTLPRRS
RMFSLAQSSTAPRRS

SEQ ID NO: 123072 - protein, 15 aa, Artificial Sequence
  Description of Artificial Sequence: Synthetic peptide
  Seed: RMCSLMQGSTLPRRS
RMFSLAQSSTCPRRS

SEQ ID NO: 123073 - protein, 15 aa, Artificial Sequence
  Description of Artificial Sequence: Synthetic peptide
  Seed: RMCSLMQGSTLPRRS
RMFSLAQSSTFPRRS

SEQ ID NO: 123074 - protein, 15 aa, Artificial Sequence
  Description of Artificial Sequence: Synthetic peptide
  Seed: RMCSLMQGSTLPRRS
RMFSLAQSSTGPRRS

SEQ ID NO: 123075 - protein, 15 aa, Artificial Sequence
  Description of Artificial Sequence: Synthetic peptide
  Seed: RMCSLMQGSTLPRRS
RMFSLAQSSTHPRRS

SEQ ID NO: 123076 - protein, 15 aa, Artificial Sequence
  Description of Artificial Sequence: Synthetic peptide
  Seed: RMCSLMQGSTLPRRS
RMFSLAQSSTIPRRS

SEQ ID NO: 123077 - protein, 15 aa, Artificial Sequence
  Description of Artificial Sequence: Synthetic peptide
  Seed: RMCSLMQGSTLPRRS
RMFSLAQSSTLPRRS

SEQ ID NO: 123078 - protein, 15 aa, Artificial Sequence
  Description of Artificial Sequence: Synthetic peptide
  Seed: RMCSLMQGSTLPRRS
RMFSLAQSSTMPRRS

SEQ ID NO: 123079 - protein, 15 aa, Artificial Sequence
  Description of Artificial Sequence: Synthetic peptide
  Seed: RMCSLMQGSTLPRRS
RMFSLAQSSTNPRRS

SEQ ID NO: 123080 - protein, 15 aa, Artificial Sequence
  Description of Artificial Sequence: Synthetic peptide
  Seed: RMCSLMQGSTLPRRS
RMFSLAQSSTQPRRS

SEQ ID NO: 123081 - protein, 15 aa, Artificial Sequence
  Description of Artificial Sequence: Synthetic peptide
  Seed: RMCSLMQGSTLPRRS
RMFSLAQSSTSPRRS

SEQ ID NO: 123082 - protein, 15 aa, Artificial Sequence
  Description of Artificial Sequence: Synthetic peptide
  Seed: RMCSLMQGSTLPRRS
RMFSLAQSSTTPRRS

SEQ ID NO: 123083 - protein, 15 aa, Artificial Sequence
  Description of Artificial Sequence: Synthetic peptide
  Seed: RMCSLMQGSTLPRRS
RMFSLAQSSTVPRRS

SEQ ID NO: 123084 - protein, 15 aa, Artificial Sequence
  Description of Artificial Sequence: Synthetic peptide
  Seed: RMCSLMQGSTLPRRS
RMFSLAQSSTYPRRS

SEQ ID NO: 123085 - protein, 15 aa, Artificial Sequence
  Description of Artificial Sequence: Synthetic peptide
  Seed: RMCSLMQGSTLPRRS
RMFSLAQTSTAPRRS

SEQ ID NO: 123086 - protein, 15 aa, Artificial Sequence
  Description of Artificial Sequence: Synthetic peptide
  Seed: RMCSLMQGSTLPRRS
RMFSLAQTSTFPRRS

SEQ ID NO: 123087 - protein, 15 aa, Artificial Sequence
  Description of Artificial Sequence: Synthetic peptide
  Seed: RMCSLMQGSTLPRRS
RMFSLAQTSTGPRRS

SEQ ID NO: 123088 - protein, 15 aa, Artificial Sequence
  Description of Artificial Sequence: Synthetic peptide
  Seed: RMCSLMQGSTLPRRS
RMFSLAQTSTHPRRS

SEQ ID NO: 123089 - protein, 15 aa, Artificial Sequence
  Description of Artificial Sequence: Synthetic peptide
  Seed: RMCSLMQGSTLPRRS
RMFSLAQTSTIPRRS

SEQ ID NO: 123090 - protein, 15 aa, Artificial Sequence
  Description of Artificial Sequence: Synthetic peptide
  Seed: RMCSLMQGSTLPRRS
RMFSLAQTSTLPRRS

SEQ ID NO: 123091 - protein, 15 aa, Artificial Sequence
  Description of Artificial Sequence: Synthetic peptide
  Seed: RMCSLMQGSTLPRRS
RMFSLAQTSTMPRRS

SEQ ID NO: 123092 - protein, 15 aa, Artificial Sequence
  Description of Artificial Sequence: Synthetic peptide
  Seed: RMCSLMQGSTLPRRS
RMFSLAQTSTNPRRS

SEQ ID NO: 123093 - protein, 15 aa, Artificial Sequence
  Description of Artificial Sequence: Synthetic peptide
  Seed: RMCSLMQGSTLPRRS
RMFSLAQTSTQPRRS

SEQ ID NO: 123094 - protein, 15 aa, Artificial Sequence
  Description of Artificial Sequence: Synthetic peptide
  Seed: RMCSLMQGSTLPRRS
RMFSLAQTSTSPRRS

SEQ ID NO: 123095 - protein, 15 aa, Artificial Sequence
  Description of Artificial Sequence: Synthetic peptide
  Seed: RMCSLMQGSTLPRRS
RMFSLAQTSTTPRRS

SEQ ID NO: 123096 - protein, 15 aa, Artificial Sequence
  Description of Artificial Sequence: Synthetic peptide
  Seed: RMCSLMQGSTLPRRS
RMFSLAQTSTVPRRS

SEQ ID NO: 123097 - protein, 15 aa, Artificial Sequence
  Description of Artificial Sequence: Synthetic peptide
  Seed: RMCSLMQGSTLPRRS
RMFSLAQVSTAPRRS

SEQ ID NO: 123098 - protein, 15 aa, Artificial Sequence
  Description of Artificial Sequence: Synthetic peptide
  Seed: RMCSLMQGSTLPRRS
RMFSLAQVSTDPRRS

SEQ ID NO: 123099 - protein, 15 aa, Artificial Sequence
  Description of Artificial Sequence: Synthetic peptide
  Seed: RMCSLMQGSTLPRRS
RMFSLAQVSTEPRRS

SEQ ID NO: 123100 - protein, 15 aa, Artificial Sequence
  Description of Artificial Sequence: Synthetic peptide
  Seed: RMCSLMQGSTLPRRS
RMFSLAQVSTGPRRS

SEQ ID NO: 123101 - protein, 15 aa, Artificial Sequence
  Description of Artificial Sequence: Synthetic peptide
  Seed: RMCSLMQGSTLPRRS
RMFSLAQVSTHPRRS

SEQ ID NO: 123102 - protein, 15 aa, Artificial Sequence
  Description of Artificial Sequence: Synthetic peptide
  Seed: RMCSLMQGSTLPRRS
RMFSLAQVSTIPRRS

SEQ ID NO: 123103 - protein, 15 aa, Artificial Sequence
  Description of Artificial Sequence: Synthetic peptide
  Seed: RMCSLMQGSTLPRRS
RMFSLAQVSTLPRRS

SEQ ID NO: 123104 - protein, 15 aa, Artificial Sequence
  Description of Artificial Sequence: Synthetic peptide
  Seed: RMCSLMQGSTLPRRS
RMFSLAQVSTMPRRS

SEQ ID NO: 123105 - protein, 15 aa, Artificial Sequence
  Description of Artificial Sequence: Synthetic peptide
  Seed: RMCSLMQGSTLPRRS
RMFSLAQVSTNPRRS

SEQ ID NO: 123106 - protein, 15 aa, Artificial Sequence
  Description of Artificial Sequence: Synthetic peptide
  Seed: RMCSLMQGSTLPRRS
RMFSLAQVSTPPRRS

SEQ ID NO: 123107 - protein, 15 aa, Artificial Sequence
  Description of Artificial Sequence: Synthetic peptide
  Seed: RMCSLMQGSTLPRRS
RMFSLAQVSTQPRRS

SEQ ID NO: 123108 - protein, 15 aa, Artificial Sequence
  Description of Artificial Sequence: Synthetic peptide
  Seed: RMCSLMQGSTLPRRS
RMFSLAQVSTSPRRS

SEQ ID NO: 123109 - protein, 15 aa, Artificial Sequence
  Description of Artificial Sequence: Synthetic peptide
  Seed: RMCSLMQGSTLPRRS
RMFSLAQVSTTPRRS

SEQ ID NO: 123110 - protein, 15 aa, Artificial Sequence
  Description of Artificial Sequence: Synthetic peptide
  Seed: RMCSLMQGSTLPRRS
RMFSLAQVSTVPRRS

SEQ ID NO: 123111 - protein, 15 aa, Artificial Sequence
  Description of Artificial Sequence: Synthetic peptide
  Seed: RMCSLMQGSTLPRRS
RMFSLCQASTAPRRS

SEQ ID NO: 123112 - protein, 15 aa, Artificial Sequence
  Description of Artificial Sequence: Synthetic peptide
  Seed: RMCSLMQGSTLPRRS
RMFSLCQASTIPRRS

SEQ ID NO: 123113 - protein, 15 aa, Artificial Sequence
  Description of Artificial Sequence: Synthetic peptide
  Seed: RMCSLMQGSTLPRRS
RMFSLCQASTLPRRS

SEQ ID NO: 123114 - protein, 15 aa, Artificial Sequence
  Description of Artificial Sequence: Synthetic peptide
  Seed: RMCSLMQGSTLPRRS
RMFSLCQASTMPRRS

SEQ ID NO: 123115 - protein, 15 aa, Artificial Sequence
  Description of Artificial Sequence: Synthetic peptide
  Seed: RMCSLMQGSTLPRRS
RMFSLCQASTSPRRS

SEQ ID NO: 123116 - protein, 15 aa, Artificial Sequence
  Description of Artificial Sequence: Synthetic peptide
  Seed: RMCSLMQGSTLPRRS
RMFSLCQASTTPRRS

SEQ ID NO: 123117 - protein, 15 aa, Artificial Sequence
  Description of Artificial Sequence: Synthetic peptide
  Seed: RMCSLMQGSTLPRRS
RMFSLCQASTVPRRS

SEQ ID NO: 123118 - protein, 15 aa, Artificial Sequence
  Description of Artificial Sequence: Synthetic peptide
  Seed: RMCSLMQGSTLPRRS
RMFSLCQGSTAPRRS

SEQ ID NO: 123119 - protein, 15 aa, Artificial Sequence
  Description of Artificial Sequence: Synthetic peptide
  Seed: RMCSLMQGSTLPRRS
RMFSLCQGSTIPRRS

SEQ ID NO: 123120 - protein, 15 aa, Artificial Sequence
  Description of Artificial Sequence: Synthetic peptide
  Seed: RMCSLMQGSTLPRRS
RMFSLCQGSTLPRRS

SEQ ID NO: 123121 - protein, 15 aa, Artificial Sequence
  Description of Artificial Sequence: Synthetic peptide
  Seed: RMCSLMQGSTLPRRS
RMFSLCQGSTMPRRS

SEQ ID NO: 123122 - protein, 15 aa, Artificial Sequence
  Description of Artificial Sequence: Synthetic peptide
  Seed: RMCSLMQGSTLPRRS
RMFSLCQGSTVPRRS

SEQ ID NO: 123123 - protein, 15 aa, Artificial Sequence
  Description of Artificial Sequence: Synthetic peptide
  Seed: RMCSLMQGSTLPRRS
RMFSLCQPSTIPRRS

SEQ ID NO: 123124 - protein, 15 aa, Artificial Sequence
  Description of Artificial Sequence: Synthetic peptide
  Seed: RMCSLMQGSTLPRRS
RMFSLCQPSTLPRRS

SEQ ID NO: 123125 - protein, 15 aa, Artificial Sequence
  Description of Artificial Sequence: Synthetic peptide
  Seed: RMCSLMQGSTLPRRS
RMFSLCQPSTVPRRS

SEQ ID NO: 123126 - protein, 15 aa, Artificial Sequence
  Description of Artificial Sequence: Synthetic peptide
  Seed: RMCSLMQGSTLPRRS
RMFSLCQSSTAPRRS

SEQ ID NO: 123127 - protein, 15 aa, Artificial Sequence
  Description of Artificial Sequence: Synthetic peptide
  Seed: RMCSLMQGSTLPRRS
RMFSLCQSSTIPRRS

SEQ ID NO: 123128 - protein, 15 aa, Artificial Sequence
  Description of Artificial Sequence: Synthetic peptide
  Seed: RMCSLMQGSTLPRRS
RMFSLCQSSTLPRRS

SEQ ID NO: 123129 - protein, 15 aa, Artificial Sequence
  Description of Artificial Sequence: Synthetic peptide
  Seed: RMCSLMQGSTLPRRS
RMFSLCQSSTVPRRS

SEQ ID NO: 123130 - protein, 15 aa, Artificial Sequence
  Description of Artificial Sequence: Synthetic peptide
  Seed: RMCSLMQGSTLPRRS
RMFSLDQASTIPRRS

SEQ ID NO: 123131 - protein, 15 aa, Artificial Sequence
  Description of Artificial Sequence: Synthetic peptide
  Seed: RMCSLMQGSTLPRRS
RMFSLDQASTLPRRS

SEQ ID NO: 123132 - protein, 15 aa, Artificial Sequence
  Description of Artificial Sequence: Synthetic peptide
  Seed: RMCSLMQGSTLPRRS
RMFSLDQASTVPRRS

SEQ ID NO: 123133 - protein, 15 aa, Artificial Sequence
  Description of Artificial Sequence: Synthetic peptide
  Seed: RMCSLMQGSTLPRRS
RMFSLEQASTAPRRS

SEQ ID NO: 123134 - protein, 15 aa, Artificial Sequence
  Description of Artificial Sequence: Synthetic peptide
  Seed: RMCSLMQGSTLPRRS
RMFSLEQASTFPRRS

SEQ ID NO: 123135 - protein, 15 aa, Artificial Sequence
  Description of Artificial Sequence: Synthetic peptide
  Seed: RMCSLMQGSTLPRRS
RMFSLEQASTGPRRS

SEQ ID NO: 123136 - protein, 15 aa, Artificial Sequence
  Description of Artificial Sequence: Synthetic peptide
  Seed: RMCSLMQGSTLPRRS
RMFSLEQASTIPRRS

SEQ ID NO: 123137 - protein, 15 aa, Artificial Sequence
  Description of Artificial Sequence: Synthetic peptide
  Seed: RMCSLMQGSTLPRRS
RMFSLEQASTLPRRS

SEQ ID NO: 123138 - protein, 15 aa, Artificial Sequence
  Description of Artificial Sequence: Synthetic peptide
  Seed: RMCSLMQGSTLPRRS
RMFSLEQASTMPRRS

SEQ ID NO: 123139 - protein, 15 aa, Artificial Sequence
  Description of Artificial Sequence: Synthetic peptide
  Seed: RMCSLMQGSTLPRRS
RMFSLEQASTNPRRS

SEQ ID NO: 123140 - protein, 15 aa, Artificial Sequence
  Description of Artificial Sequence: Synthetic peptide
  Seed: RMCSLMQGSTLPRRS
RMFSLEQASTSPRRS

SEQ ID NO: 123141 - protein, 15 aa, Artificial Sequence
  Description of Artificial Sequence: Synthetic peptide
  Seed: RMCSLMQGSTLPRRS
RMFSLEQASTTPRRS

SEQ ID NO: 123142 - protein, 15 aa, Artificial Sequence
  Description of Artificial Sequence: Synthetic peptide
  Seed: RMCSLMQGSTLPRRS
RMFSLEQASTVPRRS

SEQ ID NO: 123143 - protein, 15 aa, Artificial Sequence
  Description of Artificial Sequence: Synthetic peptide
  Seed: RMCSLMQGSTLPRRS
RMFSLEQGSTAPRRS

SEQ ID NO: 123144 - protein, 15 aa, Artificial Sequence
  Description of Artificial Sequence: Synthetic peptide
  Seed: RMCSLMQGSTLPRRS
RMFSLEQGSTGPRRS

SEQ ID NO: 123145 - protein, 15 aa, Artificial Sequence
  Description of Artificial Sequence: Synthetic peptide
  Seed: RMCSLMQGSTLPRRS
RMFSLEQGSTIPRRS

SEQ ID NO: 123146 - protein, 15 aa, Artificial Sequence
  Description of Artificial Sequence: Synthetic peptide
  Seed: RMCSLMQGSTLPRRS
RMFSLEQGSTLPRRS

SEQ ID NO: 123147 - protein, 15 aa, Artificial Sequence
  Description of Artificial Sequence: Synthetic peptide
  Seed: RMCSLMQGSTLPRRS
RMFSLEQGSTMPRRS

SEQ ID NO: 123148 - protein, 15 aa, Artificial Sequence
  Description of Artificial Sequence: Synthetic peptide
  Seed: RMCSLMQGSTLPRRS
RMFSLEQGSTSPRRS

SEQ ID NO: 123149 - protein, 15 aa, Artificial Sequence
  Description of Artificial Sequence: Synthetic peptide
  Seed: RMCSLMQGSTLPRRS
RMFSLEQGSTTPRRS

SEQ ID NO: 123150 - protein, 15 aa, Artificial Sequence
  Description of Artificial Sequence: Synthetic peptide
  Seed: RMCSLMQGSTLPRRS
RMFSLEQGSTVPRRS

SEQ ID NO: 123151 - protein, 15 aa, Artificial Sequence
  Description of Artificial Sequence: Synthetic peptide
  Seed: RMCSLMQGSTLPRRS
RMFSLEQISTAPRRS

SEQ ID NO: 123152 - protein, 15 aa, Artificial Sequence
  Description of Artificial Sequence: Synthetic peptide
  Seed: RMCSLMQGSTLPRRS
RMFSLEQNSTAPRRS

SEQ ID NO: 123153 - protein, 15 aa, Artificial Sequence
  Description of Artificial Sequence: Synthetic peptide
  Seed: RMCSLMQGSTLPRRS
RMFSLEQNSTIPRRS

SEQ ID NO: 123154 - protein, 15 aa, Artificial Sequence
  Description of Artificial Sequence: Synthetic peptide
  Seed: RMCSLMQGSTLPRRS
RMFSLEQNSTLPRRS

SEQ ID NO: 123155 - protein, 15 aa, Artificial Sequence
  Description of Artificial Sequence: Synthetic peptide
  Seed: RMCSLMQGSTLPRRS
RMFSLEQNSTVPRRS

SEQ ID NO: 123156 - protein, 15 aa, Artificial Sequence
  Description of Artificial Sequence: Synthetic peptide
  Seed: RMCSLMQGSTLPRRS
RMFSLEQPSTAPRRS

SEQ ID NO: 123157 - protein, 15 aa, Artificial Sequence
  Description of Artificial Sequence: Synthetic peptide
  Seed: RMCSLMQGSTLPRRS
RMFSLEQPSTIPRRS

SEQ ID NO: 123158 - protein, 15 aa, Artificial Sequence
  Description of Artificial Sequence: Synthetic peptide
  Seed: RMCSLMQGSTLPRRS
RMFSLEQPSTLPRRS

SEQ ID NO: 123159 - protein, 15 aa, Artificial Sequence
  Description of Artificial Sequence: Synthetic peptide
  Seed: RMCSLMQGSTLPRRS
RMFSLEQPSTMPRRS

SEQ ID NO: 123160 - protein, 15 aa, Artificial Sequence
  Description of Artificial Sequence: Synthetic peptide
  Seed: RMCSLMQGSTLPRRS
RMFSLEQPSTSPRRS

SEQ ID NO: 123161 - protein, 15 aa, Artificial Sequence
  Description of Artificial Sequence: Synthetic peptide
  Seed: RMCSLMQGSTLPRRS
RMFSLEQPSTVPRRS

SEQ ID NO: 123162 - protein, 15 aa, Artificial Sequence
  Description of Artificial Sequence: Synthetic peptide
  Seed: RMCSLMQGSTLPRRS
RMFSLEQSSTAPRRS

SEQ ID NO: 123163 - protein, 15 aa, Artificial Sequence
  Description of Artificial Sequence: Synthetic peptide
  Seed: RMCSLMQGSTLPRRS
RMFSLEQSSTIPRRS

SEQ ID NO: 123164 - protein, 15 aa, Artificial Sequence
  Description of Artificial Sequence: Synthetic peptide
  Seed: RMCSLMQGSTLPRRS
RMFSLEQSSTLPRRS

SEQ ID NO: 123165 - protein, 15 aa, Artificial Sequence
  Description of Artificial Sequence: Synthetic peptide
  Seed: RMCSLMQGSTLPRRS
RMFSLEQSSTMPRRS

SEQ ID NO: 123166 - protein, 15 aa, Artificial Sequence
  Description of Artificial Sequence: Synthetic peptide
  Seed: RMCSLMQGSTLPRRS
RMFSLEQSSTSPRRS

SEQ ID NO: 123167 - protein, 15 aa, Artificial Sequence
  Description of Artificial Sequence: Synthetic peptide
  Seed: RMCSLMQGSTLPRRS
RMFSLEQSSTTPRRS

SEQ ID NO: 123168 - protein, 15 aa, Artificial Sequence
  Description of Artificial Sequence: Synthetic peptide
  Seed: RMCSLMQGSTLPRRS
RMFSLEQSSTVPRRS

SEQ ID NO: 123169 - protein, 15 aa, Artificial Sequence
  Description of Artificial Sequence: Synthetic peptide
  Seed: RMCSLMQGSTLPRRS
RMFSLEQTSTAPRRS

SEQ ID NO: 123170 - protein, 15 aa, Artificial Sequence
  Description of Artificial Sequence: Synthetic peptide
  Seed: RMCSLMQGSTLPRRS
RMFSLEQTSTIPRRS

SEQ ID NO: 123171 - protein, 15 aa, Artificial Sequence
  Description of Artificial Sequence: Synthetic peptide
  Seed: RMCSLMQGSTLPRRS
RMFSLEQTSTLPRRS

SEQ ID NO: 123172 - protein, 15 aa, Artificial Sequence
  Description of Artificial Sequence: Synthetic peptide
  Seed: RMCSLMQGSTLPRRS
RMFSLEQTSTSPRRS

SEQ ID NO: 123173 - protein, 15 aa, Artificial Sequence
  Description of Artificial Sequence: Synthetic peptide
  Seed: RMCSLMQGSTLPRRS
RMFSLEQTSTVPRRS

SEQ ID NO: 123174 - protein, 15 aa, Artificial Sequence
  Description of Artificial Sequence: Synthetic peptide
  Seed: RMCSLMQGSTLPRRS
RMFSLEQVSTAPRRS

SEQ ID NO: 123175 - protein, 15 aa, Artificial Sequence
  Description of Artificial Sequence: Synthetic peptide
  Seed: RMCSLMQGSTLPRRS
RMFSLEQVSTIPRRS

SEQ ID NO: 123176 - protein, 15 aa, Artificial Sequence
  Description of Artificial Sequence: Synthetic peptide
  Seed: RMCSLMQGSTLPRRS
RMFSLEQVSTLPRRS

SEQ ID NO: 123177 - protein, 15 aa, Artificial Sequence
  Description of Artificial Sequence: Synthetic peptide
  Seed: RMCSLMQGSTLPRRS
RMFSLEQVSTNPRRS

SEQ ID NO: 123178 - protein, 15 aa, Artificial Sequence
  Description of Artificial Sequence: Synthetic peptide
  Seed: RMCSLMQGSTLPRRS
RMFSLEQVSTSPRRS

SEQ ID NO: 123179 - protein, 15 aa, Artificial Sequence
  Description of Artificial Sequence: Synthetic peptide
  Seed: RMCSLMQGSTLPRRS
RMFSLEQVSTVPRRS

SEQ ID NO: 123180 - protein, 15 aa, Artificial Sequence
  Description of Artificial Sequence: Synthetic peptide
  Seed: RMCSLMQGSTLPRRS
RMFSLFQASTAPRRS

SEQ ID NO: 123181 - protein, 15 aa, Artificial Sequence
  Description of Artificial Sequence: Synthetic peptide
  Seed: RMCSLMQGSTLPRRS
RMFSLFQASTCPRRS

SEQ ID NO: 123182 - protein, 15 aa, Artificial Sequence
  Description of Artificial Sequence: Synthetic peptide
  Seed: RMCSLMQGSTLPRRS
RMFSLFQASTFPRRS

SEQ ID NO: 123183 - protein, 15 aa, Artificial Sequence
  Description of Artificial Sequence: Synthetic peptide
  Seed: RMCSLMQGSTLPRRS
RMFSLFQASTGPRRS

SEQ ID NO: 123184 - protein, 15 aa, Artificial Sequence
  Description of Artificial Sequence: Synthetic peptide
  Seed: RMCSLMQGSTLPRRS
RMFSLFQASTHPRRS

SEQ ID NO: 123185 - protein, 15 aa, Artificial Sequence
  Description of Artificial Sequence: Synthetic peptide
  Seed: RMCSLMQGSTLPRRS
RMFSLFQASTIPRRS

SEQ ID NO: 123186 - protein, 15 aa, Artificial Sequence
  Description of Artificial Sequence: Synthetic peptide
  Seed: RMCSLMQGSTLPRRS
RMFSLFQASTLPRRS

SEQ ID NO: 123187 - protein, 15 aa, Artificial Sequence
  Description of Artificial Sequence: Synthetic peptide
  Seed: RMCSLMQGSTLPRRS
RMFSLFQASTMPRRS

SEQ ID NO: 123188 - protein, 15 aa, Artificial Sequence
  Description of Artificial Sequence: Synthetic peptide
  Seed: RMCSLMQGSTLPRRS
RMFSLFQASTNPRRS

SEQ ID NO: 123189 - protein, 15 aa, Artificial Sequence
  Description of Artificial Sequence: Synthetic peptide
  Seed: RMCSLMQGSTLPRRS
RMFSLFQASTPPRRS

SEQ ID NO: 123190 - protein, 15 aa, Artificial Sequence
  Description of Artificial Sequence: Synthetic peptide
  Seed: RMCSLMQGSTLPRRS
RMFSLFQASTQPRRS

SEQ ID NO: 123191 - protein, 15 aa, Artificial Sequence
  Description of Artificial Sequence: Synthetic peptide
  Seed: RMCSLMQGSTLPRRS
RMFSLFQASTRPRRS

SEQ ID NO: 123192 - protein, 15 aa, Artificial Sequence
  Description of Artificial Sequence: Synthetic peptide
  Seed: RMCSLMQGSTLPRRS
RMFSLFQASTSPRRS

SEQ ID NO: 123193 - protein, 15 aa, Artificial Sequence
  Description of Artificial Sequence: Synthetic peptide
  Seed: RMCSLMQGSTLPRRS
RMFSLFQASTTPRRS

SEQ ID NO: 123194 - protein, 15 aa, Artificial Sequence
  Description of Artificial Sequence: Synthetic peptide
  Seed: RMCSLMQGSTLPRRS
RMFSLFQASTVPRRS

SEQ ID NO: 123195 - protein, 15 aa, Artificial Sequence
  Description of Artificial Sequence: Synthetic peptide
  Seed: RMCSLMQGSTLPRRS
RMFSLFQGSTAPRRS

SEQ ID NO: 123196 - protein, 15 aa, Artificial Sequence
  Description of Artificial Sequence: Synthetic peptide
  Seed: RMCSLMQGSTLPRRS
RMFSLFQGSTGPRRS

SEQ ID NO: 123197 - protein, 15 aa, Artificial Sequence
  Description of Artificial Sequence: Synthetic peptide
  Seed: RMCSLMQGSTLPRRS
RMFSLFQGSTIPRRS

SEQ ID NO: 123198 - protein, 15 aa, Artificial Sequence
  Description of Artificial Sequence: Synthetic peptide
  Seed: RMCSLMQGSTLPRRS
RMFSLFQGSTLPRRS

SEQ ID NO: 123199 - protein, 15 aa, Artificial Sequence
  Description of Artificial Sequence: Synthetic peptide
  Seed: RMCSLMQGSTLPRRS
RMFSLFQGSTMPRRS

SEQ ID NO: 123200 - protein, 15 aa, Artificial Sequence
  Description of Artificial Sequence: Synthetic peptide
  Seed: RMCSLMQGSTLPRRS
RMFSLFQGSTNPRRS

SEQ ID NO: 123201 - protein, 15 aa, Artificial Sequence
  Description of Artificial Sequence: Synthetic peptide
  Seed: RMCSLMQGSTLPRRS
RMFSLFQGSTSPRRS

SEQ ID NO: 123202 - protein, 15 aa, Artificial Sequence
  Description of Artificial Sequence: Synthetic peptide
  Seed: RMCSLMQGSTLPRRS
RMFSLFQGSTTPRRS

SEQ ID NO: 123203 - protein, 15 aa, Artificial Sequence
  Description of Artificial Sequence: Synthetic peptide
  Seed: RMCSLMQGSTLPRRS
RMFSLFQGSTVPRRS

SEQ ID NO: 123204 - protein, 15 aa, Artificial Sequence
  Description of Artificial Sequence: Synthetic peptide
  Seed: RMCSLMQGSTLPRRS
RMFSLFQHSTAPRRS

SEQ ID NO: 123205 - protein, 15 aa, Artificial Sequence
  Description of Artificial Sequence: Synthetic peptide
  Seed: RMCSLMQGSTLPRRS
RMFSLFQISTAPRRS

SEQ ID NO: 123206 - protein, 15 aa, Artificial Sequence
  Description of Artificial Sequence: Synthetic peptide
  Seed: RMCSLMQGSTLPRRS
RMFSLFQISTNPRRS

SEQ ID NO: 123207 - protein, 15 aa, Artificial Sequence
  Description of Artificial Sequence: Synthetic peptide
  Seed: RMCSLMQGSTLPRRS
RMFSLFQISTSPRRS

SEQ ID NO: 123208 - protein, 15 aa, Artificial Sequence
  Description of Artificial Sequence: Synthetic peptide
  Seed: RMCSLMQGSTLPRRS
RMFSLFQISTTPRRS

SEQ ID NO: 123209 - protein, 15 aa, Artificial Sequence
  Description of Artificial Sequence: Synthetic peptide
  Seed: RMCSLMQGSTLPRRS
RMFSLFQISTVPRRS

SEQ ID NO: 123210 - protein, 15 aa, Artificial Sequence
  Description of Artificial Sequence: Synthetic peptide
  Seed: RMCSLMQGSTLPRRS
RMFSLFQLSTAPRRS

SEQ ID NO: 123211 - protein, 15 aa, Artificial Sequence
  Description of Artificial Sequence: Synthetic peptide
  Seed: RMCSLMQGSTLPRRS
RMFSLFQLSTSPRRS

SEQ ID NO: 123212 - protein, 15 aa, Artificial Sequence
  Description of Artificial Sequence: Synthetic peptide
  Seed: RMCSLMQGSTLPRRS
RMFSLFQMSTSPRRS

SEQ ID NO: 123213 - protein, 15 aa, Artificial Sequence
  Description of Artificial Sequence: Synthetic peptide
  Seed: RMCSLMQGSTLPRRS
RMFSLFQNSTAPRRS

SEQ ID NO: 123214 - protein, 15 aa, Artificial Sequence
  Description of Artificial Sequence: Synthetic peptide
  Seed: RMCSLMQGSTLPRRS
RMFSLFQNSTIPRRS

SEQ ID NO: 123215 - protein, 15 aa, Artificial Sequence
  Description of Artificial Sequence: Synthetic peptide
  Seed: RMCSLMQGSTLPRRS
RMFSLFQNSTLPRRS

SEQ ID NO: 123216 - protein, 15 aa, Artificial Sequence
  Description of Artificial Sequence: Synthetic peptide
  Seed: RMCSLMQGSTLPRRS
RMFSLFQNSTSPRRS

SEQ ID NO: 123217 - protein, 15 aa, Artificial Sequence
  Description of Artificial Sequence: Synthetic peptide
  Seed: RMCSLMQGSTLPRRS
RMFSLFQNSTVPRRS

SEQ ID NO: 123218 - protein, 15 aa, Artificial Sequence
  Description of Artificial Sequence: Synthetic peptide
  Seed: RMCSLMQGSTLPRRS
RMFSLFQPSTAPRRS

SEQ ID NO: 123219 - protein, 15 aa, Artificial Sequence
  Description of Artificial Sequence: Synthetic peptide
  Seed: RMCSLMQGSTLPRRS
RMFSLFQPSTGPRRS

SEQ ID NO: 123220 - protein, 15 aa, Artificial Sequence
  Description of Artificial Sequence: Synthetic peptide
  Seed: RMCSLMQGSTLPRRS
RMFSLFQPSTHPRRS

SEQ ID NO: 123221 - protein, 15 aa, Artificial Sequence
  Description of Artificial Sequence: Synthetic peptide
  Seed: RMCSLMQGSTLPRRS
RMFSLFQPSTIPRRS

SEQ ID NO: 123222 - protein, 15 aa, Artificial Sequence
  Description of Artificial Sequence: Synthetic peptide
  Seed: RMCSLMQGSTLPRRS
RMFSLFQPSTLPRRS

SEQ ID NO: 123223 - protein, 15 aa, Artificial Sequence
  Description of Artificial Sequence: Synthetic peptide
  Seed: RMCSLMQGSTLPRRS
RMFSLFQPSTMPRRS

SEQ ID NO: 123224 - protein, 15 aa, Artificial Sequence
  Description of Artificial Sequence: Synthetic peptide
  Seed: RMCSLMQGSTLPRRS
RMFSLFQPSTNPRRS

SEQ ID NO: 123225 - protein, 15 aa, Artificial Sequence
  Description of Artificial Sequence: Synthetic peptide
  Seed: RMCSLMQGSTLPRRS
RMFSLFQPSTSPRRS

SEQ ID NO: 123226 - protein, 15 aa, Artificial Sequence
  Description of Artificial Sequence: Synthetic peptide
  Seed: RMCSLMQGSTLPRRS
RMFSLFQPSTTPRRS

SEQ ID NO: 123227 - protein, 15 aa, Artificial Sequence
  Description of Artificial Sequence: Synthetic peptide
  Seed: RMCSLMQGSTLPRRS
RMFSLFQPSTVPRRS

SEQ ID NO: 123228 - protein, 15 aa, Artificial Sequence
  Description of Artificial Sequence: Synthetic peptide
  Seed: RMCSLMQGSTLPRRS
RMFSLFQSSTAPRRS

SEQ ID NO: 123229 - protein, 15 aa, Artificial Sequence
  Description of Artificial Sequence: Synthetic peptide
  Seed: RMCSLMQGSTLPRRS
RMFSLFQSSTGPRRS

SEQ ID NO: 123230 - protein, 15 aa, Artificial Sequence
  Description of Artificial Sequence: Synthetic peptide
  Seed: RMCSLMQGSTLPRRS
RMFSLFQSSTIPRRS

SEQ ID NO: 123231 - protein, 15 aa, Artificial Sequence
  Description of Artificial Sequence: Synthetic peptide
  Seed: RMCSLMQGSTLPRRS
RMFSLFQSSTLPRRS

SEQ ID NO: 123232 - protein, 15 aa, Artificial Sequence
  Description of Artificial Sequence: Synthetic peptide
  Seed: RMCSLMQGSTLPRRS
RMFSLFQSSTMPRRS

SEQ ID NO: 123233 - protein, 15 aa, Artificial Sequence
  Description of Artificial Sequence: Synthetic peptide
  Seed: RMCSLMQGSTLPRRS
RMFSLFQSSTNPRRS

SEQ ID NO: 123234 - protein, 15 aa, Artificial Sequence
  Description of Artificial Sequence: Synthetic peptide
  Seed: RMCSLMQGSTLPRRS
RMFSLFQSSTRPRRS

SEQ ID NO: 123235 - protein, 15 aa, Artificial Sequence
  Description of Artificial Sequence: Synthetic peptide
  Seed: RMCSLMQGSTLPRRS
RMFSLFQSSTSPRRS

SEQ ID NO: 123236 - protein, 15 aa, Artificial Sequence
  Description of Artificial Sequence: Synthetic peptide
  Seed: RMCSLMQGSTLPRRS
RMFSLFQSSTTPRRS

SEQ ID NO: 123237 - protein, 15 aa, Artificial Sequence
  Description of Artificial Sequence: Synthetic peptide
  Seed: RMCSLMQGSTLPRRS
RMFSLFQSSTVPRRS

SEQ ID NO: 123238 - protein, 15 aa, Artificial Sequence
  Description of Artificial Sequence: Synthetic peptide
  Seed: RMCSLMQGSTLPRRS
RMFSLFQTSTAPRRS

SEQ ID NO: 123239 - protein, 15 aa, Artificial Sequence
  Description of Artificial Sequence: Synthetic peptide
  Seed: RMCSLMQGSTLPRRS
RMFSLFQTSTGPRRS

SEQ ID NO: 123240 - protein, 15 aa, Artificial Sequence
  Description of Artificial Sequence: Synthetic peptide
  Seed: RMCSLMQGSTLPRRS
RMFSLFQTSTIPRRS

SEQ ID NO: 123241 - protein, 15 aa, Artificial Sequence
  Description of Artificial Sequence: Synthetic peptide
  Seed: RMCSLMQGSTLPRRS
RMFSLFQTSTLPRRS

SEQ ID NO: 123242 - protein, 15 aa, Artificial Sequence
  Description of Artificial Sequence: Synthetic peptide
  Seed: RMCSLMQGSTLPRRS
RMFSLFQTSTMPRRS

SEQ ID NO: 123243 - protein, 15 aa, Artificial Sequence
  Description of Artificial Sequence: Synthetic peptide
  Seed: RMCSLMQGSTLPRRS
RMFSLFQTSTNPRRS

SEQ ID NO: 123244 - protein, 15 aa, Artificial Sequence
  Description of Artificial Sequence: Synthetic peptide
  Seed: RMCSLMQGSTLPRRS
RMFSLFQTSTSPRRS

SEQ ID NO: 123245 - protein, 15 aa, Artificial Sequence
  Description of Artificial Sequence: Synthetic peptide
  Seed: RMCSLMQGSTLPRRS
RMFSLFQTSTTPRRS

SEQ ID NO: 123246 - protein, 15 aa, Artificial Sequence
  Description of Artificial Sequence: Synthetic peptide
  Seed: RMCSLMQGSTLPRRS
RMFSLFQTSTVPRRS

SEQ ID NO: 123247 - protein, 15 aa, Artificial Sequence
  Description of Artificial Sequence: Synthetic peptide
  Seed: RMCSLMQGSTLPRRS
RMFSLFQVSTAPRRS

SEQ ID NO: 123248 - protein, 15 aa, Artificial Sequence
  Description of Artificial Sequence: Synthetic peptide
  Seed: RMCSLMQGSTLPRRS
RMFSLFQVSTGPRRS

SEQ ID NO: 123249 - protein, 15 aa, Artificial Sequence
  Description of Artificial Sequence: Synthetic peptide
  Seed: RMCSLMQGSTLPRRS
RMFSLFQVSTIPRRS

SEQ ID NO: 123250 - protein, 15 aa, Artificial Sequence
  Description of Artificial Sequence: Synthetic peptide
  Seed: RMCSLMQGSTLPRRS
RMFSLFQVSTLPRRS

SEQ ID NO: 123251 - protein, 15 aa, Artificial Sequence
  Description of Artificial Sequence: Synthetic peptide
  Seed: RMCSLMQGSTLPRRS
RMFSLFQVSTMPRRS

SEQ ID NO: 123252 - protein, 15 aa, Artificial Sequence
  Description of Artificial Sequence: Synthetic peptide
  Seed: RMCSLMQGSTLPRRS
RMFSLFQVSTNPRRS

SEQ ID NO: 123253 - protein, 15 aa, Artificial Sequence
  Description of Artificial Sequence: Synthetic peptide
  Seed: RMCSLMQGSTLPRRS
RMFSLFQVSTSPRRS

SEQ ID NO: 123254 - protein, 15 aa, Artificial Sequence
  Description of Artificial Sequence: Synthetic peptide
  Seed: RMCSLMQGSTLPRRS
RMFSLFQVSTTPRRS

SEQ ID NO: 123255 - protein, 15 aa, Artificial Sequence
  Description of Artificial Sequence: Synthetic peptide
  Seed: RMCSLMQGSTLPRRS
RMFSLFQVSTVPRRS

SEQ ID NO: 123256 - protein, 15 aa, Artificial Sequence
  Description of Artificial Sequence: Synthetic peptide
  Seed: RMCSLMQGSTLPRRS
RMFSLGQASTAPRRS

SEQ ID NO: 123257 - protein, 15 aa, Artificial Sequence
  Description of Artificial Sequence: Synthetic peptide
  Seed: RMCSLMQGSTLPRRS
RMFSLGQASTFPRRS

SEQ ID NO: 123258 - protein, 15 aa, Artificial Sequence
  Description of Artificial Sequence: Synthetic peptide
  Seed: RMCSLMQGSTLPRRS
RMFSLGQASTGPRRS

SEQ ID NO: 123259 - protein, 15 aa, Artificial Sequence
  Description of Artificial Sequence: Synthetic peptide
  Seed: RMCSLMQGSTLPRRS
RMFSLGQASTIPRRS

SEQ ID NO: 123260 - protein, 15 aa, Artificial Sequence
  Description of Artificial Sequence: Synthetic peptide
  Seed: RMCSLMQGSTLPRRS
RMFSLGQASTLPRRS

SEQ ID NO: 123261 - protein, 15 aa, Artificial Sequence
  Description of Artificial Sequence: Synthetic peptide
  Seed: RMCSLMQGSTLPRRS
RMFSLGQASTMPRRS

SEQ ID NO: 123262 - protein, 15 aa, Artificial Sequence
  Description of Artificial Sequence: Synthetic peptide
  Seed: RMCSLMQGSTLPRRS
RMFSLGQASTSPRRS

SEQ ID NO: 123263 - protein, 15 aa, Artificial Sequence
  Description of Artificial Sequence: Synthetic peptide
  Seed: RMCSLMQGSTLPRRS
RMFSLGQASTTPRRS

SEQ ID NO: 123264 - protein, 15 aa, Artificial Sequence
  Description of Artificial Sequence: Synthetic peptide
  Seed: RMCSLMQGSTLPRRS
RMFSLGQASTVPRRS

SEQ ID NO: 123265 - protein, 15 aa, Artificial Sequence
  Description of Artificial Sequence: Synthetic peptide
  Seed: RMCSLMQGSTLPRRS
RMFSLGQGSTAPRRS

SEQ ID NO: 123266 - protein, 15 aa, Artificial Sequence
  Description of Artificial Sequence: Synthetic peptide
  Seed: RMCSLMQGSTLPRRS
RMFSLGQGSTIPRRS

SEQ ID NO: 123267 - protein, 15 aa, Artificial Sequence
  Description of Artificial Sequence: Synthetic peptide
  Seed: RMCSLMQGSTLPRRS
RMFSLGQGSTLPRRS

SEQ ID NO: 123268 - protein, 15 aa, Artificial Sequence
  Description of Artificial Sequence: Synthetic peptide
  Seed: RMCSLMQGSTLPRRS
RMFSLGQGSTMPRRS

SEQ ID NO: 123269 - protein, 15 aa, Artificial Sequence
  Description of Artificial Sequence: Synthetic peptide
  Seed: RMCSLMQGSTLPRRS
RMFSLGQGSTVPRRS

SEQ ID NO: 123270 - protein, 15 aa, Artificial Sequence
  Description of Artificial Sequence: Synthetic peptide
  Seed: RMCSLMQGSTLPRRS
RMFSLGQISTLPRRS

SEQ ID NO: 123271 - protein, 15 aa, Artificial Sequence
  Description of Artificial Sequence: Synthetic peptide
  Seed: RMCSLMQGSTLPRRS
RMFSLGQISTVPRRS

SEQ ID NO: 123272 - protein, 15 aa, Artificial Sequence
  Description of Artificial Sequence: Synthetic peptide
  Seed: RMCSLMQGSTLPRRS
RMFSLGQNSTAPRRS

SEQ ID NO: 123273 - protein, 15 aa, Artificial Sequence
  Description of Artificial Sequence: Synthetic peptide
  Seed: RMCSLMQGSTLPRRS
RMFSLGQNSTIPRRS

SEQ ID NO: 123274 - protein, 15 aa, Artificial Sequence
  Description of Artificial Sequence: Synthetic peptide
  Seed: RMCSLMQGSTLPRRS
RMFSLGQNSTLPRRS

SEQ ID NO: 123275 - protein, 15 aa, Artificial Sequence
  Description of Artificial Sequence: Synthetic peptide
  Seed: RMCSLMQGSTLPRRS
RMFSLGQNSTVPRRS

SEQ ID NO: 123276 - protein, 15 aa, Artificial Sequence
  Description of Artificial Sequence: Synthetic peptide
  Seed: RMCSLMQGSTLPRRS
RMFSLGQPSTAPRRS

SEQ ID NO: 123277 - protein, 15 aa, Artificial Sequence
  Description of Artificial Sequence: Synthetic peptide
  Seed: RMCSLMQGSTLPRRS
RMFSLGQPSTIPRRS

SEQ ID NO: 123278 - protein, 15 aa, Artificial Sequence
  Description of Artificial Sequence: Synthetic peptide
  Seed: RMCSLMQGSTLPRRS
RMFSLGQPSTLPRRS

SEQ ID NO: 123279 - protein, 15 aa, Artificial Sequence
  Description of Artificial Sequence: Synthetic peptide
  Seed: RMCSLMQGSTLPRRS
RMFSLGQPSTMPRRS

SEQ ID NO: 123280 - protein, 15 aa, Artificial Sequence
  Description of Artificial Sequence: Synthetic peptide
  Seed: RMCSLMQGSTLPRRS
RMFSLGQPSTVPRRS

SEQ ID NO: 123281 - protein, 15 aa, Artificial Sequence
  Description of Artificial Sequence: Synthetic peptide
  Seed: RMCSLMQGSTLPRRS
RMFSLGQSSTAPRRS

SEQ ID NO: 123282 - protein, 15 aa, Artificial Sequence
  Description of Artificial Sequence: Synthetic peptide
  Seed: RMCSLMQGSTLPRRS
RMFSLGQSSTIPRRS

SEQ ID NO: 123283 - protein, 15 aa, Artificial Sequence
  Description of Artificial Sequence: Synthetic peptide
  Seed: RMCSLMQGSTLPRRS
RMFSLGQSSTLPRRS

SEQ ID NO: 123284 - protein, 15 aa, Artificial Sequence
  Description of Artificial Sequence: Synthetic peptide
  Seed: RMCSLMQGSTLPRRS
RMFSLGQSSTMPRRS

SEQ ID NO: 123285 - protein, 15 aa, Artificial Sequence
  Description of Artificial Sequence: Synthetic peptide
  Seed: RMCSLMQGSTLPRRS
RMFSLGQSSTTPRRS

SEQ ID NO: 123286 - protein, 15 aa, Artificial Sequence
  Description of Artificial Sequence: Synthetic peptide
  Seed: RMCSLMQGSTLPRRS
RMFSLGQSSTVPRRS

SEQ ID NO: 123287 - protein, 15 aa, Artificial Sequence
  Description of Artificial Sequence: Synthetic peptide
  Seed: RMCSLMQGSTLPRRS
RMFSLGQTSTAPRRS

SEQ ID NO: 123288 - protein, 15 aa, Artificial Sequence
  Description of Artificial Sequence: Synthetic peptide
  Seed: RMCSLMQGSTLPRRS
RMFSLGQTSTIPRRS

SEQ ID NO: 123289 - protein, 15 aa, Artificial Sequence
  Description of Artificial Sequence: Synthetic peptide
  Seed: RMCSLMQGSTLPRRS
RMFSLGQTSTLPRRS

SEQ ID NO: 123290 - protein, 15 aa, Artificial Sequence
  Description of Artificial Sequence: Synthetic peptide
  Seed: RMCSLMQGSTLPRRS
RMFSLGQTSTMPRRS

SEQ ID NO: 123291 - protein, 15 aa, Artificial Sequence
  Description of Artificial Sequence: Synthetic peptide
  Seed: RMCSLMQGSTLPRRS
RMFSLGQTSTVPRRS

SEQ ID NO: 123292 - protein, 15 aa, Artificial Sequence
  Description of Artificial Sequence: Synthetic peptide
  Seed: RMCSLMQGSTLPRRS
RMFSLGQVSTAPRRS

SEQ ID NO: 123293 - protein, 15 aa, Artificial Sequence
  Description of Artificial Sequence: Synthetic peptide
  Seed: RMCSLMQGSTLPRRS
RMFSLGQVSTIPRRS

SEQ ID NO: 123294 - protein, 15 aa, Artificial Sequence
  Description of Artificial Sequence: Synthetic peptide
  Seed: RMCSLMQGSTLPRRS
RMFSLGQVSTLPRRS

SEQ ID NO: 123295 - protein, 15 aa, Artificial Sequence
  Description of Artificial Sequence: Synthetic peptide
  Seed: RMCSLMQGSTLPRRS
RMFSLGQVSTVPRRS

SEQ ID NO: 123296 - protein, 15 aa, Artificial Sequence
  Description of Artificial Sequence: Synthetic peptide
  Seed: RMCSLMQGSTLPRRS
RMFSLHQASTAPRRS

SEQ ID NO: 123297 - protein, 15 aa, Artificial Sequence
  Description of Artificial Sequence: Synthetic peptide
  Seed: RMCSLMQGSTLPRRS
RMFSLHQASTIPRRS

SEQ ID NO: 123298 - protein, 15 aa, Artificial Sequence
  Description of Artificial Sequence: Synthetic peptide
  Seed: RMCSLMQGSTLPRRS
RMFSLHQASTLPRRS

SEQ ID NO: 123299 - protein, 15 aa, Artificial Sequence
  Description of Artificial Sequence: Synthetic peptide
  Seed: RMCSLMQGSTLPRRS
RMFSLHQASTMPRRS

SEQ ID NO: 123300 - protein, 15 aa, Artificial Sequence
  Description of Artificial Sequence: Synthetic peptide
  Seed: RMCSLMQGSTLPRRS
RMFSLHQASTSPRRS

SEQ ID NO: 123301 - protein, 15 aa, Artificial Sequence
  Description of Artificial Sequence: Synthetic peptide
  Seed: RMCSLMQGSTLPRRS
RMFSLHQASTTPRRS

SEQ ID NO: 123302 - protein, 15 aa, Artificial Sequence
  Description of Artificial Sequence: Synthetic peptide
  Seed: RMCSLMQGSTLPRRS
RMFSLHQASTVPRRS

SEQ ID NO: 123303 - protein, 15 aa, Artificial Sequence
  Description of Artificial Sequence: Synthetic peptide
  Seed: RMCSLMQGSTLPRRS
RMFSLHQGSTAPRRS

SEQ ID NO: 123304 - protein, 15 aa, Artificial Sequence
  Description of Artificial Sequence: Synthetic peptide
  Seed: RMCSLMQGSTLPRRS
RMFSLHQGSTIPRRS

SEQ ID NO: 123305 - protein, 15 aa, Artificial Sequence
  Description of Artificial Sequence: Synthetic peptide
  Seed: RMCSLMQGSTLPRRS
RMFSLHQGSTLPRRS

SEQ ID NO: 123306 - protein, 15 aa, Artificial Sequence
  Description of Artificial Sequence: Synthetic peptide
  Seed: RMCSLMQGSTLPRRS
RMFSLHQGSTMPRRS

SEQ ID NO: 123307 - protein, 15 aa, Artificial Sequence
  Description of Artificial Sequence: Synthetic peptide
  Seed: RMCSLMQGSTLPRRS
RMFSLHQGSTVPRRS

SEQ ID NO: 123308 - protein, 15 aa, Artificial Sequence
  Description of Artificial Sequence: Synthetic peptide
  Seed: RMCSLMQGSTLPRRS
RMFSLHQNSTLPRRS

SEQ ID NO: 123309 - protein, 15 aa, Artificial Sequence
  Description of Artificial Sequence: Synthetic peptide
  Seed: RMCSLMQGSTLPRRS
RMFSLHQPSTIPRRS

SEQ ID NO: 123310 - protein, 15 aa, Artificial Sequence
  Description of Artificial Sequence: Synthetic peptide
  Seed: RMCSLMQGSTLPRRS
RMFSLHQPSTLPRRS

SEQ ID NO: 123311 - protein, 15 aa, Artificial Sequence
  Description of Artificial Sequence: Synthetic peptide
  Seed: RMCSLMQGSTLPRRS
RMFSLHQPSTVPRRS

SEQ ID NO: 123312 - protein, 15 aa, Artificial Sequence
  Description of Artificial Sequence: Synthetic peptide
  Seed: RMCSLMQGSTLPRRS
RMFSLHQSSTAPRRS

SEQ ID NO: 123313 - protein, 15 aa, Artificial Sequence
  Description of Artificial Sequence: Synthetic peptide
  Seed: RMCSLMQGSTLPRRS
RMFSLHQSSTFPRRS

SEQ ID NO: 123314 - protein, 15 aa, Artificial Sequence
  Description of Artificial Sequence: Synthetic peptide
  Seed: RMCSLMQGSTLPRRS
RMFSLHQSSTIPRRS

SEQ ID NO: 123315 - protein, 15 aa, Artificial Sequence
  Description of Artificial Sequence: Synthetic peptide
  Seed: RMCSLMQGSTLPRRS
RMFSLHQSSTLPRRS

SEQ ID NO: 123316 - protein, 15 aa, Artificial Sequence
  Description of Artificial Sequence: Synthetic peptide
  Seed: RMCSLMQGSTLPRRS
RMFSLHQSSTMPRRS

SEQ ID NO: 123317 - protein, 15 aa, Artificial Sequence
  Description of Artificial Sequence: Synthetic peptide
  Seed: RMCSLMQGSTLPRRS
RMFSLHQSSTVPRRS

SEQ ID NO: 123318 - protein, 15 aa, Artificial Sequence
  Description of Artificial Sequence: Synthetic peptide
  Seed: RMCSLMQGSTLPRRS
RMFSLHQTSTIPRRS

SEQ ID NO: 123319 - protein, 15 aa, Artificial Sequence
  Description of Artificial Sequence: Synthetic peptide
  Seed: RMCSLMQGSTLPRRS
RMFSLHQTSTLPRRS

SEQ ID NO: 123320 - protein, 15 aa, Artificial Sequence
  Description of Artificial Sequence: Synthetic peptide
  Seed: RMCSLMQGSTLPRRS
RMFSLIQASTAPRRS

SEQ ID NO: 123321 - protein, 15 aa, Artificial Sequence
  Description of Artificial Sequence: Synthetic peptide
  Seed: RMCSLMQGSTLPRRS
RMFSLIQASTCPRRS

SEQ ID NO: 123322 - protein, 15 aa, Artificial Sequence
  Description of Artificial Sequence: Synthetic peptide
  Seed: RMCSLMQGSTLPRRS
RMFSLIQASTDPRRS

SEQ ID NO: 123323 - protein, 15 aa, Artificial Sequence
  Description of Artificial Sequence: Synthetic peptide
  Seed: RMCSLMQGSTLPRRS
RMFSLIQASTEPRRS

SEQ ID NO: 123324 - protein, 15 aa, Artificial Sequence
  Description of Artificial Sequence: Synthetic peptide
  Seed: RMCSLMQGSTLPRRS
RMFSLIQASTFPRRS

SEQ ID NO: 123325 - protein, 15 aa, Artificial Sequence
  Description of Artificial Sequence: Synthetic peptide
  Seed: RMCSLMQGSTLPRRS
RMFSLIQASTGPRRS

SEQ ID NO: 123326 - protein, 15 aa, Artificial Sequence
  Description of Artificial Sequence: Synthetic peptide
  Seed: RMCSLMQGSTLPRRS
RMFSLIQASTHPRRS

SEQ ID NO: 123327 - protein, 15 aa, Artificial Sequence
  Description of Artificial Sequence: Synthetic peptide
  Seed: RMCSLMQGSTLPRRS
RMFSLIQASTIPRRS

SEQ ID NO: 123328 - protein, 15 aa, Artificial Sequence
  Description of Artificial Sequence: Synthetic peptide
  Seed: RMCSLMQGSTLPRRS
RMFSLIQASTKPRRS

SEQ ID NO: 123329 - protein, 15 aa, Artificial Sequence
  Description of Artificial Sequence: Synthetic peptide
  Seed: RMCSLMQGSTLPRRS
RMFSLIQASTLPRRS

SEQ ID NO: 123330 - protein, 15 aa, Artificial Sequence
  Description of Artificial Sequence: Synthetic peptide
  Seed: RMCSLMQGSTLPRRS
RMFSLIQASTMPRRS

SEQ ID NO: 123331 - protein, 15 aa, Artificial Sequence
  Description of Artificial Sequence: Synthetic peptide
  Seed: RMCSLMQGSTLPRRS
RMFSLIQASTNPRRS

SEQ ID NO: 123332 - protein, 15 aa, Artificial Sequence
  Description of Artificial Sequence: Synthetic peptide
  Seed: RMCSLMQGSTLPRRS
RMFSLIQASTPPRRS

SEQ ID NO: 123333 - protein, 15 aa, Artificial Sequence
  Description of Artificial Sequence: Synthetic peptide
  Seed: RMCSLMQGSTLPRRS
RMFSLIQASTQPRRS

SEQ ID NO: 123334 - protein, 15 aa, Artificial Sequence
  Description of Artificial Sequence: Synthetic peptide
  Seed: RMCSLMQGSTLPRRS
RMFSLIQASTRPRRS

SEQ ID NO: 123335 - protein, 15 aa, Artificial Sequence
  Description of Artificial Sequence: Synthetic peptide
  Seed: RMCSLMQGSTLPRRS
RMFSLIQASTSPRRS

SEQ ID NO: 123336 - protein, 15 aa, Artificial Sequence
  Description of Artificial Sequence: Synthetic peptide
  Seed: RMCSLMQGSTLPRRS
RMFSLIQASTTPRRS

SEQ ID NO: 123337 - protein, 15 aa, Artificial Sequence
  Description of Artificial Sequence: Synthetic peptide
  Seed: RMCSLMQGSTLPRRS
RMFSLIQASTVPRRS

SEQ ID NO: 123338 - protein, 15 aa, Artificial Sequence
  Description of Artificial Sequence: Synthetic peptide
  Seed: RMCSLMQGSTLPRRS
RMFSLIQASTWPRRS

SEQ ID NO: 123339 - protein, 15 aa, Artificial Sequence
  Description of Artificial Sequence: Synthetic peptide
  Seed: RMCSLMQGSTLPRRS
RMFSLIQASTYPRRS

SEQ ID NO: 123340 - protein, 15 aa, Artificial Sequence
  Description of Artificial Sequence: Synthetic peptide
  Seed: RMCSLMQGSTLPRRS
RMFSLIQCSTAPRRS

SEQ ID NO: 123341 - protein, 15 aa, Artificial Sequence
  Description of Artificial Sequence: Synthetic peptide
  Seed: RMCSLMQGSTLPRRS
RMFSLIQCSTIPRRS

SEQ ID NO: 123342 - protein, 15 aa, Artificial Sequence
  Description of Artificial Sequence: Synthetic peptide
  Seed: RMCSLMQGSTLPRRS
RMFSLIQCSTLPRRS

SEQ ID NO: 123343 - protein, 15 aa, Artificial Sequence
  Description of Artificial Sequence: Synthetic peptide
  Seed: RMCSLMQGSTLPRRS
RMFSLIQCSTNPRRS

SEQ ID NO: 123344 - protein, 15 aa, Artificial Sequence
  Description of Artificial Sequence: Synthetic peptide
  Seed: RMCSLMQGSTLPRRS
RMFSLIQCSTSPRRS

SEQ ID NO: 123345 - protein, 15 aa, Artificial Sequence
  Description of Artificial Sequence: Synthetic peptide
  Seed: RMCSLMQGSTLPRRS
RMFSLIQCSTVPRRS

SEQ ID NO: 123346 - protein, 15 aa, Artificial Sequence
  Description of Artificial Sequence: Synthetic peptide
  Seed: RMCSLMQGSTLPRRS
RMFSLIQESTAPRRS

SEQ ID NO: 123347 - protein, 15 aa, Artificial Sequence
  Description of Artificial Sequence: Synthetic peptide
  Seed: RMCSLMQGSTLPRRS
RMFSLIQESTIPRRS

SEQ ID NO: 123348 - protein, 15 aa, Artificial Sequence
  Description of Artificial Sequence: Synthetic peptide
  Seed: RMCSLMQGSTLPRRS
RMFSLIQESTLPRRS

SEQ ID NO: 123349 - protein, 15 aa, Artificial Sequence
  Description of Artificial Sequence: Synthetic peptide
  Seed: RMCSLMQGSTLPRRS
RMFSLIQESTVPRRS

SEQ ID NO: 123350 - protein, 15 aa, Artificial Sequence
  Description of Artificial Sequence: Synthetic peptide
  Seed: RMCSLMQGSTLPRRS
RMFSLIQGSTAPRRS

SEQ ID NO: 123351 - protein, 15 aa, Artificial Sequence
  Description of Artificial Sequence: Synthetic peptide
  Seed: RMCSLMQGSTLPRRS
RMFSLIQGSTCPRRS

SEQ ID NO: 123352 - protein, 15 aa, Artificial Sequence
  Description of Artificial Sequence: Synthetic peptide
  Seed: RMCSLMQGSTLPRRS
RMFSLIQGSTDPRRS

SEQ ID NO: 123353 - protein, 15 aa, Artificial Sequence
  Description of Artificial Sequence: Synthetic peptide
  Seed: RMCSLMQGSTLPRRS
RMFSLIQGSTEPRRS

SEQ ID NO: 123354 - protein, 15 aa, Artificial Sequence
  Description of Artificial Sequence: Synthetic peptide
  Seed: RMCSLMQGSTLPRRS
RMFSLIQGSTFPRRS

SEQ ID NO: 123355 - protein, 15 aa, Artificial Sequence
  Description of Artificial Sequence: Synthetic peptide
  Seed: RMCSLMQGSTLPRRS
RMFSLIQGSTGPRRS

SEQ ID NO: 123356 - protein, 15 aa, Artificial Sequence
  Description of Artificial Sequence: Synthetic peptide
  Seed: RMCSLMQGSTLPRRS
RMFSLIQGSTHPRRS

SEQ ID NO: 123357 - protein, 15 aa, Artificial Sequence
  Description of Artificial Sequence: Synthetic peptide
  Seed: RMCSLMQGSTLPRRS
RMFSLIQGSTIPRRS

SEQ ID NO: 123358 - protein, 15 aa, Artificial Sequence
  Description of Artificial Sequence: Synthetic peptide
  Seed: RMCSLMQGSTLPRRS
RMFSLIQGSTKPRRS

SEQ ID NO: 123359 - protein, 15 aa, Artificial Sequence
  Description of Artificial Sequence: Synthetic peptide
  Seed: RMCSLMQGSTLPRRS
RMFSLIQGSTLPRRS

SEQ ID NO: 123360 - protein, 15 aa, Artificial Sequence
  Description of Artificial Sequence: Synthetic peptide
  Seed: RMCSLMQGSTLPRRS
RMFSLIQGSTMPRRS

SEQ ID NO: 123361 - protein, 15 aa, Artificial Sequence
  Description of Artificial Sequence: Synthetic peptide
  Seed: RMCSLMQGSTLPRRS
RMFSLIQGSTNPRRS

SEQ ID NO: 123362 - protein, 15 aa, Artificial Sequence
  Description of Artificial Sequence: Synthetic peptide
  Seed: RMCSLMQGSTLPRRS
RMFSLIQGSTPPRRS

SEQ ID NO: 123363 - protein, 15 aa, Artificial Sequence
  Description of Artificial Sequence: Synthetic peptide
  Seed: RMCSLMQGSTLPRRS
RMFSLIQGSTQPRRS

SEQ ID NO: 123364 - protein, 15 aa, Artificial Sequence
  Description of Artificial Sequence: Synthetic peptide
  Seed: RMCSLMQGSTLPRRS
RMFSLIQGSTRPRRS

SEQ ID NO: 123365 - protein, 15 aa, Artificial Sequence
  Description of Artificial Sequence: Synthetic peptide
  Seed: RMCSLMQGSTLPRRS
RMFSLIQGSTSPRRS

SEQ ID NO: 123366 - protein, 15 aa, Artificial Sequence
  Description of Artificial Sequence: Synthetic peptide
  Seed: RMCSLMQGSTLPRRS
RMFSLIQGSTTPRRS

SEQ ID NO: 123367 - protein, 15 aa, Artificial Sequence
  Description of Artificial Sequence: Synthetic peptide
  Seed: RMCSLMQGSTLPRRS
RMFSLIQGSTVPRRS

SEQ ID NO: 123368 - protein, 15 aa, Artificial Sequence
  Description of Artificial Sequence: Synthetic peptide
  Seed: RMCSLMQGSTLPRRS
RMFSLIQGSTWPRRS

SEQ ID NO: 123369 - protein, 15 aa, Artificial Sequence
  Description of Artificial Sequence: Synthetic peptide
  Seed: RMCSLMQGSTLPRRS
RMFSLIQGSTYPRRS

SEQ ID NO: 123370 - protein, 15 aa, Artificial Sequence
  Description of Artificial Sequence: Synthetic peptide
  Seed: RMCSLMQGSTLPRRS
RMFSLIQHSTAPRRS

SEQ ID NO: 123371 - protein, 15 aa, Artificial Sequence
  Description of Artificial Sequence: Synthetic peptide
  Seed: RMCSLMQGSTLPRRS
RMFSLIQHSTIPRRS

SEQ ID NO: 123372 - protein, 15 aa, Artificial Sequence
  Description of Artificial Sequence: Synthetic peptide
  Seed: RMCSLMQGSTLPRRS
RMFSLIQHSTLPRRS

SEQ ID NO: 123373 - protein, 15 aa, Artificial Sequence
  Description of Artificial Sequence: Synthetic peptide
  Seed: RMCSLMQGSTLPRRS
RMFSLIQHSTMPRRS

SEQ ID NO: 123374 - protein, 15 aa, Artificial Sequence
  Description of Artificial Sequence: Synthetic peptide
  Seed: RMCSLMQGSTLPRRS
RMFSLIQHSTNPRRS

SEQ ID NO: 123375 - protein, 15 aa, Artificial Sequence
  Description of Artificial Sequence: Synthetic peptide
  Seed: RMCSLMQGSTLPRRS
RMFSLIQHSTSPRRS

SEQ ID NO: 123376 - protein, 15 aa, Artificial Sequence
  Description of Artificial Sequence: Synthetic peptide
  Seed: RMCSLMQGSTLPRRS
RMFSLIQHSTTPRRS

SEQ ID NO: 123377 - protein, 15 aa, Artificial Sequence
  Description of Artificial Sequence: Synthetic peptide
  Seed: RMCSLMQGSTLPRRS
RMFSLIQHSTVPRRS

SEQ ID NO: 123378 - protein, 15 aa, Artificial Sequence
  Description of Artificial Sequence: Synthetic peptide
  Seed: RMCSLMQGSTLPRRS
RMFSLIQISTAPRRS

SEQ ID NO: 123379 - protein, 15 aa, Artificial Sequence
  Description of Artificial Sequence: Synthetic peptide
  Seed: RMCSLMQGSTLPRRS
RMFSLIQISTCPRRS

SEQ ID NO: 123380 - protein, 15 aa, Artificial Sequence
  Description of Artificial Sequence: Synthetic peptide
  Seed: RMCSLMQGSTLPRRS
RMFSLIQISTDPRRS

SEQ ID NO: 123381 - protein, 15 aa, Artificial Sequence
  Description of Artificial Sequence: Synthetic peptide
  Seed: RMCSLMQGSTLPRRS
RMFSLIQISTEPRRS

SEQ ID NO: 123382 - protein, 15 aa, Artificial Sequence
  Description of Artificial Sequence: Synthetic peptide
  Seed: RMCSLMQGSTLPRRS
RMFSLIQISTGPRRS

SEQ ID NO: 123383 - protein, 15 aa, Artificial Sequence
  Description of Artificial Sequence: Synthetic peptide
  Seed: RMCSLMQGSTLPRRS
RMFSLIQISTHPRRS

SEQ ID NO: 123384 - protein, 15 aa, Artificial Sequence
  Description of Artificial Sequence: Synthetic peptide
  Seed: RMCSLMQGSTLPRRS
RMFSLIQISTIPRRS

SEQ ID NO: 123385 - protein, 15 aa, Artificial Sequence
  Description of Artificial Sequence: Synthetic peptide
  Seed: RMCSLMQGSTLPRRS
RMFSLIQISTLPRRS

SEQ ID NO: 123386 - protein, 15 aa, Artificial Sequence
  Description of Artificial Sequence: Synthetic peptide
  Seed: RMCSLMQGSTLPRRS
RMFSLIQISTMPRRS

SEQ ID NO: 123387 - protein, 15 aa, Artificial Sequence
  Description of Artificial Sequence: Synthetic peptide
  Seed: RMCSLMQGSTLPRRS
RMFSLIQISTNPRRS

SEQ ID NO: 123388 - protein, 15 aa, Artificial Sequence
  Description of Artificial Sequence: Synthetic peptide
  Seed: RMCSLMQGSTLPRRS
RMFSLIQISTPPRRS

SEQ ID NO: 123389 - protein, 15 aa, Artificial Sequence
  Description of Artificial Sequence: Synthetic peptide
  Seed: RMCSLMQGSTLPRRS
RMFSLIQISTQPRRS

SEQ ID NO: 123390 - protein, 15 aa, Artificial Sequence
  Description of Artificial Sequence: Synthetic peptide
  Seed: RMCSLMQGSTLPRRS
RMFSLIQISTSPRRS

SEQ ID NO: 123391 - protein, 15 aa, Artificial Sequence
  Description of Artificial Sequence: Synthetic peptide
  Seed: RMCSLMQGSTLPRRS
RMFSLIQISTTPRRS

SEQ ID NO: 123392 - protein, 15 aa, Artificial Sequence
  Description of Artificial Sequence: Synthetic peptide
  Seed: RMCSLMQGSTLPRRS
RMFSLIQISTVPRRS

SEQ ID NO: 123393 - protein, 15 aa, Artificial Sequence
  Description of Artificial Sequence: Synthetic peptide
  Seed: RMCSLMQGSTLPRRS
RMFSLIQLSTAPRRS

SEQ ID NO: 123394 - protein, 15 aa, Artificial Sequence
  Description of Artificial Sequence: Synthetic peptide
  Seed: RMCSLMQGSTLPRRS
RMFSLIQLSTGPRRS

SEQ ID NO: 123395 - protein, 15 aa, Artificial Sequence
  Description of Artificial Sequence: Synthetic peptide
  Seed: RMCSLMQGSTLPRRS
RMFSLIQLSTHPRRS

SEQ ID NO: 123396 - protein, 15 aa, Artificial Sequence
  Description of Artificial Sequence: Synthetic peptide
  Seed: RMCSLMQGSTLPRRS
RMFSLIQLSTIPRRS

SEQ ID NO: 123397 - protein, 15 aa, Artificial Sequence
  Description of Artificial Sequence: Synthetic peptide
  Seed: RMCSLMQGSTLPRRS
RMFSLIQLSTLPRRS

SEQ ID NO: 123398 - protein, 15 aa, Artificial Sequence
  Description of Artificial Sequence: Synthetic peptide
  Seed: RMCSLMQGSTLPRRS
RMFSLIQLSTMPRRS

SEQ ID NO: 123399 - protein, 15 aa, Artificial Sequence
  Description of Artificial Sequence: Synthetic peptide
  Seed: RMCSLMQGSTLPRRS
RMFSLIQLSTNPRRS

SEQ ID NO: 123400 - protein, 15 aa, Artificial Sequence
  Description of Artificial Sequence: Synthetic peptide
  Seed: RMCSLMQGSTLPRRS
RMFSLIQLSTSPRRS

SEQ ID NO: 123401 - protein, 15 aa, Artificial Sequence
  Description of Artificial Sequence: Synthetic peptide
  Seed: RMCSLMQGSTLPRRS
RMFSLIQLSTTPRRS

SEQ ID NO: 123402 - protein, 15 aa, Artificial Sequence
  Description of Artificial Sequence: Synthetic peptide
  Seed: RMCSLMQGSTLPRRS
RMFSLIQLSTVPRRS

SEQ ID NO: 123403 - protein, 15 aa, Artificial Sequence
  Description of Artificial Sequence: Synthetic peptide
  Seed: RMCSLMQGSTLPRRS
RMFSLIQMSTAPRRS

SEQ ID NO: 123404 - protein, 15 aa, Artificial Sequence
  Description of Artificial Sequence: Synthetic peptide
  Seed: RMCSLMQGSTLPRRS
RMFSLIQMSTGPRRS

SEQ ID NO: 123405 - protein, 15 aa, Artificial Sequence
  Description of Artificial Sequence: Synthetic peptide
  Seed: RMCSLMQGSTLPRRS
RMFSLIQMSTMPRRS

SEQ ID NO: 123406 - protein, 15 aa, Artificial Sequence
  Description of Artificial Sequence: Synthetic peptide
  Seed: RMCSLMQGSTLPRRS
RMFSLIQMSTNPRRS

SEQ ID NO: 123407 - protein, 15 aa, Artificial Sequence
  Description of Artificial Sequence: Synthetic peptide
  Seed: RMCSLMQGSTLPRRS
RMFSLIQMSTSPRRS

SEQ ID NO: 123408 - protein, 15 aa, Artificial Sequence
  Description of Artificial Sequence: Synthetic peptide
  Seed: RMCSLMQGSTLPRRS
RMFSLIQMSTTPRRS

SEQ ID NO: 123409 - protein, 15 aa, Artificial Sequence
  Description of Artificial Sequence: Synthetic peptide
  Seed: RMCSLMQGSTLPRRS
RMFSLIQMSTVPRRS

SEQ ID NO: 123410 - protein, 15 aa, Artificial Sequence
  Description of Artificial Sequence: Synthetic peptide
  Seed: RMCSLMQGSTLPRRS
RMFSLIQNSTAPRRS

SEQ ID NO: 123411 - protein, 15 aa, Artificial Sequence
  Description of Artificial Sequence: Synthetic peptide
  Seed: RMCSLMQGSTLPRRS
RMFSLIQNSTCPRRS

SEQ ID NO: 123412 - protein, 15 aa, Artificial Sequence
  Description of Artificial Sequence: Synthetic peptide
  Seed: RMCSLMQGSTLPRRS
RMFSLIQNSTDPRRS

SEQ ID NO: 123413 - protein, 15 aa, Artificial Sequence
  Description of Artificial Sequence: Synthetic peptide
  Seed: RMCSLMQGSTLPRRS
RMFSLIQNSTFPRRS

SEQ ID NO: 123414 - protein, 15 aa, Artificial Sequence
  Description of Artificial Sequence: Synthetic peptide
  Seed: RMCSLMQGSTLPRRS
RMFSLIQNSTGPRRS

SEQ ID NO: 123415 - protein, 15 aa, Artificial Sequence
  Description of Artificial Sequence: Synthetic peptide
  Seed: RMCSLMQGSTLPRRS
RMFSLIQNSTHPRRS

SEQ ID NO: 123416 - protein, 15 aa, Artificial Sequence
  Description of Artificial Sequence: Synthetic peptide
  Seed: RMCSLMQGSTLPRRS
RMFSLIQNSTIPRRS

SEQ ID NO: 123417 - protein, 15 aa, Artificial Sequence
  Description of Artificial Sequence: Synthetic peptide
  Seed: RMCSLMQGSTLPRRS
RMFSLIQNSTLPRRS

SEQ ID NO: 123418 - protein, 15 aa, Artificial Sequence
  Description of Artificial Sequence: Synthetic peptide
  Seed: RMCSLMQGSTLPRRS
RMFSLIQNSTMPRRS

SEQ ID NO: 123419 - protein, 15 aa, Artificial Sequence
  Description of Artificial Sequence: Synthetic peptide
  Seed: RMCSLMQGSTLPRRS
RMFSLIQNSTNPRRS

SEQ ID NO: 123420 - protein, 15 aa, Artificial Sequence
  Description of Artificial Sequence: Synthetic peptide
  Seed: RMCSLMQGSTLPRRS
RMFSLIQNSTQPRRS

SEQ ID NO: 123421 - protein, 15 aa, Artificial Sequence
  Description of Artificial Sequence: Synthetic peptide
  Seed: RMCSLMQGSTLPRRS
RMFSLIQNSTSPRRS

SEQ ID NO: 123422 - protein, 15 aa, Artificial Sequence
  Description of Artificial Sequence: Synthetic peptide
  Seed: RMCSLMQGSTLPRRS
RMFSLIQNSTTPRRS

SEQ ID NO: 123423 - protein, 15 aa, Artificial Sequence
  Description of Artificial Sequence: Synthetic peptide
  Seed: RMCSLMQGSTLPRRS
RMFSLIQNSTVPRRS

SEQ ID NO: 123424 - protein, 15 aa, Artificial Sequence
  Description of Artificial Sequence: Synthetic peptide
  Seed: RMCSLMQGSTLPRRS
RMFSLIQPSTAPRRS

SEQ ID NO: 123425 - protein, 15 aa, Artificial Sequence
  Description of Artificial Sequence: Synthetic peptide
  Seed: RMCSLMQGSTLPRRS
RMFSLIQPSTCPRRS

SEQ ID NO: 123426 - protein, 15 aa, Artificial Sequence
  Description of Artificial Sequence: Synthetic peptide
  Seed: RMCSLMQGSTLPRRS
RMFSLIQPSTDPRRS

SEQ ID NO: 123427 - protein, 15 aa, Artificial Sequence
  Description of Artificial Sequence: Synthetic peptide
  Seed: RMCSLMQGSTLPRRS
RMFSLIQPSTEPRRS

SEQ ID NO: 123428 - protein, 15 aa, Artificial Sequence
  Description of Artificial Sequence: Synthetic peptide
  Seed: RMCSLMQGSTLPRRS
RMFSLIQPSTFPRRS

SEQ ID NO: 123429 - protein, 15 aa, Artificial Sequence
  Description of Artificial Sequence: Synthetic peptide
  Seed: RMCSLMQGSTLPRRS
RMFSLIQPSTGPRRS

SEQ ID NO: 123430 - protein, 15 aa, Artificial Sequence
  Description of Artificial Sequence: Synthetic peptide
  Seed: RMCSLMQGSTLPRRS
RMFSLIQPSTHPRRS

SEQ ID NO: 123431 - protein, 15 aa, Artificial Sequence
  Description of Artificial Sequence: Synthetic peptide
  Seed: RMCSLMQGSTLPRRS
RMFSLIQPSTIPRRS

SEQ ID NO: 123432 - protein, 15 aa, Artificial Sequence
  Description of Artificial Sequence: Synthetic peptide
  Seed: RMCSLMQGSTLPRRS
RMFSLIQPSTLPRRS

SEQ ID NO: 123433 - protein, 15 aa, Artificial Sequence
  Description of Artificial Sequence: Synthetic peptide
  Seed: RMCSLMQGSTLPRRS
RMFSLIQPSTMPRRS

SEQ ID NO: 123434 - protein, 15 aa, Artificial Sequence
  Description of Artificial Sequence: Synthetic peptide
  Seed: RMCSLMQGSTLPRRS
RMFSLIQPSTNPRRS

SEQ ID NO: 123435 - protein, 15 aa, Artificial Sequence
  Description of Artificial Sequence: Synthetic peptide
  Seed: RMCSLMQGSTLPRRS
RMFSLIQPSTPPRRS

SEQ ID NO: 123436 - protein, 15 aa, Artificial Sequence
  Description of Artificial Sequence: Synthetic peptide
  Seed: RMCSLMQGSTLPRRS
RMFSLIQPSTQPRRS

SEQ ID NO: 123437 - protein, 15 aa, Artificial Sequence
  Description of Artificial Sequence: Synthetic peptide
  Seed: RMCSLMQGSTLPRRS
RMFSLIQPSTSPRRS

SEQ ID NO: 123438 - protein, 15 aa, Artificial Sequence
  Description of Artificial Sequence: Synthetic peptide
  Seed: RMCSLMQGSTLPRRS
RMFSLIQPSTTPRRS

SEQ ID NO: 123439 - protein, 15 aa, Artificial Sequence
  Description of Artificial Sequence: Synthetic peptide
  Seed: RMCSLMQGSTLPRRS
RMFSLIQPSTVPRRS

SEQ ID NO: 123440 - protein, 15 aa, Artificial Sequence
  Description of Artificial Sequence: Synthetic peptide
  Seed: RMCSLMQGSTLPRRS
RMFSLIQPSTWPRRS

SEQ ID NO: 123441 - protein, 15 aa, Artificial Sequence
  Description of Artificial Sequence: Synthetic peptide
  Seed: RMCSLMQGSTLPRRS
RMFSLIQPSTYPRRS

SEQ ID NO: 123442 - protein, 15 aa, Artificial Sequence
  Description of Artificial Sequence: Synthetic peptide
  Seed: RMCSLMQGSTLPRRS
RMFSLIQQSTAPRRS

SEQ ID NO: 123443 - protein, 15 aa, Artificial Sequence
  Description of Artificial Sequence: Synthetic peptide
  Seed: RMCSLMQGSTLPRRS
RMFSLIQQSTIPRRS

SEQ ID NO: 123444 - protein, 15 aa, Artificial Sequence
  Description of Artificial Sequence: Synthetic peptide
  Seed: RMCSLMQGSTLPRRS
RMFSLIQQSTLPRRS

SEQ ID NO: 123445 - protein, 15 aa, Artificial Sequence
  Description of Artificial Sequence: Synthetic peptide
  Seed: RMCSLMQGSTLPRRS
RMFSLIQQSTNPRRS

SEQ ID NO: 123446 - protein, 15 aa, Artificial Sequence
  Description of Artificial Sequence: Synthetic peptide
  Seed: RMCSLMQGSTLPRRS
RMFSLIQQSTSPRRS

SEQ ID NO: 123447 - protein, 15 aa, Artificial Sequence
  Description of Artificial Sequence: Synthetic peptide
  Seed: RMCSLMQGSTLPRRS
RMFSLIQQSTVPRRS

SEQ ID NO: 123448 - protein, 15 aa, Artificial Sequence
  Description of Artificial Sequence: Synthetic peptide
  Seed: RMCSLMQGSTLPRRS
RMFSLIQSSTAPRRS

SEQ ID NO: 123449 - protein, 15 aa, Artificial Sequence
  Description of Artificial Sequence: Synthetic peptide
  Seed: RMCSLMQGSTLPRRS
RMFSLIQSSTCPRRS

SEQ ID NO: 123450 - protein, 15 aa, Artificial Sequence
  Description of Artificial Sequence: Synthetic peptide
  Seed: RMCSLMQGSTLPRRS
RMFSLIQSSTDPRRS

SEQ ID NO: 123451 - protein, 15 aa, Artificial Sequence
  Description of Artificial Sequence: Synthetic peptide
  Seed: RMCSLMQGSTLPRRS
RMFSLIQSSTEPRRS

SEQ ID NO: 123452 - protein, 15 aa, Artificial Sequence
  Description of Artificial Sequence: Synthetic peptide
  Seed: RMCSLMQGSTLPRRS
RMFSLIQSSTFPRRS

SEQ ID NO: 123453 - protein, 15 aa, Artificial Sequence
  Description of Artificial Sequence: Synthetic peptide
  Seed: RMCSLMQGSTLPRRS
RMFSLIQSSTGPRRS

SEQ ID NO: 123454 - protein, 15 aa, Artificial Sequence
  Description of Artificial Sequence: Synthetic peptide
  Seed: RMCSLMQGSTLPRRS
RMFSLIQSSTHPRRS

SEQ ID NO: 123455 - protein, 15 aa, Artificial Sequence
  Description of Artificial Sequence: Synthetic peptide
  Seed: RMCSLMQGSTLPRRS
RMFSLIQSSTIPRRS

SEQ ID NO: 123456 - protein, 15 aa, Artificial Sequence
  Description of Artificial Sequence: Synthetic peptide
  Seed: RMCSLMQGSTLPRRS
RMFSLIQSSTKPRRS

SEQ ID NO: 123457 - protein, 15 aa, Artificial Sequence
  Description of Artificial Sequence: Synthetic peptide
  Seed: RMCSLMQGSTLPRRS
RMFSLIQSSTLPRRS

SEQ ID NO: 123458 - protein, 15 aa, Artificial Sequence
  Description of Artificial Sequence: Synthetic peptide
  Seed: RMCSLMQGSTLPRRS
RMFSLIQSSTMPRRS

SEQ ID NO: 123459 - protein, 15 aa, Artificial Sequence
  Description of Artificial Sequence: Synthetic peptide
  Seed: RMCSLMQGSTLPRRS
RMFSLIQSSTNPRRS

SEQ ID NO: 123460 - protein, 15 aa, Artificial Sequence
  Description of Artificial Sequence: Synthetic peptide
  Seed: RMCSLMQGSTLPRRS
RMFSLIQSSTPPRRS

SEQ ID NO: 123461 - protein, 15 aa, Artificial Sequence
  Description of Artificial Sequence: Synthetic peptide
  Seed: RMCSLMQGSTLPRRS
RMFSLIQSSTQPRRS

SEQ ID NO: 123462 - protein, 15 aa, Artificial Sequence
  Description of Artificial Sequence: Synthetic peptide
  Seed: RMCSLMQGSTLPRRS
RMFSLIQSSTRPRRS

SEQ ID NO: 123463 - protein, 15 aa, Artificial Sequence
  Description of Artificial Sequence: Synthetic peptide
  Seed: RMCSLMQGSTLPRRS
RMFSLIQSSTSPRRS

SEQ ID NO: 123464 - protein, 15 aa, Artificial Sequence
  Description of Artificial Sequence: Synthetic peptide
  Seed: RMCSLMQGSTLPRRS
RMFSLIQSSTTPRRS

SEQ ID NO: 123465 - protein, 15 aa, Artificial Sequence
  Description of Artificial Sequence: Synthetic peptide
  Seed: RMCSLMQGSTLPRRS
RMFSLIQSSTVPRRS

SEQ ID NO: 123466 - protein, 15 aa, Artificial Sequence
  Description of Artificial Sequence: Synthetic peptide
  Seed: RMCSLMQGSTLPRRS
RMFSLIQSSTWPRRS

SEQ ID NO: 123467 - protein, 15 aa, Artificial Sequence
  Description of Artificial Sequence: Synthetic peptide
  Seed: RMCSLMQGSTLPRRS
RMFSLIQSSTYPRRS

SEQ ID NO: 123468 - protein, 15 aa, Artificial Sequence
  Description of Artificial Sequence: Synthetic peptide
  Seed: RMCSLMQGSTLPRRS
RMFSLIQTSTAPRRS

SEQ ID NO: 123469 - protein, 15 aa, Artificial Sequence
  Description of Artificial Sequence: Synthetic peptide
  Seed: RMCSLMQGSTLPRRS
RMFSLIQTSTCPRRS

SEQ ID NO: 123470 - protein, 15 aa, Artificial Sequence
  Description of Artificial Sequence: Synthetic peptide
  Seed: RMCSLMQGSTLPRRS
RMFSLIQTSTDPRRS

SEQ ID NO: 123471 - protein, 15 aa, Artificial Sequence
  Description of Artificial Sequence: Synthetic peptide
  Seed: RMCSLMQGSTLPRRS
RMFSLIQTSTEPRRS

SEQ ID NO: 123472 - protein, 15 aa, Artificial Sequence
  Description of Artificial Sequence: Synthetic peptide
  Seed: RMCSLMQGSTLPRRS
RMFSLIQTSTFPRRS

SEQ ID NO: 123473 - protein, 15 aa, Artificial Sequence
  Description of Artificial Sequence: Synthetic peptide
  Seed: RMCSLMQGSTLPRRS
RMFSLIQTSTGPRRS

SEQ ID NO: 123474 - protein, 15 aa, Artificial Sequence
  Description of Artificial Sequence: Synthetic peptide
  Seed: RMCSLMQGSTLPRRS
RMFSLIQTSTHPRRS

SEQ ID NO: 123475 - protein, 15 aa, Artificial Sequence
  Description of Artificial Sequence: Synthetic peptide
  Seed: RMCSLMQGSTLPRRS
RMFSLIQTSTIPRRS

SEQ ID NO: 123476 - protein, 15 aa, Artificial Sequence
  Description of Artificial Sequence: Synthetic peptide
  Seed: RMCSLMQGSTLPRRS
RMFSLIQTSTLPRRS

SEQ ID NO: 123477 - protein, 15 aa, Artificial Sequence
  Description of Artificial Sequence: Synthetic peptide
  Seed: RMCSLMQGSTLPRRS
RMFSLIQTSTMPRRS

SEQ ID NO: 123478 - protein, 15 aa, Artificial Sequence
  Description of Artificial Sequence: Synthetic peptide
  Seed: RMCSLMQGSTLPRRS
RMFSLIQTSTNPRRS

SEQ ID NO: 123479 - protein, 15 aa, Artificial Sequence
  Description of Artificial Sequence: Synthetic peptide
  Seed: RMCSLMQGSTLPRRS
RMFSLIQTSTPPRRS

SEQ ID NO: 123480 - protein, 15 aa, Artificial Sequence
  Description of Artificial Sequence: Synthetic peptide
  Seed: RMCSLMQGSTLPRRS
RMFSLIQTSTQPRRS

SEQ ID NO: 123481 - protein, 15 aa, Artificial Sequence
  Description of Artificial Sequence: Synthetic peptide
  Seed: RMCSLMQGSTLPRRS
RMFSLIQTSTSPRRS

SEQ ID NO: 123482 - protein, 15 aa, Artificial Sequence
  Description of Artificial Sequence: Synthetic peptide
  Seed: RMCSLMQGSTLPRRS
RMFSLIQTSTTPRRS

SEQ ID NO: 123483 - protein, 15 aa, Artificial Sequence
  Description of Artificial Sequence: Synthetic peptide
  Seed: RMCSLMQGSTLPRRS
RMFSLIQTSTVPRRS

SEQ ID NO: 123484 - protein, 15 aa, Artificial Sequence
  Description of Artificial Sequence: Synthetic peptide
  Seed: RMCSLMQGSTLPRRS
RMFSLIQVSTAPRRS

SEQ ID NO: 123485 - protein, 15 aa, Artificial Sequence
  Description of Artificial Sequence: Synthetic peptide
  Seed: RMCSLMQGSTLPRRS
RMFSLIQVSTCPRRS

SEQ ID NO: 123486 - protein, 15 aa, Artificial Sequence
  Description of Artificial Sequence: Synthetic peptide
  Seed: RMCSLMQGSTLPRRS
RMFSLIQVSTDPRRS

SEQ ID NO: 123487 - protein, 15 aa, Artificial Sequence
  Description of Artificial Sequence: Synthetic peptide
  Seed: RMCSLMQGSTLPRRS
RMFSLIQVSTEPRRS

SEQ ID NO: 123488 - protein, 15 aa, Artificial Sequence
  Description of Artificial Sequence: Synthetic peptide
  Seed: RMCSLMQGSTLPRRS
RMFSLIQVSTGPRRS

SEQ ID NO: 123489 - protein, 15 aa, Artificial Sequence
  Description of Artificial Sequence: Synthetic peptide
  Seed: RMCSLMQGSTLPRRS
RMFSLIQVSTHPRRS

SEQ ID NO: 123490 - protein, 15 aa, Artificial Sequence
  Description of Artificial Sequence: Synthetic peptide
  Seed: RMCSLMQGSTLPRRS
RMFSLIQVSTIPRRS

SEQ ID NO: 123491 - protein, 15 aa, Artificial Sequence
  Description of Artificial Sequence: Synthetic peptide
  Seed: RMCSLMQGSTLPRRS
RMFSLIQVSTLPRRS

SEQ ID NO: 123492 - protein, 15 aa, Artificial Sequence
  Description of Artificial Sequence: Synthetic peptide
  Seed: RMCSLMQGSTLPRRS
RMFSLIQVSTMPRRS

SEQ ID NO: 123493 - protein, 15 aa, Artificial Sequence
  Description of Artificial Sequence: Synthetic peptide
  Seed: RMCSLMQGSTLPRRS
RMFSLIQVSTNPRRS

SEQ ID NO: 123494 - protein, 15 aa, Artificial Sequence
  Description of Artificial Sequence: Synthetic peptide
  Seed: RMCSLMQGSTLPRRS
RMFSLIQVSTPPRRS

SEQ ID NO: 123495 - protein, 15 aa, Artificial Sequence
  Description of Artificial Sequence: Synthetic peptide
  Seed: RMCSLMQGSTLPRRS
RMFSLIQVSTQPRRS

SEQ ID NO: 123496 - protein, 15 aa, Artificial Sequence
  Description of Artificial Sequence: Synthetic peptide
  Seed: RMCSLMQGSTLPRRS
RMFSLIQVSTSPRRS

SEQ ID NO: 123497 - protein, 15 aa, Artificial Sequence
  Description of Artificial Sequence: Synthetic peptide
  Seed: RMCSLMQGSTLPRRS
RMFSLIQVSTTPRRS

SEQ ID NO: 123498 - protein, 15 aa, Artificial Sequence
  Description of Artificial Sequence: Synthetic peptide
  Seed: RMCSLMQGSTLPRRS
RMFSLIQVSTVPRRS

SEQ ID NO: 123499 - protein, 15 aa, Artificial Sequence
  Description of Artificial Sequence: Synthetic peptide
  Seed: RMCSLMQGSTLPRRS
RMFSLIQWSTAPRRS

SEQ ID NO: 123500 - protein, 15 aa, Artificial Sequence
  Description of Artificial Sequence: Synthetic peptide
  Seed: RMCSLMQGSTLPRRS
RMFSLIQWSTVPRRS

SEQ ID NO: 123501 - protein, 15 aa, Artificial Sequence
  Description of Artificial Sequence: Synthetic peptide
  Seed: RMCSLMQGSTLPRRS
RMFSLKQASTAPRRS

SEQ ID NO: 123502 - protein, 15 aa, Artificial Sequence
  Description of Artificial Sequence: Synthetic peptide
  Seed: RMCSLMQGSTLPRRS
RMFSLKQASTIPRRS

SEQ ID NO: 123503 - protein, 15 aa, Artificial Sequence
  Description of Artificial Sequence: Synthetic peptide
  Seed: RMCSLMQGSTLPRRS
RMFSLKQASTLPRRS

SEQ ID NO: 123504 - protein, 15 aa, Artificial Sequence
  Description of Artificial Sequence: Synthetic peptide
  Seed: RMCSLMQGSTLPRRS
RMFSLKQASTMPRRS

SEQ ID NO: 123505 - protein, 15 aa, Artificial Sequence
  Description of Artificial Sequence: Synthetic peptide
  Seed: RMCSLMQGSTLPRRS
RMFSLKQASTVPRRS

SEQ ID NO: 123506 - protein, 15 aa, Artificial Sequence
  Description of Artificial Sequence: Synthetic peptide
  Seed: RMCSLMQGSTLPRRS
RMFSLKQGSTIPRRS

SEQ ID NO: 123507 - protein, 15 aa, Artificial Sequence
  Description of Artificial Sequence: Synthetic peptide
  Seed: RMCSLMQGSTLPRRS
RMFSLKQGSTLPRRS

SEQ ID NO: 123508 - protein, 15 aa, Artificial Sequence
  Description of Artificial Sequence: Synthetic peptide
  Seed: RMCSLMQGSTLPRRS
RMFSLKQGSTVPRRS

SEQ ID NO: 123509 - protein, 15 aa, Artificial Sequence
  Description of Artificial Sequence: Synthetic peptide
  Seed: RMCSLMQGSTLPRRS
RMFSLKQSSTIPRRS

SEQ ID NO: 123510 - protein, 15 aa, Artificial Sequence
  Description of Artificial Sequence: Synthetic peptide
  Seed: RMCSLMQGSTLPRRS
RMFSLKQSSTLPRRS

SEQ ID NO: 123511 - protein, 15 aa, Artificial Sequence
  Description of Artificial Sequence: Synthetic peptide
  Seed: RMCSLMQGSTLPRRS
RMFSLKQSSTVPRRS

SEQ ID NO: 123512 - protein, 15 aa, Artificial Sequence
  Description of Artificial Sequence: Synthetic peptide
  Seed: RMCSLMQGSTLPRRS
RMFSLLQASTAPRRS

SEQ ID NO: 123513 - protein, 15 aa, Artificial Sequence
  Description of Artificial Sequence: Synthetic peptide
  Seed: RMCSLMQGSTLPRRS
RMFSLLQASTCPRRS

SEQ ID NO: 123514 - protein, 15 aa, Artificial Sequence
  Description of Artificial Sequence: Synthetic peptide
  Seed: RMCSLMQGSTLPRRS
RMFSLLQASTDPRRS

SEQ ID NO: 123515 - protein, 15 aa, Artificial Sequence
  Description of Artificial Sequence: Synthetic peptide
  Seed: RMCSLMQGSTLPRRS
RMFSLLQASTEPRRS

SEQ ID NO: 123516 - protein, 15 aa, Artificial Sequence
  Description of Artificial Sequence: Synthetic peptide
  Seed: RMCSLMQGSTLPRRS
RMFSLLQASTFPRRS

SEQ ID NO: 123517 - protein, 15 aa, Artificial Sequence
  Description of Artificial Sequence: Synthetic peptide
  Seed: RMCSLMQGSTLPRRS
RMFSLLQASTGPRRS

SEQ ID NO: 123518 - protein, 15 aa, Artificial Sequence
  Description of Artificial Sequence: Synthetic peptide
  Seed: RMCSLMQGSTLPRRS
RMFSLLQASTHPRRS

SEQ ID NO: 123519 - protein, 15 aa, Artificial Sequence
  Description of Artificial Sequence: Synthetic peptide
  Seed: RMCSLMQGSTLPRRS
RMFSLLQASTIPRRS

SEQ ID NO: 123520 - protein, 15 aa, Artificial Sequence
  Description of Artificial Sequence: Synthetic peptide
  Seed: RMCSLMQGSTLPRRS
RMFSLLQASTKPRRS

SEQ ID NO: 123521 - protein, 15 aa, Artificial Sequence
  Description of Artificial Sequence: Synthetic peptide
  Seed: RMCSLMQGSTLPRRS
RMFSLLQASTLPRRS

SEQ ID NO: 123522 - protein, 15 aa, Artificial Sequence
  Description of Artificial Sequence: Synthetic peptide
  Seed: RMCSLMQGSTLPRRS
RMFSLLQASTMPRRS

SEQ ID NO: 123523 - protein, 15 aa, Artificial Sequence
  Description of Artificial Sequence: Synthetic peptide
  Seed: RMCSLMQGSTLPRRS
RMFSLLQASTNPRRS

SEQ ID NO: 123524 - protein, 15 aa, Artificial Sequence
  Description of Artificial Sequence: Synthetic peptide
  Seed: RMCSLMQGSTLPRRS
RMFSLLQASTPPRRS

SEQ ID NO: 123525 - protein, 15 aa, Artificial Sequence
  Description of Artificial Sequence: Synthetic peptide
  Seed: RMCSLMQGSTLPRRS
RMFSLLQASTQPRRS

SEQ ID NO: 123526 - protein, 15 aa, Artificial Sequence
  Description of Artificial Sequence: Synthetic peptide
  Seed: RMCSLMQGSTLPRRS
RMFSLLQASTRPRRS

SEQ ID NO: 123527 - protein, 15 aa, Artificial Sequence
  Description of Artificial Sequence: Synthetic peptide
  Seed: RMCSLMQGSTLPRRS
RMFSLLQASTSPRRS

SEQ ID NO: 123528 - protein, 15 aa, Artificial Sequence
  Description of Artificial Sequence: Synthetic peptide
  Seed: RMCSLMQGSTLPRRS
RMFSLLQASTTPRRS

SEQ ID NO: 123529 - protein, 15 aa, Artificial Sequence
  Description of Artificial Sequence: Synthetic peptide
  Seed: RMCSLMQGSTLPRRS
RMFSLLQASTVPRRS

SEQ ID NO: 123530 - protein, 15 aa, Artificial Sequence
  Description of Artificial Sequence: Synthetic peptide
  Seed: RMCSLMQGSTLPRRS
RMFSLLQASTWPRRS

SEQ ID NO: 123531 - protein, 15 aa, Artificial Sequence
  Description of Artificial Sequence: Synthetic peptide
  Seed: RMCSLMQGSTLPRRS
RMFSLLQASTYPRRS

SEQ ID NO: 123532 - protein, 15 aa, Artificial Sequence
  Description of Artificial Sequence: Synthetic peptide
  Seed: RMCSLMQGSTLPRRS
RMFSLLQCSTAPRRS

SEQ ID NO: 123533 - protein, 15 aa, Artificial Sequence
  Description of Artificial Sequence: Synthetic peptide
  Seed: RMCSLMQGSTLPRRS
RMFSLLQCSTIPRRS

SEQ ID NO: 123534 - protein, 15 aa, Artificial Sequence
  Description of Artificial Sequence: Synthetic peptide
  Seed: RMCSLMQGSTLPRRS
RMFSLLQCSTLPRRS

SEQ ID NO: 123535 - protein, 15 aa, Artificial Sequence
  Description of Artificial Sequence: Synthetic peptide
  Seed: RMCSLMQGSTLPRRS
RMFSLLQCSTMPRRS

SEQ ID NO: 123536 - protein, 15 aa, Artificial Sequence
  Description of Artificial Sequence: Synthetic peptide
  Seed: RMCSLMQGSTLPRRS
RMFSLLQCSTNPRRS

SEQ ID NO: 123537 - protein, 15 aa, Artificial Sequence
  Description of Artificial Sequence: Synthetic peptide
  Seed: RMCSLMQGSTLPRRS
RMFSLLQCSTSPRRS

SEQ ID NO: 123538 - protein, 15 aa, Artificial Sequence
  Description of Artificial Sequence: Synthetic peptide
  Seed: RMCSLMQGSTLPRRS
RMFSLLQCSTTPRRS

SEQ ID NO: 123539 - protein, 15 aa, Artificial Sequence
  Description of Artificial Sequence: Synthetic peptide
  Seed: RMCSLMQGSTLPRRS
RMFSLLQCSTVPRRS

SEQ ID NO: 123540 - protein, 15 aa, Artificial Sequence
  Description of Artificial Sequence: Synthetic peptide
  Seed: RMCSLMQGSTLPRRS
RMFSLLQDSTAPRRS

SEQ ID NO: 123541 - protein, 15 aa, Artificial Sequence
  Description of Artificial Sequence: Synthetic peptide
  Seed: RMCSLMQGSTLPRRS
RMFSLLQDSTIPRRS

SEQ ID NO: 123542 - protein, 15 aa, Artificial Sequence
  Description of Artificial Sequence: Synthetic peptide
  Seed: RMCSLMQGSTLPRRS
RMFSLLQDSTLPRRS

SEQ ID NO: 123543 - protein, 15 aa, Artificial Sequence
  Description of Artificial Sequence: Synthetic peptide
  Seed: RMCSLMQGSTLPRRS
RMFSLLQDSTVPRRS

SEQ ID NO: 123544 - protein, 15 aa, Artificial Sequence
  Description of Artificial Sequence: Synthetic peptide
  Seed: RMCSLMQGSTLPRRS
RMFSLLQESTAPRRS

SEQ ID NO: 123545 - protein, 15 aa, Artificial Sequence
  Description of Artificial Sequence: Synthetic peptide
  Seed: RMCSLMQGSTLPRRS
RMFSLLQESTIPRRS

SEQ ID NO: 123546 - protein, 15 aa, Artificial Sequence
  Description of Artificial Sequence: Synthetic peptide
  Seed: RMCSLMQGSTLPRRS
RMFSLLQESTLPRRS

SEQ ID NO: 123547 - protein, 15 aa, Artificial Sequence
  Description of Artificial Sequence: Synthetic peptide
  Seed: RMCSLMQGSTLPRRS
RMFSLLQESTMPRRS

SEQ ID NO: 123548 - protein, 15 aa, Artificial Sequence
  Description of Artificial Sequence: Synthetic peptide
  Seed: RMCSLMQGSTLPRRS
RMFSLLQESTNPRRS

SEQ ID NO: 123549 - protein, 15 aa, Artificial Sequence
  Description of Artificial Sequence: Synthetic peptide
  Seed: RMCSLMQGSTLPRRS
RMFSLLQESTSPRRS

SEQ ID NO: 123550 - protein, 15 aa, Artificial Sequence
  Description of Artificial Sequence: Synthetic peptide
  Seed: RMCSLMQGSTLPRRS
RMFSLLQESTTPRRS

SEQ ID NO: 123551 - protein, 15 aa, Artificial Sequence
  Description of Artificial Sequence: Synthetic peptide
  Seed: RMCSLMQGSTLPRRS
RMFSLLQESTVPRRS

SEQ ID NO: 123552 - protein, 15 aa, Artificial Sequence
  Description of Artificial Sequence: Synthetic peptide
  Seed: RMCSLMQGSTLPRRS
RMFSLLQFSTAPRRS

SEQ ID NO: 123553 - protein, 15 aa, Artificial Sequence
  Description of Artificial Sequence: Synthetic peptide
  Seed: RMCSLMQGSTLPRRS
RMFSLLQFSTIPRRS

SEQ ID NO: 123554 - protein, 15 aa, Artificial Sequence
  Description of Artificial Sequence: Synthetic peptide
  Seed: RMCSLMQGSTLPRRS
RMFSLLQFSTSPRRS

SEQ ID NO: 123555 - protein, 15 aa, Artificial Sequence
  Description of Artificial Sequence: Synthetic peptide
  Seed: RMCSLMQGSTLPRRS
RMFSLLQFSTVPRRS

SEQ ID NO: 123556 - protein, 15 aa, Artificial Sequence
  Description of Artificial Sequence: Synthetic peptide
  Seed: RMCSLMQGSTLPRRS
RMFSLLQGSTAPRRS

SEQ ID NO: 123557 - protein, 15 aa, Artificial Sequence
  Description of Artificial Sequence: Synthetic peptide
  Seed: RMCSLMQGSTLPRRS
RMFSLLQGSTCPRRS

SEQ ID NO: 123558 - protein, 15 aa, Artificial Sequence
  Description of Artificial Sequence: Synthetic peptide
  Seed: RMCSLMQGSTLPRRS
RMFSLLQGSTDPRRS

SEQ ID NO: 123559 - protein, 15 aa, Artificial Sequence
  Description of Artificial Sequence: Synthetic peptide
  Seed: RMCSLMQGSTLPRRS
RMFSLLQGSTEPRRS

SEQ ID NO: 123560 - protein, 15 aa, Artificial Sequence
  Description of Artificial Sequence: Synthetic peptide
  Seed: RMCSLMQGSTLPRRS
RMFSLLQGSTFPRRS

SEQ ID NO: 123561 - protein, 15 aa, Artificial Sequence
  Description of Artificial Sequence: Synthetic peptide
  Seed: RMCSLMQGSTLPRRS
RMFSLLQGSTGPRRS

SEQ ID NO: 123562 - protein, 15 aa, Artificial Sequence
  Description of Artificial Sequence: Synthetic peptide
  Seed: RMCSLMQGSTLPRRS
RMFSLLQGSTHPRRS

SEQ ID NO: 123563 - protein, 15 aa, Artificial Sequence
  Description of Artificial Sequence: Synthetic peptide
  Seed: RMCSLMQGSTLPRRS
RMFSLLQGSTIPRRS

SEQ ID NO: 123564 - protein, 15 aa, Artificial Sequence
  Description of Artificial Sequence: Synthetic peptide
  Seed: RMCSLMQGSTLPRRS
RMFSLLQGSTKPRRS

SEQ ID NO: 123565 - protein, 15 aa, Artificial Sequence
  Description of Artificial Sequence: Synthetic peptide
  Seed: RMCSLMQGSTLPRRS
RMFSLLQGSTLPRRS

SEQ ID NO: 123566 - protein, 15 aa, Artificial Sequence
  Description of Artificial Sequence: Synthetic peptide
  Seed: RMCSLMQGSTLPRRS
RMFSLLQGSTMPRRS

SEQ ID NO: 123567 - protein, 15 aa, Artificial Sequence
  Description of Artificial Sequence: Synthetic peptide
  Seed: RMCSLMQGSTLPRRS
RMFSLLQGSTNPRRS

SEQ ID NO: 123568 - protein, 15 aa, Artificial Sequence
  Description of Artificial Sequence: Synthetic peptide
  Seed: RMCSLMQGSTLPRRS
RMFSLLQGSTPPRRS

SEQ ID NO: 123569 - protein, 15 aa, Artificial Sequence
  Description of Artificial Sequence: Synthetic peptide
  Seed: RMCSLMQGSTLPRRS
RMFSLLQGSTQPRRS

SEQ ID NO: 123570 - protein, 15 aa, Artificial Sequence
  Description of Artificial Sequence: Synthetic peptide
  Seed: RMCSLMQGSTLPRRS
RMFSLLQGSTRPRRS

SEQ ID NO: 123571 - protein, 15 aa, Artificial Sequence
  Description of Artificial Sequence: Synthetic peptide
  Seed: RMCSLMQGSTLPRRS
RMFSLLQGSTSPRRS

SEQ ID NO: 123572 - protein, 15 aa, Artificial Sequence
  Description of Artificial Sequence: Synthetic peptide
  Seed: RMCSLMQGSTLPRRS
RMFSLLQGSTTPRRS

SEQ ID NO: 123573 - protein, 15 aa, Artificial Sequence
  Description of Artificial Sequence: Synthetic peptide
  Seed: RMCSLMQGSTLPRRS
RMFSLLQGSTVPRRS

SEQ ID NO: 123574 - protein, 15 aa, Artificial Sequence
  Description of Artificial Sequence: Synthetic peptide
  Seed: RMCSLMQGSTLPRRS
RMFSLLQGSTWPRRS

SEQ ID NO: 123575 - protein, 15 aa, Artificial Sequence
  Description of Artificial Sequence: Synthetic peptide
  Seed: RMCSLMQGSTLPRRS
RMFSLLQGSTYPRRS

SEQ ID NO: 123576 - protein, 15 aa, Artificial Sequence
  Description of Artificial Sequence: Synthetic peptide
  Seed: RMCSLMQGSTLPRRS
RMFSLLQHSTAPRRS

SEQ ID NO: 123577 - protein, 15 aa, Artificial Sequence
  Description of Artificial Sequence: Synthetic peptide
  Seed: RMCSLMQGSTLPRRS
RMFSLLQHSTIPRRS

SEQ ID NO: 123578 - protein, 15 aa, Artificial Sequence
  Description of Artificial Sequence: Synthetic peptide
  Seed: RMCSLMQGSTLPRRS
RMFSLLQHSTLPRRS

SEQ ID NO: 123579 - protein, 15 aa, Artificial Sequence
  Description of Artificial Sequence: Synthetic peptide
  Seed: RMCSLMQGSTLPRRS
RMFSLLQHSTMPRRS

SEQ ID NO: 123580 - protein, 15 aa, Artificial Sequence
  Description of Artificial Sequence: Synthetic peptide
  Seed: RMCSLMQGSTLPRRS
RMFSLLQHSTNPRRS

SEQ ID NO: 123581 - protein, 15 aa, Artificial Sequence
  Description of Artificial Sequence: Synthetic peptide
  Seed: RMCSLMQGSTLPRRS
RMFSLLQHSTSPRRS

SEQ ID NO: 123582 - protein, 15 aa, Artificial Sequence
  Description of Artificial Sequence: Synthetic peptide
  Seed: RMCSLMQGSTLPRRS
RMFSLLQHSTTPRRS

SEQ ID NO: 123583 - protein, 15 aa, Artificial Sequence
  Description of Artificial Sequence: Synthetic peptide
  Seed: RMCSLMQGSTLPRRS
RMFSLLQHSTVPRRS

SEQ ID NO: 123584 - protein, 15 aa, Artificial Sequence
  Description of Artificial Sequence: Synthetic peptide
  Seed: RMCSLMQGSTLPRRS
RMFSLLQISTAPRRS

SEQ ID NO: 123585 - protein, 15 aa, Artificial Sequence
  Description of Artificial Sequence: Synthetic peptide
  Seed: RMCSLMQGSTLPRRS
RMFSLLQISTCPRRS

SEQ ID NO: 123586 - protein, 15 aa, Artificial Sequence
  Description of Artificial Sequence: Synthetic peptide
  Seed: RMCSLMQGSTLPRRS
RMFSLLQISTDPRRS

SEQ ID NO: 123587 - protein, 15 aa, Artificial Sequence
  Description of Artificial Sequence: Synthetic peptide
  Seed: RMCSLMQGSTLPRRS
RMFSLLQISTEPRRS

SEQ ID NO: 123588 - protein, 15 aa, Artificial Sequence
  Description of Artificial Sequence: Synthetic peptide
  Seed: RMCSLMQGSTLPRRS
RMFSLLQISTFPRRS

SEQ ID NO: 123589 - protein, 15 aa, Artificial Sequence
  Description of Artificial Sequence: Synthetic peptide
  Seed: RMCSLMQGSTLPRRS
RMFSLLQISTGPRRS

SEQ ID NO: 123590 - protein, 15 aa, Artificial Sequence
  Description of Artificial Sequence: Synthetic peptide
  Seed: RMCSLMQGSTLPRRS
RMFSLLQISTHPRRS

SEQ ID NO: 123591 - protein, 15 aa, Artificial Sequence
  Description of Artificial Sequence: Synthetic peptide
  Seed: RMCSLMQGSTLPRRS
RMFSLLQISTIPRRS

SEQ ID NO: 123592 - protein, 15 aa, Artificial Sequence
  Description of Artificial Sequence: Synthetic peptide
  Seed: RMCSLMQGSTLPRRS
RMFSLLQISTLPRRS

SEQ ID NO: 123593 - protein, 15 aa, Artificial Sequence
  Description of Artificial Sequence: Synthetic peptide
  Seed: RMCSLMQGSTLPRRS
RMFSLLQISTMPRRS

SEQ ID NO: 123594 - protein, 15 aa, Artificial Sequence
  Description of Artificial Sequence: Synthetic peptide
  Seed: RMCSLMQGSTLPRRS
RMFSLLQISTNPRRS

SEQ ID NO: 123595 - protein, 15 aa, Artificial Sequence
  Description of Artificial Sequence: Synthetic peptide
  Seed: RMCSLMQGSTLPRRS
RMFSLLQISTPPRRS

SEQ ID NO: 123596 - protein, 15 aa, Artificial Sequence
  Description of Artificial Sequence: Synthetic peptide
  Seed: RMCSLMQGSTLPRRS
RMFSLLQISTQPRRS

SEQ ID NO: 123597 - protein, 15 aa, Artificial Sequence
  Description of Artificial Sequence: Synthetic peptide
  Seed: RMCSLMQGSTLPRRS
RMFSLLQISTSPRRS

SEQ ID NO: 123598 - protein, 15 aa, Artificial Sequence
  Description of Artificial Sequence: Synthetic peptide
  Seed: RMCSLMQGSTLPRRS
RMFSLLQISTTPRRS

SEQ ID NO: 123599 - protein, 15 aa, Artificial Sequence
  Description of Artificial Sequence: Synthetic peptide
  Seed: RMCSLMQGSTLPRRS
RMFSLLQISTVPRRS

SEQ ID NO: 123600 - protein, 15 aa, Artificial Sequence
  Description of Artificial Sequence: Synthetic peptide
  Seed: RMCSLMQGSTLPRRS
RMFSLLQLSTAPRRS

SEQ ID NO: 123601 - protein, 15 aa, Artificial Sequence
  Description of Artificial Sequence: Synthetic peptide
  Seed: RMCSLMQGSTLPRRS
RMFSLLQLSTGPRRS

SEQ ID NO: 123602 - protein, 15 aa, Artificial Sequence
  Description of Artificial Sequence: Synthetic peptide
  Seed: RMCSLMQGSTLPRRS
RMFSLLQLSTHPRRS

SEQ ID NO: 123603 - protein, 15 aa, Artificial Sequence
  Description of Artificial Sequence: Synthetic peptide
  Seed: RMCSLMQGSTLPRRS
RMFSLLQLSTIPRRS

SEQ ID NO: 123604 - protein, 15 aa, Artificial Sequence
  Description of Artificial Sequence: Synthetic peptide
  Seed: RMCSLMQGSTLPRRS
RMFSLLQLSTLPRRS

SEQ ID NO: 123605 - protein, 15 aa, Artificial Sequence
  Description of Artificial Sequence: Synthetic peptide
  Seed: RMCSLMQGSTLPRRS
RMFSLLQLSTMPRRS

SEQ ID NO: 123606 - protein, 15 aa, Artificial Sequence
  Description of Artificial Sequence: Synthetic peptide
  Seed: RMCSLMQGSTLPRRS
RMFSLLQLSTNPRRS

SEQ ID NO: 123607 - protein, 15 aa, Artificial Sequence
  Description of Artificial Sequence: Synthetic peptide
  Seed: RMCSLMQGSTLPRRS
RMFSLLQLSTQPRRS

SEQ ID NO: 123608 - protein, 15 aa, Artificial Sequence
  Description of Artificial Sequence: Synthetic peptide
  Seed: RMCSLMQGSTLPRRS
RMFSLLQLSTSPRRS

SEQ ID NO: 123609 - protein, 15 aa, Artificial Sequence
  Description of Artificial Sequence: Synthetic peptide
  Seed: RMCSLMQGSTLPRRS
RMFSLLQLSTTPRRS

SEQ ID NO: 123610 - protein, 15 aa, Artificial Sequence
  Description of Artificial Sequence: Synthetic peptide
  Seed: RMCSLMQGSTLPRRS
RMFSLLQLSTVPRRS

SEQ ID NO: 123611 - protein, 15 aa, Artificial Sequence
  Description of Artificial Sequence: Synthetic peptide
  Seed: RMCSLMQGSTLPRRS
RMFSLLQMSTAPRRS

SEQ ID NO: 123612 - protein, 15 aa, Artificial Sequence
  Description of Artificial Sequence: Synthetic peptide
  Seed: RMCSLMQGSTLPRRS
RMFSLLQMSTGPRRS

SEQ ID NO: 123613 - protein, 15 aa, Artificial Sequence
  Description of Artificial Sequence: Synthetic peptide
  Seed: RMCSLMQGSTLPRRS
RMFSLLQMSTHPRRS

SEQ ID NO: 123614 - protein, 15 aa, Artificial Sequence
  Description of Artificial Sequence: Synthetic peptide
  Seed: RMCSLMQGSTLPRRS
RMFSLLQMSTIPRRS

SEQ ID NO: 123615 - protein, 15 aa, Artificial Sequence
  Description of Artificial Sequence: Synthetic peptide
  Seed: RMCSLMQGSTLPRRS
RMFSLLQMSTLPRRS

SEQ ID NO: 123616 - protein, 15 aa, Artificial Sequence
  Description of Artificial Sequence: Synthetic peptide
  Seed: RMCSLMQGSTLPRRS
RMFSLLQMSTMPRRS

SEQ ID NO: 123617 - protein, 15 aa, Artificial Sequence
  Description of Artificial Sequence: Synthetic peptide
  Seed: RMCSLMQGSTLPRRS
RMFSLLQMSTNPRRS

SEQ ID NO: 123618 - protein, 15 aa, Artificial Sequence
  Description of Artificial Sequence: Synthetic peptide
  Seed: RMCSLMQGSTLPRRS
RMFSLLQMSTQPRRS

SEQ ID NO: 123619 - protein, 15 aa, Artificial Sequence
  Description of Artificial Sequence: Synthetic peptide
  Seed: RMCSLMQGSTLPRRS
RMFSLLQMSTSPRRS

SEQ ID NO: 123620 - protein, 15 aa, Artificial Sequence
  Description of Artificial Sequence: Synthetic peptide
  Seed: RMCSLMQGSTLPRRS
RMFSLLQMSTTPRRS

SEQ ID NO: 123621 - protein, 15 aa, Artificial Sequence
  Description of Artificial Sequence: Synthetic peptide
  Seed: RMCSLMQGSTLPRRS
RMFSLLQMSTVPRRS

SEQ ID NO: 123622 - protein, 15 aa, Artificial Sequence
  Description of Artificial Sequence: Synthetic peptide
  Seed: RMCSLMQGSTLPRRS
RMFSLLQNSTAPRRS

SEQ ID NO: 123623 - protein, 15 aa, Artificial Sequence
  Description of Artificial Sequence: Synthetic peptide
  Seed: RMCSLMQGSTLPRRS
RMFSLLQNSTCPRRS

SEQ ID NO: 123624 - protein, 15 aa, Artificial Sequence
  Description of Artificial Sequence: Synthetic peptide
  Seed: RMCSLMQGSTLPRRS
RMFSLLQNSTDPRRS

SEQ ID NO: 123625 - protein, 15 aa, Artificial Sequence
  Description of Artificial Sequence: Synthetic peptide
  Seed: RMCSLMQGSTLPRRS
RMFSLLQNSTEPRRS

SEQ ID NO: 123626 - protein, 15 aa, Artificial Sequence
  Description of Artificial Sequence: Synthetic peptide
  Seed: RMCSLMQGSTLPRRS
RMFSLLQNSTFPRRS

SEQ ID NO: 123627 - protein, 15 aa, Artificial Sequence
  Description of Artificial Sequence: Synthetic peptide
  Seed: RMCSLMQGSTLPRRS
RMFSLLQNSTGPRRS

SEQ ID NO: 123628 - protein, 15 aa, Artificial Sequence
  Description of Artificial Sequence: Synthetic peptide
  Seed: RMCSLMQGSTLPRRS
RMFSLLQNSTHPRRS

SEQ ID NO: 123629 - protein, 15 aa, Artificial Sequence
  Description of Artificial Sequence: Synthetic peptide
  Seed: RMCSLMQGSTLPRRS
RMFSLLQNSTIPRRS

SEQ ID NO: 123630 - protein, 15 aa, Artificial Sequence
  Description of Artificial Sequence: Synthetic peptide
  Seed: RMCSLMQGSTLPRRS
RMFSLLQNSTLPRRS

SEQ ID NO: 123631 - protein, 15 aa, Artificial Sequence
  Description of Artificial Sequence: Synthetic peptide
  Seed: RMCSLMQGSTLPRRS
RMFSLLQNSTMPRRS

SEQ ID NO: 123632 - protein, 15 aa, Artificial Sequence
  Description of Artificial Sequence: Synthetic peptide
  Seed: RMCSLMQGSTLPRRS
RMFSLLQNSTNPRRS

SEQ ID NO: 123633 - protein, 15 aa, Artificial Sequence
  Description of Artificial Sequence: Synthetic peptide
  Seed: RMCSLMQGSTLPRRS
RMFSLLQNSTPPRRS

SEQ ID NO: 123634 - protein, 15 aa, Artificial Sequence
  Description of Artificial Sequence: Synthetic peptide
  Seed: RMCSLMQGSTLPRRS
RMFSLLQNSTQPRRS

SEQ ID NO: 123635 - protein, 15 aa, Artificial Sequence
  Description of Artificial Sequence: Synthetic peptide
  Seed: RMCSLMQGSTLPRRS
RMFSLLQNSTRPRRS

SEQ ID NO: 123636 - protein, 15 aa, Artificial Sequence
  Description of Artificial Sequence: Synthetic peptide
  Seed: RMCSLMQGSTLPRRS
RMFSLLQNSTSPRRS

SEQ ID NO: 123637 - protein, 15 aa, Artificial Sequence
  Description of Artificial Sequence: Synthetic peptide
  Seed: RMCSLMQGSTLPRRS
RMFSLLQNSTTPRRS

SEQ ID NO: 123638 - protein, 15 aa, Artificial Sequence
  Description of Artificial Sequence: Synthetic peptide
  Seed: RMCSLMQGSTLPRRS
RMFSLLQNSTVPRRS

SEQ ID NO: 123639 - protein, 15 aa, Artificial Sequence
  Description of Artificial Sequence: Synthetic peptide
  Seed: RMCSLMQGSTLPRRS
RMFSLLQNSTWPRRS

SEQ ID NO: 123640 - protein, 15 aa, Artificial Sequence
  Description of Artificial Sequence: Synthetic peptide
  Seed: RMCSLMQGSTLPRRS
RMFSLLQNSTYPRRS

SEQ ID NO: 123641 - protein, 15 aa, Artificial Sequence
  Description of Artificial Sequence: Synthetic peptide
  Seed: RMCSLMQGSTLPRRS
RMFSLLQPSTAPRRS

SEQ ID NO: 123642 - protein, 15 aa, Artificial Sequence
  Description of Artificial Sequence: Synthetic peptide
  Seed: RMCSLMQGSTLPRRS
RMFSLLQPSTCPRRS

SEQ ID NO: 123643 - protein, 15 aa, Artificial Sequence
  Description of Artificial Sequence: Synthetic peptide
  Seed: RMCSLMQGSTLPRRS
RMFSLLQPSTDPRRS

SEQ ID NO: 123644 - protein, 15 aa, Artificial Sequence
  Description of Artificial Sequence: Synthetic peptide
  Seed: RMCSLMQGSTLPRRS
RMFSLLQPSTEPRRS

SEQ ID NO: 123645 - protein, 15 aa, Artificial Sequence
  Description of Artificial Sequence: Synthetic peptide
  Seed: RMCSLMQGSTLPRRS
RMFSLLQPSTFPRRS

SEQ ID NO: 123646 - protein, 15 aa, Artificial Sequence
  Description of Artificial Sequence: Synthetic peptide
  Seed: RMCSLMQGSTLPRRS
RMFSLLQPSTGPRRS

SEQ ID NO: 123647 - protein, 15 aa, Artificial Sequence
  Description of Artificial Sequence: Synthetic peptide
  Seed: RMCSLMQGSTLPRRS
RMFSLLQPSTHPRRS

SEQ ID NO: 123648 - protein, 15 aa, Artificial Sequence
  Description of Artificial Sequence: Synthetic peptide
  Seed: RMCSLMQGSTLPRRS
RMFSLLQPSTIPRRS

SEQ ID NO: 123649 - protein, 15 aa, Artificial Sequence
  Description of Artificial Sequence: Synthetic peptide
  Seed: RMCSLMQGSTLPRRS
RMFSLLQPSTKPRRS

SEQ ID NO: 123650 - protein, 15 aa, Artificial Sequence
  Description of Artificial Sequence: Synthetic peptide
  Seed: RMCSLMQGSTLPRRS
RMFSLLQPSTLPRRS

SEQ ID NO: 123651 - protein, 15 aa, Artificial Sequence
  Description of Artificial Sequence: Synthetic peptide
  Seed: RMCSLMQGSTLPRRS
RMFSLLQPSTMPRRS

SEQ ID NO: 123652 - protein, 15 aa, Artificial Sequence
  Description of Artificial Sequence: Synthetic peptide
  Seed: RMCSLMQGSTLPRRS
RMFSLLQPSTNPRRS

SEQ ID NO: 123653 - protein, 15 aa, Artificial Sequence
  Description of Artificial Sequence: Synthetic peptide
  Seed: RMCSLMQGSTLPRRS
RMFSLLQPSTPPRRS

SEQ ID NO: 123654 - protein, 15 aa, Artificial Sequence
  Description of Artificial Sequence: Synthetic peptide
  Seed: RMCSLMQGSTLPRRS
RMFSLLQPSTQPRRS

SEQ ID NO: 123655 - protein, 15 aa, Artificial Sequence
  Description of Artificial Sequence: Synthetic peptide
  Seed: RMCSLMQGSTLPRRS
RMFSLLQPSTRPRRS

SEQ ID NO: 123656 - protein, 15 aa, Artificial Sequence
  Description of Artificial Sequence: Synthetic peptide
  Seed: RMCSLMQGSTLPRRS
RMFSLLQPSTSPRRS

SEQ ID NO: 123657 - protein, 15 aa, Artificial Sequence
  Description of Artificial Sequence: Synthetic peptide
  Seed: RMCSLMQGSTLPRRS
RMFSLLQPSTTPRRS

SEQ ID NO: 123658 - protein, 15 aa, Artificial Sequence
  Description of Artificial Sequence: Synthetic peptide
  Seed: RMCSLMQGSTLPRRS
RMFSLLQPSTVPRRS

SEQ ID NO: 123659 - protein, 15 aa, Artificial Sequence
  Description of Artificial Sequence: Synthetic peptide
  Seed: RMCSLMQGSTLPRRS
RMFSLLQPSTWPRRS

SEQ ID NO: 123660 - protein, 15 aa, Artificial Sequence
  Description of Artificial Sequence: Synthetic peptide
  Seed: RMCSLMQGSTLPRRS
RMFSLLQPSTYPRRS

SEQ ID NO: 123661 - protein, 15 aa, Artificial Sequence
  Description of Artificial Sequence: Synthetic peptide
  Seed: RMCSLMQGSTLPRRS
RMFSLLQQSTAPRRS

SEQ ID NO: 123662 - protein, 15 aa, Artificial Sequence
  Description of Artificial Sequence: Synthetic peptide
  Seed: RMCSLMQGSTLPRRS
RMFSLLQQSTIPRRS

SEQ ID NO: 123663 - protein, 15 aa, Artificial Sequence
  Description of Artificial Sequence: Synthetic peptide
  Seed: RMCSLMQGSTLPRRS
RMFSLLQQSTLPRRS

SEQ ID NO: 123664 - protein, 15 aa, Artificial Sequence
  Description of Artificial Sequence: Synthetic peptide
  Seed: RMCSLMQGSTLPRRS
RMFSLLQQSTMPRRS

SEQ ID NO: 123665 - protein, 15 aa, Artificial Sequence
  Description of Artificial Sequence: Synthetic peptide
  Seed: RMCSLMQGSTLPRRS
RMFSLLQQSTNPRRS

SEQ ID NO: 123666 - protein, 15 aa, Artificial Sequence
  Description of Artificial Sequence: Synthetic peptide
  Seed: RMCSLMQGSTLPRRS
RMFSLLQQSTSPRRS

SEQ ID NO: 123667 - protein, 15 aa, Artificial Sequence
  Description of Artificial Sequence: Synthetic peptide
  Seed: RMCSLMQGSTLPRRS
RMFSLLQQSTTPRRS

SEQ ID NO: 123668 - protein, 15 aa, Artificial Sequence
  Description of Artificial Sequence: Synthetic peptide
  Seed: RMCSLMQGSTLPRRS
RMFSLLQQSTVPRRS

SEQ ID NO: 123669 - protein, 15 aa, Artificial Sequence
  Description of Artificial Sequence: Synthetic peptide
  Seed: RMCSLMQGSTLPRRS
RMFSLLQSSTAPRRS

SEQ ID NO: 123670 - protein, 15 aa, Artificial Sequence
  Description of Artificial Sequence: Synthetic peptide
  Seed: RMCSLMQGSTLPRRS
RMFSLLQSSTCPRRS

SEQ ID NO: 123671 - protein, 15 aa, Artificial Sequence
  Description of Artificial Sequence: Synthetic peptide
  Seed: RMCSLMQGSTLPRRS
RMFSLLQSSTDPRRS

SEQ ID NO: 123672 - protein, 15 aa, Artificial Sequence
  Description of Artificial Sequence: Synthetic peptide
  Seed: RMCSLMQGSTLPRRS
RMFSLLQSSTEPRRS

SEQ ID NO: 123673 - protein, 15 aa, Artificial Sequence
  Description of Artificial Sequence: Synthetic peptide
  Seed: RMCSLMQGSTLPRRS
RMFSLLQSSTFPRRS

SEQ ID NO: 123674 - protein, 15 aa, Artificial Sequence
  Description of Artificial Sequence: Synthetic peptide
  Seed: RMCSLMQGSTLPRRS
RMFSLLQSSTGPRRS

SEQ ID NO: 123675 - protein, 15 aa, Artificial Sequence
  Description of Artificial Sequence: Synthetic peptide
  Seed: RMCSLMQGSTLPRRS
RMFSLLQSSTHPRRS

SEQ ID NO: 123676 - protein, 15 aa, Artificial Sequence
  Description of Artificial Sequence: Synthetic peptide
  Seed: RMCSLMQGSTLPRRS
RMFSLLQSSTIPRRS

SEQ ID NO: 123677 - protein, 15 aa, Artificial Sequence
  Description of Artificial Sequence: Synthetic peptide
  Seed: RMCSLMQGSTLPRRS
RMFSLLQSSTKPRRS

SEQ ID NO: 123678 - protein, 15 aa, Artificial Sequence
  Description of Artificial Sequence: Synthetic peptide
  Seed: RMCSLMQGSTLPRRS
RMFSLLQSSTLPRRS

SEQ ID NO: 123679 - protein, 15 aa, Artificial Sequence
  Description of Artificial Sequence: Synthetic peptide
  Seed: RMCSLMQGSTLPRRS
RMFSLLQSSTMPRRS

SEQ ID NO: 123680 - protein, 15 aa, Artificial Sequence
  Description of Artificial Sequence: Synthetic peptide
  Seed: RMCSLMQGSTLPRRS
RMFSLLQSSTNPRRS

SEQ ID NO: 123681 - protein, 15 aa, Artificial Sequence
  Description of Artificial Sequence: Synthetic peptide
  Seed: RMCSLMQGSTLPRRS
RMFSLLQSSTPPRRS

SEQ ID NO: 123682 - protein, 15 aa, Artificial Sequence
  Description of Artificial Sequence: Synthetic peptide
  Seed: RMCSLMQGSTLPRRS
RMFSLLQSSTQPRRS

SEQ ID NO: 123683 - protein, 15 aa, Artificial Sequence
  Description of Artificial Sequence: Synthetic peptide
  Seed: RMCSLMQGSTLPRRS
RMFSLLQSSTRPRRS

SEQ ID NO: 123684 - protein, 15 aa, Artificial Sequence
  Description of Artificial Sequence: Synthetic peptide
  Seed: RMCSLMQGSTLPRRS
RMFSLLQSSTSPRRS

SEQ ID NO: 123685 - protein, 15 aa, Artificial Sequence
  Description of Artificial Sequence: Synthetic peptide
  Seed: RMCSLMQGSTLPRRS
RMFSLLQSSTTPRRS

SEQ ID NO: 123686 - protein, 15 aa, Artificial Sequence
  Description of Artificial Sequence: Synthetic peptide
  Seed: RMCSLMQGSTLPRRS
RMFSLLQSSTVPRRS

SEQ ID NO: 123687 - protein, 15 aa, Artificial Sequence
  Description of Artificial Sequence: Synthetic peptide
  Seed: RMCSLMQGSTLPRRS
RMFSLLQSSTWPRRS

SEQ ID NO: 123688 - protein, 15 aa, Artificial Sequence
  Description of Artificial Sequence: Synthetic peptide
  Seed: RMCSLMQGSTLPRRS
RMFSLLQSSTYPRRS

SEQ ID NO: 123689 - protein, 15 aa, Artificial Sequence
  Description of Artificial Sequence: Synthetic peptide
  Seed: RMCSLMQGSTLPRRS
RMFSLLQTSTAPRRS

SEQ ID NO: 123690 - protein, 15 aa, Artificial Sequence
  Description of Artificial Sequence: Synthetic peptide
  Seed: RMCSLMQGSTLPRRS
RMFSLLQTSTCPRRS

SEQ ID NO: 123691 - protein, 15 aa, Artificial Sequence
  Description of Artificial Sequence: Synthetic peptide
  Seed: RMCSLMQGSTLPRRS
RMFSLLQTSTDPRRS

SEQ ID NO: 123692 - protein, 15 aa, Artificial Sequence
  Description of Artificial Sequence: Synthetic peptide
  Seed: RMCSLMQGSTLPRRS
RMFSLLQTSTEPRRS

SEQ ID NO: 123693 - protein, 15 aa, Artificial Sequence
  Description of Artificial Sequence: Synthetic peptide
  Seed: RMCSLMQGSTLPRRS
RMFSLLQTSTFPRRS

SEQ ID NO: 123694 - protein, 15 aa, Artificial Sequence
  Description of Artificial Sequence: Synthetic peptide
  Seed: RMCSLMQGSTLPRRS
RMFSLLQTSTGPRRS

SEQ ID NO: 123695 - protein, 15 aa, Artificial Sequence
  Description of Artificial Sequence: Synthetic peptide
  Seed: RMCSLMQGSTLPRRS
RMFSLLQTSTHPRRS

SEQ ID NO: 123696 - protein, 15 aa, Artificial Sequence
  Description of Artificial Sequence: Synthetic peptide
  Seed: RMCSLMQGSTLPRRS
RMFSLLQTSTIPRRS

SEQ ID NO: 123697 - protein, 15 aa, Artificial Sequence
  Description of Artificial Sequence: Synthetic peptide
  Seed: RMCSLMQGSTLPRRS
RMFSLLQTSTKPRRS

SEQ ID NO: 123698 - protein, 15 aa, Artificial Sequence
  Description of Artificial Sequence: Synthetic peptide
  Seed: RMCSLMQGSTLPRRS
RMFSLLQTSTLPRRS

SEQ ID NO: 123699 - protein, 15 aa, Artificial Sequence
  Description of Artificial Sequence: Synthetic peptide
  Seed: RMCSLMQGSTLPRRS
RMFSLLQTSTMPRRS

SEQ ID NO: 123700 - protein, 15 aa, Artificial Sequence
  Description of Artificial Sequence: Synthetic peptide
  Seed: RMCSLMQGSTLPRRS
RMFSLLQTSTNPRRS

SEQ ID NO: 123701 - protein, 15 aa, Artificial Sequence
  Description of Artificial Sequence: Synthetic peptide
  Seed: RMCSLMQGSTLPRRS
RMFSLLQTSTPPRRS

SEQ ID NO: 123702 - protein, 15 aa, Artificial Sequence
  Description of Artificial Sequence: Synthetic peptide
  Seed: RMCSLMQGSTLPRRS
RMFSLLQTSTQPRRS

SEQ ID NO: 123703 - protein, 15 aa, Artificial Sequence
  Description of Artificial Sequence: Synthetic peptide
  Seed: RMCSLMQGSTLPRRS
RMFSLLQTSTRPRRS

SEQ ID NO: 123704 - protein, 15 aa, Artificial Sequence
  Description of Artificial Sequence: Synthetic peptide
  Seed: RMCSLMQGSTLPRRS
RMFSLLQTSTSPRRS

SEQ ID NO: 123705 - protein, 15 aa, Artificial Sequence
  Description of Artificial Sequence: Synthetic peptide
  Seed: RMCSLMQGSTLPRRS
RMFSLLQTSTTPRRS

SEQ ID NO: 123706 - protein, 15 aa, Artificial Sequence
  Description of Artificial Sequence: Synthetic peptide
  Seed: RMCSLMQGSTLPRRS
RMFSLLQTSTVPRRS

SEQ ID NO: 123707 - protein, 15 aa, Artificial Sequence
  Description of Artificial Sequence: Synthetic peptide
  Seed: RMCSLMQGSTLPRRS
RMFSLLQTSTWPRRS

SEQ ID NO: 123708 - protein, 15 aa, Artificial Sequence
  Description of Artificial Sequence: Synthetic peptide
  Seed: RMCSLMQGSTLPRRS
RMFSLLQTSTYPRRS

SEQ ID NO: 123709 - protein, 15 aa, Artificial Sequence
  Description of Artificial Sequence: Synthetic peptide
  Seed: RMCSLMQGSTLPRRS
RMFSLLQVSTAPRRS

SEQ ID NO: 123710 - protein, 15 aa, Artificial Sequence
  Description of Artificial Sequence: Synthetic peptide
  Seed: RMCSLMQGSTLPRRS
RMFSLLQVSTCPRRS

SEQ ID NO: 123711 - protein, 15 aa, Artificial Sequence
  Description of Artificial Sequence: Synthetic peptide
  Seed: RMCSLMQGSTLPRRS
RMFSLLQVSTDPRRS

SEQ ID NO: 123712 - protein, 15 aa, Artificial Sequence
  Description of Artificial Sequence: Synthetic peptide
  Seed: RMCSLMQGSTLPRRS
RMFSLLQVSTEPRRS

SEQ ID NO: 123713 - protein, 15 aa, Artificial Sequence
  Description of Artificial Sequence: Synthetic peptide
  Seed: RMCSLMQGSTLPRRS
RMFSLLQVSTFPRRS

SEQ ID NO: 123714 - protein, 15 aa, Artificial Sequence
  Description of Artificial Sequence: Synthetic peptide
  Seed: RMCSLMQGSTLPRRS
RMFSLLQVSTGPRRS

SEQ ID NO: 123715 - protein, 15 aa, Artificial Sequence
  Description of Artificial Sequence: Synthetic peptide
  Seed: RMCSLMQGSTLPRRS
RMFSLLQVSTHPRRS

SEQ ID NO: 123716 - protein, 15 aa, Artificial Sequence
  Description of Artificial Sequence: Synthetic peptide
  Seed: RMCSLMQGSTLPRRS
RMFSLLQVSTIPRRS

SEQ ID NO: 123717 - protein, 15 aa, Artificial Sequence
  Description of Artificial Sequence: Synthetic peptide
  Seed: RMCSLMQGSTLPRRS
RMFSLLQVSTKPRRS

SEQ ID NO: 123718 - protein, 15 aa, Artificial Sequence
  Description of Artificial Sequence: Synthetic peptide
  Seed: RMCSLMQGSTLPRRS
RMFSLLQVSTLPRRS

SEQ ID NO: 123719 - protein, 15 aa, Artificial Sequence
  Description of Artificial Sequence: Synthetic peptide
  Seed: RMCSLMQGSTLPRRS
RMFSLLQVSTMPRRS

SEQ ID NO: 123720 - protein, 15 aa, Artificial Sequence
  Description of Artificial Sequence: Synthetic peptide
  Seed: RMCSLMQGSTLPRRS
RMFSLLQVSTNPRRS

SEQ ID NO: 123721 - protein, 15 aa, Artificial Sequence
  Description of Artificial Sequence: Synthetic peptide
  Seed: RMCSLMQGSTLPRRS
RMFSLLQVSTPPRRS

SEQ ID NO: 123722 - protein, 15 aa, Artificial Sequence
  Description of Artificial Sequence: Synthetic peptide
  Seed: RMCSLMQGSTLPRRS
RMFSLLQVSTQPRRS

SEQ ID NO: 123723 - protein, 15 aa, Artificial Sequence
  Description of Artificial Sequence: Synthetic peptide
  Seed: RMCSLMQGSTLPRRS
RMFSLLQVSTRPRRS

SEQ ID NO: 123724 - protein, 15 aa, Artificial Sequence
  Description of Artificial Sequence: Synthetic peptide
  Seed: RMCSLMQGSTLPRRS
RMFSLLQVSTSPRRS

SEQ ID NO: 123725 - protein, 15 aa, Artificial Sequence
  Description of Artificial Sequence: Synthetic peptide
  Seed: RMCSLMQGSTLPRRS
RMFSLLQVSTTPRRS

SEQ ID NO: 123726 - protein, 15 aa, Artificial Sequence
  Description of Artificial Sequence: Synthetic peptide
  Seed: RMCSLMQGSTLPRRS
RMFSLLQVSTVPRRS

SEQ ID NO: 123727 - protein, 15 aa, Artificial Sequence
  Description of Artificial Sequence: Synthetic peptide
  Seed: RMCSLMQGSTLPRRS
RMFSLLQVSTYPRRS

SEQ ID NO: 123728 - protein, 15 aa, Artificial Sequence
  Description of Artificial Sequence: Synthetic peptide
  Seed: RMCSLMQGSTLPRRS
RMFSLLQWSTAPRRS

SEQ ID NO: 123729 - protein, 15 aa, Artificial Sequence
  Description of Artificial Sequence: Synthetic peptide
  Seed: RMCSLMQGSTLPRRS
RMFSLLQWSTIPRRS

SEQ ID NO: 123730 - protein, 15 aa, Artificial Sequence
  Description of Artificial Sequence: Synthetic peptide
  Seed: RMCSLMQGSTLPRRS
RMFSLLQWSTLPRRS

SEQ ID NO: 123731 - protein, 15 aa, Artificial Sequence
  Description of Artificial Sequence: Synthetic peptide
  Seed: RMCSLMQGSTLPRRS
RMFSLLQWSTVPRRS

SEQ ID NO: 123732 - protein, 15 aa, Artificial Sequence
  Description of Artificial Sequence: Synthetic peptide
  Seed: RMCSLMQGSTLPRRS
RMFSLLQYSTAPRRS

SEQ ID NO: 123733 - protein, 15 aa, Artificial Sequence
  Description of Artificial Sequence: Synthetic peptide
  Seed: RMCSLMQGSTLPRRS
RMFSLLQYSTIPRRS

SEQ ID NO: 123734 - protein, 15 aa, Artificial Sequence
  Description of Artificial Sequence: Synthetic peptide
  Seed: RMCSLMQGSTLPRRS
RMFSLLQYSTLPRRS

SEQ ID NO: 123735 - protein, 15 aa, Artificial Sequence
  Description of Artificial Sequence: Synthetic peptide
  Seed: RMCSLMQGSTLPRRS
RMFSLLQYSTVPRRS

SEQ ID NO: 123736 - protein, 15 aa, Artificial Sequence
  Description of Artificial Sequence: Synthetic peptide
  Seed: RMCSLMQGSTLPRRS
RMFSLMQASTAPRRS

SEQ ID NO: 123737 - protein, 15 aa, Artificial Sequence
  Description of Artificial Sequence: Synthetic peptide
  Seed: RMCSLMQGSTLPRRS
RMFSLMQASTCPRRS

SEQ ID NO: 123738 - protein, 15 aa, Artificial Sequence
  Description of Artificial Sequence: Synthetic peptide
  Seed: RMCSLMQGSTLPRRS
RMFSLMQASTDPRRS

SEQ ID NO: 123739 - protein, 15 aa, Artificial Sequence
  Description of Artificial Sequence: Synthetic peptide
  Seed: RMCSLMQGSTLPRRS
RMFSLMQASTEPRRS

SEQ ID NO: 123740 - protein, 15 aa, Artificial Sequence
  Description of Artificial Sequence: Synthetic peptide
  Seed: RMCSLMQGSTLPRRS
RMFSLMQASTFPRRS

SEQ ID NO: 123741 - protein, 15 aa, Artificial Sequence
  Description of Artificial Sequence: Synthetic peptide
  Seed: RMCSLMQGSTLPRRS
RMFSLMQASTGPRRS

SEQ ID NO: 123742 - protein, 15 aa, Artificial Sequence
  Description of Artificial Sequence: Synthetic peptide
  Seed: RMCSLMQGSTLPRRS
RMFSLMQASTHPRRS

SEQ ID NO: 123743 - protein, 15 aa, Artificial Sequence
  Description of Artificial Sequence: Synthetic peptide
  Seed: RMCSLMQGSTLPRRS
RMFSLMQASTIPRRS

SEQ ID NO: 123744 - protein, 15 aa, Artificial Sequence
  Description of Artificial Sequence: Synthetic peptide
  Seed: RMCSLMQGSTLPRRS
RMFSLMQASTKPRRS

SEQ ID NO: 123745 - protein, 15 aa, Artificial Sequence
  Description of Artificial Sequence: Synthetic peptide
  Seed: RMCSLMQGSTLPRRS
RMFSLMQASTLPRRS

SEQ ID NO: 123746 - protein, 15 aa, Artificial Sequence
  Description of Artificial Sequence: Synthetic peptide
  Seed: RMCSLMQGSTLPRRS
RMFSLMQASTMPRRS

SEQ ID NO: 123747 - protein, 15 aa, Artificial Sequence
  Description of Artificial Sequence: Synthetic peptide
  Seed: RMCSLMQGSTLPRRS
RMFSLMQASTNPRRS

SEQ ID NO: 123748 - protein, 15 aa, Artificial Sequence
  Description of Artificial Sequence: Synthetic peptide
  Seed: RMCSLMQGSTLPRRS
RMFSLMQASTPPRRS

SEQ ID NO: 123749 - protein, 15 aa, Artificial Sequence
  Description of Artificial Sequence: Synthetic peptide
  Seed: RMCSLMQGSTLPRRS
RMFSLMQASTQPRRS

SEQ ID NO: 123750 - protein, 15 aa, Artificial Sequence
  Description of Artificial Sequence: Synthetic peptide
  Seed: RMCSLMQGSTLPRRS
RMFSLMQASTRPRRS

SEQ ID NO: 123751 - protein, 15 aa, Artificial Sequence
  Description of Artificial Sequence: Synthetic peptide
  Seed: RMCSLMQGSTLPRRS
RMFSLMQASTSPRRS

SEQ ID NO: 123752 - protein, 15 aa, Artificial Sequence
  Description of Artificial Sequence: Synthetic peptide
  Seed: RMCSLMQGSTLPRRS
RMFSLMQASTTPRRS

SEQ ID NO: 123753 - protein, 15 aa, Artificial Sequence
  Description of Artificial Sequence: Synthetic peptide
  Seed: RMCSLMQGSTLPRRS
RMFSLMQASTVPRRS

SEQ ID NO: 123754 - protein, 15 aa, Artificial Sequence
  Description of Artificial Sequence: Synthetic peptide
  Seed: RMCSLMQGSTLPRRS
RMFSLMQASTWPRRS

SEQ ID NO: 123755 - protein, 15 aa, Artificial Sequence
  Description of Artificial Sequence: Synthetic peptide
  Seed: RMCSLMQGSTLPRRS
RMFSLMQASTYPRRS

SEQ ID NO: 123756 - protein, 15 aa, Artificial Sequence
  Description of Artificial Sequence: Synthetic peptide
  Seed: RMCSLMQGSTLPRRS
RMFSLMQCSTAPRRS

SEQ ID NO: 123757 - protein, 15 aa, Artificial Sequence
  Description of Artificial Sequence: Synthetic peptide
  Seed: RMCSLMQGSTLPRRS
RMFSLMQCSTIPRRS

SEQ ID NO: 123758 - protein, 15 aa, Artificial Sequence
  Description of Artificial Sequence: Synthetic peptide
  Seed: RMCSLMQGSTLPRRS
RMFSLMQCSTLPRRS

SEQ ID NO: 123759 - protein, 15 aa, Artificial Sequence
  Description of Artificial Sequence: Synthetic peptide
  Seed: RMCSLMQGSTLPRRS
RMFSLMQCSTMPRRS

SEQ ID NO: 123760 - protein, 15 aa, Artificial Sequence
  Description of Artificial Sequence: Synthetic peptide
  Seed: RMCSLMQGSTLPRRS
RMFSLMQCSTNPRRS

SEQ ID NO: 123761 - protein, 15 aa, Artificial Sequence
  Description of Artificial Sequence: Synthetic peptide
  Seed: RMCSLMQGSTLPRRS
RMFSLMQCSTSPRRS

SEQ ID NO: 123762 - protein, 15 aa, Artificial Sequence
  Description of Artificial Sequence: Synthetic peptide
  Seed: RMCSLMQGSTLPRRS
RMFSLMQCSTTPRRS

SEQ ID NO: 123763 - protein, 15 aa, Artificial Sequence
  Description of Artificial Sequence: Synthetic peptide
  Seed: RMCSLMQGSTLPRRS
RMFSLMQCSTVPRRS

SEQ ID NO: 123764 - protein, 15 aa, Artificial Sequence
  Description of Artificial Sequence: Synthetic peptide
  Seed: RMCSLMQGSTLPRRS
RMFSLMQDSTAPRRS

SEQ ID NO: 123765 - protein, 15 aa, Artificial Sequence
  Description of Artificial Sequence: Synthetic peptide
  Seed: RMCSLMQGSTLPRRS
RMFSLMQDSTIPRRS

SEQ ID NO: 123766 - protein, 15 aa, Artificial Sequence
  Description of Artificial Sequence: Synthetic peptide
  Seed: RMCSLMQGSTLPRRS
RMFSLMQDSTLPRRS

SEQ ID NO: 123767 - protein, 15 aa, Artificial Sequence
  Description of Artificial Sequence: Synthetic peptide
  Seed: RMCSLMQGSTLPRRS
RMFSLMQDSTVPRRS

SEQ ID NO: 123768 - protein, 15 aa, Artificial Sequence
  Description of Artificial Sequence: Synthetic peptide
  Seed: RMCSLMQGSTLPRRS
RMFSLMQESTAPRRS

SEQ ID NO: 123769 - protein, 15 aa, Artificial Sequence
  Description of Artificial Sequence: Synthetic peptide
  Seed: RMCSLMQGSTLPRRS
RMFSLMQESTIPRRS

SEQ ID NO: 123770 - protein, 15 aa, Artificial Sequence
  Description of Artificial Sequence: Synthetic peptide
  Seed: RMCSLMQGSTLPRRS
RMFSLMQESTLPRRS

SEQ ID NO: 123771 - protein, 15 aa, Artificial Sequence
  Description of Artificial Sequence: Synthetic peptide
  Seed: RMCSLMQGSTLPRRS
RMFSLMQESTMPRRS

SEQ ID NO: 123772 - protein, 15 aa, Artificial Sequence
  Description of Artificial Sequence: Synthetic peptide
  Seed: RMCSLMQGSTLPRRS
RMFSLMQESTNPRRS

SEQ ID NO: 123773 - protein, 15 aa, Artificial Sequence
  Description of Artificial Sequence: Synthetic peptide
  Seed: RMCSLMQGSTLPRRS
RMFSLMQESTSPRRS

SEQ ID NO: 123774 - protein, 15 aa, Artificial Sequence
  Description of Artificial Sequence: Synthetic peptide
  Seed: RMCSLMQGSTLPRRS
RMFSLMQESTTPRRS

SEQ ID NO: 123775 - protein, 15 aa, Artificial Sequence
  Description of Artificial Sequence: Synthetic peptide
  Seed: RMCSLMQGSTLPRRS
RMFSLMQESTVPRRS

SEQ ID NO: 123776 - protein, 15 aa, Artificial Sequence
  Description of Artificial Sequence: Synthetic peptide
  Seed: RMCSLMQGSTLPRRS
RMFSLMQFSTAPRRS

SEQ ID NO: 123777 - protein, 15 aa, Artificial Sequence
  Description of Artificial Sequence: Synthetic peptide
  Seed: RMCSLMQGSTLPRRS
RMFSLMQFSTIPRRS

SEQ ID NO: 123778 - protein, 15 aa, Artificial Sequence
  Description of Artificial Sequence: Synthetic peptide
  Seed: RMCSLMQGSTLPRRS
RMFSLMQFSTLPRRS

SEQ ID NO: 123779 - protein, 15 aa, Artificial Sequence
  Description of Artificial Sequence: Synthetic peptide
  Seed: RMCSLMQGSTLPRRS
RMFSLMQFSTSPRRS

SEQ ID NO: 123780 - protein, 15 aa, Artificial Sequence
  Description of Artificial Sequence: Synthetic peptide
  Seed: RMCSLMQGSTLPRRS
RMFSLMQFSTVPRRS

SEQ ID NO: 123781 - protein, 15 aa, Artificial Sequence
  Description of Artificial Sequence: Synthetic peptide
  Seed: RMCSLMQGSTLPRRS
RMFSLMQGSTAPRRS

SEQ ID NO: 123782 - protein, 15 aa, Artificial Sequence
  Description of Artificial Sequence: Synthetic peptide
  Seed: RMCSLMQGSTLPRRS
RMFSLMQGSTCPRRS

SEQ ID NO: 123783 - protein, 15 aa, Artificial Sequence
  Description of Artificial Sequence: Synthetic peptide
  Seed: RMCSLMQGSTLPRRS
RMFSLMQGSTDPRRS

SEQ ID NO: 123784 - protein, 15 aa, Artificial Sequence
  Description of Artificial Sequence: Synthetic peptide
  Seed: RMCSLMQGSTLPRRS
RMFSLMQGSTEPRRS

SEQ ID NO: 123785 - protein, 15 aa, Artificial Sequence
  Description of Artificial Sequence: Synthetic peptide
  Seed: RMCSLMQGSTLPRRS
RMFSLMQGSTFPRRS

SEQ ID NO: 123786 - protein, 15 aa, Artificial Sequence
  Description of Artificial Sequence: Synthetic peptide
  Seed: RMCSLMQGSTLPRRS
RMFSLMQGSTGPRRS

SEQ ID NO: 123787 - protein, 15 aa, Artificial Sequence
  Description of Artificial Sequence: Synthetic peptide
  Seed: RMCSLMQGSTLPRRS
RMFSLMQGSTHPRRS

SEQ ID NO: 123788 - protein, 15 aa, Artificial Sequence
  Description of Artificial Sequence: Synthetic peptide
  Seed: RMCSLMQGSTLPRRS
RMFSLMQGSTIPRRS

SEQ ID NO: 123789 - protein, 15 aa, Artificial Sequence
  Description of Artificial Sequence: Synthetic peptide
  Seed: RMCSLMQGSTLPRRS
RMFSLMQGSTKPRRS

SEQ ID NO: 123790 - protein, 15 aa, Artificial Sequence
  Description of Artificial Sequence: Synthetic peptide
  Seed: RMCSLMQGSTLPRRS
RMFSLMQGSTLPRRS

SEQ ID NO: 123791 - protein, 15 aa, Artificial Sequence
  Description of Artificial Sequence: Synthetic peptide
  Seed: RMCSLMQGSTLPRRS
RMFSLMQGSTMPRRS

SEQ ID NO: 123792 - protein, 15 aa, Artificial Sequence
  Description of Artificial Sequence: Synthetic peptide
  Seed: RMCSLMQGSTLPRRS
RMFSLMQGSTNPRRS

SEQ ID NO: 123793 - protein, 15 aa, Artificial Sequence
  Description of Artificial Sequence: Synthetic peptide
  Seed: RMCSLMQGSTLPRRS
RMFSLMQGSTPPRRS

SEQ ID NO: 123794 - protein, 15 aa, Artificial Sequence
  Description of Artificial Sequence: Synthetic peptide
  Seed: RMCSLMQGSTLPRRS
RMFSLMQGSTQPRRS

SEQ ID NO: 123795 - protein, 15 aa, Artificial Sequence
  Description of Artificial Sequence: Synthetic peptide
  Seed: RMCSLMQGSTLPRRS
RMFSLMQGSTRPRRS

SEQ ID NO: 123796 - protein, 15 aa, Artificial Sequence
  Description of Artificial Sequence: Synthetic peptide
  Seed: RMCSLMQGSTLPRRS
RMFSLMQGSTSPRRS

SEQ ID NO: 123797 - protein, 15 aa, Artificial Sequence
  Description of Artificial Sequence: Synthetic peptide
  Seed: RMCSLMQGSTLPRRS
RMFSLMQGSTTPRRS

SEQ ID NO: 123798 - protein, 15 aa, Artificial Sequence
  Description of Artificial Sequence: Synthetic peptide
  Seed: RMCSLMQGSTLPRRS
RMFSLMQGSTVPRRS

SEQ ID NO: 123799 - protein, 15 aa, Artificial Sequence
  Description of Artificial Sequence: Synthetic peptide
  Seed: RMCSLMQGSTLPRRS
RMFSLMQGSTWPRRS

SEQ ID NO: 123800 - protein, 15 aa, Artificial Sequence
  Description of Artificial Sequence: Synthetic peptide
  Seed: RMCSLMQGSTLPRRS
RMFSLMQGSTYPRRS

SEQ ID NO: 123801 - protein, 15 aa, Artificial Sequence
  Description of Artificial Sequence: Synthetic peptide
  Seed: RMCSLMQGSTLPRRS
RMFSLMQHSTAPRRS

SEQ ID NO: 123802 - protein, 15 aa, Artificial Sequence
  Description of Artificial Sequence: Synthetic peptide
  Seed: RMCSLMQGSTLPRRS
RMFSLMQHSTIPRRS

SEQ ID NO: 123803 - protein, 15 aa, Artificial Sequence
  Description of Artificial Sequence: Synthetic peptide
  Seed: RMCSLMQGSTLPRRS
RMFSLMQHSTLPRRS

SEQ ID NO: 123804 - protein, 15 aa, Artificial Sequence
  Description of Artificial Sequence: Synthetic peptide
  Seed: RMCSLMQGSTLPRRS
RMFSLMQHSTMPRRS

SEQ ID NO: 123805 - protein, 15 aa, Artificial Sequence
  Description of Artificial Sequence: Synthetic peptide
  Seed: RMCSLMQGSTLPRRS
RMFSLMQHSTNPRRS

SEQ ID NO: 123806 - protein, 15 aa, Artificial Sequence
  Description of Artificial Sequence: Synthetic peptide
  Seed: RMCSLMQGSTLPRRS
RMFSLMQHSTSPRRS

SEQ ID NO: 123807 - protein, 15 aa, Artificial Sequence
  Description of Artificial Sequence: Synthetic peptide
  Seed: RMCSLMQGSTLPRRS
RMFSLMQHSTTPRRS

SEQ ID NO: 123808 - protein, 15 aa, Artificial Sequence
  Description of Artificial Sequence: Synthetic peptide
  Seed: RMCSLMQGSTLPRRS
RMFSLMQHSTVPRRS

SEQ ID NO: 123809 - protein, 15 aa, Artificial Sequence
  Description of Artificial Sequence: Synthetic peptide
  Seed: RMCSLMQGSTLPRRS
RMFSLMQISTAPRRS

SEQ ID NO: 123810 - protein, 15 aa, Artificial Sequence
  Description of Artificial Sequence: Synthetic peptide
  Seed: RMCSLMQGSTLPRRS
RMFSLMQISTCPRRS

SEQ ID NO: 123811 - protein, 15 aa, Artificial Sequence
  Description of Artificial Sequence: Synthetic peptide
  Seed: RMCSLMQGSTLPRRS
RMFSLMQISTDPRRS

SEQ ID NO: 123812 - protein, 15 aa, Artificial Sequence
  Description of Artificial Sequence: Synthetic peptide
  Seed: RMCSLMQGSTLPRRS
RMFSLMQISTEPRRS

SEQ ID NO: 123813 - protein, 15 aa, Artificial Sequence
  Description of Artificial Sequence: Synthetic peptide
  Seed: RMCSLMQGSTLPRRS
RMFSLMQISTFPRRS

SEQ ID NO: 123814 - protein, 15 aa, Artificial Sequence
  Description of Artificial Sequence: Synthetic peptide
  Seed: RMCSLMQGSTLPRRS
RMFSLMQISTGPRRS

SEQ ID NO: 123815 - protein, 15 aa, Artificial Sequence
  Description of Artificial Sequence: Synthetic peptide
  Seed: RMCSLMQGSTLPRRS
RMFSLMQISTHPRRS

SEQ ID NO: 123816 - protein, 15 aa, Artificial Sequence
  Description of Artificial Sequence: Synthetic peptide
  Seed: RMCSLMQGSTLPRRS
RMFSLMQISTIPRRS

SEQ ID NO: 123817 - protein, 15 aa, Artificial Sequence
  Description of Artificial Sequence: Synthetic peptide
  Seed: RMCSLMQGSTLPRRS
RMFSLMQISTKPRRS

SEQ ID NO: 123818 - protein, 15 aa, Artificial Sequence
  Description of Artificial Sequence: Synthetic peptide
  Seed: RMCSLMQGSTLPRRS
RMFSLMQISTLPRRS

SEQ ID NO: 123819 - protein, 15 aa, Artificial Sequence
  Description of Artificial Sequence: Synthetic peptide
  Seed: RMCSLMQGSTLPRRS
RMFSLMQISTMPRRS

SEQ ID NO: 123820 - protein, 15 aa, Artificial Sequence
  Description of Artificial Sequence: Synthetic peptide
  Seed: RMCSLMQGSTLPRRS
RMFSLMQISTNPRRS

SEQ ID NO: 123821 - protein, 15 aa, Artificial Sequence
  Description of Artificial Sequence: Synthetic peptide
  Seed: RMCSLMQGSTLPRRS
RMFSLMQISTPPRRS

SEQ ID NO: 123822 - protein, 15 aa, Artificial Sequence
  Description of Artificial Sequence: Synthetic peptide
  Seed: RMCSLMQGSTLPRRS
RMFSLMQISTQPRRS

SEQ ID NO: 123823 - protein, 15 aa, Artificial Sequence
  Description of Artificial Sequence: Synthetic peptide
  Seed: RMCSLMQGSTLPRRS
RMFSLMQISTSPRRS

SEQ ID NO: 123824 - protein, 15 aa, Artificial Sequence
  Description of Artificial Sequence: Synthetic peptide
  Seed: RMCSLMQGSTLPRRS
RMFSLMQISTTPRRS

SEQ ID NO: 123825 - protein, 15 aa, Artificial Sequence
  Description of Artificial Sequence: Synthetic peptide
  Seed: RMCSLMQGSTLPRRS
RMFSLMQISTVPRRS

SEQ ID NO: 123826 - protein, 15 aa, Artificial Sequence
  Description of Artificial Sequence: Synthetic peptide
  Seed: RMCSLMQGSTLPRRS
RMFSLMQKSTLPRRS

SEQ ID NO: 123827 - protein, 15 aa, Artificial Sequence
  Description of Artificial Sequence: Synthetic peptide
  Seed: RMCSLMQGSTLPRRS
RMFSLMQKSTVPRRS

SEQ ID NO: 123828 - protein, 15 aa, Artificial Sequence
  Description of Artificial Sequence: Synthetic peptide
  Seed: RMCSLMQGSTLPRRS
RMFSLMQLSTAPRRS

SEQ ID NO: 123829 - protein, 15 aa, Artificial Sequence
  Description of Artificial Sequence: Synthetic peptide
  Seed: RMCSLMQGSTLPRRS
RMFSLMQLSTCPRRS

SEQ ID NO: 123830 - protein, 15 aa, Artificial Sequence
  Description of Artificial Sequence: Synthetic peptide
  Seed: RMCSLMQGSTLPRRS
RMFSLMQLSTDPRRS

SEQ ID NO: 123831 - protein, 15 aa, Artificial Sequence
  Description of Artificial Sequence: Synthetic peptide
  Seed: RMCSLMQGSTLPRRS
RMFSLMQLSTGPRRS

SEQ ID NO: 123832 - protein, 15 aa, Artificial Sequence
  Description of Artificial Sequence: Synthetic peptide
  Seed: RMCSLMQGSTLPRRS
RMFSLMQLSTHPRRS

SEQ ID NO: 123833 - protein, 15 aa, Artificial Sequence
  Description of Artificial Sequence: Synthetic peptide
  Seed: RMCSLMQGSTLPRRS
RMFSLMQLSTIPRRS

SEQ ID NO: 123834 - protein, 15 aa, Artificial Sequence
  Description of Artificial Sequence: Synthetic peptide
  Seed: RMCSLMQGSTLPRRS
RMFSLMQLSTLPRRS

SEQ ID NO: 123835 - protein, 15 aa, Artificial Sequence
  Description of Artificial Sequence: Synthetic peptide
  Seed: RMCSLMQGSTLPRRS
RMFSLMQLSTMPRRS

SEQ ID NO: 123836 - protein, 15 aa, Artificial Sequence
  Description of Artificial Sequence: Synthetic peptide
  Seed: RMCSLMQGSTLPRRS
RMFSLMQLSTNPRRS

SEQ ID NO: 123837 - protein, 15 aa, Artificial Sequence
  Description of Artificial Sequence: Synthetic peptide
  Seed: RMCSLMQGSTLPRRS
RMFSLMQLSTQPRRS

SEQ ID NO: 123838 - protein, 15 aa, Artificial Sequence
  Description of Artificial Sequence: Synthetic peptide
  Seed: RMCSLMQGSTLPRRS
RMFSLMQLSTSPRRS

SEQ ID NO: 123839 - protein, 15 aa, Artificial Sequence
  Description of Artificial Sequence: Synthetic peptide
  Seed: RMCSLMQGSTLPRRS
RMFSLMQLSTTPRRS

SEQ ID NO: 123840 - protein, 15 aa, Artificial Sequence
  Description of Artificial Sequence: Synthetic peptide
  Seed: RMCSLMQGSTLPRRS
RMFSLMQLSTVPRRS

SEQ ID NO: 123841 - protein, 15 aa, Artificial Sequence
  Description of Artificial Sequence: Synthetic peptide
  Seed: RMCSLMQGSTLPRRS
RMFSLMQMSTAPRRS

SEQ ID NO: 123842 - protein, 15 aa, Artificial Sequence
  Description of Artificial Sequence: Synthetic peptide
  Seed: RMCSLMQGSTLPRRS
RMFSLMQMSTDPRRS

SEQ ID NO: 123843 - protein, 15 aa, Artificial Sequence
  Description of Artificial Sequence: Synthetic peptide
  Seed: RMCSLMQGSTLPRRS
RMFSLMQMSTGPRRS

SEQ ID NO: 123844 - protein, 15 aa, Artificial Sequence
  Description of Artificial Sequence: Synthetic peptide
  Seed: RMCSLMQGSTLPRRS
RMFSLMQMSTHPRRS

SEQ ID NO: 123845 - protein, 15 aa, Artificial Sequence
  Description of Artificial Sequence: Synthetic peptide
  Seed: RMCSLMQGSTLPRRS
RMFSLMQMSTIPRRS

SEQ ID NO: 123846 - protein, 15 aa, Artificial Sequence
  Description of Artificial Sequence: Synthetic peptide
  Seed: RMCSLMQGSTLPRRS
RMFSLMQMSTLPRRS

SEQ ID NO: 123847 - protein, 15 aa, Artificial Sequence
  Description of Artificial Sequence: Synthetic peptide
  Seed: RMCSLMQGSTLPRRS
RMFSLMQMSTMPRRS

SEQ ID NO: 123848 - protein, 15 aa, Artificial Sequence
  Description of Artificial Sequence: Synthetic peptide
  Seed: RMCSLMQGSTLPRRS
RMFSLMQMSTNPRRS

SEQ ID NO: 123849 - protein, 15 aa, Artificial Sequence
  Description of Artificial Sequence: Synthetic peptide
  Seed: RMCSLMQGSTLPRRS
RMFSLMQMSTPPRRS

SEQ ID NO: 123850 - protein, 15 aa, Artificial Sequence
  Description of Artificial Sequence: Synthetic peptide
  Seed: RMCSLMQGSTLPRRS
RMFSLMQMSTQPRRS

SEQ ID NO: 123851 - protein, 15 aa, Artificial Sequence
  Description of Artificial Sequence: Synthetic peptide
  Seed: RMCSLMQGSTLPRRS
RMFSLMQMSTSPRRS

SEQ ID NO: 123852 - protein, 15 aa, Artificial Sequence
  Description of Artificial Sequence: Synthetic peptide
  Seed: RMCSLMQGSTLPRRS
RMFSLMQMSTTPRRS

SEQ ID NO: 123853 - protein, 15 aa, Artificial Sequence
  Description of Artificial Sequence: Synthetic peptide
  Seed: RMCSLMQGSTLPRRS
RMFSLMQMSTVPRRS

SEQ ID NO: 123854 - protein, 15 aa, Artificial Sequence
  Description of Artificial Sequence: Synthetic peptide
  Seed: RMCSLMQGSTLPRRS
RMFSLMQNSTAPRRS

SEQ ID NO: 123855 - protein, 15 aa, Artificial Sequence
  Description of Artificial Sequence: Synthetic peptide
  Seed: RMCSLMQGSTLPRRS
RMFSLMQNSTCPRRS

SEQ ID NO: 123856 - protein, 15 aa, Artificial Sequence
  Description of Artificial Sequence: Synthetic peptide
  Seed: RMCSLMQGSTLPRRS
RMFSLMQNSTDPRRS

SEQ ID NO: 123857 - protein, 15 aa, Artificial Sequence
  Description of Artificial Sequence: Synthetic peptide
  Seed: RMCSLMQGSTLPRRS
RMFSLMQNSTEPRRS

SEQ ID NO: 123858 - protein, 15 aa, Artificial Sequence
  Description of Artificial Sequence: Synthetic peptide
  Seed: RMCSLMQGSTLPRRS
RMFSLMQNSTFPRRS

SEQ ID NO: 123859 - protein, 15 aa, Artificial Sequence
  Description of Artificial Sequence: Synthetic peptide
  Seed: RMCSLMQGSTLPRRS
RMFSLMQNSTGPRRS

SEQ ID NO: 123860 - protein, 15 aa, Artificial Sequence
  Description of Artificial Sequence: Synthetic peptide
  Seed: RMCSLMQGSTLPRRS
RMFSLMQNSTHPRRS

SEQ ID NO: 123861 - protein, 15 aa, Artificial Sequence
  Description of Artificial Sequence: Synthetic peptide
  Seed: RMCSLMQGSTLPRRS
RMFSLMQNSTIPRRS

SEQ ID NO: 123862 - protein, 15 aa, Artificial Sequence
  Description of Artificial Sequence: Synthetic peptide
  Seed: RMCSLMQGSTLPRRS
RMFSLMQNSTKPRRS

SEQ ID NO: 123863 - protein, 15 aa, Artificial Sequence
  Description of Artificial Sequence: Synthetic peptide
  Seed: RMCSLMQGSTLPRRS
RMFSLMQNSTLPRRS

SEQ ID NO: 123864 - protein, 15 aa, Artificial Sequence
  Description of Artificial Sequence: Synthetic peptide
  Seed: RMCSLMQGSTLPRRS
RMFSLMQNSTMPRRS

SEQ ID NO: 123865 - protein, 15 aa, Artificial Sequence
  Description of Artificial Sequence: Synthetic peptide
  Seed: RMCSLMQGSTLPRRS
RMFSLMQNSTNPRRS

SEQ ID NO: 123866 - protein, 15 aa, Artificial Sequence
  Description of Artificial Sequence: Synthetic peptide
  Seed: RMCSLMQGSTLPRRS
RMFSLMQNSTPPRRS

SEQ ID NO: 123867 - protein, 15 aa, Artificial Sequence
  Description of Artificial Sequence: Synthetic peptide
  Seed: RMCSLMQGSTLPRRS
RMFSLMQNSTQPRRS

SEQ ID NO: 123868 - protein, 15 aa, Artificial Sequence
  Description of Artificial Sequence: Synthetic peptide
  Seed: RMCSLMQGSTLPRRS
RMFSLMQNSTRPRRS

SEQ ID NO: 123869 - protein, 15 aa, Artificial Sequence
  Description of Artificial Sequence: Synthetic peptide
  Seed: RMCSLMQGSTLPRRS
RMFSLMQNSTSPRRS

SEQ ID NO: 123870 - protein, 15 aa, Artificial Sequence
  Description of Artificial Sequence: Synthetic peptide
  Seed: RMCSLMQGSTLPRRS
RMFSLMQNSTTPRRS

SEQ ID NO: 123871 - protein, 15 aa, Artificial Sequence
  Description of Artificial Sequence: Synthetic peptide
  Seed: RMCSLMQGSTLPRRS
RMFSLMQNSTVPRRS

SEQ ID NO: 123872 - protein, 15 aa, Artificial Sequence
  Description of Artificial Sequence: Synthetic peptide
  Seed: RMCSLMQGSTLPRRS
RMFSLMQNSTWPRRS

SEQ ID NO: 123873 - protein, 15 aa, Artificial Sequence
  Description of Artificial Sequence: Synthetic peptide
  Seed: RMCSLMQGSTLPRRS
RMFSLMQNSTYPRRS

SEQ ID NO: 123874 - protein, 15 aa, Artificial Sequence
  Description of Artificial Sequence: Synthetic peptide
  Seed: RMCSLMQGSTLPRRS
RMFSLMQPSTAPRRS

SEQ ID NO: 123875 - protein, 15 aa, Artificial Sequence
  Description of Artificial Sequence: Synthetic peptide
  Seed: RMCSLMQGSTLPRRS
RMFSLMQPSTCPRRS

SEQ ID NO: 123876 - protein, 15 aa, Artificial Sequence
  Description of Artificial Sequence: Synthetic peptide
  Seed: RMCSLMQGSTLPRRS
RMFSLMQPSTDPRRS

SEQ ID NO: 123877 - protein, 15 aa, Artificial Sequence
  Description of Artificial Sequence: Synthetic peptide
  Seed: RMCSLMQGSTLPRRS
RMFSLMQPSTEPRRS

SEQ ID NO: 123878 - protein, 15 aa, Artificial Sequence
  Description of Artificial Sequence: Synthetic peptide
  Seed: RMCSLMQGSTLPRRS
RMFSLMQPSTFPRRS

SEQ ID NO: 123879 - protein, 15 aa, Artificial Sequence
  Description of Artificial Sequence: Synthetic peptide
  Seed: RMCSLMQGSTLPRRS
RMFSLMQPSTGPRRS

SEQ ID NO: 123880 - protein, 15 aa, Artificial Sequence
  Description of Artificial Sequence: Synthetic peptide
  Seed: RMCSLMQGSTLPRRS
RMFSLMQPSTHPRRS

SEQ ID NO: 123881 - protein, 15 aa, Artificial Sequence
  Description of Artificial Sequence: Synthetic peptide
  Seed: RMCSLMQGSTLPRRS
RMFSLMQPSTIPRRS

SEQ ID NO: 123882 - protein, 15 aa, Artificial Sequence
  Description of Artificial Sequence: Synthetic peptide
  Seed: RMCSLMQGSTLPRRS
RMFSLMQPSTKPRRS

SEQ ID NO: 123883 - protein, 15 aa, Artificial Sequence
  Description of Artificial Sequence: Synthetic peptide
  Seed: RMCSLMQGSTLPRRS
RMFSLMQPSTLPRRS

SEQ ID NO: 123884 - protein, 15 aa, Artificial Sequence
  Description of Artificial Sequence: Synthetic peptide
  Seed: RMCSLMQGSTLPRRS
RMFSLMQPSTMPRRS

SEQ ID NO: 123885 - protein, 15 aa, Artificial Sequence
  Description of Artificial Sequence: Synthetic peptide
  Seed: RMCSLMQGSTLPRRS
RMFSLMQPSTNPRRS

SEQ ID NO: 123886 - protein, 15 aa, Artificial Sequence
  Description of Artificial Sequence: Synthetic peptide
  Seed: RMCSLMQGSTLPRRS
RMFSLMQPSTPPRRS

SEQ ID NO: 123887 - protein, 15 aa, Artificial Sequence
  Description of Artificial Sequence: Synthetic peptide
  Seed: RMCSLMQGSTLPRRS
RMFSLMQPSTQPRRS

SEQ ID NO: 123888 - protein, 15 aa, Artificial Sequence
  Description of Artificial Sequence: Synthetic peptide
  Seed: RMCSLMQGSTLPRRS
RMFSLMQPSTRPRRS

SEQ ID NO: 123889 - protein, 15 aa, Artificial Sequence
  Description of Artificial Sequence: Synthetic peptide
  Seed: RMCSLMQGSTLPRRS
RMFSLMQPSTSPRRS

SEQ ID NO: 123890 - protein, 15 aa, Artificial Sequence
  Description of Artificial Sequence: Synthetic peptide
  Seed: RMCSLMQGSTLPRRS
RMFSLMQPSTTPRRS

SEQ ID NO: 123891 - protein, 15 aa, Artificial Sequence
  Description of Artificial Sequence: Synthetic peptide
  Seed: RMCSLMQGSTLPRRS
RMFSLMQPSTVPRRS

SEQ ID NO: 123892 - protein, 15 aa, Artificial Sequence
  Description of Artificial Sequence: Synthetic peptide
  Seed: RMCSLMQGSTLPRRS
RMFSLMQPSTWPRRS

SEQ ID NO: 123893 - protein, 15 aa, Artificial Sequence
  Description of Artificial Sequence: Synthetic peptide
  Seed: RMCSLMQGSTLPRRS
RMFSLMQPSTYPRRS

SEQ ID NO: 123894 - protein, 15 aa, Artificial Sequence
  Description of Artificial Sequence: Synthetic peptide
  Seed: RMCSLMQGSTLPRRS
RMFSLMQQSTAPRRS

SEQ ID NO: 123895 - protein, 15 aa, Artificial Sequence
  Description of Artificial Sequence: Synthetic peptide
  Seed: RMCSLMQGSTLPRRS
RMFSLMQQSTIPRRS

SEQ ID NO: 123896 - protein, 15 aa, Artificial Sequence
  Description of Artificial Sequence: Synthetic peptide
  Seed: RMCSLMQGSTLPRRS
RMFSLMQQSTLPRRS

SEQ ID NO: 123897 - protein, 15 aa, Artificial Sequence
  Description of Artificial Sequence: Synthetic peptide
  Seed: RMCSLMQGSTLPRRS
RMFSLMQQSTMPRRS

SEQ ID NO: 123898 - protein, 15 aa, Artificial Sequence
  Description of Artificial Sequence: Synthetic peptide
  Seed: RMCSLMQGSTLPRRS
RMFSLMQQSTNPRRS

SEQ ID NO: 123899 - protein, 15 aa, Artificial Sequence
  Description of Artificial Sequence: Synthetic peptide
  Seed: RMCSLMQGSTLPRRS
RMFSLMQQSTSPRRS

SEQ ID NO: 123900 - protein, 15 aa, Artificial Sequence
  Description of Artificial Sequence: Synthetic peptide
  Seed: RMCSLMQGSTLPRRS
RMFSLMQQSTTPRRS

SEQ ID NO: 123901 - protein, 15 aa, Artificial Sequence
  Description of Artificial Sequence: Synthetic peptide
  Seed: RMCSLMQGSTLPRRS
RMFSLMQQSTVPRRS

SEQ ID NO: 123902 - protein, 15 aa, Artificial Sequence
  Description of Artificial Sequence: Synthetic peptide
  Seed: RMCSLMQGSTLPRRS
RMFSLMQSSTAPRRS

SEQ ID NO: 123903 - protein, 15 aa, Artificial Sequence
  Description of Artificial Sequence: Synthetic peptide
  Seed: RMCSLMQGSTLPRRS
RMFSLMQSSTCPRRS

SEQ ID NO: 123904 - protein, 15 aa, Artificial Sequence
  Description of Artificial Sequence: Synthetic peptide
  Seed: RMCSLMQGSTLPRRS
RMFSLMQSSTDPRRS

SEQ ID NO: 123905 - protein, 15 aa, Artificial Sequence
  Description of Artificial Sequence: Synthetic peptide
  Seed: RMCSLMQGSTLPRRS
RMFSLMQSSTEPRRS

SEQ ID NO: 123906 - protein, 15 aa, Artificial Sequence
  Description of Artificial Sequence: Synthetic peptide
  Seed: RMCSLMQGSTLPRRS
RMFSLMQSSTFPRRS

SEQ ID NO: 123907 - protein, 15 aa, Artificial Sequence
  Description of Artificial Sequence: Synthetic peptide
  Seed: RMCSLMQGSTLPRRS
RMFSLMQSSTGPRRS

SEQ ID NO: 123908 - protein, 15 aa, Artificial Sequence
  Description of Artificial Sequence: Synthetic peptide
  Seed: RMCSLMQGSTLPRRS
RMFSLMQSSTHPRRS

SEQ ID NO: 123909 - protein, 15 aa, Artificial Sequence
  Description of Artificial Sequence: Synthetic peptide
  Seed: RMCSLMQGSTLPRRS
RMFSLMQSSTIPRRS

SEQ ID NO: 123910 - protein, 15 aa, Artificial Sequence
  Description of Artificial Sequence: Synthetic peptide
  Seed: RMCSLMQGSTLPRRS
RMFSLMQSSTKPRRS

SEQ ID NO: 123911 - protein, 15 aa, Artificial Sequence
  Description of Artificial Sequence: Synthetic peptide
  Seed: RMCSLMQGSTLPRRS
RMFSLMQSSTLPRRS

SEQ ID NO: 123912 - protein, 15 aa, Artificial Sequence
  Description of Artificial Sequence: Synthetic peptide
  Seed: RMCSLMQGSTLPRRS
RMFSLMQSSTMPRRS

SEQ ID NO: 123913 - protein, 15 aa, Artificial Sequence
  Description of Artificial Sequence: Synthetic peptide
  Seed: RMCSLMQGSTLPRRS
RMFSLMQSSTNPRRS

SEQ ID NO: 123914 - protein, 15 aa, Artificial Sequence
  Description of Artificial Sequence: Synthetic peptide
  Seed: RMCSLMQGSTLPRRS
RMFSLMQSSTPPRRS

SEQ ID NO: 123915 - protein, 15 aa, Artificial Sequence
  Description of Artificial Sequence: Synthetic peptide
  Seed: RMCSLMQGSTLPRRS
RMFSLMQSSTQPRRS

SEQ ID NO: 123916 - protein, 15 aa, Artificial Sequence
  Description of Artificial Sequence: Synthetic peptide
  Seed: RMCSLMQGSTLPRRS
RMFSLMQSSTRPRRS

SEQ ID NO: 123917 - protein, 15 aa, Artificial Sequence
  Description of Artificial Sequence: Synthetic peptide
  Seed: RMCSLMQGSTLPRRS
RMFSLMQSSTSPRRS

SEQ ID NO: 123918 - protein, 15 aa, Artificial Sequence
  Description of Artificial Sequence: Synthetic peptide
  Seed: RMCSLMQGSTLPRRS
RMFSLMQSSTTPRRS

SEQ ID NO: 123919 - protein, 15 aa, Artificial Sequence
  Description of Artificial Sequence: Synthetic peptide
  Seed: RMCSLMQGSTLPRRS
RMFSLMQSSTVPRRS

SEQ ID NO: 123920 - protein, 15 aa, Artificial Sequence
  Description of Artificial Sequence: Synthetic peptide
  Seed: RMCSLMQGSTLPRRS
RMFSLMQSSTWPRRS

SEQ ID NO: 123921 - protein, 15 aa, Artificial Sequence
  Description of Artificial Sequence: Synthetic peptide
  Seed: RMCSLMQGSTLPRRS
RMFSLMQSSTYPRRS

SEQ ID NO: 123922 - protein, 15 aa, Artificial Sequence
  Description of Artificial Sequence: Synthetic peptide
  Seed: RMCSLMQGSTLPRRS
RMFSLMQTSTAPRRS

SEQ ID NO: 123923 - protein, 15 aa, Artificial Sequence
  Description of Artificial Sequence: Synthetic peptide
  Seed: RMCSLMQGSTLPRRS
RMFSLMQTSTCPRRS

SEQ ID NO: 123924 - protein, 15 aa, Artificial Sequence
  Description of Artificial Sequence: Synthetic peptide
  Seed: RMCSLMQGSTLPRRS
RMFSLMQTSTDPRRS

SEQ ID NO: 123925 - protein, 15 aa, Artificial Sequence
  Description of Artificial Sequence: Synthetic peptide
  Seed: RMCSLMQGSTLPRRS
RMFSLMQTSTEPRRS

SEQ ID NO: 123926 - protein, 15 aa, Artificial Sequence
  Description of Artificial Sequence: Synthetic peptide
  Seed: RMCSLMQGSTLPRRS
RMFSLMQTSTFPRRS

SEQ ID NO: 123927 - protein, 15 aa, Artificial Sequence
  Description of Artificial Sequence: Synthetic peptide
  Seed: RMCSLMQGSTLPRRS
RMFSLMQTSTGPRRS

SEQ ID NO: 123928 - protein, 15 aa, Artificial Sequence
  Description of Artificial Sequence: Synthetic peptide
  Seed: RMCSLMQGSTLPRRS
RMFSLMQTSTHPRRS

SEQ ID NO: 123929 - protein, 15 aa, Artificial Sequence
  Description of Artificial Sequence: Synthetic peptide
  Seed: RMCSLMQGSTLPRRS
RMFSLMQTSTIPRRS

SEQ ID NO: 123930 - protein, 15 aa, Artificial Sequence
  Description of Artificial Sequence: Synthetic peptide
  Seed: RMCSLMQGSTLPRRS
RMFSLMQTSTKPRRS

SEQ ID NO: 123931 - protein, 15 aa, Artificial Sequence
  Description of Artificial Sequence: Synthetic peptide
  Seed: RMCSLMQGSTLPRRS
RMFSLMQTSTLPRRS

SEQ ID NO: 123932 - protein, 15 aa, Artificial Sequence
  Description of Artificial Sequence: Synthetic peptide
  Seed: RMCSLMQGSTLPRRS
RMFSLMQTSTMPRRS

SEQ ID NO: 123933 - protein, 15 aa, Artificial Sequence
  Description of Artificial Sequence: Synthetic peptide
  Seed: RMCSLMQGSTLPRRS
RMFSLMQTSTNPRRS

SEQ ID NO: 123934 - protein, 15 aa, Artificial Sequence
  Description of Artificial Sequence: Synthetic peptide
  Seed: RMCSLMQGSTLPRRS
RMFSLMQTSTPPRRS

SEQ ID NO: 123935 - protein, 15 aa, Artificial Sequence
  Description of Artificial Sequence: Synthetic peptide
  Seed: RMCSLMQGSTLPRRS
RMFSLMQTSTQPRRS

SEQ ID NO: 123936 - protein, 15 aa, Artificial Sequence
  Description of Artificial Sequence: Synthetic peptide
  Seed: RMCSLMQGSTLPRRS
RMFSLMQTSTRPRRS

SEQ ID NO: 123937 - protein, 15 aa, Artificial Sequence
  Description of Artificial Sequence: Synthetic peptide
  Seed: RMCSLMQGSTLPRRS
RMFSLMQTSTSPRRS

SEQ ID NO: 123938 - protein, 15 aa, Artificial Sequence
  Description of Artificial Sequence: Synthetic peptide
  Seed: RMCSLMQGSTLPRRS
RMFSLMQTSTTPRRS

SEQ ID NO: 123939 - protein, 15 aa, Artificial Sequence
  Description of Artificial Sequence: Synthetic peptide
  Seed: RMCSLMQGSTLPRRS
RMFSLMQTSTVPRRS

SEQ ID NO: 123940 - protein, 15 aa, Artificial Sequence
  Description of Artificial Sequence: Synthetic peptide
  Seed: RMCSLMQGSTLPRRS
RMFSLMQTSTWPRRS

SEQ ID NO: 123941 - protein, 15 aa, Artificial Sequence
  Description of Artificial Sequence: Synthetic peptide
  Seed: RMCSLMQGSTLPRRS
RMFSLMQTSTYPRRS

SEQ ID NO: 123942 - protein, 15 aa, Artificial Sequence
  Description of Artificial Sequence: Synthetic peptide
  Seed: RMCSLMQGSTLPRRS
RMFSLMQVSTAPRRS

SEQ ID NO: 123943 - protein, 15 aa, Artificial Sequence
  Description of Artificial Sequence: Synthetic peptide
  Seed: RMCSLMQGSTLPRRS
RMFSLMQVSTCPRRS

SEQ ID NO: 123944 - protein, 15 aa, Artificial Sequence
  Description of Artificial Sequence: Synthetic peptide
  Seed: RMCSLMQGSTLPRRS
RMFSLMQVSTDPRRS

SEQ ID NO: 123945 - protein, 15 aa, Artificial Sequence
  Description of Artificial Sequence: Synthetic peptide
  Seed: RMCSLMQGSTLPRRS
RMFSLMQVSTEPRRS

SEQ ID NO: 123946 - protein, 15 aa, Artificial Sequence
  Description of Artificial Sequence: Synthetic peptide
  Seed: RMCSLMQGSTLPRRS
RMFSLMQVSTFPRRS

SEQ ID NO: 123947 - protein, 15 aa, Artificial Sequence
  Description of Artificial Sequence: Synthetic peptide
  Seed: RMCSLMQGSTLPRRS
RMFSLMQVSTGPRRS

SEQ ID NO: 123948 - protein, 15 aa, Artificial Sequence
  Description of Artificial Sequence: Synthetic peptide
  Seed: RMCSLMQGSTLPRRS
RMFSLMQVSTHPRRS

SEQ ID NO: 123949 - protein, 15 aa, Artificial Sequence
  Description of Artificial Sequence: Synthetic peptide
  Seed: RMCSLMQGSTLPRRS
RMFSLMQVSTIPRRS

SEQ ID NO: 123950 - protein, 15 aa, Artificial Sequence
  Description of Artificial Sequence: Synthetic peptide
  Seed: RMCSLMQGSTLPRRS
RMFSLMQVSTKPRRS

SEQ ID NO: 123951 - protein, 15 aa, Artificial Sequence
  Description of Artificial Sequence: Synthetic peptide
  Seed: RMCSLMQGSTLPRRS
RMFSLMQVSTLPRRS

SEQ ID NO: 123952 - protein, 15 aa, Artificial Sequence
  Description of Artificial Sequence: Synthetic peptide
  Seed: RMCSLMQGSTLPRRS
RMFSLMQVSTMPRRS

SEQ ID NO: 123953 - protein, 15 aa, Artificial Sequence
  Description of Artificial Sequence: Synthetic peptide
  Seed: RMCSLMQGSTLPRRS
RMFSLMQVSTNPRRS

SEQ ID NO: 123954 - protein, 15 aa, Artificial Sequence
  Description of Artificial Sequence: Synthetic peptide
  Seed: RMCSLMQGSTLPRRS
RMFSLMQVSTPPRRS

SEQ ID NO: 123955 - protein, 15 aa, Artificial Sequence
  Description of Artificial Sequence: Synthetic peptide
  Seed: RMCSLMQGSTLPRRS
RMFSLMQVSTQPRRS

SEQ ID NO: 123956 - protein, 15 aa, Artificial Sequence
  Description of Artificial Sequence: Synthetic peptide
  Seed: RMCSLMQGSTLPRRS
RMFSLMQVSTRPRRS

SEQ ID NO: 123957 - protein, 15 aa, Artificial Sequence
  Description of Artificial Sequence: Synthetic peptide
  Seed: RMCSLMQGSTLPRRS
RMFSLMQVSTSPRRS

SEQ ID NO: 123958 - protein, 15 aa, Artificial Sequence
  Description of Artificial Sequence: Synthetic peptide
  Seed: RMCSLMQGSTLPRRS
RMFSLMQVSTTPRRS

SEQ ID NO: 123959 - protein, 15 aa, Artificial Sequence
  Description of Artificial Sequence: Synthetic peptide
  Seed: RMCSLMQGSTLPRRS
RMFSLMQVSTVPRRS

SEQ ID NO: 123960 - protein, 15 aa, Artificial Sequence
  Description of Artificial Sequence: Synthetic peptide
  Seed: RMCSLMQGSTLPRRS
RMFSLMQVSTWPRRS

SEQ ID NO: 123961 - protein, 15 aa, Artificial Sequence
  Description of Artificial Sequence: Synthetic peptide
  Seed: RMCSLMQGSTLPRRS
RMFSLMQVSTYPRRS

SEQ ID NO: 123962 - protein, 15 aa, Artificial Sequence
  Description of Artificial Sequence: Synthetic peptide
  Seed: RMCSLMQGSTLPRRS
RMFSLMQWSTAPRRS

SEQ ID NO: 123963 - protein, 15 aa, Artificial Sequence
  Description of Artificial Sequence: Synthetic peptide
  Seed: RMCSLMQGSTLPRRS
RMFSLMQWSTIPRRS

SEQ ID NO: 123964 - protein, 15 aa, Artificial Sequence
  Description of Artificial Sequence: Synthetic peptide
  Seed: RMCSLMQGSTLPRRS
RMFSLMQWSTLPRRS

SEQ ID NO: 123965 - protein, 15 aa, Artificial Sequence
  Description of Artificial Sequence: Synthetic peptide
  Seed: RMCSLMQGSTLPRRS
RMFSLMQWSTMPRRS

SEQ ID NO: 123966 - protein, 15 aa, Artificial Sequence
  Description of Artificial Sequence: Synthetic peptide
  Seed: RMCSLMQGSTLPRRS
RMFSLMQWSTVPRRS

SEQ ID NO: 123967 - protein, 15 aa, Artificial Sequence
  Description of Artificial Sequence: Synthetic peptide
  Seed: RMCSLMQGSTLPRRS
RMFSLMQYSTAPRRS

SEQ ID NO: 123968 - protein, 15 aa, Artificial Sequence
  Description of Artificial Sequence: Synthetic peptide
  Seed: RMCSLMQGSTLPRRS
RMFSLMQYSTIPRRS

SEQ ID NO: 123969 - protein, 15 aa, Artificial Sequence
  Description of Artificial Sequence: Synthetic peptide
  Seed: RMCSLMQGSTLPRRS
RMFSLMQYSTLPRRS

SEQ ID NO: 123970 - protein, 15 aa, Artificial Sequence
  Description of Artificial Sequence: Synthetic peptide
  Seed: RMCSLMQGSTLPRRS
RMFSLMQYSTSPRRS

SEQ ID NO: 123971 - protein, 15 aa, Artificial Sequence
  Description of Artificial Sequence: Synthetic peptide
  Seed: RMCSLMQGSTLPRRS
RMFSLMQYSTVPRRS

SEQ ID NO: 123972 - protein, 15 aa, Artificial Sequence
  Description of Artificial Sequence: Synthetic peptide
  Seed: RMCSLMQGSTLPRRS
RMFSLNQASTAPRRS

SEQ ID NO: 123973 - protein, 15 aa, Artificial Sequence
  Description of Artificial Sequence: Synthetic peptide
  Seed: RMCSLMQGSTLPRRS
RMFSLNQASTFPRRS

SEQ ID NO: 123974 - protein, 15 aa, Artificial Sequence
  Description of Artificial Sequence: Synthetic peptide
  Seed: RMCSLMQGSTLPRRS
RMFSLNQASTIPRRS

SEQ ID NO: 123975 - protein, 15 aa, Artificial Sequence
  Description of Artificial Sequence: Synthetic peptide
  Seed: RMCSLMQGSTLPRRS
RMFSLNQASTLPRRS

SEQ ID NO: 123976 - protein, 15 aa, Artificial Sequence
  Description of Artificial Sequence: Synthetic peptide
  Seed: RMCSLMQGSTLPRRS
RMFSLNQASTMPRRS

SEQ ID NO: 123977 - protein, 15 aa, Artificial Sequence
  Description of Artificial Sequence: Synthetic peptide
  Seed: RMCSLMQGSTLPRRS
RMFSLNQASTSPRRS

SEQ ID NO: 123978 - protein, 15 aa, Artificial Sequence
  Description of Artificial Sequence: Synthetic peptide
  Seed: RMCSLMQGSTLPRRS
RMFSLNQASTTPRRS

SEQ ID NO: 123979 - protein, 15 aa, Artificial Sequence
  Description of Artificial Sequence: Synthetic peptide
  Seed: RMCSLMQGSTLPRRS
RMFSLNQASTVPRRS

SEQ ID NO: 123980 - protein, 15 aa, Artificial Sequence
  Description of Artificial Sequence: Synthetic peptide
  Seed: RMCSLMQGSTLPRRS
RMFSLNQGSTAPRRS

SEQ ID NO: 123981 - protein, 15 aa, Artificial Sequence
  Description of Artificial Sequence: Synthetic peptide
  Seed: RMCSLMQGSTLPRRS
RMFSLNQGSTIPRRS

SEQ ID NO: 123982 - protein, 15 aa, Artificial Sequence
  Description of Artificial Sequence: Synthetic peptide
  Seed: RMCSLMQGSTLPRRS
RMFSLNQGSTLPRRS

SEQ ID NO: 123983 - protein, 15 aa, Artificial Sequence
  Description of Artificial Sequence: Synthetic peptide
  Seed: RMCSLMQGSTLPRRS
RMFSLNQGSTMPRRS

SEQ ID NO: 123984 - protein, 15 aa, Artificial Sequence
  Description of Artificial Sequence: Synthetic peptide
  Seed: RMCSLMQGSTLPRRS
RMFSLNQGSTVPRRS

SEQ ID NO: 123985 - protein, 15 aa, Artificial Sequence
  Description of Artificial Sequence: Synthetic peptide
  Seed: RMCSLMQGSTLPRRS
RMFSLNQNSTLPRRS

SEQ ID NO: 123986 - protein, 15 aa, Artificial Sequence
  Description of Artificial Sequence: Synthetic peptide
  Seed: RMCSLMQGSTLPRRS
RMFSLNQPSTAPRRS

SEQ ID NO: 123987 - protein, 15 aa, Artificial Sequence
  Description of Artificial Sequence: Synthetic peptide
  Seed: RMCSLMQGSTLPRRS
RMFSLNQPSTIPRRS

SEQ ID NO: 123988 - protein, 15 aa, Artificial Sequence
  Description of Artificial Sequence: Synthetic peptide
  Seed: RMCSLMQGSTLPRRS
RMFSLNQPSTLPRRS

SEQ ID NO: 123989 - protein, 15 aa, Artificial Sequence
  Description of Artificial Sequence: Synthetic peptide
  Seed: RMCSLMQGSTLPRRS
RMFSLNQPSTMPRRS

SEQ ID NO: 123990 - protein, 15 aa, Artificial Sequence
  Description of Artificial Sequence: Synthetic peptide
  Seed: RMCSLMQGSTLPRRS
RMFSLNQPSTVPRRS

SEQ ID NO: 123991 - protein, 15 aa, Artificial Sequence
  Description of Artificial Sequence: Synthetic peptide
  Seed: RMCSLMQGSTLPRRS
RMFSLNQSSTAPRRS

SEQ ID NO: 123992 - protein, 15 aa, Artificial Sequence
  Description of Artificial Sequence: Synthetic peptide
  Seed: RMCSLMQGSTLPRRS
RMFSLNQSSTIPRRS

SEQ ID NO: 123993 - protein, 15 aa, Artificial Sequence
  Description of Artificial Sequence: Synthetic peptide
  Seed: RMCSLMQGSTLPRRS
RMFSLNQSSTLPRRS

SEQ ID NO: 123994 - protein, 15 aa, Artificial Sequence
  Description of Artificial Sequence: Synthetic peptide
  Seed: RMCSLMQGSTLPRRS
RMFSLNQSSTMPRRS

SEQ ID NO: 123995 - protein, 15 aa, Artificial Sequence
  Description of Artificial Sequence: Synthetic peptide
  Seed: RMCSLMQGSTLPRRS
RMFSLNQSSTVPRRS

SEQ ID NO: 123996 - protein, 15 aa, Artificial Sequence
  Description of Artificial Sequence: Synthetic peptide
  Seed: RMCSLMQGSTLPRRS
RMFSLNQTSTLPRRS

SEQ ID NO: 123997 - protein, 15 aa, Artificial Sequence
  Description of Artificial Sequence: Synthetic peptide
  Seed: RMCSLMQGSTLPRRS
RMFSLNQVSTIPRRS

SEQ ID NO: 123998 - protein, 15 aa, Artificial Sequence
  Description of Artificial Sequence: Synthetic peptide
  Seed: RMCSLMQGSTLPRRS
RMFSLNQVSTLPRRS

SEQ ID NO: 123999 - protein, 15 aa, Artificial Sequence
  Description of Artificial Sequence: Synthetic peptide
  Seed: RMCSLMQGSTLPRRS
RMFSLNQVSTVPRRS

SEQ ID NO: 124000 - protein, 15 aa, Artificial Sequence
  Description of Artificial Sequence: Synthetic peptide
  Seed: RMCSLMQGSTLPRRS
RMFSLQQASTAPRRS

SEQ ID NO: 124001 - protein, 15 aa, Artificial Sequence
  Description of Artificial Sequence: Synthetic peptide
  Seed: RMCSLMQGSTLPRRS
RMFSLQQASTCPRRS

SEQ ID NO: 124002 - protein, 15 aa, Artificial Sequence
  Description of Artificial Sequence: Synthetic peptide
  Seed: RMCSLMQGSTLPRRS
RMFSLQQASTFPRRS

SEQ ID NO: 124003 - protein, 15 aa, Artificial Sequence
  Description of Artificial Sequence: Synthetic peptide
  Seed: RMCSLMQGSTLPRRS
RMFSLQQASTGPRRS

SEQ ID NO: 124004 - protein, 15 aa, Artificial Sequence
  Description of Artificial Sequence: Synthetic peptide
  Seed: RMCSLMQGSTLPRRS
RMFSLQQASTHPRRS

SEQ ID NO: 124005 - protein, 15 aa, Artificial Sequence
  Description of Artificial Sequence: Synthetic peptide
  Seed: RMCSLMQGSTLPRRS
RMFSLQQASTIPRRS

SEQ ID NO: 124006 - protein, 15 aa, Artificial Sequence
  Description of Artificial Sequence: Synthetic peptide
  Seed: RMCSLMQGSTLPRRS
RMFSLQQASTLPRRS

SEQ ID NO: 124007 - protein, 15 aa, Artificial Sequence
  Description of Artificial Sequence: Synthetic peptide
  Seed: RMCSLMQGSTLPRRS
RMFSLQQASTMPRRS

SEQ ID NO: 124008 - protein, 15 aa, Artificial Sequence
  Description of Artificial Sequence: Synthetic peptide
  Seed: RMCSLMQGSTLPRRS
RMFSLQQASTNPRRS

SEQ ID NO: 124009 - protein, 15 aa, Artificial Sequence
  Description of Artificial Sequence: Synthetic peptide
  Seed: RMCSLMQGSTLPRRS
RMFSLQQASTPPRRS

SEQ ID NO: 124010 - protein, 15 aa, Artificial Sequence
  Description of Artificial Sequence: Synthetic peptide
  Seed: RMCSLMQGSTLPRRS
RMFSLQQASTQPRRS

SEQ ID NO: 124011 - protein, 15 aa, Artificial Sequence
  Description of Artificial Sequence: Synthetic peptide
  Seed: RMCSLMQGSTLPRRS
RMFSLQQASTSPRRS

SEQ ID NO: 124012 - protein, 15 aa, Artificial Sequence
  Description of Artificial Sequence: Synthetic peptide
  Seed: RMCSLMQGSTLPRRS
RMFSLQQASTTPRRS

SEQ ID NO: 124013 - protein, 15 aa, Artificial Sequence
  Description of Artificial Sequence: Synthetic peptide
  Seed: RMCSLMQGSTLPRRS
RMFSLQQASTVPRRS

SEQ ID NO: 124014 - protein, 15 aa, Artificial Sequence
  Description of Artificial Sequence: Synthetic peptide
  Seed: RMCSLMQGSTLPRRS
RMFSLQQASTWPRRS

SEQ ID NO: 124015 - protein, 15 aa, Artificial Sequence
  Description of Artificial Sequence: Synthetic peptide
  Seed: RMCSLMQGSTLPRRS
RMFSLQQASTYPRRS

SEQ ID NO: 124016 - protein, 15 aa, Artificial Sequence
  Description of Artificial Sequence: Synthetic peptide
  Seed: RMCSLMQGSTLPRRS
RMFSLQQGSTAPRRS

SEQ ID NO: 124017 - protein, 15 aa, Artificial Sequence
  Description of Artificial Sequence: Synthetic peptide
  Seed: RMCSLMQGSTLPRRS
RMFSLQQGSTCPRRS

SEQ ID NO: 124018 - protein, 15 aa, Artificial Sequence
  Description of Artificial Sequence: Synthetic peptide
  Seed: RMCSLMQGSTLPRRS
RMFSLQQGSTFPRRS

SEQ ID NO: 124019 - protein, 15 aa, Artificial Sequence
  Description of Artificial Sequence: Synthetic peptide
  Seed: RMCSLMQGSTLPRRS
RMFSLQQGSTGPRRS

SEQ ID NO: 124020 - protein, 15 aa, Artificial Sequence
  Description of Artificial Sequence: Synthetic peptide
  Seed: RMCSLMQGSTLPRRS
RMFSLQQGSTIPRRS

SEQ ID NO: 124021 - protein, 15 aa, Artificial Sequence
  Description of Artificial Sequence: Synthetic peptide
  Seed: RMCSLMQGSTLPRRS
RMFSLQQGSTLPRRS

SEQ ID NO: 124022 - protein, 15 aa, Artificial Sequence
  Description of Artificial Sequence: Synthetic peptide
  Seed: RMCSLMQGSTLPRRS
RMFSLQQGSTMPRRS

SEQ ID NO: 124023 - protein, 15 aa, Artificial Sequence
  Description of Artificial Sequence: Synthetic peptide
  Seed: RMCSLMQGSTLPRRS
RMFSLQQGSTNPRRS

SEQ ID NO: 124024 - protein, 15 aa, Artificial Sequence
  Description of Artificial Sequence: Synthetic peptide
  Seed: RMCSLMQGSTLPRRS
RMFSLQQGSTSPRRS

SEQ ID NO: 124025 - protein, 15 aa, Artificial Sequence
  Description of Artificial Sequence: Synthetic peptide
  Seed: RMCSLMQGSTLPRRS
RMFSLQQGSTTPRRS

SEQ ID NO: 124026 - protein, 15 aa, Artificial Sequence
  Description of Artificial Sequence: Synthetic peptide
  Seed: RMCSLMQGSTLPRRS
RMFSLQQGSTVPRRS

SEQ ID NO: 124027 - protein, 15 aa, Artificial Sequence
  Description of Artificial Sequence: Synthetic peptide
  Seed: RMCSLMQGSTLPRRS
RMFSLQQISTAPRRS

SEQ ID NO: 124028 - protein, 15 aa, Artificial Sequence
  Description of Artificial Sequence: Synthetic peptide
  Seed: RMCSLMQGSTLPRRS
RMFSLQQISTIPRRS

SEQ ID NO: 124029 - protein, 15 aa, Artificial Sequence
  Description of Artificial Sequence: Synthetic peptide
  Seed: RMCSLMQGSTLPRRS
RMFSLQQISTLPRRS

SEQ ID NO: 124030 - protein, 15 aa, Artificial Sequence
  Description of Artificial Sequence: Synthetic peptide
  Seed: RMCSLMQGSTLPRRS
RMFSLQQISTMPRRS

SEQ ID NO: 124031 - protein, 15 aa, Artificial Sequence
  Description of Artificial Sequence: Synthetic peptide
  Seed: RMCSLMQGSTLPRRS
RMFSLQQISTNPRRS

SEQ ID NO: 124032 - protein, 15 aa, Artificial Sequence
  Description of Artificial Sequence: Synthetic peptide
  Seed: RMCSLMQGSTLPRRS
RMFSLQQISTSPRRS

SEQ ID NO: 124033 - protein, 15 aa, Artificial Sequence
  Description of Artificial Sequence: Synthetic peptide
  Seed: RMCSLMQGSTLPRRS
RMFSLQQISTTPRRS

SEQ ID NO: 124034 - protein, 15 aa, Artificial Sequence
  Description of Artificial Sequence: Synthetic peptide
  Seed: RMCSLMQGSTLPRRS
RMFSLQQISTVPRRS

SEQ ID NO: 124035 - protein, 15 aa, Artificial Sequence
  Description of Artificial Sequence: Synthetic peptide
  Seed: RMCSLMQGSTLPRRS
RMFSLQQLSTAPRRS

SEQ ID NO: 124036 - protein, 15 aa, Artificial Sequence
  Description of Artificial Sequence: Synthetic peptide
  Seed: RMCSLMQGSTLPRRS
RMFSLQQLSTNPRRS

SEQ ID NO: 124037 - protein, 15 aa, Artificial Sequence
  Description of Artificial Sequence: Synthetic peptide
  Seed: RMCSLMQGSTLPRRS
RMFSLQQLSTSPRRS

SEQ ID NO: 124038 - protein, 15 aa, Artificial Sequence
  Description of Artificial Sequence: Synthetic peptide
  Seed: RMCSLMQGSTLPRRS
RMFSLQQMSTAPRRS

SEQ ID NO: 124039 - protein, 15 aa, Artificial Sequence
  Description of Artificial Sequence: Synthetic peptide
  Seed: RMCSLMQGSTLPRRS
RMFSLQQNSTAPRRS

SEQ ID NO: 124040 - protein, 15 aa, Artificial Sequence
  Description of Artificial Sequence: Synthetic peptide
  Seed: RMCSLMQGSTLPRRS
RMFSLQQNSTGPRRS

SEQ ID NO: 124041 - protein, 15 aa, Artificial Sequence
  Description of Artificial Sequence: Synthetic peptide
  Seed: RMCSLMQGSTLPRRS
RMFSLQQNSTIPRRS

SEQ ID NO: 124042 - protein, 15 aa, Artificial Sequence
  Description of Artificial Sequence: Synthetic peptide
  Seed: RMCSLMQGSTLPRRS
RMFSLQQNSTLPRRS

SEQ ID NO: 124043 - protein, 15 aa, Artificial Sequence
  Description of Artificial Sequence: Synthetic peptide
  Seed: RMCSLMQGSTLPRRS
RMFSLQQNSTMPRRS

SEQ ID NO: 124044 - protein, 15 aa, Artificial Sequence
  Description of Artificial Sequence: Synthetic peptide
  Seed: RMCSLMQGSTLPRRS
RMFSLQQNSTNPRRS

SEQ ID NO: 124045 - protein, 15 aa, Artificial Sequence
  Description of Artificial Sequence: Synthetic peptide
  Seed: RMCSLMQGSTLPRRS
RMFSLQQNSTSPRRS

SEQ ID NO: 124046 - protein, 15 aa, Artificial Sequence
  Description of Artificial Sequence: Synthetic peptide
  Seed: RMCSLMQGSTLPRRS
RMFSLQQNSTTPRRS

SEQ ID NO: 124047 - protein, 15 aa, Artificial Sequence
  Description of Artificial Sequence: Synthetic peptide
  Seed: RMCSLMQGSTLPRRS
RMFSLQQNSTVPRRS

SEQ ID NO: 124048 - protein, 15 aa, Artificial Sequence
  Description of Artificial Sequence: Synthetic peptide
  Seed: RMCSLMQGSTLPRRS
RMFSLQQPSTAPRRS

SEQ ID NO: 124049 - protein, 15 aa, Artificial Sequence
  Description of Artificial Sequence: Synthetic peptide
  Seed: RMCSLMQGSTLPRRS
RMFSLQQPSTFPRRS

SEQ ID NO: 124050 - protein, 15 aa, Artificial Sequence
  Description of Artificial Sequence: Synthetic peptide
  Seed: RMCSLMQGSTLPRRS
RMFSLQQPSTGPRRS

SEQ ID NO: 124051 - protein, 15 aa, Artificial Sequence
  Description of Artificial Sequence: Synthetic peptide
  Seed: RMCSLMQGSTLPRRS
RMFSLQQPSTIPRRS

SEQ ID NO: 124052 - protein, 15 aa, Artificial Sequence
  Description of Artificial Sequence: Synthetic peptide
  Seed: RMCSLMQGSTLPRRS
RMFSLQQPSTLPRRS

SEQ ID NO: 124053 - protein, 15 aa, Artificial Sequence
  Description of Artificial Sequence: Synthetic peptide
  Seed: RMCSLMQGSTLPRRS
RMFSLQQPSTMPRRS

SEQ ID NO: 124054 - protein, 15 aa, Artificial Sequence
  Description of Artificial Sequence: Synthetic peptide
  Seed: RMCSLMQGSTLPRRS
RMFSLQQPSTNPRRS

SEQ ID NO: 124055 - protein, 15 aa, Artificial Sequence
  Description of Artificial Sequence: Synthetic peptide
  Seed: RMCSLMQGSTLPRRS
RMFSLQQPSTQPRRS

SEQ ID NO: 124056 - protein, 15 aa, Artificial Sequence
  Description of Artificial Sequence: Synthetic peptide
  Seed: RMCSLMQGSTLPRRS
RMFSLQQPSTSPRRS

SEQ ID NO: 124057 - protein, 15 aa, Artificial Sequence
  Description of Artificial Sequence: Synthetic peptide
  Seed: RMCSLMQGSTLPRRS
RMFSLQQPSTTPRRS

SEQ ID NO: 124058 - protein, 15 aa, Artificial Sequence
  Description of Artificial Sequence: Synthetic peptide
  Seed: RMCSLMQGSTLPRRS
RMFSLQQPSTVPRRS

SEQ ID NO: 124059 - protein, 15 aa, Artificial Sequence
  Description of Artificial Sequence: Synthetic peptide
  Seed: RMCSLMQGSTLPRRS
RMFSLQQSSTAPRRS

SEQ ID NO: 124060 - protein, 15 aa, Artificial Sequence
  Description of Artificial Sequence: Synthetic peptide
  Seed: RMCSLMQGSTLPRRS
RMFSLQQSSTCPRRS

SEQ ID NO: 124061 - protein, 15 aa, Artificial Sequence
  Description of Artificial Sequence: Synthetic peptide
  Seed: RMCSLMQGSTLPRRS
RMFSLQQSSTFPRRS

SEQ ID NO: 124062 - protein, 15 aa, Artificial Sequence
  Description of Artificial Sequence: Synthetic peptide
  Seed: RMCSLMQGSTLPRRS
RMFSLQQSSTGPRRS

SEQ ID NO: 124063 - protein, 15 aa, Artificial Sequence
  Description of Artificial Sequence: Synthetic peptide
  Seed: RMCSLMQGSTLPRRS
RMFSLQQSSTIPRRS

SEQ ID NO: 124064 - protein, 15 aa, Artificial Sequence
  Description of Artificial Sequence: Synthetic peptide
  Seed: RMCSLMQGSTLPRRS
RMFSLQQSSTLPRRS

SEQ ID NO: 124065 - protein, 15 aa, Artificial Sequence
  Description of Artificial Sequence: Synthetic peptide
  Seed: RMCSLMQGSTLPRRS
RMFSLQQSSTMPRRS

SEQ ID NO: 124066 - protein, 15 aa, Artificial Sequence
  Description of Artificial Sequence: Synthetic peptide
  Seed: RMCSLMQGSTLPRRS
RMFSLQQSSTNPRRS

SEQ ID NO: 124067 - protein, 15 aa, Artificial Sequence
  Description of Artificial Sequence: Synthetic peptide
  Seed: RMCSLMQGSTLPRRS
RMFSLQQSSTSPRRS

SEQ ID NO: 124068 - protein, 15 aa, Artificial Sequence
  Description of Artificial Sequence: Synthetic peptide
  Seed: RMCSLMQGSTLPRRS
RMFSLQQSSTTPRRS

SEQ ID NO: 124069 - protein, 15 aa, Artificial Sequence
  Description of Artificial Sequence: Synthetic peptide
  Seed: RMCSLMQGSTLPRRS
RMFSLQQSSTVPRRS

SEQ ID NO: 124070 - protein, 15 aa, Artificial Sequence
  Description of Artificial Sequence: Synthetic peptide
  Seed: RMCSLMQGSTLPRRS
RMFSLQQTSTAPRRS

SEQ ID NO: 124071 - protein, 15 aa, Artificial Sequence
  Description of Artificial Sequence: Synthetic peptide
  Seed: RMCSLMQGSTLPRRS
RMFSLQQTSTIPRRS

SEQ ID NO: 124072 - protein, 15 aa, Artificial Sequence
  Description of Artificial Sequence: Synthetic peptide
  Seed: RMCSLMQGSTLPRRS
RMFSLQQTSTLPRRS

SEQ ID NO: 124073 - protein, 15 aa, Artificial Sequence
  Description of Artificial Sequence: Synthetic peptide
  Seed: RMCSLMQGSTLPRRS
RMFSLQQTSTMPRRS

SEQ ID NO: 124074 - protein, 15 aa, Artificial Sequence
  Description of Artificial Sequence: Synthetic peptide
  Seed: RMCSLMQGSTLPRRS
RMFSLQQTSTNPRRS

SEQ ID NO: 124075 - protein, 15 aa, Artificial Sequence
  Description of Artificial Sequence: Synthetic peptide
  Seed: RMCSLMQGSTLPRRS
RMFSLQQTSTSPRRS

SEQ ID NO: 124076 - protein, 15 aa, Artificial Sequence
  Description of Artificial Sequence: Synthetic peptide
  Seed: RMCSLMQGSTLPRRS
RMFSLQQTSTTPRRS

SEQ ID NO: 124077 - protein, 15 aa, Artificial Sequence
  Description of Artificial Sequence: Synthetic peptide
  Seed: RMCSLMQGSTLPRRS
RMFSLQQTSTVPRRS

SEQ ID NO: 124078 - protein, 15 aa, Artificial Sequence
  Description of Artificial Sequence: Synthetic peptide
  Seed: RMCSLMQGSTLPRRS
RMFSLQQVSTAPRRS

SEQ ID NO: 124079 - protein, 15 aa, Artificial Sequence
  Description of Artificial Sequence: Synthetic peptide
  Seed: RMCSLMQGSTLPRRS
RMFSLQQVSTGPRRS

SEQ ID NO: 124080 - protein, 15 aa, Artificial Sequence
  Description of Artificial Sequence: Synthetic peptide
  Seed: RMCSLMQGSTLPRRS
RMFSLQQVSTIPRRS

SEQ ID NO: 124081 - protein, 15 aa, Artificial Sequence
  Description of Artificial Sequence: Synthetic peptide
  Seed: RMCSLMQGSTLPRRS
RMFSLQQVSTLPRRS

SEQ ID NO: 124082 - protein, 15 aa, Artificial Sequence
  Description of Artificial Sequence: Synthetic peptide
  Seed: RMCSLMQGSTLPRRS
RMFSLQQVSTMPRRS

SEQ ID NO: 124083 - protein, 15 aa, Artificial Sequence
  Description of Artificial Sequence: Synthetic peptide
  Seed: RMCSLMQGSTLPRRS
RMFSLQQVSTNPRRS

SEQ ID NO: 124084 - protein, 15 aa, Artificial Sequence
  Description of Artificial Sequence: Synthetic peptide
  Seed: RMCSLMQGSTLPRRS
RMFSLQQVSTSPRRS

SEQ ID NO: 124085 - protein, 15 aa, Artificial Sequence
  Description of Artificial Sequence: Synthetic peptide
  Seed: RMCSLMQGSTLPRRS
RMFSLQQVSTTPRRS

SEQ ID NO: 124086 - protein, 15 aa, Artificial Sequence
  Description of Artificial Sequence: Synthetic peptide
  Seed: RMCSLMQGSTLPRRS
RMFSLQQVSTVPRRS

SEQ ID NO: 124087 - protein, 15 aa, Artificial Sequence
  Description of Artificial Sequence: Synthetic peptide
  Seed: RMCSLMQGSTLPRRS
RMFSLRQASTIPRRS

SEQ ID NO: 124088 - protein, 15 aa, Artificial Sequence
  Description of Artificial Sequence: Synthetic peptide
  Seed: RMCSLMQGSTLPRRS
RMFSLRQASTLPRRS

SEQ ID NO: 124089 - protein, 15 aa, Artificial Sequence
  Description of Artificial Sequence: Synthetic peptide
  Seed: RMCSLMQGSTLPRRS
RMFSLRQASTVPRRS

SEQ ID NO: 124090 - protein, 15 aa, Artificial Sequence
  Description of Artificial Sequence: Synthetic peptide
  Seed: RMCSLMQGSTLPRRS
RMFSLRQGSTLPRRS

SEQ ID NO: 124091 - protein, 15 aa, Artificial Sequence
  Description of Artificial Sequence: Synthetic peptide
  Seed: RMCSLMQGSTLPRRS
RMFSLRQSSTLPRRS

SEQ ID NO: 124092 - protein, 15 aa, Artificial Sequence
  Description of Artificial Sequence: Synthetic peptide
  Seed: RMCSLMQGSTLPRRS
RMFSLSQASTAPRRS

SEQ ID NO: 124093 - protein, 15 aa, Artificial Sequence
  Description of Artificial Sequence: Synthetic peptide
  Seed: RMCSLMQGSTLPRRS
RMFSLSQASTCPRRS

SEQ ID NO: 124094 - protein, 15 aa, Artificial Sequence
  Description of Artificial Sequence: Synthetic peptide
  Seed: RMCSLMQGSTLPRRS
RMFSLSQASTFPRRS

SEQ ID NO: 124095 - protein, 15 aa, Artificial Sequence
  Description of Artificial Sequence: Synthetic peptide
  Seed: RMCSLMQGSTLPRRS
RMFSLSQASTGPRRS

SEQ ID NO: 124096 - protein, 15 aa, Artificial Sequence
  Description of Artificial Sequence: Synthetic peptide
  Seed: RMCSLMQGSTLPRRS
RMFSLSQASTHPRRS

SEQ ID NO: 124097 - protein, 15 aa, Artificial Sequence
  Description of Artificial Sequence: Synthetic peptide
  Seed: RMCSLMQGSTLPRRS
RMFSLSQASTIPRRS

SEQ ID NO: 124098 - protein, 15 aa, Artificial Sequence
  Description of Artificial Sequence: Synthetic peptide
  Seed: RMCSLMQGSTLPRRS
RMFSLSQASTLPRRS

SEQ ID NO: 124099 - protein, 15 aa, Artificial Sequence
  Description of Artificial Sequence: Synthetic peptide
  Seed: RMCSLMQGSTLPRRS
RMFSLSQASTMPRRS

SEQ ID NO: 124100 - protein, 15 aa, Artificial Sequence
  Description of Artificial Sequence: Synthetic peptide
  Seed: RMCSLMQGSTLPRRS
RMFSLSQASTNPRRS

SEQ ID NO: 124101 - protein, 15 aa, Artificial Sequence
  Description of Artificial Sequence: Synthetic peptide
  Seed: RMCSLMQGSTLPRRS
RMFSLSQASTQPRRS

SEQ ID NO: 124102 - protein, 15 aa, Artificial Sequence
  Description of Artificial Sequence: Synthetic peptide
  Seed: RMCSLMQGSTLPRRS
RMFSLSQASTSPRRS

SEQ ID NO: 124103 - protein, 15 aa, Artificial Sequence
  Description of Artificial Sequence: Synthetic peptide
  Seed: RMCSLMQGSTLPRRS
RMFSLSQASTTPRRS

SEQ ID NO: 124104 - protein, 15 aa, Artificial Sequence
  Description of Artificial Sequence: Synthetic peptide
  Seed: RMCSLMQGSTLPRRS
RMFSLSQASTVPRRS

SEQ ID NO: 124105 - protein, 15 aa, Artificial Sequence
  Description of Artificial Sequence: Synthetic peptide
  Seed: RMCSLMQGSTLPRRS
RMFSLSQASTWPRRS

SEQ ID NO: 124106 - protein, 15 aa, Artificial Sequence
  Description of Artificial Sequence: Synthetic peptide
  Seed: RMCSLMQGSTLPRRS
RMFSLSQASTYPRRS

SEQ ID NO: 124107 - protein, 15 aa, Artificial Sequence
  Description of Artificial Sequence: Synthetic peptide
  Seed: RMCSLMQGSTLPRRS
RMFSLSQGSTAPRRS

SEQ ID NO: 124108 - protein, 15 aa, Artificial Sequence
  Description of Artificial Sequence: Synthetic peptide
  Seed: RMCSLMQGSTLPRRS
RMFSLSQGSTFPRRS

SEQ ID NO: 124109 - protein, 15 aa, Artificial Sequence
  Description of Artificial Sequence: Synthetic peptide
  Seed: RMCSLMQGSTLPRRS
RMFSLSQGSTGPRRS

SEQ ID NO: 124110 - protein, 15 aa, Artificial Sequence
  Description of Artificial Sequence: Synthetic peptide
  Seed: RMCSLMQGSTLPRRS
RMFSLSQGSTIPRRS

SEQ ID NO: 124111 - protein, 15 aa, Artificial Sequence
  Description of Artificial Sequence: Synthetic peptide
  Seed: RMCSLMQGSTLPRRS
RMFSLSQGSTLPRRS

SEQ ID NO: 124112 - protein, 15 aa, Artificial Sequence
  Description of Artificial Sequence: Synthetic peptide
  Seed: RMCSLMQGSTLPRRS
RMFSLSQGSTMPRRS

SEQ ID NO: 124113 - protein, 15 aa, Artificial Sequence
  Description of Artificial Sequence: Synthetic peptide
  Seed: RMCSLMQGSTLPRRS
RMFSLSQGSTSPRRS

SEQ ID NO: 124114 - protein, 15 aa, Artificial Sequence
  Description of Artificial Sequence: Synthetic peptide
  Seed: RMCSLMQGSTLPRRS
RMFSLSQGSTTPRRS

SEQ ID NO: 124115 - protein, 15 aa, Artificial Sequence
  Description of Artificial Sequence: Synthetic peptide
  Seed: RMCSLMQGSTLPRRS
RMFSLSQGSTVPRRS

SEQ ID NO: 124116 - protein, 15 aa, Artificial Sequence
  Description of Artificial Sequence: Synthetic peptide
  Seed: RMCSLMQGSTLPRRS
RMFSLSQISTAPRRS

SEQ ID NO: 124117 - protein, 15 aa, Artificial Sequence
  Description of Artificial Sequence: Synthetic peptide
  Seed: RMCSLMQGSTLPRRS
RMFSLSQISTIPRRS

SEQ ID NO: 124118 - protein, 15 aa, Artificial Sequence
  Description of Artificial Sequence: Synthetic peptide
  Seed: RMCSLMQGSTLPRRS
RMFSLSQISTLPRRS

SEQ ID NO: 124119 - protein, 15 aa, Artificial Sequence
  Description of Artificial Sequence: Synthetic peptide
  Seed: RMCSLMQGSTLPRRS
RMFSLSQISTNPRRS

SEQ ID NO: 124120 - protein, 15 aa, Artificial Sequence
  Description of Artificial Sequence: Synthetic peptide
  Seed: RMCSLMQGSTLPRRS
RMFSLSQISTSPRRS

SEQ ID NO: 124121 - protein, 15 aa, Artificial Sequence
  Description of Artificial Sequence: Synthetic peptide
  Seed: RMCSLMQGSTLPRRS
RMFSLSQISTVPRRS

SEQ ID NO: 124122 - protein, 15 aa, Artificial Sequence
  Description of Artificial Sequence: Synthetic peptide
  Seed: RMCSLMQGSTLPRRS
RMFSLSQNSTAPRRS

SEQ ID NO: 124123 - protein, 15 aa, Artificial Sequence
  Description of Artificial Sequence: Synthetic peptide
  Seed: RMCSLMQGSTLPRRS
RMFSLSQNSTIPRRS

SEQ ID NO: 124124 - protein, 15 aa, Artificial Sequence
  Description of Artificial Sequence: Synthetic peptide
  Seed: RMCSLMQGSTLPRRS
RMFSLSQNSTLPRRS

SEQ ID NO: 124125 - protein, 15 aa, Artificial Sequence
  Description of Artificial Sequence: Synthetic peptide
  Seed: RMCSLMQGSTLPRRS
RMFSLSQNSTMPRRS

SEQ ID NO: 124126 - protein, 15 aa, Artificial Sequence
  Description of Artificial Sequence: Synthetic peptide
  Seed: RMCSLMQGSTLPRRS
RMFSLSQNSTVPRRS

SEQ ID NO: 124127 - protein, 15 aa, Artificial Sequence
  Description of Artificial Sequence: Synthetic peptide
  Seed: RMCSLMQGSTLPRRS
RMFSLSQPSTAPRRS

SEQ ID NO: 124128 - protein, 15 aa, Artificial Sequence
  Description of Artificial Sequence: Synthetic peptide
  Seed: RMCSLMQGSTLPRRS
RMFSLSQPSTFPRRS

SEQ ID NO: 124129 - protein, 15 aa, Artificial Sequence
  Description of Artificial Sequence: Synthetic peptide
  Seed: RMCSLMQGSTLPRRS
RMFSLSQPSTIPRRS

SEQ ID NO: 124130 - protein, 15 aa, Artificial Sequence
  Description of Artificial Sequence: Synthetic peptide
  Seed: RMCSLMQGSTLPRRS
RMFSLSQPSTLPRRS

SEQ ID NO: 124131 - protein, 15 aa, Artificial Sequence
  Description of Artificial Sequence: Synthetic peptide
  Seed: RMCSLMQGSTLPRRS
RMFSLSQPSTMPRRS

SEQ ID NO: 124132 - protein, 15 aa, Artificial Sequence
  Description of Artificial Sequence: Synthetic peptide
  Seed: RMCSLMQGSTLPRRS
RMFSLSQPSTNPRRS

SEQ ID NO: 124133 - protein, 15 aa, Artificial Sequence
  Description of Artificial Sequence: Synthetic peptide
  Seed: RMCSLMQGSTLPRRS
RMFSLSQPSTSPRRS

SEQ ID NO: 124134 - protein, 15 aa, Artificial Sequence
  Description of Artificial Sequence: Synthetic peptide
  Seed: RMCSLMQGSTLPRRS
RMFSLSQPSTTPRRS

SEQ ID NO: 124135 - protein, 15 aa, Artificial Sequence
  Description of Artificial Sequence: Synthetic peptide
  Seed: RMCSLMQGSTLPRRS
RMFSLSQPSTVPRRS

SEQ ID NO: 124136 - protein, 15 aa, Artificial Sequence
  Description of Artificial Sequence: Synthetic peptide
  Seed: RMCSLMQGSTLPRRS
RMFSLSQSSTAPRRS

SEQ ID NO: 124137 - protein, 15 aa, Artificial Sequence
  Description of Artificial Sequence: Synthetic peptide
  Seed: RMCSLMQGSTLPRRS
RMFSLSQSSTFPRRS

SEQ ID NO: 124138 - protein, 15 aa, Artificial Sequence
  Description of Artificial Sequence: Synthetic peptide
  Seed: RMCSLMQGSTLPRRS
RMFSLSQSSTIPRRS

SEQ ID NO: 124139 - protein, 15 aa, Artificial Sequence
  Description of Artificial Sequence: Synthetic peptide
  Seed: RMCSLMQGSTLPRRS
RMFSLSQSSTLPRRS

SEQ ID NO: 124140 - protein, 15 aa, Artificial Sequence
  Description of Artificial Sequence: Synthetic peptide
  Seed: RMCSLMQGSTLPRRS
RMFSLSQSSTMPRRS

SEQ ID NO: 124141 - protein, 15 aa, Artificial Sequence
  Description of Artificial Sequence: Synthetic peptide
  Seed: RMCSLMQGSTLPRRS
RMFSLSQSSTNPRRS

SEQ ID NO: 124142 - protein, 15 aa, Artificial Sequence
  Description of Artificial Sequence: Synthetic peptide
  Seed: RMCSLMQGSTLPRRS
RMFSLSQSSTSPRRS

SEQ ID NO: 124143 - protein, 15 aa, Artificial Sequence
  Description of Artificial Sequence: Synthetic peptide
  Seed: RMCSLMQGSTLPRRS
RMFSLSQSSTTPRRS

SEQ ID NO: 124144 - protein, 15 aa, Artificial Sequence
  Description of Artificial Sequence: Synthetic peptide
  Seed: RMCSLMQGSTLPRRS
RMFSLSQSSTVPRRS

SEQ ID NO: 124145 - protein, 15 aa, Artificial Sequence
  Description of Artificial Sequence: Synthetic peptide
  Seed: RMCSLMQGSTLPRRS
RMFSLSQSSTYPRRS

SEQ ID NO: 124146 - protein, 15 aa, Artificial Sequence
  Description of Artificial Sequence: Synthetic peptide
  Seed: RMCSLMQGSTLPRRS
RMFSLSQTSTAPRRS

SEQ ID NO: 124147 - protein, 15 aa, Artificial Sequence
  Description of Artificial Sequence: Synthetic peptide
  Seed: RMCSLMQGSTLPRRS
RMFSLSQTSTFPRRS

SEQ ID NO: 124148 - protein, 15 aa, Artificial Sequence
  Description of Artificial Sequence: Synthetic peptide
  Seed: RMCSLMQGSTLPRRS
RMFSLSQTSTIPRRS

SEQ ID NO: 124149 - protein, 15 aa, Artificial Sequence
  Description of Artificial Sequence: Synthetic peptide
  Seed: RMCSLMQGSTLPRRS
RMFSLSQTSTLPRRS

SEQ ID NO: 124150 - protein, 15 aa, Artificial Sequence
  Description of Artificial Sequence: Synthetic peptide
  Seed: RMCSLMQGSTLPRRS
RMFSLSQTSTMPRRS

SEQ ID NO: 124151 - protein, 15 aa, Artificial Sequence
  Description of Artificial Sequence: Synthetic peptide
  Seed: RMCSLMQGSTLPRRS
RMFSLSQTSTNPRRS

SEQ ID NO: 124152 - protein, 15 aa, Artificial Sequence
  Description of Artificial Sequence: Synthetic peptide
  Seed: RMCSLMQGSTLPRRS
RMFSLSQTSTSPRRS

SEQ ID NO: 124153 - protein, 15 aa, Artificial Sequence
  Description of Artificial Sequence: Synthetic peptide
  Seed: RMCSLMQGSTLPRRS
RMFSLSQTSTVPRRS

SEQ ID NO: 124154 - protein, 15 aa, Artificial Sequence
  Description of Artificial Sequence: Synthetic peptide
  Seed: RMCSLMQGSTLPRRS
RMFSLSQVSTAPRRS

SEQ ID NO: 124155 - protein, 15 aa, Artificial Sequence
  Description of Artificial Sequence: Synthetic peptide
  Seed: RMCSLMQGSTLPRRS
RMFSLSQVSTIPRRS

SEQ ID NO: 124156 - protein, 15 aa, Artificial Sequence
  Description of Artificial Sequence: Synthetic peptide
  Seed: RMCSLMQGSTLPRRS
RMFSLSQVSTLPRRS

SEQ ID NO: 124157 - protein, 15 aa, Artificial Sequence
  Description of Artificial Sequence: Synthetic peptide
  Seed: RMCSLMQGSTLPRRS
RMFSLSQVSTMPRRS

SEQ ID NO: 124158 - protein, 15 aa, Artificial Sequence
  Description of Artificial Sequence: Synthetic peptide
  Seed: RMCSLMQGSTLPRRS
RMFSLSQVSTNPRRS

SEQ ID NO: 124159 - protein, 15 aa, Artificial Sequence
  Description of Artificial Sequence: Synthetic peptide
  Seed: RMCSLMQGSTLPRRS
RMFSLSQVSTSPRRS

SEQ ID NO: 124160 - protein, 15 aa, Artificial Sequence
  Description of Artificial Sequence: Synthetic peptide
  Seed: RMCSLMQGSTLPRRS
RMFSLSQVSTVPRRS

SEQ ID NO: 124161 - protein, 15 aa, Artificial Sequence
  Description of Artificial Sequence: Synthetic peptide
  Seed: RMCSLMQGSTLPRRS
RMFSLTQASTAPRRS

SEQ ID NO: 124162 - protein, 15 aa, Artificial Sequence
  Description of Artificial Sequence: Synthetic peptide
  Seed: RMCSLMQGSTLPRRS
RMFSLTQASTFPRRS

SEQ ID NO: 124163 - protein, 15 aa, Artificial Sequence
  Description of Artificial Sequence: Synthetic peptide
  Seed: RMCSLMQGSTLPRRS
RMFSLTQASTGPRRS

SEQ ID NO: 124164 - protein, 15 aa, Artificial Sequence
  Description of Artificial Sequence: Synthetic peptide
  Seed: RMCSLMQGSTLPRRS
RMFSLTQASTHPRRS

SEQ ID NO: 124165 - protein, 15 aa, Artificial Sequence
  Description of Artificial Sequence: Synthetic peptide
  Seed: RMCSLMQGSTLPRRS
RMFSLTQASTIPRRS

SEQ ID NO: 124166 - protein, 15 aa, Artificial Sequence
  Description of Artificial Sequence: Synthetic peptide
  Seed: RMCSLMQGSTLPRRS
RMFSLTQASTLPRRS

SEQ ID NO: 124167 - protein, 15 aa, Artificial Sequence
  Description of Artificial Sequence: Synthetic peptide
  Seed: RMCSLMQGSTLPRRS
RMFSLTQASTMPRRS

SEQ ID NO: 124168 - protein, 15 aa, Artificial Sequence
  Description of Artificial Sequence: Synthetic peptide
  Seed: RMCSLMQGSTLPRRS
RMFSLTQASTNPRRS

SEQ ID NO: 124169 - protein, 15 aa, Artificial Sequence
  Description of Artificial Sequence: Synthetic peptide
  Seed: RMCSLMQGSTLPRRS
RMFSLTQASTSPRRS

SEQ ID NO: 124170 - protein, 15 aa, Artificial Sequence
  Description of Artificial Sequence: Synthetic peptide
  Seed: RMCSLMQGSTLPRRS
RMFSLTQASTTPRRS

SEQ ID NO: 124171 - protein, 15 aa, Artificial Sequence
  Description of Artificial Sequence: Synthetic peptide
  Seed: RMCSLMQGSTLPRRS
RMFSLTQASTVPRRS

SEQ ID NO: 124172 - protein, 15 aa, Artificial Sequence
  Description of Artificial Sequence: Synthetic peptide
  Seed: RMCSLMQGSTLPRRS
RMFSLTQASTYPRRS

SEQ ID NO: 124173 - protein, 15 aa, Artificial Sequence
  Description of Artificial Sequence: Synthetic peptide
  Seed: RMCSLMQGSTLPRRS
RMFSLTQGSTAPRRS

SEQ ID NO: 124174 - protein, 15 aa, Artificial Sequence
  Description of Artificial Sequence: Synthetic peptide
  Seed: RMCSLMQGSTLPRRS
RMFSLTQGSTFPRRS

SEQ ID NO: 124175 - protein, 15 aa, Artificial Sequence
  Description of Artificial Sequence: Synthetic peptide
  Seed: RMCSLMQGSTLPRRS
RMFSLTQGSTIPRRS

SEQ ID NO: 124176 - protein, 15 aa, Artificial Sequence
  Description of Artificial Sequence: Synthetic peptide
  Seed: RMCSLMQGSTLPRRS
RMFSLTQGSTLPRRS

SEQ ID NO: 124177 - protein, 15 aa, Artificial Sequence
  Description of Artificial Sequence: Synthetic peptide
  Seed: RMCSLMQGSTLPRRS
RMFSLTQGSTMPRRS

SEQ ID NO: 124178 - protein, 15 aa, Artificial Sequence
  Description of Artificial Sequence: Synthetic peptide
  Seed: RMCSLMQGSTLPRRS
RMFSLTQGSTSPRRS

SEQ ID NO: 124179 - protein, 15 aa, Artificial Sequence
  Description of Artificial Sequence: Synthetic peptide
  Seed: RMCSLMQGSTLPRRS
RMFSLTQGSTTPRRS

SEQ ID NO: 124180 - protein, 15 aa, Artificial Sequence
  Description of Artificial Sequence: Synthetic peptide
  Seed: RMCSLMQGSTLPRRS
RMFSLTQGSTVPRRS

SEQ ID NO: 124181 - protein, 15 aa, Artificial Sequence
  Description of Artificial Sequence: Synthetic peptide
  Seed: RMCSLMQGSTLPRRS
RMFSLTQISTAPRRS

SEQ ID NO: 124182 - protein, 15 aa, Artificial Sequence
  Description of Artificial Sequence: Synthetic peptide
  Seed: RMCSLMQGSTLPRRS
RMFSLTQISTIPRRS

SEQ ID NO: 124183 - protein, 15 aa, Artificial Sequence
  Description of Artificial Sequence: Synthetic peptide
  Seed: RMCSLMQGSTLPRRS
RMFSLTQISTLPRRS

SEQ ID NO: 124184 - protein, 15 aa, Artificial Sequence
  Description of Artificial Sequence: Synthetic peptide
  Seed: RMCSLMQGSTLPRRS
RMFSLTQISTNPRRS

SEQ ID NO: 124185 - protein, 15 aa, Artificial Sequence
  Description of Artificial Sequence: Synthetic peptide
  Seed: RMCSLMQGSTLPRRS
RMFSLTQISTVPRRS

SEQ ID NO: 124186 - protein, 15 aa, Artificial Sequence
  Description of Artificial Sequence: Synthetic peptide
  Seed: RMCSLMQGSTLPRRS
RMFSLTQMSTIPRRS

SEQ ID NO: 124187 - protein, 15 aa, Artificial Sequence
  Description of Artificial Sequence: Synthetic peptide
  Seed: RMCSLMQGSTLPRRS
RMFSLTQMSTLPRRS

SEQ ID NO: 124188 - protein, 15 aa, Artificial Sequence
  Description of Artificial Sequence: Synthetic peptide
  Seed: RMCSLMQGSTLPRRS
RMFSLTQNSTAPRRS

SEQ ID NO: 124189 - protein, 15 aa, Artificial Sequence
  Description of Artificial Sequence: Synthetic peptide
  Seed: RMCSLMQGSTLPRRS
RMFSLTQNSTFPRRS

SEQ ID NO: 124190 - protein, 15 aa, Artificial Sequence
  Description of Artificial Sequence: Synthetic peptide
  Seed: RMCSLMQGSTLPRRS
RMFSLTQNSTIPRRS

SEQ ID NO: 124191 - protein, 15 aa, Artificial Sequence
  Description of Artificial Sequence: Synthetic peptide
  Seed: RMCSLMQGSTLPRRS
RMFSLTQNSTLPRRS

SEQ ID NO: 124192 - protein, 15 aa, Artificial Sequence
  Description of Artificial Sequence: Synthetic peptide
  Seed: RMCSLMQGSTLPRRS
RMFSLTQNSTMPRRS

SEQ ID NO: 124193 - protein, 15 aa, Artificial Sequence
  Description of Artificial Sequence: Synthetic peptide
  Seed: RMCSLMQGSTLPRRS
RMFSLTQNSTVPRRS

SEQ ID NO: 124194 - protein, 15 aa, Artificial Sequence
  Description of Artificial Sequence: Synthetic peptide
  Seed: RMCSLMQGSTLPRRS
RMFSLTQPSTAPRRS

SEQ ID NO: 124195 - protein, 15 aa, Artificial Sequence
  Description of Artificial Sequence: Synthetic peptide
  Seed: RMCSLMQGSTLPRRS
RMFSLTQPSTFPRRS

SEQ ID NO: 124196 - protein, 15 aa, Artificial Sequence
  Description of Artificial Sequence: Synthetic peptide
  Seed: RMCSLMQGSTLPRRS
RMFSLTQPSTIPRRS

SEQ ID NO: 124197 - protein, 15 aa, Artificial Sequence
  Description of Artificial Sequence: Synthetic peptide
  Seed: RMCSLMQGSTLPRRS
RMFSLTQPSTLPRRS

SEQ ID NO: 124198 - protein, 15 aa, Artificial Sequence
  Description of Artificial Sequence: Synthetic peptide
  Seed: RMCSLMQGSTLPRRS
RMFSLTQPSTMPRRS

SEQ ID NO: 124199 - protein, 15 aa, Artificial Sequence
  Description of Artificial Sequence: Synthetic peptide
  Seed: RMCSLMQGSTLPRRS
RMFSLTQPSTNPRRS

SEQ ID NO: 124200 - protein, 15 aa, Artificial Sequence
  Description of Artificial Sequence: Synthetic peptide
  Seed: RMCSLMQGSTLPRRS
RMFSLTQPSTSPRRS

SEQ ID NO: 124201 - protein, 15 aa, Artificial Sequence
  Description of Artificial Sequence: Synthetic peptide
  Seed: RMCSLMQGSTLPRRS
RMFSLTQPSTTPRRS

SEQ ID NO: 124202 - protein, 15 aa, Artificial Sequence
  Description of Artificial Sequence: Synthetic peptide
  Seed: RMCSLMQGSTLPRRS
RMFSLTQPSTVPRRS

SEQ ID NO: 124203 - protein, 15 aa, Artificial Sequence
  Description of Artificial Sequence: Synthetic peptide
  Seed: RMCSLMQGSTLPRRS
RMFSLTQQSTIPRRS

SEQ ID NO: 124204 - protein, 15 aa, Artificial Sequence
  Description of Artificial Sequence: Synthetic peptide
  Seed: RMCSLMQGSTLPRRS
RMFSLTQSSTAPRRS

SEQ ID NO: 124205 - protein, 15 aa, Artificial Sequence
  Description of Artificial Sequence: Synthetic peptide
  Seed: RMCSLMQGSTLPRRS
RMFSLTQSSTFPRRS

SEQ ID NO: 124206 - protein, 15 aa, Artificial Sequence
  Description of Artificial Sequence: Synthetic peptide
  Seed: RMCSLMQGSTLPRRS
RMFSLTQSSTIPRRS

SEQ ID NO: 124207 - protein, 15 aa, Artificial Sequence
  Description of Artificial Sequence: Synthetic peptide
  Seed: RMCSLMQGSTLPRRS
RMFSLTQSSTLPRRS

SEQ ID NO: 124208 - protein, 15 aa, Artificial Sequence
  Description of Artificial Sequence: Synthetic peptide
  Seed: RMCSLMQGSTLPRRS
RMFSLTQSSTMPRRS

SEQ ID NO: 124209 - protein, 15 aa, Artificial Sequence
  Description of Artificial Sequence: Synthetic peptide
  Seed: RMCSLMQGSTLPRRS
RMFSLTQSSTNPRRS

SEQ ID NO: 124210 - protein, 15 aa, Artificial Sequence
  Description of Artificial Sequence: Synthetic peptide
  Seed: RMCSLMQGSTLPRRS
RMFSLTQSSTSPRRS

SEQ ID NO: 124211 - protein, 15 aa, Artificial Sequence
  Description of Artificial Sequence: Synthetic peptide
  Seed: RMCSLMQGSTLPRRS
RMFSLTQSSTTPRRS

SEQ ID NO: 124212 - protein, 15 aa, Artificial Sequence
  Description of Artificial Sequence: Synthetic peptide
  Seed: RMCSLMQGSTLPRRS
RMFSLTQSSTVPRRS

SEQ ID NO: 124213 - protein, 15 aa, Artificial Sequence
  Description of Artificial Sequence: Synthetic peptide
  Seed: RMCSLMQGSTLPRRS
RMFSLTQSSTWPRRS

SEQ ID NO: 124214 - protein, 15 aa, Artificial Sequence
  Description of Artificial Sequence: Synthetic peptide
  Seed: RMCSLMQGSTLPRRS
RMFSLTQSSTYPRRS

SEQ ID NO: 124215 - protein, 15 aa, Artificial Sequence
  Description of Artificial Sequence: Synthetic peptide
  Seed: RMCSLMQGSTLPRRS
RMFSLTQTSTAPRRS

SEQ ID NO: 124216 - protein, 15 aa, Artificial Sequence
  Description of Artificial Sequence: Synthetic peptide
  Seed: RMCSLMQGSTLPRRS
RMFSLTQTSTFPRRS

SEQ ID NO: 124217 - protein, 15 aa, Artificial Sequence
  Description of Artificial Sequence: Synthetic peptide
  Seed: RMCSLMQGSTLPRRS
RMFSLTQTSTIPRRS

SEQ ID NO: 124218 - protein, 15 aa, Artificial Sequence
  Description of Artificial Sequence: Synthetic peptide
  Seed: RMCSLMQGSTLPRRS
RMFSLTQTSTLPRRS

SEQ ID NO: 124219 - protein, 15 aa, Artificial Sequence
  Description of Artificial Sequence: Synthetic peptide
  Seed: RMCSLMQGSTLPRRS
RMFSLTQTSTMPRRS

SEQ ID NO: 124220 - protein, 15 aa, Artificial Sequence
  Description of Artificial Sequence: Synthetic peptide
  Seed: RMCSLMQGSTLPRRS
RMFSLTQTSTNPRRS

SEQ ID NO: 124221 - protein, 15 aa, Artificial Sequence
  Description of Artificial Sequence: Synthetic peptide
  Seed: RMCSLMQGSTLPRRS
RMFSLTQTSTSPRRS

SEQ ID NO: 124222 - protein, 15 aa, Artificial Sequence
  Description of Artificial Sequence: Synthetic peptide
  Seed: RMCSLMQGSTLPRRS
RMFSLTQTSTVPRRS

SEQ ID NO: 124223 - protein, 15 aa, Artificial Sequence
  Description of Artificial Sequence: Synthetic peptide
  Seed: RMCSLMQGSTLPRRS
RMFSLTQVSTAPRRS

SEQ ID NO: 124224 - protein, 15 aa, Artificial Sequence
  Description of Artificial Sequence: Synthetic peptide
  Seed: RMCSLMQGSTLPRRS
RMFSLTQVSTFPRRS

SEQ ID NO: 124225 - protein, 15 aa, Artificial Sequence
  Description of Artificial Sequence: Synthetic peptide
  Seed: RMCSLMQGSTLPRRS
RMFSLTQVSTIPRRS

SEQ ID NO: 124226 - protein, 15 aa, Artificial Sequence
  Description of Artificial Sequence: Synthetic peptide
  Seed: RMCSLMQGSTLPRRS
RMFSLTQVSTLPRRS

SEQ ID NO: 124227 - protein, 15 aa, Artificial Sequence
  Description of Artificial Sequence: Synthetic peptide
  Seed: RMCSLMQGSTLPRRS
RMFSLTQVSTMPRRS

SEQ ID NO: 124228 - protein, 15 aa, Artificial Sequence
  Description of Artificial Sequence: Synthetic peptide
  Seed: RMCSLMQGSTLPRRS
RMFSLTQVSTNPRRS

SEQ ID NO: 124229 - protein, 15 aa, Artificial Sequence
  Description of Artificial Sequence: Synthetic peptide
  Seed: RMCSLMQGSTLPRRS
RMFSLTQVSTSPRRS

SEQ ID NO: 124230 - protein, 15 aa, Artificial Sequence
  Description of Artificial Sequence: Synthetic peptide
  Seed: RMCSLMQGSTLPRRS
RMFSLTQVSTVPRRS

SEQ ID NO: 124231 - protein, 15 aa, Artificial Sequence
  Description of Artificial Sequence: Synthetic peptide
  Seed: RMCSLMQGSTLPRRS
RMFSLVQASTAPRRS

SEQ ID NO: 124232 - protein, 15 aa, Artificial Sequence
  Description of Artificial Sequence: Synthetic peptide
  Seed: RMCSLMQGSTLPRRS
RMFSLVQASTCPRRS

SEQ ID NO: 124233 - protein, 15 aa, Artificial Sequence
  Description of Artificial Sequence: Synthetic peptide
  Seed: RMCSLMQGSTLPRRS
RMFSLVQASTDPRRS

SEQ ID NO: 124234 - protein, 15 aa, Artificial Sequence
  Description of Artificial Sequence: Synthetic peptide
  Seed: RMCSLMQGSTLPRRS
RMFSLVQASTEPRRS

SEQ ID NO: 124235 - protein, 15 aa, Artificial Sequence
  Description of Artificial Sequence: Synthetic peptide
  Seed: RMCSLMQGSTLPRRS
RMFSLVQASTFPRRS

SEQ ID NO: 124236 - protein, 15 aa, Artificial Sequence
  Description of Artificial Sequence: Synthetic peptide
  Seed: RMCSLMQGSTLPRRS
RMFSLVQASTGPRRS

SEQ ID NO: 124237 - protein, 15 aa, Artificial Sequence
  Description of Artificial Sequence: Synthetic peptide
  Seed: RMCSLMQGSTLPRRS
RMFSLVQASTHPRRS

SEQ ID NO: 124238 - protein, 15 aa, Artificial Sequence
  Description of Artificial Sequence: Synthetic peptide
  Seed: RMCSLMQGSTLPRRS
RMFSLVQASTIPRRS

SEQ ID NO: 124239 - protein, 15 aa, Artificial Sequence
  Description of Artificial Sequence: Synthetic peptide
  Seed: RMCSLMQGSTLPRRS
RMFSLVQASTKPRRS

SEQ ID NO: 124240 - protein, 15 aa, Artificial Sequence
  Description of Artificial Sequence: Synthetic peptide
  Seed: RMCSLMQGSTLPRRS
RMFSLVQASTLPRRS

SEQ ID NO: 124241 - protein, 15 aa, Artificial Sequence
  Description of Artificial Sequence: Synthetic peptide
  Seed: RMCSLMQGSTLPRRS
RMFSLVQASTMPRRS

SEQ ID NO: 124242 - protein, 15 aa, Artificial Sequence
  Description of Artificial Sequence: Synthetic peptide
  Seed: RMCSLMQGSTLPRRS
RMFSLVQASTNPRRS

SEQ ID NO: 124243 - protein, 15 aa, Artificial Sequence
  Description of Artificial Sequence: Synthetic peptide
  Seed: RMCSLMQGSTLPRRS
RMFSLVQASTPPRRS

SEQ ID NO: 124244 - protein, 15 aa, Artificial Sequence
  Description of Artificial Sequence: Synthetic peptide
  Seed: RMCSLMQGSTLPRRS
RMFSLVQASTQPRRS

SEQ ID NO: 124245 - protein, 15 aa, Artificial Sequence
  Description of Artificial Sequence: Synthetic peptide
  Seed: RMCSLMQGSTLPRRS
RMFSLVQASTRPRRS

SEQ ID NO: 124246 - protein, 15 aa, Artificial Sequence
  Description of Artificial Sequence: Synthetic peptide
  Seed: RMCSLMQGSTLPRRS
RMFSLVQASTSPRRS

SEQ ID NO: 124247 - protein, 15 aa, Artificial Sequence
  Description of Artificial Sequence: Synthetic peptide
  Seed: RMCSLMQGSTLPRRS
RMFSLVQASTTPRRS

SEQ ID NO: 124248 - protein, 15 aa, Artificial Sequence
  Description of Artificial Sequence: Synthetic peptide
  Seed: RMCSLMQGSTLPRRS
RMFSLVQASTVPRRS

SEQ ID NO: 124249 - protein, 15 aa, Artificial Sequence
  Description of Artificial Sequence: Synthetic peptide
  Seed: RMCSLMQGSTLPRRS
RMFSLVQASTWPRRS

SEQ ID NO: 124250 - protein, 15 aa, Artificial Sequence
  Description of Artificial Sequence: Synthetic peptide
  Seed: RMCSLMQGSTLPRRS
RMFSLVQASTYPRRS

SEQ ID NO: 124251 - protein, 15 aa, Artificial Sequence
  Description of Artificial Sequence: Synthetic peptide
  Seed: RMCSLMQGSTLPRRS
RMFSLVQGSTAPRRS

SEQ ID NO: 124252 - protein, 15 aa, Artificial Sequence
  Description of Artificial Sequence: Synthetic peptide
  Seed: RMCSLMQGSTLPRRS
RMFSLVQGSTCPRRS

SEQ ID NO: 124253 - protein, 15 aa, Artificial Sequence
  Description of Artificial Sequence: Synthetic peptide
  Seed: RMCSLMQGSTLPRRS
RMFSLVQGSTFPRRS

SEQ ID NO: 124254 - protein, 15 aa, Artificial Sequence
  Description of Artificial Sequence: Synthetic peptide
  Seed: RMCSLMQGSTLPRRS
RMFSLVQGSTGPRRS

SEQ ID NO: 124255 - protein, 15 aa, Artificial Sequence
  Description of Artificial Sequence: Synthetic peptide
  Seed: RMCSLMQGSTLPRRS
RMFSLVQGSTIPRRS

SEQ ID NO: 124256 - protein, 15 aa, Artificial Sequence
  Description of Artificial Sequence: Synthetic peptide
  Seed: RMCSLMQGSTLPRRS
RMFSLVQGSTLPRRS

SEQ ID NO: 124257 - protein, 15 aa, Artificial Sequence
  Description of Artificial Sequence: Synthetic peptide
  Seed: RMCSLMQGSTLPRRS
RMFSLVQGSTMPRRS

SEQ ID NO: 124258 - protein, 15 aa, Artificial Sequence
  Description of Artificial Sequence: Synthetic peptide
  Seed: RMCSLMQGSTLPRRS
RMFSLVQGSTNPRRS

SEQ ID NO: 124259 - protein, 15 aa, Artificial Sequence
  Description of Artificial Sequence: Synthetic peptide
  Seed: RMCSLMQGSTLPRRS
RMFSLVQGSTQPRRS

SEQ ID NO: 124260 - protein, 15 aa, Artificial Sequence
  Description of Artificial Sequence: Synthetic peptide
  Seed: RMCSLMQGSTLPRRS
RMFSLVQGSTSPRRS

SEQ ID NO: 124261 - protein, 15 aa, Artificial Sequence
  Description of Artificial Sequence: Synthetic peptide
  Seed: RMCSLMQGSTLPRRS
RMFSLVQGSTTPRRS

SEQ ID NO: 124262 - protein, 15 aa, Artificial Sequence
  Description of Artificial Sequence: Synthetic peptide
  Seed: RMCSLMQGSTLPRRS
RMFSLVQGSTVPRRS

SEQ ID NO: 124263 - protein, 15 aa, Artificial Sequence
  Description of Artificial Sequence: Synthetic peptide
  Seed: RMCSLMQGSTLPRRS
RMFSLVQGSTYPRRS

SEQ ID NO: 124264 - protein, 15 aa, Artificial Sequence
  Description of Artificial Sequence: Synthetic peptide
  Seed: RMCSLMQGSTLPRRS
RMFSLVQHSTAPRRS

SEQ ID NO: 124265 - protein, 15 aa, Artificial Sequence
  Description of Artificial Sequence: Synthetic peptide
  Seed: RMCSLMQGSTLPRRS
RMFSLVQHSTIPRRS

SEQ ID NO: 124266 - protein, 15 aa, Artificial Sequence
  Description of Artificial Sequence: Synthetic peptide
  Seed: RMCSLMQGSTLPRRS
RMFSLVQHSTLPRRS

SEQ ID NO: 124267 - protein, 15 aa, Artificial Sequence
  Description of Artificial Sequence: Synthetic peptide
  Seed: RMCSLMQGSTLPRRS
RMFSLVQHSTVPRRS

SEQ ID NO: 124268 - protein, 15 aa, Artificial Sequence
  Description of Artificial Sequence: Synthetic peptide
  Seed: RMCSLMQGSTLPRRS
RMFSLVQISTAPRRS

SEQ ID NO: 124269 - protein, 15 aa, Artificial Sequence
  Description of Artificial Sequence: Synthetic peptide
  Seed: RMCSLMQGSTLPRRS
RMFSLVQISTGPRRS

SEQ ID NO: 124270 - protein, 15 aa, Artificial Sequence
  Description of Artificial Sequence: Synthetic peptide
  Seed: RMCSLMQGSTLPRRS
RMFSLVQISTHPRRS

SEQ ID NO: 124271 - protein, 15 aa, Artificial Sequence
  Description of Artificial Sequence: Synthetic peptide
  Seed: RMCSLMQGSTLPRRS
RMFSLVQISTIPRRS

SEQ ID NO: 124272 - protein, 15 aa, Artificial Sequence
  Description of Artificial Sequence: Synthetic peptide
  Seed: RMCSLMQGSTLPRRS
RMFSLVQISTLPRRS

SEQ ID NO: 124273 - protein, 15 aa, Artificial Sequence
  Description of Artificial Sequence: Synthetic peptide
  Seed: RMCSLMQGSTLPRRS
RMFSLVQISTMPRRS

SEQ ID NO: 124274 - protein, 15 aa, Artificial Sequence
  Description of Artificial Sequence: Synthetic peptide
  Seed: RMCSLMQGSTLPRRS
RMFSLVQISTNPRRS

SEQ ID NO: 124275 - protein, 15 aa, Artificial Sequence
  Description of Artificial Sequence: Synthetic peptide
  Seed: RMCSLMQGSTLPRRS
RMFSLVQISTSPRRS

SEQ ID NO: 124276 - protein, 15 aa, Artificial Sequence
  Description of Artificial Sequence: Synthetic peptide
  Seed: RMCSLMQGSTLPRRS
RMFSLVQISTTPRRS

SEQ ID NO: 124277 - protein, 15 aa, Artificial Sequence
  Description of Artificial Sequence: Synthetic peptide
  Seed: RMCSLMQGSTLPRRS
RMFSLVQISTVPRRS

SEQ ID NO: 124278 - protein, 15 aa, Artificial Sequence
  Description of Artificial Sequence: Synthetic peptide
  Seed: RMCSLMQGSTLPRRS
RMFSLVQLSTAPRRS

SEQ ID NO: 124279 - protein, 15 aa, Artificial Sequence
  Description of Artificial Sequence: Synthetic peptide
  Seed: RMCSLMQGSTLPRRS
RMFSLVQLSTNPRRS

SEQ ID NO: 124280 - protein, 15 aa, Artificial Sequence
  Description of Artificial Sequence: Synthetic peptide
  Seed: RMCSLMQGSTLPRRS
RMFSLVQLSTSPRRS

SEQ ID NO: 124281 - protein, 15 aa, Artificial Sequence
  Description of Artificial Sequence: Synthetic peptide
  Seed: RMCSLMQGSTLPRRS
RMFSLVQLSTTPRRS

SEQ ID NO: 124282 - protein, 15 aa, Artificial Sequence
  Description of Artificial Sequence: Synthetic peptide
  Seed: RMCSLMQGSTLPRRS
RMFSLVQMSTAPRRS

SEQ ID NO: 124283 - protein, 15 aa, Artificial Sequence
  Description of Artificial Sequence: Synthetic peptide
  Seed: RMCSLMQGSTLPRRS
RMFSLVQMSTNPRRS

SEQ ID NO: 124284 - protein, 15 aa, Artificial Sequence
  Description of Artificial Sequence: Synthetic peptide
  Seed: RMCSLMQGSTLPRRS
RMFSLVQMSTSPRRS

SEQ ID NO: 124285 - protein, 15 aa, Artificial Sequence
  Description of Artificial Sequence: Synthetic peptide
  Seed: RMCSLMQGSTLPRRS
RMFSLVQMSTTPRRS

SEQ ID NO: 124286 - protein, 15 aa, Artificial Sequence
  Description of Artificial Sequence: Synthetic peptide
  Seed: RMCSLMQGSTLPRRS
RMFSLVQNSTAPRRS

SEQ ID NO: 124287 - protein, 15 aa, Artificial Sequence
  Description of Artificial Sequence: Synthetic peptide
  Seed: RMCSLMQGSTLPRRS
RMFSLVQNSTGPRRS

SEQ ID NO: 124288 - protein, 15 aa, Artificial Sequence
  Description of Artificial Sequence: Synthetic peptide
  Seed: RMCSLMQGSTLPRRS
RMFSLVQNSTIPRRS

SEQ ID NO: 124289 - protein, 15 aa, Artificial Sequence
  Description of Artificial Sequence: Synthetic peptide
  Seed: RMCSLMQGSTLPRRS
RMFSLVQNSTLPRRS

SEQ ID NO: 124290 - protein, 15 aa, Artificial Sequence
  Description of Artificial Sequence: Synthetic peptide
  Seed: RMCSLMQGSTLPRRS
RMFSLVQNSTMPRRS

SEQ ID NO: 124291 - protein, 15 aa, Artificial Sequence
  Description of Artificial Sequence: Synthetic peptide
  Seed: RMCSLMQGSTLPRRS
RMFSLVQNSTNPRRS

SEQ ID NO: 124292 - protein, 15 aa, Artificial Sequence
  Description of Artificial Sequence: Synthetic peptide
  Seed: RMCSLMQGSTLPRRS
RMFSLVQNSTSPRRS

SEQ ID NO: 124293 - protein, 15 aa, Artificial Sequence
  Description of Artificial Sequence: Synthetic peptide
  Seed: RMCSLMQGSTLPRRS
RMFSLVQNSTTPRRS

SEQ ID NO: 124294 - protein, 15 aa, Artificial Sequence
  Description of Artificial Sequence: Synthetic peptide
  Seed: RMCSLMQGSTLPRRS
RMFSLVQNSTVPRRS

SEQ ID NO: 124295 - protein, 15 aa, Artificial Sequence
  Description of Artificial Sequence: Synthetic peptide
  Seed: RMCSLMQGSTLPRRS
RMFSLVQPSTAPRRS

SEQ ID NO: 124296 - protein, 15 aa, Artificial Sequence
  Description of Artificial Sequence: Synthetic peptide
  Seed: RMCSLMQGSTLPRRS
RMFSLVQPSTCPRRS

SEQ ID NO: 124297 - protein, 15 aa, Artificial Sequence
  Description of Artificial Sequence: Synthetic peptide
  Seed: RMCSLMQGSTLPRRS
RMFSLVQPSTDPRRS

SEQ ID NO: 124298 - protein, 15 aa, Artificial Sequence
  Description of Artificial Sequence: Synthetic peptide
  Seed: RMCSLMQGSTLPRRS
RMFSLVQPSTFPRRS

SEQ ID NO: 124299 - protein, 15 aa, Artificial Sequence
  Description of Artificial Sequence: Synthetic peptide
  Seed: RMCSLMQGSTLPRRS
RMFSLVQPSTGPRRS

SEQ ID NO: 124300 - protein, 15 aa, Artificial Sequence
  Description of Artificial Sequence: Synthetic peptide
  Seed: RMCSLMQGSTLPRRS
RMFSLVQPSTHPRRS

SEQ ID NO: 124301 - protein, 15 aa, Artificial Sequence
  Description of Artificial Sequence: Synthetic peptide
  Seed: RMCSLMQGSTLPRRS
RMFSLVQPSTIPRRS

SEQ ID NO: 124302 - protein, 15 aa, Artificial Sequence
  Description of Artificial Sequence: Synthetic peptide
  Seed: RMCSLMQGSTLPRRS
RMFSLVQPSTLPRRS

SEQ ID NO: 124303 - protein, 15 aa, Artificial Sequence
  Description of Artificial Sequence: Synthetic peptide
  Seed: RMCSLMQGSTLPRRS
RMFSLVQPSTMPRRS

SEQ ID NO: 124304 - protein, 15 aa, Artificial Sequence
  Description of Artificial Sequence: Synthetic peptide
  Seed: RMCSLMQGSTLPRRS
RMFSLVQPSTNPRRS

SEQ ID NO: 124305 - protein, 15 aa, Artificial Sequence
  Description of Artificial Sequence: Synthetic peptide
  Seed: RMCSLMQGSTLPRRS
RMFSLVQPSTPPRRS

SEQ ID NO: 124306 - protein, 15 aa, Artificial Sequence
  Description of Artificial Sequence: Synthetic peptide
  Seed: RMCSLMQGSTLPRRS
RMFSLVQPSTQPRRS

SEQ ID NO: 124307 - protein, 15 aa, Artificial Sequence
  Description of Artificial Sequence: Synthetic peptide
  Seed: RMCSLMQGSTLPRRS
RMFSLVQPSTSPRRS

SEQ ID NO: 124308 - protein, 15 aa, Artificial Sequence
  Description of Artificial Sequence: Synthetic peptide
  Seed: RMCSLMQGSTLPRRS
RMFSLVQPSTTPRRS

SEQ ID NO: 124309 - protein, 15 aa, Artificial Sequence
  Description of Artificial Sequence: Synthetic peptide
  Seed: RMCSLMQGSTLPRRS
RMFSLVQPSTVPRRS

SEQ ID NO: 124310 - protein, 15 aa, Artificial Sequence
  Description of Artificial Sequence: Synthetic peptide
  Seed: RMCSLMQGSTLPRRS
RMFSLVQQSTLPRRS

SEQ ID NO: 124311 - protein, 15 aa, Artificial Sequence
  Description of Artificial Sequence: Synthetic peptide
  Seed: RMCSLMQGSTLPRRS
RMFSLVQSSTAPRRS

SEQ ID NO: 124312 - protein, 15 aa, Artificial Sequence
  Description of Artificial Sequence: Synthetic peptide
  Seed: RMCSLMQGSTLPRRS
RMFSLVQSSTCPRRS

SEQ ID NO: 124313 - protein, 15 aa, Artificial Sequence
  Description of Artificial Sequence: Synthetic peptide
  Seed: RMCSLMQGSTLPRRS
RMFSLVQSSTFPRRS

SEQ ID NO: 124314 - protein, 15 aa, Artificial Sequence
  Description of Artificial Sequence: Synthetic peptide
  Seed: RMCSLMQGSTLPRRS
RMFSLVQSSTGPRRS

SEQ ID NO: 124315 - protein, 15 aa, Artificial Sequence
  Description of Artificial Sequence: Synthetic peptide
  Seed: RMCSLMQGSTLPRRS
RMFSLVQSSTHPRRS

SEQ ID NO: 124316 - protein, 15 aa, Artificial Sequence
  Description of Artificial Sequence: Synthetic peptide
  Seed: RMCSLMQGSTLPRRS
RMFSLVQSSTIPRRS

SEQ ID NO: 124317 - protein, 15 aa, Artificial Sequence
  Description of Artificial Sequence: Synthetic peptide
  Seed: RMCSLMQGSTLPRRS
RMFSLVQSSTLPRRS

SEQ ID NO: 124318 - protein, 15 aa, Artificial Sequence
  Description of Artificial Sequence: Synthetic peptide
  Seed: RMCSLMQGSTLPRRS
RMFSLVQSSTMPRRS

SEQ ID NO: 124319 - protein, 15 aa, Artificial Sequence
  Description of Artificial Sequence: Synthetic peptide
  Seed: RMCSLMQGSTLPRRS
RMFSLVQSSTNPRRS

SEQ ID NO: 124320 - protein, 15 aa, Artificial Sequence
  Description of Artificial Sequence: Synthetic peptide
  Seed: RMCSLMQGSTLPRRS
RMFSLVQSSTQPRRS

SEQ ID NO: 124321 - protein, 15 aa, Artificial Sequence
  Description of Artificial Sequence: Synthetic peptide
  Seed: RMCSLMQGSTLPRRS
RMFSLVQSSTSPRRS

SEQ ID NO: 124322 - protein, 15 aa, Artificial Sequence
  Description of Artificial Sequence: Synthetic peptide
  Seed: RMCSLMQGSTLPRRS
RMFSLVQSSTTPRRS

SEQ ID NO: 124323 - protein, 15 aa, Artificial Sequence
  Description of Artificial Sequence: Synthetic peptide
  Seed: RMCSLMQGSTLPRRS
RMFSLVQSSTVPRRS

SEQ ID NO: 124324 - protein, 15 aa, Artificial Sequence
  Description of Artificial Sequence: Synthetic peptide
  Seed: RMCSLMQGSTLPRRS
RMFSLVQSSTYPRRS

SEQ ID NO: 124325 - protein, 15 aa, Artificial Sequence
  Description of Artificial Sequence: Synthetic peptide
  Seed: RMCSLMQGSTLPRRS
RMFSLVQTSTAPRRS

SEQ ID NO: 124326 - protein, 15 aa, Artificial Sequence
  Description of Artificial Sequence: Synthetic peptide
  Seed: RMCSLMQGSTLPRRS
RMFSLVQTSTFPRRS

SEQ ID NO: 124327 - protein, 15 aa, Artificial Sequence
  Description of Artificial Sequence: Synthetic peptide
  Seed: RMCSLMQGSTLPRRS
RMFSLVQTSTGPRRS

SEQ ID NO: 124328 - protein, 15 aa, Artificial Sequence
  Description of Artificial Sequence: Synthetic peptide
  Seed: RMCSLMQGSTLPRRS
RMFSLVQTSTHPRRS

SEQ ID NO: 124329 - protein, 15 aa, Artificial Sequence
  Description of Artificial Sequence: Synthetic peptide
  Seed: RMCSLMQGSTLPRRS
RMFSLVQTSTIPRRS

SEQ ID NO: 124330 - protein, 15 aa, Artificial Sequence
  Description of Artificial Sequence: Synthetic peptide
  Seed: RMCSLMQGSTLPRRS
RMFSLVQTSTLPRRS

SEQ ID NO: 124331 - protein, 15 aa, Artificial Sequence
  Description of Artificial Sequence: Synthetic peptide
  Seed: RMCSLMQGSTLPRRS
RMFSLVQTSTMPRRS

SEQ ID NO: 124332 - protein, 15 aa, Artificial Sequence
  Description of Artificial Sequence: Synthetic peptide
  Seed: RMCSLMQGSTLPRRS
RMFSLVQTSTNPRRS

SEQ ID NO: 124333 - protein, 15 aa, Artificial Sequence
  Description of Artificial Sequence: Synthetic peptide
  Seed: RMCSLMQGSTLPRRS
RMFSLVQTSTQPRRS

SEQ ID NO: 124334 - protein, 15 aa, Artificial Sequence
  Description of Artificial Sequence: Synthetic peptide
  Seed: RMCSLMQGSTLPRRS
RMFSLVQTSTSPRRS

SEQ ID NO: 124335 - protein, 15 aa, Artificial Sequence
  Description of Artificial Sequence: Synthetic peptide
  Seed: RMCSLMQGSTLPRRS
RMFSLVQTSTTPRRS

SEQ ID NO: 124336 - protein, 15 aa, Artificial Sequence
  Description of Artificial Sequence: Synthetic peptide
  Seed: RMCSLMQGSTLPRRS
RMFSLVQTSTVPRRS

SEQ ID NO: 124337 - protein, 15 aa, Artificial Sequence
  Description of Artificial Sequence: Synthetic peptide
  Seed: RMCSLMQGSTLPRRS
RMFSLVQVSTAPRRS

SEQ ID NO: 124338 - protein, 15 aa, Artificial Sequence
  Description of Artificial Sequence: Synthetic peptide
  Seed: RMCSLMQGSTLPRRS
RMFSLVQVSTGPRRS

SEQ ID NO: 124339 - protein, 15 aa, Artificial Sequence
  Description of Artificial Sequence: Synthetic peptide
  Seed: RMCSLMQGSTLPRRS
RMFSLVQVSTHPRRS

SEQ ID NO: 124340 - protein, 15 aa, Artificial Sequence
  Description of Artificial Sequence: Synthetic peptide
  Seed: RMCSLMQGSTLPRRS
RMFSLVQVSTIPRRS

SEQ ID NO: 124341 - protein, 15 aa, Artificial Sequence
  Description of Artificial Sequence: Synthetic peptide
  Seed: RMCSLMQGSTLPRRS
RMFSLVQVSTLPRRS

SEQ ID NO: 124342 - protein, 15 aa, Artificial Sequence
  Description of Artificial Sequence: Synthetic peptide
  Seed: RMCSLMQGSTLPRRS
RMFSLVQVSTMPRRS

SEQ ID NO: 124343 - protein, 15 aa, Artificial Sequence
  Description of Artificial Sequence: Synthetic peptide
  Seed: RMCSLMQGSTLPRRS
RMFSLVQVSTNPRRS

SEQ ID NO: 124344 - protein, 15 aa, Artificial Sequence
  Description of Artificial Sequence: Synthetic peptide
  Seed: RMCSLMQGSTLPRRS
RMFSLVQVSTQPRRS

SEQ ID NO: 124345 - protein, 15 aa, Artificial Sequence
  Description of Artificial Sequence: Synthetic peptide
  Seed: RMCSLMQGSTLPRRS
RMFSLVQVSTSPRRS

SEQ ID NO: 124346 - protein, 15 aa, Artificial Sequence
  Description of Artificial Sequence: Synthetic peptide
  Seed: RMCSLMQGSTLPRRS
RMFSLVQVSTTPRRS

SEQ ID NO: 124347 - protein, 15 aa, Artificial Sequence
  Description of Artificial Sequence: Synthetic peptide
  Seed: RMCSLMQGSTLPRRS
RMFSLVQVSTVPRRS

SEQ ID NO: 124348 - protein, 15 aa, Artificial Sequence
  Description of Artificial Sequence: Synthetic peptide
  Seed: RMCSLMQGSTLPRRS
RMFSLWQASTAPRRS

SEQ ID NO: 124349 - protein, 15 aa, Artificial Sequence
  Description of Artificial Sequence: Synthetic peptide
  Seed: RMCSLMQGSTLPRRS
RMFSLWQASTIPRRS

SEQ ID NO: 124350 - protein, 15 aa, Artificial Sequence
  Description of Artificial Sequence: Synthetic peptide
  Seed: RMCSLMQGSTLPRRS
RMFSLWQASTLPRRS

SEQ ID NO: 124351 - protein, 15 aa, Artificial Sequence
  Description of Artificial Sequence: Synthetic peptide
  Seed: RMCSLMQGSTLPRRS
RMFSLWQASTMPRRS

SEQ ID NO: 124352 - protein, 15 aa, Artificial Sequence
  Description of Artificial Sequence: Synthetic peptide
  Seed: RMCSLMQGSTLPRRS
RMFSLWQASTSPRRS

SEQ ID NO: 124353 - protein, 15 aa, Artificial Sequence
  Description of Artificial Sequence: Synthetic peptide
  Seed: RMCSLMQGSTLPRRS
RMFSLWQASTVPRRS

SEQ ID NO: 124354 - protein, 15 aa, Artificial Sequence
  Description of Artificial Sequence: Synthetic peptide
  Seed: RMCSLMQGSTLPRRS
RMFSLWQGSTAPRRS

SEQ ID NO: 124355 - protein, 15 aa, Artificial Sequence
  Description of Artificial Sequence: Synthetic peptide
  Seed: RMCSLMQGSTLPRRS
RMFSLWQGSTIPRRS

SEQ ID NO: 124356 - protein, 15 aa, Artificial Sequence
  Description of Artificial Sequence: Synthetic peptide
  Seed: RMCSLMQGSTLPRRS
RMFSLWQGSTLPRRS

SEQ ID NO: 124357 - protein, 15 aa, Artificial Sequence
  Description of Artificial Sequence: Synthetic peptide
  Seed: RMCSLMQGSTLPRRS
RMFSLWQGSTVPRRS

SEQ ID NO: 124358 - protein, 15 aa, Artificial Sequence
  Description of Artificial Sequence: Synthetic peptide
  Seed: RMCSLMQGSTLPRRS
RMFSLWQPSTAPRRS

SEQ ID NO: 124359 - protein, 15 aa, Artificial Sequence
  Description of Artificial Sequence: Synthetic peptide
  Seed: RMCSLMQGSTLPRRS
RMFSLWQPSTVPRRS

SEQ ID NO: 124360 - protein, 15 aa, Artificial Sequence
  Description of Artificial Sequence: Synthetic peptide
  Seed: RMCSLMQGSTLPRRS
RMFSLWQSSTAPRRS

SEQ ID NO: 124361 - protein, 15 aa, Artificial Sequence
  Description of Artificial Sequence: Synthetic peptide
  Seed: RMCSLMQGSTLPRRS
RMFSLWQSSTIPRRS

SEQ ID NO: 124362 - protein, 15 aa, Artificial Sequence
  Description of Artificial Sequence: Synthetic peptide
  Seed: RMCSLMQGSTLPRRS
RMFSLWQSSTLPRRS

SEQ ID NO: 124363 - protein, 15 aa, Artificial Sequence
  Description of Artificial Sequence: Synthetic peptide
  Seed: RMCSLMQGSTLPRRS
RMFSLWQSSTVPRRS

SEQ ID NO: 124364 - protein, 15 aa, Artificial Sequence
  Description of Artificial Sequence: Synthetic peptide
  Seed: RMCSLMQGSTLPRRS
RMFSLWQVSTAPRRS

SEQ ID NO: 124365 - protein, 15 aa, Artificial Sequence
  Description of Artificial Sequence: Synthetic peptide
  Seed: RMCSLMQGSTLPRRS
RMFSLYQASTAPRRS

SEQ ID NO: 124366 - protein, 15 aa, Artificial Sequence
  Description of Artificial Sequence: Synthetic peptide
  Seed: RMCSLMQGSTLPRRS
RMFSLYQASTIPRRS

SEQ ID NO: 124367 - protein, 15 aa, Artificial Sequence
  Description of Artificial Sequence: Synthetic peptide
  Seed: RMCSLMQGSTLPRRS
RMFSLYQASTLPRRS

SEQ ID NO: 124368 - protein, 15 aa, Artificial Sequence
  Description of Artificial Sequence: Synthetic peptide
  Seed: RMCSLMQGSTLPRRS
RMFSLYQASTMPRRS

SEQ ID NO: 124369 - protein, 15 aa, Artificial Sequence
  Description of Artificial Sequence: Synthetic peptide
  Seed: RMCSLMQGSTLPRRS
RMFSLYQASTSPRRS

SEQ ID NO: 124370 - protein, 15 aa, Artificial Sequence
  Description of Artificial Sequence: Synthetic peptide
  Seed: RMCSLMQGSTLPRRS
RMFSLYQASTVPRRS

SEQ ID NO: 124371 - protein, 15 aa, Artificial Sequence
  Description of Artificial Sequence: Synthetic peptide
  Seed: RMCSLMQGSTLPRRS
RMFSLYQGSTAPRRS

SEQ ID NO: 124372 - protein, 15 aa, Artificial Sequence
  Description of Artificial Sequence: Synthetic peptide
  Seed: RMCSLMQGSTLPRRS
RMFSLYQSSTAPRRS

SEQ ID NO: 124373 - protein, 15 aa, Artificial Sequence
  Description of Artificial Sequence: Synthetic peptide
  Seed: RMCSLMQGSTLPRRS
RMFSLYQSSTLPRRS

SEQ ID NO: 124374 - protein, 15 aa, Artificial Sequence
  Description of Artificial Sequence: Synthetic peptide
  Seed: RMCSLMQGSTLPRRS
RMFSLYQSSTVPRRS

SEQ ID NO: 124375 - protein, 15 aa, Artificial Sequence
  Description of Artificial Sequence: Synthetic peptide
  Seed: RMCSLMQGSTLPRRS
RMHSLLQASTIPRRS

SEQ ID NO: 124376 - protein, 15 aa, Artificial Sequence
  Description of Artificial Sequence: Synthetic peptide
  Seed: RMCSLMQGSTLPRRS
RMHSLLQASTLPRRS

SEQ ID NO: 124377 - protein, 15 aa, Artificial Sequence
  Description of Artificial Sequence: Synthetic peptide
  Seed: RMCSLMQGSTLPRRS
RMHSLLQASTVPRRS

SEQ ID NO: 124378 - protein, 15 aa, Artificial Sequence
  Description of Artificial Sequence: Synthetic peptide
  Seed: RMCSLMQGSTLPRRS
RMHSLMQASTLPRRS

SEQ ID NO: 124379 - protein, 15 aa, Artificial Sequence
  Description of Artificial Sequence: Synthetic peptide
  Seed: RMCSLMQGSTLPRRS
RMHSLMQASTVPRRS

SEQ ID NO: 124380 - protein, 15 aa, Artificial Sequence
  Description of Artificial Sequence: Synthetic peptide
  Seed: RMCSLMQGSTLPRRS
RMISLAQASTAPRRS

SEQ ID NO: 124381 - protein, 15 aa, Artificial Sequence
  Description of Artificial Sequence: Synthetic peptide
  Seed: RMCSLMQGSTLPRRS
RMISLAQASTCPRRS

SEQ ID NO: 124382 - protein, 15 aa, Artificial Sequence
  Description of Artificial Sequence: Synthetic peptide
  Seed: RMCSLMQGSTLPRRS
RMISLAQASTFPRRS

SEQ ID NO: 124383 - protein, 15 aa, Artificial Sequence
  Description of Artificial Sequence: Synthetic peptide
  Seed: RMCSLMQGSTLPRRS
RMISLAQASTGPRRS

SEQ ID NO: 124384 - protein, 15 aa, Artificial Sequence
  Description of Artificial Sequence: Synthetic peptide
  Seed: RMCSLMQGSTLPRRS
RMISLAQASTIPRRS

SEQ ID NO: 124385 - protein, 15 aa, Artificial Sequence
  Description of Artificial Sequence: Synthetic peptide
  Seed: RMCSLMQGSTLPRRS
RMISLAQASTLPRRS

SEQ ID NO: 124386 - protein, 15 aa, Artificial Sequence
  Description of Artificial Sequence: Synthetic peptide
  Seed: RMCSLMQGSTLPRRS
RMISLAQASTMPRRS

SEQ ID NO: 124387 - protein, 15 aa, Artificial Sequence
  Description of Artificial Sequence: Synthetic peptide
  Seed: RMCSLMQGSTLPRRS
RMISLAQASTNPRRS

SEQ ID NO: 124388 - protein, 15 aa, Artificial Sequence
  Description of Artificial Sequence: Synthetic peptide
  Seed: RMCSLMQGSTLPRRS
RMISLAQASTSPRRS

SEQ ID NO: 124389 - protein, 15 aa, Artificial Sequence
  Description of Artificial Sequence: Synthetic peptide
  Seed: RMCSLMQGSTLPRRS
RMISLAQASTTPRRS

SEQ ID NO: 124390 - protein, 15 aa, Artificial Sequence
  Description of Artificial Sequence: Synthetic peptide
  Seed: RMCSLMQGSTLPRRS
RMISLAQASTVPRRS

SEQ ID NO: 124391 - protein, 15 aa, Artificial Sequence
  Description of Artificial Sequence: Synthetic peptide
  Seed: RMCSLMQGSTLPRRS
RMISLAQGSTAPRRS

SEQ ID NO: 124392 - protein, 15 aa, Artificial Sequence
  Description of Artificial Sequence: Synthetic peptide
  Seed: RMCSLMQGSTLPRRS
RMISLAQGSTIPRRS

SEQ ID NO: 124393 - protein, 15 aa, Artificial Sequence
  Description of Artificial Sequence: Synthetic peptide
  Seed: RMCSLMQGSTLPRRS
RMISLAQGSTLPRRS

SEQ ID NO: 124394 - protein, 15 aa, Artificial Sequence
  Description of Artificial Sequence: Synthetic peptide
  Seed: RMCSLMQGSTLPRRS
RMISLAQGSTMPRRS

SEQ ID NO: 124395 - protein, 15 aa, Artificial Sequence
  Description of Artificial Sequence: Synthetic peptide
  Seed: RMCSLMQGSTLPRRS
RMISLAQGSTSPRRS

SEQ ID NO: 124396 - protein, 15 aa, Artificial Sequence
  Description of Artificial Sequence: Synthetic peptide
  Seed: RMCSLMQGSTLPRRS
RMISLAQGSTTPRRS

SEQ ID NO: 124397 - protein, 15 aa, Artificial Sequence
  Description of Artificial Sequence: Synthetic peptide
  Seed: RMCSLMQGSTLPRRS
RMISLAQGSTVPRRS

SEQ ID NO: 124398 - protein, 15 aa, Artificial Sequence
  Description of Artificial Sequence: Synthetic peptide
  Seed: RMCSLMQGSTLPRRS
RMISLAQNSTAPRRS

SEQ ID NO: 124399 - protein, 15 aa, Artificial Sequence
  Description of Artificial Sequence: Synthetic peptide
  Seed: RMCSLMQGSTLPRRS
RMISLAQNSTIPRRS

SEQ ID NO: 124400 - protein, 15 aa, Artificial Sequence
  Description of Artificial Sequence: Synthetic peptide
  Seed: RMCSLMQGSTLPRRS
RMISLAQNSTLPRRS

SEQ ID NO: 124401 - protein, 15 aa, Artificial Sequence
  Description of Artificial Sequence: Synthetic peptide
  Seed: RMCSLMQGSTLPRRS
RMISLAQNSTVPRRS

SEQ ID NO: 124402 - protein, 15 aa, Artificial Sequence
  Description of Artificial Sequence: Synthetic peptide
  Seed: RMCSLMQGSTLPRRS
RMISLAQPSTAPRRS

SEQ ID NO: 124403 - protein, 15 aa, Artificial Sequence
  Description of Artificial Sequence: Synthetic peptide
  Seed: RMCSLMQGSTLPRRS
RMISLAQPSTIPRRS

SEQ ID NO: 124404 - protein, 15 aa, Artificial Sequence
  Description of Artificial Sequence: Synthetic peptide
  Seed: RMCSLMQGSTLPRRS
RMISLAQPSTLPRRS

SEQ ID NO: 124405 - protein, 15 aa, Artificial Sequence
  Description of Artificial Sequence: Synthetic peptide
  Seed: RMCSLMQGSTLPRRS
RMISLAQPSTMPRRS

SEQ ID NO: 124406 - protein, 15 aa, Artificial Sequence
  Description of Artificial Sequence: Synthetic peptide
  Seed: RMCSLMQGSTLPRRS
RMISLAQPSTVPRRS

SEQ ID NO: 124407 - protein, 15 aa, Artificial Sequence
  Description of Artificial Sequence: Synthetic peptide
  Seed: RMCSLMQGSTLPRRS
RMISLAQSSTAPRRS

SEQ ID NO: 124408 - protein, 15 aa, Artificial Sequence
  Description of Artificial Sequence: Synthetic peptide
  Seed: RMCSLMQGSTLPRRS
RMISLAQSSTIPRRS

SEQ ID NO: 124409 - protein, 15 aa, Artificial Sequence
  Description of Artificial Sequence: Synthetic peptide
  Seed: RMCSLMQGSTLPRRS
RMISLAQSSTLPRRS

SEQ ID NO: 124410 - protein, 15 aa, Artificial Sequence
  Description of Artificial Sequence: Synthetic peptide
  Seed: RMCSLMQGSTLPRRS
RMISLAQSSTMPRRS

SEQ ID NO: 124411 - protein, 15 aa, Artificial Sequence
  Description of Artificial Sequence: Synthetic peptide
  Seed: RMCSLMQGSTLPRRS
RMISLAQSSTSPRRS

SEQ ID NO: 124412 - protein, 15 aa, Artificial Sequence
  Description of Artificial Sequence: Synthetic peptide
  Seed: RMCSLMQGSTLPRRS
RMISLAQSSTTPRRS

SEQ ID NO: 124413 - protein, 15 aa, Artificial Sequence
  Description of Artificial Sequence: Synthetic peptide
  Seed: RMCSLMQGSTLPRRS
RMISLAQSSTVPRRS

SEQ ID NO: 124414 - protein, 15 aa, Artificial Sequence
  Description of Artificial Sequence: Synthetic peptide
  Seed: RMCSLMQGSTLPRRS
RMISLAQTSTAPRRS

SEQ ID NO: 124415 - protein, 15 aa, Artificial Sequence
  Description of Artificial Sequence: Synthetic peptide
  Seed: RMCSLMQGSTLPRRS
RMISLAQTSTIPRRS

SEQ ID NO: 124416 - protein, 15 aa, Artificial Sequence
  Description of Artificial Sequence: Synthetic peptide
  Seed: RMCSLMQGSTLPRRS
RMISLAQTSTLPRRS

SEQ ID NO: 124417 - protein, 15 aa, Artificial Sequence
  Description of Artificial Sequence: Synthetic peptide
  Seed: RMCSLMQGSTLPRRS
RMISLAQTSTVPRRS

SEQ ID NO: 124418 - protein, 15 aa, Artificial Sequence
  Description of Artificial Sequence: Synthetic peptide
  Seed: RMCSLMQGSTLPRRS
RMISLAQVSTLPRRS

SEQ ID NO: 124419 - protein, 15 aa, Artificial Sequence
  Description of Artificial Sequence: Synthetic peptide
  Seed: RMCSLMQGSTLPRRS
RMISLAQVSTVPRRS

SEQ ID NO: 124420 - protein, 15 aa, Artificial Sequence
  Description of Artificial Sequence: Synthetic peptide
  Seed: RMCSLMQGSTLPRRS
RMISLCQASTIPRRS

SEQ ID NO: 124421 - protein, 15 aa, Artificial Sequence
  Description of Artificial Sequence: Synthetic peptide
  Seed: RMCSLMQGSTLPRRS
RMISLCQASTLPRRS

SEQ ID NO: 124422 - protein, 15 aa, Artificial Sequence
  Description of Artificial Sequence: Synthetic peptide
  Seed: RMCSLMQGSTLPRRS
RMISLCQASTVPRRS

SEQ ID NO: 124423 - protein, 15 aa, Artificial Sequence
  Description of Artificial Sequence: Synthetic peptide
  Seed: RMCSLMQGSTLPRRS
RMISLEQASTAPRRS

SEQ ID NO: 124424 - protein, 15 aa, Artificial Sequence
  Description of Artificial Sequence: Synthetic peptide
  Seed: RMCSLMQGSTLPRRS
RMISLEQASTIPRRS

SEQ ID NO: 124425 - protein, 15 aa, Artificial Sequence
  Description of Artificial Sequence: Synthetic peptide
  Seed: RMCSLMQGSTLPRRS
RMISLEQASTLPRRS

SEQ ID NO: 124426 - protein, 15 aa, Artificial Sequence
  Description of Artificial Sequence: Synthetic peptide
  Seed: RMCSLMQGSTLPRRS
RMISLEQASTMPRRS

SEQ ID NO: 124427 - protein, 15 aa, Artificial Sequence
  Description of Artificial Sequence: Synthetic peptide
  Seed: RMCSLMQGSTLPRRS
RMISLEQASTVPRRS

SEQ ID NO: 124428 - protein, 15 aa, Artificial Sequence
  Description of Artificial Sequence: Synthetic peptide
  Seed: RMCSLMQGSTLPRRS
RMISLEQGSTAPRRS

SEQ ID NO: 124429 - protein, 15 aa, Artificial Sequence
  Description of Artificial Sequence: Synthetic peptide
  Seed: RMCSLMQGSTLPRRS
RMISLEQGSTIPRRS

SEQ ID NO: 124430 - protein, 15 aa, Artificial Sequence
  Description of Artificial Sequence: Synthetic peptide
  Seed: RMCSLMQGSTLPRRS
RMISLEQGSTLPRRS

SEQ ID NO: 124431 - protein, 15 aa, Artificial Sequence
  Description of Artificial Sequence: Synthetic peptide
  Seed: RMCSLMQGSTLPRRS
RMISLEQGSTVPRRS

SEQ ID NO: 124432 - protein, 15 aa, Artificial Sequence
  Description of Artificial Sequence: Synthetic peptide
  Seed: RMCSLMQGSTLPRRS
RMISLEQSSTIPRRS

SEQ ID NO: 124433 - protein, 15 aa, Artificial Sequence
  Description of Artificial Sequence: Synthetic peptide
  Seed: RMCSLMQGSTLPRRS
RMISLEQSSTLPRRS

SEQ ID NO: 124434 - protein, 15 aa, Artificial Sequence
  Description of Artificial Sequence: Synthetic peptide
  Seed: RMCSLMQGSTLPRRS
RMISLEQSSTVPRRS

SEQ ID NO: 124435 - protein, 15 aa, Artificial Sequence
  Description of Artificial Sequence: Synthetic peptide
  Seed: RMCSLMQGSTLPRRS
RMISLFQASTAPRRS

SEQ ID NO: 124436 - protein, 15 aa, Artificial Sequence
  Description of Artificial Sequence: Synthetic peptide
  Seed: RMCSLMQGSTLPRRS
RMISLFQASTGPRRS

SEQ ID NO: 124437 - protein, 15 aa, Artificial Sequence
  Description of Artificial Sequence: Synthetic peptide
  Seed: RMCSLMQGSTLPRRS
RMISLFQASTIPRRS

SEQ ID NO: 124438 - protein, 15 aa, Artificial Sequence
  Description of Artificial Sequence: Synthetic peptide
  Seed: RMCSLMQGSTLPRRS
RMISLFQASTMPRRS

SEQ ID NO: 124439 - protein, 15 aa, Artificial Sequence
  Description of Artificial Sequence: Synthetic peptide
  Seed: RMCSLMQGSTLPRRS
RMISLFQASTSPRRS

SEQ ID NO: 124440 - protein, 15 aa, Artificial Sequence
  Description of Artificial Sequence: Synthetic peptide
  Seed: RMCSLMQGSTLPRRS
RMISLFQASTTPRRS

SEQ ID NO: 124441 - protein, 15 aa, Artificial Sequence
  Description of Artificial Sequence: Synthetic peptide
  Seed: RMCSLMQGSTLPRRS
RMISLFQASTVPRRS

SEQ ID NO: 124442 - protein, 15 aa, Artificial Sequence
  Description of Artificial Sequence: Synthetic peptide
  Seed: RMCSLMQGSTLPRRS
RMISLFQGSTAPRRS

SEQ ID NO: 124443 - protein, 15 aa, Artificial Sequence
  Description of Artificial Sequence: Synthetic peptide
  Seed: RMCSLMQGSTLPRRS
RMISLFQGSTIPRRS

SEQ ID NO: 124444 - protein, 15 aa, Artificial Sequence
  Description of Artificial Sequence: Synthetic peptide
  Seed: RMCSLMQGSTLPRRS
RMISLFQGSTLPRRS

SEQ ID NO: 124445 - protein, 15 aa, Artificial Sequence
  Description of Artificial Sequence: Synthetic peptide
  Seed: RMCSLMQGSTLPRRS
RMISLFQGSTVPRRS

SEQ ID NO: 124446 - protein, 15 aa, Artificial Sequence
  Description of Artificial Sequence: Synthetic peptide
  Seed: RMCSLMQGSTLPRRS
RMISLFQPSTAPRRS

SEQ ID NO: 124447 - protein, 15 aa, Artificial Sequence
  Description of Artificial Sequence: Synthetic peptide
  Seed: RMCSLMQGSTLPRRS
RMISLFQPSTVPRRS

SEQ ID NO: 124448 - protein, 15 aa, Artificial Sequence
  Description of Artificial Sequence: Synthetic peptide
  Seed: RMCSLMQGSTLPRRS
RMISLFQSSTAPRRS

SEQ ID NO: 124449 - protein, 15 aa, Artificial Sequence
  Description of Artificial Sequence: Synthetic peptide
  Seed: RMCSLMQGSTLPRRS
RMISLFQSSTIPRRS

SEQ ID NO: 124450 - protein, 15 aa, Artificial Sequence
  Description of Artificial Sequence: Synthetic peptide
  Seed: RMCSLMQGSTLPRRS
RMISLFQSSTLPRRS

SEQ ID NO: 124451 - protein, 15 aa, Artificial Sequence
  Description of Artificial Sequence: Synthetic peptide
  Seed: RMCSLMQGSTLPRRS
RMISLFQSSTVPRRS

SEQ ID NO: 124452 - protein, 15 aa, Artificial Sequence
  Description of Artificial Sequence: Synthetic peptide
  Seed: RMCSLMQGSTLPRRS
RMISLGQASTAPRRS

SEQ ID NO: 124453 - protein, 15 aa, Artificial Sequence
  Description of Artificial Sequence: Synthetic peptide
  Seed: RMCSLMQGSTLPRRS
RMISLGQASTIPRRS

SEQ ID NO: 124454 - protein, 15 aa, Artificial Sequence
  Description of Artificial Sequence: Synthetic peptide
  Seed: RMCSLMQGSTLPRRS
RMISLGQASTLPRRS

SEQ ID NO: 124455 - protein, 15 aa, Artificial Sequence
  Description of Artificial Sequence: Synthetic peptide
  Seed: RMCSLMQGSTLPRRS
RMISLGQASTVPRRS

SEQ ID NO: 124456 - protein, 15 aa, Artificial Sequence
  Description of Artificial Sequence: Synthetic peptide
  Seed: RMCSLMQGSTLPRRS
RMISLGQGSTLPRRS

SEQ ID NO: 124457 - protein, 15 aa, Artificial Sequence
  Description of Artificial Sequence: Synthetic peptide
  Seed: RMCSLMQGSTLPRRS
RMISLGQSSTLPRRS

SEQ ID NO: 124458 - protein, 15 aa, Artificial Sequence
  Description of Artificial Sequence: Synthetic peptide
  Seed: RMCSLMQGSTLPRRS
RMISLHQASTLPRRS

SEQ ID NO: 124459 - protein, 15 aa, Artificial Sequence
  Description of Artificial Sequence: Synthetic peptide
  Seed: RMCSLMQGSTLPRRS
RMISLHQASTVPRRS

SEQ ID NO: 124460 - protein, 15 aa, Artificial Sequence
  Description of Artificial Sequence: Synthetic peptide
  Seed: RMCSLMQGSTLPRRS
RMISLIQASTAPRRS

SEQ ID NO: 124461 - protein, 15 aa, Artificial Sequence
  Description of Artificial Sequence: Synthetic peptide
  Seed: RMCSLMQGSTLPRRS
RMISLIQASTCPRRS

SEQ ID NO: 124462 - protein, 15 aa, Artificial Sequence
  Description of Artificial Sequence: Synthetic peptide
  Seed: RMCSLMQGSTLPRRS
RMISLIQASTFPRRS

SEQ ID NO: 124463 - protein, 15 aa, Artificial Sequence
  Description of Artificial Sequence: Synthetic peptide
  Seed: RMCSLMQGSTLPRRS
RMISLIQASTGPRRS

SEQ ID NO: 124464 - protein, 15 aa, Artificial Sequence
  Description of Artificial Sequence: Synthetic peptide
  Seed: RMCSLMQGSTLPRRS
RMISLIQASTIPRRS

SEQ ID NO: 124465 - protein, 15 aa, Artificial Sequence
  Description of Artificial Sequence: Synthetic peptide
  Seed: RMCSLMQGSTLPRRS
RMISLIQASTLPRRS

SEQ ID NO: 124466 - protein, 15 aa, Artificial Sequence
  Description of Artificial Sequence: Synthetic peptide
  Seed: RMCSLMQGSTLPRRS
RMISLIQASTMPRRS

SEQ ID NO: 124467 - protein, 15 aa, Artificial Sequence
  Description of Artificial Sequence: Synthetic peptide
  Seed: RMCSLMQGSTLPRRS
RMISLIQASTNPRRS

SEQ ID NO: 124468 - protein, 15 aa, Artificial Sequence
  Description of Artificial Sequence: Synthetic peptide
  Seed: RMCSLMQGSTLPRRS
RMISLIQASTSPRRS

SEQ ID NO: 124469 - protein, 15 aa, Artificial Sequence
  Description of Artificial Sequence: Synthetic peptide
  Seed: RMCSLMQGSTLPRRS
RMISLIQASTTPRRS

SEQ ID NO: 124470 - protein, 15 aa, Artificial Sequence
  Description of Artificial Sequence: Synthetic peptide
  Seed: RMCSLMQGSTLPRRS
RMISLIQASTVPRRS

SEQ ID NO: 124471 - protein, 15 aa, Artificial Sequence
  Description of Artificial Sequence: Synthetic peptide
  Seed: RMCSLMQGSTLPRRS
RMISLIQGSTAPRRS

SEQ ID NO: 124472 - protein, 15 aa, Artificial Sequence
  Description of Artificial Sequence: Synthetic peptide
  Seed: RMCSLMQGSTLPRRS
RMISLIQGSTCPRRS

SEQ ID NO: 124473 - protein, 15 aa, Artificial Sequence
  Description of Artificial Sequence: Synthetic peptide
  Seed: RMCSLMQGSTLPRRS
RMISLIQGSTGPRRS

SEQ ID NO: 124474 - protein, 15 aa, Artificial Sequence
  Description of Artificial Sequence: Synthetic peptide
  Seed: RMCSLMQGSTLPRRS
RMISLIQGSTIPRRS

SEQ ID NO: 124475 - protein, 15 aa, Artificial Sequence
  Description of Artificial Sequence: Synthetic peptide
  Seed: RMCSLMQGSTLPRRS
RMISLIQGSTLPRRS

SEQ ID NO: 124476 - protein, 15 aa, Artificial Sequence
  Description of Artificial Sequence: Synthetic peptide
  Seed: RMCSLMQGSTLPRRS
RMISLIQGSTMPRRS

SEQ ID NO: 124477 - protein, 15 aa, Artificial Sequence
  Description of Artificial Sequence: Synthetic peptide
  Seed: RMCSLMQGSTLPRRS
RMISLIQGSTSPRRS

SEQ ID NO: 124478 - protein, 15 aa, Artificial Sequence
  Description of Artificial Sequence: Synthetic peptide
  Seed: RMCSLMQGSTLPRRS
RMISLIQGSTTPRRS

SEQ ID NO: 124479 - protein, 15 aa, Artificial Sequence
  Description of Artificial Sequence: Synthetic peptide
  Seed: RMCSLMQGSTLPRRS
RMISLIQGSTVPRRS

SEQ ID NO: 124480 - protein, 15 aa, Artificial Sequence
  Description of Artificial Sequence: Synthetic peptide
  Seed: RMCSLMQGSTLPRRS
RMISLIQISTAPRRS

SEQ ID NO: 124481 - protein, 15 aa, Artificial Sequence
  Description of Artificial Sequence: Synthetic peptide
  Seed: RMCSLMQGSTLPRRS
RMISLIQISTNPRRS

SEQ ID NO: 124482 - protein, 15 aa, Artificial Sequence
  Description of Artificial Sequence: Synthetic peptide
  Seed: RMCSLMQGSTLPRRS
RMISLIQISTSPRRS

SEQ ID NO: 124483 - protein, 15 aa, Artificial Sequence
  Description of Artificial Sequence: Synthetic peptide
  Seed: RMCSLMQGSTLPRRS
RMISLIQNSTAPRRS

SEQ ID NO: 124484 - protein, 15 aa, Artificial Sequence
  Description of Artificial Sequence: Synthetic peptide
  Seed: RMCSLMQGSTLPRRS
RMISLIQNSTIPRRS

SEQ ID NO: 124485 - protein, 15 aa, Artificial Sequence
  Description of Artificial Sequence: Synthetic peptide
  Seed: RMCSLMQGSTLPRRS
RMISLIQNSTLPRRS

SEQ ID NO: 124486 - protein, 15 aa, Artificial Sequence
  Description of Artificial Sequence: Synthetic peptide
  Seed: RMCSLMQGSTLPRRS
RMISLIQNSTSPRRS

SEQ ID NO: 124487 - protein, 15 aa, Artificial Sequence
  Description of Artificial Sequence: Synthetic peptide
  Seed: RMCSLMQGSTLPRRS
RMISLIQNSTTPRRS

SEQ ID NO: 124488 - protein, 15 aa, Artificial Sequence
  Description of Artificial Sequence: Synthetic peptide
  Seed: RMCSLMQGSTLPRRS
RMISLIQNSTVPRRS

SEQ ID NO: 124489 - protein, 15 aa, Artificial Sequence
  Description of Artificial Sequence: Synthetic peptide
  Seed: RMCSLMQGSTLPRRS
RMISLIQPSTAPRRS

SEQ ID NO: 124490 - protein, 15 aa, Artificial Sequence
  Description of Artificial Sequence: Synthetic peptide
  Seed: RMCSLMQGSTLPRRS
RMISLIQPSTIPRRS

SEQ ID NO: 124491 - protein, 15 aa, Artificial Sequence
  Description of Artificial Sequence: Synthetic peptide
  Seed: RMCSLMQGSTLPRRS
RMISLIQPSTLPRRS

SEQ ID NO: 124492 - protein, 15 aa, Artificial Sequence
  Description of Artificial Sequence: Synthetic peptide
  Seed: RMCSLMQGSTLPRRS
RMISLIQPSTMPRRS

SEQ ID NO: 124493 - protein, 15 aa, Artificial Sequence
  Description of Artificial Sequence: Synthetic peptide
  Seed: RMCSLMQGSTLPRRS
RMISLIQPSTNPRRS

SEQ ID NO: 124494 - protein, 15 aa, Artificial Sequence
  Description of Artificial Sequence: Synthetic peptide
  Seed: RMCSLMQGSTLPRRS
RMISLIQPSTSPRRS

SEQ ID NO: 124495 - protein, 15 aa, Artificial Sequence
  Description of Artificial Sequence: Synthetic peptide
  Seed: RMCSLMQGSTLPRRS
RMISLIQPSTTPRRS

SEQ ID NO: 124496 - protein, 15 aa, Artificial Sequence
  Description of Artificial Sequence: Synthetic peptide
  Seed: RMCSLMQGSTLPRRS
RMISLIQPSTVPRRS

SEQ ID NO: 124497 - protein, 15 aa, Artificial Sequence
  Description of Artificial Sequence: Synthetic peptide
  Seed: RMCSLMQGSTLPRRS
RMISLIQSSTAPRRS

SEQ ID NO: 124498 - protein, 15 aa, Artificial Sequence
  Description of Artificial Sequence: Synthetic peptide
  Seed: RMCSLMQGSTLPRRS
RMISLIQSSTCPRRS

SEQ ID NO: 124499 - protein, 15 aa, Artificial Sequence
  Description of Artificial Sequence: Synthetic peptide
  Seed: RMCSLMQGSTLPRRS
RMISLIQSSTGPRRS

SEQ ID NO: 124500 - protein, 15 aa, Artificial Sequence
  Description of Artificial Sequence: Synthetic peptide
  Seed: RMCSLMQGSTLPRRS
RMISLIQSSTIPRRS

SEQ ID NO: 124501 - protein, 15 aa, Artificial Sequence
  Description of Artificial Sequence: Synthetic peptide
  Seed: RMCSLMQGSTLPRRS
RMISLIQSSTLPRRS

SEQ ID NO: 124502 - protein, 15 aa, Artificial Sequence
  Description of Artificial Sequence: Synthetic peptide
  Seed: RMCSLMQGSTLPRRS
RMISLIQSSTMPRRS

SEQ ID NO: 124503 - protein, 15 aa, Artificial Sequence
  Description of Artificial Sequence: Synthetic peptide
  Seed: RMCSLMQGSTLPRRS
RMISLIQSSTNPRRS

SEQ ID NO: 124504 - protein, 15 aa, Artificial Sequence
  Description of Artificial Sequence: Synthetic peptide
  Seed: RMCSLMQGSTLPRRS
RMISLIQSSTSPRRS

SEQ ID NO: 124505 - protein, 15 aa, Artificial Sequence
  Description of Artificial Sequence: Synthetic peptide
  Seed: RMCSLMQGSTLPRRS
RMISLIQSSTTPRRS

SEQ ID NO: 124506 - protein, 15 aa, Artificial Sequence
  Description of Artificial Sequence: Synthetic peptide
  Seed: RMCSLMQGSTLPRRS
RMISLIQSSTVPRRS

SEQ ID NO: 124507 - protein, 15 aa, Artificial Sequence
  Description of Artificial Sequence: Synthetic peptide
  Seed: RMCSLMQGSTLPRRS
RMISLIQTSTAPRRS

SEQ ID NO: 124508 - protein, 15 aa, Artificial Sequence
  Description of Artificial Sequence: Synthetic peptide
  Seed: RMCSLMQGSTLPRRS
RMISLIQTSTIPRRS

SEQ ID NO: 124509 - protein, 15 aa, Artificial Sequence
  Description of Artificial Sequence: Synthetic peptide
  Seed: RMCSLMQGSTLPRRS
RMISLIQTSTLPRRS

SEQ ID NO: 124510 - protein, 15 aa, Artificial Sequence
  Description of Artificial Sequence: Synthetic peptide
  Seed: RMCSLMQGSTLPRRS
RMISLIQTSTMPRRS

SEQ ID NO: 124511 - protein, 15 aa, Artificial Sequence
  Description of Artificial Sequence: Synthetic peptide
  Seed: RMCSLMQGSTLPRRS
RMISLIQTSTNPRRS

SEQ ID NO: 124512 - protein, 15 aa, Artificial Sequence
  Description of Artificial Sequence: Synthetic peptide
  Seed: RMCSLMQGSTLPRRS
RMISLIQTSTSPRRS

SEQ ID NO: 124513 - protein, 15 aa, Artificial Sequence
  Description of Artificial Sequence: Synthetic peptide
  Seed: RMCSLMQGSTLPRRS
RMISLIQTSTTPRRS

SEQ ID NO: 124514 - protein, 15 aa, Artificial Sequence
  Description of Artificial Sequence: Synthetic peptide
  Seed: RMCSLMQGSTLPRRS
RMISLIQTSTVPRRS

SEQ ID NO: 124515 - protein, 15 aa, Artificial Sequence
  Description of Artificial Sequence: Synthetic peptide
  Seed: RMCSLMQGSTLPRRS
RMISLIQVSTAPRRS

SEQ ID NO: 124516 - protein, 15 aa, Artificial Sequence
  Description of Artificial Sequence: Synthetic peptide
  Seed: RMCSLMQGSTLPRRS
RMISLIQVSTIPRRS

SEQ ID NO: 124517 - protein, 15 aa, Artificial Sequence
  Description of Artificial Sequence: Synthetic peptide
  Seed: RMCSLMQGSTLPRRS
RMISLIQVSTLPRRS

SEQ ID NO: 124518 - protein, 15 aa, Artificial Sequence
  Description of Artificial Sequence: Synthetic peptide
  Seed: RMCSLMQGSTLPRRS
RMISLIQVSTNPRRS

SEQ ID NO: 124519 - protein, 15 aa, Artificial Sequence
  Description of Artificial Sequence: Synthetic peptide
  Seed: RMCSLMQGSTLPRRS
RMISLIQVSTSPRRS

SEQ ID NO: 124520 - protein, 15 aa, Artificial Sequence
  Description of Artificial Sequence: Synthetic peptide
  Seed: RMCSLMQGSTLPRRS
RMISLIQVSTVPRRS

SEQ ID NO: 124521 - protein, 15 aa, Artificial Sequence
  Description of Artificial Sequence: Synthetic peptide
  Seed: RMCSLMQGSTLPRRS
RMISLLQASTAPRRS

SEQ ID NO: 124522 - protein, 15 aa, Artificial Sequence
  Description of Artificial Sequence: Synthetic peptide
  Seed: RMCSLMQGSTLPRRS
RMISLLQASTCPRRS

SEQ ID NO: 124523 - protein, 15 aa, Artificial Sequence
  Description of Artificial Sequence: Synthetic peptide
  Seed: RMCSLMQGSTLPRRS
RMISLLQASTFPRRS

SEQ ID NO: 124524 - protein, 15 aa, Artificial Sequence
  Description of Artificial Sequence: Synthetic peptide
  Seed: RMCSLMQGSTLPRRS
RMISLLQASTGPRRS

SEQ ID NO: 124525 - protein, 15 aa, Artificial Sequence
  Description of Artificial Sequence: Synthetic peptide
  Seed: RMCSLMQGSTLPRRS
RMISLLQASTHPRRS

SEQ ID NO: 124526 - protein, 15 aa, Artificial Sequence
  Description of Artificial Sequence: Synthetic peptide
  Seed: RMCSLMQGSTLPRRS
RMISLLQASTIPRRS

SEQ ID NO: 124527 - protein, 15 aa, Artificial Sequence
  Description of Artificial Sequence: Synthetic peptide
  Seed: RMCSLMQGSTLPRRS
RMISLLQASTKPRRS

SEQ ID NO: 124528 - protein, 15 aa, Artificial Sequence
  Description of Artificial Sequence: Synthetic peptide
  Seed: RMCSLMQGSTLPRRS
RMISLLQASTLPRRS

SEQ ID NO: 124529 - protein, 15 aa, Artificial Sequence
  Description of Artificial Sequence: Synthetic peptide
  Seed: RMCSLMQGSTLPRRS
RMISLLQASTMPRRS

SEQ ID NO: 124530 - protein, 15 aa, Artificial Sequence
  Description of Artificial Sequence: Synthetic peptide
  Seed: RMCSLMQGSTLPRRS
RMISLLQASTNPRRS

SEQ ID NO: 124531 - protein, 15 aa, Artificial Sequence
  Description of Artificial Sequence: Synthetic peptide
  Seed: RMCSLMQGSTLPRRS
RMISLLQASTPPRRS

SEQ ID NO: 124532 - protein, 15 aa, Artificial Sequence
  Description of Artificial Sequence: Synthetic peptide
  Seed: RMCSLMQGSTLPRRS
RMISLLQASTQPRRS

SEQ ID NO: 124533 - protein, 15 aa, Artificial Sequence
  Description of Artificial Sequence: Synthetic peptide
  Seed: RMCSLMQGSTLPRRS
RMISLLQASTRPRRS

SEQ ID NO: 124534 - protein, 15 aa, Artificial Sequence
  Description of Artificial Sequence: Synthetic peptide
  Seed: RMCSLMQGSTLPRRS
RMISLLQASTSPRRS

SEQ ID NO: 124535 - protein, 15 aa, Artificial Sequence
  Description of Artificial Sequence: Synthetic peptide
  Seed: RMCSLMQGSTLPRRS
RMISLLQASTTPRRS

SEQ ID NO: 124536 - protein, 15 aa, Artificial Sequence
  Description of Artificial Sequence: Synthetic peptide
  Seed: RMCSLMQGSTLPRRS
RMISLLQASTVPRRS

SEQ ID NO: 124537 - protein, 15 aa, Artificial Sequence
  Description of Artificial Sequence: Synthetic peptide
  Seed: RMCSLMQGSTLPRRS
RMISLLQASTYPRRS

SEQ ID NO: 124538 - protein, 15 aa, Artificial Sequence
  Description of Artificial Sequence: Synthetic peptide
  Seed: RMCSLMQGSTLPRRS
RMISLLQGSTAPRRS

SEQ ID NO: 124539 - protein, 15 aa, Artificial Sequence
  Description of Artificial Sequence: Synthetic peptide
  Seed: RMCSLMQGSTLPRRS
RMISLLQGSTCPRRS

SEQ ID NO: 124540 - protein, 15 aa, Artificial Sequence
  Description of Artificial Sequence: Synthetic peptide
  Seed: RMCSLMQGSTLPRRS
RMISLLQGSTFPRRS

SEQ ID NO: 124541 - protein, 15 aa, Artificial Sequence
  Description of Artificial Sequence: Synthetic peptide
  Seed: RMCSLMQGSTLPRRS
RMISLLQGSTGPRRS

SEQ ID NO: 124542 - protein, 15 aa, Artificial Sequence
  Description of Artificial Sequence: Synthetic peptide
  Seed: RMCSLMQGSTLPRRS
RMISLLQGSTHPRRS

SEQ ID NO: 124543 - protein, 15 aa, Artificial Sequence
  Description of Artificial Sequence: Synthetic peptide
  Seed: RMCSLMQGSTLPRRS
RMISLLQGSTIPRRS

SEQ ID NO: 124544 - protein, 15 aa, Artificial Sequence
  Description of Artificial Sequence: Synthetic peptide
  Seed: RMCSLMQGSTLPRRS
RMISLLQGSTLPRRS

SEQ ID NO: 124545 - protein, 15 aa, Artificial Sequence
  Description of Artificial Sequence: Synthetic peptide
  Seed: RMCSLMQGSTLPRRS
RMISLLQGSTMPRRS

SEQ ID NO: 124546 - protein, 15 aa, Artificial Sequence
  Description of Artificial Sequence: Synthetic peptide
  Seed: RMCSLMQGSTLPRRS
RMISLLQGSTNPRRS

SEQ ID NO: 124547 - protein, 15 aa, Artificial Sequence
  Description of Artificial Sequence: Synthetic peptide
  Seed: RMCSLMQGSTLPRRS
RMISLLQGSTPPRRS

SEQ ID NO: 124548 - protein, 15 aa, Artificial Sequence
  Description of Artificial Sequence: Synthetic peptide
  Seed: RMCSLMQGSTLPRRS
RMISLLQGSTQPRRS

SEQ ID NO: 124549 - protein, 15 aa, Artificial Sequence
  Description of Artificial Sequence: Synthetic peptide
  Seed: RMCSLMQGSTLPRRS
RMISLLQGSTSPRRS

SEQ ID NO: 124550 - protein, 15 aa, Artificial Sequence
  Description of Artificial Sequence: Synthetic peptide
  Seed: RMCSLMQGSTLPRRS
RMISLLQGSTTPRRS

SEQ ID NO: 124551 - protein, 15 aa, Artificial Sequence
  Description of Artificial Sequence: Synthetic peptide
  Seed: RMCSLMQGSTLPRRS
RMISLLQGSTVPRRS

SEQ ID NO: 124552 - protein, 15 aa, Artificial Sequence
  Description of Artificial Sequence: Synthetic peptide
  Seed: RMCSLMQGSTLPRRS
RMISLLQGSTYPRRS

SEQ ID NO: 124553 - protein, 15 aa, Artificial Sequence
  Description of Artificial Sequence: Synthetic peptide
  Seed: RMCSLMQGSTLPRRS
RMISLLQISTAPRRS

SEQ ID NO: 124554 - protein, 15 aa, Artificial Sequence
  Description of Artificial Sequence: Synthetic peptide
  Seed: RMCSLMQGSTLPRRS
RMISLLQISTIPRRS

SEQ ID NO: 124555 - protein, 15 aa, Artificial Sequence
  Description of Artificial Sequence: Synthetic peptide
  Seed: RMCSLMQGSTLPRRS
RMISLLQISTLPRRS

SEQ ID NO: 124556 - protein, 15 aa, Artificial Sequence
  Description of Artificial Sequence: Synthetic peptide
  Seed: RMCSLMQGSTLPRRS
RMISLLQISTMPRRS

SEQ ID NO: 124557 - protein, 15 aa, Artificial Sequence
  Description of Artificial Sequence: Synthetic peptide
  Seed: RMCSLMQGSTLPRRS
RMISLLQISTNPRRS

SEQ ID NO: 124558 - protein, 15 aa, Artificial Sequence
  Description of Artificial Sequence: Synthetic peptide
  Seed: RMCSLMQGSTLPRRS
RMISLLQISTSPRRS

SEQ ID NO: 124559 - protein, 15 aa, Artificial Sequence
  Description of Artificial Sequence: Synthetic peptide
  Seed: RMCSLMQGSTLPRRS
RMISLLQISTTPRRS

SEQ ID NO: 124560 - protein, 15 aa, Artificial Sequence
  Description of Artificial Sequence: Synthetic peptide
  Seed: RMCSLMQGSTLPRRS
RMISLLQISTVPRRS

SEQ ID NO: 124561 - protein, 15 aa, Artificial Sequence
  Description of Artificial Sequence: Synthetic peptide
  Seed: RMCSLMQGSTLPRRS
RMISLLQLSTAPRRS

SEQ ID NO: 124562 - protein, 15 aa, Artificial Sequence
  Description of Artificial Sequence: Synthetic peptide
  Seed: RMCSLMQGSTLPRRS
RMISLLQLSTSPRRS

SEQ ID NO: 124563 - protein, 15 aa, Artificial Sequence
  Description of Artificial Sequence: Synthetic peptide
  Seed: RMCSLMQGSTLPRRS
RMISLLQMSTAPRRS

SEQ ID NO: 124564 - protein, 15 aa, Artificial Sequence
  Description of Artificial Sequence: Synthetic peptide
  Seed: RMCSLMQGSTLPRRS
RMISLLQNSTAPRRS

SEQ ID NO: 124565 - protein, 15 aa, Artificial Sequence
  Description of Artificial Sequence: Synthetic peptide
  Seed: RMCSLMQGSTLPRRS
RMISLLQNSTGPRRS

SEQ ID NO: 124566 - protein, 15 aa, Artificial Sequence
  Description of Artificial Sequence: Synthetic peptide
  Seed: RMCSLMQGSTLPRRS
RMISLLQNSTIPRRS

SEQ ID NO: 124567 - protein, 15 aa, Artificial Sequence
  Description of Artificial Sequence: Synthetic peptide
  Seed: RMCSLMQGSTLPRRS
RMISLLQNSTLPRRS

SEQ ID NO: 124568 - protein, 15 aa, Artificial Sequence
  Description of Artificial Sequence: Synthetic peptide
  Seed: RMCSLMQGSTLPRRS
RMISLLQNSTMPRRS

SEQ ID NO: 124569 - protein, 15 aa, Artificial Sequence
  Description of Artificial Sequence: Synthetic peptide
  Seed: RMCSLMQGSTLPRRS
RMISLLQNSTNPRRS

SEQ ID NO: 124570 - protein, 15 aa, Artificial Sequence
  Description of Artificial Sequence: Synthetic peptide
  Seed: RMCSLMQGSTLPRRS
RMISLLQNSTSPRRS

SEQ ID NO: 124571 - protein, 15 aa, Artificial Sequence
  Description of Artificial Sequence: Synthetic peptide
  Seed: RMCSLMQGSTLPRRS
RMISLLQNSTTPRRS

SEQ ID NO: 124572 - protein, 15 aa, Artificial Sequence
  Description of Artificial Sequence: Synthetic peptide
  Seed: RMCSLMQGSTLPRRS
RMISLLQNSTVPRRS

SEQ ID NO: 124573 - protein, 15 aa, Artificial Sequence
  Description of Artificial Sequence: Synthetic peptide
  Seed: RMCSLMQGSTLPRRS
RMISLLQPSTAPRRS

SEQ ID NO: 124574 - protein, 15 aa, Artificial Sequence
  Description of Artificial Sequence: Synthetic peptide
  Seed: RMCSLMQGSTLPRRS
RMISLLQPSTCPRRS

SEQ ID NO: 124575 - protein, 15 aa, Artificial Sequence
  Description of Artificial Sequence: Synthetic peptide
  Seed: RMCSLMQGSTLPRRS
RMISLLQPSTFPRRS

SEQ ID NO: 124576 - protein, 15 aa, Artificial Sequence
  Description of Artificial Sequence: Synthetic peptide
  Seed: RMCSLMQGSTLPRRS
RMISLLQPSTGPRRS

SEQ ID NO: 124577 - protein, 15 aa, Artificial Sequence
  Description of Artificial Sequence: Synthetic peptide
  Seed: RMCSLMQGSTLPRRS
RMISLLQPSTHPRRS

SEQ ID NO: 124578 - protein, 15 aa, Artificial Sequence
  Description of Artificial Sequence: Synthetic peptide
  Seed: RMCSLMQGSTLPRRS
RMISLLQPSTIPRRS

SEQ ID NO: 124579 - protein, 15 aa, Artificial Sequence
  Description of Artificial Sequence: Synthetic peptide
  Seed: RMCSLMQGSTLPRRS
RMISLLQPSTLPRRS

SEQ ID NO: 124580 - protein, 15 aa, Artificial Sequence
  Description of Artificial Sequence: Synthetic peptide
  Seed: RMCSLMQGSTLPRRS
RMISLLQPSTMPRRS

SEQ ID NO: 124581 - protein, 15 aa, Artificial Sequence
  Description of Artificial Sequence: Synthetic peptide
  Seed: RMCSLMQGSTLPRRS
RMISLLQPSTNPRRS

SEQ ID NO: 124582 - protein, 15 aa, Artificial Sequence
  Description of Artificial Sequence: Synthetic peptide
  Seed: RMCSLMQGSTLPRRS
RMISLLQPSTQPRRS

SEQ ID NO: 124583 - protein, 15 aa, Artificial Sequence
  Description of Artificial Sequence: Synthetic peptide
  Seed: RMCSLMQGSTLPRRS
RMISLLQPSTSPRRS

SEQ ID NO: 124584 - protein, 15 aa, Artificial Sequence
  Description of Artificial Sequence: Synthetic peptide
  Seed: RMCSLMQGSTLPRRS
RMISLLQPSTTPRRS

SEQ ID NO: 124585 - protein, 15 aa, Artificial Sequence
  Description of Artificial Sequence: Synthetic peptide
  Seed: RMCSLMQGSTLPRRS
RMISLLQPSTVPRRS

SEQ ID NO: 124586 - protein, 15 aa, Artificial Sequence
  Description of Artificial Sequence: Synthetic peptide
  Seed: RMCSLMQGSTLPRRS
RMISLLQSSTAPRRS

SEQ ID NO: 124587 - protein, 15 aa, Artificial Sequence
  Description of Artificial Sequence: Synthetic peptide
  Seed: RMCSLMQGSTLPRRS
RMISLLQSSTCPRRS

SEQ ID NO: 124588 - protein, 15 aa, Artificial Sequence
  Description of Artificial Sequence: Synthetic peptide
  Seed: RMCSLMQGSTLPRRS
RMISLLQSSTFPRRS

SEQ ID NO: 124589 - protein, 15 aa, Artificial Sequence
  Description of Artificial Sequence: Synthetic peptide
  Seed: RMCSLMQGSTLPRRS
RMISLLQSSTGPRRS

SEQ ID NO: 124590 - protein, 15 aa, Artificial Sequence
  Description of Artificial Sequence: Synthetic peptide
  Seed: RMCSLMQGSTLPRRS
RMISLLQSSTHPRRS

SEQ ID NO: 124591 - protein, 15 aa, Artificial Sequence
  Description of Artificial Sequence: Synthetic peptide
  Seed: RMCSLMQGSTLPRRS
RMISLLQSSTIPRRS

SEQ ID NO: 124592 - protein, 15 aa, Artificial Sequence
  Description of Artificial Sequence: Synthetic peptide
  Seed: RMCSLMQGSTLPRRS
RMISLLQSSTLPRRS

SEQ ID NO: 124593 - protein, 15 aa, Artificial Sequence
  Description of Artificial Sequence: Synthetic peptide
  Seed: RMCSLMQGSTLPRRS
RMISLLQSSTMPRRS

SEQ ID NO: 124594 - protein, 15 aa, Artificial Sequence
  Description of Artificial Sequence: Synthetic peptide
  Seed: RMCSLMQGSTLPRRS
RMISLLQSSTNPRRS

SEQ ID NO: 124595 - protein, 15 aa, Artificial Sequence
  Description of Artificial Sequence: Synthetic peptide
  Seed: RMCSLMQGSTLPRRS
RMISLLQSSTSPRRS

SEQ ID NO: 124596 - protein, 15 aa, Artificial Sequence
  Description of Artificial Sequence: Synthetic peptide
  Seed: RMCSLMQGSTLPRRS
RMISLLQSSTTPRRS

SEQ ID NO: 124597 - protein, 15 aa, Artificial Sequence
  Description of Artificial Sequence: Synthetic peptide
  Seed: RMCSLMQGSTLPRRS
RMISLLQSSTVPRRS

SEQ ID NO: 124598 - protein, 15 aa, Artificial Sequence
  Description of Artificial Sequence: Synthetic peptide
  Seed: RMCSLMQGSTLPRRS
RMISLLQTSTAPRRS

SEQ ID NO: 124599 - protein, 15 aa, Artificial Sequence
  Description of Artificial Sequence: Synthetic peptide
  Seed: RMCSLMQGSTLPRRS
RMISLLQTSTGPRRS

SEQ ID NO: 124600 - protein, 15 aa, Artificial Sequence
  Description of Artificial Sequence: Synthetic peptide
  Seed: RMCSLMQGSTLPRRS
RMISLLQTSTIPRRS

SEQ ID NO: 124601 - protein, 15 aa, Artificial Sequence
  Description of Artificial Sequence: Synthetic peptide
  Seed: RMCSLMQGSTLPRRS
RMISLLQTSTLPRRS

SEQ ID NO: 124602 - protein, 15 aa, Artificial Sequence
  Description of Artificial Sequence: Synthetic peptide
  Seed: RMCSLMQGSTLPRRS
RMISLLQTSTMPRRS

SEQ ID NO: 124603 - protein, 15 aa, Artificial Sequence
  Description of Artificial Sequence: Synthetic peptide
  Seed: RMCSLMQGSTLPRRS
RMISLLQTSTNPRRS

SEQ ID NO: 124604 - protein, 15 aa, Artificial Sequence
  Description of Artificial Sequence: Synthetic peptide
  Seed: RMCSLMQGSTLPRRS
RMISLLQTSTSPRRS

SEQ ID NO: 124605 - protein, 15 aa, Artificial Sequence
  Description of Artificial Sequence: Synthetic peptide
  Seed: RMCSLMQGSTLPRRS
RMISLLQTSTTPRRS

SEQ ID NO: 124606 - protein, 15 aa, Artificial Sequence
  Description of Artificial Sequence: Synthetic peptide
  Seed: RMCSLMQGSTLPRRS
RMISLLQTSTVPRRS

SEQ ID NO: 124607 - protein, 15 aa, Artificial Sequence
  Description of Artificial Sequence: Synthetic peptide
  Seed: RMCSLMQGSTLPRRS
RMISLLQVSTAPRRS

SEQ ID NO: 124608 - protein, 15 aa, Artificial Sequence
  Description of Artificial Sequence: Synthetic peptide
  Seed: RMCSLMQGSTLPRRS
RMISLLQVSTIPRRS

SEQ ID NO: 124609 - protein, 15 aa, Artificial Sequence
  Description of Artificial Sequence: Synthetic peptide
  Seed: RMCSLMQGSTLPRRS
RMISLLQVSTLPRRS

SEQ ID NO: 124610 - protein, 15 aa, Artificial Sequence
  Description of Artificial Sequence: Synthetic peptide
  Seed: RMCSLMQGSTLPRRS
RMISLLQVSTMPRRS

SEQ ID NO: 124611 - protein, 15 aa, Artificial Sequence
  Description of Artificial Sequence: Synthetic peptide
  Seed: RMCSLMQGSTLPRRS
RMISLLQVSTNPRRS

SEQ ID NO: 124612 - protein, 15 aa, Artificial Sequence
  Description of Artificial Sequence: Synthetic peptide
  Seed: RMCSLMQGSTLPRRS
RMISLLQVSTSPRRS

SEQ ID NO: 124613 - protein, 15 aa, Artificial Sequence
  Description of Artificial Sequence: Synthetic peptide
  Seed: RMCSLMQGSTLPRRS
RMISLLQVSTTPRRS

SEQ ID NO: 124614 - protein, 15 aa, Artificial Sequence
  Description of Artificial Sequence: Synthetic peptide
  Seed: RMCSLMQGSTLPRRS
RMISLLQVSTVPRRS

SEQ ID NO: 124615 - protein, 15 aa, Artificial Sequence
  Description of Artificial Sequence: Synthetic peptide
  Seed: RMCSLMQGSTLPRRS
RMISLMQASTAPRRS

SEQ ID NO: 124616 - protein, 15 aa, Artificial Sequence
  Description of Artificial Sequence: Synthetic peptide
  Seed: RMCSLMQGSTLPRRS
RMISLMQASTCPRRS

SEQ ID NO: 124617 - protein, 15 aa, Artificial Sequence
  Description of Artificial Sequence: Synthetic peptide
  Seed: RMCSLMQGSTLPRRS
RMISLMQASTFPRRS

SEQ ID NO: 124618 - protein, 15 aa, Artificial Sequence
  Description of Artificial Sequence: Synthetic peptide
  Seed: RMCSLMQGSTLPRRS
RMISLMQASTGPRRS

SEQ ID NO: 124619 - protein, 15 aa, Artificial Sequence
  Description of Artificial Sequence: Synthetic peptide
  Seed: RMCSLMQGSTLPRRS
RMISLMQASTHPRRS

SEQ ID NO: 124620 - protein, 15 aa, Artificial Sequence
  Description of Artificial Sequence: Synthetic peptide
  Seed: RMCSLMQGSTLPRRS
RMISLMQASTIPRRS

SEQ ID NO: 124621 - protein, 15 aa, Artificial Sequence
  Description of Artificial Sequence: Synthetic peptide
  Seed: RMCSLMQGSTLPRRS
RMISLMQASTKPRRS

SEQ ID NO: 124622 - protein, 15 aa, Artificial Sequence
  Description of Artificial Sequence: Synthetic peptide
  Seed: RMCSLMQGSTLPRRS
RMISLMQASTLPRRS

SEQ ID NO: 124623 - protein, 15 aa, Artificial Sequence
  Description of Artificial Sequence: Synthetic peptide
  Seed: RMCSLMQGSTLPRRS
RMISLMQASTMPRRS

SEQ ID NO: 124624 - protein, 15 aa, Artificial Sequence
  Description of Artificial Sequence: Synthetic peptide
  Seed: RMCSLMQGSTLPRRS
RMISLMQASTNPRRS

SEQ ID NO: 124625 - protein, 15 aa, Artificial Sequence
  Description of Artificial Sequence: Synthetic peptide
  Seed: RMCSLMQGSTLPRRS
RMISLMQASTPPRRS

SEQ ID NO: 124626 - protein, 15 aa, Artificial Sequence
  Description of Artificial Sequence: Synthetic peptide
  Seed: RMCSLMQGSTLPRRS
RMISLMQASTQPRRS

SEQ ID NO: 124627 - protein, 15 aa, Artificial Sequence
  Description of Artificial Sequence: Synthetic peptide
  Seed: RMCSLMQGSTLPRRS
RMISLMQASTRPRRS

SEQ ID NO: 124628 - protein, 15 aa, Artificial Sequence
  Description of Artificial Sequence: Synthetic peptide
  Seed: RMCSLMQGSTLPRRS
RMISLMQASTSPRRS

SEQ ID NO: 124629 - protein, 15 aa, Artificial Sequence
  Description of Artificial Sequence: Synthetic peptide
  Seed: RMCSLMQGSTLPRRS
RMISLMQASTTPRRS

SEQ ID NO: 124630 - protein, 15 aa, Artificial Sequence
  Description of Artificial Sequence: Synthetic peptide
  Seed: RMCSLMQGSTLPRRS
RMISLMQASTVPRRS

SEQ ID NO: 124631 - protein, 15 aa, Artificial Sequence
  Description of Artificial Sequence: Synthetic peptide
  Seed: RMCSLMQGSTLPRRS
RMISLMQASTWPRRS

SEQ ID NO: 124632 - protein, 15 aa, Artificial Sequence
  Description of Artificial Sequence: Synthetic peptide
  Seed: RMCSLMQGSTLPRRS
RMISLMQASTYPRRS

SEQ ID NO: 124633 - protein, 15 aa, Artificial Sequence
  Description of Artificial Sequence: Synthetic peptide
  Seed: RMCSLMQGSTLPRRS
RMISLMQGSTAPRRS

SEQ ID NO: 124634 - protein, 15 aa, Artificial Sequence
  Description of Artificial Sequence: Synthetic peptide
  Seed: RMCSLMQGSTLPRRS
RMISLMQGSTCPRRS

SEQ ID NO: 124635 - protein, 15 aa, Artificial Sequence
  Description of Artificial Sequence: Synthetic peptide
  Seed: RMCSLMQGSTLPRRS
RMISLMQGSTFPRRS

SEQ ID NO: 124636 - protein, 15 aa, Artificial Sequence
  Description of Artificial Sequence: Synthetic peptide
  Seed: RMCSLMQGSTLPRRS
RMISLMQGSTGPRRS

SEQ ID NO: 124637 - protein, 15 aa, Artificial Sequence
  Description of Artificial Sequence: Synthetic peptide
  Seed: RMCSLMQGSTLPRRS
RMISLMQGSTHPRRS

SEQ ID NO: 124638 - protein, 15 aa, Artificial Sequence
  Description of Artificial Sequence: Synthetic peptide
  Seed: RMCSLMQGSTLPRRS
RMISLMQGSTIPRRS

SEQ ID NO: 124639 - protein, 15 aa, Artificial Sequence
  Description of Artificial Sequence: Synthetic peptide
  Seed: RMCSLMQGSTLPRRS
RMISLMQGSTLPRRS

SEQ ID NO: 124640 - protein, 15 aa, Artificial Sequence
  Description of Artificial Sequence: Synthetic peptide
  Seed: RMCSLMQGSTLPRRS
RMISLMQGSTMPRRS

SEQ ID NO: 124641 - protein, 15 aa, Artificial Sequence
  Description of Artificial Sequence: Synthetic peptide
  Seed: RMCSLMQGSTLPRRS
RMISLMQGSTNPRRS

SEQ ID NO: 124642 - protein, 15 aa, Artificial Sequence
  Description of Artificial Sequence: Synthetic peptide
  Seed: RMCSLMQGSTLPRRS
RMISLMQGSTQPRRS

SEQ ID NO: 124643 - protein, 15 aa, Artificial Sequence
  Description of Artificial Sequence: Synthetic peptide
  Seed: RMCSLMQGSTLPRRS
RMISLMQGSTSPRRS

SEQ ID NO: 124644 - protein, 15 aa, Artificial Sequence
  Description of Artificial Sequence: Synthetic peptide
  Seed: RMCSLMQGSTLPRRS
RMISLMQGSTTPRRS

SEQ ID NO: 124645 - protein, 15 aa, Artificial Sequence
  Description of Artificial Sequence: Synthetic peptide
  Seed: RMCSLMQGSTLPRRS
RMISLMQGSTVPRRS

SEQ ID NO: 124646 - protein, 15 aa, Artificial Sequence
  Description of Artificial Sequence: Synthetic peptide
  Seed: RMCSLMQGSTLPRRS
RMISLMQGSTYPRRS

SEQ ID NO: 124647 - protein, 15 aa, Artificial Sequence
  Description of Artificial Sequence: Synthetic peptide
  Seed: RMCSLMQGSTLPRRS
RMISLMQHSTLPRRS

SEQ ID NO: 124648 - protein, 15 aa, Artificial Sequence
  Description of Artificial Sequence: Synthetic peptide
  Seed: RMCSLMQGSTLPRRS
RMISLMQHSTVPRRS

SEQ ID NO: 124649 - protein, 15 aa, Artificial Sequence
  Description of Artificial Sequence: Synthetic peptide
  Seed: RMCSLMQGSTLPRRS
RMISLMQISTAPRRS

SEQ ID NO: 124650 - protein, 15 aa, Artificial Sequence
  Description of Artificial Sequence: Synthetic peptide
  Seed: RMCSLMQGSTLPRRS
RMISLMQISTIPRRS

SEQ ID NO: 124651 - protein, 15 aa, Artificial Sequence
  Description of Artificial Sequence: Synthetic peptide
  Seed: RMCSLMQGSTLPRRS
RMISLMQISTLPRRS

SEQ ID NO: 124652 - protein, 15 aa, Artificial Sequence
  Description of Artificial Sequence: Synthetic peptide
  Seed: RMCSLMQGSTLPRRS
RMISLMQISTMPRRS

SEQ ID NO: 124653 - protein, 15 aa, Artificial Sequence
  Description of Artificial Sequence: Synthetic peptide
  Seed: RMCSLMQGSTLPRRS
RMISLMQISTNPRRS

SEQ ID NO: 124654 - protein, 15 aa, Artificial Sequence
  Description of Artificial Sequence: Synthetic peptide
  Seed: RMCSLMQGSTLPRRS
RMISLMQISTSPRRS

SEQ ID NO: 124655 - protein, 15 aa, Artificial Sequence
  Description of Artificial Sequence: Synthetic peptide
  Seed: RMCSLMQGSTLPRRS
RMISLMQISTTPRRS

SEQ ID NO: 124656 - protein, 15 aa, Artificial Sequence
  Description of Artificial Sequence: Synthetic peptide
  Seed: RMCSLMQGSTLPRRS
RMISLMQISTVPRRS

SEQ ID NO: 124657 - protein, 15 aa, Artificial Sequence
  Description of Artificial Sequence: Synthetic peptide
  Seed: RMCSLMQGSTLPRRS
RMISLMQLSTAPRRS

SEQ ID NO: 124658 - protein, 15 aa, Artificial Sequence
  Description of Artificial Sequence: Synthetic peptide
  Seed: RMCSLMQGSTLPRRS
RMISLMQLSTNPRRS

SEQ ID NO: 124659 - protein, 15 aa, Artificial Sequence
  Description of Artificial Sequence: Synthetic peptide
  Seed: RMCSLMQGSTLPRRS
RMISLMQLSTSPRRS

SEQ ID NO: 124660 - protein, 15 aa, Artificial Sequence
  Description of Artificial Sequence: Synthetic peptide
  Seed: RMCSLMQGSTLPRRS
RMISLMQMSTAPRRS

SEQ ID NO: 124661 - protein, 15 aa, Artificial Sequence
  Description of Artificial Sequence: Synthetic peptide
  Seed: RMCSLMQGSTLPRRS
RMISLMQMSTSPRRS

SEQ ID NO: 124662 - protein, 15 aa, Artificial Sequence
  Description of Artificial Sequence: Synthetic peptide
  Seed: RMCSLMQGSTLPRRS
RMISLMQNSTAPRRS

SEQ ID NO: 124663 - protein, 15 aa, Artificial Sequence
  Description of Artificial Sequence: Synthetic peptide
  Seed: RMCSLMQGSTLPRRS
RMISLMQNSTGPRRS

SEQ ID NO: 124664 - protein, 15 aa, Artificial Sequence
  Description of Artificial Sequence: Synthetic peptide
  Seed: RMCSLMQGSTLPRRS
RMISLMQNSTIPRRS

SEQ ID NO: 124665 - protein, 15 aa, Artificial Sequence
  Description of Artificial Sequence: Synthetic peptide
  Seed: RMCSLMQGSTLPRRS
RMISLMQNSTLPRRS

SEQ ID NO: 124666 - protein, 15 aa, Artificial Sequence
  Description of Artificial Sequence: Synthetic peptide
  Seed: RMCSLMQGSTLPRRS
RMISLMQNSTMPRRS

SEQ ID NO: 124667 - protein, 15 aa, Artificial Sequence
  Description of Artificial Sequence: Synthetic peptide
  Seed: RMCSLMQGSTLPRRS
RMISLMQNSTNPRRS

SEQ ID NO: 124668 - protein, 15 aa, Artificial Sequence
  Description of Artificial Sequence: Synthetic peptide
  Seed: RMCSLMQGSTLPRRS
RMISLMQNSTSPRRS

SEQ ID NO: 124669 - protein, 15 aa, Artificial Sequence
  Description of Artificial Sequence: Synthetic peptide
  Seed: RMCSLMQGSTLPRRS
RMISLMQNSTTPRRS

SEQ ID NO: 124670 - protein, 15 aa, Artificial Sequence
  Description of Artificial Sequence: Synthetic peptide
  Seed: RMCSLMQGSTLPRRS
RMISLMQNSTVPRRS

SEQ ID NO: 124671 - protein, 15 aa, Artificial Sequence
  Description of Artificial Sequence: Synthetic peptide
  Seed: RMCSLMQGSTLPRRS
RMISLMQPSTAPRRS

SEQ ID NO: 124672 - protein, 15 aa, Artificial Sequence
  Description of Artificial Sequence: Synthetic peptide
  Seed: RMCSLMQGSTLPRRS
RMISLMQPSTCPRRS

SEQ ID NO: 124673 - protein, 15 aa, Artificial Sequence
  Description of Artificial Sequence: Synthetic peptide
  Seed: RMCSLMQGSTLPRRS
RMISLMQPSTFPRRS

SEQ ID NO: 124674 - protein, 15 aa, Artificial Sequence
  Description of Artificial Sequence: Synthetic peptide
  Seed: RMCSLMQGSTLPRRS
RMISLMQPSTGPRRS

SEQ ID NO: 124675 - protein, 15 aa, Artificial Sequence
  Description of Artificial Sequence: Synthetic peptide
  Seed: RMCSLMQGSTLPRRS
RMISLMQPSTHPRRS

SEQ ID NO: 124676 - protein, 15 aa, Artificial Sequence
  Description of Artificial Sequence: Synthetic peptide
  Seed: RMCSLMQGSTLPRRS
RMISLMQPSTIPRRS

SEQ ID NO: 124677 - protein, 15 aa, Artificial Sequence
  Description of Artificial Sequence: Synthetic peptide
  Seed: RMCSLMQGSTLPRRS
RMISLMQPSTLPRRS

SEQ ID NO: 124678 - protein, 15 aa, Artificial Sequence
  Description of Artificial Sequence: Synthetic peptide
  Seed: RMCSLMQGSTLPRRS
RMISLMQPSTMPRRS

SEQ ID NO: 124679 - protein, 15 aa, Artificial Sequence
  Description of Artificial Sequence: Synthetic peptide
  Seed: RMCSLMQGSTLPRRS
RMISLMQPSTNPRRS

SEQ ID NO: 124680 - protein, 15 aa, Artificial Sequence
  Description of Artificial Sequence: Synthetic peptide
  Seed: RMCSLMQGSTLPRRS
RMISLMQPSTQPRRS

SEQ ID NO: 124681 - protein, 15 aa, Artificial Sequence
  Description of Artificial Sequence: Synthetic peptide
  Seed: RMCSLMQGSTLPRRS
RMISLMQPSTSPRRS

SEQ ID NO: 124682 - protein, 15 aa, Artificial Sequence
  Description of Artificial Sequence: Synthetic peptide
  Seed: RMCSLMQGSTLPRRS
RMISLMQPSTTPRRS

SEQ ID NO: 124683 - protein, 15 aa, Artificial Sequence
  Description of Artificial Sequence: Synthetic peptide
  Seed: RMCSLMQGSTLPRRS
RMISLMQPSTVPRRS

SEQ ID NO: 124684 - protein, 15 aa, Artificial Sequence
  Description of Artificial Sequence: Synthetic peptide
  Seed: RMCSLMQGSTLPRRS
RMISLMQSSTAPRRS

SEQ ID NO: 124685 - protein, 15 aa, Artificial Sequence
  Description of Artificial Sequence: Synthetic peptide
  Seed: RMCSLMQGSTLPRRS
RMISLMQSSTCPRRS

SEQ ID NO: 124686 - protein, 15 aa, Artificial Sequence
  Description of Artificial Sequence: Synthetic peptide
  Seed: RMCSLMQGSTLPRRS
RMISLMQSSTFPRRS

SEQ ID NO: 124687 - protein, 15 aa, Artificial Sequence
  Description of Artificial Sequence: Synthetic peptide
  Seed: RMCSLMQGSTLPRRS
RMISLMQSSTGPRRS

SEQ ID NO: 124688 - protein, 15 aa, Artificial Sequence
  Description of Artificial Sequence: Synthetic peptide
  Seed: RMCSLMQGSTLPRRS
RMISLMQSSTHPRRS

SEQ ID NO: 124689 - protein, 15 aa, Artificial Sequence
  Description of Artificial Sequence: Synthetic peptide
  Seed: RMCSLMQGSTLPRRS
RMISLMQSSTIPRRS

SEQ ID NO: 124690 - protein, 15 aa, Artificial Sequence
  Description of Artificial Sequence: Synthetic peptide
  Seed: RMCSLMQGSTLPRRS
RMISLMQSSTLPRRS

SEQ ID NO: 124691 - protein, 15 aa, Artificial Sequence
  Description of Artificial Sequence: Synthetic peptide
  Seed: RMCSLMQGSTLPRRS
RMISLMQSSTMPRRS

SEQ ID NO: 124692 - protein, 15 aa, Artificial Sequence
  Description of Artificial Sequence: Synthetic peptide
  Seed: RMCSLMQGSTLPRRS
RMISLMQSSTNPRRS

SEQ ID NO: 124693 - protein, 15 aa, Artificial Sequence
  Description of Artificial Sequence: Synthetic peptide
  Seed: RMCSLMQGSTLPRRS
RMISLMQSSTSPRRS

SEQ ID NO: 124694 - protein, 15 aa, Artificial Sequence
  Description of Artificial Sequence: Synthetic peptide
  Seed: RMCSLMQGSTLPRRS
RMISLMQSSTTPRRS

SEQ ID NO: 124695 - protein, 15 aa, Artificial Sequence
  Description of Artificial Sequence: Synthetic peptide
  Seed: RMCSLMQGSTLPRRS
RMISLMQSSTVPRRS

SEQ ID NO: 124696 - protein, 15 aa, Artificial Sequence
  Description of Artificial Sequence: Synthetic peptide
  Seed: RMCSLMQGSTLPRRS
RMISLMQTSTAPRRS

SEQ ID NO: 124697 - protein, 15 aa, Artificial Sequence
  Description of Artificial Sequence: Synthetic peptide
  Seed: RMCSLMQGSTLPRRS
RMISLMQTSTIPRRS

SEQ ID NO: 124698 - protein, 15 aa, Artificial Sequence
  Description of Artificial Sequence: Synthetic peptide
  Seed: RMCSLMQGSTLPRRS
RMISLMQTSTLPRRS

SEQ ID NO: 124699 - protein, 15 aa, Artificial Sequence
  Description of Artificial Sequence: Synthetic peptide
  Seed: RMCSLMQGSTLPRRS
RMISLMQTSTMPRRS

SEQ ID NO: 124700 - protein, 15 aa, Artificial Sequence
  Description of Artificial Sequence: Synthetic peptide
  Seed: RMCSLMQGSTLPRRS
RMISLMQTSTNPRRS

SEQ ID NO: 124701 - protein, 15 aa, Artificial Sequence
  Description of Artificial Sequence: Synthetic peptide
  Seed: RMCSLMQGSTLPRRS
RMISLMQTSTSPRRS

SEQ ID NO: 124702 - protein, 15 aa, Artificial Sequence
  Description of Artificial Sequence: Synthetic peptide
  Seed: RMCSLMQGSTLPRRS
RMISLMQTSTTPRRS

SEQ ID NO: 124703 - protein, 15 aa, Artificial Sequence
  Description of Artificial Sequence: Synthetic peptide
  Seed: RMCSLMQGSTLPRRS
RMISLMQTSTVPRRS

SEQ ID NO: 124704 - protein, 15 aa, Artificial Sequence
  Description of Artificial Sequence: Synthetic peptide
  Seed: RMCSLMQGSTLPRRS
RMISLMQVSTAPRRS

SEQ ID NO: 124705 - protein, 15 aa, Artificial Sequence
  Description of Artificial Sequence: Synthetic peptide
  Seed: RMCSLMQGSTLPRRS
RMISLMQVSTHPRRS

SEQ ID NO: 124706 - protein, 15 aa, Artificial Sequence
  Description of Artificial Sequence: Synthetic peptide
  Seed: RMCSLMQGSTLPRRS
RMISLMQVSTIPRRS

SEQ ID NO: 124707 - protein, 15 aa, Artificial Sequence
  Description of Artificial Sequence: Synthetic peptide
  Seed: RMCSLMQGSTLPRRS
RMISLMQVSTLPRRS

SEQ ID NO: 124708 - protein, 15 aa, Artificial Sequence
  Description of Artificial Sequence: Synthetic peptide
  Seed: RMCSLMQGSTLPRRS
RMISLMQVSTMPRRS

SEQ ID NO: 124709 - protein, 15 aa, Artificial Sequence
  Description of Artificial Sequence: Synthetic peptide
  Seed: RMCSLMQGSTLPRRS
RMISLMQVSTNPRRS

SEQ ID NO: 124710 - protein, 15 aa, Artificial Sequence
  Description of Artificial Sequence: Synthetic peptide
  Seed: RMCSLMQGSTLPRRS
RMISLMQVSTSPRRS

SEQ ID NO: 124711 - protein, 15 aa, Artificial Sequence
  Description of Artificial Sequence: Synthetic peptide
  Seed: RMCSLMQGSTLPRRS
RMISLMQVSTTPRRS

SEQ ID NO: 124712 - protein, 15 aa, Artificial Sequence
  Description of Artificial Sequence: Synthetic peptide
  Seed: RMCSLMQGSTLPRRS
RMISLMQVSTVPRRS

SEQ ID NO: 124713 - protein, 15 aa, Artificial Sequence
  Description of Artificial Sequence: Synthetic peptide
  Seed: RMCSLMQGSTLPRRS
RMISLNQASTLPRRS

SEQ ID NO: 124714 - protein, 15 aa, Artificial Sequence
  Description of Artificial Sequence: Synthetic peptide
  Seed: RMCSLMQGSTLPRRS
RMISLQQASTAPRRS

SEQ ID NO: 124715 - protein, 15 aa, Artificial Sequence
  Description of Artificial Sequence: Synthetic peptide
  Seed: RMCSLMQGSTLPRRS
RMISLQQASTIPRRS

SEQ ID NO: 124716 - protein, 15 aa, Artificial Sequence
  Description of Artificial Sequence: Synthetic peptide
  Seed: RMCSLMQGSTLPRRS
RMISLQQASTLPRRS

SEQ ID NO: 124717 - protein, 15 aa, Artificial Sequence
  Description of Artificial Sequence: Synthetic peptide
  Seed: RMCSLMQGSTLPRRS
RMISLQQASTMPRRS

SEQ ID NO: 124718 - protein, 15 aa, Artificial Sequence
  Description of Artificial Sequence: Synthetic peptide
  Seed: RMCSLMQGSTLPRRS
RMISLQQASTSPRRS

SEQ ID NO: 124719 - protein, 15 aa, Artificial Sequence
  Description of Artificial Sequence: Synthetic peptide
  Seed: RMCSLMQGSTLPRRS
RMISLQQASTTPRRS

SEQ ID NO: 124720 - protein, 15 aa, Artificial Sequence
  Description of Artificial Sequence: Synthetic peptide
  Seed: RMCSLMQGSTLPRRS
RMISLQQASTVPRRS

SEQ ID NO: 124721 - protein, 15 aa, Artificial Sequence
  Description of Artificial Sequence: Synthetic peptide
  Seed: RMCSLMQGSTLPRRS
RMISLQQGSTAPRRS

SEQ ID NO: 124722 - protein, 15 aa, Artificial Sequence
  Description of Artificial Sequence: Synthetic peptide
  Seed: RMCSLMQGSTLPRRS
RMISLQQGSTIPRRS

SEQ ID NO: 124723 - protein, 15 aa, Artificial Sequence
  Description of Artificial Sequence: Synthetic peptide
  Seed: RMCSLMQGSTLPRRS
RMISLQQGSTLPRRS

SEQ ID NO: 124724 - protein, 15 aa, Artificial Sequence
  Description of Artificial Sequence: Synthetic peptide
  Seed: RMCSLMQGSTLPRRS
RMISLQQGSTMPRRS

SEQ ID NO: 124725 - protein, 15 aa, Artificial Sequence
  Description of Artificial Sequence: Synthetic peptide
  Seed: RMCSLMQGSTLPRRS
RMISLQQGSTSPRRS

SEQ ID NO: 124726 - protein, 15 aa, Artificial Sequence
  Description of Artificial Sequence: Synthetic peptide
  Seed: RMCSLMQGSTLPRRS
RMISLQQGSTTPRRS

SEQ ID NO: 124727 - protein, 15 aa, Artificial Sequence
  Description of Artificial Sequence: Synthetic peptide
  Seed: RMCSLMQGSTLPRRS
RMISLQQGSTVPRRS

SEQ ID NO: 124728 - protein, 15 aa, Artificial Sequence
  Description of Artificial Sequence: Synthetic peptide
  Seed: RMCSLMQGSTLPRRS
RMISLQQNSTLPRRS

SEQ ID NO: 124729 - protein, 15 aa, Artificial Sequence
  Description of Artificial Sequence: Synthetic peptide
  Seed: RMCSLMQGSTLPRRS
RMISLQQNSTVPRRS

SEQ ID NO: 124730 - protein, 15 aa, Artificial Sequence
  Description of Artificial Sequence: Synthetic peptide
  Seed: RMCSLMQGSTLPRRS
RMISLQQPSTAPRRS

SEQ ID NO: 124731 - protein, 15 aa, Artificial Sequence
  Description of Artificial Sequence: Synthetic peptide
  Seed: RMCSLMQGSTLPRRS
RMISLQQPSTIPRRS

SEQ ID NO: 124732 - protein, 15 aa, Artificial Sequence
  Description of Artificial Sequence: Synthetic peptide
  Seed: RMCSLMQGSTLPRRS
RMISLQQPSTLPRRS

SEQ ID NO: 124733 - protein, 15 aa, Artificial Sequence
  Description of Artificial Sequence: Synthetic peptide
  Seed: RMCSLMQGSTLPRRS
RMISLQQPSTVPRRS

SEQ ID NO: 124734 - protein, 15 aa, Artificial Sequence
  Description of Artificial Sequence: Synthetic peptide
  Seed: RMCSLMQGSTLPRRS
RMISLQQSSTAPRRS

SEQ ID NO: 124735 - protein, 15 aa, Artificial Sequence
  Description of Artificial Sequence: Synthetic peptide
  Seed: RMCSLMQGSTLPRRS
RMISLQQSSTIPRRS

SEQ ID NO: 124736 - protein, 15 aa, Artificial Sequence
  Description of Artificial Sequence: Synthetic peptide
  Seed: RMCSLMQGSTLPRRS
RMISLQQSSTLPRRS

SEQ ID NO: 124737 - protein, 15 aa, Artificial Sequence
  Description of Artificial Sequence: Synthetic peptide
  Seed: RMCSLMQGSTLPRRS
RMISLQQSSTMPRRS

SEQ ID NO: 124738 - protein, 15 aa, Artificial Sequence
  Description of Artificial Sequence: Synthetic peptide
  Seed: RMCSLMQGSTLPRRS
RMISLQQSSTTPRRS

SEQ ID NO: 124739 - protein, 15 aa, Artificial Sequence
  Description of Artificial Sequence: Synthetic peptide
  Seed: RMCSLMQGSTLPRRS
RMISLQQSSTVPRRS

SEQ ID NO: 124740 - protein, 15 aa, Artificial Sequence
  Description of Artificial Sequence: Synthetic peptide
  Seed: RMCSLMQGSTLPRRS
RMISLQQTSTLPRRS

SEQ ID NO: 124741 - protein, 15 aa, Artificial Sequence
  Description of Artificial Sequence: Synthetic peptide
  Seed: RMCSLMQGSTLPRRS
RMISLQQTSTVPRRS

SEQ ID NO: 124742 - protein, 15 aa, Artificial Sequence
  Description of Artificial Sequence: Synthetic peptide
  Seed: RMCSLMQGSTLPRRS
RMISLSQASTAPRRS

SEQ ID NO: 124743 - protein, 15 aa, Artificial Sequence
  Description of Artificial Sequence: Synthetic peptide
  Seed: RMCSLMQGSTLPRRS
RMISLSQASTIPRRS

SEQ ID NO: 124744 - protein, 15 aa, Artificial Sequence
  Description of Artificial Sequence: Synthetic peptide
  Seed: RMCSLMQGSTLPRRS
RMISLSQASTLPRRS

SEQ ID NO: 124745 - protein, 15 aa, Artificial Sequence
  Description of Artificial Sequence: Synthetic peptide
  Seed: RMCSLMQGSTLPRRS
RMISLSQASTMPRRS

SEQ ID NO: 124746 - protein, 15 aa, Artificial Sequence
  Description of Artificial Sequence: Synthetic peptide
  Seed: RMCSLMQGSTLPRRS
RMISLSQASTVPRRS

SEQ ID NO: 124747 - protein, 15 aa, Artificial Sequence
  Description of Artificial Sequence: Synthetic peptide
  Seed: RMCSLMQGSTLPRRS
RMISLSQGSTAPRRS

SEQ ID NO: 124748 - protein, 15 aa, Artificial Sequence
  Description of Artificial Sequence: Synthetic peptide
  Seed: RMCSLMQGSTLPRRS
RMISLSQGSTIPRRS

SEQ ID NO: 124749 - protein, 15 aa, Artificial Sequence
  Description of Artificial Sequence: Synthetic peptide
  Seed: RMCSLMQGSTLPRRS
RMISLSQGSTLPRRS

SEQ ID NO: 124750 - protein, 15 aa, Artificial Sequence
  Description of Artificial Sequence: Synthetic peptide
  Seed: RMCSLMQGSTLPRRS
RMISLSQGSTVPRRS

SEQ ID NO: 124751 - protein, 15 aa, Artificial Sequence
  Description of Artificial Sequence: Synthetic peptide
  Seed: RMCSLMQGSTLPRRS
RMISLSQPSTLPRRS

SEQ ID NO: 124752 - protein, 15 aa, Artificial Sequence
  Description of Artificial Sequence: Synthetic peptide
  Seed: RMCSLMQGSTLPRRS
RMISLSQSSTFPRRS

SEQ ID NO: 124753 - protein, 15 aa, Artificial Sequence
  Description of Artificial Sequence: Synthetic peptide
  Seed: RMCSLMQGSTLPRRS
RMISLSQSSTIPRRS

SEQ ID NO: 124754 - protein, 15 aa, Artificial Sequence
  Description of Artificial Sequence: Synthetic peptide
  Seed: RMCSLMQGSTLPRRS
RMISLSQSSTLPRRS

SEQ ID NO: 124755 - protein, 15 aa, Artificial Sequence
  Description of Artificial Sequence: Synthetic peptide
  Seed: RMCSLMQGSTLPRRS
RMISLSQSSTMPRRS

SEQ ID NO: 124756 - protein, 15 aa, Artificial Sequence
  Description of Artificial Sequence: Synthetic peptide
  Seed: RMCSLMQGSTLPRRS
RMISLSQSSTVPRRS

SEQ ID NO: 124757 - protein, 15 aa, Artificial Sequence
  Description of Artificial Sequence: Synthetic peptide
  Seed: RMCSLMQGSTLPRRS
RMISLTQASTAPRRS

SEQ ID NO: 124758 - protein, 15 aa, Artificial Sequence
  Description of Artificial Sequence: Synthetic peptide
  Seed: RMCSLMQGSTLPRRS
RMISLTQASTFPRRS

SEQ ID NO: 124759 - protein, 15 aa, Artificial Sequence
  Description of Artificial Sequence: Synthetic peptide
  Seed: RMCSLMQGSTLPRRS
RMISLTQASTIPRRS

SEQ ID NO: 124760 - protein, 15 aa, Artificial Sequence
  Description of Artificial Sequence: Synthetic peptide
  Seed: RMCSLMQGSTLPRRS
RMISLTQASTLPRRS

SEQ ID NO: 124761 - protein, 15 aa, Artificial Sequence
  Description of Artificial Sequence: Synthetic peptide
  Seed: RMCSLMQGSTLPRRS
RMISLTQASTMPRRS

SEQ ID NO: 124762 - protein, 15 aa, Artificial Sequence
  Description of Artificial Sequence: Synthetic peptide
  Seed: RMCSLMQGSTLPRRS
RMISLTQASTVPRRS

SEQ ID NO: 124763 - protein, 15 aa, Artificial Sequence
  Description of Artificial Sequence: Synthetic peptide
  Seed: RMCSLMQGSTLPRRS
RMISLTQGSTIPRRS

SEQ ID NO: 124764 - protein, 15 aa, Artificial Sequence
  Description of Artificial Sequence: Synthetic peptide
  Seed: RMCSLMQGSTLPRRS
RMISLTQGSTLPRRS

SEQ ID NO: 124765 - protein, 15 aa, Artificial Sequence
  Description of Artificial Sequence: Synthetic peptide
  Seed: RMCSLMQGSTLPRRS
RMISLTQGSTVPRRS

SEQ ID NO: 124766 - protein, 15 aa, Artificial Sequence
  Description of Artificial Sequence: Synthetic peptide
  Seed: RMCSLMQGSTLPRRS
RMISLTQPSTIPRRS

SEQ ID NO: 124767 - protein, 15 aa, Artificial Sequence
  Description of Artificial Sequence: Synthetic peptide
  Seed: RMCSLMQGSTLPRRS
RMISLTQPSTLPRRS

SEQ ID NO: 124768 - protein, 15 aa, Artificial Sequence
  Description of Artificial Sequence: Synthetic peptide
  Seed: RMCSLMQGSTLPRRS
RMISLTQPSTVPRRS

SEQ ID NO: 124769 - protein, 15 aa, Artificial Sequence
  Description of Artificial Sequence: Synthetic peptide
  Seed: RMCSLMQGSTLPRRS
RMISLTQSSTFPRRS

SEQ ID NO: 124770 - protein, 15 aa, Artificial Sequence
  Description of Artificial Sequence: Synthetic peptide
  Seed: RMCSLMQGSTLPRRS
RMISLTQSSTIPRRS

SEQ ID NO: 124771 - protein, 15 aa, Artificial Sequence
  Description of Artificial Sequence: Synthetic peptide
  Seed: RMCSLMQGSTLPRRS
RMISLTQSSTLPRRS

SEQ ID NO: 124772 - protein, 15 aa, Artificial Sequence
  Description of Artificial Sequence: Synthetic peptide
  Seed: RMCSLMQGSTLPRRS
RMISLTQSSTMPRRS

SEQ ID NO: 124773 - protein, 15 aa, Artificial Sequence
  Description of Artificial Sequence: Synthetic peptide
  Seed: RMCSLMQGSTLPRRS
RMISLTQSSTVPRRS

SEQ ID NO: 124774 - protein, 15 aa, Artificial Sequence
  Description of Artificial Sequence: Synthetic peptide
  Seed: RMCSLMQGSTLPRRS
RMISLTQTSTIPRRS

SEQ ID NO: 124775 - protein, 15 aa, Artificial Sequence
  Description of Artificial Sequence: Synthetic peptide
  Seed: RMCSLMQGSTLPRRS
RMISLTQTSTLPRRS

SEQ ID NO: 124776 - protein, 15 aa, Artificial Sequence
  Description of Artificial Sequence: Synthetic peptide
  Seed: RMCSLMQGSTLPRRS
RMISLVQASTAPRRS

SEQ ID NO: 124777 - protein, 15 aa, Artificial Sequence
  Description of Artificial Sequence: Synthetic peptide
  Seed: RMCSLMQGSTLPRRS
RMISLVQASTIPRRS

SEQ ID NO: 124778 - protein, 15 aa, Artificial Sequence
  Description of Artificial Sequence: Synthetic peptide
  Seed: RMCSLMQGSTLPRRS
RMISLVQASTLPRRS

SEQ ID NO: 124779 - protein, 15 aa, Artificial Sequence
  Description of Artificial Sequence: Synthetic peptide
  Seed: RMCSLMQGSTLPRRS
RMISLVQASTMPRRS

SEQ ID NO: 124780 - protein, 15 aa, Artificial Sequence
  Description of Artificial Sequence: Synthetic peptide
  Seed: RMCSLMQGSTLPRRS
RMISLVQASTNPRRS

SEQ ID NO: 124781 - protein, 15 aa, Artificial Sequence
  Description of Artificial Sequence: Synthetic peptide
  Seed: RMCSLMQGSTLPRRS
RMISLVQASTSPRRS

SEQ ID NO: 124782 - protein, 15 aa, Artificial Sequence
  Description of Artificial Sequence: Synthetic peptide
  Seed: RMCSLMQGSTLPRRS
RMISLVQASTTPRRS

SEQ ID NO: 124783 - protein, 15 aa, Artificial Sequence
  Description of Artificial Sequence: Synthetic peptide
  Seed: RMCSLMQGSTLPRRS
RMISLVQASTVPRRS

SEQ ID NO: 124784 - protein, 15 aa, Artificial Sequence
  Description of Artificial Sequence: Synthetic peptide
  Seed: RMCSLMQGSTLPRRS
RMISLVQGSTAPRRS

SEQ ID NO: 124785 - protein, 15 aa, Artificial Sequence
  Description of Artificial Sequence: Synthetic peptide
  Seed: RMCSLMQGSTLPRRS
RMISLVQGSTIPRRS

SEQ ID NO: 124786 - protein, 15 aa, Artificial Sequence
  Description of Artificial Sequence: Synthetic peptide
  Seed: RMCSLMQGSTLPRRS
RMISLVQGSTLPRRS

SEQ ID NO: 124787 - protein, 15 aa, Artificial Sequence
  Description of Artificial Sequence: Synthetic peptide
  Seed: RMCSLMQGSTLPRRS
RMISLVQGSTMPRRS

SEQ ID NO: 124788 - protein, 15 aa, Artificial Sequence
  Description of Artificial Sequence: Synthetic peptide
  Seed: RMCSLMQGSTLPRRS
RMISLVQGSTSPRRS

SEQ ID NO: 124789 - protein, 15 aa, Artificial Sequence
  Description of Artificial Sequence: Synthetic peptide
  Seed: RMCSLMQGSTLPRRS
RMISLVQGSTTPRRS

SEQ ID NO: 124790 - protein, 15 aa, Artificial Sequence
  Description of Artificial Sequence: Synthetic peptide
  Seed: RMCSLMQGSTLPRRS
RMISLVQGSTVPRRS

SEQ ID NO: 124791 - protein, 15 aa, Artificial Sequence
  Description of Artificial Sequence: Synthetic peptide
  Seed: RMCSLMQGSTLPRRS
RMISLVQNSTLPRRS

SEQ ID NO: 124792 - protein, 15 aa, Artificial Sequence
  Description of Artificial Sequence: Synthetic peptide
  Seed: RMCSLMQGSTLPRRS
RMISLVQNSTVPRRS

SEQ ID NO: 124793 - protein, 15 aa, Artificial Sequence
  Description of Artificial Sequence: Synthetic peptide
  Seed: RMCSLMQGSTLPRRS
RMISLVQPSTAPRRS

SEQ ID NO: 124794 - protein, 15 aa, Artificial Sequence
  Description of Artificial Sequence: Synthetic peptide
  Seed: RMCSLMQGSTLPRRS
RMISLVQPSTIPRRS

SEQ ID NO: 124795 - protein, 15 aa, Artificial Sequence
  Description of Artificial Sequence: Synthetic peptide
  Seed: RMCSLMQGSTLPRRS
RMISLVQPSTLPRRS

SEQ ID NO: 124796 - protein, 15 aa, Artificial Sequence
  Description of Artificial Sequence: Synthetic peptide
  Seed: RMCSLMQGSTLPRRS
RMISLVQPSTMPRRS

SEQ ID NO: 124797 - protein, 15 aa, Artificial Sequence
  Description of Artificial Sequence: Synthetic peptide
  Seed: RMCSLMQGSTLPRRS
RMISLVQPSTVPRRS

SEQ ID NO: 124798 - protein, 15 aa, Artificial Sequence
  Description of Artificial Sequence: Synthetic peptide
  Seed: RMCSLMQGSTLPRRS
RMISLVQSSTAPRRS

SEQ ID NO: 124799 - protein, 15 aa, Artificial Sequence
  Description of Artificial Sequence: Synthetic peptide
  Seed: RMCSLMQGSTLPRRS
RMISLVQSSTIPRRS

SEQ ID NO: 124800 - protein, 15 aa, Artificial Sequence
  Description of Artificial Sequence: Synthetic peptide
  Seed: RMCSLMQGSTLPRRS
RMISLVQSSTLPRRS

SEQ ID NO: 124801 - protein, 15 aa, Artificial Sequence
  Description of Artificial Sequence: Synthetic peptide
  Seed: RMCSLMQGSTLPRRS
RMISLVQSSTMPRRS

SEQ ID NO: 124802 - protein, 15 aa, Artificial Sequence
  Description of Artificial Sequence: Synthetic peptide
  Seed: RMCSLMQGSTLPRRS
RMISLVQSSTSPRRS

SEQ ID NO: 124803 - protein, 15 aa, Artificial Sequence
  Description of Artificial Sequence: Synthetic peptide
  Seed: RMCSLMQGSTLPRRS
RMISLVQSSTTPRRS

SEQ ID NO: 124804 - protein, 15 aa, Artificial Sequence
  Description of Artificial Sequence: Synthetic peptide
  Seed: RMCSLMQGSTLPRRS
RMISLVQSSTVPRRS

SEQ ID NO: 124805 - protein, 15 aa, Artificial Sequence
  Description of Artificial Sequence: Synthetic peptide
  Seed: RMCSLMQGSTLPRRS
RMISLVQTSTLPRRS

SEQ ID NO: 124806 - protein, 15 aa, Artificial Sequence
  Description of Artificial Sequence: Synthetic peptide
  Seed: RMCSLMQGSTLPRRS
RMISLVQTSTVPRRS

SEQ ID NO: 124807 - protein, 15 aa, Artificial Sequence
  Description of Artificial Sequence: Synthetic peptide
  Seed: RMCSLMQGSTLPRRS
RMISLWQASTAPRRS

SEQ ID NO: 124808 - protein, 15 aa, Artificial Sequence
  Description of Artificial Sequence: Synthetic peptide
  Seed: RMCSLMQGSTLPRRS
RMLSLAQASTAPRRS

SEQ ID NO: 124809 - protein, 15 aa, Artificial Sequence
  Description of Artificial Sequence: Synthetic peptide
  Seed: RMCSLMQGSTLPRRS
RMLSLAQASTIPRRS

SEQ ID NO: 124810 - protein, 15 aa, Artificial Sequence
  Description of Artificial Sequence: Synthetic peptide
  Seed: RMCSLMQGSTLPRRS
RMLSLAQASTLPRRS

SEQ ID NO: 124811 - protein, 15 aa, Artificial Sequence
  Description of Artificial Sequence: Synthetic peptide
  Seed: RMCSLMQGSTLPRRS
RMLSLAQASTMPRRS

SEQ ID NO: 124812 - protein, 15 aa, Artificial Sequence
  Description of Artificial Sequence: Synthetic peptide
  Seed: RMCSLMQGSTLPRRS
RMLSLAQASTNPRRS

SEQ ID NO: 124813 - protein, 15 aa, Artificial Sequence
  Description of Artificial Sequence: Synthetic peptide
  Seed: RMCSLMQGSTLPRRS
RMLSLAQASTSPRRS

SEQ ID NO: 124814 - protein, 15 aa, Artificial Sequence
  Description of Artificial Sequence: Synthetic peptide
  Seed: RMCSLMQGSTLPRRS
RMLSLAQASTTPRRS

SEQ ID NO: 124815 - protein, 15 aa, Artificial Sequence
  Description of Artificial Sequence: Synthetic peptide
  Seed: RMCSLMQGSTLPRRS
RMLSLAQASTVPRRS

SEQ ID NO: 124816 - protein, 15 aa, Artificial Sequence
  Description of Artificial Sequence: Synthetic peptide
  Seed: RMCSLMQGSTLPRRS
RMLSLAQGSTAPRRS

SEQ ID NO: 124817 - protein, 15 aa, Artificial Sequence
  Description of Artificial Sequence: Synthetic peptide
  Seed: RMCSLMQGSTLPRRS
RMLSLAQGSTIPRRS

SEQ ID NO: 124818 - protein, 15 aa, Artificial Sequence
  Description of Artificial Sequence: Synthetic peptide
  Seed: RMCSLMQGSTLPRRS
RMLSLAQGSTLPRRS

SEQ ID NO: 124819 - protein, 15 aa, Artificial Sequence
  Description of Artificial Sequence: Synthetic peptide
  Seed: RMCSLMQGSTLPRRS
RMLSLAQGSTMPRRS

SEQ ID NO: 124820 - protein, 15 aa, Artificial Sequence
  Description of Artificial Sequence: Synthetic peptide
  Seed: RMCSLMQGSTLPRRS
RMLSLAQGSTSPRRS

SEQ ID NO: 124821 - protein, 15 aa, Artificial Sequence
  Description of Artificial Sequence: Synthetic peptide
  Seed: RMCSLMQGSTLPRRS
RMLSLAQGSTTPRRS

SEQ ID NO: 124822 - protein, 15 aa, Artificial Sequence
  Description of Artificial Sequence: Synthetic peptide
  Seed: RMCSLMQGSTLPRRS
RMLSLAQGSTVPRRS

SEQ ID NO: 124823 - protein, 15 aa, Artificial Sequence
  Description of Artificial Sequence: Synthetic peptide
  Seed: RMCSLMQGSTLPRRS
RMLSLAQNSTLPRRS

SEQ ID NO: 124824 - protein, 15 aa, Artificial Sequence
  Description of Artificial Sequence: Synthetic peptide
  Seed: RMCSLMQGSTLPRRS
RMLSLAQNSTVPRRS

SEQ ID NO: 124825 - protein, 15 aa, Artificial Sequence
  Description of Artificial Sequence: Synthetic peptide
  Seed: RMCSLMQGSTLPRRS
RMLSLAQPSTAPRRS

SEQ ID NO: 124826 - protein, 15 aa, Artificial Sequence
  Description of Artificial Sequence: Synthetic peptide
  Seed: RMCSLMQGSTLPRRS
RMLSLAQPSTIPRRS

SEQ ID NO: 124827 - protein, 15 aa, Artificial Sequence
  Description of Artificial Sequence: Synthetic peptide
  Seed: RMCSLMQGSTLPRRS
RMLSLAQPSTLPRRS

SEQ ID NO: 124828 - protein, 15 aa, Artificial Sequence
  Description of Artificial Sequence: Synthetic peptide
  Seed: RMCSLMQGSTLPRRS
RMLSLAQPSTMPRRS

SEQ ID NO: 124829 - protein, 15 aa, Artificial Sequence
  Description of Artificial Sequence: Synthetic peptide
  Seed: RMCSLMQGSTLPRRS
RMLSLAQPSTVPRRS

SEQ ID NO: 124830 - protein, 15 aa, Artificial Sequence
  Description of Artificial Sequence: Synthetic peptide
  Seed: RMCSLMQGSTLPRRS
RMLSLAQSSTAPRRS

SEQ ID NO: 124831 - protein, 15 aa, Artificial Sequence
  Description of Artificial Sequence: Synthetic peptide
  Seed: RMCSLMQGSTLPRRS
RMLSLAQSSTIPRRS

SEQ ID NO: 124832 - protein, 15 aa, Artificial Sequence
  Description of Artificial Sequence: Synthetic peptide
  Seed: RMCSLMQGSTLPRRS
RMLSLAQSSTLPRRS

SEQ ID NO: 124833 - protein, 15 aa, Artificial Sequence
  Description of Artificial Sequence: Synthetic peptide
  Seed: RMCSLMQGSTLPRRS
RMLSLAQSSTMPRRS

SEQ ID NO: 124834 - protein, 15 aa, Artificial Sequence
  Description of Artificial Sequence: Synthetic peptide
  Seed: RMCSLMQGSTLPRRS
RMLSLAQSSTVPRRS

SEQ ID NO: 124835 - protein, 15 aa, Artificial Sequence
  Description of Artificial Sequence: Synthetic peptide
  Seed: RMCSLMQGSTLPRRS
RMLSLAQTSTLPRRS

SEQ ID NO: 124836 - protein, 15 aa, Artificial Sequence
  Description of Artificial Sequence: Synthetic peptide
  Seed: RMCSLMQGSTLPRRS
RMLSLEQASTAPRRS

SEQ ID NO: 124837 - protein, 15 aa, Artificial Sequence
  Description of Artificial Sequence: Synthetic peptide
  Seed: RMCSLMQGSTLPRRS
RMLSLEQASTIPRRS

SEQ ID NO: 124838 - protein, 15 aa, Artificial Sequence
  Description of Artificial Sequence: Synthetic peptide
  Seed: RMCSLMQGSTLPRRS
RMLSLEQASTLPRRS

SEQ ID NO: 124839 - protein, 15 aa, Artificial Sequence
  Description of Artificial Sequence: Synthetic peptide
  Seed: RMCSLMQGSTLPRRS
RMLSLEQASTVPRRS

SEQ ID NO: 124840 - protein, 15 aa, Artificial Sequence
  Description of Artificial Sequence: Synthetic peptide
  Seed: RMCSLMQGSTLPRRS
RMLSLEQGSTLPRRS

SEQ ID NO: 124841 - protein, 15 aa, Artificial Sequence
  Description of Artificial Sequence: Synthetic peptide
  Seed: RMCSLMQGSTLPRRS
RMLSLFQASTAPRRS

SEQ ID NO: 124842 - protein, 15 aa, Artificial Sequence
  Description of Artificial Sequence: Synthetic peptide
  Seed: RMCSLMQGSTLPRRS
RMLSLFQASTIPRRS

SEQ ID NO: 124843 - protein, 15 aa, Artificial Sequence
  Description of Artificial Sequence: Synthetic peptide
  Seed: RMCSLMQGSTLPRRS
RMLSLFQASTLPRRS

SEQ ID NO: 124844 - protein, 15 aa, Artificial Sequence
  Description of Artificial Sequence: Synthetic peptide
  Seed: RMCSLMQGSTLPRRS
RMLSLFQASTMPRRS

SEQ ID NO: 124845 - protein, 15 aa, Artificial Sequence
  Description of Artificial Sequence: Synthetic peptide
  Seed: RMCSLMQGSTLPRRS
RMLSLFQASTSPRRS

SEQ ID NO: 124846 - protein, 15 aa, Artificial Sequence
  Description of Artificial Sequence: Synthetic peptide
  Seed: RMCSLMQGSTLPRRS
RMLSLFQASTVPRRS

SEQ ID NO: 124847 - protein, 15 aa, Artificial Sequence
  Description of Artificial Sequence: Synthetic peptide
  Seed: RMCSLMQGSTLPRRS
RMLSLFQGSTAPRRS

SEQ ID NO: 124848 - protein, 15 aa, Artificial Sequence
  Description of Artificial Sequence: Synthetic peptide
  Seed: RMCSLMQGSTLPRRS
RMLSLFQGSTVPRRS

SEQ ID NO: 124849 - protein, 15 aa, Artificial Sequence
  Description of Artificial Sequence: Synthetic peptide
  Seed: RMCSLMQGSTLPRRS
RMLSLFQSSTVPRRS

SEQ ID NO: 124850 - protein, 15 aa, Artificial Sequence
  Description of Artificial Sequence: Synthetic peptide
  Seed: RMCSLMQGSTLPRRS
RMLSLGQASTIPRRS

SEQ ID NO: 124851 - protein, 15 aa, Artificial Sequence
  Description of Artificial Sequence: Synthetic peptide
  Seed: RMCSLMQGSTLPRRS
RMLSLGQASTLPRRS

SEQ ID NO: 124852 - protein, 15 aa, Artificial Sequence
  Description of Artificial Sequence: Synthetic peptide
  Seed: RMCSLMQGSTLPRRS
RMLSLGQASTVPRRS

SEQ ID NO: 124853 - protein, 15 aa, Artificial Sequence
  Description of Artificial Sequence: Synthetic peptide
  Seed: RMCSLMQGSTLPRRS
RMLSLIQASTAPRRS

SEQ ID NO: 124854 - protein, 15 aa, Artificial Sequence
  Description of Artificial Sequence: Synthetic peptide
  Seed: RMCSLMQGSTLPRRS
RMLSLIQASTCPRRS

SEQ ID NO: 124855 - protein, 15 aa, Artificial Sequence
  Description of Artificial Sequence: Synthetic peptide
  Seed: RMCSLMQGSTLPRRS
RMLSLIQASTGPRRS

SEQ ID NO: 124856 - protein, 15 aa, Artificial Sequence
  Description of Artificial Sequence: Synthetic peptide
  Seed: RMCSLMQGSTLPRRS
RMLSLIQASTIPRRS

SEQ ID NO: 124857 - protein, 15 aa, Artificial Sequence
  Description of Artificial Sequence: Synthetic peptide
  Seed: RMCSLMQGSTLPRRS
RMLSLIQASTLPRRS

SEQ ID NO: 124858 - protein, 15 aa, Artificial Sequence
  Description of Artificial Sequence: Synthetic peptide
  Seed: RMCSLMQGSTLPRRS
RMLSLIQASTMPRRS

SEQ ID NO: 124859 - protein, 15 aa, Artificial Sequence
  Description of Artificial Sequence: Synthetic peptide
  Seed: RMCSLMQGSTLPRRS
RMLSLIQASTNPRRS

SEQ ID NO: 124860 - protein, 15 aa, Artificial Sequence
  Description of Artificial Sequence: Synthetic peptide
  Seed: RMCSLMQGSTLPRRS
RMLSLIQASTSPRRS

SEQ ID NO: 124861 - protein, 15 aa, Artificial Sequence
  Description of Artificial Sequence: Synthetic peptide
  Seed: RMCSLMQGSTLPRRS
RMLSLIQASTTPRRS

SEQ ID NO: 124862 - protein, 15 aa, Artificial Sequence
  Description of Artificial Sequence: Synthetic peptide
  Seed: RMCSLMQGSTLPRRS
RMLSLIQASTVPRRS

SEQ ID NO: 124863 - protein, 15 aa, Artificial Sequence
  Description of Artificial Sequence: Synthetic peptide
  Seed: RMCSLMQGSTLPRRS
RMLSLIQGSTAPRRS

SEQ ID NO: 124864 - protein, 15 aa, Artificial Sequence
  Description of Artificial Sequence: Synthetic peptide
  Seed: RMCSLMQGSTLPRRS
RMLSLIQGSTGPRRS

SEQ ID NO: 124865 - protein, 15 aa, Artificial Sequence
  Description of Artificial Sequence: Synthetic peptide
  Seed: RMCSLMQGSTLPRRS
RMLSLIQGSTIPRRS

SEQ ID NO: 124866 - protein, 15 aa, Artificial Sequence
  Description of Artificial Sequence: Synthetic peptide
  Seed: RMCSLMQGSTLPRRS
RMLSLIQGSTLPRRS

SEQ ID NO: 124867 - protein, 15 aa, Artificial Sequence
  Description of Artificial Sequence: Synthetic peptide
  Seed: RMCSLMQGSTLPRRS
RMLSLIQGSTMPRRS

SEQ ID NO: 124868 - protein, 15 aa, Artificial Sequence
  Description of Artificial Sequence: Synthetic peptide
  Seed: RMCSLMQGSTLPRRS
RMLSLIQGSTSPRRS

SEQ ID NO: 124869 - protein, 15 aa, Artificial Sequence
  Description of Artificial Sequence: Synthetic peptide
  Seed: RMCSLMQGSTLPRRS
RMLSLIQGSTTPRRS

SEQ ID NO: 124870 - protein, 15 aa, Artificial Sequence
  Description of Artificial Sequence: Synthetic peptide
  Seed: RMCSLMQGSTLPRRS
RMLSLIQGSTVPRRS

SEQ ID NO: 124871 - protein, 15 aa, Artificial Sequence
  Description of Artificial Sequence: Synthetic peptide
  Seed: RMCSLMQGSTLPRRS
RMLSLIQISTAPRRS

SEQ ID NO: 124872 - protein, 15 aa, Artificial Sequence
  Description of Artificial Sequence: Synthetic peptide
  Seed: RMCSLMQGSTLPRRS
RMLSLIQNSTAPRRS

SEQ ID NO: 124873 - protein, 15 aa, Artificial Sequence
  Description of Artificial Sequence: Synthetic peptide
  Seed: RMCSLMQGSTLPRRS
RMLSLIQNSTIPRRS

SEQ ID NO: 124874 - protein, 15 aa, Artificial Sequence
  Description of Artificial Sequence: Synthetic peptide
  Seed: RMCSLMQGSTLPRRS
RMLSLIQNSTLPRRS

SEQ ID NO: 124875 - protein, 15 aa, Artificial Sequence
  Description of Artificial Sequence: Synthetic peptide
  Seed: RMCSLMQGSTLPRRS
RMLSLIQNSTVPRRS

SEQ ID NO: 124876 - protein, 15 aa, Artificial Sequence
  Description of Artificial Sequence: Synthetic peptide
  Seed: RMCSLMQGSTLPRRS
RMLSLIQPSTAPRRS

SEQ ID NO: 124877 - protein, 15 aa, Artificial Sequence
  Description of Artificial Sequence: Synthetic peptide
  Seed: RMCSLMQGSTLPRRS
RMLSLIQPSTIPRRS

SEQ ID NO: 124878 - protein, 15 aa, Artificial Sequence
  Description of Artificial Sequence: Synthetic peptide
  Seed: RMCSLMQGSTLPRRS
RMLSLIQPSTLPRRS

SEQ ID NO: 124879 - protein, 15 aa, Artificial Sequence
  Description of Artificial Sequence: Synthetic peptide
  Seed: RMCSLMQGSTLPRRS
RMLSLIQPSTMPRRS

SEQ ID NO: 124880 - protein, 15 aa, Artificial Sequence
  Description of Artificial Sequence: Synthetic peptide
  Seed: RMCSLMQGSTLPRRS
RMLSLIQPSTNPRRS

SEQ ID NO: 124881 - protein, 15 aa, Artificial Sequence
  Description of Artificial Sequence: Synthetic peptide
  Seed: RMCSLMQGSTLPRRS
RMLSLIQPSTSPRRS

SEQ ID NO: 124882 - protein, 15 aa, Artificial Sequence
  Description of Artificial Sequence: Synthetic peptide
  Seed: RMCSLMQGSTLPRRS
RMLSLIQPSTTPRRS

SEQ ID NO: 124883 - protein, 15 aa, Artificial Sequence
  Description of Artificial Sequence: Synthetic peptide
  Seed: RMCSLMQGSTLPRRS
RMLSLIQPSTVPRRS

SEQ ID NO: 124884 - protein, 15 aa, Artificial Sequence
  Description of Artificial Sequence: Synthetic peptide
  Seed: RMCSLMQGSTLPRRS
RMLSLIQSSTAPRRS

SEQ ID NO: 124885 - protein, 15 aa, Artificial Sequence
  Description of Artificial Sequence: Synthetic peptide
  Seed: RMCSLMQGSTLPRRS
RMLSLIQSSTIPRRS

SEQ ID NO: 124886 - protein, 15 aa, Artificial Sequence
  Description of Artificial Sequence: Synthetic peptide
  Seed: RMCSLMQGSTLPRRS
RMLSLIQSSTLPRRS

SEQ ID NO: 124887 - protein, 15 aa, Artificial Sequence
  Description of Artificial Sequence: Synthetic peptide
  Seed: RMCSLMQGSTLPRRS
RMLSLIQSSTMPRRS

SEQ ID NO: 124888 - protein, 15 aa, Artificial Sequence
  Description of Artificial Sequence: Synthetic peptide
  Seed: RMCSLMQGSTLPRRS
RMLSLIQSSTNPRRS

SEQ ID NO: 124889 - protein, 15 aa, Artificial Sequence
  Description of Artificial Sequence: Synthetic peptide
  Seed: RMCSLMQGSTLPRRS
RMLSLIQSSTSPRRS

SEQ ID NO: 124890 - protein, 15 aa, Artificial Sequence
  Description of Artificial Sequence: Synthetic peptide
  Seed: RMCSLMQGSTLPRRS
RMLSLIQSSTTPRRS

SEQ ID NO: 124891 - protein, 15 aa, Artificial Sequence
  Description of Artificial Sequence: Synthetic peptide
  Seed: RMCSLMQGSTLPRRS
RMLSLIQSSTVPRRS

SEQ ID NO: 124892 - protein, 15 aa, Artificial Sequence
  Description of Artificial Sequence: Synthetic peptide
  Seed: RMCSLMQGSTLPRRS
RMLSLIQTSTAPRRS

SEQ ID NO: 124893 - protein, 15 aa, Artificial Sequence
  Description of Artificial Sequence: Synthetic peptide
  Seed: RMCSLMQGSTLPRRS
RMLSLIQTSTIPRRS

SEQ ID NO: 124894 - protein, 15 aa, Artificial Sequence
  Description of Artificial Sequence: Synthetic peptide
  Seed: RMCSLMQGSTLPRRS
RMLSLIQTSTLPRRS

SEQ ID NO: 124895 - protein, 15 aa, Artificial Sequence
  Description of Artificial Sequence: Synthetic peptide
  Seed: RMCSLMQGSTLPRRS
RMLSLIQTSTNPRRS

SEQ ID NO: 124896 - protein, 15 aa, Artificial Sequence
  Description of Artificial Sequence: Synthetic peptide
  Seed: RMCSLMQGSTLPRRS
RMLSLIQTSTSPRRS

SEQ ID NO: 124897 - protein, 15 aa, Artificial Sequence
  Description of Artificial Sequence: Synthetic peptide
  Seed: RMCSLMQGSTLPRRS
RMLSLIQTSTVPRRS

SEQ ID NO: 124898 - protein, 15 aa, Artificial Sequence
  Description of Artificial Sequence: Synthetic peptide
  Seed: RMCSLMQGSTLPRRS
RMLSLIQVSTAPRRS

SEQ ID NO: 124899 - protein, 15 aa, Artificial Sequence
  Description of Artificial Sequence: Synthetic peptide
  Seed: RMCSLMQGSTLPRRS
RMLSLIQVSTNPRRS

SEQ ID NO: 124900 - protein, 15 aa, Artificial Sequence
  Description of Artificial Sequence: Synthetic peptide
  Seed: RMCSLMQGSTLPRRS
RMLSLIQVSTSPRRS

SEQ ID NO: 124901 - protein, 15 aa, Artificial Sequence
  Description of Artificial Sequence: Synthetic peptide
  Seed: RMCSLMQGSTLPRRS
RMLSLLQASTAPRRS

SEQ ID NO: 124902 - protein, 15 aa, Artificial Sequence
  Description of Artificial Sequence: Synthetic peptide
  Seed: RMCSLMQGSTLPRRS
RMLSLLQASTCPRRS

SEQ ID NO: 124903 - protein, 15 aa, Artificial Sequence
  Description of Artificial Sequence: Synthetic peptide
  Seed: RMCSLMQGSTLPRRS
RMLSLLQASTFPRRS

SEQ ID NO: 124904 - protein, 15 aa, Artificial Sequence
  Description of Artificial Sequence: Synthetic peptide
  Seed: RMCSLMQGSTLPRRS
RMLSLLQASTGPRRS

SEQ ID NO: 124905 - protein, 15 aa, Artificial Sequence
  Description of Artificial Sequence: Synthetic peptide
  Seed: RMCSLMQGSTLPRRS
RMLSLLQASTHPRRS

SEQ ID NO: 124906 - protein, 15 aa, Artificial Sequence
  Description of Artificial Sequence: Synthetic peptide
  Seed: RMCSLMQGSTLPRRS
RMLSLLQASTIPRRS

SEQ ID NO: 124907 - protein, 15 aa, Artificial Sequence
  Description of Artificial Sequence: Synthetic peptide
  Seed: RMCSLMQGSTLPRRS
RMLSLLQASTLPRRS

SEQ ID NO: 124908 - protein, 15 aa, Artificial Sequence
  Description of Artificial Sequence: Synthetic peptide
  Seed: RMCSLMQGSTLPRRS
RMLSLLQASTMPRRS

SEQ ID NO: 124909 - protein, 15 aa, Artificial Sequence
  Description of Artificial Sequence: Synthetic peptide
  Seed: RMCSLMQGSTLPRRS
RMLSLLQASTNPRRS

SEQ ID NO: 124910 - protein, 15 aa, Artificial Sequence
  Description of Artificial Sequence: Synthetic peptide
  Seed: RMCSLMQGSTLPRRS
RMLSLLQASTPPRRS

SEQ ID NO: 124911 - protein, 15 aa, Artificial Sequence
  Description of Artificial Sequence: Synthetic peptide
  Seed: RMCSLMQGSTLPRRS
RMLSLLQASTQPRRS

SEQ ID NO: 124912 - protein, 15 aa, Artificial Sequence
  Description of Artificial Sequence: Synthetic peptide
  Seed: RMCSLMQGSTLPRRS
RMLSLLQASTSPRRS

SEQ ID NO: 124913 - protein, 15 aa, Artificial Sequence
  Description of Artificial Sequence: Synthetic peptide
  Seed: RMCSLMQGSTLPRRS
RMLSLLQASTTPRRS

SEQ ID NO: 124914 - protein, 15 aa, Artificial Sequence
  Description of Artificial Sequence: Synthetic peptide
  Seed: RMCSLMQGSTLPRRS
RMLSLLQASTVPRRS

SEQ ID NO: 124915 - protein, 15 aa, Artificial Sequence
  Description of Artificial Sequence: Synthetic peptide
  Seed: RMCSLMQGSTLPRRS
RMLSLLQASTYPRRS

SEQ ID NO: 124916 - protein, 15 aa, Artificial Sequence
  Description of Artificial Sequence: Synthetic peptide
  Seed: RMCSLMQGSTLPRRS
RMLSLLQGSTAPRRS

SEQ ID NO: 124917 - protein, 15 aa, Artificial Sequence
  Description of Artificial Sequence: Synthetic peptide
  Seed: RMCSLMQGSTLPRRS
RMLSLLQGSTCPRRS

SEQ ID NO: 124918 - protein, 15 aa, Artificial Sequence
  Description of Artificial Sequence: Synthetic peptide
  Seed: RMCSLMQGSTLPRRS
RMLSLLQGSTFPRRS

SEQ ID NO: 124919 - protein, 15 aa, Artificial Sequence
  Description of Artificial Sequence: Synthetic peptide
  Seed: RMCSLMQGSTLPRRS
RMLSLLQGSTGPRRS

SEQ ID NO: 124920 - protein, 15 aa, Artificial Sequence
  Description of Artificial Sequence: Synthetic peptide
  Seed: RMCSLMQGSTLPRRS
RMLSLLQGSTIPRRS

SEQ ID NO: 124921 - protein, 15 aa, Artificial Sequence
  Description of Artificial Sequence: Synthetic peptide
  Seed: RMCSLMQGSTLPRRS
RMLSLLQGSTLPRRS

SEQ ID NO: 124922 - protein, 15 aa, Artificial Sequence
  Description of Artificial Sequence: Synthetic peptide
  Seed: RMCSLMQGSTLPRRS
RMLSLLQGSTMPRRS

SEQ ID NO: 124923 - protein, 15 aa, Artificial Sequence
  Description of Artificial Sequence: Synthetic peptide
  Seed: RMCSLMQGSTLPRRS
RMLSLLQGSTNPRRS

SEQ ID NO: 124924 - protein, 15 aa, Artificial Sequence
  Description of Artificial Sequence: Synthetic peptide
  Seed: RMCSLMQGSTLPRRS
RMLSLLQGSTSPRRS

SEQ ID NO: 124925 - protein, 15 aa, Artificial Sequence
  Description of Artificial Sequence: Synthetic peptide
  Seed: RMCSLMQGSTLPRRS
RMLSLLQGSTTPRRS

SEQ ID NO: 124926 - protein, 15 aa, Artificial Sequence
  Description of Artificial Sequence: Synthetic peptide
  Seed: RMCSLMQGSTLPRRS
RMLSLLQGSTVPRRS

SEQ ID NO: 124927 - protein, 15 aa, Artificial Sequence
  Description of Artificial Sequence: Synthetic peptide
  Seed: RMCSLMQGSTLPRRS
RMLSLLQISTAPRRS

SEQ ID NO: 124928 - protein, 15 aa, Artificial Sequence
  Description of Artificial Sequence: Synthetic peptide
  Seed: RMCSLMQGSTLPRRS
RMLSLLQISTIPRRS

SEQ ID NO: 124929 - protein, 15 aa, Artificial Sequence
  Description of Artificial Sequence: Synthetic peptide
  Seed: RMCSLMQGSTLPRRS
RMLSLLQISTLPRRS

SEQ ID NO: 124930 - protein, 15 aa, Artificial Sequence
  Description of Artificial Sequence: Synthetic peptide
  Seed: RMCSLMQGSTLPRRS
RMLSLLQISTNPRRS

SEQ ID NO: 124931 - protein, 15 aa, Artificial Sequence
  Description of Artificial Sequence: Synthetic peptide
  Seed: RMCSLMQGSTLPRRS
RMLSLLQISTSPRRS

SEQ ID NO: 124932 - protein, 15 aa, Artificial Sequence
  Description of Artificial Sequence: Synthetic peptide
  Seed: RMCSLMQGSTLPRRS
RMLSLLQISTTPRRS

SEQ ID NO: 124933 - protein, 15 aa, Artificial Sequence
  Description of Artificial Sequence: Synthetic peptide
  Seed: RMCSLMQGSTLPRRS
RMLSLLQISTVPRRS

SEQ ID NO: 124934 - protein, 15 aa, Artificial Sequence
  Description of Artificial Sequence: Synthetic peptide
  Seed: RMCSLMQGSTLPRRS
RMLSLLQLSTAPRRS

SEQ ID NO: 124935 - protein, 15 aa, Artificial Sequence
  Description of Artificial Sequence: Synthetic peptide
  Seed: RMCSLMQGSTLPRRS
RMLSLLQMSTAPRRS

SEQ ID NO: 124936 - protein, 15 aa, Artificial Sequence
  Description of Artificial Sequence: Synthetic peptide
  Seed: RMCSLMQGSTLPRRS
RMLSLLQNSTAPRRS

SEQ ID NO: 124937 - protein, 15 aa, Artificial Sequence
  Description of Artificial Sequence: Synthetic peptide
  Seed: RMCSLMQGSTLPRRS
RMLSLLQNSTIPRRS

SEQ ID NO: 124938 - protein, 15 aa, Artificial Sequence
  Description of Artificial Sequence: Synthetic peptide
  Seed: RMCSLMQGSTLPRRS
RMLSLLQNSTLPRRS

SEQ ID NO: 124939 - protein, 15 aa, Artificial Sequence
  Description of Artificial Sequence: Synthetic peptide
  Seed: RMCSLMQGSTLPRRS
RMLSLLQNSTMPRRS

SEQ ID NO: 124940 - protein, 15 aa, Artificial Sequence
  Description of Artificial Sequence: Synthetic peptide
  Seed: RMCSLMQGSTLPRRS
RMLSLLQNSTNPRRS

SEQ ID NO: 124941 - protein, 15 aa, Artificial Sequence
  Description of Artificial Sequence: Synthetic peptide
  Seed: RMCSLMQGSTLPRRS
RMLSLLQNSTSPRRS

SEQ ID NO: 124942 - protein, 15 aa, Artificial Sequence
  Description of Artificial Sequence: Synthetic peptide
  Seed: RMCSLMQGSTLPRRS
RMLSLLQNSTTPRRS

SEQ ID NO: 124943 - protein, 15 aa, Artificial Sequence
  Description of Artificial Sequence: Synthetic peptide
  Seed: RMCSLMQGSTLPRRS
RMLSLLQNSTVPRRS

SEQ ID NO: 124944 - protein, 15 aa, Artificial Sequence
  Description of Artificial Sequence: Synthetic peptide
  Seed: RMCSLMQGSTLPRRS
RMLSLLQPSTAPRRS

SEQ ID NO: 124945 - protein, 15 aa, Artificial Sequence
  Description of Artificial Sequence: Synthetic peptide
  Seed: RMCSLMQGSTLPRRS
RMLSLLQPSTCPRRS

SEQ ID NO: 124946 - protein, 15 aa, Artificial Sequence
  Description of Artificial Sequence: Synthetic peptide
  Seed: RMCSLMQGSTLPRRS
RMLSLLQPSTFPRRS

SEQ ID NO: 124947 - protein, 15 aa, Artificial Sequence
  Description of Artificial Sequence: Synthetic peptide
  Seed: RMCSLMQGSTLPRRS
RMLSLLQPSTGPRRS

SEQ ID NO: 124948 - protein, 15 aa, Artificial Sequence
  Description of Artificial Sequence: Synthetic peptide
  Seed: RMCSLMQGSTLPRRS
RMLSLLQPSTHPRRS

SEQ ID NO: 124949 - protein, 15 aa, Artificial Sequence
  Description of Artificial Sequence: Synthetic peptide
  Seed: RMCSLMQGSTLPRRS
RMLSLLQPSTIPRRS

SEQ ID NO: 124950 - protein, 15 aa, Artificial Sequence
  Description of Artificial Sequence: Synthetic peptide
  Seed: RMCSLMQGSTLPRRS
RMLSLLQPSTLPRRS

SEQ ID NO: 124951 - protein, 15 aa, Artificial Sequence
  Description of Artificial Sequence: Synthetic peptide
  Seed: RMCSLMQGSTLPRRS
RMLSLLQPSTMPRRS

SEQ ID NO: 124952 - protein, 15 aa, Artificial Sequence
  Description of Artificial Sequence: Synthetic peptide
  Seed: RMCSLMQGSTLPRRS
RMLSLLQPSTNPRRS

SEQ ID NO: 124953 - protein, 15 aa, Artificial Sequence
  Description of Artificial Sequence: Synthetic peptide
  Seed: RMCSLMQGSTLPRRS
RMLSLLQPSTQPRRS

SEQ ID NO: 124954 - protein, 15 aa, Artificial Sequence
  Description of Artificial Sequence: Synthetic peptide
  Seed: RMCSLMQGSTLPRRS
RMLSLLQPSTSPRRS

SEQ ID NO: 124955 - protein, 15 aa, Artificial Sequence
  Description of Artificial Sequence: Synthetic peptide
  Seed: RMCSLMQGSTLPRRS
RMLSLLQPSTTPRRS

SEQ ID NO: 124956 - protein, 15 aa, Artificial Sequence
  Description of Artificial Sequence: Synthetic peptide
  Seed: RMCSLMQGSTLPRRS
RMLSLLQPSTVPRRS

SEQ ID NO: 124957 - protein, 15 aa, Artificial Sequence
  Description of Artificial Sequence: Synthetic peptide
  Seed: RMCSLMQGSTLPRRS
RMLSLLQSSTAPRRS

SEQ ID NO: 124958 - protein, 15 aa, Artificial Sequence
  Description of Artificial Sequence: Synthetic peptide
  Seed: RMCSLMQGSTLPRRS
RMLSLLQSSTCPRRS

SEQ ID NO: 124959 - protein, 15 aa, Artificial Sequence
  Description of Artificial Sequence: Synthetic peptide
  Seed: RMCSLMQGSTLPRRS
RMLSLLQSSTFPRRS

SEQ ID NO: 124960 - protein, 15 aa, Artificial Sequence
  Description of Artificial Sequence: Synthetic peptide
  Seed: RMCSLMQGSTLPRRS
RMLSLLQSSTGPRRS

SEQ ID NO: 124961 - protein, 15 aa, Artificial Sequence
  Description of Artificial Sequence: Synthetic peptide
  Seed: RMCSLMQGSTLPRRS
RMLSLLQSSTIPRRS

SEQ ID NO: 124962 - protein, 15 aa, Artificial Sequence
  Description of Artificial Sequence: Synthetic peptide
  Seed: RMCSLMQGSTLPRRS
RMLSLLQSSTLPRRS

SEQ ID NO: 124963 - protein, 15 aa, Artificial Sequence
  Description of Artificial Sequence: Synthetic peptide
  Seed: RMCSLMQGSTLPRRS
RMLSLLQSSTMPRRS

SEQ ID NO: 124964 - protein, 15 aa, Artificial Sequence
  Description of Artificial Sequence: Synthetic peptide
  Seed: RMCSLMQGSTLPRRS
RMLSLLQSSTNPRRS

SEQ ID NO: 124965 - protein, 15 aa, Artificial Sequence
  Description of Artificial Sequence: Synthetic peptide
  Seed: RMCSLMQGSTLPRRS
RMLSLLQSSTSPRRS

SEQ ID NO: 124966 - protein, 15 aa, Artificial Sequence
  Description of Artificial Sequence: Synthetic peptide
  Seed: RMCSLMQGSTLPRRS
RMLSLLQSSTTPRRS

SEQ ID NO: 124967 - protein, 15 aa, Artificial Sequence
  Description of Artificial Sequence: Synthetic peptide
  Seed: RMCSLMQGSTLPRRS
RMLSLLQSSTVPRRS

SEQ ID NO: 124968 - protein, 15 aa, Artificial Sequence
  Description of Artificial Sequence: Synthetic peptide
  Seed: RMCSLMQGSTLPRRS
RMLSLLQTSTAPRRS

SEQ ID NO: 124969 - protein, 15 aa, Artificial Sequence
  Description of Artificial Sequence: Synthetic peptide
  Seed: RMCSLMQGSTLPRRS
RMLSLLQTSTIPRRS

SEQ ID NO: 124970 - protein, 15 aa, Artificial Sequence
  Description of Artificial Sequence: Synthetic peptide
  Seed: RMCSLMQGSTLPRRS
RMLSLLQTSTLPRRS

SEQ ID NO: 124971 - protein, 15 aa, Artificial Sequence
  Description of Artificial Sequence: Synthetic peptide
  Seed: RMCSLMQGSTLPRRS
RMLSLLQTSTMPRRS

SEQ ID NO: 124972 - protein, 15 aa, Artificial Sequence
  Description of Artificial Sequence: Synthetic peptide
  Seed: RMCSLMQGSTLPRRS
RMLSLLQTSTNPRRS

SEQ ID NO: 124973 - protein, 15 aa, Artificial Sequence
  Description of Artificial Sequence: Synthetic peptide
  Seed: RMCSLMQGSTLPRRS
RMLSLLQTSTSPRRS

SEQ ID NO: 124974 - protein, 15 aa, Artificial Sequence
  Description of Artificial Sequence: Synthetic peptide
  Seed: RMCSLMQGSTLPRRS
RMLSLLQTSTTPRRS

SEQ ID NO: 124975 - protein, 15 aa, Artificial Sequence
  Description of Artificial Sequence: Synthetic peptide
  Seed: RMCSLMQGSTLPRRS
RMLSLLQTSTVPRRS

SEQ ID NO: 124976 - protein, 15 aa, Artificial Sequence
  Description of Artificial Sequence: Synthetic peptide
  Seed: RMCSLMQGSTLPRRS
RMLSLLQVSTAPRRS

SEQ ID NO: 124977 - protein, 15 aa, Artificial Sequence
  Description of Artificial Sequence: Synthetic peptide
  Seed: RMCSLMQGSTLPRRS
RMLSLLQVSTIPRRS

SEQ ID NO: 124978 - protein, 15 aa, Artificial Sequence
  Description of Artificial Sequence: Synthetic peptide
  Seed: RMCSLMQGSTLPRRS
RMLSLLQVSTLPRRS

SEQ ID NO: 124979 - protein, 15 aa, Artificial Sequence
  Description of Artificial Sequence: Synthetic peptide
  Seed: RMCSLMQGSTLPRRS
RMLSLLQVSTMPRRS

SEQ ID NO: 124980 - protein, 15 aa, Artificial Sequence
  Description of Artificial Sequence: Synthetic peptide
  Seed: RMCSLMQGSTLPRRS
RMLSLLQVSTNPRRS

SEQ ID NO: 124981 - protein, 15 aa, Artificial Sequence
  Description of Artificial Sequence: Synthetic peptide
  Seed: RMCSLMQGSTLPRRS
RMLSLLQVSTSPRRS

SEQ ID NO: 124982 - protein, 15 aa, Artificial Sequence
  Description of Artificial Sequence: Synthetic peptide
  Seed: RMCSLMQGSTLPRRS
RMLSLLQVSTTPRRS

SEQ ID NO: 124983 - protein, 15 aa, Artificial Sequence
  Description of Artificial Sequence: Synthetic peptide
  Seed: RMCSLMQGSTLPRRS
RMLSLLQVSTVPRRS

SEQ ID NO: 124984 - protein, 15 aa, Artificial Sequence
  Description of Artificial Sequence: Synthetic peptide
  Seed: RMCSLMQGSTLPRRS
RMLSLMQASTAPRRS

SEQ ID NO: 124985 - protein, 15 aa, Artificial Sequence
  Description of Artificial Sequence: Synthetic peptide
  Seed: RMCSLMQGSTLPRRS
RMLSLMQASTCPRRS

SEQ ID NO: 124986 - protein, 15 aa, Artificial Sequence
  Description of Artificial Sequence: Synthetic peptide
  Seed: RMCSLMQGSTLPRRS
RMLSLMQASTFPRRS

SEQ ID NO: 124987 - protein, 15 aa, Artificial Sequence
  Description of Artificial Sequence: Synthetic peptide
  Seed: RMCSLMQGSTLPRRS
RMLSLMQASTGPRRS

SEQ ID NO: 124988 - protein, 15 aa, Artificial Sequence
  Description of Artificial Sequence: Synthetic peptide
  Seed: RMCSLMQGSTLPRRS
RMLSLMQASTHPRRS

SEQ ID NO: 124989 - protein, 15 aa, Artificial Sequence
  Description of Artificial Sequence: Synthetic peptide
  Seed: RMCSLMQGSTLPRRS
RMLSLMQASTIPRRS

SEQ ID NO: 124990 - protein, 15 aa, Artificial Sequence
  Description of Artificial Sequence: Synthetic peptide
  Seed: RMCSLMQGSTLPRRS
RMLSLMQASTKPRRS

SEQ ID NO: 124991 - protein, 15 aa, Artificial Sequence
  Description of Artificial Sequence: Synthetic peptide
  Seed: RMCSLMQGSTLPRRS
RMLSLMQASTLPRRS

SEQ ID NO: 124992 - protein, 15 aa, Artificial Sequence
  Description of Artificial Sequence: Synthetic peptide
  Seed: RMCSLMQGSTLPRRS
RMLSLMQASTMPRRS

SEQ ID NO: 124993 - protein, 15 aa, Artificial Sequence
  Description of Artificial Sequence: Synthetic peptide
  Seed: RMCSLMQGSTLPRRS
RMLSLMQASTNPRRS

SEQ ID NO: 124994 - protein, 15 aa, Artificial Sequence
  Description of Artificial Sequence: Synthetic peptide
  Seed: RMCSLMQGSTLPRRS
RMLSLMQASTQPRRS

SEQ ID NO: 124995 - protein, 15 aa, Artificial Sequence
  Description of Artificial Sequence: Synthetic peptide
  Seed: RMCSLMQGSTLPRRS
RMLSLMQASTRPRRS

SEQ ID NO: 124996 - protein, 15 aa, Artificial Sequence
  Description of Artificial Sequence: Synthetic peptide
  Seed: RMCSLMQGSTLPRRS
RMLSLMQASTSPRRS

SEQ ID NO: 124997 - protein, 15 aa, Artificial Sequence
  Description of Artificial Sequence: Synthetic peptide
  Seed: RMCSLMQGSTLPRRS
RMLSLMQASTTPRRS

SEQ ID NO: 124998 - protein, 15 aa, Artificial Sequence
  Description of Artificial Sequence: Synthetic peptide
  Seed: RMCSLMQGSTLPRRS
RMLSLMQASTVPRRS

SEQ ID NO: 124999 - protein, 15 aa, Artificial Sequence
  Description of Artificial Sequence: Synthetic peptide
  Seed: RMCSLMQGSTLPRRS
RMLSLMQASTYPRRS

SEQ ID NO: 125000 - protein, 15 aa, Artificial Sequence
  Description of Artificial Sequence: Synthetic peptide
  Seed: RMCSLMQGSTLPRRS
RMLSLMQGSTAPRRS

SEQ ID NO: 125001 - protein, 15 aa, Artificial Sequence
  Description of Artificial Sequence: Synthetic peptide
  Seed: RMCSLMQGSTLPRRS
RMLSLMQGSTCPRRS

SEQ ID NO: 125002 - protein, 15 aa, Artificial Sequence
  Description of Artificial Sequence: Synthetic peptide
  Seed: RMCSLMQGSTLPRRS
RMLSLMQGSTFPRRS

SEQ ID NO: 125003 - protein, 15 aa, Artificial Sequence
  Description of Artificial Sequence: Synthetic peptide
  Seed: RMCSLMQGSTLPRRS
RMLSLMQGSTGPRRS

SEQ ID NO: 125004 - protein, 15 aa, Artificial Sequence
  Description of Artificial Sequence: Synthetic peptide
  Seed: RMCSLMQGSTLPRRS
RMLSLMQGSTIPRRS

SEQ ID NO: 125005 - protein, 15 aa, Artificial Sequence
  Description of Artificial Sequence: Synthetic peptide
  Seed: RMCSLMQGSTLPRRS
RMLSLMQGSTLPRRS

SEQ ID NO: 125006 - protein, 15 aa, Artificial Sequence
  Description of Artificial Sequence: Synthetic peptide
  Seed: RMCSLMQGSTLPRRS
RMLSLMQGSTMPRRS

SEQ ID NO: 125007 - protein, 15 aa, Artificial Sequence
  Description of Artificial Sequence: Synthetic peptide
  Seed: RMCSLMQGSTLPRRS
RMLSLMQGSTNPRRS

SEQ ID NO: 125008 - protein, 15 aa, Artificial Sequence
  Description of Artificial Sequence: Synthetic peptide
  Seed: RMCSLMQGSTLPRRS
RMLSLMQGSTSPRRS

SEQ ID NO: 125009 - protein, 15 aa, Artificial Sequence
  Description of Artificial Sequence: Synthetic peptide
  Seed: RMCSLMQGSTLPRRS
RMLSLMQGSTTPRRS

SEQ ID NO: 125010 - protein, 15 aa, Artificial Sequence
  Description of Artificial Sequence: Synthetic peptide
  Seed: RMCSLMQGSTLPRRS
RMLSLMQGSTVPRRS

SEQ ID NO: 125011 - protein, 15 aa, Artificial Sequence
  Description of Artificial Sequence: Synthetic peptide
  Seed: RMCSLMQGSTLPRRS
RMLSLMQISTAPRRS

SEQ ID NO: 125012 - protein, 15 aa, Artificial Sequence
  Description of Artificial Sequence: Synthetic peptide
  Seed: RMCSLMQGSTLPRRS
RMLSLMQISTIPRRS

SEQ ID NO: 125013 - protein, 15 aa, Artificial Sequence
  Description of Artificial Sequence: Synthetic peptide
  Seed: RMCSLMQGSTLPRRS
RMLSLMQISTLPRRS

SEQ ID NO: 125014 - protein, 15 aa, Artificial Sequence
  Description of Artificial Sequence: Synthetic peptide
  Seed: RMCSLMQGSTLPRRS
RMLSLMQISTMPRRS

SEQ ID NO: 125015 - protein, 15 aa, Artificial Sequence
  Description of Artificial Sequence: Synthetic peptide
  Seed: RMCSLMQGSTLPRRS
RMLSLMQISTNPRRS

SEQ ID NO: 125016 - protein, 15 aa, Artificial Sequence
  Description of Artificial Sequence: Synthetic peptide
  Seed: RMCSLMQGSTLPRRS
RMLSLMQISTSPRRS

SEQ ID NO: 125017 - protein, 15 aa, Artificial Sequence
  Description of Artificial Sequence: Synthetic peptide
  Seed: RMCSLMQGSTLPRRS
RMLSLMQISTTPRRS

SEQ ID NO: 125018 - protein, 15 aa, Artificial Sequence
  Description of Artificial Sequence: Synthetic peptide
  Seed: RMCSLMQGSTLPRRS
RMLSLMQISTVPRRS

SEQ ID NO: 125019 - protein, 15 aa, Artificial Sequence
  Description of Artificial Sequence: Synthetic peptide
  Seed: RMCSLMQGSTLPRRS
RMLSLMQLSTAPRRS

SEQ ID NO: 125020 - protein, 15 aa, Artificial Sequence
  Description of Artificial Sequence: Synthetic peptide
  Seed: RMCSLMQGSTLPRRS
RMLSLMQLSTNPRRS

SEQ ID NO: 125021 - protein, 15 aa, Artificial Sequence
  Description of Artificial Sequence: Synthetic peptide
  Seed: RMCSLMQGSTLPRRS
RMLSLMQLSTSPRRS

SEQ ID NO: 125022 - protein, 15 aa, Artificial Sequence
  Description of Artificial Sequence: Synthetic peptide
  Seed: RMCSLMQGSTLPRRS
RMLSLMQMSTAPRRS

SEQ ID NO: 125023 - protein, 15 aa, Artificial Sequence
  Description of Artificial Sequence: Synthetic peptide
  Seed: RMCSLMQGSTLPRRS
RMLSLMQMSTSPRRS

SEQ ID NO: 125024 - protein, 15 aa, Artificial Sequence
  Description of Artificial Sequence: Synthetic peptide
  Seed: RMCSLMQGSTLPRRS
RMLSLMQNSTAPRRS

SEQ ID NO: 125025 - protein, 15 aa, Artificial Sequence
  Description of Artificial Sequence: Synthetic peptide
  Seed: RMCSLMQGSTLPRRS
RMLSLMQNSTIPRRS

SEQ ID NO: 125026 - protein, 15 aa, Artificial Sequence
  Description of Artificial Sequence: Synthetic peptide
  Seed: RMCSLMQGSTLPRRS
RMLSLMQNSTLPRRS

SEQ ID NO: 125027 - protein, 15 aa, Artificial Sequence
  Description of Artificial Sequence: Synthetic peptide
  Seed: RMCSLMQGSTLPRRS
RMLSLMQNSTMPRRS

SEQ ID NO: 125028 - protein, 15 aa, Artificial Sequence
  Description of Artificial Sequence: Synthetic peptide
  Seed: RMCSLMQGSTLPRRS
RMLSLMQNSTNPRRS

SEQ ID NO: 125029 - protein, 15 aa, Artificial Sequence
  Description of Artificial Sequence: Synthetic peptide
  Seed: RMCSLMQGSTLPRRS
RMLSLMQNSTSPRRS

SEQ ID NO: 125030 - protein, 15 aa, Artificial Sequence
  Description of Artificial Sequence: Synthetic peptide
  Seed: RMCSLMQGSTLPRRS
RMLSLMQNSTTPRRS

SEQ ID NO: 125031 - protein, 15 aa, Artificial Sequence
  Description of Artificial Sequence: Synthetic peptide
  Seed: RMCSLMQGSTLPRRS
RMLSLMQNSTVPRRS

SEQ ID NO: 125032 - protein, 15 aa, Artificial Sequence
  Description of Artificial Sequence: Synthetic peptide
  Seed: RMCSLMQGSTLPRRS
RMLSLMQPSTAPRRS

SEQ ID NO: 125033 - protein, 15 aa, Artificial Sequence
  Description of Artificial Sequence: Synthetic peptide
  Seed: RMCSLMQGSTLPRRS
RMLSLMQPSTCPRRS

SEQ ID NO: 125034 - protein, 15 aa, Artificial Sequence
  Description of Artificial Sequence: Synthetic peptide
  Seed: RMCSLMQGSTLPRRS
RMLSLMQPSTFPRRS

SEQ ID NO: 125035 - protein, 15 aa, Artificial Sequence
  Description of Artificial Sequence: Synthetic peptide
  Seed: RMCSLMQGSTLPRRS
RMLSLMQPSTGPRRS

SEQ ID NO: 125036 - protein, 15 aa, Artificial Sequence
  Description of Artificial Sequence: Synthetic peptide
  Seed: RMCSLMQGSTLPRRS
RMLSLMQPSTHPRRS

SEQ ID NO: 125037 - protein, 15 aa, Artificial Sequence
  Description of Artificial Sequence: Synthetic peptide
  Seed: RMCSLMQGSTLPRRS
RMLSLMQPSTIPRRS

SEQ ID NO: 125038 - protein, 15 aa, Artificial Sequence
  Description of Artificial Sequence: Synthetic peptide
  Seed: RMCSLMQGSTLPRRS
RMLSLMQPSTLPRRS

SEQ ID NO: 125039 - protein, 15 aa, Artificial Sequence
  Description of Artificial Sequence: Synthetic peptide
  Seed: RMCSLMQGSTLPRRS
RMLSLMQPSTMPRRS

SEQ ID NO: 125040 - protein, 15 aa, Artificial Sequence
  Description of Artificial Sequence: Synthetic peptide
  Seed: RMCSLMQGSTLPRRS
RMLSLMQPSTNPRRS

SEQ ID NO: 125041 - protein, 15 aa, Artificial Sequence
  Description of Artificial Sequence: Synthetic peptide
  Seed: RMCSLMQGSTLPRRS
RMLSLMQPSTQPRRS

SEQ ID NO: 125042 - protein, 15 aa, Artificial Sequence
  Description of Artificial Sequence: Synthetic peptide
  Seed: RMCSLMQGSTLPRRS
RMLSLMQPSTSPRRS

SEQ ID NO: 125043 - protein, 15 aa, Artificial Sequence
  Description of Artificial Sequence: Synthetic peptide
  Seed: RMCSLMQGSTLPRRS
RMLSLMQPSTTPRRS

SEQ ID NO: 125044 - protein, 15 aa, Artificial Sequence
  Description of Artificial Sequence: Synthetic peptide
  Seed: RMCSLMQGSTLPRRS
RMLSLMQPSTVPRRS

SEQ ID NO: 125045 - protein, 15 aa, Artificial Sequence
  Description of Artificial Sequence: Synthetic peptide
  Seed: RMCSLMQGSTLPRRS
RMLSLMQSSTAPRRS

SEQ ID NO: 125046 - protein, 15 aa, Artificial Sequence
  Description of Artificial Sequence: Synthetic peptide
  Seed: RMCSLMQGSTLPRRS
RMLSLMQSSTCPRRS

SEQ ID NO: 125047 - protein, 15 aa, Artificial Sequence
  Description of Artificial Sequence: Synthetic peptide
  Seed: RMCSLMQGSTLPRRS
RMLSLMQSSTGPRRS

SEQ ID NO: 125048 - protein, 15 aa, Artificial Sequence
  Description of Artificial Sequence: Synthetic peptide
  Seed: RMCSLMQGSTLPRRS
RMLSLMQSSTIPRRS

SEQ ID NO: 125049 - protein, 15 aa, Artificial Sequence
  Description of Artificial Sequence: Synthetic peptide
  Seed: RMCSLMQGSTLPRRS
RMLSLMQSSTLPRRS

SEQ ID NO: 125050 - protein, 15 aa, Artificial Sequence
  Description of Artificial Sequence: Synthetic peptide
  Seed: RMCSLMQGSTLPRRS
RMLSLMQSSTMPRRS

SEQ ID NO: 125051 - protein, 15 aa, Artificial Sequence
  Description of Artificial Sequence: Synthetic peptide
  Seed: RMCSLMQGSTLPRRS
RMLSLMQSSTNPRRS

SEQ ID NO: 125052 - protein, 15 aa, Artificial Sequence
  Description of Artificial Sequence: Synthetic peptide
  Seed: RMCSLMQGSTLPRRS
RMLSLMQSSTSPRRS

SEQ ID NO: 125053 - protein, 15 aa, Artificial Sequence
  Description of Artificial Sequence: Synthetic peptide
  Seed: RMCSLMQGSTLPRRS
RMLSLMQSSTTPRRS

SEQ ID NO: 125054 - protein, 15 aa, Artificial Sequence
  Description of Artificial Sequence: Synthetic peptide
  Seed: RMCSLMQGSTLPRRS
RMLSLMQSSTVPRRS

SEQ ID NO: 125055 - protein, 15 aa, Artificial Sequence
  Description of Artificial Sequence: Synthetic peptide
  Seed: RMCSLMQGSTLPRRS
RMLSLMQTSTAPRRS

SEQ ID NO: 125056 - protein, 15 aa, Artificial Sequence
  Description of Artificial Sequence: Synthetic peptide
  Seed: RMCSLMQGSTLPRRS
RMLSLMQTSTIPRRS

SEQ ID NO: 125057 - protein, 15 aa, Artificial Sequence
  Description of Artificial Sequence: Synthetic peptide
  Seed: RMCSLMQGSTLPRRS
RMLSLMQTSTLPRRS

SEQ ID NO: 125058 - protein, 15 aa, Artificial Sequence
  Description of Artificial Sequence: Synthetic peptide
  Seed: RMCSLMQGSTLPRRS
RMLSLMQTSTMPRRS

SEQ ID NO: 125059 - protein, 15 aa, Artificial Sequence
  Description of Artificial Sequence: Synthetic peptide
  Seed: RMCSLMQGSTLPRRS
RMLSLMQTSTNPRRS

SEQ ID NO: 125060 - protein, 15 aa, Artificial Sequence
  Description of Artificial Sequence: Synthetic peptide
  Seed: RMCSLMQGSTLPRRS
RMLSLMQTSTSPRRS

SEQ ID NO: 125061 - protein, 15 aa, Artificial Sequence
  Description of Artificial Sequence: Synthetic peptide
  Seed: RMCSLMQGSTLPRRS
RMLSLMQTSTTPRRS

SEQ ID NO: 125062 - protein, 15 aa, Artificial Sequence
  Description of Artificial Sequence: Synthetic peptide
  Seed: RMCSLMQGSTLPRRS
RMLSLMQTSTVPRRS

SEQ ID NO: 125063 - protein, 15 aa, Artificial Sequence
  Description of Artificial Sequence: Synthetic peptide
  Seed: RMCSLMQGSTLPRRS
RMLSLMQVSTAPRRS

SEQ ID NO: 125064 - protein, 15 aa, Artificial Sequence
  Description of Artificial Sequence: Synthetic peptide
  Seed: RMCSLMQGSTLPRRS
RMLSLMQVSTHPRRS

SEQ ID NO: 125065 - protein, 15 aa, Artificial Sequence
  Description of Artificial Sequence: Synthetic peptide
  Seed: RMCSLMQGSTLPRRS
RMLSLMQVSTIPRRS

SEQ ID NO: 125066 - protein, 15 aa, Artificial Sequence
  Description of Artificial Sequence: Synthetic peptide
  Seed: RMCSLMQGSTLPRRS
RMLSLMQVSTLPRRS

SEQ ID NO: 125067 - protein, 15 aa, Artificial Sequence
  Description of Artificial Sequence: Synthetic peptide
  Seed: RMCSLMQGSTLPRRS
RMLSLMQVSTMPRRS

SEQ ID NO: 125068 - protein, 15 aa, Artificial Sequence
  Description of Artificial Sequence: Synthetic peptide
  Seed: RMCSLMQGSTLPRRS
RMLSLMQVSTNPRRS

SEQ ID NO: 125069 - protein, 15 aa, Artificial Sequence
  Description of Artificial Sequence: Synthetic peptide
  Seed: RMCSLMQGSTLPRRS
RMLSLMQVSTSPRRS

SEQ ID NO: 125070 - protein, 15 aa, Artificial Sequence
  Description of Artificial Sequence: Synthetic peptide
  Seed: RMCSLMQGSTLPRRS
RMLSLMQVSTTPRRS

SEQ ID NO: 125071 - protein, 15 aa, Artificial Sequence
  Description of Artificial Sequence: Synthetic peptide
  Seed: RMCSLMQGSTLPRRS
RMLSLMQVSTVPRRS

SEQ ID NO: 125072 - protein, 15 aa, Artificial Sequence
  Description of Artificial Sequence: Synthetic peptide
  Seed: RMCSLMQGSTLPRRS
RMLSLQQASTAPRRS

SEQ ID NO: 125073 - protein, 15 aa, Artificial Sequence
  Description of Artificial Sequence: Synthetic peptide
  Seed: RMCSLMQGSTLPRRS
RMLSLQQASTIPRRS

SEQ ID NO: 125074 - protein, 15 aa, Artificial Sequence
  Description of Artificial Sequence: Synthetic peptide
  Seed: RMCSLMQGSTLPRRS
RMLSLQQASTLPRRS

SEQ ID NO: 125075 - protein, 15 aa, Artificial Sequence
  Description of Artificial Sequence: Synthetic peptide
  Seed: RMCSLMQGSTLPRRS
RMLSLQQASTMPRRS

SEQ ID NO: 125076 - protein, 15 aa, Artificial Sequence
  Description of Artificial Sequence: Synthetic peptide
  Seed: RMCSLMQGSTLPRRS
RMLSLQQASTSPRRS

SEQ ID NO: 125077 - protein, 15 aa, Artificial Sequence
  Description of Artificial Sequence: Synthetic peptide
  Seed: RMCSLMQGSTLPRRS
RMLSLQQASTTPRRS

SEQ ID NO: 125078 - protein, 15 aa, Artificial Sequence
  Description of Artificial Sequence: Synthetic peptide
  Seed: RMCSLMQGSTLPRRS
RMLSLQQASTVPRRS

SEQ ID NO: 125079 - protein, 15 aa, Artificial Sequence
  Description of Artificial Sequence: Synthetic peptide
  Seed: RMCSLMQGSTLPRRS
RMLSLQQGSTAPRRS

SEQ ID NO: 125080 - protein, 15 aa, Artificial Sequence
  Description of Artificial Sequence: Synthetic peptide
  Seed: RMCSLMQGSTLPRRS
RMLSLQQGSTIPRRS

SEQ ID NO: 125081 - protein, 15 aa, Artificial Sequence
  Description of Artificial Sequence: Synthetic peptide
  Seed: RMCSLMQGSTLPRRS
RMLSLQQGSTLPRRS

SEQ ID NO: 125082 - protein, 15 aa, Artificial Sequence
  Description of Artificial Sequence: Synthetic peptide
  Seed: RMCSLMQGSTLPRRS
RMLSLQQGSTMPRRS

SEQ ID NO: 125083 - protein, 15 aa, Artificial Sequence
  Description of Artificial Sequence: Synthetic peptide
  Seed: RMCSLMQGSTLPRRS
RMLSLQQGSTTPRRS

SEQ ID NO: 125084 - protein, 15 aa, Artificial Sequence
  Description of Artificial Sequence: Synthetic peptide
  Seed: RMCSLMQGSTLPRRS
RMLSLQQGSTVPRRS

SEQ ID NO: 125085 - protein, 15 aa, Artificial Sequence
  Description of Artificial Sequence: Synthetic peptide
  Seed: RMCSLMQGSTLPRRS
RMLSLQQPSTIPRRS

SEQ ID NO: 125086 - protein, 15 aa, Artificial Sequence
  Description of Artificial Sequence: Synthetic peptide
  Seed: RMCSLMQGSTLPRRS
RMLSLQQPSTLPRRS

SEQ ID NO: 125087 - protein, 15 aa, Artificial Sequence
  Description of Artificial Sequence: Synthetic peptide
  Seed: RMCSLMQGSTLPRRS
RMLSLQQPSTVPRRS

SEQ ID NO: 125088 - protein, 15 aa, Artificial Sequence
  Description of Artificial Sequence: Synthetic peptide
  Seed: RMCSLMQGSTLPRRS
RMLSLQQSSTAPRRS

SEQ ID NO: 125089 - protein, 15 aa, Artificial Sequence
  Description of Artificial Sequence: Synthetic peptide
  Seed: RMCSLMQGSTLPRRS
RMLSLQQSSTIPRRS

SEQ ID NO: 125090 - protein, 15 aa, Artificial Sequence
  Description of Artificial Sequence: Synthetic peptide
  Seed: RMCSLMQGSTLPRRS
RMLSLQQSSTLPRRS

SEQ ID NO: 125091 - protein, 15 aa, Artificial Sequence
  Description of Artificial Sequence: Synthetic peptide
  Seed: RMCSLMQGSTLPRRS
RMLSLQQSSTVPRRS

SEQ ID NO: 125092 - protein, 15 aa, Artificial Sequence
  Description of Artificial Sequence: Synthetic peptide
  Seed: RMCSLMQGSTLPRRS
RMLSLSQASTAPRRS

SEQ ID NO: 125093 - protein, 15 aa, Artificial Sequence
  Description of Artificial Sequence: Synthetic peptide
  Seed: RMCSLMQGSTLPRRS
RMLSLSQASTIPRRS

SEQ ID NO: 125094 - protein, 15 aa, Artificial Sequence
  Description of Artificial Sequence: Synthetic peptide
  Seed: RMCSLMQGSTLPRRS
RMLSLSQASTLPRRS

SEQ ID NO: 125095 - protein, 15 aa, Artificial Sequence
  Description of Artificial Sequence: Synthetic peptide
  Seed: RMCSLMQGSTLPRRS
RMLSLSQASTMPRRS

SEQ ID NO: 125096 - protein, 15 aa, Artificial Sequence
  Description of Artificial Sequence: Synthetic peptide
  Seed: RMCSLMQGSTLPRRS
RMLSLSQASTVPRRS

SEQ ID NO: 125097 - protein, 15 aa, Artificial Sequence
  Description of Artificial Sequence: Synthetic peptide
  Seed: RMCSLMQGSTLPRRS
RMLSLSQGSTIPRRS

SEQ ID NO: 125098 - protein, 15 aa, Artificial Sequence
  Description of Artificial Sequence: Synthetic peptide
  Seed: RMCSLMQGSTLPRRS
RMLSLSQGSTLPRRS

SEQ ID NO: 125099 - protein, 15 aa, Artificial Sequence
  Description of Artificial Sequence: Synthetic peptide
  Seed: RMCSLMQGSTLPRRS
RMLSLSQGSTVPRRS

SEQ ID NO: 125100 - protein, 15 aa, Artificial Sequence
  Description of Artificial Sequence: Synthetic peptide
  Seed: RMCSLMQGSTLPRRS
RMLSLSQSSTIPRRS

SEQ ID NO: 125101 - protein, 15 aa, Artificial Sequence
  Description of Artificial Sequence: Synthetic peptide
  Seed: RMCSLMQGSTLPRRS
RMLSLSQSSTLPRRS

SEQ ID NO: 125102 - protein, 15 aa, Artificial Sequence
  Description of Artificial Sequence: Synthetic peptide
  Seed: RMCSLMQGSTLPRRS
RMLSLSQSSTVPRRS

SEQ ID NO: 125103 - protein, 15 aa, Artificial Sequence
  Description of Artificial Sequence: Synthetic peptide
  Seed: RMCSLMQGSTLPRRS
RMLSLTQASTIPRRS

SEQ ID NO: 125104 - protein, 15 aa, Artificial Sequence
  Description of Artificial Sequence: Synthetic peptide
  Seed: RMCSLMQGSTLPRRS
RMLSLTQASTLPRRS

SEQ ID NO: 125105 - protein, 15 aa, Artificial Sequence
  Description of Artificial Sequence: Synthetic peptide
  Seed: RMCSLMQGSTLPRRS
RMLSLTQASTMPRRS

SEQ ID NO: 125106 - protein, 15 aa, Artificial Sequence
  Description of Artificial Sequence: Synthetic peptide
  Seed: RMCSLMQGSTLPRRS
RMLSLTQASTVPRRS

SEQ ID NO: 125107 - protein, 15 aa, Artificial Sequence
  Description of Artificial Sequence: Synthetic peptide
  Seed: RMCSLMQGSTLPRRS
RMLSLTQGSTIPRRS

SEQ ID NO: 125108 - protein, 15 aa, Artificial Sequence
  Description of Artificial Sequence: Synthetic peptide
  Seed: RMCSLMQGSTLPRRS
RMLSLTQGSTLPRRS

SEQ ID NO: 125109 - protein, 15 aa, Artificial Sequence
  Description of Artificial Sequence: Synthetic peptide
  Seed: RMCSLMQGSTLPRRS
RMLSLTQGSTVPRRS

SEQ ID NO: 125110 - protein, 15 aa, Artificial Sequence
  Description of Artificial Sequence: Synthetic peptide
  Seed: RMCSLMQGSTLPRRS
RMLSLTQPSTIPRRS

SEQ ID NO: 125111 - protein, 15 aa, Artificial Sequence
  Description of Artificial Sequence: Synthetic peptide
  Seed: RMCSLMQGSTLPRRS
RMLSLTQPSTLPRRS

SEQ ID NO: 125112 - protein, 15 aa, Artificial Sequence
  Description of Artificial Sequence: Synthetic peptide
  Seed: RMCSLMQGSTLPRRS
RMLSLTQSSTFPRRS

SEQ ID NO: 125113 - protein, 15 aa, Artificial Sequence
  Description of Artificial Sequence: Synthetic peptide
  Seed: RMCSLMQGSTLPRRS
RMLSLTQSSTIPRRS

SEQ ID NO: 125114 - protein, 15 aa, Artificial Sequence
  Description of Artificial Sequence: Synthetic peptide
  Seed: RMCSLMQGSTLPRRS
RMLSLTQSSTLPRRS

SEQ ID NO: 125115 - protein, 15 aa, Artificial Sequence
  Description of Artificial Sequence: Synthetic peptide
  Seed: RMCSLMQGSTLPRRS
RMLSLTQSSTMPRRS

SEQ ID NO: 125116 - protein, 15 aa, Artificial Sequence
  Description of Artificial Sequence: Synthetic peptide
  Seed: RMCSLMQGSTLPRRS
RMLSLTQSSTVPRRS

SEQ ID NO: 125117 - protein, 15 aa, Artificial Sequence
  Description of Artificial Sequence: Synthetic peptide
  Seed: RMCSLMQGSTLPRRS
RMLSLTQTSTIPRRS

SEQ ID NO: 125118 - protein, 15 aa, Artificial Sequence
  Description of Artificial Sequence: Synthetic peptide
  Seed: RMCSLMQGSTLPRRS
RMLSLVQASTAPRRS

SEQ ID NO: 125119 - protein, 15 aa, Artificial Sequence
  Description of Artificial Sequence: Synthetic peptide
  Seed: RMCSLMQGSTLPRRS
RMLSLVQASTIPRRS

SEQ ID NO: 125120 - protein, 15 aa, Artificial Sequence
  Description of Artificial Sequence: Synthetic peptide
  Seed: RMCSLMQGSTLPRRS
RMLSLVQASTLPRRS

SEQ ID NO: 125121 - protein, 15 aa, Artificial Sequence
  Description of Artificial Sequence: Synthetic peptide
  Seed: RMCSLMQGSTLPRRS
RMLSLVQASTMPRRS

SEQ ID NO: 125122 - protein, 15 aa, Artificial Sequence
  Description of Artificial Sequence: Synthetic peptide
  Seed: RMCSLMQGSTLPRRS
RMLSLVQASTNPRRS

SEQ ID NO: 125123 - protein, 15 aa, Artificial Sequence
  Description of Artificial Sequence: Synthetic peptide
  Seed: RMCSLMQGSTLPRRS
RMLSLVQASTSPRRS

SEQ ID NO: 125124 - protein, 15 aa, Artificial Sequence
  Description of Artificial Sequence: Synthetic peptide
  Seed: RMCSLMQGSTLPRRS
RMLSLVQASTTPRRS

SEQ ID NO: 125125 - protein, 15 aa, Artificial Sequence
  Description of Artificial Sequence: Synthetic peptide
  Seed: RMCSLMQGSTLPRRS
RMLSLVQASTVPRRS

SEQ ID NO: 125126 - protein, 15 aa, Artificial Sequence
  Description of Artificial Sequence: Synthetic peptide
  Seed: RMCSLMQGSTLPRRS
RMLSLVQGSTAPRRS

SEQ ID NO: 125127 - protein, 15 aa, Artificial Sequence
  Description of Artificial Sequence: Synthetic peptide
  Seed: RMCSLMQGSTLPRRS
RMLSLVQGSTIPRRS

SEQ ID NO: 125128 - protein, 15 aa, Artificial Sequence
  Description of Artificial Sequence: Synthetic peptide
  Seed: RMCSLMQGSTLPRRS
RMLSLVQGSTLPRRS

SEQ ID NO: 125129 - protein, 15 aa, Artificial Sequence
  Description of Artificial Sequence: Synthetic peptide
  Seed: RMCSLMQGSTLPRRS
RMLSLVQGSTMPRRS

SEQ ID NO: 125130 - protein, 15 aa, Artificial Sequence
  Description of Artificial Sequence: Synthetic peptide
  Seed: RMCSLMQGSTLPRRS
RMLSLVQGSTTPRRS

SEQ ID NO: 125131 - protein, 15 aa, Artificial Sequence
  Description of Artificial Sequence: Synthetic peptide
  Seed: RMCSLMQGSTLPRRS
RMLSLVQGSTVPRRS

SEQ ID NO: 125132 - protein, 15 aa, Artificial Sequence
  Description of Artificial Sequence: Synthetic peptide
  Seed: RMCSLMQGSTLPRRS
RMLSLVQPSTAPRRS

SEQ ID NO: 125133 - protein, 15 aa, Artificial Sequence
  Description of Artificial Sequence: Synthetic peptide
  Seed: RMCSLMQGSTLPRRS
RMLSLVQPSTIPRRS

SEQ ID NO: 125134 - protein, 15 aa, Artificial Sequence
  Description of Artificial Sequence: Synthetic peptide
  Seed: RMCSLMQGSTLPRRS
RMLSLVQPSTLPRRS

SEQ ID NO: 125135 - protein, 15 aa, Artificial Sequence
  Description of Artificial Sequence: Synthetic peptide
  Seed: RMCSLMQGSTLPRRS
RMLSLVQPSTVPRRS

SEQ ID NO: 125136 - protein, 15 aa, Artificial Sequence
  Description of Artificial Sequence: Synthetic peptide
  Seed: RMCSLMQGSTLPRRS
RMLSLVQSSTAPRRS

SEQ ID NO: 125137 - protein, 15 aa, Artificial Sequence
  Description of Artificial Sequence: Synthetic peptide
  Seed: RMCSLMQGSTLPRRS
RMLSLVQSSTIPRRS

SEQ ID NO: 125138 - protein, 15 aa, Artificial Sequence
  Description of Artificial Sequence: Synthetic peptide
  Seed: RMCSLMQGSTLPRRS
RMLSLVQSSTLPRRS

SEQ ID NO: 125139 - protein, 15 aa, Artificial Sequence
  Description of Artificial Sequence: Synthetic peptide
  Seed: RMCSLMQGSTLPRRS
RMLSLVQSSTVPRRS

SEQ ID NO: 125140 - protein, 15 aa, Artificial Sequence
  Description of Artificial Sequence: Synthetic peptide
  Seed: RMCSLMQGSTLPRRS
RMMSLAQASTAPRRS

SEQ ID NO: 125141 - protein, 15 aa, Artificial Sequence
  Description of Artificial Sequence: Synthetic peptide
  Seed: RMCSLMQGSTLPRRS
RMMSLAQASTIPRRS

SEQ ID NO: 125142 - protein, 15 aa, Artificial Sequence
  Description of Artificial Sequence: Synthetic peptide
  Seed: RMCSLMQGSTLPRRS
RMMSLAQASTLPRRS

SEQ ID NO: 125143 - protein, 15 aa, Artificial Sequence
  Description of Artificial Sequence: Synthetic peptide
  Seed: RMCSLMQGSTLPRRS
RMMSLAQASTMPRRS

SEQ ID NO: 125144 - protein, 15 aa, Artificial Sequence
  Description of Artificial Sequence: Synthetic peptide
  Seed: RMCSLMQGSTLPRRS
RMMSLAQASTVPRRS

SEQ ID NO: 125145 - protein, 15 aa, Artificial Sequence
  Description of Artificial Sequence: Synthetic peptide
  Seed: RMCSLMQGSTLPRRS
RMMSLAQGSTAPRRS

SEQ ID NO: 125146 - protein, 15 aa, Artificial Sequence
  Description of Artificial Sequence: Synthetic peptide
  Seed: RMCSLMQGSTLPRRS
RMMSLAQGSTIPRRS

SEQ ID NO: 125147 - protein, 15 aa, Artificial Sequence
  Description of Artificial Sequence: Synthetic peptide
  Seed: RMCSLMQGSTLPRRS
RMMSLAQGSTLPRRS

SEQ ID NO: 125148 - protein, 15 aa, Artificial Sequence
  Description of Artificial Sequence: Synthetic peptide
  Seed: RMCSLMQGSTLPRRS
RMMSLAQGSTVPRRS

SEQ ID NO: 125149 - protein, 15 aa, Artificial Sequence
  Description of Artificial Sequence: Synthetic peptide
  Seed: RMCSLMQGSTLPRRS
RMMSLAQPSTLPRRS

SEQ ID NO: 125150 - protein, 15 aa, Artificial Sequence
  Description of Artificial Sequence: Synthetic peptide
  Seed: RMCSLMQGSTLPRRS
RMMSLAQSSTIPRRS

SEQ ID NO: 125151 - protein, 15 aa, Artificial Sequence
  Description of Artificial Sequence: Synthetic peptide
  Seed: RMCSLMQGSTLPRRS
RMMSLAQSSTLPRRS

SEQ ID NO: 125152 - protein, 15 aa, Artificial Sequence
  Description of Artificial Sequence: Synthetic peptide
  Seed: RMCSLMQGSTLPRRS
RMMSLAQSSTVPRRS

SEQ ID NO: 125153 - protein, 15 aa, Artificial Sequence
  Description of Artificial Sequence: Synthetic peptide
  Seed: RMCSLMQGSTLPRRS
RMMSLFQASTIPRRS

SEQ ID NO: 125154 - protein, 15 aa, Artificial Sequence
  Description of Artificial Sequence: Synthetic peptide
  Seed: RMCSLMQGSTLPRRS
RMMSLFQASTLPRRS

SEQ ID NO: 125155 - protein, 15 aa, Artificial Sequence
  Description of Artificial Sequence: Synthetic peptide
  Seed: RMCSLMQGSTLPRRS
RMMSLFQASTVPRRS

SEQ ID NO: 125156 - protein, 15 aa, Artificial Sequence
  Description of Artificial Sequence: Synthetic peptide
  Seed: RMCSLMQGSTLPRRS
RMMSLIQASTAPRRS

SEQ ID NO: 125157 - protein, 15 aa, Artificial Sequence
  Description of Artificial Sequence: Synthetic peptide
  Seed: RMCSLMQGSTLPRRS
RMMSLIQASTIPRRS

SEQ ID NO: 125158 - protein, 15 aa, Artificial Sequence
  Description of Artificial Sequence: Synthetic peptide
  Seed: RMCSLMQGSTLPRRS
RMMSLIQASTLPRRS

SEQ ID NO: 125159 - protein, 15 aa, Artificial Sequence
  Description of Artificial Sequence: Synthetic peptide
  Seed: RMCSLMQGSTLPRRS
RMMSLIQASTMPRRS

SEQ ID NO: 125160 - protein, 15 aa, Artificial Sequence
  Description of Artificial Sequence: Synthetic peptide
  Seed: RMCSLMQGSTLPRRS
RMMSLIQASTNPRRS

SEQ ID NO: 125161 - protein, 15 aa, Artificial Sequence
  Description of Artificial Sequence: Synthetic peptide
  Seed: RMCSLMQGSTLPRRS
RMMSLIQASTSPRRS

SEQ ID NO: 125162 - protein, 15 aa, Artificial Sequence
  Description of Artificial Sequence: Synthetic peptide
  Seed: RMCSLMQGSTLPRRS
RMMSLIQASTTPRRS

SEQ ID NO: 125163 - protein, 15 aa, Artificial Sequence
  Description of Artificial Sequence: Synthetic peptide
  Seed: RMCSLMQGSTLPRRS
RMMSLIQASTVPRRS

SEQ ID NO: 125164 - protein, 15 aa, Artificial Sequence
  Description of Artificial Sequence: Synthetic peptide
  Seed: RMCSLMQGSTLPRRS
RMMSLIQGSTAPRRS

SEQ ID NO: 125165 - protein, 15 aa, Artificial Sequence
  Description of Artificial Sequence: Synthetic peptide
  Seed: RMCSLMQGSTLPRRS
RMMSLIQGSTIPRRS

SEQ ID NO: 125166 - protein, 15 aa, Artificial Sequence
  Description of Artificial Sequence: Synthetic peptide
  Seed: RMCSLMQGSTLPRRS
RMMSLIQGSTLPRRS

SEQ ID NO: 125167 - protein, 15 aa, Artificial Sequence
  Description of Artificial Sequence: Synthetic peptide
  Seed: RMCSLMQGSTLPRRS
RMMSLIQGSTMPRRS

SEQ ID NO: 125168 - protein, 15 aa, Artificial Sequence
  Description of Artificial Sequence: Synthetic peptide
  Seed: RMCSLMQGSTLPRRS
RMMSLIQGSTSPRRS

SEQ ID NO: 125169 - protein, 15 aa, Artificial Sequence
  Description of Artificial Sequence: Synthetic peptide
  Seed: RMCSLMQGSTLPRRS
RMMSLIQGSTTPRRS

SEQ ID NO: 125170 - protein, 15 aa, Artificial Sequence
  Description of Artificial Sequence: Synthetic peptide
  Seed: RMCSLMQGSTLPRRS
RMMSLIQGSTVPRRS

SEQ ID NO: 125171 - protein, 15 aa, Artificial Sequence
  Description of Artificial Sequence: Synthetic peptide
  Seed: RMCSLMQGSTLPRRS
RMMSLIQPSTAPRRS

SEQ ID NO: 125172 - protein, 15 aa, Artificial Sequence
  Description of Artificial Sequence: Synthetic peptide
  Seed: RMCSLMQGSTLPRRS
RMMSLIQPSTIPRRS

SEQ ID NO: 125173 - protein, 15 aa, Artificial Sequence
  Description of Artificial Sequence: Synthetic peptide
  Seed: RMCSLMQGSTLPRRS
RMMSLIQPSTLPRRS

SEQ ID NO: 125174 - protein, 15 aa, Artificial Sequence
  Description of Artificial Sequence: Synthetic peptide
  Seed: RMCSLMQGSTLPRRS
RMMSLIQPSTNPRRS

SEQ ID NO: 125175 - protein, 15 aa, Artificial Sequence
  Description of Artificial Sequence: Synthetic peptide
  Seed: RMCSLMQGSTLPRRS
RMMSLIQPSTSPRRS

SEQ ID NO: 125176 - protein, 15 aa, Artificial Sequence
  Description of Artificial Sequence: Synthetic peptide
  Seed: RMCSLMQGSTLPRRS
RMMSLIQPSTVPRRS

SEQ ID NO: 125177 - protein, 15 aa, Artificial Sequence
  Description of Artificial Sequence: Synthetic peptide
  Seed: RMCSLMQGSTLPRRS
RMMSLIQSSTAPRRS

SEQ ID NO: 125178 - protein, 15 aa, Artificial Sequence
  Description of Artificial Sequence: Synthetic peptide
  Seed: RMCSLMQGSTLPRRS
RMMSLIQSSTIPRRS

SEQ ID NO: 125179 - protein, 15 aa, Artificial Sequence
  Description of Artificial Sequence: Synthetic peptide
  Seed: RMCSLMQGSTLPRRS
RMMSLIQSSTLPRRS

SEQ ID NO: 125180 - protein, 15 aa, Artificial Sequence
  Description of Artificial Sequence: Synthetic peptide
  Seed: RMCSLMQGSTLPRRS
RMMSLIQSSTTPRRS

SEQ ID NO: 125181 - protein, 15 aa, Artificial Sequence
  Description of Artificial Sequence: Synthetic peptide
  Seed: RMCSLMQGSTLPRRS
RMMSLIQSSTVPRRS

SEQ ID NO: 125182 - protein, 15 aa, Artificial Sequence
  Description of Artificial Sequence: Synthetic peptide
  Seed: RMCSLMQGSTLPRRS
RMMSLIQVSTAPRRS

SEQ ID NO: 125183 - protein, 15 aa, Artificial Sequence
  Description of Artificial Sequence: Synthetic peptide
  Seed: RMCSLMQGSTLPRRS
RMMSLLQASTAPRRS

SEQ ID NO: 125184 - protein, 15 aa, Artificial Sequence
  Description of Artificial Sequence: Synthetic peptide
  Seed: RMCSLMQGSTLPRRS
RMMSLLQASTCPRRS

SEQ ID NO: 125185 - protein, 15 aa, Artificial Sequence
  Description of Artificial Sequence: Synthetic peptide
  Seed: RMCSLMQGSTLPRRS
RMMSLLQASTFPRRS

SEQ ID NO: 125186 - protein, 15 aa, Artificial Sequence
  Description of Artificial Sequence: Synthetic peptide
  Seed: RMCSLMQGSTLPRRS
RMMSLLQASTGPRRS

SEQ ID NO: 125187 - protein, 15 aa, Artificial Sequence
  Description of Artificial Sequence: Synthetic peptide
  Seed: RMCSLMQGSTLPRRS
RMMSLLQASTIPRRS

SEQ ID NO: 125188 - protein, 15 aa, Artificial Sequence
  Description of Artificial Sequence: Synthetic peptide
  Seed: RMCSLMQGSTLPRRS
RMMSLLQASTLPRRS

SEQ ID NO: 125189 - protein, 15 aa, Artificial Sequence
  Description of Artificial Sequence: Synthetic peptide
  Seed: RMCSLMQGSTLPRRS
RMMSLLQASTMPRRS

SEQ ID NO: 125190 - protein, 15 aa, Artificial Sequence
  Description of Artificial Sequence: Synthetic peptide
  Seed: RMCSLMQGSTLPRRS
RMMSLLQASTNPRRS

SEQ ID NO: 125191 - protein, 15 aa, Artificial Sequence
  Description of Artificial Sequence: Synthetic peptide
  Seed: RMCSLMQGSTLPRRS
RMMSLLQASTSPRRS

SEQ ID NO: 125192 - protein, 15 aa, Artificial Sequence
  Description of Artificial Sequence: Synthetic peptide
  Seed: RMCSLMQGSTLPRRS
RMMSLLQASTTPRRS

SEQ ID NO: 125193 - protein, 15 aa, Artificial Sequence
  Description of Artificial Sequence: Synthetic peptide
  Seed: RMCSLMQGSTLPRRS
RMMSLLQASTVPRRS

SEQ ID NO: 125194 - protein, 15 aa, Artificial Sequence
  Description of Artificial Sequence: Synthetic peptide
  Seed: RMCSLMQGSTLPRRS
RMMSLLQGSTAPRRS

SEQ ID NO: 125195 - protein, 15 aa, Artificial Sequence
  Description of Artificial Sequence: Synthetic peptide
  Seed: RMCSLMQGSTLPRRS
RMMSLLQGSTCPRRS

SEQ ID NO: 125196 - protein, 15 aa, Artificial Sequence
  Description of Artificial Sequence: Synthetic peptide
  Seed: RMCSLMQGSTLPRRS
RMMSLLQGSTGPRRS

SEQ ID NO: 125197 - protein, 15 aa, Artificial Sequence
  Description of Artificial Sequence: Synthetic peptide
  Seed: RMCSLMQGSTLPRRS
RMMSLLQGSTIPRRS

SEQ ID NO: 125198 - protein, 15 aa, Artificial Sequence
  Description of Artificial Sequence: Synthetic peptide
  Seed: RMCSLMQGSTLPRRS
RMMSLLQGSTLPRRS

SEQ ID NO: 125199 - protein, 15 aa, Artificial Sequence
  Description of Artificial Sequence: Synthetic peptide
  Seed: RMCSLMQGSTLPRRS
RMMSLLQGSTMPRRS

SEQ ID NO: 125200 - protein, 15 aa, Artificial Sequence
  Description of Artificial Sequence: Synthetic peptide
  Seed: RMCSLMQGSTLPRRS
RMMSLLQGSTSPRRS

SEQ ID NO: 125201 - protein, 15 aa, Artificial Sequence
  Description of Artificial Sequence: Synthetic peptide
  Seed: RMCSLMQGSTLPRRS
RMMSLLQGSTTPRRS

SEQ ID NO: 125202 - protein, 15 aa, Artificial Sequence
  Description of Artificial Sequence: Synthetic peptide
  Seed: RMCSLMQGSTLPRRS
RMMSLLQGSTVPRRS

SEQ ID NO: 125203 - protein, 15 aa, Artificial Sequence
  Description of Artificial Sequence: Synthetic peptide
  Seed: RMCSLMQGSTLPRRS
RMMSLLQISTAPRRS

SEQ ID NO: 125204 - protein, 15 aa, Artificial Sequence
  Description of Artificial Sequence: Synthetic peptide
  Seed: RMCSLMQGSTLPRRS
RMMSLLQISTLPRRS

SEQ ID NO: 125205 - protein, 15 aa, Artificial Sequence
  Description of Artificial Sequence: Synthetic peptide
  Seed: RMCSLMQGSTLPRRS
RMMSLLQISTNPRRS

SEQ ID NO: 125206 - protein, 15 aa, Artificial Sequence
  Description of Artificial Sequence: Synthetic peptide
  Seed: RMCSLMQGSTLPRRS
RMMSLLQISTSPRRS

SEQ ID NO: 125207 - protein, 15 aa, Artificial Sequence
  Description of Artificial Sequence: Synthetic peptide
  Seed: RMCSLMQGSTLPRRS
RMMSLLQISTVPRRS

SEQ ID NO: 125208 - protein, 15 aa, Artificial Sequence
  Description of Artificial Sequence: Synthetic peptide
  Seed: RMCSLMQGSTLPRRS
RMMSLLQNSTAPRRS

SEQ ID NO: 125209 - protein, 15 aa, Artificial Sequence
  Description of Artificial Sequence: Synthetic peptide
  Seed: RMCSLMQGSTLPRRS
RMMSLLQNSTIPRRS

SEQ ID NO: 125210 - protein, 15 aa, Artificial Sequence
  Description of Artificial Sequence: Synthetic peptide
  Seed: RMCSLMQGSTLPRRS
RMMSLLQNSTLPRRS

SEQ ID NO: 125211 - protein, 15 aa, Artificial Sequence
  Description of Artificial Sequence: Synthetic peptide
  Seed: RMCSLMQGSTLPRRS
RMMSLLQNSTVPRRS

SEQ ID NO: 125212 - protein, 15 aa, Artificial Sequence
  Description of Artificial Sequence: Synthetic peptide
  Seed: RMCSLMQGSTLPRRS
RMMSLLQPSTAPRRS

SEQ ID NO: 125213 - protein, 15 aa, Artificial Sequence
  Description of Artificial Sequence: Synthetic peptide
  Seed: RMCSLMQGSTLPRRS
RMMSLLQPSTIPRRS

SEQ ID NO: 125214 - protein, 15 aa, Artificial Sequence
  Description of Artificial Sequence: Synthetic peptide
  Seed: RMCSLMQGSTLPRRS
RMMSLLQPSTLPRRS

SEQ ID NO: 125215 - protein, 15 aa, Artificial Sequence
  Description of Artificial Sequence: Synthetic peptide
  Seed: RMCSLMQGSTLPRRS
RMMSLLQPSTMPRRS

SEQ ID NO: 125216 - protein, 15 aa, Artificial Sequence
  Description of Artificial Sequence: Synthetic peptide
  Seed: RMCSLMQGSTLPRRS
RMMSLLQPSTNPRRS

SEQ ID NO: 125217 - protein, 15 aa, Artificial Sequence
  Description of Artificial Sequence: Synthetic peptide
  Seed: RMCSLMQGSTLPRRS
RMMSLLQPSTSPRRS

SEQ ID NO: 125218 - protein, 15 aa, Artificial Sequence
  Description of Artificial Sequence: Synthetic peptide
  Seed: RMCSLMQGSTLPRRS
RMMSLLQPSTTPRRS

SEQ ID NO: 125219 - protein, 15 aa, Artificial Sequence
  Description of Artificial Sequence: Synthetic peptide
  Seed: RMCSLMQGSTLPRRS
RMMSLLQPSTVPRRS

SEQ ID NO: 125220 - protein, 15 aa, Artificial Sequence
  Description of Artificial Sequence: Synthetic peptide
  Seed: RMCSLMQGSTLPRRS
RMMSLLQSSTAPRRS

SEQ ID NO: 125221 - protein, 15 aa, Artificial Sequence
  Description of Artificial Sequence: Synthetic peptide
  Seed: RMCSLMQGSTLPRRS
RMMSLLQSSTGPRRS

SEQ ID NO: 125222 - protein, 15 aa, Artificial Sequence
  Description of Artificial Sequence: Synthetic peptide
  Seed: RMCSLMQGSTLPRRS
RMMSLLQSSTIPRRS

SEQ ID NO: 125223 - protein, 15 aa, Artificial Sequence
  Description of Artificial Sequence: Synthetic peptide
  Seed: RMCSLMQGSTLPRRS
RMMSLLQSSTLPRRS

SEQ ID NO: 125224 - protein, 15 aa, Artificial Sequence
  Description of Artificial Sequence: Synthetic peptide
  Seed: RMCSLMQGSTLPRRS
RMMSLLQSSTMPRRS

SEQ ID NO: 125225 - protein, 15 aa, Artificial Sequence
  Description of Artificial Sequence: Synthetic peptide
  Seed: RMCSLMQGSTLPRRS
RMMSLLQSSTNPRRS

SEQ ID NO: 125226 - protein, 15 aa, Artificial Sequence
  Description of Artificial Sequence: Synthetic peptide
  Seed: RMCSLMQGSTLPRRS
RMMSLLQSSTSPRRS

SEQ ID NO: 125227 - protein, 15 aa, Artificial Sequence
  Description of Artificial Sequence: Synthetic peptide
  Seed: RMCSLMQGSTLPRRS
RMMSLLQSSTTPRRS

SEQ ID NO: 125228 - protein, 15 aa, Artificial Sequence
  Description of Artificial Sequence: Synthetic peptide
  Seed: RMCSLMQGSTLPRRS
RMMSLLQSSTVPRRS

SEQ ID NO: 125229 - protein, 15 aa, Artificial Sequence
  Description of Artificial Sequence: Synthetic peptide
  Seed: RMCSLMQGSTLPRRS
RMMSLLQTSTAPRRS

SEQ ID NO: 125230 - protein, 15 aa, Artificial Sequence
  Description of Artificial Sequence: Synthetic peptide
  Seed: RMCSLMQGSTLPRRS
RMMSLLQTSTIPRRS

SEQ ID NO: 125231 - protein, 15 aa, Artificial Sequence
  Description of Artificial Sequence: Synthetic peptide
  Seed: RMCSLMQGSTLPRRS
RMMSLLQTSTLPRRS

SEQ ID NO: 125232 - protein, 15 aa, Artificial Sequence
  Description of Artificial Sequence: Synthetic peptide
  Seed: RMCSLMQGSTLPRRS
RMMSLLQTSTMPRRS

SEQ ID NO: 125233 - protein, 15 aa, Artificial Sequence
  Description of Artificial Sequence: Synthetic peptide
  Seed: RMCSLMQGSTLPRRS
RMMSLLQTSTNPRRS

SEQ ID NO: 125234 - protein, 15 aa, Artificial Sequence
  Description of Artificial Sequence: Synthetic peptide
  Seed: RMCSLMQGSTLPRRS
RMMSLLQTSTSPRRS

SEQ ID NO: 125235 - protein, 15 aa, Artificial Sequence
  Description of Artificial Sequence: Synthetic peptide
  Seed: RMCSLMQGSTLPRRS
RMMSLLQTSTTPRRS

SEQ ID NO: 125236 - protein, 15 aa, Artificial Sequence
  Description of Artificial Sequence: Synthetic peptide
  Seed: RMCSLMQGSTLPRRS
RMMSLLQTSTVPRRS

SEQ ID NO: 125237 - protein, 15 aa, Artificial Sequence
  Description of Artificial Sequence: Synthetic peptide
  Seed: RMCSLMQGSTLPRRS
RMMSLLQVSTAPRRS

SEQ ID NO: 125238 - protein, 15 aa, Artificial Sequence
  Description of Artificial Sequence: Synthetic peptide
  Seed: RMCSLMQGSTLPRRS
RMMSLLQVSTIPRRS

SEQ ID NO: 125239 - protein, 15 aa, Artificial Sequence
  Description of Artificial Sequence: Synthetic peptide
  Seed: RMCSLMQGSTLPRRS
RMMSLLQVSTLPRRS

SEQ ID NO: 125240 - protein, 15 aa, Artificial Sequence
  Description of Artificial Sequence: Synthetic peptide
  Seed: RMCSLMQGSTLPRRS
RMMSLLQVSTNPRRS

SEQ ID NO: 125241 - protein, 15 aa, Artificial Sequence
  Description of Artificial Sequence: Synthetic peptide
  Seed: RMCSLMQGSTLPRRS
RMMSLLQVSTSPRRS

SEQ ID NO: 125242 - protein, 15 aa, Artificial Sequence
  Description of Artificial Sequence: Synthetic peptide
  Seed: RMCSLMQGSTLPRRS
RMMSLLQVSTTPRRS

SEQ ID NO: 125243 - protein, 15 aa, Artificial Sequence
  Description of Artificial Sequence: Synthetic peptide
  Seed: RMCSLMQGSTLPRRS
RMMSLLQVSTVPRRS

SEQ ID NO: 125244 - protein, 15 aa, Artificial Sequence
  Description of Artificial Sequence: Synthetic peptide
  Seed: RMCSLMQGSTLPRRS
RMMSLMQASTAPRRS

SEQ ID NO: 125245 - protein, 15 aa, Artificial Sequence
  Description of Artificial Sequence: Synthetic peptide
  Seed: RMCSLMQGSTLPRRS
RMMSLMQASTCPRRS

SEQ ID NO: 125246 - protein, 15 aa, Artificial Sequence
  Description of Artificial Sequence: Synthetic peptide
  Seed: RMCSLMQGSTLPRRS
RMMSLMQASTFPRRS

SEQ ID NO: 125247 - protein, 15 aa, Artificial Sequence
  Description of Artificial Sequence: Synthetic peptide
  Seed: RMCSLMQGSTLPRRS
RMMSLMQASTGPRRS

SEQ ID NO: 125248 - protein, 15 aa, Artificial Sequence
  Description of Artificial Sequence: Synthetic peptide
  Seed: RMCSLMQGSTLPRRS
RMMSLMQASTIPRRS

SEQ ID NO: 125249 - protein, 15 aa, Artificial Sequence
  Description of Artificial Sequence: Synthetic peptide
  Seed: RMCSLMQGSTLPRRS
RMMSLMQASTLPRRS

SEQ ID NO: 125250 - protein, 15 aa, Artificial Sequence
  Description of Artificial Sequence: Synthetic peptide
  Seed: RMCSLMQGSTLPRRS
RMMSLMQASTMPRRS

SEQ ID NO: 125251 - protein, 15 aa, Artificial Sequence
  Description of Artificial Sequence: Synthetic peptide
  Seed: RMCSLMQGSTLPRRS
RMMSLMQASTNPRRS

SEQ ID NO: 125252 - protein, 15 aa, Artificial Sequence
  Description of Artificial Sequence: Synthetic peptide
  Seed: RMCSLMQGSTLPRRS
RMMSLMQASTSPRRS

SEQ ID NO: 125253 - protein, 15 aa, Artificial Sequence
  Description of Artificial Sequence: Synthetic peptide
  Seed: RMCSLMQGSTLPRRS
RMMSLMQASTTPRRS

SEQ ID NO: 125254 - protein, 15 aa, Artificial Sequence
  Description of Artificial Sequence: Synthetic peptide
  Seed: RMCSLMQGSTLPRRS
RMMSLMQASTVPRRS

SEQ ID NO: 125255 - protein, 15 aa, Artificial Sequence
  Description of Artificial Sequence: Synthetic peptide
  Seed: RMCSLMQGSTLPRRS
RMMSLMQGSTAPRRS

SEQ ID NO: 125256 - protein, 15 aa, Artificial Sequence
  Description of Artificial Sequence: Synthetic peptide
  Seed: RMCSLMQGSTLPRRS
RMMSLMQGSTGPRRS

SEQ ID NO: 125257 - protein, 15 aa, Artificial Sequence
  Description of Artificial Sequence: Synthetic peptide
  Seed: RMCSLMQGSTLPRRS
RMMSLMQGSTIPRRS

SEQ ID NO: 125258 - protein, 15 aa, Artificial Sequence
  Description of Artificial Sequence: Synthetic peptide
  Seed: RMCSLMQGSTLPRRS
RMMSLMQGSTLPRRS

SEQ ID NO: 125259 - protein, 15 aa, Artificial Sequence
  Description of Artificial Sequence: Synthetic peptide
  Seed: RMCSLMQGSTLPRRS
RMMSLMQGSTMPRRS

SEQ ID NO: 125260 - protein, 15 aa, Artificial Sequence
  Description of Artificial Sequence: Synthetic peptide
  Seed: RMCSLMQGSTLPRRS
RMMSLMQGSTSPRRS

SEQ ID NO: 125261 - protein, 15 aa, Artificial Sequence
  Description of Artificial Sequence: Synthetic peptide
  Seed: RMCSLMQGSTLPRRS
RMMSLMQGSTTPRRS

SEQ ID NO: 125262 - protein, 15 aa, Artificial Sequence
  Description of Artificial Sequence: Synthetic peptide
  Seed: RMCSLMQGSTLPRRS
RMMSLMQGSTVPRRS

SEQ ID NO: 125263 - protein, 15 aa, Artificial Sequence
  Description of Artificial Sequence: Synthetic peptide
  Seed: RMCSLMQGSTLPRRS
RMMSLMQISTAPRRS

SEQ ID NO: 125264 - protein, 15 aa, Artificial Sequence
  Description of Artificial Sequence: Synthetic peptide
  Seed: RMCSLMQGSTLPRRS
RMMSLMQISTNPRRS

SEQ ID NO: 125265 - protein, 15 aa, Artificial Sequence
  Description of Artificial Sequence: Synthetic peptide
  Seed: RMCSLMQGSTLPRRS
RMMSLMQISTSPRRS

SEQ ID NO: 125266 - protein, 15 aa, Artificial Sequence
  Description of Artificial Sequence: Synthetic peptide
  Seed: RMCSLMQGSTLPRRS
RMMSLMQISTTPRRS

SEQ ID NO: 125267 - protein, 15 aa, Artificial Sequence
  Description of Artificial Sequence: Synthetic peptide
  Seed: RMCSLMQGSTLPRRS
RMMSLMQISTVPRRS

SEQ ID NO: 125268 - protein, 15 aa, Artificial Sequence
  Description of Artificial Sequence: Synthetic peptide
  Seed: RMCSLMQGSTLPRRS
RMMSLMQLSTAPRRS

SEQ ID NO: 125269 - protein, 15 aa, Artificial Sequence
  Description of Artificial Sequence: Synthetic peptide
  Seed: RMCSLMQGSTLPRRS
RMMSLMQNSTAPRRS

SEQ ID NO: 125270 - protein, 15 aa, Artificial Sequence
  Description of Artificial Sequence: Synthetic peptide
  Seed: RMCSLMQGSTLPRRS
RMMSLMQNSTIPRRS

SEQ ID NO: 125271 - protein, 15 aa, Artificial Sequence
  Description of Artificial Sequence: Synthetic peptide
  Seed: RMCSLMQGSTLPRRS
RMMSLMQNSTLPRRS

SEQ ID NO: 125272 - protein, 15 aa, Artificial Sequence
  Description of Artificial Sequence: Synthetic peptide
  Seed: RMCSLMQGSTLPRRS
RMMSLMQNSTVPRRS

SEQ ID NO: 125273 - protein, 15 aa, Artificial Sequence
  Description of Artificial Sequence: Synthetic peptide
  Seed: RMCSLMQGSTLPRRS
RMMSLMQPSTAPRRS

SEQ ID NO: 125274 - protein, 15 aa, Artificial Sequence
  Description of Artificial Sequence: Synthetic peptide
  Seed: RMCSLMQGSTLPRRS
RMMSLMQPSTIPRRS

SEQ ID NO: 125275 - protein, 15 aa, Artificial Sequence
  Description of Artificial Sequence: Synthetic peptide
  Seed: RMCSLMQGSTLPRRS
RMMSLMQPSTLPRRS

SEQ ID NO: 125276 - protein, 15 aa, Artificial Sequence
  Description of Artificial Sequence: Synthetic peptide
  Seed: RMCSLMQGSTLPRRS
RMMSLMQPSTMPRRS

SEQ ID NO: 125277 - protein, 15 aa, Artificial Sequence
  Description of Artificial Sequence: Synthetic peptide
  Seed: RMCSLMQGSTLPRRS
RMMSLMQPSTNPRRS

SEQ ID NO: 125278 - protein, 15 aa, Artificial Sequence
  Description of Artificial Sequence: Synthetic peptide
  Seed: RMCSLMQGSTLPRRS
RMMSLMQPSTSPRRS

SEQ ID NO: 125279 - protein, 15 aa, Artificial Sequence
  Description of Artificial Sequence: Synthetic peptide
  Seed: RMCSLMQGSTLPRRS
RMMSLMQPSTTPRRS

SEQ ID NO: 125280 - protein, 15 aa, Artificial Sequence
  Description of Artificial Sequence: Synthetic peptide
  Seed: RMCSLMQGSTLPRRS
RMMSLMQPSTVPRRS

SEQ ID NO: 125281 - protein, 15 aa, Artificial Sequence
  Description of Artificial Sequence: Synthetic peptide
  Seed: RMCSLMQGSTLPRRS
RMMSLMQSSTAPRRS

SEQ ID NO: 125282 - protein, 15 aa, Artificial Sequence
  Description of Artificial Sequence: Synthetic peptide
  Seed: RMCSLMQGSTLPRRS
RMMSLMQSSTIPRRS

SEQ ID NO: 125283 - protein, 15 aa, Artificial Sequence
  Description of Artificial Sequence: Synthetic peptide
  Seed: RMCSLMQGSTLPRRS
RMMSLMQSSTLPRRS

SEQ ID NO: 125284 - protein, 15 aa, Artificial Sequence
  Description of Artificial Sequence: Synthetic peptide
  Seed: RMCSLMQGSTLPRRS
RMMSLMQSSTMPRRS

SEQ ID NO: 125285 - protein, 15 aa, Artificial Sequence
  Description of Artificial Sequence: Synthetic peptide
  Seed: RMCSLMQGSTLPRRS
RMMSLMQSSTNPRRS

SEQ ID NO: 125286 - protein, 15 aa, Artificial Sequence
  Description of Artificial Sequence: Synthetic peptide
  Seed: RMCSLMQGSTLPRRS
RMMSLMQSSTSPRRS

SEQ ID NO: 125287 - protein, 15 aa, Artificial Sequence
  Description of Artificial Sequence: Synthetic peptide
  Seed: RMCSLMQGSTLPRRS
RMMSLMQSSTTPRRS

SEQ ID NO: 125288 - protein, 15 aa, Artificial Sequence
  Description of Artificial Sequence: Synthetic peptide
  Seed: RMCSLMQGSTLPRRS
RMMSLMQSSTVPRRS

SEQ ID NO: 125289 - protein, 15 aa, Artificial Sequence
  Description of Artificial Sequence: Synthetic peptide
  Seed: RMCSLMQGSTLPRRS
RMMSLMQTSTAPRRS

SEQ ID NO: 125290 - protein, 15 aa, Artificial Sequence
  Description of Artificial Sequence: Synthetic peptide
  Seed: RMCSLMQGSTLPRRS
RMMSLMQTSTIPRRS

SEQ ID NO: 125291 - protein, 15 aa, Artificial Sequence
  Description of Artificial Sequence: Synthetic peptide
  Seed: RMCSLMQGSTLPRRS
RMMSLMQTSTLPRRS

SEQ ID NO: 125292 - protein, 15 aa, Artificial Sequence
  Description of Artificial Sequence: Synthetic peptide
  Seed: RMCSLMQGSTLPRRS
RMMSLMQTSTMPRRS

SEQ ID NO: 125293 - protein, 15 aa, Artificial Sequence
  Description of Artificial Sequence: Synthetic peptide
  Seed: RMCSLMQGSTLPRRS
RMMSLMQTSTNPRRS

SEQ ID NO: 125294 - protein, 15 aa, Artificial Sequence
  Description of Artificial Sequence: Synthetic peptide
  Seed: RMCSLMQGSTLPRRS
RMMSLMQTSTSPRRS

SEQ ID NO: 125295 - protein, 15 aa, Artificial Sequence
  Description of Artificial Sequence: Synthetic peptide
  Seed: RMCSLMQGSTLPRRS
RMMSLMQTSTTPRRS

SEQ ID NO: 125296 - protein, 15 aa, Artificial Sequence
  Description of Artificial Sequence: Synthetic peptide
  Seed: RMCSLMQGSTLPRRS
RMMSLMQTSTVPRRS

SEQ ID NO: 125297 - protein, 15 aa, Artificial Sequence
  Description of Artificial Sequence: Synthetic peptide
  Seed: RMCSLMQGSTLPRRS
RMMSLMQVSTAPRRS

SEQ ID NO: 125298 - protein, 15 aa, Artificial Sequence
  Description of Artificial Sequence: Synthetic peptide
  Seed: RMCSLMQGSTLPRRS
RMMSLMQVSTIPRRS

SEQ ID NO: 125299 - protein, 15 aa, Artificial Sequence
  Description of Artificial Sequence: Synthetic peptide
  Seed: RMCSLMQGSTLPRRS
RMMSLMQVSTLPRRS

SEQ ID NO: 125300 - protein, 15 aa, Artificial Sequence
  Description of Artificial Sequence: Synthetic peptide
  Seed: RMCSLMQGSTLPRRS
RMMSLMQVSTNPRRS

SEQ ID NO: 125301 - protein, 15 aa, Artificial Sequence
  Description of Artificial Sequence: Synthetic peptide
  Seed: RMCSLMQGSTLPRRS
RMMSLMQVSTSPRRS

SEQ ID NO: 125302 - protein, 15 aa, Artificial Sequence
  Description of Artificial Sequence: Synthetic peptide
  Seed: RMCSLMQGSTLPRRS
RMMSLMQVSTTPRRS

SEQ ID NO: 125303 - protein, 15 aa, Artificial Sequence
  Description of Artificial Sequence: Synthetic peptide
  Seed: RMCSLMQGSTLPRRS
RMMSLMQVSTVPRRS

SEQ ID NO: 125304 - protein, 15 aa, Artificial Sequence
  Description of Artificial Sequence: Synthetic peptide
  Seed: RMCSLMQGSTLPRRS
RMMSLQQASTAPRRS

SEQ ID NO: 125305 - protein, 15 aa, Artificial Sequence
  Description of Artificial Sequence: Synthetic peptide
  Seed: RMCSLMQGSTLPRRS
RMMSLQQASTIPRRS

SEQ ID NO: 125306 - protein, 15 aa, Artificial Sequence
  Description of Artificial Sequence: Synthetic peptide
  Seed: RMCSLMQGSTLPRRS
RMMSLQQASTLPRRS

SEQ ID NO: 125307 - protein, 15 aa, Artificial Sequence
  Description of Artificial Sequence: Synthetic peptide
  Seed: RMCSLMQGSTLPRRS
RMMSLQQASTVPRRS

SEQ ID NO: 125308 - protein, 15 aa, Artificial Sequence
  Description of Artificial Sequence: Synthetic peptide
  Seed: RMCSLMQGSTLPRRS
RMMSLQQGSTAPRRS

SEQ ID NO: 125309 - protein, 15 aa, Artificial Sequence
  Description of Artificial Sequence: Synthetic peptide
  Seed: RMCSLMQGSTLPRRS
RMMSLQQGSTIPRRS

SEQ ID NO: 125310 - protein, 15 aa, Artificial Sequence
  Description of Artificial Sequence: Synthetic peptide
  Seed: RMCSLMQGSTLPRRS
RMMSLQQGSTLPRRS

SEQ ID NO: 125311 - protein, 15 aa, Artificial Sequence
  Description of Artificial Sequence: Synthetic peptide
  Seed: RMCSLMQGSTLPRRS
RMMSLQQGSTVPRRS

SEQ ID NO: 125312 - protein, 15 aa, Artificial Sequence
  Description of Artificial Sequence: Synthetic peptide
  Seed: RMCSLMQGSTLPRRS
RMMSLQQSSTIPRRS

SEQ ID NO: 125313 - protein, 15 aa, Artificial Sequence
  Description of Artificial Sequence: Synthetic peptide
  Seed: RMCSLMQGSTLPRRS
RMMSLQQSSTLPRRS

SEQ ID NO: 125314 - protein, 15 aa, Artificial Sequence
  Description of Artificial Sequence: Synthetic peptide
  Seed: RMCSLMQGSTLPRRS
RMMSLQQSSTVPRRS

SEQ ID NO: 125315 - protein, 15 aa, Artificial Sequence
  Description of Artificial Sequence: Synthetic peptide
  Seed: RMCSLMQGSTLPRRS
RMMSLSQASTIPRRS

SEQ ID NO: 125316 - protein, 15 aa, Artificial Sequence
  Description of Artificial Sequence: Synthetic peptide
  Seed: RMCSLMQGSTLPRRS
RMMSLSQASTLPRRS

SEQ ID NO: 125317 - protein, 15 aa, Artificial Sequence
  Description of Artificial Sequence: Synthetic peptide
  Seed: RMCSLMQGSTLPRRS
RMMSLSQASTVPRRS

SEQ ID NO: 125318 - protein, 15 aa, Artificial Sequence
  Description of Artificial Sequence: Synthetic peptide
  Seed: RMCSLMQGSTLPRRS
RMMSLSQSSTIPRRS

SEQ ID NO: 125319 - protein, 15 aa, Artificial Sequence
  Description of Artificial Sequence: Synthetic peptide
  Seed: RMCSLMQGSTLPRRS
RMMSLSQSSTLPRRS

SEQ ID NO: 125320 - protein, 15 aa, Artificial Sequence
  Description of Artificial Sequence: Synthetic peptide
  Seed: RMCSLMQGSTLPRRS
RMMSLSQSSTVPRRS

SEQ ID NO: 125321 - protein, 15 aa, Artificial Sequence
  Description of Artificial Sequence: Synthetic peptide
  Seed: RMCSLMQGSTLPRRS
RMMSLTQASTIPRRS

SEQ ID NO: 125322 - protein, 15 aa, Artificial Sequence
  Description of Artificial Sequence: Synthetic peptide
  Seed: RMCSLMQGSTLPRRS
RMMSLTQASTLPRRS

SEQ ID NO: 125323 - protein, 15 aa, Artificial Sequence
  Description of Artificial Sequence: Synthetic peptide
  Seed: RMCSLMQGSTLPRRS
RMMSLTQASTVPRRS

SEQ ID NO: 125324 - protein, 15 aa, Artificial Sequence
  Description of Artificial Sequence: Synthetic peptide
  Seed: RMCSLMQGSTLPRRS
RMMSLTQGSTIPRRS

SEQ ID NO: 125325 - protein, 15 aa, Artificial Sequence
  Description of Artificial Sequence: Synthetic peptide
  Seed: RMCSLMQGSTLPRRS
RMMSLTQSSTIPRRS

SEQ ID NO: 125326 - protein, 15 aa, Artificial Sequence
  Description of Artificial Sequence: Synthetic peptide
  Seed: RMCSLMQGSTLPRRS
RMMSLTQSSTLPRRS

SEQ ID NO: 125327 - protein, 15 aa, Artificial Sequence
  Description of Artificial Sequence: Synthetic peptide
  Seed: RMCSLMQGSTLPRRS
RMMSLTQSSTVPRRS

SEQ ID NO: 125328 - protein, 15 aa, Artificial Sequence
  Description of Artificial Sequence: Synthetic peptide
  Seed: RMCSLMQGSTLPRRS
RMMSLVQASTAPRRS

SEQ ID NO: 125329 - protein, 15 aa, Artificial Sequence
  Description of Artificial Sequence: Synthetic peptide
  Seed: RMCSLMQGSTLPRRS
RMMSLVQASTIPRRS

SEQ ID NO: 125330 - protein, 15 aa, Artificial Sequence
  Description of Artificial Sequence: Synthetic peptide
  Seed: RMCSLMQGSTLPRRS
RMMSLVQASTLPRRS

SEQ ID NO: 125331 - protein, 15 aa, Artificial Sequence
  Description of Artificial Sequence: Synthetic peptide
  Seed: RMCSLMQGSTLPRRS
RMMSLVQASTMPRRS

SEQ ID NO: 125332 - protein, 15 aa, Artificial Sequence
  Description of Artificial Sequence: Synthetic peptide
  Seed: RMCSLMQGSTLPRRS
RMMSLVQASTVPRRS

SEQ ID NO: 125333 - protein, 15 aa, Artificial Sequence
  Description of Artificial Sequence: Synthetic peptide
  Seed: RMCSLMQGSTLPRRS
RMMSLVQGSTAPRRS

SEQ ID NO: 125334 - protein, 15 aa, Artificial Sequence
  Description of Artificial Sequence: Synthetic peptide
  Seed: RMCSLMQGSTLPRRS
RMMSLVQGSTIPRRS

SEQ ID NO: 125335 - protein, 15 aa, Artificial Sequence
  Description of Artificial Sequence: Synthetic peptide
  Seed: RMCSLMQGSTLPRRS
RMMSLVQGSTLPRRS

SEQ ID NO: 125336 - protein, 15 aa, Artificial Sequence
  Description of Artificial Sequence: Synthetic peptide
  Seed: RMCSLMQGSTLPRRS
RMMSLVQGSTVPRRS

SEQ ID NO: 125337 - protein, 15 aa, Artificial Sequence
  Description of Artificial Sequence: Synthetic peptide
  Seed: RMCSLMQGSTLPRRS
RMMSLVQSSTIPRRS

SEQ ID NO: 125338 - protein, 15 aa, Artificial Sequence
  Description of Artificial Sequence: Synthetic peptide
  Seed: RMCSLMQGSTLPRRS
RMMSLVQSSTLPRRS

SEQ ID NO: 125339 - protein, 15 aa, Artificial Sequence
  Description of Artificial Sequence: Synthetic peptide
  Seed: RMCSLMQGSTLPRRS
RMMSLVQSSTVPRRS

SEQ ID NO: 125340 - protein, 15 aa, Artificial Sequence
  Description of Artificial Sequence: Synthetic peptide
  Seed: RMCSLMQGSTLPRRS
RMTSLLQASTLPRRS

SEQ ID NO: 125341 - protein, 15 aa, Artificial Sequence
  Description of Artificial Sequence: Synthetic peptide
  Seed: RMCSLMQGSTLPRRS
RMVSLAQASTAPRRS

SEQ ID NO: 125342 - protein, 15 aa, Artificial Sequence
  Description of Artificial Sequence: Synthetic peptide
  Seed: RMCSLMQGSTLPRRS
RMVSLAQASTIPRRS

SEQ ID NO: 125343 - protein, 15 aa, Artificial Sequence
  Description of Artificial Sequence: Synthetic peptide
  Seed: RMCSLMQGSTLPRRS
RMVSLAQASTLPRRS

SEQ ID NO: 125344 - protein, 15 aa, Artificial Sequence
  Description of Artificial Sequence: Synthetic peptide
  Seed: RMCSLMQGSTLPRRS
RMVSLAQASTMPRRS

SEQ ID NO: 125345 - protein, 15 aa, Artificial Sequence
  Description of Artificial Sequence: Synthetic peptide
  Seed: RMCSLMQGSTLPRRS
RMVSLAQASTVPRRS

SEQ ID NO: 125346 - protein, 15 aa, Artificial Sequence
  Description of Artificial Sequence: Synthetic peptide
  Seed: RMCSLMQGSTLPRRS
RMVSLAQGSTAPRRS

SEQ ID NO: 125347 - protein, 15 aa, Artificial Sequence
  Description of Artificial Sequence: Synthetic peptide
  Seed: RMCSLMQGSTLPRRS
RMVSLAQGSTIPRRS

SEQ ID NO: 125348 - protein, 15 aa, Artificial Sequence
  Description of Artificial Sequence: Synthetic peptide
  Seed: RMCSLMQGSTLPRRS
RMVSLAQGSTLPRRS

SEQ ID NO: 125349 - protein, 15 aa, Artificial Sequence
  Description of Artificial Sequence: Synthetic peptide
  Seed: RMCSLMQGSTLPRRS
RMVSLAQGSTVPRRS

SEQ ID NO: 125350 - protein, 15 aa, Artificial Sequence
  Description of Artificial Sequence: Synthetic peptide
  Seed: RMCSLMQGSTLPRRS
RMVSLAQSSTIPRRS

SEQ ID NO: 125351 - protein, 15 aa, Artificial Sequence
  Description of Artificial Sequence: Synthetic peptide
  Seed: RMCSLMQGSTLPRRS
RMVSLAQSSTLPRRS

SEQ ID NO: 125352 - protein, 15 aa, Artificial Sequence
  Description of Artificial Sequence: Synthetic peptide
  Seed: RMCSLMQGSTLPRRS
RMVSLAQSSTVPRRS

SEQ ID NO: 125353 - protein, 15 aa, Artificial Sequence
  Description of Artificial Sequence: Synthetic peptide
  Seed: RMCSLMQGSTLPRRS
RMVSLFQASTIPRRS

SEQ ID NO: 125354 - protein, 15 aa, Artificial Sequence
  Description of Artificial Sequence: Synthetic peptide
  Seed: RMCSLMQGSTLPRRS
RMVSLFQASTLPRRS

SEQ ID NO: 125355 - protein, 15 aa, Artificial Sequence
  Description of Artificial Sequence: Synthetic peptide
  Seed: RMCSLMQGSTLPRRS
RMVSLFQASTVPRRS

SEQ ID NO: 125356 - protein, 15 aa, Artificial Sequence
  Description of Artificial Sequence: Synthetic peptide
  Seed: RMCSLMQGSTLPRRS
RMVSLIQASTAPRRS

SEQ ID NO: 125357 - protein, 15 aa, Artificial Sequence
  Description of Artificial Sequence: Synthetic peptide
  Seed: RMCSLMQGSTLPRRS
RMVSLIQASTIPRRS

SEQ ID NO: 125358 - protein, 15 aa, Artificial Sequence
  Description of Artificial Sequence: Synthetic peptide
  Seed: RMCSLMQGSTLPRRS
RMVSLIQASTLPRRS

SEQ ID NO: 125359 - protein, 15 aa, Artificial Sequence
  Description of Artificial Sequence: Synthetic peptide
  Seed: RMCSLMQGSTLPRRS
RMVSLIQASTMPRRS

SEQ ID NO: 125360 - protein, 15 aa, Artificial Sequence
  Description of Artificial Sequence: Synthetic peptide
  Seed: RMCSLMQGSTLPRRS
RMVSLIQASTNPRRS

SEQ ID NO: 125361 - protein, 15 aa, Artificial Sequence
  Description of Artificial Sequence: Synthetic peptide
  Seed: RMCSLMQGSTLPRRS
RMVSLIQASTSPRRS

SEQ ID NO: 125362 - protein, 15 aa, Artificial Sequence
  Description of Artificial Sequence: Synthetic peptide
  Seed: RMCSLMQGSTLPRRS
RMVSLIQASTTPRRS

SEQ ID NO: 125363 - protein, 15 aa, Artificial Sequence
  Description of Artificial Sequence: Synthetic peptide
  Seed: RMCSLMQGSTLPRRS
RMVSLIQASTVPRRS

SEQ ID NO: 125364 - protein, 15 aa, Artificial Sequence
  Description of Artificial Sequence: Synthetic peptide
  Seed: RMCSLMQGSTLPRRS
RMVSLIQGSTAPRRS

SEQ ID NO: 125365 - protein, 15 aa, Artificial Sequence
  Description of Artificial Sequence: Synthetic peptide
  Seed: RMCSLMQGSTLPRRS
RMVSLIQGSTIPRRS

SEQ ID NO: 125366 - protein, 15 aa, Artificial Sequence
  Description of Artificial Sequence: Synthetic peptide
  Seed: RMCSLMQGSTLPRRS
RMVSLIQGSTLPRRS

SEQ ID NO: 125367 - protein, 15 aa, Artificial Sequence
  Description of Artificial Sequence: Synthetic peptide
  Seed: RMCSLMQGSTLPRRS
RMVSLIQGSTMPRRS

SEQ ID NO: 125368 - protein, 15 aa, Artificial Sequence
  Description of Artificial Sequence: Synthetic peptide
  Seed: RMCSLMQGSTLPRRS
RMVSLIQGSTSPRRS

SEQ ID NO: 125369 - protein, 15 aa, Artificial Sequence
  Description of Artificial Sequence: Synthetic peptide
  Seed: RMCSLMQGSTLPRRS
RMVSLIQGSTTPRRS

SEQ ID NO: 125370 - protein, 15 aa, Artificial Sequence
  Description of Artificial Sequence: Synthetic peptide
  Seed: RMCSLMQGSTLPRRS
RMVSLIQGSTVPRRS

SEQ ID NO: 125371 - protein, 15 aa, Artificial Sequence
  Description of Artificial Sequence: Synthetic peptide
  Seed: RMCSLMQGSTLPRRS
RMVSLIQPSTAPRRS

SEQ ID NO: 125372 - protein, 15 aa, Artificial Sequence
  Description of Artificial Sequence: Synthetic peptide
  Seed: RMCSLMQGSTLPRRS
RMVSLIQPSTIPRRS

SEQ ID NO: 125373 - protein, 15 aa, Artificial Sequence
  Description of Artificial Sequence: Synthetic peptide
  Seed: RMCSLMQGSTLPRRS
RMVSLIQPSTLPRRS

SEQ ID NO: 125374 - protein, 15 aa, Artificial Sequence
  Description of Artificial Sequence: Synthetic peptide
  Seed: RMCSLMQGSTLPRRS
RMVSLIQPSTVPRRS

SEQ ID NO: 125375 - protein, 15 aa, Artificial Sequence
  Description of Artificial Sequence: Synthetic peptide
  Seed: RMCSLMQGSTLPRRS
RMVSLIQSSTAPRRS

SEQ ID NO: 125376 - protein, 15 aa, Artificial Sequence
  Description of Artificial Sequence: Synthetic peptide
  Seed: RMCSLMQGSTLPRRS
RMVSLIQSSTIPRRS

SEQ ID NO: 125377 - protein, 15 aa, Artificial Sequence
  Description of Artificial Sequence: Synthetic peptide
  Seed: RMCSLMQGSTLPRRS
RMVSLIQSSTLPRRS

SEQ ID NO: 125378 - protein, 15 aa, Artificial Sequence
  Description of Artificial Sequence: Synthetic peptide
  Seed: RMCSLMQGSTLPRRS
RMVSLIQSSTMPRRS

SEQ ID NO: 125379 - protein, 15 aa, Artificial Sequence
  Description of Artificial Sequence: Synthetic peptide
  Seed: RMCSLMQGSTLPRRS
RMVSLIQSSTVPRRS

SEQ ID NO: 125380 - protein, 15 aa, Artificial Sequence
  Description of Artificial Sequence: Synthetic peptide
  Seed: RMCSLMQGSTLPRRS
RMVSLLQASTAPRRS

SEQ ID NO: 125381 - protein, 15 aa, Artificial Sequence
  Description of Artificial Sequence: Synthetic peptide
  Seed: RMCSLMQGSTLPRRS
RMVSLLQASTCPRRS

SEQ ID NO: 125382 - protein, 15 aa, Artificial Sequence
  Description of Artificial Sequence: Synthetic peptide
  Seed: RMCSLMQGSTLPRRS
RMVSLLQASTFPRRS

SEQ ID NO: 125383 - protein, 15 aa, Artificial Sequence
  Description of Artificial Sequence: Synthetic peptide
  Seed: RMCSLMQGSTLPRRS
RMVSLLQASTGPRRS

SEQ ID NO: 125384 - protein, 15 aa, Artificial Sequence
  Description of Artificial Sequence: Synthetic peptide
  Seed: RMCSLMQGSTLPRRS
RMVSLLQASTIPRRS

SEQ ID NO: 125385 - protein, 15 aa, Artificial Sequence
  Description of Artificial Sequence: Synthetic peptide
  Seed: RMCSLMQGSTLPRRS
RMVSLLQASTLPRRS

SEQ ID NO: 125386 - protein, 15 aa, Artificial Sequence
  Description of Artificial Sequence: Synthetic peptide
  Seed: RMCSLMQGSTLPRRS
RMVSLLQASTMPRRS

SEQ ID NO: 125387 - protein, 15 aa, Artificial Sequence
  Description of Artificial Sequence: Synthetic peptide
  Seed: RMCSLMQGSTLPRRS
RMVSLLQASTNPRRS

SEQ ID NO: 125388 - protein, 15 aa, Artificial Sequence
  Description of Artificial Sequence: Synthetic peptide
  Seed: RMCSLMQGSTLPRRS
RMVSLLQASTSPRRS

SEQ ID NO: 125389 - protein, 15 aa, Artificial Sequence
  Description of Artificial Sequence: Synthetic peptide
  Seed: RMCSLMQGSTLPRRS
RMVSLLQASTTPRRS

SEQ ID NO: 125390 - protein, 15 aa, Artificial Sequence
  Description of Artificial Sequence: Synthetic peptide
  Seed: RMCSLMQGSTLPRRS
RMVSLLQASTVPRRS

SEQ ID NO: 125391 - protein, 15 aa, Artificial Sequence
  Description of Artificial Sequence: Synthetic peptide
  Seed: RMCSLMQGSTLPRRS
RMVSLLQGSTAPRRS

SEQ ID NO: 125392 - protein, 15 aa, Artificial Sequence
  Description of Artificial Sequence: Synthetic peptide
  Seed: RMCSLMQGSTLPRRS
RMVSLLQGSTGPRRS

SEQ ID NO: 125393 - protein, 15 aa, Artificial Sequence
  Description of Artificial Sequence: Synthetic peptide
  Seed: RMCSLMQGSTLPRRS
RMVSLLQGSTIPRRS

SEQ ID NO: 125394 - protein, 15 aa, Artificial Sequence
  Description of Artificial Sequence: Synthetic peptide
  Seed: RMCSLMQGSTLPRRS
RMVSLLQGSTLPRRS

SEQ ID NO: 125395 - protein, 15 aa, Artificial Sequence
  Description of Artificial Sequence: Synthetic peptide
  Seed: RMCSLMQGSTLPRRS
RMVSLLQGSTMPRRS

SEQ ID NO: 125396 - protein, 15 aa, Artificial Sequence
  Description of Artificial Sequence: Synthetic peptide
  Seed: RMCSLMQGSTLPRRS
RMVSLLQGSTSPRRS

SEQ ID NO: 125397 - protein, 15 aa, Artificial Sequence
  Description of Artificial Sequence: Synthetic peptide
  Seed: RMCSLMQGSTLPRRS
RMVSLLQGSTTPRRS

SEQ ID NO: 125398 - protein, 15 aa, Artificial Sequence
  Description of Artificial Sequence: Synthetic peptide
  Seed: RMCSLMQGSTLPRRS
RMVSLLQGSTVPRRS

SEQ ID NO: 125399 - protein, 15 aa, Artificial Sequence
  Description of Artificial Sequence: Synthetic peptide
  Seed: RMCSLMQGSTLPRRS
RMVSLLQISTAPRRS

SEQ ID NO: 125400 - protein, 15 aa, Artificial Sequence
  Description of Artificial Sequence: Synthetic peptide
  Seed: RMCSLMQGSTLPRRS
RMVSLLQNSTAPRRS

SEQ ID NO: 125401 - protein, 15 aa, Artificial Sequence
  Description of Artificial Sequence: Synthetic peptide
  Seed: RMCSLMQGSTLPRRS
RMVSLLQNSTIPRRS

SEQ ID NO: 125402 - protein, 15 aa, Artificial Sequence
  Description of Artificial Sequence: Synthetic peptide
  Seed: RMCSLMQGSTLPRRS
RMVSLLQNSTLPRRS

SEQ ID NO: 125403 - protein, 15 aa, Artificial Sequence
  Description of Artificial Sequence: Synthetic peptide
  Seed: RMCSLMQGSTLPRRS
RMVSLLQNSTTPRRS

SEQ ID NO: 125404 - protein, 15 aa, Artificial Sequence
  Description of Artificial Sequence: Synthetic peptide
  Seed: RMCSLMQGSTLPRRS
RMVSLLQNSTVPRRS

SEQ ID NO: 125405 - protein, 15 aa, Artificial Sequence
  Description of Artificial Sequence: Synthetic peptide
  Seed: RMCSLMQGSTLPRRS
RMVSLLQPSTAPRRS

SEQ ID NO: 125406 - protein, 15 aa, Artificial Sequence
  Description of Artificial Sequence: Synthetic peptide
  Seed: RMCSLMQGSTLPRRS
RMVSLLQPSTIPRRS

SEQ ID NO: 125407 - protein, 15 aa, Artificial Sequence
  Description of Artificial Sequence: Synthetic peptide
  Seed: RMCSLMQGSTLPRRS
RMVSLLQPSTLPRRS

SEQ ID NO: 125408 - protein, 15 aa, Artificial Sequence
  Description of Artificial Sequence: Synthetic peptide
  Seed: RMCSLMQGSTLPRRS
RMVSLLQPSTMPRRS

SEQ ID NO: 125409 - protein, 15 aa, Artificial Sequence
  Description of Artificial Sequence: Synthetic peptide
  Seed: RMCSLMQGSTLPRRS
RMVSLLQPSTNPRRS

SEQ ID NO: 125410 - protein, 15 aa, Artificial Sequence
  Description of Artificial Sequence: Synthetic peptide
  Seed: RMCSLMQGSTLPRRS
RMVSLLQPSTSPRRS

SEQ ID NO: 125411 - protein, 15 aa, Artificial Sequence
  Description of Artificial Sequence: Synthetic peptide
  Seed: RMCSLMQGSTLPRRS
RMVSLLQPSTTPRRS

SEQ ID NO: 125412 - protein, 15 aa, Artificial Sequence
  Description of Artificial Sequence: Synthetic peptide
  Seed: RMCSLMQGSTLPRRS
RMVSLLQPSTVPRRS

SEQ ID NO: 125413 - protein, 15 aa, Artificial Sequence
  Description of Artificial Sequence: Synthetic peptide
  Seed: RMCSLMQGSTLPRRS
RMVSLLQSSTAPRRS

SEQ ID NO: 125414 - protein, 15 aa, Artificial Sequence
  Description of Artificial Sequence: Synthetic peptide
  Seed: RMCSLMQGSTLPRRS
RMVSLLQSSTGPRRS

SEQ ID NO: 125415 - protein, 15 aa, Artificial Sequence
  Description of Artificial Sequence: Synthetic peptide
  Seed: RMCSLMQGSTLPRRS
RMVSLLQSSTIPRRS

SEQ ID NO: 125416 - protein, 15 aa, Artificial Sequence
  Description of Artificial Sequence: Synthetic peptide
  Seed: RMCSLMQGSTLPRRS
RMVSLLQSSTLPRRS

SEQ ID NO: 125417 - protein, 15 aa, Artificial Sequence
  Description of Artificial Sequence: Synthetic peptide
  Seed: RMCSLMQGSTLPRRS
RMVSLLQSSTMPRRS

SEQ ID NO: 125418 - protein, 15 aa, Artificial Sequence
  Description of Artificial Sequence: Synthetic peptide
  Seed: RMCSLMQGSTLPRRS
RMVSLLQSSTNPRRS

SEQ ID NO: 125419 - protein, 15 aa, Artificial Sequence
  Description of Artificial Sequence: Synthetic peptide
  Seed: RMCSLMQGSTLPRRS
RMVSLLQSSTSPRRS

SEQ ID NO: 125420 - protein, 15 aa, Artificial Sequence
  Description of Artificial Sequence: Synthetic peptide
  Seed: RMCSLMQGSTLPRRS
RMVSLLQSSTTPRRS

SEQ ID NO: 125421 - protein, 15 aa, Artificial Sequence
  Description of Artificial Sequence: Synthetic peptide
  Seed: RMCSLMQGSTLPRRS
RMVSLLQSSTVPRRS

SEQ ID NO: 125422 - protein, 15 aa, Artificial Sequence
  Description of Artificial Sequence: Synthetic peptide
  Seed: RMCSLMQGSTLPRRS
RMVSLLQTSTAPRRS

SEQ ID NO: 125423 - protein, 15 aa, Artificial Sequence
  Description of Artificial Sequence: Synthetic peptide
  Seed: RMCSLMQGSTLPRRS
RMVSLLQTSTIPRRS

SEQ ID NO: 125424 - protein, 15 aa, Artificial Sequence
  Description of Artificial Sequence: Synthetic peptide
  Seed: RMCSLMQGSTLPRRS
RMVSLLQTSTLPRRS

SEQ ID NO: 125425 - protein, 15 aa, Artificial Sequence
  Description of Artificial Sequence: Synthetic peptide
  Seed: RMCSLMQGSTLPRRS
RMVSLLQTSTMPRRS

SEQ ID NO: 125426 - protein, 15 aa, Artificial Sequence
  Description of Artificial Sequence: Synthetic peptide
  Seed: RMCSLMQGSTLPRRS
RMVSLLQTSTNPRRS

SEQ ID NO: 125427 - protein, 15 aa, Artificial Sequence
  Description of Artificial Sequence: Synthetic peptide
  Seed: RMCSLMQGSTLPRRS
RMVSLLQTSTSPRRS

SEQ ID NO: 125428 - protein, 15 aa, Artificial Sequence
  Description of Artificial Sequence: Synthetic peptide
  Seed: RMCSLMQGSTLPRRS
RMVSLLQTSTTPRRS

SEQ ID NO: 125429 - protein, 15 aa, Artificial Sequence
  Description of Artificial Sequence: Synthetic peptide
  Seed: RMCSLMQGSTLPRRS
RMVSLLQTSTVPRRS

SEQ ID NO: 125430 - protein, 15 aa, Artificial Sequence
  Description of Artificial Sequence: Synthetic peptide
  Seed: RMCSLMQGSTLPRRS
RMVSLLQVSTAPRRS

SEQ ID NO: 125431 - protein, 15 aa, Artificial Sequence
  Description of Artificial Sequence: Synthetic peptide
  Seed: RMCSLMQGSTLPRRS
RMVSLLQVSTIPRRS

SEQ ID NO: 125432 - protein, 15 aa, Artificial Sequence
  Description of Artificial Sequence: Synthetic peptide
  Seed: RMCSLMQGSTLPRRS
RMVSLLQVSTLPRRS

SEQ ID NO: 125433 - protein, 15 aa, Artificial Sequence
  Description of Artificial Sequence: Synthetic peptide
  Seed: RMCSLMQGSTLPRRS
RMVSLLQVSTNPRRS

SEQ ID NO: 125434 - protein, 15 aa, Artificial Sequence
  Description of Artificial Sequence: Synthetic peptide
  Seed: RMCSLMQGSTLPRRS
RMVSLLQVSTSPRRS

SEQ ID NO: 125435 - protein, 15 aa, Artificial Sequence
  Description of Artificial Sequence: Synthetic peptide
  Seed: RMCSLMQGSTLPRRS
RMVSLLQVSTVPRRS

SEQ ID NO: 125436 - protein, 15 aa, Artificial Sequence
  Description of Artificial Sequence: Synthetic peptide
  Seed: RMCSLMQGSTLPRRS
RMVSLMQASTAPRRS

SEQ ID NO: 125437 - protein, 15 aa, Artificial Sequence
  Description of Artificial Sequence: Synthetic peptide
  Seed: RMCSLMQGSTLPRRS
RMVSLMQASTCPRRS

SEQ ID NO: 125438 - protein, 15 aa, Artificial Sequence
  Description of Artificial Sequence: Synthetic peptide
  Seed: RMCSLMQGSTLPRRS
RMVSLMQASTFPRRS

SEQ ID NO: 125439 - protein, 15 aa, Artificial Sequence
  Description of Artificial Sequence: Synthetic peptide
  Seed: RMCSLMQGSTLPRRS
RMVSLMQASTGPRRS

SEQ ID NO: 125440 - protein, 15 aa, Artificial Sequence
  Description of Artificial Sequence: Synthetic peptide
  Seed: RMCSLMQGSTLPRRS
RMVSLMQASTIPRRS

SEQ ID NO: 125441 - protein, 15 aa, Artificial Sequence
  Description of Artificial Sequence: Synthetic peptide
  Seed: RMCSLMQGSTLPRRS
RMVSLMQASTLPRRS

SEQ ID NO: 125442 - protein, 15 aa, Artificial Sequence
  Description of Artificial Sequence: Synthetic peptide
  Seed: RMCSLMQGSTLPRRS
RMVSLMQASTMPRRS

SEQ ID NO: 125443 - protein, 15 aa, Artificial Sequence
  Description of Artificial Sequence: Synthetic peptide
  Seed: RMCSLMQGSTLPRRS
RMVSLMQASTNPRRS

SEQ ID NO: 125444 - protein, 15 aa, Artificial Sequence
  Description of Artificial Sequence: Synthetic peptide
  Seed: RMCSLMQGSTLPRRS
RMVSLMQASTSPRRS

SEQ ID NO: 125445 - protein, 15 aa, Artificial Sequence
  Description of Artificial Sequence: Synthetic peptide
  Seed: RMCSLMQGSTLPRRS
RMVSLMQASTTPRRS

SEQ ID NO: 125446 - protein, 15 aa, Artificial Sequence
  Description of Artificial Sequence: Synthetic peptide
  Seed: RMCSLMQGSTLPRRS
RMVSLMQASTVPRRS

SEQ ID NO: 125447 - protein, 15 aa, Artificial Sequence
  Description of Artificial Sequence: Synthetic peptide
  Seed: RMCSLMQGSTLPRRS
RMVSLMQGSTAPRRS

SEQ ID NO: 125448 - protein, 15 aa, Artificial Sequence
  Description of Artificial Sequence: Synthetic peptide
  Seed: RMCSLMQGSTLPRRS
RMVSLMQGSTGPRRS

SEQ ID NO: 125449 - protein, 15 aa, Artificial Sequence
  Description of Artificial Sequence: Synthetic peptide
  Seed: RMCSLMQGSTLPRRS
RMVSLMQGSTIPRRS

SEQ ID NO: 125450 - protein, 15 aa, Artificial Sequence
  Description of Artificial Sequence: Synthetic peptide
  Seed: RMCSLMQGSTLPRRS
RMVSLMQGSTLPRRS

SEQ ID NO: 125451 - protein, 15 aa, Artificial Sequence
  Description of Artificial Sequence: Synthetic peptide
  Seed: RMCSLMQGSTLPRRS
RMVSLMQGSTMPRRS

SEQ ID NO: 125452 - protein, 15 aa, Artificial Sequence
  Description of Artificial Sequence: Synthetic peptide
  Seed: RMCSLMQGSTLPRRS
RMVSLMQGSTSPRRS

SEQ ID NO: 125453 - protein, 15 aa, Artificial Sequence
  Description of Artificial Sequence: Synthetic peptide
  Seed: RMCSLMQGSTLPRRS
RMVSLMQGSTTPRRS

SEQ ID NO: 125454 - protein, 15 aa, Artificial Sequence
  Description of Artificial Sequence: Synthetic peptide
  Seed: RMCSLMQGSTLPRRS
RMVSLMQGSTVPRRS

SEQ ID NO: 125455 - protein, 15 aa, Artificial Sequence
  Description of Artificial Sequence: Synthetic peptide
  Seed: RMCSLMQGSTLPRRS
RMVSLMQISTAPRRS

SEQ ID NO: 125456 - protein, 15 aa, Artificial Sequence
  Description of Artificial Sequence: Synthetic peptide
  Seed: RMCSLMQGSTLPRRS
RMVSLMQISTSPRRS

SEQ ID NO: 125457 - protein, 15 aa, Artificial Sequence
  Description of Artificial Sequence: Synthetic peptide
  Seed: RMCSLMQGSTLPRRS
RMVSLMQNSTAPRRS

SEQ ID NO: 125458 - protein, 15 aa, Artificial Sequence
  Description of Artificial Sequence: Synthetic peptide
  Seed: RMCSLMQGSTLPRRS
RMVSLMQNSTIPRRS

SEQ ID NO: 125459 - protein, 15 aa, Artificial Sequence
  Description of Artificial Sequence: Synthetic peptide
  Seed: RMCSLMQGSTLPRRS
RMVSLMQNSTLPRRS

SEQ ID NO: 125460 - protein, 15 aa, Artificial Sequence
  Description of Artificial Sequence: Synthetic peptide
  Seed: RMCSLMQGSTLPRRS
RMVSLMQNSTVPRRS

SEQ ID NO: 125461 - protein, 15 aa, Artificial Sequence
  Description of Artificial Sequence: Synthetic peptide
  Seed: RMCSLMQGSTLPRRS
RMVSLMQPSTAPRRS

SEQ ID NO: 125462 - protein, 15 aa, Artificial Sequence
  Description of Artificial Sequence: Synthetic peptide
  Seed: RMCSLMQGSTLPRRS
RMVSLMQPSTIPRRS

SEQ ID NO: 125463 - protein, 15 aa, Artificial Sequence
  Description of Artificial Sequence: Synthetic peptide
  Seed: RMCSLMQGSTLPRRS
RMVSLMQPSTLPRRS

SEQ ID NO: 125464 - protein, 15 aa, Artificial Sequence
  Description of Artificial Sequence: Synthetic peptide
  Seed: RMCSLMQGSTLPRRS
RMVSLMQPSTMPRRS

SEQ ID NO: 125465 - protein, 15 aa, Artificial Sequence
  Description of Artificial Sequence: Synthetic peptide
  Seed: RMCSLMQGSTLPRRS
RMVSLMQPSTNPRRS

SEQ ID NO: 125466 - protein, 15 aa, Artificial Sequence
  Description of Artificial Sequence: Synthetic peptide
  Seed: RMCSLMQGSTLPRRS
RMVSLMQPSTSPRRS

SEQ ID NO: 125467 - protein, 15 aa, Artificial Sequence
  Description of Artificial Sequence: Synthetic peptide
  Seed: RMCSLMQGSTLPRRS
RMVSLMQPSTTPRRS

SEQ ID NO: 125468 - protein, 15 aa, Artificial Sequence
  Description of Artificial Sequence: Synthetic peptide
  Seed: RMCSLMQGSTLPRRS
RMVSLMQPSTVPRRS

SEQ ID NO: 125469 - protein, 15 aa, Artificial Sequence
  Description of Artificial Sequence: Synthetic peptide
  Seed: RMCSLMQGSTLPRRS
RMVSLMQSSTAPRRS

SEQ ID NO: 125470 - protein, 15 aa, Artificial Sequence
  Description of Artificial Sequence: Synthetic peptide
  Seed: RMCSLMQGSTLPRRS
RMVSLMQSSTIPRRS

SEQ ID NO: 125471 - protein, 15 aa, Artificial Sequence
  Description of Artificial Sequence: Synthetic peptide
  Seed: RMCSLMQGSTLPRRS
RMVSLMQSSTLPRRS

SEQ ID NO: 125472 - protein, 15 aa, Artificial Sequence
  Description of Artificial Sequence: Synthetic peptide
  Seed: RMCSLMQGSTLPRRS
RMVSLMQSSTMPRRS

SEQ ID NO: 125473 - protein, 15 aa, Artificial Sequence
  Description of Artificial Sequence: Synthetic peptide
  Seed: RMCSLMQGSTLPRRS
RMVSLMQSSTNPRRS

SEQ ID NO: 125474 - protein, 15 aa, Artificial Sequence
  Description of Artificial Sequence: Synthetic peptide
  Seed: RMCSLMQGSTLPRRS
RMVSLMQSSTSPRRS

SEQ ID NO: 125475 - protein, 15 aa, Artificial Sequence
  Description of Artificial Sequence: Synthetic peptide
  Seed: RMCSLMQGSTLPRRS
RMVSLMQSSTTPRRS

SEQ ID NO: 125476 - protein, 15 aa, Artificial Sequence
  Description of Artificial Sequence: Synthetic peptide
  Seed: RMCSLMQGSTLPRRS
RMVSLMQSSTVPRRS

SEQ ID NO: 125477 - protein, 15 aa, Artificial Sequence
  Description of Artificial Sequence: Synthetic peptide
  Seed: RMCSLMQGSTLPRRS
RMVSLMQTSTAPRRS

SEQ ID NO: 125478 - protein, 15 aa, Artificial Sequence
  Description of Artificial Sequence: Synthetic peptide
  Seed: RMCSLMQGSTLPRRS
RMVSLMQTSTIPRRS

SEQ ID NO: 125479 - protein, 15 aa, Artificial Sequence
  Description of Artificial Sequence: Synthetic peptide
  Seed: RMCSLMQGSTLPRRS
RMVSLMQTSTLPRRS

SEQ ID NO: 125480 - protein, 15 aa, Artificial Sequence
  Description of Artificial Sequence: Synthetic peptide
  Seed: RMCSLMQGSTLPRRS
RMVSLMQTSTMPRRS

SEQ ID NO: 125481 - protein, 15 aa, Artificial Sequence
  Description of Artificial Sequence: Synthetic peptide
  Seed: RMCSLMQGSTLPRRS
RMVSLMQTSTTPRRS

SEQ ID NO: 125482 - protein, 15 aa, Artificial Sequence
  Description of Artificial Sequence: Synthetic peptide
  Seed: RMCSLMQGSTLPRRS
RMVSLMQTSTVPRRS

SEQ ID NO: 125483 - protein, 15 aa, Artificial Sequence
  Description of Artificial Sequence: Synthetic peptide
  Seed: RMCSLMQGSTLPRRS
RMVSLMQVSTAPRRS

SEQ ID NO: 125484 - protein, 15 aa, Artificial Sequence
  Description of Artificial Sequence: Synthetic peptide
  Seed: RMCSLMQGSTLPRRS
RMVSLMQVSTIPRRS

SEQ ID NO: 125485 - protein, 15 aa, Artificial Sequence
  Description of Artificial Sequence: Synthetic peptide
  Seed: RMCSLMQGSTLPRRS
RMVSLMQVSTLPRRS

SEQ ID NO: 125486 - protein, 15 aa, Artificial Sequence
  Description of Artificial Sequence: Synthetic peptide
  Seed: RMCSLMQGSTLPRRS
RMVSLMQVSTNPRRS

SEQ ID NO: 125487 - protein, 15 aa, Artificial Sequence
  Description of Artificial Sequence: Synthetic peptide
  Seed: RMCSLMQGSTLPRRS
RMVSLMQVSTSPRRS

SEQ ID NO: 125488 - protein, 15 aa, Artificial Sequence
  Description of Artificial Sequence: Synthetic peptide
  Seed: RMCSLMQGSTLPRRS
RMVSLMQVSTVPRRS

SEQ ID NO: 125489 - protein, 15 aa, Artificial Sequence
  Description of Artificial Sequence: Synthetic peptide
  Seed: RMCSLMQGSTLPRRS
RMVSLQQASTAPRRS

SEQ ID NO: 125490 - protein, 15 aa, Artificial Sequence
  Description of Artificial Sequence: Synthetic peptide
  Seed: RMCSLMQGSTLPRRS
RMVSLQQASTIPRRS

SEQ ID NO: 125491 - protein, 15 aa, Artificial Sequence
  Description of Artificial Sequence: Synthetic peptide
  Seed: RMCSLMQGSTLPRRS
RMVSLQQASTLPRRS

SEQ ID NO: 125492 - protein, 15 aa, Artificial Sequence
  Description of Artificial Sequence: Synthetic peptide
  Seed: RMCSLMQGSTLPRRS
RMVSLQQASTVPRRS

SEQ ID NO: 125493 - protein, 15 aa, Artificial Sequence
  Description of Artificial Sequence: Synthetic peptide
  Seed: RMCSLMQGSTLPRRS
RMVSLQQGSTIPRRS

SEQ ID NO: 125494 - protein, 15 aa, Artificial Sequence
  Description of Artificial Sequence: Synthetic peptide
  Seed: RMCSLMQGSTLPRRS
RMVSLQQGSTLPRRS

SEQ ID NO: 125495 - protein, 15 aa, Artificial Sequence
  Description of Artificial Sequence: Synthetic peptide
  Seed: RMCSLMQGSTLPRRS
RMVSLQQGSTVPRRS

SEQ ID NO: 125496 - protein, 15 aa, Artificial Sequence
  Description of Artificial Sequence: Synthetic peptide
  Seed: RMCSLMQGSTLPRRS
RMVSLQQSSTIPRRS

SEQ ID NO: 125497 - protein, 15 aa, Artificial Sequence
  Description of Artificial Sequence: Synthetic peptide
  Seed: RMCSLMQGSTLPRRS
RMVSLQQSSTLPRRS

SEQ ID NO: 125498 - protein, 15 aa, Artificial Sequence
  Description of Artificial Sequence: Synthetic peptide
  Seed: RMCSLMQGSTLPRRS
RMVSLQQSSTVPRRS

SEQ ID NO: 125499 - protein, 15 aa, Artificial Sequence
  Description of Artificial Sequence: Synthetic peptide
  Seed: RMCSLMQGSTLPRRS
RMVSLSQASTIPRRS

SEQ ID NO: 125500 - protein, 15 aa, Artificial Sequence
  Description of Artificial Sequence: Synthetic peptide
  Seed: RMCSLMQGSTLPRRS
RMVSLSQASTLPRRS

SEQ ID NO: 125501 - protein, 15 aa, Artificial Sequence
  Description of Artificial Sequence: Synthetic peptide
  Seed: RMCSLMQGSTLPRRS
RMVSLSQSSTIPRRS

SEQ ID NO: 125502 - protein, 15 aa, Artificial Sequence
  Description of Artificial Sequence: Synthetic peptide
  Seed: RMCSLMQGSTLPRRS
RMVSLSQSSTLPRRS

SEQ ID NO: 125503 - protein, 15 aa, Artificial Sequence
  Description of Artificial Sequence: Synthetic peptide
  Seed: RMCSLMQGSTLPRRS
RMVSLTQASTIPRRS

SEQ ID NO: 125504 - protein, 15 aa, Artificial Sequence
  Description of Artificial Sequence: Synthetic peptide
  Seed: RMCSLMQGSTLPRRS
RMVSLTQASTLPRRS

SEQ ID NO: 125505 - protein, 15 aa, Artificial Sequence
  Description of Artificial Sequence: Synthetic peptide
  Seed: RMCSLMQGSTLPRRS
RMVSLTQASTVPRRS

SEQ ID NO: 125506 - protein, 15 aa, Artificial Sequence
  Description of Artificial Sequence: Synthetic peptide
  Seed: RMCSLMQGSTLPRRS
RMVSLTQGSTIPRRS

SEQ ID NO: 125507 - protein, 15 aa, Artificial Sequence
  Description of Artificial Sequence: Synthetic peptide
  Seed: RMCSLMQGSTLPRRS
RMVSLTQSSTIPRRS

SEQ ID NO: 125508 - protein, 15 aa, Artificial Sequence
  Description of Artificial Sequence: Synthetic peptide
  Seed: RMCSLMQGSTLPRRS
RMVSLTQSSTLPRRS

SEQ ID NO: 125509 - protein, 15 aa, Artificial Sequence
  Description of Artificial Sequence: Synthetic peptide
  Seed: RMCSLMQGSTLPRRS
RMVSLTQSSTVPRRS

SEQ ID NO: 125510 - protein, 15 aa, Artificial Sequence
  Description of Artificial Sequence: Synthetic peptide
  Seed: RMCSLMQGSTLPRRS
RMVSLVQASTAPRRS

SEQ ID NO: 125511 - protein, 15 aa, Artificial Sequence
  Description of Artificial Sequence: Synthetic peptide
  Seed: RMCSLMQGSTLPRRS
RMVSLVQASTIPRRS

SEQ ID NO: 125512 - protein, 15 aa, Artificial Sequence
  Description of Artificial Sequence: Synthetic peptide
  Seed: RMCSLMQGSTLPRRS
RMVSLVQASTLPRRS

SEQ ID NO: 125513 - protein, 15 aa, Artificial Sequence
  Description of Artificial Sequence: Synthetic peptide
  Seed: RMCSLMQGSTLPRRS
RMVSLVQASTVPRRS

SEQ ID NO: 125514 - protein, 15 aa, Artificial Sequence
  Description of Artificial Sequence: Synthetic peptide
  Seed: RMCSLMQGSTLPRRS
RMVSLVQGSTAPRRS

SEQ ID NO: 125515 - protein, 15 aa, Artificial Sequence
  Description of Artificial Sequence: Synthetic peptide
  Seed: RMCSLMQGSTLPRRS
RMVSLVQGSTIPRRS

SEQ ID NO: 125516 - protein, 15 aa, Artificial Sequence
  Description of Artificial Sequence: Synthetic peptide
  Seed: RMCSLMQGSTLPRRS
RMVSLVQGSTLPRRS

SEQ ID NO: 125517 - protein, 15 aa, Artificial Sequence
  Description of Artificial Sequence: Synthetic peptide
  Seed: RMCSLMQGSTLPRRS
RMVSLVQGSTVPRRS

SEQ ID NO: 125518 - protein, 15 aa, Artificial Sequence
  Description of Artificial Sequence: Synthetic peptide
  Seed: RMCSLMQGSTLPRRS
RMVSLVQSSTIPRRS

SEQ ID NO: 125519 - protein, 15 aa, Artificial Sequence
  Description of Artificial Sequence: Synthetic peptide
  Seed: RMCSLMQGSTLPRRS
RMVSLVQSSTLPRRS

SEQ ID NO: 125520 - protein, 15 aa, Artificial Sequence
  Description of Artificial Sequence: Synthetic peptide
  Seed: RMCSLMQGSTLPRRS
RMVSLVQSSTVPRRS

SEQ ID NO: 125521 - protein, 15 aa, Artificial Sequence
  Description of Artificial Sequence: Synthetic peptide
  Seed: RMCSLMQGSTLPRRS
RMWSLAQASTAPRRS

SEQ ID NO: 125522 - protein, 15 aa, Artificial Sequence
  Description of Artificial Sequence: Synthetic peptide
  Seed: RMCSLMQGSTLPRRS
RMWSLAQASTCPRRS

SEQ ID NO: 125523 - protein, 15 aa, Artificial Sequence
  Description of Artificial Sequence: Synthetic peptide
  Seed: RMCSLMQGSTLPRRS
RMWSLAQASTFPRRS

SEQ ID NO: 125524 - protein, 15 aa, Artificial Sequence
  Description of Artificial Sequence: Synthetic peptide
  Seed: RMCSLMQGSTLPRRS
RMWSLAQASTGPRRS

SEQ ID NO: 125525 - protein, 15 aa, Artificial Sequence
  Description of Artificial Sequence: Synthetic peptide
  Seed: RMCSLMQGSTLPRRS
RMWSLAQASTIPRRS

SEQ ID NO: 125526 - protein, 15 aa, Artificial Sequence
  Description of Artificial Sequence: Synthetic peptide
  Seed: RMCSLMQGSTLPRRS
RMWSLAQASTLPRRS

SEQ ID NO: 125527 - protein, 15 aa, Artificial Sequence
  Description of Artificial Sequence: Synthetic peptide
  Seed: RMCSLMQGSTLPRRS
RMWSLAQASTMPRRS

SEQ ID NO: 125528 - protein, 15 aa, Artificial Sequence
  Description of Artificial Sequence: Synthetic peptide
  Seed: RMCSLMQGSTLPRRS
RMWSLAQASTNPRRS

SEQ ID NO: 125529 - protein, 15 aa, Artificial Sequence
  Description of Artificial Sequence: Synthetic peptide
  Seed: RMCSLMQGSTLPRRS
RMWSLAQASTQPRRS

SEQ ID NO: 125530 - protein, 15 aa, Artificial Sequence
  Description of Artificial Sequence: Synthetic peptide
  Seed: RMCSLMQGSTLPRRS
RMWSLAQASTSPRRS

SEQ ID NO: 125531 - protein, 15 aa, Artificial Sequence
  Description of Artificial Sequence: Synthetic peptide
  Seed: RMCSLMQGSTLPRRS
RMWSLAQASTTPRRS

SEQ ID NO: 125532 - protein, 15 aa, Artificial Sequence
  Description of Artificial Sequence: Synthetic peptide
  Seed: RMCSLMQGSTLPRRS
RMWSLAQASTVPRRS

SEQ ID NO: 125533 - protein, 15 aa, Artificial Sequence
  Description of Artificial Sequence: Synthetic peptide
  Seed: RMCSLMQGSTLPRRS
RMWSLAQGSTAPRRS

SEQ ID NO: 125534 - protein, 15 aa, Artificial Sequence
  Description of Artificial Sequence: Synthetic peptide
  Seed: RMCSLMQGSTLPRRS
RMWSLAQGSTIPRRS

SEQ ID NO: 125535 - protein, 15 aa, Artificial Sequence
  Description of Artificial Sequence: Synthetic peptide
  Seed: RMCSLMQGSTLPRRS
RMWSLAQGSTLPRRS

SEQ ID NO: 125536 - protein, 15 aa, Artificial Sequence
  Description of Artificial Sequence: Synthetic peptide
  Seed: RMCSLMQGSTLPRRS
RMWSLAQGSTMPRRS

SEQ ID NO: 125537 - protein, 15 aa, Artificial Sequence
  Description of Artificial Sequence: Synthetic peptide
  Seed: RMCSLMQGSTLPRRS
RMWSLAQGSTSPRRS

SEQ ID NO: 125538 - protein, 15 aa, Artificial Sequence
  Description of Artificial Sequence: Synthetic peptide
  Seed: RMCSLMQGSTLPRRS
RMWSLAQGSTTPRRS

SEQ ID NO: 125539 - protein, 15 aa, Artificial Sequence
  Description of Artificial Sequence: Synthetic peptide
  Seed: RMCSLMQGSTLPRRS
RMWSLAQGSTVPRRS

SEQ ID NO: 125540 - protein, 15 aa, Artificial Sequence
  Description of Artificial Sequence: Synthetic peptide
  Seed: RMCSLMQGSTLPRRS
RMWSLAQISTAPRRS

SEQ ID NO: 125541 - protein, 15 aa, Artificial Sequence
  Description of Artificial Sequence: Synthetic peptide
  Seed: RMCSLMQGSTLPRRS
RMWSLAQISTNPRRS

SEQ ID NO: 125542 - protein, 15 aa, Artificial Sequence
  Description of Artificial Sequence: Synthetic peptide
  Seed: RMCSLMQGSTLPRRS
RMWSLAQISTSPRRS

SEQ ID NO: 125543 - protein, 15 aa, Artificial Sequence
  Description of Artificial Sequence: Synthetic peptide
  Seed: RMCSLMQGSTLPRRS
RMWSLAQNSTAPRRS

SEQ ID NO: 125544 - protein, 15 aa, Artificial Sequence
  Description of Artificial Sequence: Synthetic peptide
  Seed: RMCSLMQGSTLPRRS
RMWSLAQNSTIPRRS

SEQ ID NO: 125545 - protein, 15 aa, Artificial Sequence
  Description of Artificial Sequence: Synthetic peptide
  Seed: RMCSLMQGSTLPRRS
RMWSLAQNSTLPRRS

SEQ ID NO: 125546 - protein, 15 aa, Artificial Sequence
  Description of Artificial Sequence: Synthetic peptide
  Seed: RMCSLMQGSTLPRRS
RMWSLAQNSTMPRRS

SEQ ID NO: 125547 - protein, 15 aa, Artificial Sequence
  Description of Artificial Sequence: Synthetic peptide
  Seed: RMCSLMQGSTLPRRS
RMWSLAQNSTVPRRS

SEQ ID NO: 125548 - protein, 15 aa, Artificial Sequence
  Description of Artificial Sequence: Synthetic peptide
  Seed: RMCSLMQGSTLPRRS
RMWSLAQPSTAPRRS

SEQ ID NO: 125549 - protein, 15 aa, Artificial Sequence
  Description of Artificial Sequence: Synthetic peptide
  Seed: RMCSLMQGSTLPRRS
RMWSLAQPSTIPRRS

SEQ ID NO: 125550 - protein, 15 aa, Artificial Sequence
  Description of Artificial Sequence: Synthetic peptide
  Seed: RMCSLMQGSTLPRRS
RMWSLAQPSTLPRRS

SEQ ID NO: 125551 - protein, 15 aa, Artificial Sequence
  Description of Artificial Sequence: Synthetic peptide
  Seed: RMCSLMQGSTLPRRS
RMWSLAQPSTMPRRS

SEQ ID NO: 125552 - protein, 15 aa, Artificial Sequence
  Description of Artificial Sequence: Synthetic peptide
  Seed: RMCSLMQGSTLPRRS
RMWSLAQPSTNPRRS

SEQ ID NO: 125553 - protein, 15 aa, Artificial Sequence
  Description of Artificial Sequence: Synthetic peptide
  Seed: RMCSLMQGSTLPRRS
RMWSLAQPSTSPRRS

SEQ ID NO: 125554 - protein, 15 aa, Artificial Sequence
  Description of Artificial Sequence: Synthetic peptide
  Seed: RMCSLMQGSTLPRRS
RMWSLAQPSTTPRRS

SEQ ID NO: 125555 - protein, 15 aa, Artificial Sequence
  Description of Artificial Sequence: Synthetic peptide
  Seed: RMCSLMQGSTLPRRS
RMWSLAQPSTVPRRS

SEQ ID NO: 125556 - protein, 15 aa, Artificial Sequence
  Description of Artificial Sequence: Synthetic peptide
  Seed: RMCSLMQGSTLPRRS
RMWSLAQSSTAPRRS

SEQ ID NO: 125557 - protein, 15 aa, Artificial Sequence
  Description of Artificial Sequence: Synthetic peptide
  Seed: RMCSLMQGSTLPRRS
RMWSLAQSSTIPRRS

SEQ ID NO: 125558 - protein, 15 aa, Artificial Sequence
  Description of Artificial Sequence: Synthetic peptide
  Seed: RMCSLMQGSTLPRRS
RMWSLAQSSTLPRRS

SEQ ID NO: 125559 - protein, 15 aa, Artificial Sequence
  Description of Artificial Sequence: Synthetic peptide
  Seed: RMCSLMQGSTLPRRS
RMWSLAQSSTMPRRS

SEQ ID NO: 125560 - protein, 15 aa, Artificial Sequence
  Description of Artificial Sequence: Synthetic peptide
  Seed: RMCSLMQGSTLPRRS
RMWSLAQSSTNPRRS

SEQ ID NO: 125561 - protein, 15 aa, Artificial Sequence
  Description of Artificial Sequence: Synthetic peptide
  Seed: RMCSLMQGSTLPRRS
RMWSLAQSSTSPRRS

SEQ ID NO: 125562 - protein, 15 aa, Artificial Sequence
  Description of Artificial Sequence: Synthetic peptide
  Seed: RMCSLMQGSTLPRRS
RMWSLAQSSTTPRRS

SEQ ID NO: 125563 - protein, 15 aa, Artificial Sequence
  Description of Artificial Sequence: Synthetic peptide
  Seed: RMCSLMQGSTLPRRS
RMWSLAQSSTVPRRS

SEQ ID NO: 125564 - protein, 15 aa, Artificial Sequence
  Description of Artificial Sequence: Synthetic peptide
  Seed: RMCSLMQGSTLPRRS
RMWSLAQTSTAPRRS

SEQ ID NO: 125565 - protein, 15 aa, Artificial Sequence
  Description of Artificial Sequence: Synthetic peptide
  Seed: RMCSLMQGSTLPRRS
RMWSLAQTSTIPRRS

SEQ ID NO: 125566 - protein, 15 aa, Artificial Sequence
  Description of Artificial Sequence: Synthetic peptide
  Seed: RMCSLMQGSTLPRRS
RMWSLAQTSTLPRRS

SEQ ID NO: 125567 - protein, 15 aa, Artificial Sequence
  Description of Artificial Sequence: Synthetic peptide
  Seed: RMCSLMQGSTLPRRS
RMWSLAQTSTMPRRS

SEQ ID NO: 125568 - protein, 15 aa, Artificial Sequence
  Description of Artificial Sequence: Synthetic peptide
  Seed: RMCSLMQGSTLPRRS
RMWSLAQTSTNPRRS

SEQ ID NO: 125569 - protein, 15 aa, Artificial Sequence
  Description of Artificial Sequence: Synthetic peptide
  Seed: RMCSLMQGSTLPRRS
RMWSLAQTSTSPRRS

SEQ ID NO: 125570 - protein, 15 aa, Artificial Sequence
  Description of Artificial Sequence: Synthetic peptide
  Seed: RMCSLMQGSTLPRRS
RMWSLAQTSTVPRRS

SEQ ID NO: 125571 - protein, 15 aa, Artificial Sequence
  Description of Artificial Sequence: Synthetic peptide
  Seed: RMCSLMQGSTLPRRS
RMWSLAQVSTAPRRS

SEQ ID NO: 125572 - protein, 15 aa, Artificial Sequence
  Description of Artificial Sequence: Synthetic peptide
  Seed: RMCSLMQGSTLPRRS
RMWSLAQVSTIPRRS

SEQ ID NO: 125573 - protein, 15 aa, Artificial Sequence
  Description of Artificial Sequence: Synthetic peptide
  Seed: RMCSLMQGSTLPRRS
RMWSLAQVSTLPRRS

SEQ ID NO: 125574 - protein, 15 aa, Artificial Sequence
  Description of Artificial Sequence: Synthetic peptide
  Seed: RMCSLMQGSTLPRRS
RMWSLAQVSTNPRRS

SEQ ID NO: 125575 - protein, 15 aa, Artificial Sequence
  Description of Artificial Sequence: Synthetic peptide
  Seed: RMCSLMQGSTLPRRS
RMWSLAQVSTSPRRS

SEQ ID NO: 125576 - protein, 15 aa, Artificial Sequence
  Description of Artificial Sequence: Synthetic peptide
  Seed: RMCSLMQGSTLPRRS
RMWSLAQVSTVPRRS

SEQ ID NO: 125577 - protein, 15 aa, Artificial Sequence
  Description of Artificial Sequence: Synthetic peptide
  Seed: RMCSLMQGSTLPRRS
RMWSLCQASTIPRRS

SEQ ID NO: 125578 - protein, 15 aa, Artificial Sequence
  Description of Artificial Sequence: Synthetic peptide
  Seed: RMCSLMQGSTLPRRS
RMWSLCQASTLPRRS

SEQ ID NO: 125579 - protein, 15 aa, Artificial Sequence
  Description of Artificial Sequence: Synthetic peptide
  Seed: RMCSLMQGSTLPRRS
RMWSLCQASTVPRRS

SEQ ID NO: 125580 - protein, 15 aa, Artificial Sequence
  Description of Artificial Sequence: Synthetic peptide
  Seed: RMCSLMQGSTLPRRS
RMWSLEQASTAPRRS

SEQ ID NO: 125581 - protein, 15 aa, Artificial Sequence
  Description of Artificial Sequence: Synthetic peptide
  Seed: RMCSLMQGSTLPRRS
RMWSLEQASTIPRRS

SEQ ID NO: 125582 - protein, 15 aa, Artificial Sequence
  Description of Artificial Sequence: Synthetic peptide
  Seed: RMCSLMQGSTLPRRS
RMWSLEQASTLPRRS

SEQ ID NO: 125583 - protein, 15 aa, Artificial Sequence
  Description of Artificial Sequence: Synthetic peptide
  Seed: RMCSLMQGSTLPRRS
RMWSLEQASTMPRRS

SEQ ID NO: 125584 - protein, 15 aa, Artificial Sequence
  Description of Artificial Sequence: Synthetic peptide
  Seed: RMCSLMQGSTLPRRS
RMWSLEQASTVPRRS

SEQ ID NO: 125585 - protein, 15 aa, Artificial Sequence
  Description of Artificial Sequence: Synthetic peptide
  Seed: RMCSLMQGSTLPRRS
RMWSLEQGSTAPRRS

SEQ ID NO: 125586 - protein, 15 aa, Artificial Sequence
  Description of Artificial Sequence: Synthetic peptide
  Seed: RMCSLMQGSTLPRRS
RMWSLEQGSTIPRRS

SEQ ID NO: 125587 - protein, 15 aa, Artificial Sequence
  Description of Artificial Sequence: Synthetic peptide
  Seed: RMCSLMQGSTLPRRS
RMWSLEQGSTLPRRS

SEQ ID NO: 125588 - protein, 15 aa, Artificial Sequence
  Description of Artificial Sequence: Synthetic peptide
  Seed: RMCSLMQGSTLPRRS
RMWSLEQGSTVPRRS

SEQ ID NO: 125589 - protein, 15 aa, Artificial Sequence
  Description of Artificial Sequence: Synthetic peptide
  Seed: RMCSLMQGSTLPRRS
RMWSLEQSSTAPRRS

SEQ ID NO: 125590 - protein, 15 aa, Artificial Sequence
  Description of Artificial Sequence: Synthetic peptide
  Seed: RMCSLMQGSTLPRRS
RMWSLEQSSTIPRRS

SEQ ID NO: 125591 - protein, 15 aa, Artificial Sequence
  Description of Artificial Sequence: Synthetic peptide
  Seed: RMCSLMQGSTLPRRS
RMWSLEQSSTLPRRS

SEQ ID NO: 125592 - protein, 15 aa, Artificial Sequence
  Description of Artificial Sequence: Synthetic peptide
  Seed: RMCSLMQGSTLPRRS
RMWSLEQSSTVPRRS

SEQ ID NO: 125593 - protein, 15 aa, Artificial Sequence
  Description of Artificial Sequence: Synthetic peptide
  Seed: RMCSLMQGSTLPRRS
RMWSLFQASTAPRRS

SEQ ID NO: 125594 - protein, 15 aa, Artificial Sequence
  Description of Artificial Sequence: Synthetic peptide
  Seed: RMCSLMQGSTLPRRS
RMWSLFQASTIPRRS

SEQ ID NO: 125595 - protein, 15 aa, Artificial Sequence
  Description of Artificial Sequence: Synthetic peptide
  Seed: RMCSLMQGSTLPRRS
RMWSLFQASTLPRRS

SEQ ID NO: 125596 - protein, 15 aa, Artificial Sequence
  Description of Artificial Sequence: Synthetic peptide
  Seed: RMCSLMQGSTLPRRS
RMWSLFQASTMPRRS

SEQ ID NO: 125597 - protein, 15 aa, Artificial Sequence
  Description of Artificial Sequence: Synthetic peptide
  Seed: RMCSLMQGSTLPRRS
RMWSLFQASTNPRRS

SEQ ID NO: 125598 - protein, 15 aa, Artificial Sequence
  Description of Artificial Sequence: Synthetic peptide
  Seed: RMCSLMQGSTLPRRS
RMWSLFQASTSPRRS

SEQ ID NO: 125599 - protein, 15 aa, Artificial Sequence
  Description of Artificial Sequence: Synthetic peptide
  Seed: RMCSLMQGSTLPRRS
RMWSLFQASTTPRRS

SEQ ID NO: 125600 - protein, 15 aa, Artificial Sequence
  Description of Artificial Sequence: Synthetic peptide
  Seed: RMCSLMQGSTLPRRS
RMWSLFQASTVPRRS

SEQ ID NO: 125601 - protein, 15 aa, Artificial Sequence
  Description of Artificial Sequence: Synthetic peptide
  Seed: RMCSLMQGSTLPRRS
RMWSLFQGSTAPRRS

SEQ ID NO: 125602 - protein, 15 aa, Artificial Sequence
  Description of Artificial Sequence: Synthetic peptide
  Seed: RMCSLMQGSTLPRRS
RMWSLFQGSTIPRRS

SEQ ID NO: 125603 - protein, 15 aa, Artificial Sequence
  Description of Artificial Sequence: Synthetic peptide
  Seed: RMCSLMQGSTLPRRS
RMWSLFQGSTLPRRS

SEQ ID NO: 125604 - protein, 15 aa, Artificial Sequence
  Description of Artificial Sequence: Synthetic peptide
  Seed: RMCSLMQGSTLPRRS
RMWSLFQGSTVPRRS

SEQ ID NO: 125605 - protein, 15 aa, Artificial Sequence
  Description of Artificial Sequence: Synthetic peptide
  Seed: RMCSLMQGSTLPRRS
RMWSLFQISTAPRRS

SEQ ID NO: 125606 - protein, 15 aa, Artificial Sequence
  Description of Artificial Sequence: Synthetic peptide
  Seed: RMCSLMQGSTLPRRS
RMWSLFQPSTAPRRS

SEQ ID NO: 125607 - protein, 15 aa, Artificial Sequence
  Description of Artificial Sequence: Synthetic peptide
  Seed: RMCSLMQGSTLPRRS
RMWSLFQPSTIPRRS

SEQ ID NO: 125608 - protein, 15 aa, Artificial Sequence
  Description of Artificial Sequence: Synthetic peptide
  Seed: RMCSLMQGSTLPRRS
RMWSLFQPSTLPRRS

SEQ ID NO: 125609 - protein, 15 aa, Artificial Sequence
  Description of Artificial Sequence: Synthetic peptide
  Seed: RMCSLMQGSTLPRRS
RMWSLFQPSTVPRRS

SEQ ID NO: 125610 - protein, 15 aa, Artificial Sequence
  Description of Artificial Sequence: Synthetic peptide
  Seed: RMCSLMQGSTLPRRS
RMWSLFQSSTAPRRS

SEQ ID NO: 125611 - protein, 15 aa, Artificial Sequence
  Description of Artificial Sequence: Synthetic peptide
  Seed: RMCSLMQGSTLPRRS
RMWSLFQSSTIPRRS

SEQ ID NO: 125612 - protein, 15 aa, Artificial Sequence
  Description of Artificial Sequence: Synthetic peptide
  Seed: RMCSLMQGSTLPRRS
RMWSLFQSSTLPRRS

SEQ ID NO: 125613 - protein, 15 aa, Artificial Sequence
  Description of Artificial Sequence: Synthetic peptide
  Seed: RMCSLMQGSTLPRRS
RMWSLFQSSTVPRRS

SEQ ID NO: 125614 - protein, 15 aa, Artificial Sequence
  Description of Artificial Sequence: Synthetic peptide
  Seed: RMCSLMQGSTLPRRS
RMWSLFQTSTAPRRS

SEQ ID NO: 125615 - protein, 15 aa, Artificial Sequence
  Description of Artificial Sequence: Synthetic peptide
  Seed: RMCSLMQGSTLPRRS
RMWSLFQVSTAPRRS

SEQ ID NO: 125616 - protein, 15 aa, Artificial Sequence
  Description of Artificial Sequence: Synthetic peptide
  Seed: RMCSLMQGSTLPRRS
RMWSLGQASTAPRRS

SEQ ID NO: 125617 - protein, 15 aa, Artificial Sequence
  Description of Artificial Sequence: Synthetic peptide
  Seed: RMCSLMQGSTLPRRS
RMWSLGQASTIPRRS

SEQ ID NO: 125618 - protein, 15 aa, Artificial Sequence
  Description of Artificial Sequence: Synthetic peptide
  Seed: RMCSLMQGSTLPRRS
RMWSLGQASTLPRRS

SEQ ID NO: 125619 - protein, 15 aa, Artificial Sequence
  Description of Artificial Sequence: Synthetic peptide
  Seed: RMCSLMQGSTLPRRS
RMWSLGQASTMPRRS

SEQ ID NO: 125620 - protein, 15 aa, Artificial Sequence
  Description of Artificial Sequence: Synthetic peptide
  Seed: RMCSLMQGSTLPRRS
RMWSLGQASTVPRRS

SEQ ID NO: 125621 - protein, 15 aa, Artificial Sequence
  Description of Artificial Sequence: Synthetic peptide
  Seed: RMCSLMQGSTLPRRS
RMWSLGQGSTIPRRS

SEQ ID NO: 125622 - protein, 15 aa, Artificial Sequence
  Description of Artificial Sequence: Synthetic peptide
  Seed: RMCSLMQGSTLPRRS
RMWSLGQGSTLPRRS

SEQ ID NO: 125623 - protein, 15 aa, Artificial Sequence
  Description of Artificial Sequence: Synthetic peptide
  Seed: RMCSLMQGSTLPRRS
RMWSLGQGSTVPRRS

SEQ ID NO: 125624 - protein, 15 aa, Artificial Sequence
  Description of Artificial Sequence: Synthetic peptide
  Seed: RMCSLMQGSTLPRRS
RMWSLGQSSTIPRRS

SEQ ID NO: 125625 - protein, 15 aa, Artificial Sequence
  Description of Artificial Sequence: Synthetic peptide
  Seed: RMCSLMQGSTLPRRS
RMWSLGQSSTLPRRS

SEQ ID NO: 125626 - protein, 15 aa, Artificial Sequence
  Description of Artificial Sequence: Synthetic peptide
  Seed: RMCSLMQGSTLPRRS
RMWSLGQSSTVPRRS

SEQ ID NO: 125627 - protein, 15 aa, Artificial Sequence
  Description of Artificial Sequence: Synthetic peptide
  Seed: RMCSLMQGSTLPRRS
RMWSLHQASTIPRRS

SEQ ID NO: 125628 - protein, 15 aa, Artificial Sequence
  Description of Artificial Sequence: Synthetic peptide
  Seed: RMCSLMQGSTLPRRS
RMWSLHQASTLPRRS

SEQ ID NO: 125629 - protein, 15 aa, Artificial Sequence
  Description of Artificial Sequence: Synthetic peptide
  Seed: RMCSLMQGSTLPRRS
RMWSLHQASTVPRRS

SEQ ID NO: 125630 - protein, 15 aa, Artificial Sequence
  Description of Artificial Sequence: Synthetic peptide
  Seed: RMCSLMQGSTLPRRS
RMWSLHQSSTIPRRS

SEQ ID NO: 125631 - protein, 15 aa, Artificial Sequence
  Description of Artificial Sequence: Synthetic peptide
  Seed: RMCSLMQGSTLPRRS
RMWSLIQASTAPRRS

SEQ ID NO: 125632 - protein, 15 aa, Artificial Sequence
  Description of Artificial Sequence: Synthetic peptide
  Seed: RMCSLMQGSTLPRRS
RMWSLIQASTCPRRS

SEQ ID NO: 125633 - protein, 15 aa, Artificial Sequence
  Description of Artificial Sequence: Synthetic peptide
  Seed: RMCSLMQGSTLPRRS
RMWSLIQASTFPRRS

SEQ ID NO: 125634 - protein, 15 aa, Artificial Sequence
  Description of Artificial Sequence: Synthetic peptide
  Seed: RMCSLMQGSTLPRRS
RMWSLIQASTGPRRS

SEQ ID NO: 125635 - protein, 15 aa, Artificial Sequence
  Description of Artificial Sequence: Synthetic peptide
  Seed: RMCSLMQGSTLPRRS
RMWSLIQASTHPRRS

SEQ ID NO: 125636 - protein, 15 aa, Artificial Sequence
  Description of Artificial Sequence: Synthetic peptide
  Seed: RMCSLMQGSTLPRRS
RMWSLIQASTIPRRS

SEQ ID NO: 125637 - protein, 15 aa, Artificial Sequence
  Description of Artificial Sequence: Synthetic peptide
  Seed: RMCSLMQGSTLPRRS
RMWSLIQASTLPRRS

SEQ ID NO: 125638 - protein, 15 aa, Artificial Sequence
  Description of Artificial Sequence: Synthetic peptide
  Seed: RMCSLMQGSTLPRRS
RMWSLIQASTMPRRS

SEQ ID NO: 125639 - protein, 15 aa, Artificial Sequence
  Description of Artificial Sequence: Synthetic peptide
  Seed: RMCSLMQGSTLPRRS
RMWSLIQASTNPRRS

SEQ ID NO: 125640 - protein, 15 aa, Artificial Sequence
  Description of Artificial Sequence: Synthetic peptide
  Seed: RMCSLMQGSTLPRRS
RMWSLIQASTQPRRS

SEQ ID NO: 125641 - protein, 15 aa, Artificial Sequence
  Description of Artificial Sequence: Synthetic peptide
  Seed: RMCSLMQGSTLPRRS
RMWSLIQASTSPRRS

SEQ ID NO: 125642 - protein, 15 aa, Artificial Sequence
  Description of Artificial Sequence: Synthetic peptide
  Seed: RMCSLMQGSTLPRRS
RMWSLIQASTTPRRS

SEQ ID NO: 125643 - protein, 15 aa, Artificial Sequence
  Description of Artificial Sequence: Synthetic peptide
  Seed: RMCSLMQGSTLPRRS
RMWSLIQASTVPRRS

SEQ ID NO: 125644 - protein, 15 aa, Artificial Sequence
  Description of Artificial Sequence: Synthetic peptide
  Seed: RMCSLMQGSTLPRRS
RMWSLIQGSTAPRRS

SEQ ID NO: 125645 - protein, 15 aa, Artificial Sequence
  Description of Artificial Sequence: Synthetic peptide
  Seed: RMCSLMQGSTLPRRS
RMWSLIQGSTCPRRS

SEQ ID NO: 125646 - protein, 15 aa, Artificial Sequence
  Description of Artificial Sequence: Synthetic peptide
  Seed: RMCSLMQGSTLPRRS
RMWSLIQGSTGPRRS

SEQ ID NO: 125647 - protein, 15 aa, Artificial Sequence
  Description of Artificial Sequence: Synthetic peptide
  Seed: RMCSLMQGSTLPRRS
RMWSLIQGSTIPRRS

SEQ ID NO: 125648 - protein, 15 aa, Artificial Sequence
  Description of Artificial Sequence: Synthetic peptide
  Seed: RMCSLMQGSTLPRRS
RMWSLIQGSTLPRRS

SEQ ID NO: 125649 - protein, 15 aa, Artificial Sequence
  Description of Artificial Sequence: Synthetic peptide
  Seed: RMCSLMQGSTLPRRS
RMWSLIQGSTMPRRS

SEQ ID NO: 125650 - protein, 15 aa, Artificial Sequence
  Description of Artificial Sequence: Synthetic peptide
  Seed: RMCSLMQGSTLPRRS
RMWSLIQGSTNPRRS

SEQ ID NO: 125651 - protein, 15 aa, Artificial Sequence
  Description of Artificial Sequence: Synthetic peptide
  Seed: RMCSLMQGSTLPRRS
RMWSLIQGSTSPRRS

SEQ ID NO: 125652 - protein, 15 aa, Artificial Sequence
  Description of Artificial Sequence: Synthetic peptide
  Seed: RMCSLMQGSTLPRRS
RMWSLIQGSTTPRRS

SEQ ID NO: 125653 - protein, 15 aa, Artificial Sequence
  Description of Artificial Sequence: Synthetic peptide
  Seed: RMCSLMQGSTLPRRS
RMWSLIQGSTVPRRS

SEQ ID NO: 125654 - protein, 15 aa, Artificial Sequence
  Description of Artificial Sequence: Synthetic peptide
  Seed: RMCSLMQGSTLPRRS
RMWSLIQISTAPRRS

SEQ ID NO: 125655 - protein, 15 aa, Artificial Sequence
  Description of Artificial Sequence: Synthetic peptide
  Seed: RMCSLMQGSTLPRRS
RMWSLIQISTIPRRS

SEQ ID NO: 125656 - protein, 15 aa, Artificial Sequence
  Description of Artificial Sequence: Synthetic peptide
  Seed: RMCSLMQGSTLPRRS
RMWSLIQISTLPRRS

SEQ ID NO: 125657 - protein, 15 aa, Artificial Sequence
  Description of Artificial Sequence: Synthetic peptide
  Seed: RMCSLMQGSTLPRRS
RMWSLIQISTNPRRS

SEQ ID NO: 125658 - protein, 15 aa, Artificial Sequence
  Description of Artificial Sequence: Synthetic peptide
  Seed: RMCSLMQGSTLPRRS
RMWSLIQISTSPRRS

SEQ ID NO: 125659 - protein, 15 aa, Artificial Sequence
  Description of Artificial Sequence: Synthetic peptide
  Seed: RMCSLMQGSTLPRRS
RMWSLIQISTTPRRS

SEQ ID NO: 125660 - protein, 15 aa, Artificial Sequence
  Description of Artificial Sequence: Synthetic peptide
  Seed: RMCSLMQGSTLPRRS
RMWSLIQISTVPRRS

SEQ ID NO: 125661 - protein, 15 aa, Artificial Sequence
  Description of Artificial Sequence: Synthetic peptide
  Seed: RMCSLMQGSTLPRRS
RMWSLIQLSTAPRRS

SEQ ID NO: 125662 - protein, 15 aa, Artificial Sequence
  Description of Artificial Sequence: Synthetic peptide
  Seed: RMCSLMQGSTLPRRS
RMWSLIQMSTAPRRS

SEQ ID NO: 125663 - protein, 15 aa, Artificial Sequence
  Description of Artificial Sequence: Synthetic peptide
  Seed: RMCSLMQGSTLPRRS
RMWSLIQNSTAPRRS

SEQ ID NO: 125664 - protein, 15 aa, Artificial Sequence
  Description of Artificial Sequence: Synthetic peptide
  Seed: RMCSLMQGSTLPRRS
RMWSLIQNSTIPRRS

SEQ ID NO: 125665 - protein, 15 aa, Artificial Sequence
  Description of Artificial Sequence: Synthetic peptide
  Seed: RMCSLMQGSTLPRRS
RMWSLIQNSTLPRRS

SEQ ID NO: 125666 - protein, 15 aa, Artificial Sequence
  Description of Artificial Sequence: Synthetic peptide
  Seed: RMCSLMQGSTLPRRS
RMWSLIQNSTMPRRS

SEQ ID NO: 125667 - protein, 15 aa, Artificial Sequence
  Description of Artificial Sequence: Synthetic peptide
  Seed: RMCSLMQGSTLPRRS
RMWSLIQNSTNPRRS

SEQ ID NO: 125668 - protein, 15 aa, Artificial Sequence
  Description of Artificial Sequence: Synthetic peptide
  Seed: RMCSLMQGSTLPRRS
RMWSLIQNSTSPRRS

SEQ ID NO: 125669 - protein, 15 aa, Artificial Sequence
  Description of Artificial Sequence: Synthetic peptide
  Seed: RMCSLMQGSTLPRRS
RMWSLIQNSTTPRRS

SEQ ID NO: 125670 - protein, 15 aa, Artificial Sequence
  Description of Artificial Sequence: Synthetic peptide
  Seed: RMCSLMQGSTLPRRS
RMWSLIQNSTVPRRS

SEQ ID NO: 125671 - protein, 15 aa, Artificial Sequence
  Description of Artificial Sequence: Synthetic peptide
  Seed: RMCSLMQGSTLPRRS
RMWSLIQPSTAPRRS

SEQ ID NO: 125672 - protein, 15 aa, Artificial Sequence
  Description of Artificial Sequence: Synthetic peptide
  Seed: RMCSLMQGSTLPRRS
RMWSLIQPSTGPRRS

SEQ ID NO: 125673 - protein, 15 aa, Artificial Sequence
  Description of Artificial Sequence: Synthetic peptide
  Seed: RMCSLMQGSTLPRRS
RMWSLIQPSTIPRRS

SEQ ID NO: 125674 - protein, 15 aa, Artificial Sequence
  Description of Artificial Sequence: Synthetic peptide
  Seed: RMCSLMQGSTLPRRS
RMWSLIQPSTLPRRS

SEQ ID NO: 125675 - protein, 15 aa, Artificial Sequence
  Description of Artificial Sequence: Synthetic peptide
  Seed: RMCSLMQGSTLPRRS
RMWSLIQPSTMPRRS

SEQ ID NO: 125676 - protein, 15 aa, Artificial Sequence
  Description of Artificial Sequence: Synthetic peptide
  Seed: RMCSLMQGSTLPRRS
RMWSLIQPSTNPRRS

SEQ ID NO: 125677 - protein, 15 aa, Artificial Sequence
  Description of Artificial Sequence: Synthetic peptide
  Seed: RMCSLMQGSTLPRRS
RMWSLIQPSTQPRRS

SEQ ID NO: 125678 - protein, 15 aa, Artificial Sequence
  Description of Artificial Sequence: Synthetic peptide
  Seed: RMCSLMQGSTLPRRS
RMWSLIQPSTSPRRS

SEQ ID NO: 125679 - protein, 15 aa, Artificial Sequence
  Description of Artificial Sequence: Synthetic peptide
  Seed: RMCSLMQGSTLPRRS
RMWSLIQPSTTPRRS

SEQ ID NO: 125680 - protein, 15 aa, Artificial Sequence
  Description of Artificial Sequence: Synthetic peptide
  Seed: RMCSLMQGSTLPRRS
RMWSLIQPSTVPRRS

SEQ ID NO: 125681 - protein, 15 aa, Artificial Sequence
  Description of Artificial Sequence: Synthetic peptide
  Seed: RMCSLMQGSTLPRRS
RMWSLIQSSTAPRRS

SEQ ID NO: 125682 - protein, 15 aa, Artificial Sequence
  Description of Artificial Sequence: Synthetic peptide
  Seed: RMCSLMQGSTLPRRS
RMWSLIQSSTCPRRS

SEQ ID NO: 125683 - protein, 15 aa, Artificial Sequence
  Description of Artificial Sequence: Synthetic peptide
  Seed: RMCSLMQGSTLPRRS
RMWSLIQSSTGPRRS

SEQ ID NO: 125684 - protein, 15 aa, Artificial Sequence
  Description of Artificial Sequence: Synthetic peptide
  Seed: RMCSLMQGSTLPRRS
RMWSLIQSSTHPRRS

SEQ ID NO: 125685 - protein, 15 aa, Artificial Sequence
  Description of Artificial Sequence: Synthetic peptide
  Seed: RMCSLMQGSTLPRRS
RMWSLIQSSTIPRRS

SEQ ID NO: 125686 - protein, 15 aa, Artificial Sequence
  Description of Artificial Sequence: Synthetic peptide
  Seed: RMCSLMQGSTLPRRS
RMWSLIQSSTLPRRS

SEQ ID NO: 125687 - protein, 15 aa, Artificial Sequence
  Description of Artificial Sequence: Synthetic peptide
  Seed: RMCSLMQGSTLPRRS
RMWSLIQSSTMPRRS

SEQ ID NO: 125688 - protein, 15 aa, Artificial Sequence
  Description of Artificial Sequence: Synthetic peptide
  Seed: RMCSLMQGSTLPRRS
RMWSLIQSSTNPRRS

SEQ ID NO: 125689 - protein, 15 aa, Artificial Sequence
  Description of Artificial Sequence: Synthetic peptide
  Seed: RMCSLMQGSTLPRRS
RMWSLIQSSTSPRRS

SEQ ID NO: 125690 - protein, 15 aa, Artificial Sequence
  Description of Artificial Sequence: Synthetic peptide
  Seed: RMCSLMQGSTLPRRS
RMWSLIQSSTTPRRS

SEQ ID NO: 125691 - protein, 15 aa, Artificial Sequence
  Description of Artificial Sequence: Synthetic peptide
  Seed: RMCSLMQGSTLPRRS
RMWSLIQSSTVPRRS

SEQ ID NO: 125692 - protein, 15 aa, Artificial Sequence
  Description of Artificial Sequence: Synthetic peptide
  Seed: RMCSLMQGSTLPRRS
RMWSLIQTSTAPRRS

SEQ ID NO: 125693 - protein, 15 aa, Artificial Sequence
  Description of Artificial Sequence: Synthetic peptide
  Seed: RMCSLMQGSTLPRRS
RMWSLIQTSTGPRRS

SEQ ID NO: 125694 - protein, 15 aa, Artificial Sequence
  Description of Artificial Sequence: Synthetic peptide
  Seed: RMCSLMQGSTLPRRS
RMWSLIQTSTIPRRS

SEQ ID NO: 125695 - protein, 15 aa, Artificial Sequence
  Description of Artificial Sequence: Synthetic peptide
  Seed: RMCSLMQGSTLPRRS
RMWSLIQTSTLPRRS

SEQ ID NO: 125696 - protein, 15 aa, Artificial Sequence
  Description of Artificial Sequence: Synthetic peptide
  Seed: RMCSLMQGSTLPRRS
RMWSLIQTSTMPRRS

SEQ ID NO: 125697 - protein, 15 aa, Artificial Sequence
  Description of Artificial Sequence: Synthetic peptide
  Seed: RMCSLMQGSTLPRRS
RMWSLIQTSTNPRRS

SEQ ID NO: 125698 - protein, 15 aa, Artificial Sequence
  Description of Artificial Sequence: Synthetic peptide
  Seed: RMCSLMQGSTLPRRS
RMWSLIQTSTSPRRS

SEQ ID NO: 125699 - protein, 15 aa, Artificial Sequence
  Description of Artificial Sequence: Synthetic peptide
  Seed: RMCSLMQGSTLPRRS
RMWSLIQTSTTPRRS

SEQ ID NO: 125700 - protein, 15 aa, Artificial Sequence
  Description of Artificial Sequence: Synthetic peptide
  Seed: RMCSLMQGSTLPRRS
RMWSLIQTSTVPRRS

SEQ ID NO: 125701 - protein, 15 aa, Artificial Sequence
  Description of Artificial Sequence: Synthetic peptide
  Seed: RMCSLMQGSTLPRRS
RMWSLIQVSTAPRRS

SEQ ID NO: 125702 - protein, 15 aa, Artificial Sequence
  Description of Artificial Sequence: Synthetic peptide
  Seed: RMCSLMQGSTLPRRS
RMWSLIQVSTGPRRS

SEQ ID NO: 125703 - protein, 15 aa, Artificial Sequence
  Description of Artificial Sequence: Synthetic peptide
  Seed: RMCSLMQGSTLPRRS
RMWSLIQVSTIPRRS

SEQ ID NO: 125704 - protein, 15 aa, Artificial Sequence
  Description of Artificial Sequence: Synthetic peptide
  Seed: RMCSLMQGSTLPRRS
RMWSLIQVSTLPRRS

SEQ ID NO: 125705 - protein, 15 aa, Artificial Sequence
  Description of Artificial Sequence: Synthetic peptide
  Seed: RMCSLMQGSTLPRRS
RMWSLIQVSTMPRRS

SEQ ID NO: 125706 - protein, 15 aa, Artificial Sequence
  Description of Artificial Sequence: Synthetic peptide
  Seed: RMCSLMQGSTLPRRS
RMWSLIQVSTNPRRS

SEQ ID NO: 125707 - protein, 15 aa, Artificial Sequence
  Description of Artificial Sequence: Synthetic peptide
  Seed: RMCSLMQGSTLPRRS
RMWSLIQVSTSPRRS

SEQ ID NO: 125708 - protein, 15 aa, Artificial Sequence
  Description of Artificial Sequence: Synthetic peptide
  Seed: RMCSLMQGSTLPRRS
RMWSLIQVSTTPRRS

SEQ ID NO: 125709 - protein, 15 aa, Artificial Sequence
  Description of Artificial Sequence: Synthetic peptide
  Seed: RMCSLMQGSTLPRRS
RMWSLIQVSTVPRRS

SEQ ID NO: 125710 - protein, 15 aa, Artificial Sequence
  Description of Artificial Sequence: Synthetic peptide
  Seed: RMCSLMQGSTLPRRS
RMWSLLQASTAPRRS

SEQ ID NO: 125711 - protein, 15 aa, Artificial Sequence
  Description of Artificial Sequence: Synthetic peptide
  Seed: RMCSLMQGSTLPRRS
RMWSLLQASTCPRRS

SEQ ID NO: 125712 - protein, 15 aa, Artificial Sequence
  Description of Artificial Sequence: Synthetic peptide
  Seed: RMCSLMQGSTLPRRS
RMWSLLQASTDPRRS

SEQ ID NO: 125713 - protein, 15 aa, Artificial Sequence
  Description of Artificial Sequence: Synthetic peptide
  Seed: RMCSLMQGSTLPRRS
RMWSLLQASTEPRRS

SEQ ID NO: 125714 - protein, 15 aa, Artificial Sequence
  Description of Artificial Sequence: Synthetic peptide
  Seed: RMCSLMQGSTLPRRS
RMWSLLQASTFPRRS

SEQ ID NO: 125715 - protein, 15 aa, Artificial Sequence
  Description of Artificial Sequence: Synthetic peptide
  Seed: RMCSLMQGSTLPRRS
RMWSLLQASTGPRRS

SEQ ID NO: 125716 - protein, 15 aa, Artificial Sequence
  Description of Artificial Sequence: Synthetic peptide
  Seed: RMCSLMQGSTLPRRS
RMWSLLQASTHPRRS

SEQ ID NO: 125717 - protein, 15 aa, Artificial Sequence
  Description of Artificial Sequence: Synthetic peptide
  Seed: RMCSLMQGSTLPRRS
RMWSLLQASTIPRRS

SEQ ID NO: 125718 - protein, 15 aa, Artificial Sequence
  Description of Artificial Sequence: Synthetic peptide
  Seed: RMCSLMQGSTLPRRS
RMWSLLQASTKPRRS

SEQ ID NO: 125719 - protein, 15 aa, Artificial Sequence
  Description of Artificial Sequence: Synthetic peptide
  Seed: RMCSLMQGSTLPRRS
RMWSLLQASTLPRRS

SEQ ID NO: 125720 - protein, 15 aa, Artificial Sequence
  Description of Artificial Sequence: Synthetic peptide
  Seed: RMCSLMQGSTLPRRS
RMWSLLQASTMPRRS

SEQ ID NO: 125721 - protein, 15 aa, Artificial Sequence
  Description of Artificial Sequence: Synthetic peptide
  Seed: RMCSLMQGSTLPRRS
RMWSLLQASTNPRRS

SEQ ID NO: 125722 - protein, 15 aa, Artificial Sequence
  Description of Artificial Sequence: Synthetic peptide
  Seed: RMCSLMQGSTLPRRS
RMWSLLQASTPPRRS

SEQ ID NO: 125723 - protein, 15 aa, Artificial Sequence
  Description of Artificial Sequence: Synthetic peptide
  Seed: RMCSLMQGSTLPRRS
RMWSLLQASTQPRRS

SEQ ID NO: 125724 - protein, 15 aa, Artificial Sequence
  Description of Artificial Sequence: Synthetic peptide
  Seed: RMCSLMQGSTLPRRS
RMWSLLQASTRPRRS

SEQ ID NO: 125725 - protein, 15 aa, Artificial Sequence
  Description of Artificial Sequence: Synthetic peptide
  Seed: RMCSLMQGSTLPRRS
RMWSLLQASTSPRRS

SEQ ID NO: 125726 - protein, 15 aa, Artificial Sequence
  Description of Artificial Sequence: Synthetic peptide
  Seed: RMCSLMQGSTLPRRS
RMWSLLQASTTPRRS

SEQ ID NO: 125727 - protein, 15 aa, Artificial Sequence
  Description of Artificial Sequence: Synthetic peptide
  Seed: RMCSLMQGSTLPRRS
RMWSLLQASTVPRRS

SEQ ID NO: 125728 - protein, 15 aa, Artificial Sequence
  Description of Artificial Sequence: Synthetic peptide
  Seed: RMCSLMQGSTLPRRS
RMWSLLQASTYPRRS

SEQ ID NO: 125729 - protein, 15 aa, Artificial Sequence
  Description of Artificial Sequence: Synthetic peptide
  Seed: RMCSLMQGSTLPRRS
RMWSLLQGSTAPRRS

SEQ ID NO: 125730 - protein, 15 aa, Artificial Sequence
  Description of Artificial Sequence: Synthetic peptide
  Seed: RMCSLMQGSTLPRRS
RMWSLLQGSTCPRRS

SEQ ID NO: 125731 - protein, 15 aa, Artificial Sequence
  Description of Artificial Sequence: Synthetic peptide
  Seed: RMCSLMQGSTLPRRS
RMWSLLQGSTFPRRS

SEQ ID NO: 125732 - protein, 15 aa, Artificial Sequence
  Description of Artificial Sequence: Synthetic peptide
  Seed: RMCSLMQGSTLPRRS
RMWSLLQGSTGPRRS

SEQ ID NO: 125733 - protein, 15 aa, Artificial Sequence
  Description of Artificial Sequence: Synthetic peptide
  Seed: RMCSLMQGSTLPRRS
RMWSLLQGSTHPRRS

SEQ ID NO: 125734 - protein, 15 aa, Artificial Sequence
  Description of Artificial Sequence: Synthetic peptide
  Seed: RMCSLMQGSTLPRRS
RMWSLLQGSTIPRRS

SEQ ID NO: 125735 - protein, 15 aa, Artificial Sequence
  Description of Artificial Sequence: Synthetic peptide
  Seed: RMCSLMQGSTLPRRS
RMWSLLQGSTLPRRS

SEQ ID NO: 125736 - protein, 15 aa, Artificial Sequence
  Description of Artificial Sequence: Synthetic peptide
  Seed: RMCSLMQGSTLPRRS
RMWSLLQGSTMPRRS

SEQ ID NO: 125737 - protein, 15 aa, Artificial Sequence
  Description of Artificial Sequence: Synthetic peptide
  Seed: RMCSLMQGSTLPRRS
RMWSLLQGSTNPRRS

SEQ ID NO: 125738 - protein, 15 aa, Artificial Sequence
  Description of Artificial Sequence: Synthetic peptide
  Seed: RMCSLMQGSTLPRRS
RMWSLLQGSTPPRRS

SEQ ID NO: 125739 - protein, 15 aa, Artificial Sequence
  Description of Artificial Sequence: Synthetic peptide
  Seed: RMCSLMQGSTLPRRS
RMWSLLQGSTQPRRS

SEQ ID NO: 125740 - protein, 15 aa, Artificial Sequence
  Description of Artificial Sequence: Synthetic peptide
  Seed: RMCSLMQGSTLPRRS
RMWSLLQGSTSPRRS

SEQ ID NO: 125741 - protein, 15 aa, Artificial Sequence
  Description of Artificial Sequence: Synthetic peptide
  Seed: RMCSLMQGSTLPRRS
RMWSLLQGSTTPRRS

SEQ ID NO: 125742 - protein, 15 aa, Artificial Sequence
  Description of Artificial Sequence: Synthetic peptide
  Seed: RMCSLMQGSTLPRRS
RMWSLLQGSTVPRRS

SEQ ID NO: 125743 - protein, 15 aa, Artificial Sequence
  Description of Artificial Sequence: Synthetic peptide
  Seed: RMCSLMQGSTLPRRS
RMWSLLQGSTYPRRS

SEQ ID NO: 125744 - protein, 15 aa, Artificial Sequence
  Description of Artificial Sequence: Synthetic peptide
  Seed: RMCSLMQGSTLPRRS
RMWSLLQHSTAPRRS

SEQ ID NO: 125745 - protein, 15 aa, Artificial Sequence
  Description of Artificial Sequence: Synthetic peptide
  Seed: RMCSLMQGSTLPRRS
RMWSLLQHSTIPRRS

SEQ ID NO: 125746 - protein, 15 aa, Artificial Sequence
  Description of Artificial Sequence: Synthetic peptide
  Seed: RMCSLMQGSTLPRRS
RMWSLLQHSTLPRRS

SEQ ID NO: 125747 - protein, 15 aa, Artificial Sequence
  Description of Artificial Sequence: Synthetic peptide
  Seed: RMCSLMQGSTLPRRS
RMWSLLQHSTVPRRS

SEQ ID NO: 125748 - protein, 15 aa, Artificial Sequence
  Description of Artificial Sequence: Synthetic peptide
  Seed: RMCSLMQGSTLPRRS
RMWSLLQISTAPRRS

SEQ ID NO: 125749 - protein, 15 aa, Artificial Sequence
  Description of Artificial Sequence: Synthetic peptide
  Seed: RMCSLMQGSTLPRRS
RMWSLLQISTGPRRS

SEQ ID NO: 125750 - protein, 15 aa, Artificial Sequence
  Description of Artificial Sequence: Synthetic peptide
  Seed: RMCSLMQGSTLPRRS
RMWSLLQISTHPRRS

SEQ ID NO: 125751 - protein, 15 aa, Artificial Sequence
  Description of Artificial Sequence: Synthetic peptide
  Seed: RMCSLMQGSTLPRRS
RMWSLLQISTIPRRS

SEQ ID NO: 125752 - protein, 15 aa, Artificial Sequence
  Description of Artificial Sequence: Synthetic peptide
  Seed: RMCSLMQGSTLPRRS
RMWSLLQISTLPRRS

SEQ ID NO: 125753 - protein, 15 aa, Artificial Sequence
  Description of Artificial Sequence: Synthetic peptide
  Seed: RMCSLMQGSTLPRRS
RMWSLLQISTMPRRS

SEQ ID NO: 125754 - protein, 15 aa, Artificial Sequence
  Description of Artificial Sequence: Synthetic peptide
  Seed: RMCSLMQGSTLPRRS
RMWSLLQISTNPRRS

SEQ ID NO: 125755 - protein, 15 aa, Artificial Sequence
  Description of Artificial Sequence: Synthetic peptide
  Seed: RMCSLMQGSTLPRRS
RMWSLLQISTSPRRS

SEQ ID NO: 125756 - protein, 15 aa, Artificial Sequence
  Description of Artificial Sequence: Synthetic peptide
  Seed: RMCSLMQGSTLPRRS
RMWSLLQISTTPRRS

SEQ ID NO: 125757 - protein, 15 aa, Artificial Sequence
  Description of Artificial Sequence: Synthetic peptide
  Seed: RMCSLMQGSTLPRRS
RMWSLLQISTVPRRS

SEQ ID NO: 125758 - protein, 15 aa, Artificial Sequence
  Description of Artificial Sequence: Synthetic peptide
  Seed: RMCSLMQGSTLPRRS
RMWSLLQLSTAPRRS

SEQ ID NO: 125759 - protein, 15 aa, Artificial Sequence
  Description of Artificial Sequence: Synthetic peptide
  Seed: RMCSLMQGSTLPRRS
RMWSLLQLSTIPRRS

SEQ ID NO: 125760 - protein, 15 aa, Artificial Sequence
  Description of Artificial Sequence: Synthetic peptide
  Seed: RMCSLMQGSTLPRRS
RMWSLLQLSTLPRRS

SEQ ID NO: 125761 - protein, 15 aa, Artificial Sequence
  Description of Artificial Sequence: Synthetic peptide
  Seed: RMCSLMQGSTLPRRS
RMWSLLQLSTNPRRS

SEQ ID NO: 125762 - protein, 15 aa, Artificial Sequence
  Description of Artificial Sequence: Synthetic peptide
  Seed: RMCSLMQGSTLPRRS
RMWSLLQLSTSPRRS

SEQ ID NO: 125763 - protein, 15 aa, Artificial Sequence
  Description of Artificial Sequence: Synthetic peptide
  Seed: RMCSLMQGSTLPRRS
RMWSLLQLSTVPRRS

SEQ ID NO: 125764 - protein, 15 aa, Artificial Sequence
  Description of Artificial Sequence: Synthetic peptide
  Seed: RMCSLMQGSTLPRRS
RMWSLLQMSTAPRRS

SEQ ID NO: 125765 - protein, 15 aa, Artificial Sequence
  Description of Artificial Sequence: Synthetic peptide
  Seed: RMCSLMQGSTLPRRS
RMWSLLQMSTIPRRS

SEQ ID NO: 125766 - protein, 15 aa, Artificial Sequence
  Description of Artificial Sequence: Synthetic peptide
  Seed: RMCSLMQGSTLPRRS
RMWSLLQMSTLPRRS

SEQ ID NO: 125767 - protein, 15 aa, Artificial Sequence
  Description of Artificial Sequence: Synthetic peptide
  Seed: RMCSLMQGSTLPRRS
RMWSLLQMSTNPRRS

SEQ ID NO: 125768 - protein, 15 aa, Artificial Sequence
  Description of Artificial Sequence: Synthetic peptide
  Seed: RMCSLMQGSTLPRRS
RMWSLLQMSTSPRRS

SEQ ID NO: 125769 - protein, 15 aa, Artificial Sequence
  Description of Artificial Sequence: Synthetic peptide
  Seed: RMCSLMQGSTLPRRS
RMWSLLQMSTVPRRS

SEQ ID NO: 125770 - protein, 15 aa, Artificial Sequence
  Description of Artificial Sequence: Synthetic peptide
  Seed: RMCSLMQGSTLPRRS
RMWSLLQNSTAPRRS

SEQ ID NO: 125771 - protein, 15 aa, Artificial Sequence
  Description of Artificial Sequence: Synthetic peptide
  Seed: RMCSLMQGSTLPRRS
RMWSLLQNSTCPRRS

SEQ ID NO: 125772 - protein, 15 aa, Artificial Sequence
  Description of Artificial Sequence: Synthetic peptide
  Seed: RMCSLMQGSTLPRRS
RMWSLLQNSTGPRRS

SEQ ID NO: 125773 - protein, 15 aa, Artificial Sequence
  Description of Artificial Sequence: Synthetic peptide
  Seed: RMCSLMQGSTLPRRS
RMWSLLQNSTIPRRS

SEQ ID NO: 125774 - protein, 15 aa, Artificial Sequence
  Description of Artificial Sequence: Synthetic peptide
  Seed: RMCSLMQGSTLPRRS
RMWSLLQNSTLPRRS

SEQ ID NO: 125775 - protein, 15 aa, Artificial Sequence
  Description of Artificial Sequence: Synthetic peptide
  Seed: RMCSLMQGSTLPRRS
RMWSLLQNSTMPRRS

SEQ ID NO: 125776 - protein, 15 aa, Artificial Sequence
  Description of Artificial Sequence: Synthetic peptide
  Seed: RMCSLMQGSTLPRRS
RMWSLLQNSTNPRRS

SEQ ID NO: 125777 - protein, 15 aa, Artificial Sequence
  Description of Artificial Sequence: Synthetic peptide
  Seed: RMCSLMQGSTLPRRS
RMWSLLQNSTSPRRS

SEQ ID NO: 125778 - protein, 15 aa, Artificial Sequence
  Description of Artificial Sequence: Synthetic peptide
  Seed: RMCSLMQGSTLPRRS
RMWSLLQNSTTPRRS

SEQ ID NO: 125779 - protein, 15 aa, Artificial Sequence
  Description of Artificial Sequence: Synthetic peptide
  Seed: RMCSLMQGSTLPRRS
RMWSLLQNSTVPRRS

SEQ ID NO: 125780 - protein, 15 aa, Artificial Sequence
  Description of Artificial Sequence: Synthetic peptide
  Seed: RMCSLMQGSTLPRRS
RMWSLLQPSTAPRRS

SEQ ID NO: 125781 - protein, 15 aa, Artificial Sequence
  Description of Artificial Sequence: Synthetic peptide
  Seed: RMCSLMQGSTLPRRS
RMWSLLQPSTCPRRS

SEQ ID NO: 125782 - protein, 15 aa, Artificial Sequence
  Description of Artificial Sequence: Synthetic peptide
  Seed: RMCSLMQGSTLPRRS
RMWSLLQPSTFPRRS

SEQ ID NO: 125783 - protein, 15 aa, Artificial Sequence
  Description of Artificial Sequence: Synthetic peptide
  Seed: RMCSLMQGSTLPRRS
RMWSLLQPSTGPRRS

SEQ ID NO: 125784 - protein, 15 aa, Artificial Sequence
  Description of Artificial Sequence: Synthetic peptide
  Seed: RMCSLMQGSTLPRRS
RMWSLLQPSTHPRRS

SEQ ID NO: 125785 - protein, 15 aa, Artificial Sequence
  Description of Artificial Sequence: Synthetic peptide
  Seed: RMCSLMQGSTLPRRS
RMWSLLQPSTIPRRS

SEQ ID NO: 125786 - protein, 15 aa, Artificial Sequence
  Description of Artificial Sequence: Synthetic peptide
  Seed: RMCSLMQGSTLPRRS
RMWSLLQPSTLPRRS

SEQ ID NO: 125787 - protein, 15 aa, Artificial Sequence
  Description of Artificial Sequence: Synthetic peptide
  Seed: RMCSLMQGSTLPRRS
RMWSLLQPSTMPRRS

SEQ ID NO: 125788 - protein, 15 aa, Artificial Sequence
  Description of Artificial Sequence: Synthetic peptide
  Seed: RMCSLMQGSTLPRRS
RMWSLLQPSTNPRRS

SEQ ID NO: 125789 - protein, 15 aa, Artificial Sequence
  Description of Artificial Sequence: Synthetic peptide
  Seed: RMCSLMQGSTLPRRS
RMWSLLQPSTQPRRS

SEQ ID NO: 125790 - protein, 15 aa, Artificial Sequence
  Description of Artificial Sequence: Synthetic peptide
  Seed: RMCSLMQGSTLPRRS
RMWSLLQPSTSPRRS

SEQ ID NO: 125791 - protein, 15 aa, Artificial Sequence
  Description of Artificial Sequence: Synthetic peptide
  Seed: RMCSLMQGSTLPRRS
RMWSLLQPSTTPRRS

SEQ ID NO: 125792 - protein, 15 aa, Artificial Sequence
  Description of Artificial Sequence: Synthetic peptide
  Seed: RMCSLMQGSTLPRRS
RMWSLLQPSTVPRRS

SEQ ID NO: 125793 - protein, 15 aa, Artificial Sequence
  Description of Artificial Sequence: Synthetic peptide
  Seed: RMCSLMQGSTLPRRS
RMWSLLQSSTAPRRS

SEQ ID NO: 125794 - protein, 15 aa, Artificial Sequence
  Description of Artificial Sequence: Synthetic peptide
  Seed: RMCSLMQGSTLPRRS
RMWSLLQSSTCPRRS

SEQ ID NO: 125795 - protein, 15 aa, Artificial Sequence
  Description of Artificial Sequence: Synthetic peptide
  Seed: RMCSLMQGSTLPRRS
RMWSLLQSSTFPRRS

SEQ ID NO: 125796 - protein, 15 aa, Artificial Sequence
  Description of Artificial Sequence: Synthetic peptide
  Seed: RMCSLMQGSTLPRRS
RMWSLLQSSTGPRRS

SEQ ID NO: 125797 - protein, 15 aa, Artificial Sequence
  Description of Artificial Sequence: Synthetic peptide
  Seed: RMCSLMQGSTLPRRS
RMWSLLQSSTHPRRS

SEQ ID NO: 125798 - protein, 15 aa, Artificial Sequence
  Description of Artificial Sequence: Synthetic peptide
  Seed: RMCSLMQGSTLPRRS
RMWSLLQSSTIPRRS

SEQ ID NO: 125799 - protein, 15 aa, Artificial Sequence
  Description of Artificial Sequence: Synthetic peptide
  Seed: RMCSLMQGSTLPRRS
RMWSLLQSSTLPRRS

SEQ ID NO: 125800 - protein, 15 aa, Artificial Sequence
  Description of Artificial Sequence: Synthetic peptide
  Seed: RMCSLMQGSTLPRRS
RMWSLLQSSTMPRRS

SEQ ID NO: 125801 - protein, 15 aa, Artificial Sequence
  Description of Artificial Sequence: Synthetic peptide
  Seed: RMCSLMQGSTLPRRS
RMWSLLQSSTNPRRS

SEQ ID NO: 125802 - protein, 15 aa, Artificial Sequence
  Description of Artificial Sequence: Synthetic peptide
  Seed: RMCSLMQGSTLPRRS
RMWSLLQSSTPPRRS

SEQ ID NO: 125803 - protein, 15 aa, Artificial Sequence
  Description of Artificial Sequence: Synthetic peptide
  Seed: RMCSLMQGSTLPRRS
RMWSLLQSSTQPRRS

SEQ ID NO: 125804 - protein, 15 aa, Artificial Sequence
  Description of Artificial Sequence: Synthetic peptide
  Seed: RMCSLMQGSTLPRRS
RMWSLLQSSTSPRRS

SEQ ID NO: 125805 - protein, 15 aa, Artificial Sequence
  Description of Artificial Sequence: Synthetic peptide
  Seed: RMCSLMQGSTLPRRS
RMWSLLQSSTTPRRS

SEQ ID NO: 125806 - protein, 15 aa, Artificial Sequence
  Description of Artificial Sequence: Synthetic peptide
  Seed: RMCSLMQGSTLPRRS
RMWSLLQSSTVPRRS

SEQ ID NO: 125807 - protein, 15 aa, Artificial Sequence
  Description of Artificial Sequence: Synthetic peptide
  Seed: RMCSLMQGSTLPRRS
RMWSLLQSSTYPRRS

SEQ ID NO: 125808 - protein, 15 aa, Artificial Sequence
  Description of Artificial Sequence: Synthetic peptide
  Seed: RMCSLMQGSTLPRRS
RMWSLLQTSTAPRRS

SEQ ID NO: 125809 - protein, 15 aa, Artificial Sequence
  Description of Artificial Sequence: Synthetic peptide
  Seed: RMCSLMQGSTLPRRS
RMWSLLQTSTCPRRS

SEQ ID NO: 125810 - protein, 15 aa, Artificial Sequence
  Description of Artificial Sequence: Synthetic peptide
  Seed: RMCSLMQGSTLPRRS
RMWSLLQTSTGPRRS

SEQ ID NO: 125811 - protein, 15 aa, Artificial Sequence
  Description of Artificial Sequence: Synthetic peptide
  Seed: RMCSLMQGSTLPRRS
RMWSLLQTSTHPRRS

SEQ ID NO: 125812 - protein, 15 aa, Artificial Sequence
  Description of Artificial Sequence: Synthetic peptide
  Seed: RMCSLMQGSTLPRRS
RMWSLLQTSTIPRRS

SEQ ID NO: 125813 - protein, 15 aa, Artificial Sequence
  Description of Artificial Sequence: Synthetic peptide
  Seed: RMCSLMQGSTLPRRS
RMWSLLQTSTLPRRS

SEQ ID NO: 125814 - protein, 15 aa, Artificial Sequence
  Description of Artificial Sequence: Synthetic peptide
  Seed: RMCSLMQGSTLPRRS
RMWSLLQTSTMPRRS

SEQ ID NO: 125815 - protein, 15 aa, Artificial Sequence
  Description of Artificial Sequence: Synthetic peptide
  Seed: RMCSLMQGSTLPRRS
RMWSLLQTSTNPRRS

SEQ ID NO: 125816 - protein, 15 aa, Artificial Sequence
  Description of Artificial Sequence: Synthetic peptide
  Seed: RMCSLMQGSTLPRRS
RMWSLLQTSTQPRRS

SEQ ID NO: 125817 - protein, 15 aa, Artificial Sequence
  Description of Artificial Sequence: Synthetic peptide
  Seed: RMCSLMQGSTLPRRS
RMWSLLQTSTSPRRS

SEQ ID NO: 125818 - protein, 15 aa, Artificial Sequence
  Description of Artificial Sequence: Synthetic peptide
  Seed: RMCSLMQGSTLPRRS
RMWSLLQTSTTPRRS

SEQ ID NO: 125819 - protein, 15 aa, Artificial Sequence
  Description of Artificial Sequence: Synthetic peptide
  Seed: RMCSLMQGSTLPRRS
RMWSLLQTSTVPRRS

SEQ ID NO: 125820 - protein, 15 aa, Artificial Sequence
  Description of Artificial Sequence: Synthetic peptide
  Seed: RMCSLMQGSTLPRRS
RMWSLLQVSTAPRRS

SEQ ID NO: 125821 - protein, 15 aa, Artificial Sequence
  Description of Artificial Sequence: Synthetic peptide
  Seed: RMCSLMQGSTLPRRS
RMWSLLQVSTGPRRS

SEQ ID NO: 125822 - protein, 15 aa, Artificial Sequence
  Description of Artificial Sequence: Synthetic peptide
  Seed: RMCSLMQGSTLPRRS
RMWSLLQVSTHPRRS

SEQ ID NO: 125823 - protein, 15 aa, Artificial Sequence
  Description of Artificial Sequence: Synthetic peptide
  Seed: RMCSLMQGSTLPRRS
RMWSLLQVSTIPRRS

SEQ ID NO: 125824 - protein, 15 aa, Artificial Sequence
  Description of Artificial Sequence: Synthetic peptide
  Seed: RMCSLMQGSTLPRRS
RMWSLLQVSTLPRRS

SEQ ID NO: 125825 - protein, 15 aa, Artificial Sequence
  Description of Artificial Sequence: Synthetic peptide
  Seed: RMCSLMQGSTLPRRS
RMWSLLQVSTMPRRS

SEQ ID NO: 125826 - protein, 15 aa, Artificial Sequence
  Description of Artificial Sequence: Synthetic peptide
  Seed: RMCSLMQGSTLPRRS
RMWSLLQVSTNPRRS

SEQ ID NO: 125827 - protein, 15 aa, Artificial Sequence
  Description of Artificial Sequence: Synthetic peptide
  Seed: RMCSLMQGSTLPRRS
RMWSLLQVSTQPRRS

SEQ ID NO: 125828 - protein, 15 aa, Artificial Sequence
  Description of Artificial Sequence: Synthetic peptide
  Seed: RMCSLMQGSTLPRRS
RMWSLLQVSTSPRRS

SEQ ID NO: 125829 - protein, 15 aa, Artificial Sequence
  Description of Artificial Sequence: Synthetic peptide
  Seed: RMCSLMQGSTLPRRS
RMWSLLQVSTTPRRS

SEQ ID NO: 125830 - protein, 15 aa, Artificial Sequence
  Description of Artificial Sequence: Synthetic peptide
  Seed: RMCSLMQGSTLPRRS
RMWSLLQVSTVPRRS

SEQ ID NO: 125831 - protein, 15 aa, Artificial Sequence
  Description of Artificial Sequence: Synthetic peptide
  Seed: RMCSLMQGSTLPRRS
RMWSLMQASTAPRRS

SEQ ID NO: 125832 - protein, 15 aa, Artificial Sequence
  Description of Artificial Sequence: Synthetic peptide
  Seed: RMCSLMQGSTLPRRS
RMWSLMQASTCPRRS

SEQ ID NO: 125833 - protein, 15 aa, Artificial Sequence
  Description of Artificial Sequence: Synthetic peptide
  Seed: RMCSLMQGSTLPRRS
RMWSLMQASTDPRRS

SEQ ID NO: 125834 - protein, 15 aa, Artificial Sequence
  Description of Artificial Sequence: Synthetic peptide
  Seed: RMCSLMQGSTLPRRS
RMWSLMQASTEPRRS

SEQ ID NO: 125835 - protein, 15 aa, Artificial Sequence
  Description of Artificial Sequence: Synthetic peptide
  Seed: RMCSLMQGSTLPRRS
RMWSLMQASTFPRRS

SEQ ID NO: 125836 - protein, 15 aa, Artificial Sequence
  Description of Artificial Sequence: Synthetic peptide
  Seed: RMCSLMQGSTLPRRS
RMWSLMQASTGPRRS

SEQ ID NO: 125837 - protein, 15 aa, Artificial Sequence
  Description of Artificial Sequence: Synthetic peptide
  Seed: RMCSLMQGSTLPRRS
RMWSLMQASTHPRRS

SEQ ID NO: 125838 - protein, 15 aa, Artificial Sequence
  Description of Artificial Sequence: Synthetic peptide
  Seed: RMCSLMQGSTLPRRS
RMWSLMQASTIPRRS

SEQ ID NO: 125839 - protein, 15 aa, Artificial Sequence
  Description of Artificial Sequence: Synthetic peptide
  Seed: RMCSLMQGSTLPRRS
RMWSLMQASTKPRRS

SEQ ID NO: 125840 - protein, 15 aa, Artificial Sequence
  Description of Artificial Sequence: Synthetic peptide
  Seed: RMCSLMQGSTLPRRS
RMWSLMQASTLPRRS

SEQ ID NO: 125841 - protein, 15 aa, Artificial Sequence
  Description of Artificial Sequence: Synthetic peptide
  Seed: RMCSLMQGSTLPRRS
RMWSLMQASTMPRRS

SEQ ID NO: 125842 - protein, 15 aa, Artificial Sequence
  Description of Artificial Sequence: Synthetic peptide
  Seed: RMCSLMQGSTLPRRS
RMWSLMQASTNPRRS

SEQ ID NO: 125843 - protein, 15 aa, Artificial Sequence
  Description of Artificial Sequence: Synthetic peptide
  Seed: RMCSLMQGSTLPRRS
RMWSLMQASTPPRRS

SEQ ID NO: 125844 - protein, 15 aa, Artificial Sequence
  Description of Artificial Sequence: Synthetic peptide
  Seed: RMCSLMQGSTLPRRS
RMWSLMQASTQPRRS

SEQ ID NO: 125845 - protein, 15 aa, Artificial Sequence
  Description of Artificial Sequence: Synthetic peptide
  Seed: RMCSLMQGSTLPRRS
RMWSLMQASTRPRRS

SEQ ID NO: 125846 - protein, 15 aa, Artificial Sequence
  Description of Artificial Sequence: Synthetic peptide
  Seed: RMCSLMQGSTLPRRS
RMWSLMQASTSPRRS

SEQ ID NO: 125847 - protein, 15 aa, Artificial Sequence
  Description of Artificial Sequence: Synthetic peptide
  Seed: RMCSLMQGSTLPRRS
RMWSLMQASTTPRRS

SEQ ID NO: 125848 - protein, 15 aa, Artificial Sequence
  Description of Artificial Sequence: Synthetic peptide
  Seed: RMCSLMQGSTLPRRS
RMWSLMQASTVPRRS

SEQ ID NO: 125849 - protein, 15 aa, Artificial Sequence
  Description of Artificial Sequence: Synthetic peptide
  Seed: RMCSLMQGSTLPRRS
RMWSLMQASTWPRRS

SEQ ID NO: 125850 - protein, 15 aa, Artificial Sequence
  Description of Artificial Sequence: Synthetic peptide
  Seed: RMCSLMQGSTLPRRS
RMWSLMQASTYPRRS

SEQ ID NO: 125851 - protein, 15 aa, Artificial Sequence
  Description of Artificial Sequence: Synthetic peptide
  Seed: RMCSLMQGSTLPRRS
RMWSLMQGSTAPRRS

SEQ ID NO: 125852 - protein, 15 aa, Artificial Sequence
  Description of Artificial Sequence: Synthetic peptide
  Seed: RMCSLMQGSTLPRRS
RMWSLMQGSTCPRRS

SEQ ID NO: 125853 - protein, 15 aa, Artificial Sequence
  Description of Artificial Sequence: Synthetic peptide
  Seed: RMCSLMQGSTLPRRS
RMWSLMQGSTFPRRS

SEQ ID NO: 125854 - protein, 15 aa, Artificial Sequence
  Description of Artificial Sequence: Synthetic peptide
  Seed: RMCSLMQGSTLPRRS
RMWSLMQGSTGPRRS

SEQ ID NO: 125855 - protein, 15 aa, Artificial Sequence
  Description of Artificial Sequence: Synthetic peptide
  Seed: RMCSLMQGSTLPRRS
RMWSLMQGSTHPRRS

SEQ ID NO: 125856 - protein, 15 aa, Artificial Sequence
  Description of Artificial Sequence: Synthetic peptide
  Seed: RMCSLMQGSTLPRRS
RMWSLMQGSTIPRRS

SEQ ID NO: 125857 - protein, 15 aa, Artificial Sequence
  Description of Artificial Sequence: Synthetic peptide
  Seed: RMCSLMQGSTLPRRS
RMWSLMQGSTLPRRS

SEQ ID NO: 125858 - protein, 15 aa, Artificial Sequence
  Description of Artificial Sequence: Synthetic peptide
  Seed: RMCSLMQGSTLPRRS
RMWSLMQGSTMPRRS

SEQ ID NO: 125859 - protein, 15 aa, Artificial Sequence
  Description of Artificial Sequence: Synthetic peptide
  Seed: RMCSLMQGSTLPRRS
RMWSLMQGSTNPRRS

SEQ ID NO: 125860 - protein, 15 aa, Artificial Sequence
  Description of Artificial Sequence: Synthetic peptide
  Seed: RMCSLMQGSTLPRRS
RMWSLMQGSTPPRRS

SEQ ID NO: 125861 - protein, 15 aa, Artificial Sequence
  Description of Artificial Sequence: Synthetic peptide
  Seed: RMCSLMQGSTLPRRS
RMWSLMQGSTQPRRS

SEQ ID NO: 125862 - protein, 15 aa, Artificial Sequence
  Description of Artificial Sequence: Synthetic peptide
  Seed: RMCSLMQGSTLPRRS
RMWSLMQGSTSPRRS

SEQ ID NO: 125863 - protein, 15 aa, Artificial Sequence
  Description of Artificial Sequence: Synthetic peptide
  Seed: RMCSLMQGSTLPRRS
RMWSLMQGSTTPRRS

SEQ ID NO: 125864 - protein, 15 aa, Artificial Sequence
  Description of Artificial Sequence: Synthetic peptide
  Seed: RMCSLMQGSTLPRRS
RMWSLMQGSTVPRRS

SEQ ID NO: 125865 - protein, 15 aa, Artificial Sequence
  Description of Artificial Sequence: Synthetic peptide
  Seed: RMCSLMQGSTLPRRS
RMWSLMQGSTYPRRS

SEQ ID NO: 125866 - protein, 15 aa, Artificial Sequence
  Description of Artificial Sequence: Synthetic peptide
  Seed: RMCSLMQGSTLPRRS
RMWSLMQHSTAPRRS

SEQ ID NO: 125867 - protein, 15 aa, Artificial Sequence
  Description of Artificial Sequence: Synthetic peptide
  Seed: RMCSLMQGSTLPRRS
RMWSLMQHSTIPRRS

SEQ ID NO: 125868 - protein, 15 aa, Artificial Sequence
  Description of Artificial Sequence: Synthetic peptide
  Seed: RMCSLMQGSTLPRRS
RMWSLMQHSTLPRRS

SEQ ID NO: 125869 - protein, 15 aa, Artificial Sequence
  Description of Artificial Sequence: Synthetic peptide
  Seed: RMCSLMQGSTLPRRS
RMWSLMQHSTVPRRS

SEQ ID NO: 125870 - protein, 15 aa, Artificial Sequence
  Description of Artificial Sequence: Synthetic peptide
  Seed: RMCSLMQGSTLPRRS
RMWSLMQISTAPRRS

SEQ ID NO: 125871 - protein, 15 aa, Artificial Sequence
  Description of Artificial Sequence: Synthetic peptide
  Seed: RMCSLMQGSTLPRRS
RMWSLMQISTGPRRS

SEQ ID NO: 125872 - protein, 15 aa, Artificial Sequence
  Description of Artificial Sequence: Synthetic peptide
  Seed: RMCSLMQGSTLPRRS
RMWSLMQISTHPRRS

SEQ ID NO: 125873 - protein, 15 aa, Artificial Sequence
  Description of Artificial Sequence: Synthetic peptide
  Seed: RMCSLMQGSTLPRRS
RMWSLMQISTIPRRS

SEQ ID NO: 125874 - protein, 15 aa, Artificial Sequence
  Description of Artificial Sequence: Synthetic peptide
  Seed: RMCSLMQGSTLPRRS
RMWSLMQISTLPRRS

SEQ ID NO: 125875 - protein, 15 aa, Artificial Sequence
  Description of Artificial Sequence: Synthetic peptide
  Seed: RMCSLMQGSTLPRRS
RMWSLMQISTMPRRS

SEQ ID NO: 125876 - protein, 15 aa, Artificial Sequence
  Description of Artificial Sequence: Synthetic peptide
  Seed: RMCSLMQGSTLPRRS
RMWSLMQISTNPRRS

SEQ ID NO: 125877 - protein, 15 aa, Artificial Sequence
  Description of Artificial Sequence: Synthetic peptide
  Seed: RMCSLMQGSTLPRRS
RMWSLMQISTQPRRS

SEQ ID NO: 125878 - protein, 15 aa, Artificial Sequence
  Description of Artificial Sequence: Synthetic peptide
  Seed: RMCSLMQGSTLPRRS
RMWSLMQISTSPRRS

SEQ ID NO: 125879 - protein, 15 aa, Artificial Sequence
  Description of Artificial Sequence: Synthetic peptide
  Seed: RMCSLMQGSTLPRRS
RMWSLMQISTTPRRS

SEQ ID NO: 125880 - protein, 15 aa, Artificial Sequence
  Description of Artificial Sequence: Synthetic peptide
  Seed: RMCSLMQGSTLPRRS
RMWSLMQISTVPRRS

SEQ ID NO: 125881 - protein, 15 aa, Artificial Sequence
  Description of Artificial Sequence: Synthetic peptide
  Seed: RMCSLMQGSTLPRRS
RMWSLMQLSTAPRRS

SEQ ID NO: 125882 - protein, 15 aa, Artificial Sequence
  Description of Artificial Sequence: Synthetic peptide
  Seed: RMCSLMQGSTLPRRS
RMWSLMQLSTLPRRS

SEQ ID NO: 125883 - protein, 15 aa, Artificial Sequence
  Description of Artificial Sequence: Synthetic peptide
  Seed: RMCSLMQGSTLPRRS
RMWSLMQLSTNPRRS

SEQ ID NO: 125884 - protein, 15 aa, Artificial Sequence
  Description of Artificial Sequence: Synthetic peptide
  Seed: RMCSLMQGSTLPRRS
RMWSLMQLSTSPRRS

SEQ ID NO: 125885 - protein, 15 aa, Artificial Sequence
  Description of Artificial Sequence: Synthetic peptide
  Seed: RMCSLMQGSTLPRRS
RMWSLMQLSTTPRRS

SEQ ID NO: 125886 - protein, 15 aa, Artificial Sequence
  Description of Artificial Sequence: Synthetic peptide
  Seed: RMCSLMQGSTLPRRS
RMWSLMQLSTVPRRS

SEQ ID NO: 125887 - protein, 15 aa, Artificial Sequence
  Description of Artificial Sequence: Synthetic peptide
  Seed: RMCSLMQGSTLPRRS
RMWSLMQMSTAPRRS

SEQ ID NO: 125888 - protein, 15 aa, Artificial Sequence
  Description of Artificial Sequence: Synthetic peptide
  Seed: RMCSLMQGSTLPRRS
RMWSLMQMSTIPRRS

SEQ ID NO: 125889 - protein, 15 aa, Artificial Sequence
  Description of Artificial Sequence: Synthetic peptide
  Seed: RMCSLMQGSTLPRRS
RMWSLMQMSTLPRRS

SEQ ID NO: 125890 - protein, 15 aa, Artificial Sequence
  Description of Artificial Sequence: Synthetic peptide
  Seed: RMCSLMQGSTLPRRS
RMWSLMQMSTNPRRS

SEQ ID NO: 125891 - protein, 15 aa, Artificial Sequence
  Description of Artificial Sequence: Synthetic peptide
  Seed: RMCSLMQGSTLPRRS
RMWSLMQMSTSPRRS

SEQ ID NO: 125892 - protein, 15 aa, Artificial Sequence
  Description of Artificial Sequence: Synthetic peptide
  Seed: RMCSLMQGSTLPRRS
RMWSLMQMSTTPRRS

SEQ ID NO: 125893 - protein, 15 aa, Artificial Sequence
  Description of Artificial Sequence: Synthetic peptide
  Seed: RMCSLMQGSTLPRRS
RMWSLMQMSTVPRRS

SEQ ID NO: 125894 - protein, 15 aa, Artificial Sequence
  Description of Artificial Sequence: Synthetic peptide
  Seed: RMCSLMQGSTLPRRS
RMWSLMQNSTAPRRS

SEQ ID NO: 125895 - protein, 15 aa, Artificial Sequence
  Description of Artificial Sequence: Synthetic peptide
  Seed: RMCSLMQGSTLPRRS
RMWSLMQNSTGPRRS

SEQ ID NO: 125896 - protein, 15 aa, Artificial Sequence
  Description of Artificial Sequence: Synthetic peptide
  Seed: RMCSLMQGSTLPRRS
RMWSLMQNSTIPRRS

SEQ ID NO: 125897 - protein, 15 aa, Artificial Sequence
  Description of Artificial Sequence: Synthetic peptide
  Seed: RMCSLMQGSTLPRRS
RMWSLMQNSTLPRRS

SEQ ID NO: 125898 - protein, 15 aa, Artificial Sequence
  Description of Artificial Sequence: Synthetic peptide
  Seed: RMCSLMQGSTLPRRS
RMWSLMQNSTMPRRS

SEQ ID NO: 125899 - protein, 15 aa, Artificial Sequence
  Description of Artificial Sequence: Synthetic peptide
  Seed: RMCSLMQGSTLPRRS
RMWSLMQNSTNPRRS

SEQ ID NO: 125900 - protein, 15 aa, Artificial Sequence
  Description of Artificial Sequence: Synthetic peptide
  Seed: RMCSLMQGSTLPRRS
RMWSLMQNSTSPRRS

SEQ ID NO: 125901 - protein, 15 aa, Artificial Sequence
  Description of Artificial Sequence: Synthetic peptide
  Seed: RMCSLMQGSTLPRRS
RMWSLMQNSTTPRRS

SEQ ID NO: 125902 - protein, 15 aa, Artificial Sequence
  Description of Artificial Sequence: Synthetic peptide
  Seed: RMCSLMQGSTLPRRS
RMWSLMQNSTVPRRS

SEQ ID NO: 125903 - protein, 15 aa, Artificial Sequence
  Description of Artificial Sequence: Synthetic peptide
  Seed: RMCSLMQGSTLPRRS
RMWSLMQPSTAPRRS

SEQ ID NO: 125904 - protein, 15 aa, Artificial Sequence
  Description of Artificial Sequence: Synthetic peptide
  Seed: RMCSLMQGSTLPRRS
RMWSLMQPSTCPRRS

SEQ ID NO: 125905 - protein, 15 aa, Artificial Sequence
  Description of Artificial Sequence: Synthetic peptide
  Seed: RMCSLMQGSTLPRRS
RMWSLMQPSTFPRRS

SEQ ID NO: 125906 - protein, 15 aa, Artificial Sequence
  Description of Artificial Sequence: Synthetic peptide
  Seed: RMCSLMQGSTLPRRS
RMWSLMQPSTGPRRS

SEQ ID NO: 125907 - protein, 15 aa, Artificial Sequence
  Description of Artificial Sequence: Synthetic peptide
  Seed: RMCSLMQGSTLPRRS
RMWSLMQPSTHPRRS

SEQ ID NO: 125908 - protein, 15 aa, Artificial Sequence
  Description of Artificial Sequence: Synthetic peptide
  Seed: RMCSLMQGSTLPRRS
RMWSLMQPSTIPRRS

SEQ ID NO: 125909 - protein, 15 aa, Artificial Sequence
  Description of Artificial Sequence: Synthetic peptide
  Seed: RMCSLMQGSTLPRRS
RMWSLMQPSTLPRRS

SEQ ID NO: 125910 - protein, 15 aa, Artificial Sequence
  Description of Artificial Sequence: Synthetic peptide
  Seed: RMCSLMQGSTLPRRS
RMWSLMQPSTMPRRS

SEQ ID NO: 125911 - protein, 15 aa, Artificial Sequence
  Description of Artificial Sequence: Synthetic peptide
  Seed: RMCSLMQGSTLPRRS
RMWSLMQPSTNPRRS

SEQ ID NO: 125912 - protein, 15 aa, Artificial Sequence
  Description of Artificial Sequence: Synthetic peptide
  Seed: RMCSLMQGSTLPRRS
RMWSLMQPSTQPRRS

SEQ ID NO: 125913 - protein, 15 aa, Artificial Sequence
  Description of Artificial Sequence: Synthetic peptide
  Seed: RMCSLMQGSTLPRRS
RMWSLMQPSTSPRRS

SEQ ID NO: 125914 - protein, 15 aa, Artificial Sequence
  Description of Artificial Sequence: Synthetic peptide
  Seed: RMCSLMQGSTLPRRS
RMWSLMQPSTTPRRS

SEQ ID NO: 125915 - protein, 15 aa, Artificial Sequence
  Description of Artificial Sequence: Synthetic peptide
  Seed: RMCSLMQGSTLPRRS
RMWSLMQPSTVPRRS

SEQ ID NO: 125916 - protein, 15 aa, Artificial Sequence
  Description of Artificial Sequence: Synthetic peptide
  Seed: RMCSLMQGSTLPRRS
RMWSLMQQSTLPRRS

SEQ ID NO: 125917 - protein, 15 aa, Artificial Sequence
  Description of Artificial Sequence: Synthetic peptide
  Seed: RMCSLMQGSTLPRRS
RMWSLMQQSTVPRRS

SEQ ID NO: 125918 - protein, 15 aa, Artificial Sequence
  Description of Artificial Sequence: Synthetic peptide
  Seed: RMCSLMQGSTLPRRS
RMWSLMQSSTAPRRS

SEQ ID NO: 125919 - protein, 15 aa, Artificial Sequence
  Description of Artificial Sequence: Synthetic peptide
  Seed: RMCSLMQGSTLPRRS
RMWSLMQSSTCPRRS

SEQ ID NO: 125920 - protein, 15 aa, Artificial Sequence
  Description of Artificial Sequence: Synthetic peptide
  Seed: RMCSLMQGSTLPRRS
RMWSLMQSSTFPRRS

SEQ ID NO: 125921 - protein, 15 aa, Artificial Sequence
  Description of Artificial Sequence: Synthetic peptide
  Seed: RMCSLMQGSTLPRRS
RMWSLMQSSTGPRRS

SEQ ID NO: 125922 - protein, 15 aa, Artificial Sequence
  Description of Artificial Sequence: Synthetic peptide
  Seed: RMCSLMQGSTLPRRS
RMWSLMQSSTHPRRS

SEQ ID NO: 125923 - protein, 15 aa, Artificial Sequence
  Description of Artificial Sequence: Synthetic peptide
  Seed: RMCSLMQGSTLPRRS
RMWSLMQSSTIPRRS

SEQ ID NO: 125924 - protein, 15 aa, Artificial Sequence
  Description of Artificial Sequence: Synthetic peptide
  Seed: RMCSLMQGSTLPRRS
RMWSLMQSSTLPRRS

SEQ ID NO: 125925 - protein, 15 aa, Artificial Sequence
  Description of Artificial Sequence: Synthetic peptide
  Seed: RMCSLMQGSTLPRRS
RMWSLMQSSTMPRRS

SEQ ID NO: 125926 - protein, 15 aa, Artificial Sequence
  Description of Artificial Sequence: Synthetic peptide
  Seed: RMCSLMQGSTLPRRS
RMWSLMQSSTNPRRS

SEQ ID NO: 125927 - protein, 15 aa, Artificial Sequence
  Description of Artificial Sequence: Synthetic peptide
  Seed: RMCSLMQGSTLPRRS
RMWSLMQSSTQPRRS

SEQ ID NO: 125928 - protein, 15 aa, Artificial Sequence
  Description of Artificial Sequence: Synthetic peptide
  Seed: RMCSLMQGSTLPRRS
RMWSLMQSSTSPRRS

SEQ ID NO: 125929 - protein, 15 aa, Artificial Sequence
  Description of Artificial Sequence: Synthetic peptide
  Seed: RMCSLMQGSTLPRRS
RMWSLMQSSTTPRRS

SEQ ID NO: 125930 - protein, 15 aa, Artificial Sequence
  Description of Artificial Sequence: Synthetic peptide
  Seed: RMCSLMQGSTLPRRS
RMWSLMQSSTVPRRS

SEQ ID NO: 125931 - protein, 15 aa, Artificial Sequence
  Description of Artificial Sequence: Synthetic peptide
  Seed: RMCSLMQGSTLPRRS
RMWSLMQSSTYPRRS

SEQ ID NO: 125932 - protein, 15 aa, Artificial Sequence
  Description of Artificial Sequence: Synthetic peptide
  Seed: RMCSLMQGSTLPRRS
RMWSLMQTSTAPRRS

SEQ ID NO: 125933 - protein, 15 aa, Artificial Sequence
  Description of Artificial Sequence: Synthetic peptide
  Seed: RMCSLMQGSTLPRRS
RMWSLMQTSTGPRRS

SEQ ID NO: 125934 - protein, 15 aa, Artificial Sequence
  Description of Artificial Sequence: Synthetic peptide
  Seed: RMCSLMQGSTLPRRS
RMWSLMQTSTHPRRS

SEQ ID NO: 125935 - protein, 15 aa, Artificial Sequence
  Description of Artificial Sequence: Synthetic peptide
  Seed: RMCSLMQGSTLPRRS
RMWSLMQTSTIPRRS

SEQ ID NO: 125936 - protein, 15 aa, Artificial Sequence
  Description of Artificial Sequence: Synthetic peptide
  Seed: RMCSLMQGSTLPRRS
RMWSLMQTSTLPRRS

SEQ ID NO: 125937 - protein, 15 aa, Artificial Sequence
  Description of Artificial Sequence: Synthetic peptide
  Seed: RMCSLMQGSTLPRRS
RMWSLMQTSTMPRRS

SEQ ID NO: 125938 - protein, 15 aa, Artificial Sequence
  Description of Artificial Sequence: Synthetic peptide
  Seed: RMCSLMQGSTLPRRS
RMWSLMQTSTNPRRS

SEQ ID NO: 125939 - protein, 15 aa, Artificial Sequence
  Description of Artificial Sequence: Synthetic peptide
  Seed: RMCSLMQGSTLPRRS
RMWSLMQTSTQPRRS

SEQ ID NO: 125940 - protein, 15 aa, Artificial Sequence
  Description of Artificial Sequence: Synthetic peptide
  Seed: RMCSLMQGSTLPRRS
RMWSLMQTSTSPRRS

SEQ ID NO: 125941 - protein, 15 aa, Artificial Sequence
  Description of Artificial Sequence: Synthetic peptide
  Seed: RMCSLMQGSTLPRRS
RMWSLMQTSTTPRRS

SEQ ID NO: 125942 - protein, 15 aa, Artificial Sequence
  Description of Artificial Sequence: Synthetic peptide
  Seed: RMCSLMQGSTLPRRS
RMWSLMQTSTVPRRS

SEQ ID NO: 125943 - protein, 15 aa, Artificial Sequence
  Description of Artificial Sequence: Synthetic peptide
  Seed: RMCSLMQGSTLPRRS
RMWSLMQVSTAPRRS

SEQ ID NO: 125944 - protein, 15 aa, Artificial Sequence
  Description of Artificial Sequence: Synthetic peptide
  Seed: RMCSLMQGSTLPRRS
RMWSLMQVSTGPRRS

SEQ ID NO: 125945 - protein, 15 aa, Artificial Sequence
  Description of Artificial Sequence: Synthetic peptide
  Seed: RMCSLMQGSTLPRRS
RMWSLMQVSTHPRRS

SEQ ID NO: 125946 - protein, 15 aa, Artificial Sequence
  Description of Artificial Sequence: Synthetic peptide
  Seed: RMCSLMQGSTLPRRS
RMWSLMQVSTIPRRS

SEQ ID NO: 125947 - protein, 15 aa, Artificial Sequence
  Description of Artificial Sequence: Synthetic peptide
  Seed: RMCSLMQGSTLPRRS
RMWSLMQVSTLPRRS

SEQ ID NO: 125948 - protein, 15 aa, Artificial Sequence
  Description of Artificial Sequence: Synthetic peptide
  Seed: RMCSLMQGSTLPRRS
RMWSLMQVSTMPRRS

SEQ ID NO: 125949 - protein, 15 aa, Artificial Sequence
  Description of Artificial Sequence: Synthetic peptide
  Seed: RMCSLMQGSTLPRRS
RMWSLMQVSTNPRRS

SEQ ID NO: 125950 - protein, 15 aa, Artificial Sequence
  Description of Artificial Sequence: Synthetic peptide
  Seed: RMCSLMQGSTLPRRS
RMWSLMQVSTQPRRS

SEQ ID NO: 125951 - protein, 15 aa, Artificial Sequence
  Description of Artificial Sequence: Synthetic peptide
  Seed: RMCSLMQGSTLPRRS
RMWSLMQVSTSPRRS

SEQ ID NO: 125952 - protein, 15 aa, Artificial Sequence
  Description of Artificial Sequence: Synthetic peptide
  Seed: RMCSLMQGSTLPRRS
RMWSLMQVSTTPRRS

SEQ ID NO: 125953 - protein, 15 aa, Artificial Sequence
  Description of Artificial Sequence: Synthetic peptide
  Seed: RMCSLMQGSTLPRRS
RMWSLMQVSTVPRRS

SEQ ID NO: 125954 - protein, 15 aa, Artificial Sequence
  Description of Artificial Sequence: Synthetic peptide
  Seed: RMCSLMQGSTLPRRS
RMWSLNQASTAPRRS

SEQ ID NO: 125955 - protein, 15 aa, Artificial Sequence
  Description of Artificial Sequence: Synthetic peptide
  Seed: RMCSLMQGSTLPRRS
RMWSLNQASTIPRRS

SEQ ID NO: 125956 - protein, 15 aa, Artificial Sequence
  Description of Artificial Sequence: Synthetic peptide
  Seed: RMCSLMQGSTLPRRS
RMWSLNQASTLPRRS

SEQ ID NO: 125957 - protein, 15 aa, Artificial Sequence
  Description of Artificial Sequence: Synthetic peptide
  Seed: RMCSLMQGSTLPRRS
RMWSLNQASTVPRRS

SEQ ID NO: 125958 - protein, 15 aa, Artificial Sequence
  Description of Artificial Sequence: Synthetic peptide
  Seed: RMCSLMQGSTLPRRS
RMWSLQQASTAPRRS

SEQ ID NO: 125959 - protein, 15 aa, Artificial Sequence
  Description of Artificial Sequence: Synthetic peptide
  Seed: RMCSLMQGSTLPRRS
RMWSLQQASTIPRRS

SEQ ID NO: 125960 - protein, 15 aa, Artificial Sequence
  Description of Artificial Sequence: Synthetic peptide
  Seed: RMCSLMQGSTLPRRS
RMWSLQQASTLPRRS

SEQ ID NO: 125961 - protein, 15 aa, Artificial Sequence
  Description of Artificial Sequence: Synthetic peptide
  Seed: RMCSLMQGSTLPRRS
RMWSLQQASTMPRRS

SEQ ID NO: 125962 - protein, 15 aa, Artificial Sequence
  Description of Artificial Sequence: Synthetic peptide
  Seed: RMCSLMQGSTLPRRS
RMWSLQQASTSPRRS

SEQ ID NO: 125963 - protein, 15 aa, Artificial Sequence
  Description of Artificial Sequence: Synthetic peptide
  Seed: RMCSLMQGSTLPRRS
RMWSLQQASTTPRRS

SEQ ID NO: 125964 - protein, 15 aa, Artificial Sequence
  Description of Artificial Sequence: Synthetic peptide
  Seed: RMCSLMQGSTLPRRS
RMWSLQQASTVPRRS

SEQ ID NO: 125965 - protein, 15 aa, Artificial Sequence
  Description of Artificial Sequence: Synthetic peptide
  Seed: RMCSLMQGSTLPRRS
RMWSLQQGSTAPRRS

SEQ ID NO: 125966 - protein, 15 aa, Artificial Sequence
  Description of Artificial Sequence: Synthetic peptide
  Seed: RMCSLMQGSTLPRRS
RMWSLQQGSTIPRRS

SEQ ID NO: 125967 - protein, 15 aa, Artificial Sequence
  Description of Artificial Sequence: Synthetic peptide
  Seed: RMCSLMQGSTLPRRS
RMWSLQQGSTLPRRS

SEQ ID NO: 125968 - protein, 15 aa, Artificial Sequence
  Description of Artificial Sequence: Synthetic peptide
  Seed: RMCSLMQGSTLPRRS
RMWSLQQGSTMPRRS

SEQ ID NO: 125969 - protein, 15 aa, Artificial Sequence
  Description of Artificial Sequence: Synthetic peptide
  Seed: RMCSLMQGSTLPRRS
RMWSLQQGSTSPRRS

SEQ ID NO: 125970 - protein, 15 aa, Artificial Sequence
  Description of Artificial Sequence: Synthetic peptide
  Seed: RMCSLMQGSTLPRRS
RMWSLQQGSTTPRRS

SEQ ID NO: 125971 - protein, 15 aa, Artificial Sequence
  Description of Artificial Sequence: Synthetic peptide
  Seed: RMCSLMQGSTLPRRS
RMWSLQQGSTVPRRS

SEQ ID NO: 125972 - protein, 15 aa, Artificial Sequence
  Description of Artificial Sequence: Synthetic peptide
  Seed: RMCSLMQGSTLPRRS
RMWSLQQNSTAPRRS

SEQ ID NO: 125973 - protein, 15 aa, Artificial Sequence
  Description of Artificial Sequence: Synthetic peptide
  Seed: RMCSLMQGSTLPRRS
RMWSLQQNSTIPRRS

SEQ ID NO: 125974 - protein, 15 aa, Artificial Sequence
  Description of Artificial Sequence: Synthetic peptide
  Seed: RMCSLMQGSTLPRRS
RMWSLQQNSTLPRRS

SEQ ID NO: 125975 - protein, 15 aa, Artificial Sequence
  Description of Artificial Sequence: Synthetic peptide
  Seed: RMCSLMQGSTLPRRS
RMWSLQQNSTVPRRS

SEQ ID NO: 125976 - protein, 15 aa, Artificial Sequence
  Description of Artificial Sequence: Synthetic peptide
  Seed: RMCSLMQGSTLPRRS
RMWSLQQPSTAPRRS

SEQ ID NO: 125977 - protein, 15 aa, Artificial Sequence
  Description of Artificial Sequence: Synthetic peptide
  Seed: RMCSLMQGSTLPRRS
RMWSLQQPSTIPRRS

SEQ ID NO: 125978 - protein, 15 aa, Artificial Sequence
  Description of Artificial Sequence: Synthetic peptide
  Seed: RMCSLMQGSTLPRRS
RMWSLQQPSTLPRRS

SEQ ID NO: 125979 - protein, 15 aa, Artificial Sequence
  Description of Artificial Sequence: Synthetic peptide
  Seed: RMCSLMQGSTLPRRS
RMWSLQQPSTVPRRS

SEQ ID NO: 125980 - protein, 15 aa, Artificial Sequence
  Description of Artificial Sequence: Synthetic peptide
  Seed: RMCSLMQGSTLPRRS
RMWSLQQSSTAPRRS

SEQ ID NO: 125981 - protein, 15 aa, Artificial Sequence
  Description of Artificial Sequence: Synthetic peptide
  Seed: RMCSLMQGSTLPRRS
RMWSLQQSSTIPRRS

SEQ ID NO: 125982 - protein, 15 aa, Artificial Sequence
  Description of Artificial Sequence: Synthetic peptide
  Seed: RMCSLMQGSTLPRRS
RMWSLQQSSTLPRRS

SEQ ID NO: 125983 - protein, 15 aa, Artificial Sequence
  Description of Artificial Sequence: Synthetic peptide
  Seed: RMCSLMQGSTLPRRS
RMWSLQQSSTMPRRS

SEQ ID NO: 125984 - protein, 15 aa, Artificial Sequence
  Description of Artificial Sequence: Synthetic peptide
  Seed: RMCSLMQGSTLPRRS
RMWSLQQSSTSPRRS

SEQ ID NO: 125985 - protein, 15 aa, Artificial Sequence
  Description of Artificial Sequence: Synthetic peptide
  Seed: RMCSLMQGSTLPRRS
RMWSLQQSSTTPRRS

SEQ ID NO: 125986 - protein, 15 aa, Artificial Sequence
  Description of Artificial Sequence: Synthetic peptide
  Seed: RMCSLMQGSTLPRRS
RMWSLQQSSTVPRRS

SEQ ID NO: 125987 - protein, 15 aa, Artificial Sequence
  Description of Artificial Sequence: Synthetic peptide
  Seed: RMCSLMQGSTLPRRS
RMWSLQQTSTAPRRS

SEQ ID NO: 125988 - protein, 15 aa, Artificial Sequence
  Description of Artificial Sequence: Synthetic peptide
  Seed: RMCSLMQGSTLPRRS
RMWSLQQTSTIPRRS

SEQ ID NO: 125989 - protein, 15 aa, Artificial Sequence
  Description of Artificial Sequence: Synthetic peptide
  Seed: RMCSLMQGSTLPRRS
RMWSLQQTSTLPRRS

SEQ ID NO: 125990 - protein, 15 aa, Artificial Sequence
  Description of Artificial Sequence: Synthetic peptide
  Seed: RMCSLMQGSTLPRRS
RMWSLQQTSTVPRRS

SEQ ID NO: 125991 - protein, 15 aa, Artificial Sequence
  Description of Artificial Sequence: Synthetic peptide
  Seed: RMCSLMQGSTLPRRS
RMWSLSQASTAPRRS

SEQ ID NO: 125992 - protein, 15 aa, Artificial Sequence
  Description of Artificial Sequence: Synthetic peptide
  Seed: RMCSLMQGSTLPRRS
RMWSLSQASTIPRRS

SEQ ID NO: 125993 - protein, 15 aa, Artificial Sequence
  Description of Artificial Sequence: Synthetic peptide
  Seed: RMCSLMQGSTLPRRS
RMWSLSQASTLPRRS

SEQ ID NO: 125994 - protein, 15 aa, Artificial Sequence
  Description of Artificial Sequence: Synthetic peptide
  Seed: RMCSLMQGSTLPRRS
RMWSLSQASTMPRRS

SEQ ID NO: 125995 - protein, 15 aa, Artificial Sequence
  Description of Artificial Sequence: Synthetic peptide
  Seed: RMCSLMQGSTLPRRS
RMWSLSQASTSPRRS

SEQ ID NO: 125996 - protein, 15 aa, Artificial Sequence
  Description of Artificial Sequence: Synthetic peptide
  Seed: RMCSLMQGSTLPRRS
RMWSLSQASTTPRRS

SEQ ID NO: 125997 - protein, 15 aa, Artificial Sequence
  Description of Artificial Sequence: Synthetic peptide
  Seed: RMCSLMQGSTLPRRS
RMWSLSQASTVPRRS

SEQ ID NO: 125998 - protein, 15 aa, Artificial Sequence
  Description of Artificial Sequence: Synthetic peptide
  Seed: RMCSLMQGSTLPRRS
RMWSLSQGSTAPRRS

SEQ ID NO: 125999 - protein, 15 aa, Artificial Sequence
  Description of Artificial Sequence: Synthetic peptide
  Seed: RMCSLMQGSTLPRRS
RMWSLSQGSTIPRRS

SEQ ID NO: 126000 - protein, 15 aa, Artificial Sequence
  Description of Artificial Sequence: Synthetic peptide
  Seed: RMCSLMQGSTLPRRS
RMWSLSQGSTLPRRS

SEQ ID NO: 126001 - protein, 15 aa, Artificial Sequence
  Description of Artificial Sequence: Synthetic peptide
  Seed: RMCSLMQGSTLPRRS
RMWSLSQGSTMPRRS

SEQ ID NO: 126002 - protein, 15 aa, Artificial Sequence
  Description of Artificial Sequence: Synthetic peptide
  Seed: RMCSLMQGSTLPRRS
RMWSLSQGSTVPRRS

SEQ ID NO: 126003 - protein, 15 aa, Artificial Sequence
  Description of Artificial Sequence: Synthetic peptide
  Seed: RMCSLMQGSTLPRRS
RMWSLSQPSTIPRRS

SEQ ID NO: 126004 - protein, 15 aa, Artificial Sequence
  Description of Artificial Sequence: Synthetic peptide
  Seed: RMCSLMQGSTLPRRS
RMWSLSQPSTLPRRS

SEQ ID NO: 126005 - protein, 15 aa, Artificial Sequence
  Description of Artificial Sequence: Synthetic peptide
  Seed: RMCSLMQGSTLPRRS
RMWSLSQPSTVPRRS

SEQ ID NO: 126006 - protein, 15 aa, Artificial Sequence
  Description of Artificial Sequence: Synthetic peptide
  Seed: RMCSLMQGSTLPRRS
RMWSLSQSSTAPRRS

SEQ ID NO: 126007 - protein, 15 aa, Artificial Sequence
  Description of Artificial Sequence: Synthetic peptide
  Seed: RMCSLMQGSTLPRRS
RMWSLSQSSTFPRRS

SEQ ID NO: 126008 - protein, 15 aa, Artificial Sequence
  Description of Artificial Sequence: Synthetic peptide
  Seed: RMCSLMQGSTLPRRS
RMWSLSQSSTIPRRS

SEQ ID NO: 126009 - protein, 15 aa, Artificial Sequence
  Description of Artificial Sequence: Synthetic peptide
  Seed: RMCSLMQGSTLPRRS
RMWSLSQSSTLPRRS

SEQ ID NO: 126010 - protein, 15 aa, Artificial Sequence
  Description of Artificial Sequence: Synthetic peptide
  Seed: RMCSLMQGSTLPRRS
RMWSLSQSSTMPRRS

SEQ ID NO: 126011 - protein, 15 aa, Artificial Sequence
  Description of Artificial Sequence: Synthetic peptide
  Seed: RMCSLMQGSTLPRRS
RMWSLSQSSTVPRRS

SEQ ID NO: 126012 - protein, 15 aa, Artificial Sequence
  Description of Artificial Sequence: Synthetic peptide
  Seed: RMCSLMQGSTLPRRS
RMWSLSQTSTIPRRS

SEQ ID NO: 126013 - protein, 15 aa, Artificial Sequence
  Description of Artificial Sequence: Synthetic peptide
  Seed: RMCSLMQGSTLPRRS
RMWSLTQASTAPRRS

SEQ ID NO: 126014 - protein, 15 aa, Artificial Sequence
  Description of Artificial Sequence: Synthetic peptide
  Seed: RMCSLMQGSTLPRRS
RMWSLTQASTFPRRS

SEQ ID NO: 126015 - protein, 15 aa, Artificial Sequence
  Description of Artificial Sequence: Synthetic peptide
  Seed: RMCSLMQGSTLPRRS
RMWSLTQASTIPRRS

SEQ ID NO: 126016 - protein, 15 aa, Artificial Sequence
  Description of Artificial Sequence: Synthetic peptide
  Seed: RMCSLMQGSTLPRRS
RMWSLTQASTLPRRS

SEQ ID NO: 126017 - protein, 15 aa, Artificial Sequence
  Description of Artificial Sequence: Synthetic peptide
  Seed: RMCSLMQGSTLPRRS
RMWSLTQASTMPRRS

SEQ ID NO: 126018 - protein, 15 aa, Artificial Sequence
  Description of Artificial Sequence: Synthetic peptide
  Seed: RMCSLMQGSTLPRRS
RMWSLTQASTVPRRS

SEQ ID NO: 126019 - protein, 15 aa, Artificial Sequence
  Description of Artificial Sequence: Synthetic peptide
  Seed: RMCSLMQGSTLPRRS
RMWSLTQGSTAPRRS

SEQ ID NO: 126020 - protein, 15 aa, Artificial Sequence
  Description of Artificial Sequence: Synthetic peptide
  Seed: RMCSLMQGSTLPRRS
RMWSLTQGSTIPRRS

SEQ ID NO: 126021 - protein, 15 aa, Artificial Sequence
  Description of Artificial Sequence: Synthetic peptide
  Seed: RMCSLMQGSTLPRRS
RMWSLTQGSTLPRRS

SEQ ID NO: 126022 - protein, 15 aa, Artificial Sequence
  Description of Artificial Sequence: Synthetic peptide
  Seed: RMCSLMQGSTLPRRS
RMWSLTQGSTVPRRS

SEQ ID NO: 126023 - protein, 15 aa, Artificial Sequence
  Description of Artificial Sequence: Synthetic peptide
  Seed: RMCSLMQGSTLPRRS
RMWSLTQNSTIPRRS

SEQ ID NO: 126024 - protein, 15 aa, Artificial Sequence
  Description of Artificial Sequence: Synthetic peptide
  Seed: RMCSLMQGSTLPRRS
RMWSLTQPSTIPRRS

SEQ ID NO: 126025 - protein, 15 aa, Artificial Sequence
  Description of Artificial Sequence: Synthetic peptide
  Seed: RMCSLMQGSTLPRRS
RMWSLTQPSTLPRRS

SEQ ID NO: 126026 - protein, 15 aa, Artificial Sequence
  Description of Artificial Sequence: Synthetic peptide
  Seed: RMCSLMQGSTLPRRS
RMWSLTQSSTFPRRS

SEQ ID NO: 126027 - protein, 15 aa, Artificial Sequence
  Description of Artificial Sequence: Synthetic peptide
  Seed: RMCSLMQGSTLPRRS
RMWSLTQSSTIPRRS

SEQ ID NO: 126028 - protein, 15 aa, Artificial Sequence
  Description of Artificial Sequence: Synthetic peptide
  Seed: RMCSLMQGSTLPRRS
RMWSLTQSSTLPRRS

SEQ ID NO: 126029 - protein, 15 aa, Artificial Sequence
  Description of Artificial Sequence: Synthetic peptide
  Seed: RMCSLMQGSTLPRRS
RMWSLTQSSTMPRRS

SEQ ID NO: 126030 - protein, 15 aa, Artificial Sequence
  Description of Artificial Sequence: Synthetic peptide
  Seed: RMCSLMQGSTLPRRS
RMWSLTQSSTVPRRS

SEQ ID NO: 126031 - protein, 15 aa, Artificial Sequence
  Description of Artificial Sequence: Synthetic peptide
  Seed: RMCSLMQGSTLPRRS
RMWSLTQTSTIPRRS

SEQ ID NO: 126032 - protein, 15 aa, Artificial Sequence
  Description of Artificial Sequence: Synthetic peptide
  Seed: RMCSLMQGSTLPRRS
RMWSLTQTSTLPRRS

SEQ ID NO: 126033 - protein, 15 aa, Artificial Sequence
  Description of Artificial Sequence: Synthetic peptide
  Seed: RMCSLMQGSTLPRRS
RMWSLTQTSTVPRRS

SEQ ID NO: 126034 - protein, 15 aa, Artificial Sequence
  Description of Artificial Sequence: Synthetic peptide
  Seed: RMCSLMQGSTLPRRS
RMWSLVQASTAPRRS

SEQ ID NO: 126035 - protein, 15 aa, Artificial Sequence
  Description of Artificial Sequence: Synthetic peptide
  Seed: RMCSLMQGSTLPRRS
RMWSLVQASTGPRRS

SEQ ID NO: 126036 - protein, 15 aa, Artificial Sequence
  Description of Artificial Sequence: Synthetic peptide
  Seed: RMCSLMQGSTLPRRS
RMWSLVQASTIPRRS

SEQ ID NO: 126037 - protein, 15 aa, Artificial Sequence
  Description of Artificial Sequence: Synthetic peptide
  Seed: RMCSLMQGSTLPRRS
RMWSLVQASTLPRRS

SEQ ID NO: 126038 - protein, 15 aa, Artificial Sequence
  Description of Artificial Sequence: Synthetic peptide
  Seed: RMCSLMQGSTLPRRS
RMWSLVQASTMPRRS

SEQ ID NO: 126039 - protein, 15 aa, Artificial Sequence
  Description of Artificial Sequence: Synthetic peptide
  Seed: RMCSLMQGSTLPRRS
RMWSLVQASTNPRRS

SEQ ID NO: 126040 - protein, 15 aa, Artificial Sequence
  Description of Artificial Sequence: Synthetic peptide
  Seed: RMCSLMQGSTLPRRS
RMWSLVQASTSPRRS

SEQ ID NO: 126041 - protein, 15 aa, Artificial Sequence
  Description of Artificial Sequence: Synthetic peptide
  Seed: RMCSLMQGSTLPRRS
RMWSLVQASTTPRRS

SEQ ID NO: 126042 - protein, 15 aa, Artificial Sequence
  Description of Artificial Sequence: Synthetic peptide
  Seed: RMCSLMQGSTLPRRS
RMWSLVQASTVPRRS

SEQ ID NO: 126043 - protein, 15 aa, Artificial Sequence
  Description of Artificial Sequence: Synthetic peptide
  Seed: RMCSLMQGSTLPRRS
RMWSLVQGSTAPRRS

SEQ ID NO: 126044 - protein, 15 aa, Artificial Sequence
  Description of Artificial Sequence: Synthetic peptide
  Seed: RMCSLMQGSTLPRRS
RMWSLVQGSTIPRRS

SEQ ID NO: 126045 - protein, 15 aa, Artificial Sequence
  Description of Artificial Sequence: Synthetic peptide
  Seed: RMCSLMQGSTLPRRS
RMWSLVQGSTLPRRS

SEQ ID NO: 126046 - protein, 15 aa, Artificial Sequence
  Description of Artificial Sequence: Synthetic peptide
  Seed: RMCSLMQGSTLPRRS
RMWSLVQGSTMPRRS

SEQ ID NO: 126047 - protein, 15 aa, Artificial Sequence
  Description of Artificial Sequence: Synthetic peptide
  Seed: RMCSLMQGSTLPRRS
RMWSLVQGSTSPRRS

SEQ ID NO: 126048 - protein, 15 aa, Artificial Sequence
  Description of Artificial Sequence: Synthetic peptide
  Seed: RMCSLMQGSTLPRRS
RMWSLVQGSTTPRRS

SEQ ID NO: 126049 - protein, 15 aa, Artificial Sequence
  Description of Artificial Sequence: Synthetic peptide
  Seed: RMCSLMQGSTLPRRS
RMWSLVQGSTVPRRS

SEQ ID NO: 126050 - protein, 15 aa, Artificial Sequence
  Description of Artificial Sequence: Synthetic peptide
  Seed: RMCSLMQGSTLPRRS
RMWSLVQISTAPRRS

SEQ ID NO: 126051 - protein, 15 aa, Artificial Sequence
  Description of Artificial Sequence: Synthetic peptide
  Seed: RMCSLMQGSTLPRRS
RMWSLVQISTNPRRS

SEQ ID NO: 126052 - protein, 15 aa, Artificial Sequence
  Description of Artificial Sequence: Synthetic peptide
  Seed: RMCSLMQGSTLPRRS
RMWSLVQNSTAPRRS

SEQ ID NO: 126053 - protein, 15 aa, Artificial Sequence
  Description of Artificial Sequence: Synthetic peptide
  Seed: RMCSLMQGSTLPRRS
RMWSLVQNSTIPRRS

SEQ ID NO: 126054 - protein, 15 aa, Artificial Sequence
  Description of Artificial Sequence: Synthetic peptide
  Seed: RMCSLMQGSTLPRRS
RMWSLVQNSTLPRRS

SEQ ID NO: 126055 - protein, 15 aa, Artificial Sequence
  Description of Artificial Sequence: Synthetic peptide
  Seed: RMCSLMQGSTLPRRS
RMWSLVQNSTVPRRS

SEQ ID NO: 126056 - protein, 15 aa, Artificial Sequence
  Description of Artificial Sequence: Synthetic peptide
  Seed: RMCSLMQGSTLPRRS
RMWSLVQPSTAPRRS

SEQ ID NO: 126057 - protein, 15 aa, Artificial Sequence
  Description of Artificial Sequence: Synthetic peptide
  Seed: RMCSLMQGSTLPRRS
RMWSLVQPSTIPRRS

SEQ ID NO: 126058 - protein, 15 aa, Artificial Sequence
  Description of Artificial Sequence: Synthetic peptide
  Seed: RMCSLMQGSTLPRRS
RMWSLVQPSTLPRRS

SEQ ID NO: 126059 - protein, 15 aa, Artificial Sequence
  Description of Artificial Sequence: Synthetic peptide
  Seed: RMCSLMQGSTLPRRS
RMWSLVQPSTMPRRS

SEQ ID NO: 126060 - protein, 15 aa, Artificial Sequence
  Description of Artificial Sequence: Synthetic peptide
  Seed: RMCSLMQGSTLPRRS
RMWSLVQPSTNPRRS

SEQ ID NO: 126061 - protein, 15 aa, Artificial Sequence
  Description of Artificial Sequence: Synthetic peptide
  Seed: RMCSLMQGSTLPRRS
RMWSLVQPSTSPRRS

SEQ ID NO: 126062 - protein, 15 aa, Artificial Sequence
  Description of Artificial Sequence: Synthetic peptide
  Seed: RMCSLMQGSTLPRRS
RMWSLVQPSTTPRRS

SEQ ID NO: 126063 - protein, 15 aa, Artificial Sequence
  Description of Artificial Sequence: Synthetic peptide
  Seed: RMCSLMQGSTLPRRS
RMWSLVQPSTVPRRS

SEQ ID NO: 126064 - protein, 15 aa, Artificial Sequence
  Description of Artificial Sequence: Synthetic peptide
  Seed: RMCSLMQGSTLPRRS
RMWSLVQSSTAPRRS

SEQ ID NO: 126065 - protein, 15 aa, Artificial Sequence
  Description of Artificial Sequence: Synthetic peptide
  Seed: RMCSLMQGSTLPRRS
RMWSLVQSSTIPRRS

SEQ ID NO: 126066 - protein, 15 aa, Artificial Sequence
  Description of Artificial Sequence: Synthetic peptide
  Seed: RMCSLMQGSTLPRRS
RMWSLVQSSTLPRRS

SEQ ID NO: 126067 - protein, 15 aa, Artificial Sequence
  Description of Artificial Sequence: Synthetic peptide
  Seed: RMCSLMQGSTLPRRS
RMWSLVQSSTMPRRS

SEQ ID NO: 126068 - protein, 15 aa, Artificial Sequence
  Description of Artificial Sequence: Synthetic peptide
  Seed: RMCSLMQGSTLPRRS
RMWSLVQSSTNPRRS

SEQ ID NO: 126069 - protein, 15 aa, Artificial Sequence
  Description of Artificial Sequence: Synthetic peptide
  Seed: RMCSLMQGSTLPRRS
RMWSLVQSSTSPRRS

SEQ ID NO: 126070 - protein, 15 aa, Artificial Sequence
  Description of Artificial Sequence: Synthetic peptide
  Seed: RMCSLMQGSTLPRRS
RMWSLVQSSTTPRRS

SEQ ID NO: 126071 - protein, 15 aa, Artificial Sequence
  Description of Artificial Sequence: Synthetic peptide
  Seed: RMCSLMQGSTLPRRS
RMWSLVQSSTVPRRS

SEQ ID NO: 126072 - protein, 15 aa, Artificial Sequence
  Description of Artificial Sequence: Synthetic peptide
  Seed: RMCSLMQGSTLPRRS
RMWSLVQTSTAPRRS

SEQ ID NO: 126073 - protein, 15 aa, Artificial Sequence
  Description of Artificial Sequence: Synthetic peptide
  Seed: RMCSLMQGSTLPRRS
RMWSLVQTSTIPRRS

SEQ ID NO: 126074 - protein, 15 aa, Artificial Sequence
  Description of Artificial Sequence: Synthetic peptide
  Seed: RMCSLMQGSTLPRRS
RMWSLVQTSTLPRRS

SEQ ID NO: 126075 - protein, 15 aa, Artificial Sequence
  Description of Artificial Sequence: Synthetic peptide
  Seed: RMCSLMQGSTLPRRS
RMWSLVQTSTNPRRS

SEQ ID NO: 126076 - protein, 15 aa, Artificial Sequence
  Description of Artificial Sequence: Synthetic peptide
  Seed: RMCSLMQGSTLPRRS
RMWSLVQTSTSPRRS

SEQ ID NO: 126077 - protein, 15 aa, Artificial Sequence
  Description of Artificial Sequence: Synthetic peptide
  Seed: RMCSLMQGSTLPRRS
RMWSLVQTSTTPRRS

SEQ ID NO: 126078 - protein, 15 aa, Artificial Sequence
  Description of Artificial Sequence: Synthetic peptide
  Seed: RMCSLMQGSTLPRRS
RMWSLVQTSTVPRRS

SEQ ID NO: 126079 - protein, 15 aa, Artificial Sequence
  Description of Artificial Sequence: Synthetic peptide
  Seed: RMCSLMQGSTLPRRS
RMWSLVQVSTAPRRS

SEQ ID NO: 126080 - protein, 15 aa, Artificial Sequence
  Description of Artificial Sequence: Synthetic peptide
  Seed: RMCSLMQGSTLPRRS
RMWSLVQVSTNPRRS

SEQ ID NO: 126081 - protein, 15 aa, Artificial Sequence
  Description of Artificial Sequence: Synthetic peptide
  Seed: RMCSLMQGSTLPRRS
RMWSLVQVSTSPRRS

SEQ ID NO: 126082 - protein, 15 aa, Artificial Sequence
  Description of Artificial Sequence: Synthetic peptide
  Seed: RMCSLMQGSTLPRRS
RMWSLYQASTAPRRS

SEQ ID NO: 126083 - protein, 15 aa, Artificial Sequence
  Description of Artificial Sequence: Synthetic peptide
  Seed: RMCSLMQGSTLPRRS
RMYSLAQASTAPRRS

SEQ ID NO: 126084 - protein, 15 aa, Artificial Sequence
  Description of Artificial Sequence: Synthetic peptide
  Seed: RMCSLMQGSTLPRRS
RMYSLAQASTCPRRS

SEQ ID NO: 126085 - protein, 15 aa, Artificial Sequence
  Description of Artificial Sequence: Synthetic peptide
  Seed: RMCSLMQGSTLPRRS
RMYSLAQASTEPRRS

SEQ ID NO: 126086 - protein, 15 aa, Artificial Sequence
  Description of Artificial Sequence: Synthetic peptide
  Seed: RMCSLMQGSTLPRRS
RMYSLAQASTFPRRS

SEQ ID NO: 126087 - protein, 15 aa, Artificial Sequence
  Description of Artificial Sequence: Synthetic peptide
  Seed: RMCSLMQGSTLPRRS
RMYSLAQASTGPRRS

SEQ ID NO: 126088 - protein, 15 aa, Artificial Sequence
  Description of Artificial Sequence: Synthetic peptide
  Seed: RMCSLMQGSTLPRRS
RMYSLAQASTHPRRS

SEQ ID NO: 126089 - protein, 15 aa, Artificial Sequence
  Description of Artificial Sequence: Synthetic peptide
  Seed: RMCSLMQGSTLPRRS
RMYSLAQASTIPRRS

SEQ ID NO: 126090 - protein, 15 aa, Artificial Sequence
  Description of Artificial Sequence: Synthetic peptide
  Seed: RMCSLMQGSTLPRRS
RMYSLAQASTKPRRS

SEQ ID NO: 126091 - protein, 15 aa, Artificial Sequence
  Description of Artificial Sequence: Synthetic peptide
  Seed: RMCSLMQGSTLPRRS
RMYSLAQASTLPRRS

SEQ ID NO: 126092 - protein, 15 aa, Artificial Sequence
  Description of Artificial Sequence: Synthetic peptide
  Seed: RMCSLMQGSTLPRRS
RMYSLAQASTMPRRS

SEQ ID NO: 126093 - protein, 15 aa, Artificial Sequence
  Description of Artificial Sequence: Synthetic peptide
  Seed: RMCSLMQGSTLPRRS
RMYSLAQASTNPRRS

SEQ ID NO: 126094 - protein, 15 aa, Artificial Sequence
  Description of Artificial Sequence: Synthetic peptide
  Seed: RMCSLMQGSTLPRRS
RMYSLAQASTPPRRS

SEQ ID NO: 126095 - protein, 15 aa, Artificial Sequence
  Description of Artificial Sequence: Synthetic peptide
  Seed: RMCSLMQGSTLPRRS
RMYSLAQASTQPRRS

SEQ ID NO: 126096 - protein, 15 aa, Artificial Sequence
  Description of Artificial Sequence: Synthetic peptide
  Seed: RMCSLMQGSTLPRRS
RMYSLAQASTRPRRS

SEQ ID NO: 126097 - protein, 15 aa, Artificial Sequence
  Description of Artificial Sequence: Synthetic peptide
  Seed: RMCSLMQGSTLPRRS
RMYSLAQASTSPRRS

SEQ ID NO: 126098 - protein, 15 aa, Artificial Sequence
  Description of Artificial Sequence: Synthetic peptide
  Seed: RMCSLMQGSTLPRRS
RMYSLAQASTTPRRS

SEQ ID NO: 126099 - protein, 15 aa, Artificial Sequence
  Description of Artificial Sequence: Synthetic peptide
  Seed: RMCSLMQGSTLPRRS
RMYSLAQASTVPRRS

SEQ ID NO: 126100 - protein, 15 aa, Artificial Sequence
  Description of Artificial Sequence: Synthetic peptide
  Seed: RMCSLMQGSTLPRRS
RMYSLAQASTWPRRS

SEQ ID NO: 126101 - protein, 15 aa, Artificial Sequence
  Description of Artificial Sequence: Synthetic peptide
  Seed: RMCSLMQGSTLPRRS
RMYSLAQASTYPRRS

SEQ ID NO: 126102 - protein, 15 aa, Artificial Sequence
  Description of Artificial Sequence: Synthetic peptide
  Seed: RMCSLMQGSTLPRRS
RMYSLAQGSTAPRRS

SEQ ID NO: 126103 - protein, 15 aa, Artificial Sequence
  Description of Artificial Sequence: Synthetic peptide
  Seed: RMCSLMQGSTLPRRS
RMYSLAQGSTCPRRS

SEQ ID NO: 126104 - protein, 15 aa, Artificial Sequence
  Description of Artificial Sequence: Synthetic peptide
  Seed: RMCSLMQGSTLPRRS
RMYSLAQGSTFPRRS

SEQ ID NO: 126105 - protein, 15 aa, Artificial Sequence
  Description of Artificial Sequence: Synthetic peptide
  Seed: RMCSLMQGSTLPRRS
RMYSLAQGSTGPRRS

SEQ ID NO: 126106 - protein, 15 aa, Artificial Sequence
  Description of Artificial Sequence: Synthetic peptide
  Seed: RMCSLMQGSTLPRRS
RMYSLAQGSTIPRRS

SEQ ID NO: 126107 - protein, 15 aa, Artificial Sequence
  Description of Artificial Sequence: Synthetic peptide
  Seed: RMCSLMQGSTLPRRS
RMYSLAQGSTLPRRS

SEQ ID NO: 126108 - protein, 15 aa, Artificial Sequence
  Description of Artificial Sequence: Synthetic peptide
  Seed: RMCSLMQGSTLPRRS
RMYSLAQGSTMPRRS

SEQ ID NO: 126109 - protein, 15 aa, Artificial Sequence
  Description of Artificial Sequence: Synthetic peptide
  Seed: RMCSLMQGSTLPRRS
RMYSLAQGSTNPRRS

SEQ ID NO: 126110 - protein, 15 aa, Artificial Sequence
  Description of Artificial Sequence: Synthetic peptide
  Seed: RMCSLMQGSTLPRRS
RMYSLAQGSTSPRRS

SEQ ID NO: 126111 - protein, 15 aa, Artificial Sequence
  Description of Artificial Sequence: Synthetic peptide
  Seed: RMCSLMQGSTLPRRS
RMYSLAQGSTTPRRS

SEQ ID NO: 126112 - protein, 15 aa, Artificial Sequence
  Description of Artificial Sequence: Synthetic peptide
  Seed: RMCSLMQGSTLPRRS
RMYSLAQGSTVPRRS

SEQ ID NO: 126113 - protein, 15 aa, Artificial Sequence
  Description of Artificial Sequence: Synthetic peptide
  Seed: RMCSLMQGSTLPRRS
RMYSLAQGSTYPRRS

SEQ ID NO: 126114 - protein, 15 aa, Artificial Sequence
  Description of Artificial Sequence: Synthetic peptide
  Seed: RMCSLMQGSTLPRRS
RMYSLAQHSTIPRRS

SEQ ID NO: 126115 - protein, 15 aa, Artificial Sequence
  Description of Artificial Sequence: Synthetic peptide
  Seed: RMCSLMQGSTLPRRS
RMYSLAQHSTLPRRS

SEQ ID NO: 126116 - protein, 15 aa, Artificial Sequence
  Description of Artificial Sequence: Synthetic peptide
  Seed: RMCSLMQGSTLPRRS
RMYSLAQHSTVPRRS

SEQ ID NO: 126117 - protein, 15 aa, Artificial Sequence
  Description of Artificial Sequence: Synthetic peptide
  Seed: RMCSLMQGSTLPRRS
RMYSLAQISTAPRRS

SEQ ID NO: 126118 - protein, 15 aa, Artificial Sequence
  Description of Artificial Sequence: Synthetic peptide
  Seed: RMCSLMQGSTLPRRS
RMYSLAQISTGPRRS

SEQ ID NO: 126119 - protein, 15 aa, Artificial Sequence
  Description of Artificial Sequence: Synthetic peptide
  Seed: RMCSLMQGSTLPRRS
RMYSLAQISTHPRRS

SEQ ID NO: 126120 - protein, 15 aa, Artificial Sequence
  Description of Artificial Sequence: Synthetic peptide
  Seed: RMCSLMQGSTLPRRS
RMYSLAQISTIPRRS

SEQ ID NO: 126121 - protein, 15 aa, Artificial Sequence
  Description of Artificial Sequence: Synthetic peptide
  Seed: RMCSLMQGSTLPRRS
RMYSLAQISTLPRRS

SEQ ID NO: 126122 - protein, 15 aa, Artificial Sequence
  Description of Artificial Sequence: Synthetic peptide
  Seed: RMCSLMQGSTLPRRS
RMYSLAQISTMPRRS

SEQ ID NO: 126123 - protein, 15 aa, Artificial Sequence
  Description of Artificial Sequence: Synthetic peptide
  Seed: RMCSLMQGSTLPRRS
RMYSLAQISTNPRRS

SEQ ID NO: 126124 - protein, 15 aa, Artificial Sequence
  Description of Artificial Sequence: Synthetic peptide
  Seed: RMCSLMQGSTLPRRS
RMYSLAQISTQPRRS

SEQ ID NO: 126125 - protein, 15 aa, Artificial Sequence
  Description of Artificial Sequence: Synthetic peptide
  Seed: RMCSLMQGSTLPRRS
RMYSLAQISTSPRRS

SEQ ID NO: 126126 - protein, 15 aa, Artificial Sequence
  Description of Artificial Sequence: Synthetic peptide
  Seed: RMCSLMQGSTLPRRS
RMYSLAQISTTPRRS

SEQ ID NO: 126127 - protein, 15 aa, Artificial Sequence
  Description of Artificial Sequence: Synthetic peptide
  Seed: RMCSLMQGSTLPRRS
RMYSLAQISTVPRRS

SEQ ID NO: 126128 - protein, 15 aa, Artificial Sequence
  Description of Artificial Sequence: Synthetic peptide
  Seed: RMCSLMQGSTLPRRS
RMYSLAQLSTAPRRS

SEQ ID NO: 126129 - protein, 15 aa, Artificial Sequence
  Description of Artificial Sequence: Synthetic peptide
  Seed: RMCSLMQGSTLPRRS
RMYSLAQLSTLPRRS

SEQ ID NO: 126130 - protein, 15 aa, Artificial Sequence
  Description of Artificial Sequence: Synthetic peptide
  Seed: RMCSLMQGSTLPRRS
RMYSLAQLSTNPRRS

SEQ ID NO: 126131 - protein, 15 aa, Artificial Sequence
  Description of Artificial Sequence: Synthetic peptide
  Seed: RMCSLMQGSTLPRRS
RMYSLAQLSTSPRRS

SEQ ID NO: 126132 - protein, 15 aa, Artificial Sequence
  Description of Artificial Sequence: Synthetic peptide
  Seed: RMCSLMQGSTLPRRS
RMYSLAQLSTVPRRS

SEQ ID NO: 126133 - protein, 15 aa, Artificial Sequence
  Description of Artificial Sequence: Synthetic peptide
  Seed: RMCSLMQGSTLPRRS
RMYSLAQMSTAPRRS

SEQ ID NO: 126134 - protein, 15 aa, Artificial Sequence
  Description of Artificial Sequence: Synthetic peptide
  Seed: RMCSLMQGSTLPRRS
RMYSLAQMSTIPRRS

SEQ ID NO: 126135 - protein, 15 aa, Artificial Sequence
  Description of Artificial Sequence: Synthetic peptide
  Seed: RMCSLMQGSTLPRRS
RMYSLAQMSTLPRRS

SEQ ID NO: 126136 - protein, 15 aa, Artificial Sequence
  Description of Artificial Sequence: Synthetic peptide
  Seed: RMCSLMQGSTLPRRS
RMYSLAQMSTNPRRS

SEQ ID NO: 126137 - protein, 15 aa, Artificial Sequence
  Description of Artificial Sequence: Synthetic peptide
  Seed: RMCSLMQGSTLPRRS
RMYSLAQMSTSPRRS

SEQ ID NO: 126138 - protein, 15 aa, Artificial Sequence
  Description of Artificial Sequence: Synthetic peptide
  Seed: RMCSLMQGSTLPRRS
RMYSLAQMSTVPRRS

SEQ ID NO: 126139 - protein, 15 aa, Artificial Sequence
  Description of Artificial Sequence: Synthetic peptide
  Seed: RMCSLMQGSTLPRRS
RMYSLAQNSTAPRRS

SEQ ID NO: 126140 - protein, 15 aa, Artificial Sequence
  Description of Artificial Sequence: Synthetic peptide
  Seed: RMCSLMQGSTLPRRS
RMYSLAQNSTIPRRS

SEQ ID NO: 126141 - protein, 15 aa, Artificial Sequence
  Description of Artificial Sequence: Synthetic peptide
  Seed: RMCSLMQGSTLPRRS
RMYSLAQNSTLPRRS

SEQ ID NO: 126142 - protein, 15 aa, Artificial Sequence
  Description of Artificial Sequence: Synthetic peptide
  Seed: RMCSLMQGSTLPRRS
RMYSLAQNSTMPRRS

SEQ ID NO: 126143 - protein, 15 aa, Artificial Sequence
  Description of Artificial Sequence: Synthetic peptide
  Seed: RMCSLMQGSTLPRRS
RMYSLAQNSTNPRRS

SEQ ID NO: 126144 - protein, 15 aa, Artificial Sequence
  Description of Artificial Sequence: Synthetic peptide
  Seed: RMCSLMQGSTLPRRS
RMYSLAQNSTSPRRS

SEQ ID NO: 126145 - protein, 15 aa, Artificial Sequence
  Description of Artificial Sequence: Synthetic peptide
  Seed: RMCSLMQGSTLPRRS
RMYSLAQNSTTPRRS

SEQ ID NO: 126146 - protein, 15 aa, Artificial Sequence
  Description of Artificial Sequence: Synthetic peptide
  Seed: RMCSLMQGSTLPRRS
RMYSLAQNSTVPRRS

SEQ ID NO: 126147 - protein, 15 aa, Artificial Sequence
  Description of Artificial Sequence: Synthetic peptide
  Seed: RMCSLMQGSTLPRRS
RMYSLAQPSTAPRRS

SEQ ID NO: 126148 - protein, 15 aa, Artificial Sequence
  Description of Artificial Sequence: Synthetic peptide
  Seed: RMCSLMQGSTLPRRS
RMYSLAQPSTFPRRS

SEQ ID NO: 126149 - protein, 15 aa, Artificial Sequence
  Description of Artificial Sequence: Synthetic peptide
  Seed: RMCSLMQGSTLPRRS
RMYSLAQPSTGPRRS

SEQ ID NO: 126150 - protein, 15 aa, Artificial Sequence
  Description of Artificial Sequence: Synthetic peptide
  Seed: RMCSLMQGSTLPRRS
RMYSLAQPSTIPRRS

SEQ ID NO: 126151 - protein, 15 aa, Artificial Sequence
  Description of Artificial Sequence: Synthetic peptide
  Seed: RMCSLMQGSTLPRRS
RMYSLAQPSTLPRRS

SEQ ID NO: 126152 - protein, 15 aa, Artificial Sequence
  Description of Artificial Sequence: Synthetic peptide
  Seed: RMCSLMQGSTLPRRS
RMYSLAQPSTMPRRS

SEQ ID NO: 126153 - protein, 15 aa, Artificial Sequence
  Description of Artificial Sequence: Synthetic peptide
  Seed: RMCSLMQGSTLPRRS
RMYSLAQPSTNPRRS

SEQ ID NO: 126154 - protein, 15 aa, Artificial Sequence
  Description of Artificial Sequence: Synthetic peptide
  Seed: RMCSLMQGSTLPRRS
RMYSLAQPSTQPRRS

SEQ ID NO: 126155 - protein, 15 aa, Artificial Sequence
  Description of Artificial Sequence: Synthetic peptide
  Seed: RMCSLMQGSTLPRRS
RMYSLAQPSTSPRRS

SEQ ID NO: 126156 - protein, 15 aa, Artificial Sequence
  Description of Artificial Sequence: Synthetic peptide
  Seed: RMCSLMQGSTLPRRS
RMYSLAQPSTTPRRS

SEQ ID NO: 126157 - protein, 15 aa, Artificial Sequence
  Description of Artificial Sequence: Synthetic peptide
  Seed: RMCSLMQGSTLPRRS
RMYSLAQPSTVPRRS

SEQ ID NO: 126158 - protein, 15 aa, Artificial Sequence
  Description of Artificial Sequence: Synthetic peptide
  Seed: RMCSLMQGSTLPRRS
RMYSLAQQSTLPRRS

SEQ ID NO: 126159 - protein, 15 aa, Artificial Sequence
  Description of Artificial Sequence: Synthetic peptide
  Seed: RMCSLMQGSTLPRRS
RMYSLAQSSTAPRRS

SEQ ID NO: 126160 - protein, 15 aa, Artificial Sequence
  Description of Artificial Sequence: Synthetic peptide
  Seed: RMCSLMQGSTLPRRS
RMYSLAQSSTCPRRS

SEQ ID NO: 126161 - protein, 15 aa, Artificial Sequence
  Description of Artificial Sequence: Synthetic peptide
  Seed: RMCSLMQGSTLPRRS
RMYSLAQSSTFPRRS

SEQ ID NO: 126162 - protein, 15 aa, Artificial Sequence
  Description of Artificial Sequence: Synthetic peptide
  Seed: RMCSLMQGSTLPRRS
RMYSLAQSSTGPRRS

SEQ ID NO: 126163 - protein, 15 aa, Artificial Sequence
  Description of Artificial Sequence: Synthetic peptide
  Seed: RMCSLMQGSTLPRRS
RMYSLAQSSTHPRRS

SEQ ID NO: 126164 - protein, 15 aa, Artificial Sequence
  Description of Artificial Sequence: Synthetic peptide
  Seed: RMCSLMQGSTLPRRS
RMYSLAQSSTIPRRS

SEQ ID NO: 126165 - protein, 15 aa, Artificial Sequence
  Description of Artificial Sequence: Synthetic peptide
  Seed: RMCSLMQGSTLPRRS
RMYSLAQSSTLPRRS

SEQ ID NO: 126166 - protein, 15 aa, Artificial Sequence
  Description of Artificial Sequence: Synthetic peptide
  Seed: RMCSLMQGSTLPRRS
RMYSLAQSSTMPRRS

SEQ ID NO: 126167 - protein, 15 aa, Artificial Sequence
  Description of Artificial Sequence: Synthetic peptide
  Seed: RMCSLMQGSTLPRRS
RMYSLAQSSTNPRRS

SEQ ID NO: 126168 - protein, 15 aa, Artificial Sequence
  Description of Artificial Sequence: Synthetic peptide
  Seed: RMCSLMQGSTLPRRS
RMYSLAQSSTQPRRS

SEQ ID NO: 126169 - protein, 15 aa, Artificial Sequence
  Description of Artificial Sequence: Synthetic peptide
  Seed: RMCSLMQGSTLPRRS
RMYSLAQSSTSPRRS

SEQ ID NO: 126170 - protein, 15 aa, Artificial Sequence
  Description of Artificial Sequence: Synthetic peptide
  Seed: RMCSLMQGSTLPRRS
RMYSLAQSSTTPRRS

SEQ ID NO: 126171 - protein, 15 aa, Artificial Sequence
  Description of Artificial Sequence: Synthetic peptide
  Seed: RMCSLMQGSTLPRRS
RMYSLAQSSTVPRRS

SEQ ID NO: 126172 - protein, 15 aa, Artificial Sequence
  Description of Artificial Sequence: Synthetic peptide
  Seed: RMCSLMQGSTLPRRS
RMYSLAQTSTAPRRS

SEQ ID NO: 126173 - protein, 15 aa, Artificial Sequence
  Description of Artificial Sequence: Synthetic peptide
  Seed: RMCSLMQGSTLPRRS
RMYSLAQTSTIPRRS

SEQ ID NO: 126174 - protein, 15 aa, Artificial Sequence
  Description of Artificial Sequence: Synthetic peptide
  Seed: RMCSLMQGSTLPRRS
RMYSLAQTSTLPRRS

SEQ ID NO: 126175 - protein, 15 aa, Artificial Sequence
  Description of Artificial Sequence: Synthetic peptide
  Seed: RMCSLMQGSTLPRRS
RMYSLAQTSTMPRRS

SEQ ID NO: 126176 - protein, 15 aa, Artificial Sequence
  Description of Artificial Sequence: Synthetic peptide
  Seed: RMCSLMQGSTLPRRS
RMYSLAQTSTNPRRS

SEQ ID NO: 126177 - protein, 15 aa, Artificial Sequence
  Description of Artificial Sequence: Synthetic peptide
  Seed: RMCSLMQGSTLPRRS
RMYSLAQTSTQPRRS

SEQ ID NO: 126178 - protein, 15 aa, Artificial Sequence
  Description of Artificial Sequence: Synthetic peptide
  Seed: RMCSLMQGSTLPRRS
RMYSLAQTSTSPRRS

SEQ ID NO: 126179 - protein, 15 aa, Artificial Sequence
  Description of Artificial Sequence: Synthetic peptide
  Seed: RMCSLMQGSTLPRRS
RMYSLAQTSTTPRRS

SEQ ID NO: 126180 - protein, 15 aa, Artificial Sequence
  Description of Artificial Sequence: Synthetic peptide
  Seed: RMCSLMQGSTLPRRS
RMYSLAQTSTVPRRS

SEQ ID NO: 126181 - protein, 15 aa, Artificial Sequence
  Description of Artificial Sequence: Synthetic peptide
  Seed: RMCSLMQGSTLPRRS
RMYSLAQVSTAPRRS

SEQ ID NO: 126182 - protein, 15 aa, Artificial Sequence
  Description of Artificial Sequence: Synthetic peptide
  Seed: RMCSLMQGSTLPRRS
RMYSLAQVSTGPRRS

SEQ ID NO: 126183 - protein, 15 aa, Artificial Sequence
  Description of Artificial Sequence: Synthetic peptide
  Seed: RMCSLMQGSTLPRRS
RMYSLAQVSTHPRRS

SEQ ID NO: 126184 - protein, 15 aa, Artificial Sequence
  Description of Artificial Sequence: Synthetic peptide
  Seed: RMCSLMQGSTLPRRS
RMYSLAQVSTIPRRS

SEQ ID NO: 126185 - protein, 15 aa, Artificial Sequence
  Description of Artificial Sequence: Synthetic peptide
  Seed: RMCSLMQGSTLPRRS
RMYSLAQVSTLPRRS

SEQ ID NO: 126186 - protein, 15 aa, Artificial Sequence
  Description of Artificial Sequence: Synthetic peptide
  Seed: RMCSLMQGSTLPRRS
RMYSLAQVSTMPRRS

SEQ ID NO: 126187 - protein, 15 aa, Artificial Sequence
  Description of Artificial Sequence: Synthetic peptide
  Seed: RMCSLMQGSTLPRRS
RMYSLAQVSTNPRRS

SEQ ID NO: 126188 - protein, 15 aa, Artificial Sequence
  Description of Artificial Sequence: Synthetic peptide
  Seed: RMCSLMQGSTLPRRS
RMYSLAQVSTQPRRS

SEQ ID NO: 126189 - protein, 15 aa, Artificial Sequence
  Description of Artificial Sequence: Synthetic peptide
  Seed: RMCSLMQGSTLPRRS
RMYSLAQVSTSPRRS

SEQ ID NO: 126190 - protein, 15 aa, Artificial Sequence
  Description of Artificial Sequence: Synthetic peptide
  Seed: RMCSLMQGSTLPRRS
RMYSLAQVSTTPRRS

SEQ ID NO: 126191 - protein, 15 aa, Artificial Sequence
  Description of Artificial Sequence: Synthetic peptide
  Seed: RMCSLMQGSTLPRRS
RMYSLAQVSTVPRRS

SEQ ID NO: 126192 - protein, 15 aa, Artificial Sequence
  Description of Artificial Sequence: Synthetic peptide
  Seed: RMCSLMQGSTLPRRS
RMYSLCQASTAPRRS

SEQ ID NO: 126193 - protein, 15 aa, Artificial Sequence
  Description of Artificial Sequence: Synthetic peptide
  Seed: RMCSLMQGSTLPRRS
RMYSLCQASTIPRRS

SEQ ID NO: 126194 - protein, 15 aa, Artificial Sequence
  Description of Artificial Sequence: Synthetic peptide
  Seed: RMCSLMQGSTLPRRS
RMYSLCQASTLPRRS

SEQ ID NO: 126195 - protein, 15 aa, Artificial Sequence
  Description of Artificial Sequence: Synthetic peptide
  Seed: RMCSLMQGSTLPRRS
RMYSLCQASTMPRRS

SEQ ID NO: 126196 - protein, 15 aa, Artificial Sequence
  Description of Artificial Sequence: Synthetic peptide
  Seed: RMCSLMQGSTLPRRS
RMYSLCQASTVPRRS

SEQ ID NO: 126197 - protein, 15 aa, Artificial Sequence
  Description of Artificial Sequence: Synthetic peptide
  Seed: RMCSLMQGSTLPRRS
RMYSLCQGSTAPRRS

SEQ ID NO: 126198 - protein, 15 aa, Artificial Sequence
  Description of Artificial Sequence: Synthetic peptide
  Seed: RMCSLMQGSTLPRRS
RMYSLCQGSTIPRRS

SEQ ID NO: 126199 - protein, 15 aa, Artificial Sequence
  Description of Artificial Sequence: Synthetic peptide
  Seed: RMCSLMQGSTLPRRS
RMYSLCQGSTLPRRS

SEQ ID NO: 126200 - protein, 15 aa, Artificial Sequence
  Description of Artificial Sequence: Synthetic peptide
  Seed: RMCSLMQGSTLPRRS
RMYSLCQGSTVPRRS

SEQ ID NO: 126201 - protein, 15 aa, Artificial Sequence
  Description of Artificial Sequence: Synthetic peptide
  Seed: RMCSLMQGSTLPRRS
RMYSLCQPSTLPRRS

SEQ ID NO: 126202 - protein, 15 aa, Artificial Sequence
  Description of Artificial Sequence: Synthetic peptide
  Seed: RMCSLMQGSTLPRRS
RMYSLCQSSTIPRRS

SEQ ID NO: 126203 - protein, 15 aa, Artificial Sequence
  Description of Artificial Sequence: Synthetic peptide
  Seed: RMCSLMQGSTLPRRS
RMYSLCQSSTLPRRS

SEQ ID NO: 126204 - protein, 15 aa, Artificial Sequence
  Description of Artificial Sequence: Synthetic peptide
  Seed: RMCSLMQGSTLPRRS
RMYSLCQSSTVPRRS

SEQ ID NO: 126205 - protein, 15 aa, Artificial Sequence
  Description of Artificial Sequence: Synthetic peptide
  Seed: RMCSLMQGSTLPRRS
RMYSLEQASTAPRRS

SEQ ID NO: 126206 - protein, 15 aa, Artificial Sequence
  Description of Artificial Sequence: Synthetic peptide
  Seed: RMCSLMQGSTLPRRS
RMYSLEQASTIPRRS

SEQ ID NO: 126207 - protein, 15 aa, Artificial Sequence
  Description of Artificial Sequence: Synthetic peptide
  Seed: RMCSLMQGSTLPRRS
RMYSLEQASTLPRRS

SEQ ID NO: 126208 - protein, 15 aa, Artificial Sequence
  Description of Artificial Sequence: Synthetic peptide
  Seed: RMCSLMQGSTLPRRS
RMYSLEQASTMPRRS

SEQ ID NO: 126209 - protein, 15 aa, Artificial Sequence
  Description of Artificial Sequence: Synthetic peptide
  Seed: RMCSLMQGSTLPRRS
RMYSLEQASTSPRRS

SEQ ID NO: 126210 - protein, 15 aa, Artificial Sequence
  Description of Artificial Sequence: Synthetic peptide
  Seed: RMCSLMQGSTLPRRS
RMYSLEQASTTPRRS

SEQ ID NO: 126211 - protein, 15 aa, Artificial Sequence
  Description of Artificial Sequence: Synthetic peptide
  Seed: RMCSLMQGSTLPRRS
RMYSLEQASTVPRRS

SEQ ID NO: 126212 - protein, 15 aa, Artificial Sequence
  Description of Artificial Sequence: Synthetic peptide
  Seed: RMCSLMQGSTLPRRS
RMYSLEQGSTAPRRS

SEQ ID NO: 126213 - protein, 15 aa, Artificial Sequence
  Description of Artificial Sequence: Synthetic peptide
  Seed: RMCSLMQGSTLPRRS
RMYSLEQGSTIPRRS

SEQ ID NO: 126214 - protein, 15 aa, Artificial Sequence
  Description of Artificial Sequence: Synthetic peptide
  Seed: RMCSLMQGSTLPRRS
RMYSLEQGSTLPRRS

SEQ ID NO: 126215 - protein, 15 aa, Artificial Sequence
  Description of Artificial Sequence: Synthetic peptide
  Seed: RMCSLMQGSTLPRRS
RMYSLEQGSTMPRRS

SEQ ID NO: 126216 - protein, 15 aa, Artificial Sequence
  Description of Artificial Sequence: Synthetic peptide
  Seed: RMCSLMQGSTLPRRS
RMYSLEQGSTTPRRS

SEQ ID NO: 126217 - protein, 15 aa, Artificial Sequence
  Description of Artificial Sequence: Synthetic peptide
  Seed: RMCSLMQGSTLPRRS
RMYSLEQGSTVPRRS

SEQ ID NO: 126218 - protein, 15 aa, Artificial Sequence
  Description of Artificial Sequence: Synthetic peptide
  Seed: RMCSLMQGSTLPRRS
RMYSLEQNSTIPRRS

SEQ ID NO: 126219 - protein, 15 aa, Artificial Sequence
  Description of Artificial Sequence: Synthetic peptide
  Seed: RMCSLMQGSTLPRRS
RMYSLEQNSTLPRRS

SEQ ID NO: 126220 - protein, 15 aa, Artificial Sequence
  Description of Artificial Sequence: Synthetic peptide
  Seed: RMCSLMQGSTLPRRS
RMYSLEQNSTVPRRS

SEQ ID NO: 126221 - protein, 15 aa, Artificial Sequence
  Description of Artificial Sequence: Synthetic peptide
  Seed: RMCSLMQGSTLPRRS
RMYSLEQPSTAPRRS

SEQ ID NO: 126222 - protein, 15 aa, Artificial Sequence
  Description of Artificial Sequence: Synthetic peptide
  Seed: RMCSLMQGSTLPRRS
RMYSLEQPSTIPRRS

SEQ ID NO: 126223 - protein, 15 aa, Artificial Sequence
  Description of Artificial Sequence: Synthetic peptide
  Seed: RMCSLMQGSTLPRRS
RMYSLEQPSTLPRRS

SEQ ID NO: 126224 - protein, 15 aa, Artificial Sequence
  Description of Artificial Sequence: Synthetic peptide
  Seed: RMCSLMQGSTLPRRS
RMYSLEQPSTVPRRS

SEQ ID NO: 126225 - protein, 15 aa, Artificial Sequence
  Description of Artificial Sequence: Synthetic peptide
  Seed: RMCSLMQGSTLPRRS
RMYSLEQSSTAPRRS

SEQ ID NO: 126226 - protein, 15 aa, Artificial Sequence
  Description of Artificial Sequence: Synthetic peptide
  Seed: RMCSLMQGSTLPRRS
RMYSLEQSSTIPRRS

SEQ ID NO: 126227 - protein, 15 aa, Artificial Sequence
  Description of Artificial Sequence: Synthetic peptide
  Seed: RMCSLMQGSTLPRRS
RMYSLEQSSTLPRRS

SEQ ID NO: 126228 - protein, 15 aa, Artificial Sequence
  Description of Artificial Sequence: Synthetic peptide
  Seed: RMCSLMQGSTLPRRS
RMYSLEQSSTMPRRS

SEQ ID NO: 126229 - protein, 15 aa, Artificial Sequence
  Description of Artificial Sequence: Synthetic peptide
  Seed: RMCSLMQGSTLPRRS
RMYSLEQSSTTPRRS

SEQ ID NO: 126230 - protein, 15 aa, Artificial Sequence
  Description of Artificial Sequence: Synthetic peptide
  Seed: RMCSLMQGSTLPRRS
RMYSLEQSSTVPRRS

SEQ ID NO: 126231 - protein, 15 aa, Artificial Sequence
  Description of Artificial Sequence: Synthetic peptide
  Seed: RMCSLMQGSTLPRRS
RMYSLEQTSTLPRRS

SEQ ID NO: 126232 - protein, 15 aa, Artificial Sequence
  Description of Artificial Sequence: Synthetic peptide
  Seed: RMCSLMQGSTLPRRS
RMYSLEQTSTVPRRS

SEQ ID NO: 126233 - protein, 15 aa, Artificial Sequence
  Description of Artificial Sequence: Synthetic peptide
  Seed: RMCSLMQGSTLPRRS
RMYSLEQVSTAPRRS

SEQ ID NO: 126234 - protein, 15 aa, Artificial Sequence
  Description of Artificial Sequence: Synthetic peptide
  Seed: RMCSLMQGSTLPRRS
RMYSLFQASTAPRRS

SEQ ID NO: 126235 - protein, 15 aa, Artificial Sequence
  Description of Artificial Sequence: Synthetic peptide
  Seed: RMCSLMQGSTLPRRS
RMYSLFQASTFPRRS

SEQ ID NO: 126236 - protein, 15 aa, Artificial Sequence
  Description of Artificial Sequence: Synthetic peptide
  Seed: RMCSLMQGSTLPRRS
RMYSLFQASTGPRRS

SEQ ID NO: 126237 - protein, 15 aa, Artificial Sequence
  Description of Artificial Sequence: Synthetic peptide
  Seed: RMCSLMQGSTLPRRS
RMYSLFQASTHPRRS

SEQ ID NO: 126238 - protein, 15 aa, Artificial Sequence
  Description of Artificial Sequence: Synthetic peptide
  Seed: RMCSLMQGSTLPRRS
RMYSLFQASTIPRRS

SEQ ID NO: 126239 - protein, 15 aa, Artificial Sequence
  Description of Artificial Sequence: Synthetic peptide
  Seed: RMCSLMQGSTLPRRS
RMYSLFQASTLPRRS

SEQ ID NO: 126240 - protein, 15 aa, Artificial Sequence
  Description of Artificial Sequence: Synthetic peptide
  Seed: RMCSLMQGSTLPRRS
RMYSLFQASTMPRRS

SEQ ID NO: 126241 - protein, 15 aa, Artificial Sequence
  Description of Artificial Sequence: Synthetic peptide
  Seed: RMCSLMQGSTLPRRS
RMYSLFQASTNPRRS

SEQ ID NO: 126242 - protein, 15 aa, Artificial Sequence
  Description of Artificial Sequence: Synthetic peptide
  Seed: RMCSLMQGSTLPRRS
RMYSLFQASTPPRRS

SEQ ID NO: 126243 - protein, 15 aa, Artificial Sequence
  Description of Artificial Sequence: Synthetic peptide
  Seed: RMCSLMQGSTLPRRS
RMYSLFQASTSPRRS

SEQ ID NO: 126244 - protein, 15 aa, Artificial Sequence
  Description of Artificial Sequence: Synthetic peptide
  Seed: RMCSLMQGSTLPRRS
RMYSLFQASTTPRRS

SEQ ID NO: 126245 - protein, 15 aa, Artificial Sequence
  Description of Artificial Sequence: Synthetic peptide
  Seed: RMCSLMQGSTLPRRS
RMYSLFQASTVPRRS

SEQ ID NO: 126246 - protein, 15 aa, Artificial Sequence
  Description of Artificial Sequence: Synthetic peptide
  Seed: RMCSLMQGSTLPRRS
RMYSLFQGSTAPRRS

SEQ ID NO: 126247 - protein, 15 aa, Artificial Sequence
  Description of Artificial Sequence: Synthetic peptide
  Seed: RMCSLMQGSTLPRRS
RMYSLFQGSTIPRRS

SEQ ID NO: 126248 - protein, 15 aa, Artificial Sequence
  Description of Artificial Sequence: Synthetic peptide
  Seed: RMCSLMQGSTLPRRS
RMYSLFQGSTLPRRS

SEQ ID NO: 126249 - protein, 15 aa, Artificial Sequence
  Description of Artificial Sequence: Synthetic peptide
  Seed: RMCSLMQGSTLPRRS
RMYSLFQGSTMPRRS

SEQ ID NO: 126250 - protein, 15 aa, Artificial Sequence
  Description of Artificial Sequence: Synthetic peptide
  Seed: RMCSLMQGSTLPRRS
RMYSLFQGSTSPRRS

SEQ ID NO: 126251 - protein, 15 aa, Artificial Sequence
  Description of Artificial Sequence: Synthetic peptide
  Seed: RMCSLMQGSTLPRRS
RMYSLFQGSTTPRRS

SEQ ID NO: 126252 - protein, 15 aa, Artificial Sequence
  Description of Artificial Sequence: Synthetic peptide
  Seed: RMCSLMQGSTLPRRS
RMYSLFQGSTVPRRS

SEQ ID NO: 126253 - protein, 15 aa, Artificial Sequence
  Description of Artificial Sequence: Synthetic peptide
  Seed: RMCSLMQGSTLPRRS
RMYSLFQHSTAPRRS

SEQ ID NO: 126254 - protein, 15 aa, Artificial Sequence
  Description of Artificial Sequence: Synthetic peptide
  Seed: RMCSLMQGSTLPRRS
RMYSLFQISTAPRRS

SEQ ID NO: 126255 - protein, 15 aa, Artificial Sequence
  Description of Artificial Sequence: Synthetic peptide
  Seed: RMCSLMQGSTLPRRS
RMYSLFQISTNPRRS

SEQ ID NO: 126256 - protein, 15 aa, Artificial Sequence
  Description of Artificial Sequence: Synthetic peptide
  Seed: RMCSLMQGSTLPRRS
RMYSLFQISTSPRRS

SEQ ID NO: 126257 - protein, 15 aa, Artificial Sequence
  Description of Artificial Sequence: Synthetic peptide
  Seed: RMCSLMQGSTLPRRS
RMYSLFQISTTPRRS

SEQ ID NO: 126258 - protein, 15 aa, Artificial Sequence
  Description of Artificial Sequence: Synthetic peptide
  Seed: RMCSLMQGSTLPRRS
RMYSLFQISTVPRRS

SEQ ID NO: 126259 - protein, 15 aa, Artificial Sequence
  Description of Artificial Sequence: Synthetic peptide
  Seed: RMCSLMQGSTLPRRS
RMYSLFQLSTAPRRS

SEQ ID NO: 126260 - protein, 15 aa, Artificial Sequence
  Description of Artificial Sequence: Synthetic peptide
  Seed: RMCSLMQGSTLPRRS
RMYSLFQMSTSPRRS

SEQ ID NO: 126261 - protein, 15 aa, Artificial Sequence
  Description of Artificial Sequence: Synthetic peptide
  Seed: RMCSLMQGSTLPRRS
RMYSLFQNSTAPRRS

SEQ ID NO: 126262 - protein, 15 aa, Artificial Sequence
  Description of Artificial Sequence: Synthetic peptide
  Seed: RMCSLMQGSTLPRRS
RMYSLFQNSTIPRRS

SEQ ID NO: 126263 - protein, 15 aa, Artificial Sequence
  Description of Artificial Sequence: Synthetic peptide
  Seed: RMCSLMQGSTLPRRS
RMYSLFQNSTLPRRS

SEQ ID NO: 126264 - protein, 15 aa, Artificial Sequence
  Description of Artificial Sequence: Synthetic peptide
  Seed: RMCSLMQGSTLPRRS
RMYSLFQNSTVPRRS

SEQ ID NO: 126265 - protein, 15 aa, Artificial Sequence
  Description of Artificial Sequence: Synthetic peptide
  Seed: RMCSLMQGSTLPRRS
RMYSLFQPSTAPRRS

SEQ ID NO: 126266 - protein, 15 aa, Artificial Sequence
  Description of Artificial Sequence: Synthetic peptide
  Seed: RMCSLMQGSTLPRRS
RMYSLFQPSTIPRRS

SEQ ID NO: 126267 - protein, 15 aa, Artificial Sequence
  Description of Artificial Sequence: Synthetic peptide
  Seed: RMCSLMQGSTLPRRS
RMYSLFQPSTLPRRS

SEQ ID NO: 126268 - protein, 15 aa, Artificial Sequence
  Description of Artificial Sequence: Synthetic peptide
  Seed: RMCSLMQGSTLPRRS
RMYSLFQPSTMPRRS

SEQ ID NO: 126269 - protein, 15 aa, Artificial Sequence
  Description of Artificial Sequence: Synthetic peptide
  Seed: RMCSLMQGSTLPRRS
RMYSLFQPSTNPRRS

SEQ ID NO: 126270 - protein, 15 aa, Artificial Sequence
  Description of Artificial Sequence: Synthetic peptide
  Seed: RMCSLMQGSTLPRRS
RMYSLFQPSTSPRRS

SEQ ID NO: 126271 - protein, 15 aa, Artificial Sequence
  Description of Artificial Sequence: Synthetic peptide
  Seed: RMCSLMQGSTLPRRS
RMYSLFQPSTTPRRS

SEQ ID NO: 126272 - protein, 15 aa, Artificial Sequence
  Description of Artificial Sequence: Synthetic peptide
  Seed: RMCSLMQGSTLPRRS
RMYSLFQPSTVPRRS

SEQ ID NO: 126273 - protein, 15 aa, Artificial Sequence
  Description of Artificial Sequence: Synthetic peptide
  Seed: RMCSLMQGSTLPRRS
RMYSLFQSSTAPRRS

SEQ ID NO: 126274 - protein, 15 aa, Artificial Sequence
  Description of Artificial Sequence: Synthetic peptide
  Seed: RMCSLMQGSTLPRRS
RMYSLFQSSTIPRRS

SEQ ID NO: 126275 - protein, 15 aa, Artificial Sequence
  Description of Artificial Sequence: Synthetic peptide
  Seed: RMCSLMQGSTLPRRS
RMYSLFQSSTLPRRS

SEQ ID NO: 126276 - protein, 15 aa, Artificial Sequence
  Description of Artificial Sequence: Synthetic peptide
  Seed: RMCSLMQGSTLPRRS
RMYSLFQSSTMPRRS

SEQ ID NO: 126277 - protein, 15 aa, Artificial Sequence
  Description of Artificial Sequence: Synthetic peptide
  Seed: RMCSLMQGSTLPRRS
RMYSLFQSSTNPRRS

SEQ ID NO: 126278 - protein, 15 aa, Artificial Sequence
  Description of Artificial Sequence: Synthetic peptide
  Seed: RMCSLMQGSTLPRRS
RMYSLFQSSTSPRRS

SEQ ID NO: 126279 - protein, 15 aa, Artificial Sequence
  Description of Artificial Sequence: Synthetic peptide
  Seed: RMCSLMQGSTLPRRS
RMYSLFQSSTTPRRS

SEQ ID NO: 126280 - protein, 15 aa, Artificial Sequence
  Description of Artificial Sequence: Synthetic peptide
  Seed: RMCSLMQGSTLPRRS
RMYSLFQSSTVPRRS

SEQ ID NO: 126281 - protein, 15 aa, Artificial Sequence
  Description of Artificial Sequence: Synthetic peptide
  Seed: RMCSLMQGSTLPRRS
RMYSLFQTSTAPRRS

SEQ ID NO: 126282 - protein, 15 aa, Artificial Sequence
  Description of Artificial Sequence: Synthetic peptide
  Seed: RMCSLMQGSTLPRRS
RMYSLFQTSTIPRRS

SEQ ID NO: 126283 - protein, 15 aa, Artificial Sequence
  Description of Artificial Sequence: Synthetic peptide
  Seed: RMCSLMQGSTLPRRS
RMYSLFQTSTLPRRS

SEQ ID NO: 126284 - protein, 15 aa, Artificial Sequence
  Description of Artificial Sequence: Synthetic peptide
  Seed: RMCSLMQGSTLPRRS
RMYSLFQTSTMPRRS

SEQ ID NO: 126285 - protein, 15 aa, Artificial Sequence
  Description of Artificial Sequence: Synthetic peptide
  Seed: RMCSLMQGSTLPRRS
RMYSLFQTSTNPRRS

SEQ ID NO: 126286 - protein, 15 aa, Artificial Sequence
  Description of Artificial Sequence: Synthetic peptide
  Seed: RMCSLMQGSTLPRRS
RMYSLFQTSTSPRRS

SEQ ID NO: 126287 - protein, 15 aa, Artificial Sequence
  Description of Artificial Sequence: Synthetic peptide
  Seed: RMCSLMQGSTLPRRS
RMYSLFQTSTTPRRS

SEQ ID NO: 126288 - protein, 15 aa, Artificial Sequence
  Description of Artificial Sequence: Synthetic peptide
  Seed: RMCSLMQGSTLPRRS
RMYSLFQTSTVPRRS

SEQ ID NO: 126289 - protein, 15 aa, Artificial Sequence
  Description of Artificial Sequence: Synthetic peptide
  Seed: RMCSLMQGSTLPRRS
RMYSLFQVSTAPRRS

SEQ ID NO: 126290 - protein, 15 aa, Artificial Sequence
  Description of Artificial Sequence: Synthetic peptide
  Seed: RMCSLMQGSTLPRRS
RMYSLFQVSTIPRRS

SEQ ID NO: 126291 - protein, 15 aa, Artificial Sequence
  Description of Artificial Sequence: Synthetic peptide
  Seed: RMCSLMQGSTLPRRS
RMYSLFQVSTLPRRS

SEQ ID NO: 126292 - protein, 15 aa, Artificial Sequence
  Description of Artificial Sequence: Synthetic peptide
  Seed: RMCSLMQGSTLPRRS
RMYSLFQVSTMPRRS

SEQ ID NO: 126293 - protein, 15 aa, Artificial Sequence
  Description of Artificial Sequence: Synthetic peptide
  Seed: RMCSLMQGSTLPRRS
RMYSLFQVSTNPRRS

SEQ ID NO: 126294 - protein, 15 aa, Artificial Sequence
  Description of Artificial Sequence: Synthetic peptide
  Seed: RMCSLMQGSTLPRRS
RMYSLFQVSTSPRRS

SEQ ID NO: 126295 - protein, 15 aa, Artificial Sequence
  Description of Artificial Sequence: Synthetic peptide
  Seed: RMCSLMQGSTLPRRS
RMYSLFQVSTTPRRS

SEQ ID NO: 126296 - protein, 15 aa, Artificial Sequence
  Description of Artificial Sequence: Synthetic peptide
  Seed: RMCSLMQGSTLPRRS
RMYSLFQVSTVPRRS

SEQ ID NO: 126297 - protein, 15 aa, Artificial Sequence
  Description of Artificial Sequence: Synthetic peptide
  Seed: RMCSLMQGSTLPRRS
RMYSLGQASTAPRRS

SEQ ID NO: 126298 - protein, 15 aa, Artificial Sequence
  Description of Artificial Sequence: Synthetic peptide
  Seed: RMCSLMQGSTLPRRS
RMYSLGQASTIPRRS

SEQ ID NO: 126299 - protein, 15 aa, Artificial Sequence
  Description of Artificial Sequence: Synthetic peptide
  Seed: RMCSLMQGSTLPRRS
RMYSLGQASTLPRRS

SEQ ID NO: 126300 - protein, 15 aa, Artificial Sequence
  Description of Artificial Sequence: Synthetic peptide
  Seed: RMCSLMQGSTLPRRS
RMYSLGQASTMPRRS

SEQ ID NO: 126301 - protein, 15 aa, Artificial Sequence
  Description of Artificial Sequence: Synthetic peptide
  Seed: RMCSLMQGSTLPRRS
RMYSLGQASTSPRRS

SEQ ID NO: 126302 - protein, 15 aa, Artificial Sequence
  Description of Artificial Sequence: Synthetic peptide
  Seed: RMCSLMQGSTLPRRS
RMYSLGQASTTPRRS

SEQ ID NO: 126303 - protein, 15 aa, Artificial Sequence
  Description of Artificial Sequence: Synthetic peptide
  Seed: RMCSLMQGSTLPRRS
RMYSLGQASTVPRRS

SEQ ID NO: 126304 - protein, 15 aa, Artificial Sequence
  Description of Artificial Sequence: Synthetic peptide
  Seed: RMCSLMQGSTLPRRS
RMYSLGQGSTAPRRS

SEQ ID NO: 126305 - protein, 15 aa, Artificial Sequence
  Description of Artificial Sequence: Synthetic peptide
  Seed: RMCSLMQGSTLPRRS
RMYSLGQGSTIPRRS

SEQ ID NO: 126306 - protein, 15 aa, Artificial Sequence
  Description of Artificial Sequence: Synthetic peptide
  Seed: RMCSLMQGSTLPRRS
RMYSLGQGSTLPRRS

SEQ ID NO: 126307 - protein, 15 aa, Artificial Sequence
  Description of Artificial Sequence: Synthetic peptide
  Seed: RMCSLMQGSTLPRRS
RMYSLGQGSTMPRRS

SEQ ID NO: 126308 - protein, 15 aa, Artificial Sequence
  Description of Artificial Sequence: Synthetic peptide
  Seed: RMCSLMQGSTLPRRS
RMYSLGQGSTVPRRS

SEQ ID NO: 126309 - protein, 15 aa, Artificial Sequence
  Description of Artificial Sequence: Synthetic peptide
  Seed: RMCSLMQGSTLPRRS
RMYSLGQNSTIPRRS

SEQ ID NO: 126310 - protein, 15 aa, Artificial Sequence
  Description of Artificial Sequence: Synthetic peptide
  Seed: RMCSLMQGSTLPRRS
RMYSLGQNSTLPRRS

SEQ ID NO: 126311 - protein, 15 aa, Artificial Sequence
  Description of Artificial Sequence: Synthetic peptide
  Seed: RMCSLMQGSTLPRRS
RMYSLGQNSTVPRRS

SEQ ID NO: 126312 - protein, 15 aa, Artificial Sequence
  Description of Artificial Sequence: Synthetic peptide
  Seed: RMCSLMQGSTLPRRS
RMYSLGQPSTIPRRS

SEQ ID NO: 126313 - protein, 15 aa, Artificial Sequence
  Description of Artificial Sequence: Synthetic peptide
  Seed: RMCSLMQGSTLPRRS
RMYSLGQPSTLPRRS

SEQ ID NO: 126314 - protein, 15 aa, Artificial Sequence
  Description of Artificial Sequence: Synthetic peptide
  Seed: RMCSLMQGSTLPRRS
RMYSLGQPSTVPRRS

SEQ ID NO: 126315 - protein, 15 aa, Artificial Sequence
  Description of Artificial Sequence: Synthetic peptide
  Seed: RMCSLMQGSTLPRRS
RMYSLGQSSTAPRRS

SEQ ID NO: 126316 - protein, 15 aa, Artificial Sequence
  Description of Artificial Sequence: Synthetic peptide
  Seed: RMCSLMQGSTLPRRS
RMYSLGQSSTIPRRS

SEQ ID NO: 126317 - protein, 15 aa, Artificial Sequence
  Description of Artificial Sequence: Synthetic peptide
  Seed: RMCSLMQGSTLPRRS
RMYSLGQSSTLPRRS
